United States Patent Application Publication US 2013/0267429 A1 - sequence listing, part 18

SEQ ID NO: 407042 - DNA, 60 bp, Artificial
  Synthetic oligonucleotide
gcagattgccctggagttggaacaggctgtactgcatgtggtctatatttagaccaatta

SEQ ID NO: 407043 - DNA, 58 bp, Artificial
  Synthetic oligonucleotide
gcagattgcggttaggcgaaccgctgcacgagccactgaaaaatatcccgtgtcgcca

SEQ ID NO: 407044 - DNA, 55 bp, Artificial
  Synthetic oligonucleotide
gcagattgggatagaacccacccaccaccaatagggccgttaccaccagggcaaa

SEQ ID NO: 407045 - DNA, 55 bp, Artificial
  Synthetic oligonucleotide
gcagattgggggttactacaacggttcctttgtcccacagacgacttatggaaca

SEQ ID NO: 407046 - DNA, 55 bp, Artificial
  Synthetic oligonucleotide
gcagattggtggaacatgcactatctgggatcttttaagtttgcccctgtggtcg

SEQ ID NO: 407047 - DNA, 60 bp, Artificial
  Synthetic oligonucleotide
gcagattgtgcgcacatttccccgagtcgttgccgcacacttccgatcatggactggaaa

SEQ ID NO: 407048 - DNA, 57 bp, Artificial
  Synthetic oligonucleotide
gcagatttaaaaattgtatacgacttctcaccgaaatattgtgtacacgaggtcgga

SEQ ID NO: 407049 - DNA, 57 bp, Artificial
  Synthetic oligonucleotide
gcagatttcggcataatatgatatgggaagggttaaccaccggggcaggggcgtcag

SEQ ID NO: 407050 - DNA, 60 bp, Artificial
  Synthetic oligonucleotide
gcagatttcgtacaatagtatgtggtctatttcccactcagatccaagttcgtaatatcg

SEQ ID NO: 407051 - DNA, 55 bp, Artificial
  Synthetic oligonucleotide
gcagatttgaattcgaatccggatgaccgcgccatcttctgggtttatggaccca

SEQ ID NO: 407052 - DNA, 50 bp, Artificial
  Synthetic oligonucleotide
gcagatttgctaatgtgctactgaacgtgaatagctttgcccacatttgc

SEQ ID NO: 407053 - DNA, 55 bp, Artificial
  Synthetic oligonucleotide
gcagatttggctaagtagacaatggggagatccagaagcagctaacatttggctc

SEQ ID NO: 407054 - DNA, 56 bp, Artificial
  Synthetic oligonucleotide
gcagattttaagggtgtccagtatgaaaagtggataactgcgggtttagttatgcc

SEQ ID NO: 407055 - DNA, 55 bp, Artificial
  Synthetic oligonucleotide
gcagattttgcgacaggaacgggatacaatggatgggctacgatagatgttgagt

SEQ ID NO: 407056 - DNA, 55 bp, Artificial
  Synthetic oligonucleotide
gcagcaaactactgttgcgcttatggtgaatggcctaattatttaccagatcatg

SEQ ID NO: 407057 - DNA, 55 bp, Artificial
  Synthetic oligonucleotide
gcagcaaagattggcactgcaaaaggagcaaattcggaataattatgagcttggc

SEQ ID NO: 407058 - DNA, 55 bp, Artificial
  Synthetic oligonucleotide
gcagcaaatggctgctgcgaatagaggttttagcgagggccttaggtctcgcccc

SEQ ID NO: 407059 - DNA, 54 bp, Artificial
  Synthetic oligonucleotide
gcagcaaatgttggtaggtcaaagacaaggctgtttgcattagcagctcctggg

SEQ ID NO: 407060 - DNA, 60 bp, Artificial
  Synthetic oligonucleotide
gcagcaaattatcagtacagttattcgcgtgatggtgaacaggtcactgcgcataccact

SEQ ID NO: 407061 - DNA, 55 bp, Artificial
  Synthetic oligonucleotide
gcagcaacaagttacagtttaggattcgctcataaactggttaacgaagagctcg

SEQ ID NO: 407062 - DNA, 55 bp, Artificial
  Synthetic oligonucleotide
gcagcaacacttggagtgggaggaaagaagtttagagatcatcatacctcaagag

SEQ ID NO: 407063 - DNA, 60 bp, Artificial
  Synthetic oligonucleotide
gcagcaacgttgaaacagggaagagcgaggtgtgcactggcgaccacatattctgtcaga

SEQ ID NO: 407064 - DNA, 60 bp, Artificial
  Synthetic oligonucleotide
gcagcaatactacgaaaggtacggatgctggcctacgtcagacaaggatgacggagaatg

SEQ ID NO: 407065 - DNA, 60 bp, Artificial
  Synthetic oligonucleotide
gcagcaatatctacgagttggctatctcgaggaaagacgttatgtcacgcaactatttgg

SEQ ID NO: 407066 - DNA, 55 bp, Artificial
  Synthetic oligonucleotide
gcagcaatatttacgagtcggttacatcgaggagagacgttatgttacacagcta

SEQ ID NO: 407067 - DNA, 60 bp, Artificial
  Synthetic oligonucleotide
gcagcaatgttcgcaacatggaattctgaatccatcgtcaacgagctgtcagcaaggact

SEQ ID NO: 407068 - DNA, 60 bp, Artificial
  Synthetic oligonucleotide
gcagcaattccataaggtaaggcgcaattggaaaggattgtgtagacattgtgggtcgat

SEQ ID NO: 407069 - DNA, 60 bp, Artificial
  Synthetic oligonucleotide
gcagcaattgcctgataaagtcctatcacaaaaggaggagattattaccgacgcacacga

SEQ ID NO: 407070 - DNA, 58 bp, Artificial
  Synthetic oligonucleotide
gcagcacaaatctacccagggataaaaaccagacacttatgtaagctaattagaggaa

SEQ ID NO: 407071 - DNA, 50 bp, Artificial
  Synthetic oligonucleotide
gcagcacaacctccatcaaaaacgtgtgtgaccctaaggacaatccaaat

SEQ ID NO: 407072 - DNA, 55 bp, Artificial
  Synthetic oligonucleotide
gcagcacaagccacttgcggcggatcaatcgtatttcaccttggagactgcggat

SEQ ID NO: 407073 - DNA, 55 bp, Artificial
  Synthetic oligonucleotide
gcagcacagtcaacgaaaaggatctcgctaatggaaatgctacattgagtgatgg

SEQ ID NO: 407074 - DNA, 55 bp, Artificial
  Synthetic oligonucleotide
gcagcacagtcgacttacatgaccgaacctaacaatggaagacggtgtaagtcga

SEQ ID NO: 407075 - DNA, 51 bp, Artificial
  Synthetic oligonucleotide
gcagcacatcaagggatatcactatcggatctgatccctattacacatcct

SEQ ID NO: 407076 - DNA, 52 bp, Artificial
  Synthetic oligonucleotide
gcagcacatggtgctcagttatttcaaaagtggtcaccctcatggccttctg

SEQ ID NO: 407077 - DNA, 52 bp, Artificial
  Synthetic oligonucleotide
gcagcacccgtaagcggacgttacgcattgctaattctgtgggcacatcacc

SEQ ID NO: 407078 - DNA, 55 bp, Artificial
  Synthetic oligonucleotide
gcagcaccggatcagagacaactaggacgtgatagtaacaaccagttagcattgg

SEQ ID NO: 407079 - DNA, 60 bp, Artificial
  Synthetic oligonucleotide
gcagcacggaaggctacgccttagcccaacaataccatcatctgtacggtcacccctcag

SEQ ID NO: 407080 - DNA, 55 bp, Artificial
  Synthetic oligonucleotide
gcagcacgtcgaccaagggatttcatttacgttgttcttaaaggatacgatgacg

SEQ ID NO: 407081 - DNA, 52 bp, Artificial
  Synthetic oligonucleotide
gcagcacgtcttcgcttcggctaaggttttctccaagggggacagtagctta

SEQ ID NO: 407082 - DNA, 60 bp, Artificial
  Synthetic oligonucleotide
gcagcactaggacgtgataccctacaacgtttctacgccctcgtgcctgtctacatgcac

SEQ ID NO: 407083 - DNA, 59 bp, Artificial
  Synthetic oligonucleotide
gcagcactatattggtataggacaggaatatcaaatattagtgaagtaacaggagacac

SEQ ID NO: 407084 - DNA, 56 bp, Artificial
  Synthetic oligonucleotide
gcagcactcatgcactttgttaatgacagagccttacttagagattcagagttgct

SEQ ID NO: 407085 - DNA, 55 bp, Artificial
  Synthetic oligonucleotide
gcagcagaccgaagccttaacggtcgagttatcagaaaaggtggaccgtgtggag

SEQ ID NO: 407086 - DNA, 58 bp, Artificial
  Synthetic oligonucleotide
gcagcagactacaaaagtacccagtcggcaattgatcagataaccggaaaattaaata

SEQ ID NO: 407087 - DNA, 60 bp, Artificial
  Synthetic oligonucleotide
gcagcagactattgctaaatctcctggccgtctcgatgaggaggaatacaacgttattcg

SEQ ID NO: 407088 - DNA, 55 bp, Artificial
  Synthetic oligonucleotide
gcagcagactattgctaagtctcctggacgtctcgatgaggaaggatgtaatgtc

SEQ ID NO: 407089 - DNA, 55 bp, Artificial
  Synthetic oligonucleotide
gcagcagaggcggtgtcttgataagaaagcaatgatccggaagctaaagtaaagg

SEQ ID NO: 407090 - DNA, 60 bp, Artificial
  Synthetic oligonucleotide
gcagcagaggctatggaggttgccagccaggcaaggcaaatggtgcaggcaatgaggacc

SEQ ID NO: 407091 - DNA, 55 bp, Artificial
  Synthetic oligonucleotide
gcagcagagttctgcataagcatgatagcgttatcgcgactaaatggaacttcag

SEQ ID NO: 407092 - DNA, 60 bp, Artificial
  Synthetic oligonucleotide
gcagcagatagttttgccactaaatataatccaacagagaaagacttagatttattcaat

SEQ ID NO: 407093 - DNA, 55 bp, Artificial
  Synthetic oligonucleotide
gcagcagattgggatagaactcacccaccaccgataggaccgttaccaccagggc

SEQ ID NO: 407094 - DNA, 55 bp, Artificial
  Synthetic oligonucleotide
gcagcagattgggatgtgcaacatccaataccaggtcccttaccagcggggcagc

SEQ ID NO: 407095 - DNA, 55 bp, Artificial
  Synthetic oligonucleotide
gcagcagcaagtacttgctcttttttatagacgtgatatagtaccaatcagtaac

SEQ ID NO: 407096 - DNA, 60 bp, Artificial
  Synthetic oligonucleotide
gcagcagcagttagaggtaagtcaaaccggttatttggacttgatggcaatgttggaaca

SEQ ID NO: 407097 - DNA, 60 bp, Artificial
  Synthetic oligonucleotide
gcagcagccggaaactcggaatggagttaccgtcgatggcgcatctcagcaacaaagtgc

SEQ ID NO: 407098 - DNA, 50 bp, Artificial
  Synthetic oligonucleotide
gcagcaggaggaccatgggtggaaaaacaaattggagttccagcaaatgt

SEQ ID NO: 407099 - DNA, 55 bp, Artificial
  Synthetic oligonucleotide
gcagcaggcggaaggtaccgctccatggccgcaggaggacgctacaaggatgtaa

SEQ ID NO: 407100 - DNA, 55 bp, Artificial
  Synthetic oligonucleotide
gcagcaggcttgctatatctgacggacaacatgtctactattttcgcaaagctcc

SEQ ID NO: 407101 - DNA, 55 bp, Artificial
  Synthetic oligonucleotide
gcagcagggataaggaagaggctcgaagcaaccctgatgagacagaccataggcc

SEQ ID NO: 407102 - DNA, 55 bp, Artificial
  Synthetic oligonucleotide
gcagcagtactattcgaagagttaaccatctactaccttaagagaagcatgcctc

SEQ ID NO: 407103 - DNA, 55 bp, Artificial
  Synthetic oligonucleotide
gcagcagtagatttatgtactatacaagcagtctctctgcttccaggggagcccc

SEQ ID NO: 407104 - DNA, 55 bp, Artificial
  Synthetic oligonucleotide
gcagcagtgctgctgccccaactgtcctagtcacaaacaaccgcagcagacgggg

SEQ ID NO: 407105 - DNA, 60 bp, Artificial
  Synthetic oligonucleotide
gcagcagttaagaggagtgattgggcatcattagtgcaagtgttcctaacaaatagtaat

SEQ ID NO: 407106 - DNA, 55 bp, Artificial
  Synthetic oligonucleotide
gcagcagttacctggtggaatacatatgggcccataggggatactgaagggtttg

SEQ ID NO: 407107 - DNA, 55 bp, Artificial
  Synthetic oligonucleotide
gcagcagttgctttgacggaaaggagtggatgcatgtatgtatgacagggaacga

SEQ ID NO: 407108 - DNA, 60 bp, Artificial
  Synthetic oligonucleotide
gcagcagtttgctttataattggtagtgatgtgacggcatttgttgtttccaaattggcc

SEQ ID NO: 407109 - DNA, 55 bp, Artificial
  Synthetic oligonucleotide
gcagcataagccgttggcggcagatcaatcgtacttcactttggagaccgcagat

SEQ ID NO: 407110 - DNA, 60 bp, Artificial
  Synthetic oligonucleotide
gcagcatacatattgggcgtttttcatcctgaaaccagatgcgctgaactacctaggatt

SEQ ID NO: 407111 - DNA, 59 bp, Artificial
  Synthetic oligonucleotide
gcagcatacatcaatggaataaacaaattccttgtacttaaatcatacaatggtacgcc

SEQ ID NO: 407112 - DNA, 55 bp, Artificial
  Synthetic oligonucleotide
gcagcatacccggactggttatcgctgattactgatccaacctcattgaatattc

SEQ ID NO: 407113 - DNA, 55 bp, Artificial
  Synthetic oligonucleotide
gcagcatcattaatgacagtgcttccggctgttagattgttgagttcgagggcca

SEQ ID NO: 407114 - DNA, 60 bp, Artificial
  Synthetic oligonucleotide
gcagcatcccctcgaacaatcaagtggtgccatgtgagccaatcatagtagaaaggaaca

SEQ ID NO: 407115 - DNA, 60 bp, Artificial
  Synthetic oligonucleotide
gcagcatcgtttgtgagcgcgtactcaacacgttcagactgaacgtaccctcccacggac

SEQ ID NO: 407116 - DNA, 60 bp, Artificial
  Synthetic oligonucleotide
gcagcatgataaaaattctaaccccattcagacagcagcatccagacttaataatttacc

SEQ ID NO: 407117 - DNA, 60 bp, Artificial
  Synthetic oligonucleotide
gcagcatgcaagaggtaatgacaagaattgagctaagtggcgtgctagctaagacatatg

SEQ ID NO: 407118 - DNA, 56 bp, Artificial
  Synthetic oligonucleotide
gcagcatggtacctgtgggaagtgaagaaacaacgggccggagtattgtgggacgt

SEQ ID NO: 407119 - DNA, 55 bp, Artificial
  Synthetic oligonucleotide
gcagcatgttaggaaaagtaaccttgaccatggcttatcgtacgcataataacaa

SEQ ID NO: 407120 - DNA, 55 bp, Artificial
  Synthetic oligonucleotide
gcagcattaggggtctctttaaattacccagtggcaaaggtagaatatacaaaag

SEQ ID NO: 407121 - DNA, 55 bp, Artificial
  Synthetic oligonucleotide
gcagcattttgtcaacctctccattggctatcagtgatgttgcattatcatctga

SEQ ID NO: 407122 - DNA, 55 bp, Artificial
  Synthetic oligonucleotide
gcagccaaaccatgacctcaggaaggaaagtgcatgactcacagggaggagctgc

SEQ ID NO: 407123 - DNA, 55 bp, Artificial
  Synthetic oligonucleotide
gcagccaatctcgcagatgtgcgcagttactgttacctagcttcggtcagtgact

SEQ ID NO: 407124 - DNA, 51 bp, Artificial
  Synthetic oligonucleotide
gcagccaattcaatagcaaacttggcgttaattaaaacagtgctatcacga

SEQ ID NO: 407125 - DNA, 57 bp, Artificial
  Synthetic oligonucleotide
gcagccacacattccttctgtaggatgtgagatgatagcaaaaatatttagaaccga

SEQ ID NO: 407126 - DNA, 51 bp, Artificial
  Synthetic oligonucleotide
gcagccacaggtacaagtgccgctcagagacaagttttcatatggggctgt

SEQ ID NO: 407127 - DNA, 58 bp, Artificial
  Synthetic oligonucleotide
gcagccactcccaaaaagagagcaggcacgtctgaggaaggctgagcgtaaggcacgc

SEQ ID NO: 407128 - DNA, 60 bp, Artificial
  Synthetic oligonucleotide
gcagccactgctagtcgttgttcaaagcctcgagaatcgagaacgcaccttcacgggtgc

SEQ ID NO: 407129 - DNA, 60 bp, Artificial
  Synthetic oligonucleotide
gcagccagaccttcggtcatttcgctttcccctcagaagaaagcgaaatgcagccaagaa

SEQ ID NO: 407130 - DNA, 55 bp, Artificial
  Synthetic oligonucleotide
gcagccagaggccaatacagcgggttcgtaaggaccctgtttcagcagatgcgtg

SEQ ID NO: 407131 - DNA, 55 bp, Artificial
  Synthetic oligonucleotide
gcagccaggaacatagtgagaagagccgcagtatcagcagatccactagcatctt

SEQ ID NO: 407132 - DNA, 55 bp, Artificial
  Synthetic oligonucleotide
gcagccagggcagcgcagctacctaggccagctagcggaaaccagaatagagacc

SEQ ID NO: 407133 - DNA, 55 bp, Artificial
  Synthetic oligonucleotide
gcagccatcgctagtggtgcttaccgaggacacattgagtgcgataaaggttcaa

SEQ ID NO: 407134 - DNA, 60 bp, Artificial
  Synthetic oligonucleotide
gcagccatctacagttgttgacaatacacttatggttgtcattgctatgtattattcgtg

SEQ ID NO: 407135 - DNA, 50 bp, Artificial
  Synthetic oligonucleotide
gcagcccaactccgcagagttcattctgtgcgtcaagcccgggtgtccgg

SEQ ID NO: 407136 - DNA, 58 bp, Artificial
  Synthetic oligonucleotide
gcagcccctcaacttccggagttacgagcggcaatacaacgacgtcctctgagcccgc

SEQ ID NO: 407137 - DNA, 55 bp, Artificial
  Synthetic oligonucleotide
gcagcccgagccccgtatgagacttgtagctatgttgtatactcctcttagatct

SEQ ID NO: 407138 - DNA, 55 bp, Artificial
  Synthetic oligonucleotide
gcagcccttgaaaggagatttccgttccacttgcgcattagagctgtagccagct

SEQ ID NO: 407139 - DNA, 60 bp, Artificial
  Synthetic oligonucleotide
gcagccgagtggatgttggaatgttcgtactacgtttcttgaattagattatctgagcga

SEQ ID NO: 407140 - DNA, 55 bp, Artificial
  Synthetic oligonucleotide
gcagccgcactccaaatctatccttcgtcgtctactacgtttcttggcaatcttg

SEQ ID NO: 407141 - DNA, 60 bp, Artificial
  Synthetic oligonucleotide
gcagccgcacttgaggtcaattcgtttgcgtcgaattgctttcttcttggcgcacctgtg

SEQ ID NO: 407142 - DNA, 60 bp, Artificial
  Synthetic oligonucleotide
gcagccgcagtctaggtctatgcgcttacgtctgactgctctcgttttcgctatgcggtg

SEQ ID NO: 407143 - DNA, 55 bp, Artificial
  Synthetic oligonucleotide
gcagccgccgtacgagctgccatgcatcgagccgtcgaaagaaacagacctggac

SEQ ID NO: 407144 - DNA, 55 bp, Artificial
  Synthetic oligonucleotide
gcagccgccttcttagcaagcaattgtcaggcacgatatataaaggatgcaatga

SEQ ID NO: 407145 - DNA, 56 bp, Artificial
  Synthetic oligonucleotide
gcagccggaggccgctacctaacacatgcagcaggaggacgctacactgacgtaat

SEQ ID NO: 407146 - DNA, 54 bp, Artificial
  Synthetic oligonucleotide
gcagccgggtctgacccacccagaacctacggtcaattttcgaatctcttttcg

SEQ ID NO: 407147 - DNA, 55 bp, Artificial
  Synthetic oligonucleotide
gcagccgtaacgctattgcacatgggtccggtactgccccctgtattgaatgcga

SEQ ID NO: 407148 - DNA, 51 bp, Artificial
  Synthetic oligonucleotide
gcagccgtatatgaaaactattcctggtaagatttctgatctggtcactga

SEQ ID NO: 407149 - DNA, 59 bp, Artificial
  Synthetic oligonucleotide
gcagccgtttttaatcatacgtcgttgtatggtggcgcattcagtgcgtttacgagtac

SEQ ID NO: 407150 - DNA, 55 bp, Artificial
  Synthetic oligonucleotide
gcagcctacttcgatcacatgagagccctgggcttctgcccaaccggcccagaca

SEQ ID NO: 407151 - DNA, 55 bp, Artificial
  Synthetic oligonucleotide
gcagcctagcagaagaagaggtggtaattagatctagcaatatcacagacaatgc

SEQ ID NO: 407152 - DNA, 59 bp, Artificial
  Synthetic oligonucleotide
gcagcctataaagttaccagaaaaggaaagttggacagtcaatgatatccagagattgg

SEQ ID NO: 407153 - DNA, 60 bp, Artificial
  Synthetic oligonucleotide
gcagcctcacagaatgctatggaggccctaatggtcacaactgtagacaaattaacccag

SEQ ID NO: 407154 - DNA, 60 bp, Artificial
  Synthetic oligonucleotide
gcagcctcaggagatcctacaccaccagattccatcaagtctccgcaggcaccttgggta

SEQ ID NO: 407155 - DNA, 55 bp, Artificial
  Synthetic oligonucleotide
gcagcctcccctagcacttcttccgtcgatctggaaatctccccattcgattgtg

SEQ ID NO: 407156 - DNA, 59 bp, Artificial
  Synthetic oligonucleotide
gcagcctcggcaaaactcttcaaaccatggccgttttcgggcacggaattgctgatcaa

SEQ ID NO: 407157 - DNA, 60 bp, Artificial
  Synthetic oligonucleotide
gcagcctcttggcagtcctcggtgttgaaccttctgctcagacaaccactcatacggagg

SEQ ID NO: 407158 - DNA, 59 bp, Artificial
  Synthetic oligonucleotide
gcagcctggtcaattgtaaccctaccctggttcagaggcctcttggagagagctagaga

SEQ ID NO: 407159 - DNA, 60 bp, Artificial
  Synthetic oligonucleotide
gcagcctgtaaacagcacagtagtaagcagatatgcacatcacgtagtaaaatatatcat

SEQ ID NO: 407160 - DNA, 55 bp, Artificial
  Synthetic oligonucleotide
gcagcctgttagtaggccaatgtccaacaagaatttagaatcccctacaatcctc

SEQ ID NO: 407161 - DNA, 55 bp, Artificial
  Synthetic oligonucleotide
gcagcctgttggtgggccaatgtccaacaggaatttgggatcccttacaatcccc

SEQ ID NO: 407162 - DNA, 55 bp, Artificial
  Synthetic oligonucleotide
gcagccttactaccacgcattgtactctttctatgaacatacaggtatgtacttc

SEQ ID NO: 407163 - DNA, 55 bp, Artificial
  Synthetic oligonucleotide
gcagccttactgggtatttgtctcatgctatttattctaataaaacgttcccggc

SEQ ID NO: 407164 - DNA, 55 bp, Artificial
  Synthetic oligonucleotide
gcagccttctcaataacgaggatcaccatacagcccatatcagcttggtggcgag

SEQ ID NO: 407165 - DNA, 59 bp, Artificial
  Synthetic oligonucleotide
gcagcctttgacttctttttgggagtcacagatgagagtgcgcttgaaccaaagggtgg

SEQ ID NO: 407166 - DNA, 55 bp, Artificial
  Synthetic oligonucleotide
gcagcgaagatctgattctgtgaagggcgacacatacggttcaggttgtggaggg

SEQ ID NO: 407167 - DNA, 55 bp, Artificial
  Synthetic oligonucleotide
gcagcgaatgatgcatttaagacgattatagcatgtatgctctctcagcgaacca

SEQ ID NO: 407168 - DNA, 55 bp, Artificial
  Synthetic oligonucleotide
gcagcgaatggggccgtatgatctaatgcacaacatgactaaacaagcggtcctc

SEQ ID NO: 407169 - DNA, 55 bp, Artificial
  Synthetic oligonucleotide
gcagcgactgcctcccttgaatccaacgtggagttttggacccgatattgccgct

SEQ ID NO: 407170 - DNA, 55 bp, Artificial
  Synthetic oligonucleotide
gcagcgagacaatcattgccatattgtcaaatcaaaatagggaggaacttcgctt

SEQ ID NO: 407171 - DNA, 60 bp, Artificial
  Synthetic oligonucleotide
gcagcgagagtaagtgaggaatgtattggcatttctatgcttgaacggtcttgttgctac

SEQ ID NO: 407172 - DNA, 55 bp, Artificial
  Synthetic oligonucleotide
gcagcgagatgcgaagatggcgccggaggaaacggccacacctaaaaccgttggc

SEQ ID NO: 407173 - DNA, 55 bp, Artificial
  Synthetic oligonucleotide
gcagcgaggtcaagcacctgcagccttacatggactactactgcctctggtccca

SEQ ID NO: 407174 - DNA, 55 bp, Artificial
  Synthetic oligonucleotide
gcagcgaggtgccgggcactacctgagagagcaacatgctctgccgctgtggaaa

SEQ ID NO: 407175 - DNA, 60 bp, Artificial
  Synthetic oligonucleotide
gcagcgataccgcatggtgtgcaatctatttggatgactgctagggaatatgaagcagtt

SEQ ID NO: 407176 - DNA, 52 bp, Artificial
  Synthetic oligonucleotide
gcagcgcaccatataatgttcatacagcgcacacgggctcaggttgattggc

SEQ ID NO: 407177 - DNA, 60 bp, Artificial
  Synthetic oligonucleotide
gcagcgcattgttgattcagtcggtgatgtcgacagtgttgatgcggtaaggaaggtttt

SEQ ID NO: 407178 - DNA, 53 bp, Artificial
  Synthetic oligonucleotide
gcagcgccccttaatggtaggtctgctttagggctgccaggtggcgcaaacta

SEQ ID NO: 407179 - DNA, 60 bp, Artificial
  Synthetic oligonucleotide
gcagcgcgcgataacatatattaaacattgagctcatagtacctgtgtagaacatatact

SEQ ID NO: 407180 - DNA, 60 bp, Artificial
  Synthetic oligonucleotide
gcagcgctaacatgatggcttgtaattctgtcttactaatgggattaatgcctggaccct

SEQ ID NO: 407181 - DNA, 57 bp, Artificial
  Synthetic oligonucleotide
gcagcgctccaaccgctcaagggctcttgggacgttgtcctcgccgaccccctccaa

SEQ ID NO: 407182 - DNA, 55 bp, Artificial
  Synthetic oligonucleotide
gcagcgctcctggtatgactccttctaactcaactccaatttgaattatccggtc

SEQ ID NO: 407183 - DNA, 60 bp, Artificial
  Synthetic oligonucleotide
gcagcgctttctgctatgggtgcaccctggtcatttcctagcactcaaaaacctattcaa

SEQ ID NO: 407184 - DNA, 55 bp, Artificial
  Synthetic oligonucleotide
gcagcggcgacatgctgtctggcgctggaacattgactccgctacaaggcgtagc

SEQ ID NO: 407185 - DNA, 55 bp, Artificial
  Synthetic oligonucleotide
gcagcggctacaaagaggtgatactttggtttagcttcggggcgtcatgtttcct

SEQ ID NO: 407186 - DNA, 55 bp, Artificial
  Synthetic oligonucleotide
gcagcgggagtgcttggaggtggatgttggatgctataccagtacttcaaacaag

SEQ ID NO: 407187 - DNA, 55 bp, Artificial
  Synthetic oligonucleotide
gcagcgggatggattatcagcaattggcagggagatacaaaggtcgagtgcggtc

SEQ ID NO: 407188 - DNA, 55 bp, Artificial
  Synthetic oligonucleotide
gcagcgggccgggtgcaccgcaagaccaagcgcaagacggtatggcccagacagt

SEQ ID NO: 407189 - DNA, 57 bp, Artificial
  Synthetic oligonucleotide
gcagcgggctagtcagtgggtgttccgccccccgagaggggacgagtgaggcttatc

SEQ ID NO: 407190 - DNA, 60 bp, Artificial
  Synthetic oligonucleotide
gcagcgggtaattcagggaccatggattgagaaagatggaattgggattctaatgaaaga

SEQ ID NO: 407191 - DNA, 54 bp, Artificial
  Synthetic oligonucleotide
gcagcgggtttacatcgactcgttgggcgcattggagtaccccgccgcatgttc

SEQ ID NO: 407192 - DNA, 50 bp, Artificial
  Synthetic oligonucleotide
gcagcggtgcgtatagcatcgggacccttatagtcagcgcgggctctgtt

SEQ ID NO: 407193 - DNA, 57 bp, Artificial
  Synthetic oligonucleotide
gcagcgtaccgagaaacttgctcccgccgtggtaccgctgcctacccacttcttggc

SEQ ID NO: 407194 - DNA, 55 bp, Artificial
  Synthetic oligonucleotide
gcagcgtcccgagacttagagaaatatggggcacttacaagcagcaacacccctg

SEQ ID NO: 407195 - DNA, 55 bp, Artificial
  Synthetic oligonucleotide
gcagcgtccctacttgatagagctatcgaaaggaaggatggcgatctcaagacct

SEQ ID NO: 407196 - DNA, 55 bp, Artificial
  Synthetic oligonucleotide
gcagcgtcgaatagtcacgtgcatggaaatgatatgctcgctggcacgactcgat

SEQ ID NO: 407197 - DNA, 57 bp, Artificial
  Synthetic oligonucleotide
gcagcgtcgtcctatccatcgcgtaagcccgtgaaaggtggtgcttccctcggggac

SEQ ID NO: 407198 - DNA, 55 bp, Artificial
  Synthetic oligonucleotide
gcagcgtctcaggacctagataaacatggggcacttacaactagcaacacaccct

SEQ ID NO: 407199 - DNA, 60 bp, Artificial
  Synthetic oligonucleotide
gcagcgtgacacattttgagaaagtaaagattctgcccagaaatgaatggacacagcata

SEQ ID NO: 407200 - DNA, 60 bp, Artificial
  Synthetic oligonucleotide
gcagcgtgcaactggactcgaggagagcgttgtaacatagaggacagggataggtcagag

SEQ ID NO: 407201 - DNA, 60 bp, Artificial
  Synthetic oligonucleotide
gcagcgtggccctgatgtggcatgggatgtcactcccgcggagtctcctctgcatcccat

SEQ ID NO: 407202 - DNA, 60 bp, Artificial
  Synthetic oligonucleotide
gcagcgtgtaagtttattgaattacgcactaatcatatattctttgctcaggataaggtg

SEQ ID NO: 407203 - DNA, 60 bp, Artificial
  Synthetic oligonucleotide
gcagcgtgtattcacagtagcttccattagaagcatgttgattaagtgaggactaggcta

SEQ ID NO: 407204 - DNA, 55 bp, Artificial
  Synthetic oligonucleotide
gcagcgttcaaaactcagctcccctaccctgtagagttcgaacaaggaatgttcg

SEQ ID NO: 407205 - DNA, 50 bp, Artificial
  Synthetic oligonucleotide
gcagcgttcgagcaagagccgccgtgctgcgaacatgcctgccaaggctg

SEQ ID NO: 407206 - DNA, 55 bp, Artificial
  Synthetic oligonucleotide
gcagcgttctggaaatgtatcgccagttgggcgtacaatggtctcgttaccactg

SEQ ID NO: 407207 - DNA, 55 bp, Artificial
  Synthetic oligonucleotide
gcagcgttgtaccttgcaactgtcctctaaattgcttcgtgcagaatgcagatgt

SEQ ID NO: 407208 - DNA, 57 bp, Artificial
  Synthetic oligonucleotide
gcagcgttttattatagagtgtagatattatgtagattagagttgtatgatgtgacc

SEQ ID NO: 407209 - DNA, 57 bp, Artificial
  Synthetic oligonucleotide
gcagcgttttcagttgacccacaactatactgcgattacaatatagttctgatgaag

SEQ ID NO: 407210 - DNA, 55 bp, Artificial
  Synthetic oligonucleotide
gcagctaacaatcatctgttacactcctcccagttatgtcctcaggaagatccag

SEQ ID NO: 407211 - DNA, 60 bp, Artificial
  Synthetic oligonucleotide
gcagctaacatgttgatgtggatacctaagagaattggtgctatagctgcatggacagtg

SEQ ID NO: 407212 - DNA, 55 bp, Artificial
  Synthetic oligonucleotide
gcagctaacgaagaagcgatacaagagatgcttgatataagtgcggatgtgatcg

SEQ ID NO: 407213 - DNA, 55 bp, Artificial
  Synthetic oligonucleotide
gcagctaacgtggtactggcactcccgtctcgacccaggcctgcacaaaacctcc

SEQ ID NO: 407214 - DNA, 60 bp, Artificial
  Synthetic oligonucleotide
gcagctaagctactgcgcttcgctaggatctgcccaaacgtagacactggtgaacctaca

SEQ ID NO: 407215 - DNA, 55 bp, Artificial
  Synthetic oligonucleotide
gcagctaatattaatgcttaaaactacttttatcggtgcgtggaagatgaagcgg

SEQ ID NO: 407216 - DNA, 60 bp, Artificial
  Synthetic oligonucleotide
gcagctaatgtcactgctttccggtatgcgtcaatggcagccggtgtttaccccacgagc

SEQ ID NO: 407217 - DNA, 56 bp, Artificial
  Synthetic oligonucleotide
gcagctaattctatagctaacttagcactcattaaaactgtattgtcaaggattgc

SEQ ID NO: 407218 - DNA, 56 bp, Artificial
  Synthetic oligonucleotide
gcagctaatttgaattcagtgaaatgtacaggtggaagttacgactttagtatacc

SEQ ID NO: 407219 - DNA, 55 bp, Artificial
  Synthetic oligonucleotide
gcagctacactagaagaaatgatgacagcatgtcaagaagtaagaagacccggcc

SEQ ID NO: 407220 - DNA, 60 bp, Artificial
  Synthetic oligonucleotide
gcagctacactagaagaaatgatgacagcatgtcagggagtgggaggacctggccataaa

SEQ ID NO: 407221 - DNA, 60 bp, Artificial
  Synthetic oligonucleotide
gcagctacacttgccccccagttcgcaccaataatcggtgctgccgatgggttagccaat

SEQ ID NO: 407222 - DNA, 60 bp, Artificial
  Synthetic oligonucleotide
gcagctacgcctcgacagcgaccgcagacagttcgatgacaacggacctgagctctggat

SEQ ID NO: 407223 - DNA, 60 bp, Artificial
  Synthetic oligonucleotide
gcagctagacccaaagttagaggacaggcaggcagaatgaaccattattggacactatta

SEQ ID NO: 407224 - DNA, 60 bp, Artificial
  Synthetic oligonucleotide
gcagctagagcacacaagccagtgtgtatctagtcgtaatgagtaattgcgggacgggac

SEQ ID NO: 407225 - DNA, 55 bp, Artificial
  Synthetic oligonucleotide
gcagctagaggtcaatacagcggattcgtgaggacactgttccaacagatgcggg

SEQ ID NO: 407226 - DNA, 60 bp, Artificial
  Synthetic oligonucleotide
gcagctagcaaccttagacatcagtacagaacccatgaagcttgaggacgctgtctatgg

SEQ ID NO: 407227 - DNA, 55 bp, Artificial
  Synthetic oligonucleotide
gcagctagctgggaaccttaaggcaatagcacactgccctagtcaacttgtgacg

SEQ ID NO: 407228 - DNA, 55 bp, Artificial
  Synthetic oligonucleotide
gcagctaggaaatatcctttacatgtcgaaactagcgtttgcgactcgtatcgga

SEQ ID NO: 407229 - DNA, 59 bp, Artificial
  Synthetic oligonucleotide
gcagctaggcggagggcctatgccggaacactgggaggaagcctggttggaagctacca

SEQ ID NO: 407230 - DNA, 55 bp, Artificial
  Synthetic oligonucleotide
gcagctagtgccaactacccagtcataaggaacgcacaagggcagttccaacatc

SEQ ID NO: 407231 - DNA, 60 bp, Artificial
  Synthetic oligonucleotide
gcagctatgttaagccagcgtacaatgtcattagattttgtaaccacaaattatatgtca

SEQ ID NO: 407232 - DNA, 60 bp, Artificial
  Synthetic oligonucleotide
gcagctattcaaatcctcatcgctttagctaacggtatacttcaagcaattccaaaagta

SEQ ID NO: 407233 - DNA, 55 bp, Artificial
  Synthetic oligonucleotide
gcagctcaaagaaagaaacaacgtcgccaaagaccacgcgcacagaagtctcgcg

SEQ ID NO: 407234 - DNA, 55 bp, Artificial
  Synthetic oligonucleotide
gcagctcaaaggaaagtgggatgggaagaaattcatgaatgatgctgtcgtggct

SEQ ID NO: 407235 - DNA, 55 bp, Artificial
  Synthetic oligonucleotide
gcagctcatacggccgattatttagatatactacattaccaactgtacatgatcg

SEQ ID NO: 407236 - DNA, 60 bp, Artificial
  Synthetic oligonucleotide
gcagctcatggaatagcgagtcaaataaatttctacatgatagattcaagtagacgcgac

SEQ ID NO: 407237 - DNA, 54 bp, Artificial
  Synthetic oligonucleotide
gcagctccaccagcaacctacacgcagtcggcgttcctcaaagccccggaagcc

SEQ ID NO: 407238 - DNA, 55 bp, Artificial
  Synthetic oligonucleotide
gcagctccagacgacatgagaacaaggacttatactcattatcaactcggcttca

SEQ ID NO: 407239 - DNA, 50 bp, Artificial
  Synthetic oligonucleotide
gcagctccagacttcttactgtgggacacccatactatcctgtgcaggtt

SEQ ID NO: 407240 - DNA, 58 bp, Artificial
  Synthetic oligonucleotide
gcagctccgacaaccggaggttggtcgtggagtcacgtcggcgaggtagctatattga

SEQ ID NO: 407241 - DNA, 55 bp, Artificial
  Synthetic oligonucleotide
gcagctcgaatgtgacagtgagttcccgttcaacgggtcgctggttgttggtacc

SEQ ID NO: 407242 - DNA, 55 bp, Artificial
  Synthetic oligonucleotide
gcagctcgactagagccctgtaatggtactgaaccagaacacgtaatccgtgcct

SEQ ID NO: 407243 - DNA, 55 bp, Artificial
  Synthetic oligonucleotide
gcagctcgcaaaaaaggtctgacctcacttggacactgtccagttcctaccctgg

SEQ ID NO: 407244 - DNA, 60 bp, Artificial
  Synthetic oligonucleotide
gcagctcgtgtgtacttacgcagcaggttctcttcatagtggtatatcaaccgcccactc

SEQ ID NO: 407245 - DNA, 60 bp, Artificial
  Synthetic oligonucleotide
gcagctctaatcaatgcgatggtcagagcgattttgaaatcggatgaggttgacattaat

SEQ ID NO: 407246 - DNA, 55 bp, Artificial
  Synthetic oligonucleotide
gcagctctagttttaccaatcctttatttactgagccgtccataattgagcctcc

SEQ ID NO: 407247 - DNA, 55 bp, Artificial
  Synthetic oligonucleotide
gcagctctgtgtaccgatcgcccgtgtagggctttagctatcagttcttggtagc

SEQ ID NO: 407248 - DNA, 60 bp, Artificial
  Synthetic oligonucleotide
gcagctgaaagatttgccgaaagtgagattggaagcgcggcgattgacggattaatacag

SEQ ID NO: 407249 - DNA, 60 bp, Artificial
  Synthetic oligonucleotide
gcagctgaacacgaaccgcattgtgcctcattatagaacagagggccacttcatggaatt

SEQ ID NO: 407250 - DNA, 60 bp, Artificial
  Synthetic oligonucleotide
gcagctgaatgcatgaaaaggtacattggcacaccttatgaaggaatagtagacacctta

SEQ ID NO: 407251 - DNA, 60 bp, Artificial
  Synthetic oligonucleotide
gcagctgactacaaaagcacccaatctgcaatagatcaaatcactggcaaattgaatcgt

SEQ ID NO: 407252 - DNA, 55 bp, Artificial
  Synthetic oligonucleotide
gcagctgagaacaacagcctcaatttagaggtaaacccagagatccagctgtacc

SEQ ID NO: 407253 - DNA, 60 bp, Artificial
  Synthetic oligonucleotide
gcagctgagcggagggcccatgttcctgtactgggaagaagcctggctgacatcaataga

SEQ ID NO: 407254 - DNA, 60 bp, Artificial
  Synthetic oligonucleotide
gcagctgagcggagggcctacatgaaggagaaagactactgggaagaagcctggctgacc

SEQ ID NO: 407255 - DNA, 55 bp, Artificial
  Synthetic oligonucleotide
gcagctgaggacaatcgtttgtttatcctactgccttgcataggatttccttggc

SEQ ID NO: 407256 - DNA, 60 bp, Artificial
  Synthetic oligonucleotide
gcagctgagtcaaccacgtgtgatgttatcccaataaatagagctaaagtgatcagatca

SEQ ID NO: 407257 - DNA, 55 bp, Artificial
  Synthetic oligonucleotide
gcagctgagtcggtcagttatgcttcaatgaaccttgagagagcgttgacccagg

SEQ ID NO: 407258 - DNA, 53 bp, Artificial
  Synthetic oligonucleotide
gcagctgatgattttgcgtggcttttggcctccaccaaggaattgatgacatg

SEQ ID NO: 407259 - DNA, 55 bp, Artificial
  Synthetic oligonucleotide
gcagctgcaaacagttttgcggagaattatagtgctactagccaagatatggatc

SEQ ID NO: 407260 - DNA, 55 bp, Artificial
  Synthetic oligonucleotide
gcagctgcaactaaaatgttcctggctgtttgcctctgtaccgctttcggtcacg

SEQ ID NO: 407261 - DNA, 55 bp, Artificial
  Synthetic oligonucleotide
gcagctgcagcatcatttcaatacccacatataggttgttgtatgcctaacagag

SEQ ID NO: 407262 - DNA, 59 bp, Artificial
  Synthetic oligonucleotide
gcagctgcctgtatgggtgcgtcgcgttctctatttcggagtccgcgtctgagtgagtg

SEQ ID NO: 407263 - DNA, 60 bp, Artificial
  Synthetic oligonucleotide
gcagctgctctgtatcgggaagccttagagtctcctgaacattgctcgcctcaccataca

SEQ ID NO: 407264 - DNA, 60 bp, Artificial
  Synthetic oligonucleotide
gcagctgctttgcgcctgtactgggtctctctaggtagaccagatctgagtccgggaact

SEQ ID NO: 407265 - DNA, 55 bp, Artificial
  Synthetic oligonucleotide
gcagctggactactcttaagaaagttgacctccaaggaattaatgatgaccacca

SEQ ID NO: 407266 - DNA, 60 bp, Artificial
  Synthetic oligonucleotide
gcagctggcacataaacaggactgctttgaactgcaatgattccctccagacggggttct

SEQ ID NO: 407267 - DNA, 55 bp, Artificial
  Synthetic oligonucleotide
gcagctgggaagttgaagacaattccacaaatagcaccattcgccctagctaccg

SEQ ID NO: 407268 - DNA, 52 bp, Artificial
  Synthetic oligonucleotide
gcagctgtactaatagggggttcctctgtgttgcctggcgtgagaaactctg

SEQ ID NO: 407269 - DNA, 55 bp, Artificial
  Synthetic oligonucleotide
gcagctgtagaaattaattgtacaagacacggcaacaatacaagaagaagcatac

SEQ ID NO: 407270 - DNA, 55 bp, Artificial
  Synthetic oligonucleotide
gcagctgttagaataggcgtgagggtgactgcaatggttcaaggagacaatcaag

SEQ ID NO: 407271 - DNA, 55 bp, Artificial
  Synthetic oligonucleotide
gcagctgtttaataatgttatgtggttggaacagatgtctcaaaagtttgcacca

SEQ ID NO: 407272 - DNA, 57 bp, Artificial
  Synthetic oligonucleotide
gcagcttacggtagttccgtgtaaggctactgtggaagtagacggacacgggattgc

SEQ ID NO: 407273 - DNA, 55 bp, Artificial
  Synthetic oligonucleotide
gcagcttagggaaatcaacaatcaagaaggggaataccaaagtcctcgtctcatc

SEQ ID NO: 407274 - DNA, 55 bp, Artificial
  Synthetic oligonucleotide
gcagcttcaccgagtctgcggacggttaccaacagtcacggtcagtcctgtgcag

SEQ ID NO: 407275 - DNA, 55 bp, Artificial
  Synthetic oligonucleotide
gcagcttccaaccggttccgatacaatactgtgcacccgcggggtacagcttgct

SEQ ID NO: 407276 - DNA, 60 bp, Artificial
  Synthetic oligonucleotide
gcagcttctttagaacctgcgtttaatgcctctgcggcagcgtcgttagcagtctgctga

SEQ ID NO: 407277 - DNA, 55 bp, Artificial
  Synthetic oligonucleotide
gcagcttgaactgagggcaattgaagaagcgctaaagcatggaccaaccactatg

SEQ ID NO: 407278 - DNA, 60 bp, Artificial
  Synthetic oligonucleotide
gcagcttgattttagtagattatcatgggctgacgttgtagacgatgatgacttaggtac

SEQ ID NO: 407279 - DNA, 55 bp, Artificial
  Synthetic oligonucleotide
gcagcttgggattactccaagtgggaccaccacgttatgcttgctgaaaggctca

SEQ ID NO: 407280 - DNA, 55 bp, Artificial
  Synthetic oligonucleotide
gcagcttggtacctaaaaggcaagtgggcccctggactcgcctattccgtctatg

SEQ ID NO: 407281 - DNA, 51 bp, Artificial
  Synthetic oligonucleotide
gcagcttgtgtacgtgttatgagctctgcccgtctggctgacgcgcgtgta

SEQ ID NO: 407282 - DNA, 60 bp, Artificial
  Synthetic oligonucleotide
gcagctttcgatatcaatgagcgggtggattccgtacgtcgaaaggatgtgcgcggagag

SEQ ID NO: 407283 - DNA, 60 bp, Artificial
  Synthetic oligonucleotide
gcagctttcggtctacgtgcagtctgaatagtgctagagacattaacgtagtgtttgaca

SEQ ID NO: 407284 - DNA, 55 bp, Artificial
  Synthetic oligonucleotide
gcagctttgcattgtcaatctaactccagaatcaatagcttacctgcacaatatg

SEQ ID NO: 407285 - DNA, 55 bp, Artificial
  Synthetic oligonucleotide
gcagcttttgccattcgtaaccgtaaccgcgcgccgcactgctgctcttgccagc

SEQ ID NO: 407286 - DNA, 55 bp, Artificial
  Synthetic oligonucleotide
gcaggaaaatatcaccgcacacgaacaacatctcgtcactgccaggcagaaactt

SEQ ID NO: 407287 - DNA, 55 bp, Artificial
  Synthetic oligonucleotide
gcaggaaagaaatgaacaagatttattatcattggacagttggaacagtctgtgg

SEQ ID NO: 407288 - DNA, 57 bp, Artificial
  Synthetic oligonucleotide
gcaggaaatactcagggattggatagtgaaccaccctaaaattcaatttgggatcta

SEQ ID NO: 407289 - DNA, 60 bp, Artificial
  Synthetic oligonucleotide
gcaggaaatagaatcggtgaagctagagaaccttggtgtgtatcaaattcttgccattta

SEQ ID NO: 407290 - DNA, 55 bp, Artificial
  Synthetic oligonucleotide
gcaggaacactttattcgcatggtcggtgtggccctcgtttacgggcgcgctata

SEQ ID NO: 407291 - DNA, 55 bp, Artificial
  Synthetic oligonucleotide
gcaggaacatcatgagacaaagtcagaagtcaggtcggactaagccatagtacgg

SEQ ID NO: 407292 - DNA, 56 bp, Artificial
  Synthetic oligonucleotide
gcaggaaccactagtacccctcaagaacaaatagggtggatgacaggcaaccctcc

SEQ ID NO: 407293 - DNA, 57 bp, Artificial
  Synthetic oligonucleotide
gcaggaacccgatctctcggattacctagcaagggtgaagcctcccactcaaccgaa

SEQ ID NO: 407294 - DNA, 60 bp, Artificial
  Synthetic oligonucleotide
gcaggaacgacagctcttattgtccctcgagacataagatggaatgatgacagatctatc

SEQ ID NO: 407295 - DNA, 60 bp, Artificial
  Synthetic oligonucleotide
gcaggaactactagtaccctgcaggaacaaataggatggatgacaaataatccacctatc

SEQ ID NO: 407296 - DNA, 59 bp, Artificial
  Synthetic oligonucleotide
gcaggaactataggtgaacctattccagatgtagaaggtgtatataccagaaaggtgga

SEQ ID NO: 407297 - DNA, 57 bp, Artificial
  Synthetic oligonucleotide
gcaggaactgcattatccaccgttaccacaatatcagcatccacagacccatcatca

SEQ ID NO: 407298 - DNA, 53 bp, Artificial
  Synthetic oligonucleotide
gcaggaactgggcttgaaagtgaaggaatgatattatctttaaactttaccga

SEQ ID NO: 407299 - DNA, 60 bp, Artificial
  Synthetic oligonucleotide
gcaggaagaagcggagacagcgacgaagcactcctctgcgcagtgaggaccatcagactc

SEQ ID NO: 407300 - DNA, 55 bp, Artificial
  Synthetic oligonucleotide
gcaggaagaatgatcccaaaagggactgtcacatggtcgggcaaatatccaacga

SEQ ID NO: 407301 - DNA, 54 bp, Artificial
  Synthetic oligonucleotide
gcaggaagaatgattcctcccgaattttcggggcccataacaacggcaggaaaa

SEQ ID NO: 407302 - DNA, 59 bp, Artificial
  Synthetic oligonucleotide
gcaggaagaggagtctcccacgaccaagcgtcgtcatctccaaggttaccttcaattga

SEQ ID NO: 407303 - DNA, 55 bp, Artificial
  Synthetic oligonucleotide
gcaggaagaggcaccctataattggctaggatatcaacttagtccaggcagttgg

SEQ ID NO: 407304 - DNA, 57 bp, Artificial
  Synthetic oligonucleotide
gcaggaagatcaaaagaattaactcccatccttggattcaggtacagttctatttgg

SEQ ID NO: 407305 - DNA, 55 bp, Artificial
  Synthetic oligonucleotide
gcaggaagcactatgggcgcagcatcagtggtgctgacggtacaggcccggcaat

SEQ ID NO: 407306 - DNA, 55 bp, Artificial
  Synthetic oligonucleotide
gcaggaaggattaggctcagaggtagtcggttggcgaacctcagatatggagaag

SEQ ID NO: 407307 - DNA, 56 bp, Artificial
  Synthetic oligonucleotide
gcaggaagttcaagaggtagatcctacacttgtttacaaaaacggagatacgttga

SEQ ID NO: 407308 - DNA, 54 bp, Artificial
  Synthetic oligonucleotide
gcaggaataggtgggaacgcgggacccgtctttcccgcgcgatagcgacgggtg

SEQ ID NO: 407309 - DNA, 55 bp, Artificial
  Synthetic oligonucleotide
gcaggaatcatgaggatctggttacagtcactgctacattggcactacttgggtg

SEQ ID NO: 407310 - DNA, 55 bp, Artificial
  Synthetic oligonucleotide
gcaggaatgacgcagccacaaaaagaggagttggcgaaattccttcagccaatgc

SEQ ID NO: 407311 - DNA, 55 bp, Artificial
  Synthetic oligonucleotide
gcaggaattgctgaaggtttcaggaaaagatatatgaaggattacactcagcaca

SEQ ID NO: 407312 - DNA, 55 bp, Artificial
  Synthetic oligonucleotide
gcaggaattggaccatttgcgttccatagtgaacaatggcactagttcttcgatc

SEQ ID NO: 407313 - DNA, 55 bp, Artificial
  Synthetic oligonucleotide
gcaggacaaatcagtgtacagcctaccttctcagtacagagaaacctccccttcg

SEQ ID NO: 407314 - DNA, 60 bp, Artificial
  Synthetic oligonucleotide
gcaggacaacccgaaacaacctacagatgaatatgctatccctaagaggagctgccagat

SEQ ID NO: 407315 - DNA, 57 bp, Artificial
  Synthetic oligonucleotide
gcaggacaacgtatagctcaacttcttttagttccattagtcatacaaggaaaaaca

SEQ ID NO: 407316 - DNA, 55 bp, Artificial
  Synthetic oligonucleotide
gcaggacaaggatttcttctgggtcactatcaaccaaatcgctcaatctcttgtc

SEQ ID NO: 407317 - DNA, 55 bp, Artificial
  Synthetic oligonucleotide
gcaggacagagcgcttgacaacccatgagaggaactgttgtaggcgtagcgaggg

SEQ ID NO: 407318 - DNA, 55 bp, Artificial
  Synthetic oligonucleotide
gcaggacaggattctgctcaaacaagggtttatgaatcggttgctgaagaaagca

SEQ ID NO: 407319 - DNA, 55 bp, Artificial
  Synthetic oligonucleotide
gcaggacaggccgcagtgatgactctgtgccgaaaatacgtgagccaagtcgtcc

SEQ ID NO: 407320 - DNA, 55 bp, Artificial
  Synthetic oligonucleotide
gcaggacaggctgtagctccagtaacactagcaggcaattcctctctctgcccca

SEQ ID NO: 407321 - DNA, 55 bp, Artificial
  Synthetic oligonucleotide
gcaggacatcttaatggaagcctgtagtttgacgatacaagattacccgccaggc

SEQ ID NO: 407322 - DNA, 54 bp, Artificial
  Synthetic oligonucleotide
gcaggacccaccaaaactgtgccgactcctaacgtcgaagtgtccgccaacccc

SEQ ID NO: 407323 - DNA, 55 bp, Artificial
  Synthetic oligonucleotide
gcaggacccactacaccacatagtctaaggctgtatgtgtatataagtaatccac

SEQ ID NO: 407324 - DNA, 55 bp, Artificial
  Synthetic oligonucleotide
gcaggaccgttttcggtcgcccgccttttcggtttcaatagtggcacattgccac

SEQ ID NO: 407325 - DNA, 56 bp, Artificial
  Synthetic oligonucleotide
gcaggacctaaaacgaaagtatttaggcagtccatatgttagtcccctaggacatg

SEQ ID NO: 407326 - DNA, 53 bp, Artificial
  Synthetic oligonucleotide
gcaggacctaaaacgaaagtatttaggtagtccatatgttagtcctttaagta

SEQ ID NO: 407327 - DNA, 55 bp, Artificial
  Synthetic oligonucleotide
gcaggacgaaaacgctctcgtcgcgtatgtttcgagaggaatctcaaatcttcag

SEQ ID NO: 407328 - DNA, 55 bp, Artificial
  Synthetic oligonucleotide
gcaggacgattacgtggcgtcacttactgtcgacgctactgagctggcgaagcgg

SEQ ID NO: 407329 - DNA, 55 bp, Artificial
  Synthetic oligonucleotide
gcaggactgagactggtgtgggaaaccctaacatacttgaagagcattctccagt

SEQ ID NO: 407330 - DNA, 55 bp, Artificial
  Synthetic oligonucleotide
gcaggactgtcaaggagaatggacagtggttacaggggaaaccgatgaaaccggg

SEQ ID NO: 407331 - DNA, 56 bp, Artificial
  Synthetic oligonucleotide
gcaggacttaagccgtgaggctttaaatctgaagtcggaggactttaatcttaaga

SEQ ID NO: 407332 - DNA, 60 bp, Artificial
  Synthetic oligonucleotide
gcaggagaaaagtgcacattgacttgtgcaccatgtccagtcaggtccattacagagccg

SEQ ID NO: 407333 - DNA, 53 bp, Artificial
  Synthetic oligonucleotide
gcaggagagatggttgggtaaaagagtgtcacaatttgacattggacaatata

SEQ ID NO: 407334 - DNA, 55 bp, Artificial
  Synthetic oligonucleotide
gcaggagatattgaagagaacccagggccttctttatccaaattgtaccaaatac

SEQ ID NO: 407335 - DNA, 56 bp, Artificial
  Synthetic oligonucleotide
gcaggagatgcgcaaactggccaccacctctaaccccttagaggtggtgcagaacc

SEQ ID NO: 407336 - DNA, 55 bp, Artificial
  Synthetic oligonucleotide
gcaggagattgccaagagtacgagcctagtacattggtttcgagtacgttcggga

SEQ ID NO: 407337 - DNA, 55 bp, Artificial
  Synthetic oligonucleotide
gcaggagcatcagttgataaacttgctaacttggcaaaagatacagagttagtga

SEQ ID NO: 407338 - DNA, 60 bp, Artificial
  Synthetic oligonucleotide
gcaggagcatctatgcaacttgctcgatgagcttaatgttcacgctagcgattttgcgag

SEQ ID NO: 407339 - DNA, 60 bp, Artificial
  Synthetic oligonucleotide
gcaggagcgtacttatttcatgcagcgttatcgtgatgttatctccagctttggcggttc

SEQ ID NO: 407340 - DNA, 60 bp, Artificial
  Synthetic oligonucleotide
gcaggagcgtctgtctgcagatttgaattcgaatccggatgaccgcgccatcttctgggt

SEQ ID NO: 407341 - DNA, 58 bp, Artificial
  Synthetic oligonucleotide
gcaggagctagtaacagcccttctatgaccgtaagaggtagtgtttttgtcgaagcta

SEQ ID NO: 407342 - DNA, 55 bp, Artificial
  Synthetic oligonucleotide
gcaggaggaacaactgggcacaaatgagatatattcgcgcaatgggcaggatcct

SEQ ID NO: 407343 - DNA, 60 bp, Artificial
  Synthetic oligonucleotide
gcaggagggaactcagcacctatatatgtgcctacacttgatgattttaggtctatggag

SEQ ID NO: 407344 - DNA, 58 bp, Artificial
  Synthetic oligonucleotide
gcaggaggggcccaagaatacctctgtgccctccagtgaggaaacacctggacttcga

SEQ ID NO: 407345 - DNA, 59 bp, Artificial
  Synthetic oligonucleotide
gcaggaggttcttgatcccctcttcgagtgcgttgaaatcgaatggagctatggtacct

SEQ ID NO: 407346 - DNA, 60 bp, Artificial
  Synthetic oligonucleotide
gcaggaggttgggcagtctcaggctcttctcagctctacccctagacagctgcgaaataa

SEQ ID NO: 407347 - DNA, 55 bp, Artificial
  Synthetic oligonucleotide
gcaggagtctcgtccacaccccaacagcagatagagtggataaccagggctaaca

SEQ ID NO: 407348 - DNA, 55 bp, Artificial
  Synthetic oligonucleotide
gcaggagtgatgatggcctgtagggaggcggaccatcgtagtgcggaccgacagt

SEQ ID NO: 407349 - DNA, 55 bp, Artificial
  Synthetic oligonucleotide
gcaggagtggactattaagccgctctctggtcagattatcttcgggtccggtact

SEQ ID NO: 407350 - DNA, 59 bp, Artificial
  Synthetic oligonucleotide
gcaggagtttaaaatgaatccaaatcagaaaataataaccattggctccatatcattgg

SEQ ID NO: 407351 - DNA, 60 bp, Artificial
  Synthetic oligonucleotide
gcaggataaaccagattataaacatgtggcaggaggtaggacgagcaatgtatgctcctc

SEQ ID NO: 407352 - DNA, 55 bp, Artificial
  Synthetic oligonucleotide
gcaggataagaatagatactacgaccgattcaaacgggacaaagagagtacggct

SEQ ID NO: 407353 - DNA, 55 bp, Artificial
  Synthetic oligonucleotide
gcaggatagtggaactaaatagggtcataaccgtgagacacacgctgcacgtgac

SEQ ID NO: 407354 - DNA, 57 bp, Artificial
  Synthetic oligonucleotide
gcaggatccataatagtacaccttaatgaatctgtgcagattaattgcacaagaccc

SEQ ID NO: 407355 - DNA, 54 bp, Artificial
  Synthetic oligonucleotide
gcaggatctactagtacccttcaggaacagatacaatggataacaggcaaccca

SEQ ID NO: 407356 - DNA, 55 bp, Artificial
  Synthetic oligonucleotide
gcaggatctattgagtagatcacatatacagctacggaagttacaacacatagca

SEQ ID NO: 407357 - DNA, 58 bp, Artificial
  Synthetic oligonucleotide
gcaggatgaggatggtcccgacgcctaacggaccttgctgccttctttccctggattg

SEQ ID NO: 407358 - DNA, 60 bp, Artificial
  Synthetic oligonucleotide
gcaggatggatccttggcaacccagagtgtgatctattgctcacagcgaattcatggtct

SEQ ID NO: 407359 - DNA, 55 bp, Artificial
  Synthetic oligonucleotide
gcaggatgtggaacaactccagtaaagtttatctgccaccaacgcagcctattgc

SEQ ID NO: 407360 - DNA, 55 bp, Artificial
  Synthetic oligonucleotide
gcaggatgttgtggacagtctttaagtcagggagcctcgccttggaagcactctc

SEQ ID NO: 407361 - DNA, 60 bp, Artificial
  Synthetic oligonucleotide
gcaggattcggggcaggaagtaaacatagtgacagattcacagtatgcattaggaatcat

SEQ ID NO: 407362 - DNA, 56 bp, Artificial
  Synthetic oligonucleotide
gcaggattgggctcgggttggactgacaataatccttttgtgtccccgatgacccg

SEQ ID NO: 407363 - DNA, 57 bp, Artificial
  Synthetic oligonucleotide
gcaggattgtcttgtccgggaagccggcagttatacctgacagggaagttctctacc

SEQ ID NO: 407364 - DNA, 56 bp, Artificial
  Synthetic oligonucleotide
gcaggattgtgagcttttacttcaaggagacatgcacaacagctaacggtgagcct

SEQ ID NO: 407365 - DNA, 60 bp, Artificial
  Synthetic oligonucleotide
gcaggatttctcgcaagatcctagcaagttcactgaaccgatgaaagacctaatggttaa

SEQ ID NO: 407366 - DNA, 55 bp, Artificial
  Synthetic oligonucleotide
gcaggcaaaatagcaccataacaggaataatgggaacgaacactaattggacaac

SEQ ID NO: 407367 - DNA, 60 bp, Artificial
  Synthetic oligonucleotide
gcaggcaaaccatttgaatggatgtcaatccgactctacttttcttgaaagtgccagcgc

SEQ ID NO: 407368 - DNA, 55 bp, Artificial
  Synthetic oligonucleotide
gcaggcaacgtcactctagtgtgatcaaaacataacatgtctagatacctgttca

SEQ ID NO: 407369 - DNA, 55 bp, Artificial
  Synthetic oligonucleotide
gcaggcagagctgttggatttaggaagaggtatttgagggattacacacagcgca

SEQ ID NO: 407370 - DNA, 55 bp, Artificial
  Synthetic oligonucleotide
gcaggcagagcttcagaatcttcgtgagcagaaccgtttgattagaaaccaagca

SEQ ID NO: 407371 - DNA, 55 bp, Artificial
  Synthetic oligonucleotide
gcaggcagctcttctcggagcagggacgagcagaccaattgggatggaggctcca

SEQ ID NO: 407372 - DNA, 55 bp, Artificial
  Synthetic oligonucleotide
gcaggcagtagtgatattgatggattgcctcaagacggtatcatttcggtaaatg

SEQ ID NO: 407373 - DNA, 55 bp, Artificial
  Synthetic oligonucleotide
gcaggcatatttggtgctaaaccacttcagtctttacaagtgtgcgtgcagacgg

SEQ ID NO: 407374 - DNA, 60 bp, Artificial
  Synthetic oligonucleotide
gcaggcatgcaaaatgaaagttcggctcagaggggagcacttgacagaaggaaattgtgt

SEQ ID NO: 407375 - DNA, 55 bp, Artificial
  Synthetic oligonucleotide
gcaggccaatgcggtggtgtggttattagcatgggtaagatagtgggtgtccacg

SEQ ID NO: 407376 - DNA, 54 bp, Artificial
  Synthetic oligonucleotide
gcaggccatagcagcgcaacaacatctgttgcagctctctgtgtggggcattaa

SEQ ID NO: 407377 - DNA, 55 bp, Artificial
  Synthetic oligonucleotide
gcaggccatgaagctcatactaaagagacacatactaggagatgtatgttcccta

SEQ ID NO: 407378 - DNA, 55 bp, Artificial
  Synthetic oligonucleotide
gcaggccatttattggcggatacaaatgtggttatagatgttccacttgttccac

SEQ ID NO: 407379 - DNA, 55 bp, Artificial
  Synthetic oligonucleotide
gcaggccccttgctgatttcgctcagggttggggtcctatcagctatgccaacgg

SEQ ID NO: 407380 - DNA, 55 bp, Artificial
  Synthetic oligonucleotide
gcaggccgcatgatcccaaaagggactgtcacatggtcgggcaagtttccaacaa

SEQ ID NO: 407381 - DNA, 55 bp, Artificial
  Synthetic oligonucleotide
gcaggccgccatgtactacatcctcaccagaggatggtccgacaacggtgacccc

SEQ ID NO: 407382 - DNA, 55 bp, Artificial
  Synthetic oligonucleotide
gcaggcctaaaagcctggaagcgactccctcaaaagggagcggctactacttccc

SEQ ID NO: 407383 - DNA, 60 bp, Artificial
  Synthetic oligonucleotide
gcaggcctaccagaagcgaatgggagtgcagatgcagcgattcaagtgatcctttcgtca

SEQ ID NO: 407384 - DNA, 53 bp, Artificial
  Synthetic oligonucleotide
gcaggcctagctatgcaatgttcgcgatcattcaccatgcacttctcatcctt

SEQ ID NO: 407385 - DNA, 55 bp, Artificial
  Synthetic oligonucleotide
gcaggcctcaaattacgtaccaatcacagtaactgtagcgcccatgtatgccgag

SEQ ID NO: 407386 - DNA, 51 bp, Artificial
  Synthetic oligonucleotide
gcaggcctccctactgcgcatcccctactttgtgagagcgcatgccctcat

SEQ ID NO: 407387 - DNA, 58 bp, Artificial
  Synthetic oligonucleotide
gcaggccttctcacaaccccagttctcaccggggtcggcaatgacaacagatggaacg

SEQ ID NO: 407388 - DNA, 60 bp, Artificial
  Synthetic oligonucleotide
gcaggcgaccacatgccatcacacaccgtggtttgtcttacagcgatttgttggactacg

SEQ ID NO: 407389 - DNA, 60 bp, Artificial
  Synthetic oligonucleotide
gcaggcgagtatgctattatgttggacgcagccaacgaaacctggcgctatcctatcata

SEQ ID NO: 407390 - DNA, 55 bp, Artificial
  Synthetic oligonucleotide
gcaggcgattttccagggaccaattgatattgtgaacaaaccaccaccaccagct

SEQ ID NO: 407391 - DNA, 55 bp, Artificial
  Synthetic oligonucleotide
gcaggcgcattgacagaagatccagacgagggaacagctggggtggaatctgcgg

SEQ ID NO: 407392 - DNA, 60 bp, Artificial
  Synthetic oligonucleotide
gcaggcgctactatacacaggtacctgtcgaagacccagacgagattgctgctgcaggct

SEQ ID NO: 407393 - DNA, 55 bp, Artificial
  Synthetic oligonucleotide
gcaggcggctatgtactacatcctcactagagggtggtcagacaatggtgacccc

SEQ ID NO: 407394 - DNA, 60 bp, Artificial
  Synthetic oligonucleotide
gcaggcgtgtaaaggtaaaatccaagcactctgcgagaatcccgagtgggcaccattgaa

SEQ ID NO: 407395 - DNA, 55 bp, Artificial
  Synthetic oligonucleotide
gcaggctaggaacgcttatcttggcgctgctgatatgatagagcaaggcctacca

SEQ ID NO: 407396 - DNA, 60 bp, Artificial
  Synthetic oligonucleotide
gcaggctatggccagcatcctagaggattcaacccttggcaatgacagtccgatggcata

SEQ ID NO: 407397 - DNA, 57 bp, Artificial
  Synthetic oligonucleotide
gcaggctgtgtaaccctctgaacccgtttgtcagccataaggaaattgagtccgtaa

SEQ ID NO: 407398 - DNA, 59 bp, Artificial
  Synthetic oligonucleotide
gcaggctgttcgtgagtcgtacgatccttccacccttggttacgatcttctaagcgatc

SEQ ID NO: 407399 - DNA, 60 bp, Artificial
  Synthetic oligonucleotide
gcaggcttatcccatttggcttcagttaagagagatactgacagaacaatcagacctggt

SEQ ID NO: 407400 - DNA, 55 bp, Artificial
  Synthetic oligonucleotide
gcaggcttctcggtaccaggtgactgtggaggtatcctgaggtgtgagcatggtg

SEQ ID NO: 407401 - DNA, 55 bp, Artificial
  Synthetic oligonucleotide
gcaggcttctgtcaggtggaattgcaagctgtcgacactattgagcccgcagatt

SEQ ID NO: 407402 - DNA, 55 bp, Artificial
  Synthetic oligonucleotide
gcaggctttgagactgctagtggacttgtctggaccacaactccggctacttagc

SEQ ID NO: 407403 - DNA, 55 bp, Artificial
  Synthetic oligonucleotide
gcagggaataacaccaaatgtatttaagtatgggcaattgccaacatgggtagct

SEQ ID NO: 407404 - DNA, 55 bp, Artificial
  Synthetic oligonucleotide
gcagggacaaatagagtggatggaaaccaacaaagagtcaggttacccaataatc

SEQ ID NO: 407405 - DNA, 60 bp, Artificial
  Synthetic oligonucleotide
gcagggacaattggcgggggagcaatcgaccgtggataagattcaacagtgatcttgatt

SEQ ID NO: 407406 - DNA, 55 bp, Artificial
  Synthetic oligonucleotide
gcagggacaggttgtaactagacagaaattaagggaattgaacttagctccagtg

SEQ ID NO: 407407 - DNA, 54 bp, Artificial
  Synthetic oligonucleotide
gcagggacccccactctataatcattccatacacccaggaccaattaacctggc

SEQ ID NO: 407408 - DNA, 60 bp, Artificial
  Synthetic oligonucleotide
gcagggacggcacactcacagccatttcctgactttggaatgactgttggattcgtcacc

SEQ ID NO: 407409 - DNA, 60 bp, Artificial
  Synthetic oligonucleotide
gcagggagagagcatcaaaagagagccaattacgttggcatgtgtatcacgccaggacgg

SEQ ID NO: 407410 - DNA, 60 bp, Artificial
  Synthetic oligonucleotide
gcagggagagggacccaactggactagatcctggtgatcaccttaaagagaaatcaatgc

SEQ ID NO: 407411 - DNA, 55 bp, Artificial
  Synthetic oligonucleotide
gcagggagctggaaagattcgcatgtgaccccgggctaatggaaagtaaggaagg

SEQ ID NO: 407412 - DNA, 55 bp, Artificial
  Synthetic oligonucleotide
gcagggagctggagaaattctcaattaaccctggccttttagaaacaccagaggg

SEQ ID NO: 407413 - DNA, 59 bp, Artificial
  Synthetic oligonucleotide
gcagggagtcgcttacctcttcgaggctgagaagttctcctacgtgactgagagcaaat

SEQ ID NO: 407414 - DNA, 60 bp, Artificial
  Synthetic oligonucleotide
gcagggataactggcagggcgcaaatagacccatcatagaaatcgatatgaacacattgg

SEQ ID NO: 407415 - DNA, 55 bp, Artificial
  Synthetic oligonucleotide
gcagggatagaggtcaaactgaccccgaagaaggggaccactacgtctggcatag

SEQ ID NO: 407416 - DNA, 60 bp, Artificial
  Synthetic oligonucleotide
gcagggatagatgaaacttgggacaatacaggtcatcacatgtcaccgctatgggacaaa

SEQ ID NO: 407417 - DNA, 55 bp, Artificial
  Synthetic oligonucleotide
gcagggatcgcatccctgtctgcagtttgtaaattggtaggtagactaaagaact

SEQ ID NO: 407418 - DNA, 59 bp, Artificial
  Synthetic oligonucleotide
gcagggattagaataaagcagctgtgtaaactcctcaagggaactaaagcactaacaga

SEQ ID NO: 407419 - DNA, 60 bp, Artificial
  Synthetic oligonucleotide
gcagggcaacgatgtatggatgggaaggaccattagcagaacatcaagatcagggtttga

SEQ ID NO: 407420 - DNA, 55 bp, Artificial
  Synthetic oligonucleotide
gcagggcaaggagatgatttaggacatattgcactccagtacatgtatgttcccc

SEQ ID NO: 407421 - DNA, 59 bp, Artificial
  Synthetic oligonucleotide
gcagggcacaggctcaaatgcggatatggtgcaatatggcaataacttattggtatatg

SEQ ID NO: 407422 - DNA, 55 bp, Artificial
  Synthetic oligonucleotide
gcagggccaaaactttccttggatgttagatgctcttcaaggtaatttgcaagcc

SEQ ID NO: 407423 - DNA, 60 bp, Artificial
  Synthetic oligonucleotide
gcagggccaaatccagtaggccagctgagagaaccaaggggaagtgacatagcaggaaca

SEQ ID NO: 407424 - DNA, 60 bp, Artificial
  Synthetic oligonucleotide
gcagggcctatagctccaggccagataagagaaccaaggggaagtgacatagcaggaact

SEQ ID NO: 407425 - DNA, 55 bp, Artificial
  Synthetic oligonucleotide
gcagggcctcactatgggcaaacaggcccatgtataggaagcccaggatctatcg

SEQ ID NO: 407426 - DNA, 60 bp, Artificial
  Synthetic oligonucleotide
gcagggcctcatccaccaggccagatgagagaaccaaggggaagtgacatagcaggaact

SEQ ID NO: 407427 - DNA, 60 bp, Artificial
  Synthetic oligonucleotide
gcagggcgatctggtacatgtggctaggagctagattccttgagtttgaagcactgggat

SEQ ID NO: 407428 - DNA, 59 bp, Artificial
  Synthetic oligonucleotide
gcagggctagtaggagttgtggaggtgaaagactcaggcactagtcaggacgggtacac

SEQ ID NO: 407429 - DNA, 55 bp, Artificial
  Synthetic oligonucleotide
gcagggctttataaccatctctaacagtggggaccaccctattgttatgcccgct

SEQ ID NO: 407430 - DNA, 52 bp, Artificial
  Synthetic oligonucleotide
gcagggctttcatcactctacaagccattgccacctttgtgtcaatagctgg

SEQ ID NO: 407431 - DNA, 57 bp, Artificial
  Synthetic oligonucleotide
gcaggggaaatactcaaaacacaccgagaaaggaaataatgggcatactatgcccta

SEQ ID NO: 407432 - DNA, 56 bp, Artificial
  Synthetic oligonucleotide
gcaggggaacatttcaattgaaaaattggtagagtattgtgattttttgacaacat

SEQ ID NO: 407433 - DNA, 55 bp, Artificial
  Synthetic oligonucleotide
gcaggggacccatgttgggagttactcgttcggtggtggagctgtgtcagaaatg

SEQ ID NO: 407434 - DNA, 55 bp, Artificial
  Synthetic oligonucleotide
gcaggggactggagcggttggtgatgtgaccacgaaaggggacaatattctggtg

SEQ ID NO: 407435 - DNA, 60 bp, Artificial
  Synthetic oligonucleotide
gcaggggcaccagttttgaaatctcctagcgctgaggcttgtggctacagtgatagagta

SEQ ID NO: 407436 - DNA, 60 bp, Artificial
  Synthetic oligonucleotide
gcaggggcagtctgaaagtggcagaacgccaccatgaacgcttcgtacttctgaatcaaa

SEQ ID NO: 407437 - DNA, 55 bp, Artificial
  Synthetic oligonucleotide
gcaggggcttatccgaatgccctctataagattcgaacacaggattcctggtctg

SEQ ID NO: 407438 - DNA, 54 bp, Artificial
  Synthetic oligonucleotide
gcagggggaaggatcagctcccgagagtggaaaatggtaaagagtgggggaatt

SEQ ID NO: 407439 - DNA, 53 bp, Artificial
  Synthetic oligonucleotide
gcagggggacgtgcctcacgtaccgtagggggtaagcgcaacactccgtgttg

SEQ ID NO: 407440 - DNA, 57 bp, Artificial
  Synthetic oligonucleotide
gcagggggagacttcggcgacattaagagcggcgctctttacttagtgttggctccg

SEQ ID NO: 407441 - DNA, 55 bp, Artificial
  Synthetic oligonucleotide
gcaggggtcacaatggagaagttcattgtactgagtataattctaacaactggtc

SEQ ID NO: 407442 - DNA, 55 bp, Artificial
  Synthetic oligonucleotide
gcaggggtcacaatgtacaaaatagcactggtactcgcgctccttagagcagtgc

SEQ ID NO: 407443 - DNA, 51 bp, Artificial
  Synthetic oligonucleotide
gcaggggtcgatttcactcggtaatcggttatggccgggaatttagcctgg

SEQ ID NO: 407444 - DNA, 55 bp, Artificial
  Synthetic oligonucleotide
gcaggggtgatgccccagccttggatcttccttacaaattacatcctgtaagagg

SEQ ID NO: 407445 - DNA, 60 bp, Artificial
  Synthetic oligonucleotide
gcagggtacacttgccagtataggaactgcctttgagcgatcaatctccgaaactagaca

SEQ ID NO: 407446 - DNA, 59 bp, Artificial
  Synthetic oligonucleotide
gcagggtagtcagacaatgggaccccaatgtaaccagacgatgcatgataaacgggtac

SEQ ID NO: 407447 - DNA, 56 bp, Artificial
  Synthetic oligonucleotide
gcagggtggaggcaccaaacgaagggtgactacctcagtgtccactaacaaacctg

SEQ ID NO: 407448 - DNA, 55 bp, Artificial
  Synthetic oligonucleotide
gcagggtggatgtcaagtgtcagaccttccaaactcggccgtcgaccgcgaaccg

SEQ ID NO: 407449 - DNA, 55 bp, Artificial
  Synthetic oligonucleotide
gcagggtggtggtggaagttcccagaggcccttagtgacatgggactgtttggac

SEQ ID NO: 407450 - DNA, 57 bp, Artificial
  Synthetic oligonucleotide
gcagggttaacttactcccaattaatgaccctcaaagactcaatgcttcaacttgac

SEQ ID NO: 407451 - DNA, 60 bp, Artificial
  Synthetic oligonucleotide
gcagggttcgataatgaatatggccgctggtttacatatggtagccacagacataggggg

SEQ ID NO: 407452 - DNA, 55 bp, Artificial
  Synthetic oligonucleotide
gcagggttttggtgtatacaacgctgatcagaatggaattctggaattcggaagc

SEQ ID NO: 407453 - DNA, 57 bp, Artificial
  Synthetic oligonucleotide
gcaggtaaaccataaaaagcgccaaagtaattggaagtattagcgccagaatcctca

SEQ ID NO: 407454 - DNA, 52 bp, Artificial
  Synthetic oligonucleotide
gcaggtaacaagagacactgtggatctgatctggggccacctacctctatcc

SEQ ID NO: 407455 - DNA, 55 bp, Artificial
  Synthetic oligonucleotide
gcaggtaacgcagagtctggctttattagtctttgatattagtcactatcttagg

SEQ ID NO: 407456 - DNA, 56 bp, Artificial
  Synthetic oligonucleotide
gcaggtaactaaggttatctgttctgttacttttggcctagctgggaaatgcttcc

SEQ ID NO: 407457 - DNA, 58 bp, Artificial
  Synthetic oligonucleotide
gcaggtaagggatagcgagcatccctttgtacatctcgtgacccggtagaggttcctc

SEQ ID NO: 407458 - DNA, 55 bp, Artificial
  Synthetic oligonucleotide
gcaggtacaatttatcctctttagtgaggctaaaagaggaaacgttattgtgcca

SEQ ID NO: 407459 - DNA, 53 bp, Artificial
  Synthetic oligonucleotide
gcaggtacaccgagactggtttgaggacctctccttgccatggcgacacgggg

SEQ ID NO: 407460 - DNA, 54 bp, Artificial
  Synthetic oligonucleotide
gcaggtaccagcaaggagtaatgaaaggagtaggccctgctgaacctggggatt

SEQ ID NO: 407461 - DNA, 55 bp, Artificial
  Synthetic oligonucleotide
gcaggtaccagttgacccaagtgaagtagaagaggccaataaaggagaagacaac

SEQ ID NO: 407462 - DNA, 55 bp, Artificial
  Synthetic oligonucleotide
gcaggtactccaaccgcggtacaggtgtgatgtggctggtgtacgacactacccc

SEQ ID NO: 407463 - DNA, 55 bp, Artificial
  Synthetic oligonucleotide
gcaggtactctaatgaaggaaaacggagttgtcttgaatcaattatcactgacca

SEQ ID NO: 407464 - DNA, 60 bp, Artificial
  Synthetic oligonucleotide
gcaggtactggcagaactgcaggacattgagagtgaggagaagattccaagaactaaaaa

SEQ ID NO: 407465 - DNA, 55 bp, Artificial
  Synthetic oligonucleotide
gcaggtagaggggcaaaatggcgatatgcagtgcagtagtcagggtagtacgggg

SEQ ID NO: 407466 - DNA, 55 bp, Artificial
  Synthetic oligonucleotide
gcaggtagcactatgggcgcagcggcaacagcgctgacggtacagacccacactt

SEQ ID NO: 407467 - DNA, 60 bp, Artificial
  Synthetic oligonucleotide
gcaggtaggataagaaagccttgaagttccctggtcttgcattgttgttctgatctgagg

SEQ ID NO: 407468 - DNA, 55 bp, Artificial
  Synthetic oligonucleotide
gcaggtagtcagattcttgcagaactgggtccctatctgacgcaggtgagcctac

SEQ ID NO: 407469 - DNA, 53 bp, Artificial
  Synthetic oligonucleotide
gcaggtataatagtggaggactctatggagggttcttttgacaatatcaccct

SEQ ID NO: 407470 - DNA, 52 bp, Artificial
  Synthetic oligonucleotide
gcaggtatccggcagtctagtcggcgataaccggcaacgctgcgctgaatcg

SEQ ID NO: 407471 - DNA, 60 bp, Artificial
  Synthetic oligonucleotide
gcaggtatctttacgtctacattgctgttgtcagccttgactgtacctttggtatgtacc

SEQ ID NO: 407472 - DNA, 52 bp, Artificial
  Synthetic oligonucleotide
gcaggtatggctagctccaaacgaactccgccgcttgttgcacaacaaccga

SEQ ID NO: 407473 - DNA, 60 bp, Artificial
  Synthetic oligonucleotide
gcaggtcaacacccaacgatagatgagttcagagcgtacatcgctgacaaagcaccacat

SEQ ID NO: 407474 - DNA, 59 bp, Artificial
  Synthetic oligonucleotide
gcaggtcaagaatatccatgccaagttcctatcaaaactcaagctgaaggcaaaagtag

SEQ ID NO: 407475 - DNA, 55 bp, Artificial
  Synthetic oligonucleotide
gcaggtcagtgcggtggggtgctcatgtctaccggcaaagtattggggatccacg

SEQ ID NO: 407476 - DNA, 57 bp, Artificial
  Synthetic oligonucleotide
gcaggtcatgagagaccaacttaagcccttcaccgcccctagaggaaagccacctaa

SEQ ID NO: 407477 - DNA, 55 bp, Artificial
  Synthetic oligonucleotide
gcaggtccaatataaggacggatcgcatgccgggtatgctacttgtgtgacgctg

SEQ ID NO: 407478 - DNA, 55 bp, Artificial
  Synthetic oligonucleotide
gcaggtccacggaggagctgatatttggaggacaagctgtggataggagcaaccc

SEQ ID NO: 407479 - DNA, 60 bp, Artificial
  Synthetic oligonucleotide
gcaggtccattcaacaatcatgctgctgtagggctcacgctgcgaattgagtctgcaatt

SEQ ID NO: 407480 - DNA, 56 bp, Artificial
  Synthetic oligonucleotide
gcaggtcccaacacaagatttacacaccctcttgcaaccttcccgccaagtaacat

SEQ ID NO: 407481 - DNA, 54 bp, Artificial
  Synthetic oligonucleotide
gcaggtcctgggcacagcctgggtacccgtggcctctttacggcaacgagggct

SEQ ID NO: 407482 - DNA, 55 bp, Artificial
  Synthetic oligonucleotide
gcaggtcgcaatatgtcaagaccactccagtatagcgtcaatgaaacgtatgcgc

SEQ ID NO: 407483 - DNA, 51 bp, Artificial
  Synthetic oligonucleotide
gcaggtctacaacgttgtgctcagcgacaatctatacacgtgcgataacgt

SEQ ID NO: 407484 - DNA, 60 bp, Artificial
  Synthetic oligonucleotide
gcaggtctaccacgtactccatttcgaatgcaactgtgatgcatttattggcccggcgcc

SEQ ID NO: 407485 - DNA, 55 bp, Artificial
  Synthetic oligonucleotide
gcaggtctgattcttgctgataaggctatgaagttagctaacgcaatcacgaagg

SEQ ID NO: 407486 - DNA, 55 bp, Artificial
  Synthetic oligonucleotide
gcaggtgaatcatggttcggttggcagtttaaaggtggcttccttgtgagtccgg

SEQ ID NO: 407487 - DNA, 60 bp, Artificial
  Synthetic oligonucleotide
gcaggtgacatatatggcccccacttggaatgatccatgctcactgctagacctgaaagc

SEQ ID NO: 407488 - DNA, 60 bp, Artificial
  Synthetic oligonucleotide
gcaggtgagatgcataacctatggtgaatctcaaggtttgacatttgacttcggcttaat

SEQ ID NO: 407489 - DNA, 55 bp, Artificial
  Synthetic oligonucleotide
gcaggtgcatggtgatttgccaggcgtagcgccaaggatttacttcacttataag

SEQ ID NO: 407490 - DNA, 55 bp, Artificial
  Synthetic oligonucleotide
gcaggtgcattgaccgaagatccagatgaaagtacagctggggtagagtctgctg

SEQ ID NO: 407491 - DNA, 56 bp, Artificial
  Synthetic oligonucleotide
gcaggtgcgaaatgaatccaaatcagaagataataacaattggtgtagtgaatacg

SEQ ID NO: 407492 - DNA, 55 bp, Artificial
  Synthetic oligonucleotide
gcaggtgcttctactgcaggttctaaagccagaggtgttaatagtgctagagggc

SEQ ID NO: 407493 - DNA, 55 bp, Artificial
  Synthetic oligonucleotide
gcaggtggaaggagggatgtgctcaggatctccatgtaccacagtggtcaattct

SEQ ID NO: 407494 - DNA, 60 bp, Artificial
  Synthetic oligonucleotide
gcaggtggacagatgccatccatgacgactcgagcgtgcacaaagggtgttattcacaca

SEQ ID NO: 407495 - DNA, 59 bp, Artificial
  Synthetic oligonucleotide
gcaggtggacccatgttggggacaaccatccttgcacaaccgtggtagatgaaccaata

SEQ ID NO: 407496 - DNA, 60 bp, Artificial
  Synthetic oligonucleotide
gcaggtggagtgaactgcatatcacgtatataccaaaccgagtaatggggataatgaaca

SEQ ID NO: 407497 - DNA, 57 bp, Artificial
  Synthetic oligonucleotide
gcaggtggatatcggaacatccgagagtcaggtaccagggggaaccactaacagcgg

SEQ ID NO: 407498 - DNA, 55 bp, Artificial
  Synthetic oligonucleotide
gcaggtggccctcgaatctccattggcattgttaaacaccgagtctacaattatg

SEQ ID NO: 407499 - DNA, 56 bp, Artificial
  Synthetic oligonucleotide
gcaggtgggctagtccaatttacggtaccaagccagttctaccaggctgacgggcc

SEQ ID NO: 407500 - DNA, 55 bp, Artificial
  Synthetic oligonucleotide
gcaggtggggccatttgggttactagagaaccttatgtgtcatgcgaccctgaca

SEQ ID NO: 407501 - DNA, 55 bp, Artificial
  Synthetic oligonucleotide
gcaggtggtaaaagtaaagatcctttggaacgtgccaagcttattgctgacggta

SEQ ID NO: 407502 - DNA, 60 bp, Artificial
  Synthetic oligonucleotide
gcaggtggtgatctgtcagcgactacttcattgactgcgtattggccattcctgctgggt

SEQ ID NO: 407503 - DNA, 60 bp, Artificial
  Synthetic oligonucleotide
gcaggtggtgcttacacccacgccacagtaatcggcaaaggtggtgtgcgagaagagatc

SEQ ID NO: 407504 - DNA, 50 bp, Artificial
  Synthetic oligonucleotide
gcaggtgtccgatggctctctgctcgacactttctgcgacgtcgtgctga

SEQ ID NO: 407505 - DNA, 58 bp, Artificial
  Synthetic oligonucleotide
gcaggtgtcctcctatagagcttgtaaattcatacatacaggatggtgatatggctga

SEQ ID NO: 407506 - DNA, 57 bp, Artificial
  Synthetic oligonucleotide
gcaggtgtcgagggcgcgttgaagcgtctctggccccatatccaggcgccgacgtca

SEQ ID NO: 407507 - DNA, 55 bp, Artificial
  Synthetic oligonucleotide
gcaggttactgtagttggtaagtcccgccgcgctattcgtgactgggaaacggac

SEQ ID NO: 407508 - DNA, 55 bp, Artificial
  Synthetic oligonucleotide
gcaggttagaagcacttgagaatagggtggcggagcttaccaagtttgtctctcc

SEQ ID NO: 407509 - DNA, 58 bp, Artificial
  Synthetic oligonucleotide
gcaggttaggcagggggagtgcgttcttgccgtgtgatctaggggcagtcaaggggga

SEQ ID NO: 407510 - DNA, 54 bp, Artificial
  Synthetic oligonucleotide
gcaggttagttaccgtcaacccctttgtctccgtgtcaacggccaatgctaaag

SEQ ID NO: 407511 - DNA, 60 bp, Artificial
  Synthetic oligonucleotide
gcaggttcattgacagaagacccggatgaagggacagcgggagtggaatctgcagtatta

SEQ ID NO: 407512 - DNA, 59 bp, Artificial
  Synthetic oligonucleotide
gcaggttcggtaatacaatgggctcgcgcattgttgaagcttaccgacgttcacaagat

SEQ ID NO: 407513 - DNA, 55 bp, Artificial
  Synthetic oligonucleotide
gcaggttctgcaatgggcgcagcgtcgctaacgctgactgctcagtcccggactt

SEQ ID NO: 407514 - DNA, 60 bp, Artificial
  Synthetic oligonucleotide
gcaggttgagtctaccttcatggctgagatgaatttgttcaacgtcgcccgaggcaattt

SEQ ID NO: 407515 - DNA, 60 bp, Artificial
  Synthetic oligonucleotide
gcaggttgagttccctcagcgcaagagtgctgccccctctagtgctgattccacctatag

SEQ ID NO: 407516 - DNA, 57 bp, Artificial
  Synthetic oligonucleotide
gcaggttggggatgttataacggaagatgagccagaaaaattctattcaaccataat

SEQ ID NO: 407517 - DNA, 55 bp, Artificial
  Synthetic oligonucleotide
gcaggttgggtactaaaggcactataagattacgttctggcacacaaataggaga

SEQ ID NO: 407518 - DNA, 58 bp, Artificial
  Synthetic oligonucleotide
gcaggttgtggttgaacctgatttgaactgagattatgtcgtgttggtagttgaacgg

SEQ ID NO: 407519 - DNA, 60 bp, Artificial
  Synthetic oligonucleotide
gcaggttgtgtgtcttttagttggttgtatgctaagttgtccatgttcgcttcgtgtggc

SEQ ID NO: 407520 - DNA, 55 bp, Artificial
  Synthetic oligonucleotide
gcaggttgttcacctttcaactccgtaatgggcgttgttcaggggattggacagt

SEQ ID NO: 407521 - DNA, 53 bp, Artificial
  Synthetic oligonucleotide
gcaggtttcactgtctcctccaaaaaaattcagaggggatcgggggtacaatt

SEQ ID NO: 407522 - DNA, 60 bp, Artificial
  Synthetic oligonucleotide
gcaggtttcttagaggtagcttgaagatctttgagaggctctgcttacattacggtgcga

SEQ ID NO: 407523 - DNA, 60 bp, Artificial
  Synthetic oligonucleotide
gcaggttttacacagatttagtgcgactgttactggtggacaatatgcgtctaaggaaca

SEQ ID NO: 407524 - DNA, 52 bp, Artificial
  Synthetic oligonucleotide
gcaggttttagggttctcgttagcctgggtaggaaagaccccaaccgcagta

SEQ ID NO: 407525 - DNA, 55 bp, Artificial
  Synthetic oligonucleotide
gcaggttttcctgagagggaggatgagttgcgtcagacaggattgccacaagtgg

SEQ ID NO: 407526 - DNA, 55 bp, Artificial
  Synthetic oligonucleotide
gcagtaaactgcagtatcgcgcggtaaattgcagtctggcagccgcgcgttactg

SEQ ID NO: 407527 - DNA, 56 bp, Artificial
  Synthetic oligonucleotide
gcagtaaagggagtcgggacgatggtgatggaactaattcggatgataaaacgagg

SEQ ID NO: 407528 - DNA, 55 bp, Artificial
  Synthetic oligonucleotide
gcagtaaatcacgaatgctgaacagtttcgtgtgagggagcaacgtgtagtagac

SEQ ID NO: 407529 - DNA, 59 bp, Artificial
  Synthetic oligonucleotide
gcagtaaatctaatcgcaaacgtaacaataaacggtgtgagtcatgctatcccctatag

SEQ ID NO: 407530 - DNA, 59 bp, Artificial
  Synthetic oligonucleotide
gcagtaaatttcactcagacacccccaggccagttgacccctcaacaatatcgtgtgac

SEQ ID NO: 407531 - DNA, 55 bp, Artificial
  Synthetic oligonucleotide
gcagtaacacaacctgacaaacaagcatttaaggtgttaagccagtgtggaggtg

SEQ ID NO: 407532 - DNA, 55 bp, Artificial
  Synthetic oligonucleotide
gcagtaacctgggcctctgcagttgcagccatcttcactaggacacatggtagtt

SEQ ID NO: 407533 - DNA, 57 bp, Artificial
  Synthetic oligonucleotide
gcagtaacgcctgaccccgtttggtcaatattcccgtcaatcgacggagctagatgg

SEQ ID NO: 407534 - DNA, 57 bp, Artificial
  Synthetic oligonucleotide
gcagtaactgacctaaatggacctatcgtcgtacagtgcttctccgttaaggagagt

SEQ ID NO: 407535 - DNA, 55 bp, Artificial
  Synthetic oligonucleotide
gcagtaagagagccagcaaactttgagtatgtgagagggttcatgcaaggtcgac

SEQ ID NO: 407536 - DNA, 57 bp, Artificial
  Synthetic oligonucleotide
gcagtaagagggatagcgaacccgttgggaacgattgacgctcatggtacggttatc

SEQ ID NO: 407537 - DNA, 60 bp, Artificial
  Synthetic oligonucleotide
gcagtaagcgagggacccgtcaagggcgcaactctgaggcagatgtgcgagccattcgca

SEQ ID NO: 407538 - DNA, 54 bp, Artificial
  Synthetic oligonucleotide
gcagtaagctctcagctaaatattgctgatccgagcaagtactataggtatgag

SEQ ID NO: 407539 - DNA, 59 bp, Artificial
  Synthetic oligonucleotide
gcagtaagtaatgtgtggttcacacataagggaataaagctgtacctaaatccgatcat

SEQ ID NO: 407540 - DNA, 50 bp, Artificial
  Synthetic oligonucleotide
gcagtaagtactaagtatatgtgatgacccctttggaaattagtgcaata

SEQ ID NO: 407541 - DNA, 60 bp, Artificial
  Synthetic oligonucleotide
gcagtaagtagtaataattagtatatgtaatgagctcattggaaatatatgcaatagtag

SEQ ID NO: 407542 - DNA, 56 bp, Artificial
  Synthetic oligonucleotide
gcagtaagtatatgtaatgtgggatttgctagcaagagtagattatagagtaggag

SEQ ID NO: 407543 - DNA, 55 bp, Artificial
  Synthetic oligonucleotide
gcagtaatacatggcatggtaccttccccatcaatgcttacactacgggtcccgg

SEQ ID NO: 407544 - DNA, 55 bp, Artificial
  Synthetic oligonucleotide
gcagtaatagacatggaggtgttgtcctccacatcagtgacacagctggtgagag

SEQ ID NO: 407545 - DNA, 55 bp, Artificial
  Synthetic oligonucleotide
gcagtaatccactatggaggagtgcctactgatgtcgttaattcctgggtaggag

SEQ ID NO: 407546 - DNA, 57 bp, Artificial
  Synthetic oligonucleotide
gcagtaatggaagagctgcatagtatgctacaagagaaggggctagcatgtcatacg

SEQ ID NO: 407547 - DNA, 60 bp, Artificial
  Synthetic oligonucleotide
gcagtacactgagccacatattaccaatccacccccacacctggtaaagtgtgcacacag

SEQ ID NO: 407548 - DNA, 60 bp, Artificial
  Synthetic oligonucleotide
gcagtacataaataatgggctgcctccaatgcagaatactagaaatgtagtaccagtgag

SEQ ID NO: 407549 - DNA, 55 bp, Artificial
  Synthetic oligonucleotide
gcagtacatccaagagtcccacttagggaaatgacttacaagttggcaatagacc

SEQ ID NO: 407550 - DNA, 55 bp, Artificial
  Synthetic oligonucleotide
gcagtacatgggtggtgatatagcgcttgcgagtcgggctgtaacggggcatggc

SEQ ID NO: 407551 - DNA, 55 bp, Artificial
  Synthetic oligonucleotide
gcagtacattgcgtagtagtgattttgccaatagggatatttccgaacctttctt

SEQ ID NO: 407552 - DNA, 52 bp, Artificial
  Synthetic oligonucleotide
gcagtaccagaagagtaggcttaaccgagaggcctacgcaaaggatctcctt

SEQ ID NO: 407553 - DNA, 55 bp, Artificial
  Synthetic oligonucleotide
gcagtaccagtagtgcgttttacctctgatggtgtaagcatgaaagtattagctt

SEQ ID NO: 407554 - DNA, 57 bp, Artificial
  Synthetic oligonucleotide
gcagtaccccaaccttcccatcgaggtcgtccttccaaccaacgagctcaggctgga

SEQ ID NO: 407555 - DNA, 55 bp, Artificial
  Synthetic oligonucleotide
gcagtaccgtctacagtgactcgtaagttagcaccagtagcgccgttaccgtagt

SEQ ID NO: 407556 - DNA, 55 bp, Artificial
  Synthetic oligonucleotide
gcagtacctatagtatattactaaatagtacgttcgtgaggccttgcctcgagtg

SEQ ID NO: 407557 - DNA, 60 bp, Artificial
  Synthetic oligonucleotide
gcagtacctttgctcctccctcgtggcttccctccatcaccagcagctagatagccttat

SEQ ID NO: 407558 - DNA, 60 bp, Artificial
  Synthetic oligonucleotide
gcagtacgcaggcaacacaaacggtgtattccgtgccagacagcggatatggcaatatgg

SEQ ID NO: 407559 - DNA, 55 bp, Artificial
  Synthetic oligonucleotide
gcagtacgcgcctatgtataagtatgtggaaccctttgacaggttgaaacgtttg

SEQ ID NO: 407560 - DNA, 54 bp, Artificial
  Synthetic oligonucleotide
gcagtacgctctagcgttgttttcggggaaccgttacaatggttacctcgacgc

SEQ ID NO: 407561 - DNA, 55 bp, Artificial
  Synthetic oligonucleotide
gcagtacgtaaggttcgatcccacagtggctgtaggagtagctgctcacttctgg

SEQ ID NO: 407562 - DNA, 60 bp, Artificial
  Synthetic oligonucleotide
gcagtacgtcaagagtatgctataccagttggaccagtatttccaccaggcatgaattgg

SEQ ID NO: 407563 - DNA, 55 bp, Artificial
  Synthetic oligonucleotide
gcagtactaactggagttgacactgccatggtaatcatggtttccgatgctaccc

SEQ ID NO: 407564 - DNA, 58 bp, Artificial
  Synthetic oligonucleotide
gcagtactaatcataatttgttagcaccccccaccataacgtctttaccagcaatgaa

SEQ ID NO: 407565 - DNA, 50 bp, Artificial
  Synthetic oligonucleotide
gcagtactccacttgatagtgttgtacttgcctataccgcttggtaatag

SEQ ID NO: 407566 - DNA, 60 bp, Artificial
  Synthetic oligonucleotide
gcagtactccattgccacgcaatcaatctgtaggccgcaggaggggtttctccttgacta

SEQ ID NO: 407567 - DNA, 55 bp, Artificial
  Synthetic oligonucleotide
gcagtactcgtacgatatgctcgactctgtgatggcagggcagaatgctcgaatt

SEQ ID NO: 407568 - DNA, 55 bp, Artificial
  Synthetic oligonucleotide
gcagtactggccttaactactcgttctaaacattactttgcatcacaggatgccc

SEQ ID NO: 407569 - DNA, 55 bp, Artificial
  Synthetic oligonucleotide
gcagtacttgtacggggtggggtcaagcatcgcgtcctgggctgttaagtgggac

SEQ ID NO: 407570 - DNA, 57 bp, Artificial
  Synthetic oligonucleotide
gcagtacttgtacggtgtagggtcggtggttgtctcctttgcaatcaagtgggagta

SEQ ID NO: 407571 - DNA, 55 bp, Artificial
  Synthetic oligonucleotide
gcagtagatggagtgtattacaccattaaaattgggagaaccgtacaatgtgggg

SEQ ID NO: 407572 - DNA, 55 bp, Artificial
  Synthetic oligonucleotide
gcagtagcttcaccaatccattatttactgagccagcattagtagagcctccaca

SEQ ID NO: 407573 - DNA, 60 bp, Artificial
  Synthetic oligonucleotide
gcagtaggaaaatgtccgaggtatgttaaacaagagagtctgctactggcaacaggaatg

SEQ ID NO: 407574 - DNA, 60 bp, Artificial
  Synthetic oligonucleotide
gcagtagggaaatgcccgaggtatgttaagcaggagagtttgctactagcaacagggatg

SEQ ID NO: 407575 - DNA, 60 bp, Artificial
  Synthetic oligonucleotide
gcagtagggtgtaatcctgatgtgttctggagtaaattaccgatcctgctgccaggatcg

SEQ ID NO: 407576 - DNA, 55 bp, Artificial
  Synthetic oligonucleotide
gcagtagtaacccaaggatctcgcgcaccttgctagggtcgctaacccgccaggc

SEQ ID NO: 407577 - DNA, 53 bp, Artificial
  Synthetic oligonucleotide
gcagtagtacaaatggttgcgaatcatgcttcaacggaggtgatcttatctgg

SEQ ID NO: 407578 - DNA, 55 bp, Artificial
  Synthetic oligonucleotide
gcagtagtagagccccgtcttaaggcccttcttataggcgtacaccaggaggttc

SEQ ID NO: 407579 - DNA, 55 bp, Artificial
  Synthetic oligonucleotide
gcagtagtggcttatggggtgtggccacactatttgacaccacaggatgcaactg

SEQ ID NO: 407580 - DNA, 55 bp, Artificial
  Synthetic oligonucleotide
gcagtatagccaaaggactactttgcttcttgaatcagaatacagctgggtctga

SEQ ID NO: 407581 - DNA, 55 bp, Artificial
  Synthetic oligonucleotide
gcagtatagttgttgggatgagggtgttggtggttggattgaacttaagaccagg

SEQ ID NO: 407582 - DNA, 60 bp, Artificial
  Synthetic oligonucleotide
gcagtatcctgtgactctagtgacggaggaaagtctctctttcgagcagtttgtttcaca

SEQ ID NO: 407583 - DNA, 52 bp, Artificial
  Synthetic oligonucleotide
gcagtatctttaacgcacctggtgttatactgtttgcgaacaacgcgggaaa

SEQ ID NO: 407584 - DNA, 60 bp, Artificial
  Synthetic oligonucleotide
gcagtatgacagggcgaatgcgcgtttcgccgagatttcatccatatggggggagaccgg

SEQ ID NO: 407585 - DNA, 56 bp, Artificial
  Synthetic oligonucleotide
gcagtatggtagggcgaattcccgtttctcggagatttcatccctatggggggaga

SEQ ID NO: 407586 - DNA, 55 bp, Artificial
  Synthetic oligonucleotide
gcagtatgtgctgtcattcgacccgattaaacaaactatggccgccggcccgcac

SEQ ID NO: 407587 - DNA, 60 bp, Artificial
  Synthetic oligonucleotide
gcagtattgttgccacaatatgatgttgtaatccaacacccggcagatatgagctggtgt

SEQ ID NO: 407588 - DNA, 53 bp, Artificial
  Synthetic oligonucleotide
gcagtatttgattccattacacggagtcgagtaactagggtgagctctagcag

SEQ ID NO: 407589 - DNA, 59 bp, Artificial
  Synthetic oligonucleotide
gcagtatttgttaacgaacgcgaagattaatcaaaatgcgcgcagtgagtccgaggatt

SEQ ID NO: 407590 - DNA, 60 bp, Artificial
  Synthetic oligonucleotide
gcagtcaacaaattggtgacgctgactcataaggcaggccaagtctttgttactcctgag

SEQ ID NO: 407591 - DNA, 50 bp, Artificial
  Synthetic oligonucleotide
gcagtcaagatgttcggggccaggcaaaatgaatacacgaccgtgattga

SEQ ID NO: 407592 - DNA, 55 bp, Artificial
  Synthetic oligonucleotide
gcagtcaagcggcatgagataaatccgaagccaattcgatttggagtcctgctca

SEQ ID NO: 407593 - DNA, 55 bp, Artificial
  Synthetic oligonucleotide
gcagtcaagttggacttcgccccgccactgaaggcactagaaaccctccacagac

SEQ ID NO: 407594 - DNA, 57 bp, Artificial
  Synthetic oligonucleotide
gcagtcaatactgcctacggactcacgagggggtggtacggaggtgggagcaccttg

SEQ ID NO: 407595 - DNA, 59 bp, Artificial
  Synthetic oligonucleotide
gcagtcaatagggatggtggactttacagagcccaggtgccacccgaggtagttgagcg

SEQ ID NO: 407596 - DNA, 55 bp, Artificial
  Synthetic oligonucleotide
gcagtcaatcctggcctgttagaaacagcagaaggctgcagacaaatactgggac

SEQ ID NO: 407597 - DNA, 50 bp, Artificial
  Synthetic oligonucleotide
gcagtcacagcccttgacaataactctgggagactggtcactggaactgt

SEQ ID NO: 407598 - DNA, 55 bp, Artificial
  Synthetic oligonucleotide
gcagtcacatcgtttacgcaatagtcagactgtagttctatcatgcttcctacgt

SEQ ID NO: 407599 - DNA, 55 bp, Artificial
  Synthetic oligonucleotide
gcagtcaccggacttaatcatgtcgatccagcgaaacgactcctgtggtctcacc

SEQ ID NO: 407600 - DNA, 55 bp, Artificial
  Synthetic oligonucleotide
gcagtcacctttgcagctccgatttagaatgcaagctaagcagcacatgaaggtg

SEQ ID NO: 407601 - DNA, 59 bp, Artificial
  Synthetic oligonucleotide
gcagtcactcgacgccaacgttatcaccttccccaccaatgtctccaccatgcccgagt

SEQ ID NO: 407602 - DNA, 60 bp, Artificial
  Synthetic oligonucleotide
gcagtcactgtagacacagcctctaccgcattagtcgcgacacaacacgccaaagccaac

SEQ ID NO: 407603 - DNA, 60 bp, Artificial
  Synthetic oligonucleotide
gcagtcacttatatctctgagaatgggcccctcatcagcttgggtttggaaggcaacttt

SEQ ID NO: 407604 - DNA, 60 bp, Artificial
  Synthetic oligonucleotide
gcagtcagaagatttattgcagagatgagacaacgtgtacaggctgatagaaatgttgtt

SEQ ID NO: 407605 - DNA, 60 bp, Artificial
  Synthetic oligonucleotide
gcagtcagaggtgacctgaatttcgtcaacagagctaatcaacggctgaaccctatgcac

SEQ ID NO: 407606 - DNA, 60 bp, Artificial
  Synthetic oligonucleotide
gcagtcagcagcatgactcaaaaaatgcggagctaagacaatcggaagtctctaaaattc

SEQ ID NO: 407607 - DNA, 60 bp, Artificial
  Synthetic oligonucleotide
gcagtcaggaaggcagcctactcccttaactccacctctaagggacactcatcctcaggc

SEQ ID NO: 407608 - DNA, 55 bp, Artificial
  Synthetic oligonucleotide
gcagtcaggggtcacaggaaggtgcgttgtgtttgacaaaagatgggaaaactgc

SEQ ID NO: 407609 - DNA, 55 bp, Artificial
  Synthetic oligonucleotide
gcagtcatgaaattgaactcctcctgccaactgtcaagccatcattcgattacct

SEQ ID NO: 407610 - DNA, 60 bp, Artificial
  Synthetic oligonucleotide
gcagtcatgagaagtgaactggagtatggtaactgtgataccaaatgccagacccccgta

SEQ ID NO: 407611 - DNA, 58 bp, Artificial
  Synthetic oligonucleotide
gcagtccaatttactgttggacggcaataccgtgacatcacaagcaacttcataaaca

SEQ ID NO: 407612 - DNA, 56 bp, Artificial
  Synthetic oligonucleotide
gcagtccactatacccaccgacagtttgataaaaggtggggtcacgccattatacc

SEQ ID NO: 407613 - DNA, 55 bp, Artificial
  Synthetic oligonucleotide
gcagtccatgatgatctatttgaaagttcaaagcagttgttgcaacagcattgtg

SEQ ID NO: 407614 - DNA, 55 bp, Artificial
  Synthetic oligonucleotide
gcagtcccagttgccacgacctgaatcaagggcaatgtaactcccgccccaagcc

SEQ ID NO: 407615 - DNA, 55 bp, Artificial
  Synthetic oligonucleotide
gcagtccccgttgtggaagaagaacacgttggggtggaagtggttgggcgtcagc

SEQ ID NO: 407616 - DNA, 55 bp, Artificial
  Synthetic oligonucleotide
gcagtccctcaatttagaaaattgccagacattgagctcagacctggagacttaa

SEQ ID NO: 407617 - DNA, 60 bp, Artificial
  Synthetic oligonucleotide
gcagtccgacccacagacatggagttggtgtcgaattcgagtgctctcgtagtctgagca

SEQ ID NO: 407618 - DNA, 55 bp, Artificial
  Synthetic oligonucleotide
gcagtccgaggccctgctccttaggtacaggaacactttaactgggcagctgctg

SEQ ID NO: 407619 - DNA, 55 bp, Artificial
  Synthetic oligonucleotide
gcagtccgatctgtcgaccaaacaattgagacacatcggaggagctggtggaagc

SEQ ID NO: 407620 - DNA, 54 bp, Artificial
  Synthetic oligonucleotide
gcagtccgcacagcagcctacttcctcgattcaaggtagttcgcaagctactgt

SEQ ID NO: 407621 - DNA, 59 bp, Artificial
  Synthetic oligonucleotide
gcagtccgcatcttcttggttagcgagcttaagagaggccgtaacacggcaggtgggac

SEQ ID NO: 407622 - DNA, 55 bp, Artificial
  Synthetic oligonucleotide
gcagtcctgcgcatagagactcctgatggtattgggaccgggttcttctgcgcca

SEQ ID NO: 407623 - DNA, 60 bp, Artificial
  Synthetic oligonucleotide
gcagtcgatttagctgcgaaattgaaagttatgatcgattcagcgcgtcgtaagaatgat

SEQ ID NO: 407624 - DNA, 60 bp, Artificial
  Synthetic oligonucleotide
gcagtcgccgctgcagttgttgcggacctggtgctccgccttgcacagcaaccgtacatg

SEQ ID NO: 407625 - DNA, 59 bp, Artificial
  Synthetic oligonucleotide
gcagtcgcgtaagtcgcttagcggaaaactccgccgcgctgcgaacacaagaatcgtgg

SEQ ID NO: 407626 - DNA, 60 bp, Artificial
  Synthetic oligonucleotide
gcagtcggaactcgctgccgcacttcttaaacatagaatcccgcagttctcagataatcg

SEQ ID NO: 407627 - DNA, 55 bp, Artificial
  Synthetic oligonucleotide
gcagtcggagccacatgcgatacagtgtgttttgacagtaccatcacacccgagg

SEQ ID NO: 407628 - DNA, 56 bp, Artificial
  Synthetic oligonucleotide
gcagtcgggctaactccccaacttccgcgcgaggaaacggcctcggcgggatcaca

SEQ ID NO: 407629 - DNA, 51 bp, Artificial
  Synthetic oligonucleotide
gcagtcgtcgtctcgtccatttggtcccacgcgacagtaaactcgtcttcg

SEQ ID NO: 407630 - DNA, 55 bp, Artificial
  Synthetic oligonucleotide
gcagtctcaagggactgagactggggtgggaaggtctcaagaatctgtggaatct

SEQ ID NO: 407631 - DNA, 55 bp, Artificial
  Synthetic oligonucleotide
gcagtctccgcggagtcattccaggaatggtatgacgtgcaggctactgctgcct

SEQ ID NO: 407632 - DNA, 60 bp, Artificial
  Synthetic oligonucleotide
gcagtctccttgctggttagggggctgattgacagcattagcagtaccttttttcctgga

SEQ ID NO: 407633 - DNA, 55 bp, Artificial
  Synthetic oligonucleotide
gcagtctctcaattggggctcatcaaggtcataatgtttgaatagggactttagg

SEQ ID NO: 407634 - DNA, 55 bp, Artificial
  Synthetic oligonucleotide
gcagtctctcagacttctatctctacaaggagctaccagcctcctggggtcccgc

SEQ ID NO: 407635 - DNA, 55 bp, Artificial
  Synthetic oligonucleotide
gcagtctgattatgagcggagtgaatttacgggacagatggtaatctgctcaaaa

SEQ ID NO: 407636 - DNA, 53 bp, Artificial
  Synthetic oligonucleotide
gcagtctgcgcgtagctgctggttttcccgctccaagaaatctatgtagcccc

SEQ ID NO: 407637 - DNA, 55 bp, Artificial
  Synthetic oligonucleotide
gcagtctgtggattatacccagcccaggttaaagcaaggaatttgatcagccccg

SEQ ID NO: 407638 - DNA, 55 bp, Artificial
  Synthetic oligonucleotide
gcagtcttacactaaggcagctgtccagacccttgctaacgcaactgcggcacag

SEQ ID NO: 407639 - DNA, 55 bp, Artificial
  Synthetic oligonucleotide
gcagtcttatgagcaacgggatgatattaagcataccggtattgttcgttgtgtc

SEQ ID NO: 407640 - DNA, 59 bp, Artificial
  Synthetic oligonucleotide
gcagtcttcttgtactatggtggttccatggattagtaacaccagttaccgcagaacag

SEQ ID NO: 407641 - DNA, 60 bp, Artificial
  Synthetic oligonucleotide
gcagtcttgtgtcgtgcatctctattatgacgtgtccagttgcatttacaggaacctgat

SEQ ID NO: 407642 - DNA, 55 bp, Artificial
  Synthetic oligonucleotide
gcagtctttggcagcttgtatattaggatggaatatggagaatggagatgtatcc

SEQ ID NO: 407643 - DNA, 60 bp, Artificial
  Synthetic oligonucleotide
gcagtgaaatctctgcttatgtcagcagaaaacaacatcgtgcctaactctcaggctttt

SEQ ID NO: 407644 - DNA, 60 bp, Artificial
  Synthetic oligonucleotide
gcagtgaaccaggctagcaccattataaacacaattctaatgtttgtgagcactcttggg

SEQ ID NO: 407645 - DNA, 56 bp, Artificial
  Synthetic oligonucleotide
gcagtgaagtgaattttcccctgaactttctcacacatttcttcaaacgtttgact

SEQ ID NO: 407646 - DNA, 60 bp, Artificial
  Synthetic oligonucleotide
gcagtgaatgtactgtttacttgcaggttggaacaatgccatctcaacaggatcagtggc

SEQ ID NO: 407647 - DNA, 55 bp, Artificial
  Synthetic oligonucleotide
gcagtgacagaataacccccgggagttatatttatgcccctacacctagtgggtc

SEQ ID NO: 407648 - DNA, 55 bp, Artificial
  Synthetic oligonucleotide
gcagtgaccttccacggaagcctgagtgagttgactgactacagctacaacgggc

SEQ ID NO: 407649 - DNA, 52 bp, Artificial
  Synthetic oligonucleotide
gcagtgagctcactccacatctcgcgaacgccgaggctttgcttcaagttta

SEQ ID NO: 407650 - DNA, 58 bp, Artificial
  Synthetic oligonucleotide
gcagtgaggatcatcaaaatcttatatcaaagcagtaagtagtacatgtaatgcaagc

SEQ ID NO: 407651 - DNA, 60 bp, Artificial
  Synthetic oligonucleotide
gcagtgagtaataagcatatgtaatgacacctttgcaagttagtgcaatagtaggactgg

SEQ ID NO: 407652 - DNA, 60 bp, Artificial
  Synthetic oligonucleotide
gcagtgagtagttccccggtgcgtgaatccattatcgcgacaccctatagcgatgaagta

SEQ ID NO: 407653 - DNA, 58 bp, Artificial
  Synthetic oligonucleotide
gcagtgatcgatatagattaataaattgtaatacctcagccattacacaagcttgtcc

SEQ ID NO: 407654 - DNA, 60 bp, Artificial
  Synthetic oligonucleotide
gcagtgatgagcaatgagagtggtctcacgctcacgtttgaacaaccaacagaagctaac

SEQ ID NO: 407655 - DNA, 55 bp, Artificial
  Synthetic oligonucleotide
gcagtgatgagttcccctgtgcgtgaatccatgattattgcagttgaggtggagg

SEQ ID NO: 407656 - DNA, 57 bp, Artificial
  Synthetic oligonucleotide
gcagtgatgggttcctctgtgcgtgaatccatgattagcacagttaatgtggatgta

SEQ ID NO: 407657 - DNA, 58 bp, Artificial
  Synthetic oligonucleotide
gcagtgatgtaaggtggttgttgcgttgctatacacacgtcaataccttcctccctga

SEQ ID NO: 407658 - DNA, 60 bp, Artificial
  Synthetic oligonucleotide
gcagtgattacatatgagggggattccagtgccgggtacaatcatgatgtgtctatctta

SEQ ID NO: 407659 - DNA, 60 bp, Artificial
  Synthetic oligonucleotide
gcagtgcagcttgattgaggcaggcacaagattcaacttgggtcctgtgaccatcacgtt

SEQ ID NO: 407660 - DNA, 60 bp, Artificial
  Synthetic oligonucleotide
gcagtgcatgcaccgacttccatttactaccaggcgctgaaaggtgtacgaactatctat

SEQ ID NO: 407661 - DNA, 56 bp, Artificial
  Synthetic oligonucleotide
gcagtgccaatggattcaatgctcagacataataattggagtttagtgataattcc

SEQ ID NO: 407662 - DNA, 59 bp, Artificial
  Synthetic oligonucleotide
gcagtgccctttatagatataacaggttcacccaacggcactcgctgaccggtggatta

SEQ ID NO: 407663 - DNA, 60 bp, Artificial
  Synthetic oligonucleotide
gcagtgccgaatgggacaatagtgaaggccattacagatgatcagattgaggtgactaat

SEQ ID NO: 407664 - DNA, 55 bp, Artificial
  Synthetic oligonucleotide
gcagtgcctaatcctttaaaacttctacagaaattggggcccaaaaccatgcagg

SEQ ID NO: 407665 - DNA, 51 bp, Artificial
  Synthetic oligonucleotide
gcagtgcctcggggtcttgcaccaggagcaaggggtccttgtgtggagagg

SEQ ID NO: 407666 - DNA, 55 bp, Artificial
  Synthetic oligonucleotide
gcagtgcgtaagcctacagtcagtctatcaaaggacaccttttgcgtgtcagggt

SEQ ID NO: 407667 - DNA, 55 bp, Artificial
  Synthetic oligonucleotide
gcagtgctctggagggtttaggggaggtattgcgtttcgttgggaagctgagggg

SEQ ID NO: 407668 - DNA, 55 bp, Artificial
  Synthetic oligonucleotide
gcagtgctgcctcacaattcttatcggttcctctgtctcactcaacgcctatccc

SEQ ID NO: 407669 - DNA, 50 bp, Artificial
  Synthetic oligonucleotide
gcagtgctggggctccttctcgcagaccaagcagggcaggcacctacaaa

SEQ ID NO: 407670 - DNA, 60 bp, Artificial
  Synthetic oligonucleotide
gcagtgcttgcaaaaggggacctgctagcggtttcttcagtagattgaactggttgacta

SEQ ID NO: 407671 - DNA, 55 bp, Artificial
  Synthetic oligonucleotide
gcagtggaagaatggaacggacggaggagttggtgccatccagagaggagcgttg

SEQ ID NO: 407672 - DNA, 58 bp, Artificial
  Synthetic oligonucleotide
gcagtggaagagatagcggatttctttgcaaacaaacgagttatccagttgaagaacg

SEQ ID NO: 407673 - DNA, 60 bp, Artificial
  Synthetic oligonucleotide
gcagtggacatagcacttaattagcttgatgtctgaaagttattagacctagtgtcaaca

SEQ ID NO: 407674 - DNA, 55 bp, Artificial
  Synthetic oligonucleotide
gcagtggaccccggaggccacactgcaatttctcagcgtcacattgcacgtgtag

SEQ ID NO: 407675 - DNA, 60 bp, Artificial
  Synthetic oligonucleotide
gcagtggaggccctctatcatcttagaggactactgttgtctcaggctctctaaagagta

SEQ ID NO: 407676 - DNA, 60 bp, Artificial
  Synthetic oligonucleotide
gcagtggaggtttgacagccgcttagcacttcgtcacctggcccgagagctacatccgga

SEQ ID NO: 407677 - DNA, 55 bp, Artificial
  Synthetic oligonucleotide
gcagtggagtatgaaatttggaagaggttaggaatagatgaatttctggccgaag

SEQ ID NO: 407678 - DNA, 55 bp, Artificial
  Synthetic oligonucleotide
gcagtggatcagcattcaagctggactcatcaaggctggagccacggacgcaaac

SEQ ID NO: 407679 - DNA, 55 bp, Artificial
  Synthetic oligonucleotide
gcagtggatggggttatacgtatgatgtgcgattttgagttcaatgaatgtcgat

SEQ ID NO: 407680 - DNA, 55 bp, Artificial
  Synthetic oligonucleotide
gcagtggattagacgatttagaccgaataacttttggttggcttgacggagaaga

SEQ ID NO: 407681 - DNA, 55 bp, Artificial
  Synthetic oligonucleotide
gcagtggcatatttgtaataatagctgggcaccgattggggactctctaaaactc

SEQ ID NO: 407682 - DNA, 55 bp, Artificial
  Synthetic oligonucleotide
gcagtggcattcgttgttttattaggttgtttcatattgttaggaatcgcagttg

SEQ ID NO: 407683 - DNA, 55 bp, Artificial
  Synthetic oligonucleotide
gcagtggctggtcgggctccccgctctaccacaaaggttgcgtggttggcttaca

SEQ ID NO: 407684 - DNA, 55 bp, Artificial
  Synthetic oligonucleotide
gcagtgggaattaatgttcagagtacagagtggacgcttttagcttctaagttgc

SEQ ID NO: 407685 - DNA, 55 bp, Artificial
  Synthetic oligonucleotide
gcagtgggatctggatcaggcgcaaaaggacctggagaacgcgcgaacgagaatg

SEQ ID NO: 407686 - DNA, 60 bp, Artificial
  Synthetic oligonucleotide
gcagtgggctgagattattcacagatactggcctaacccttcacagattcgttatggtgc

SEQ ID NO: 407687 - DNA, 60 bp, Artificial
  Synthetic oligonucleotide
gcagtgggctggggtgatcctatcactcactggagccacggacaaaatcagtggcccctg

SEQ ID NO: 407688 - DNA, 55 bp, Artificial
  Synthetic oligonucleotide
gcagtgggtccttgttatctgggttatggctcccctgcaaatattacagggagag

SEQ ID NO: 407689 - DNA, 60 bp, Artificial
  Synthetic oligonucleotide
gcagtggtaagcgtattggggccaaggtgcacttctatcatgacctcagtcctattgccc

SEQ ID NO: 407690 - DNA, 60 bp, Artificial
  Synthetic oligonucleotide
gcagtggtactggctgctaatgctatgaggaatagaagagagtggacacaagatgtggaa

SEQ ID NO: 407691 - DNA, 60 bp, Artificial
  Synthetic oligonucleotide
gcagtggtcaatcttcatgcagctacgactgagtctagctgtcaactgagacgccgtgga

SEQ ID NO: 407692 - DNA, 55 bp, Artificial
  Synthetic oligonucleotide
gcagtggtcgcagtccatcgttctggggtcaacgcgaaggaacgcagagcatgca

SEQ ID NO: 407693 - DNA, 60 bp, Artificial
  Synthetic oligonucleotide
gcagtggtgcgcctgtggtttacattctgatccgcagcactcacattgtggtggtcggat

SEQ ID NO: 407694 - DNA, 58 bp, Artificial
  Synthetic oligonucleotide
gcagtggtggtgctaacacgtggttgggaaatagtttagtcttgtgcaccttgttgtc

SEQ ID NO: 407695 - DNA, 60 bp, Artificial
  Synthetic oligonucleotide
gcagtggtgtacaacctcttgtgcctttggtgatcctggcgatattatggctactactgc

SEQ ID NO: 407696 - DNA, 55 bp, Artificial
  Synthetic oligonucleotide
gcagtggttaagtgaaccctgtaagcttcttccagacacagcggcagttagcctc

SEQ ID NO: 407697 - DNA, 55 bp, Artificial
  Synthetic oligonucleotide
gcagtggtttcgcagccccaggcgactgtggtggcattttacgatgtcaacacgg

SEQ ID NO: 407698 - DNA, 55 bp, Artificial
  Synthetic oligonucleotide
gcagtgtagcgcaacagttagaccaggagagaactccagcagtcaagagagctct

SEQ ID NO: 407699 - DNA, 54 bp, Artificial
  Synthetic oligonucleotide
gcagtgtaggggttttactgatgtaataacgatttgttaccctgtaacctctcc

SEQ ID NO: 407700 - DNA, 55 bp, Artificial
  Synthetic oligonucleotide
gcagtgtatggcactgaaggactagaggctcttgacttaacaacaagtgcagggt

SEQ ID NO: 407701 - DNA, 60 bp, Artificial
  Synthetic oligonucleotide
gcagtgtatttcattgcctgtcgactaaatcttgtgtcgacttgagatctattcctaacc

SEQ ID NO: 407702 - DNA, 60 bp, Artificial
  Synthetic oligonucleotide
gcagtgtccggaaaaaggtggcactcttatgtgctacccataacgatgggacatcatagg

SEQ ID NO: 407703 - DNA, 51 bp, Artificial
  Synthetic oligonucleotide
gcagtgtcgcattttggatgggggtgttgccgtaaaccgctaggcgttggg

SEQ ID NO: 407704 - DNA, 55 bp, Artificial
  Synthetic oligonucleotide
gcagtgtctgcccttagtataagggctacgttacggttgttaatggaaggtctag

SEQ ID NO: 407705 - DNA, 57 bp, Artificial
  Synthetic oligonucleotide
gcagtgtgagttacacagcgacaactaagggtatttacttcatccttaacgtttatc

SEQ ID NO: 407706 - DNA, 60 bp, Artificial
  Synthetic oligonucleotide
gcagtgtgcaaccttactagcaagtcgaagtaaagagcaacaatatatggacatgagtcg

SEQ ID NO: 407707 - DNA, 60 bp, Artificial
  Synthetic oligonucleotide
gcagtgtgcattcagcgttgacgggcgagtcgtatggggagagcgtaaaacaggcggtaa

SEQ ID NO: 407708 - DNA, 58 bp, Artificial
  Synthetic oligonucleotide
gcagtgtggaaactgataagggacccctggataggggtgctattgaagagagggttga

SEQ ID NO: 407709 - DNA, 56 bp, Artificial
  Synthetic oligonucleotide
gcagtgtggatatgtgaggaaatagtttttcgcatttattttaaaacgatttggag

SEQ ID NO: 407710 - DNA, 57 bp, Artificial
  Synthetic oligonucleotide
gcagtgtgggattccaccactggcgagaaagtgcatactggcacggggaccttccgc

SEQ ID NO: 407711 - DNA, 59 bp, Artificial
  Synthetic oligonucleotide
gcagtgtgtacattgaagtattgcatttgactcaaggaacctgctgggaacagatgtac

SEQ ID NO: 407712 - DNA, 55 bp, Artificial
  Synthetic oligonucleotide
gcagtgtgtcagcatgaaagatggtaactatgtttatccgtgttgctgcacaaca

SEQ ID NO: 407713 - DNA, 55 bp, Artificial
  Synthetic oligonucleotide
gcagtgtgtgtggccccgtgtattgtttcactcccagccctgtcgtggtcggaac

SEQ ID NO: 407714 - DNA, 55 bp, Artificial
  Synthetic oligonucleotide
gcagtgtgttaagccctttaaaattgggaacttcactgatggagactacttggcc

SEQ ID NO: 407715 - DNA, 60 bp, Artificial
  Synthetic oligonucleotide
gcagtgttagcgctggccgtgcactgtatgtccctccttatgacttgctccttcatgagt

SEQ ID NO: 407716 - DNA, 51 bp, Artificial
  Synthetic oligonucleotide
gcagtgttctctggctcggtgtaccagttgatcggtccactgaaataccaa

SEQ ID NO: 407717 - DNA, 54 bp, Artificial
  Synthetic oligonucleotide
gcagtgtttagctttatgtacaagtgtccgttagatgacaatggggacccagtg

SEQ ID NO: 407718 - DNA, 60 bp, Artificial
  Synthetic oligonucleotide
gcagtgtttgatgccttcctctaagctgttgaagtcgattggtgggatgatcccctggtg

SEQ ID NO: 407719 - DNA, 56 bp, Artificial
  Synthetic oligonucleotide
gcagttaaccctagcctcttagaaacaccagaagggtgtcaacaaatactggaaca

SEQ ID NO: 407720 - DNA, 60 bp, Artificial
  Synthetic oligonucleotide
gcagttaaggatggtcaagatgtgataaaacatgtcccagtggaaggtggcttgtacgta

SEQ ID NO: 407721 - DNA, 60 bp, Artificial
  Synthetic oligonucleotide
gcagttaataagaggaattgctcgattgcactcggccatttagacgagctagaaatatct

SEQ ID NO: 407722 - DNA, 60 bp, Artificial
  Synthetic oligonucleotide
gcagttacataaaccagtgattgattcggaccatgtggtcttcaatgagagatggttgat

SEQ ID NO: 407723 - DNA, 60 bp, Artificial
  Synthetic oligonucleotide
gcagttacattcgcatcagcaatcactaacgccaccatcaacaaaccaacatccaccgga

SEQ ID NO: 407724 - DNA, 55 bp, Artificial
  Synthetic oligonucleotide
gcagttacgggattgtagattatccgccgtcagttgtgagtactgccgtaaacat

SEQ ID NO: 407725 - DNA, 56 bp, Artificial
  Synthetic oligonucleotide
gcagttagaattcaaaaattggctgttgcagggttgtcccccactgttgtgtttaa

SEQ ID NO: 407726 - DNA, 60 bp, Artificial
  Synthetic oligonucleotide
gcagttagaggtgacctgaatttcgttaatagggcaaatcagcgattgaatcccatgcat

SEQ ID NO: 407727 - DNA, 59 bp, Artificial
  Synthetic oligonucleotide
gcagttagatctaagtgaccaagaagacgagggggaggatggaggctctgaaccagcgt

SEQ ID NO: 407728 - DNA, 55 bp, Artificial
  Synthetic oligonucleotide
gcagttagatgaatcaaattacataagggaagaggacctccagtgtggaacatgg

SEQ ID NO: 407729 - DNA, 60 bp, Artificial
  Synthetic oligonucleotide
gcagttagcatcatagcaatcctgaaaggcattgcaaatgtttggaggagcgggcttcta

SEQ ID NO: 407730 - DNA, 60 bp, Artificial
  Synthetic oligonucleotide
gcagttaggttcgtagatccactcacaggggcgacgctagatgataacccattcacggac

SEQ ID NO: 407731 - DNA, 55 bp, Artificial
  Synthetic oligonucleotide
gcagttagtacatgtgctacaagacaagtgtctatacgtaatgaatcgcacagaa

SEQ ID NO: 407732 - DNA, 55 bp, Artificial
  Synthetic oligonucleotide
gcagttatacaggttggtgggccaaaatgtgcttgacataacagctgatccaacg

SEQ ID NO: 407733 - DNA, 55 bp, Artificial
  Synthetic oligonucleotide
gcagttatcataggaacattatcagaattggcacgaaaggtttcaacctcgcgag

SEQ ID NO: 407734 - DNA, 55 bp, Artificial
  Synthetic oligonucleotide
gcagttatggatacgctccttgacacctctttctgaagcgggcttacagctgatg

SEQ ID NO: 407735 - DNA, 55 bp, Artificial
  Synthetic oligonucleotide
gcagttattaacagaagcacagtctcttccctcagtacatacatggcttgtctta

SEQ ID NO: 407736 - DNA, 51 bp, Artificial
  Synthetic oligonucleotide
gcagttattcaagtaggtggttcaaatatattggatattacggcagatcca

SEQ ID NO: 407737 - DNA, 55 bp, Artificial
  Synthetic oligonucleotide
gcagttcaagatcctggcttaattgcaaaattcggcgttagagtagctccacccg

SEQ ID NO: 407738 - DNA, 53 bp, Artificial
  Synthetic oligonucleotide
gcagttcaccccttttggacaaaaggtaaagactacgagataaaccttacatc

SEQ ID NO: 407739 - DNA, 55 bp, Artificial
  Synthetic oligonucleotide
gcagttcacccttgtaatgtcttctgtgttttatcaggaccaggtgcatcatgtg

SEQ ID NO: 407740 - DNA, 55 bp, Artificial
  Synthetic oligonucleotide
gcagttcagggacaccatagtggaacaacaatacgggtccggaaccagtcagggg

SEQ ID NO: 407741 - DNA, 55 bp, Artificial
  Synthetic oligonucleotide
gcagttcatgagcaaaacaatccagcacaatggagtgtactatccagccagtatc

SEQ ID NO: 407742 - DNA, 55 bp, Artificial
  Synthetic oligonucleotide
gcagttccagacgcaaccatttcaagcgggaagagttatgttggggtcgtttccg

SEQ ID NO: 407743 - DNA, 55 bp, Artificial
  Synthetic oligonucleotide
gcagttccattggtgttaagtcccgacatgtacgacatttccagtaaagctctgt

SEQ ID NO: 407744 - DNA, 56 bp, Artificial
  Synthetic oligonucleotide
gcagttcccctctcttttactagctggacaatcctttttgggtcaaatccctgata

SEQ ID NO: 407745 - DNA, 54 bp, Artificial
  Synthetic oligonucleotide
gcagttcccggcgtcatttttcgacacgcgcggcggtgtgtacccctgggaggg

SEQ ID NO: 407746 - DNA, 58 bp, Artificial
  Synthetic oligonucleotide
gcagttcctctccctcaaagattaccgaaagcggataagcaactagaacaatcaccca

SEQ ID NO: 407747 - DNA, 55 bp, Artificial
  Synthetic oligonucleotide
gcagttcgagccacgaccatccacgagcttctcgtgcgcatgaagcgtgctgagc

SEQ ID NO: 407748 - DNA, 60 bp, Artificial
  Synthetic oligonucleotide
gcagttcgaggcgatttgaactttgtcaacagggcaaaccagcgactgaatcccatgcac

SEQ ID NO: 407749 - DNA, 55 bp, Artificial
  Synthetic oligonucleotide
gcagttcgcgatgtgattatagcaaccggtgtcgcaattggtggtgcatggatgc

SEQ ID NO: 407750 - DNA, 55 bp, Artificial
  Synthetic oligonucleotide
gcagttcgcggggttcagtccccactgatgcggtcacggtgtctcctgttgcgtt

SEQ ID NO: 407751 - DNA, 55 bp, Artificial
  Synthetic oligonucleotide
gcagttcgcgtaaatccggtgggatatcagggtcattaatgcggcgctgtagcgt

SEQ ID NO: 407752 - DNA, 60 bp, Artificial
  Synthetic oligonucleotide
gcagttcgtaggatggttatgtaagccggaacacagactcatacactactggtttacaca

SEQ ID NO: 407753 - DNA, 60 bp, Artificial
  Synthetic oligonucleotide
gcagttcgttagcagtgttgtaaagtatcaggtcttctttgtagaagcgcatataaaatg

SEQ ID NO: 407754 - DNA, 54 bp, Artificial
  Synthetic oligonucleotide
gcagttcgttctctatctctgagtccgcatctgactgggccgttcctattgtgc

SEQ ID NO: 407755 - DNA, 56 bp, Artificial
  Synthetic oligonucleotide
gcagttgaaatctcttaaagaatcagaatatgggaaagaaccatggactatgcaag

SEQ ID NO: 407756 - DNA, 55 bp, Artificial
  Synthetic oligonucleotide
gcagttgaccctgacgaagcgaaacttgccgtgaacgcacgtggagccgaccacc

SEQ ID NO: 407757 - DNA, 59 bp, Artificial
  Synthetic oligonucleotide
gcagttgacttttgctggcctaataaacctgagtagtgttccaacaaaccgcatgatac

SEQ ID NO: 407758 - DNA, 58 bp, Artificial
  Synthetic oligonucleotide
gcagttgagacacatgaatggtattcgtgcacaacaagatgtgagcagctcgcccgat

SEQ ID NO: 407759 - DNA, 60 bp, Artificial
  Synthetic oligonucleotide
gcagttgagctcagtgtcatcgtttgaaagattcgaaatattccccaagacaagttcgtg

SEQ ID NO: 407760 - DNA, 55 bp, Artificial
  Synthetic oligonucleotide
gcagttgatcccaccacatcctcctttacaactgctctgaatagagcgcgcaccc

SEQ ID NO: 407761 - DNA, 55 bp, Artificial
  Synthetic oligonucleotide
gcagttgatcgagatataataggaacaaccacacggcagatcaactcgcctcctg

SEQ ID NO: 407762 - DNA, 55 bp, Artificial
  Synthetic oligonucleotide
gcagttgatcgatgtgtaatacgaacaaccacactgtagatcaactcgcctcctg

SEQ ID NO: 407763 - DNA, 59 bp, Artificial
  Synthetic oligonucleotide
gcagttgatttacgactgcccgttacaaaagacattgcgcgatttttcctcgcgcgaca

SEQ ID NO: 407764 - DNA, 60 bp, Artificial
  Synthetic oligonucleotide
gcagttgcaaacctatttccgcaagcaccaccatttatatttcatgctacagttggactc

SEQ ID NO: 407765 - DNA, 55 bp, Artificial
  Synthetic oligonucleotide
gcagttgcaccctatgggtatagtgaactcagcctgcttcgagtcaccttcgtgt

SEQ ID NO: 407766 - DNA, 55 bp, Artificial
  Synthetic oligonucleotide
gcagttgcattgaacgggaatagtgaactccgcctgcttggagtccccatcgttc

SEQ ID NO: 407767 - DNA, 55 bp, Artificial
  Synthetic oligonucleotide
gcagttgcatttgattggaattgtgaattctgcttgtttcgtgtctccttccgtc

SEQ ID NO: 407768 - DNA, 55 bp, Artificial
  Synthetic oligonucleotide
gcagttgcattttatcggaatcgtgaactcagcttgtttggtgtctccctctgtc

SEQ ID NO: 407769 - DNA, 55 bp, Artificial
  Synthetic oligonucleotide
gcagttggaattatggaaattcagatcatcctcatggtcaatggattagagatgc

SEQ ID NO: 407770 - DNA, 55 bp, Artificial
  Synthetic oligonucleotide
gcagttggaggaatcctgatgatgctggttagcgtggctgggagggtggatggtc

SEQ ID NO: 407771 - DNA, 55 bp, Artificial
  Synthetic oligonucleotide
gcagttggaggatggcacaacacagagagtactcagataatcatgataataattg

SEQ ID NO: 407772 - DNA, 60 bp, Artificial
  Synthetic oligonucleotide
gcagttggcacatcaatcgcacggccttgaactgtaatgcgagcctcgacactggttggt

SEQ ID NO: 407773 - DNA, 59 bp, Artificial
  Synthetic oligonucleotide
gcagttggcatggtcacactatacctaggagtcatggttcaagcggactcgggatgtgt

SEQ ID NO: 407774 - DNA, 55 bp, Artificial
  Synthetic oligonucleotide
gcagttggctcagggaaatcaacaggtttaccacatcatctctcgaagaagggca

SEQ ID NO: 407775 - DNA, 60 bp, Artificial
  Synthetic oligonucleotide
gcagttggtgaccagattattcattggcgttatgaggttaaagcatcggcggagacgacc

SEQ ID NO: 407776 - DNA, 55 bp, Artificial
  Synthetic oligonucleotide
gcagttggtggtactcaagaacacacaaccaatttcactagttagagatggacaa

SEQ ID NO: 407777 - DNA, 59 bp, Artificial
  Synthetic oligonucleotide
gcagttgtagataatctagtatcacgtacgacgaaaggtagcgagatatataagaccgg

SEQ ID NO: 407778 - DNA, 59 bp, Artificial
  Synthetic oligonucleotide
gcagttgtctaaagaccttagtaggtgtggtctaacactcatccctgttgtagatggta

SEQ ID NO: 407779 - DNA, 55 bp, Artificial
  Synthetic oligonucleotide
gcagttgtggcccctccttttgttagtattggctctgccccgcagggcttatgct

SEQ ID NO: 407780 - DNA, 55 bp, Artificial
  Synthetic oligonucleotide
gcagtttaccataaccccaactttctgtgggtggggtttgtgcgaacatggtgtg

SEQ ID NO: 407781 - DNA, 52 bp, Artificial
  Synthetic oligonucleotide
gcagtttactttaggtctagattaccaatgccctaatcccagtttgcacaat

SEQ ID NO: 407782 - DNA, 58 bp, Artificial
  Synthetic oligonucleotide
gcagtttagtcaatttttataaggtcatttgcatctcaggtgataacaccaaatgggg

SEQ ID NO: 407783 - DNA, 51 bp, Artificial
  Synthetic oligonucleotide
gcagtttagttggatggcctaatgtattagaaagaataagacgaactgagc

SEQ ID NO: 407784 - DNA, 60 bp, Artificial
  Synthetic oligonucleotide
gcagtttatctccacattattcagcattccaatggaaggaacaaaagccattcttcctac

SEQ ID NO: 407785 - DNA, 52 bp, Artificial
  Synthetic oligonucleotide
gcagtttcataaaggagagatggtagatcttgttgagaataggtctgtggat

SEQ ID NO: 407786 - DNA, 53 bp, Artificial
  Synthetic oligonucleotide
gcagtttcgatcccttttataaaaatactattgggctctctgtctgatttacc

SEQ ID NO: 407787 - DNA, 60 bp, Artificial
  Synthetic oligonucleotide
gcagtttctgaaatacggctctatgattgtgctcgctaccgttgtgctggctggcatcgc

SEQ ID NO: 407788 - DNA, 55 bp, Artificial
  Synthetic oligonucleotide
gcagtttctgaacacgcaaatgggcatagtttcgtttgtcgaattgtactacacg

SEQ ID NO: 407789 - DNA, 55 bp, Artificial
  Synthetic oligonucleotide
gcagtttgacaatatcgctgttgctcacacggaccatttatcagtagtatatgcc

SEQ ID NO: 407790 - DNA, 55 bp, Artificial
  Synthetic oligonucleotide
gcagtttgacactgaactggctcggagacacagagctaaagagctgcatccagag

SEQ ID NO: 407791 - DNA, 55 bp, Artificial
  Synthetic oligonucleotide
gcagtttgacagctccctggcaagaagacacatagcaagagagctgcatccggac

SEQ ID NO: 407792 - DNA, 55 bp, Artificial
  Synthetic oligonucleotide
gcagtttgacagtcagctagcactgaaacacagagcccgagagctgcatccggag

SEQ ID NO: 407793 - DNA, 59 bp, Artificial
  Synthetic oligonucleotide
gcagtttgacattcaactagcacgcaaacacatggcccgcgagctacatccggaatatt

SEQ ID NO: 407794 - DNA, 59 bp, Artificial
  Synthetic oligonucleotide
gcagtttgatagttcactgtctccatacttaattaactcaattcttcgattgagacttg

SEQ ID NO: 407795 - DNA, 60 bp, Artificial
  Synthetic oligonucleotide
gcagtttgtgaatcagtgcttgcggatgcaaatgaaacgctgttagcgaatgtgaccgca

SEQ ID NO: 407796 - DNA, 55 bp, Artificial
  Synthetic oligonucleotide
gcagtttgtggagtcagacacaaaggtagggacacgccaccgtctctacagttcc

SEQ ID NO: 407797 - DNA, 58 bp, Artificial
  Synthetic oligonucleotide
gcagtttgttgagatccacggaacccctaacccctcatgtgatcccgagaagttgtgc

SEQ ID NO: 407798 - DNA, 55 bp, Artificial
  Synthetic oligonucleotide
gcagtttgtttgggcaaagaattgaggtcaaggagaactttagcatgggagagtt

SEQ ID NO: 407799 - DNA, 55 bp, Artificial
  Synthetic oligonucleotide
gcagttttagcacctaaggcacagctaggaggagcaagagatctgttagtgcaag

SEQ ID NO: 407800 - DNA, 59 bp, Artificial
  Synthetic oligonucleotide
gcataaaacaggctctctatcctctatactgagtaagagtaaaagtttgaggtacacta

SEQ ID NO: 407801 - DNA, 55 bp, Artificial
  Synthetic oligonucleotide
gcataaaagaacgatccaggtcgctgtccccgcatatagcgggaggtaggggtcc

SEQ ID NO: 407802 - DNA, 55 bp, Artificial
  Synthetic oligonucleotide
gcataaacatcgatccccgcaaccggtgtaatacaatccggcgtcggccaactct

SEQ ID NO: 407803 - DNA, 55 bp, Artificial
  Synthetic oligonucleotide
gcataaactactaaggtcatgagcgactacggtagggggtaaacttttgagattg

SEQ ID NO: 407804 - DNA, 55 bp, Artificial
  Synthetic oligonucleotide
gcataaactttgataagactactccatctcctgtaaacgacataagattcctcgg

SEQ ID NO: 407805 - DNA, 59 bp, Artificial
  Synthetic oligonucleotide
gcataaagaaatttattgtcactatgacgtgtgcactcaagggttgtgtgaatgaagtc

SEQ ID NO: 407806 - DNA, 59 bp, Artificial
  Synthetic oligonucleotide
gcataaagcgttagtacagctaaaatgtccaccattactattaacttccaacatagatg

SEQ ID NO: 407807 - DNA, 54 bp, Artificial
  Synthetic oligonucleotide
gcataaatgatttactgcaggctgtcgattctcaggaggttagggactactgtg

SEQ ID NO: 407808 - DNA, 60 bp, Artificial
  Synthetic oligonucleotide
gcataaatgggagaagtatagcattcttgagataggagacatggttctaagaactgccat

SEQ ID NO: 407809 - DNA, 60 bp, Artificial
  Synthetic oligonucleotide
gcataaattcgcaagcggctaacgattgctttaagactttaatcgcagctatgttaagtc

SEQ ID NO: 407810 - DNA, 50 bp, Artificial
  Synthetic oligonucleotide
gcataacaaaatgaggactgctctcataatgactctccatagcgagattg

SEQ ID NO: 407811 - DNA, 60 bp, Artificial
  Synthetic oligonucleotide
gcataacagtcttgaaccacatgggtagcattgctttcagagtagttaatgatcatgatt

SEQ ID NO: 407812 - DNA, 60 bp, Artificial
  Synthetic oligonucleotide
gcataacatggtcgcactctttgtaatcacaatgtacgctctgattggggcgtacttcct

SEQ ID NO: 407813 - DNA, 60 bp, Artificial
  Synthetic oligonucleotide
gcataacccactcgcgatgggggctaagtcaacatcgatagctggccatccggagcgaga

SEQ ID NO: 407814 - DNA, 55 bp, Artificial
  Synthetic oligonucleotide
gcataacgcagtaccggcttacggactacggctgtcacacttcggctgggttcgg

SEQ ID NO: 407815 - DNA, 59 bp, Artificial
  Synthetic oligonucleotide
gcataactacacaccgggaccgggggtcagatatccactgacctttggatggtgcttca

SEQ ID NO: 407816 - DNA, 57 bp, Artificial
  Synthetic oligonucleotide
gcataactgtcaagagaagtgtttgtaagagtcagttcaattccccaggtggttcct

SEQ ID NO: 407817 - DNA, 55 bp, Artificial
  Synthetic oligonucleotide
gcataacttgcggatgtgtcttaaagatggtatgcctccggaaccgcaatgtcga

SEQ ID NO: 407818 - DNA, 60 bp, Artificial
  Synthetic oligonucleotide
gcataagaataggaccaggacaaacattctatgcaacaggtgacataataggaaacataa

SEQ ID NO: 407819 - DNA, 55 bp, Artificial
  Synthetic oligonucleotide
gcataagaccttgtttctgggttgagttaataagagggcggcccaaagagagcac

SEQ ID NO: 407820 - DNA, 53 bp, Artificial
  Synthetic oligonucleotide
gcataagatcgaggactgtaattcaaggcctccccacagtactaacacctggt

SEQ ID NO: 407821 - DNA, 55 bp, Artificial
  Synthetic oligonucleotide
gcataagcacagtgtggtctcactcagcgcggggcgagtctccctcacatttcgc

SEQ ID NO: 407822 - DNA, 60 bp, Artificial
  Synthetic oligonucleotide
gcataagctgtgcccacggctgaaggcaagtgatccgttatccgcttgggtacttcgaga

SEQ ID NO: 407823 - DNA, 58 bp, Artificial
  Synthetic oligonucleotide
gcataaggcgaatgagtgccagcaactttggggcatttctaacaggcggacggtctga

SEQ ID NO: 407824 - DNA, 55 bp, Artificial
  Synthetic oligonucleotide
gcataagtggatgggaagttggttaatgtctgataatcatgatgccagtcaaggg

SEQ ID NO: 407825 - DNA, 55 bp, Artificial
  Synthetic oligonucleotide
gcataagtgtaactattcctgattggattcctatagttggaggtaaacacttcgg

SEQ ID NO: 407826 - DNA, 60 bp, Artificial
  Synthetic oligonucleotide
gcataatagaccaattagtggatggctataatgaagttgccaaatggatattgaaagatg

SEQ ID NO: 407827 - DNA, 60 bp, Artificial
  Synthetic oligonucleotide
gcataataggtgtagacaaagagactgcacaagtaagattgcaaactgatacaacaaatc

SEQ ID NO: 407828 - DNA, 60 bp, Artificial
  Synthetic oligonucleotide
gcataatcaatgacaaaccctttcaaaacgtaaacaagatcacatatggagcatgtccta

SEQ ID NO: 407829 - DNA, 59 bp, Artificial
  Synthetic oligonucleotide
gcataatccattcgtcggacccatttcggataatcctctgaaacgtgccctacaatgga

SEQ ID NO: 407830 - DNA, 55 bp, Artificial
  Synthetic oligonucleotide
gcataatccctcagagtacacaattggcagaaagtctctgaggcgagcgacaccg

SEQ ID NO: 407831 - DNA, 55 bp, Artificial
  Synthetic oligonucleotide
gcataatcggaatgggagacagagcagtcgagcctaacattagggttcgtgtgcc

SEQ ID NO: 407832 - DNA, 57 bp, Artificial
  Synthetic oligonucleotide
gcataatctatgaggccgatcatcacatcttgcacctcccgggatgcgttccgtgtg

SEQ ID NO: 407833 - DNA, 60 bp, Artificial
  Synthetic oligonucleotide
gcataatgcatactggcttaaatggtggaatgagcatacatataggcagcaggagacggt

SEQ ID NO: 407834 - DNA, 60 bp, Artificial
  Synthetic oligonucleotide
gcataatggacgtgatgcatacaaaggatttgtggagaagatacgcagcgttagcgctgg

SEQ ID NO: 407835 - DNA, 55 bp, Artificial
  Synthetic oligonucleotide
gcataatgtgtagtcaaatgggcatgaaacccgagacagtgcaggcagcaaaggg

SEQ ID NO: 407836 - DNA, 57 bp, Artificial
  Synthetic oligonucleotide
gcataattatactgattatgtcctcgttgatagagactatcatctgtcatttgcttc

SEQ ID NO: 407837 - DNA, 55 bp, Artificial
  Synthetic oligonucleotide
gcataattgcatgttaattggttataatccccacccaacaatttgactttaattt

SEQ ID NO: 407838 - DNA, 55 bp, Artificial
  Synthetic oligonucleotide
gcatacaaaggatttgtggagaagatacgcagcgttagcgctggtcgcatgctgt

SEQ ID NO: 407839 - DNA, 60 bp, Artificial
  Synthetic oligonucleotide
gcatacaacgcgagactagccttccgatctgacttggcgtgatccgtgacatgcgtagtg

SEQ ID NO: 407840 - DNA, 60 bp, Artificial
  Synthetic oligonucleotide
gcatacaagattgttaagaaaggagattcagcaatcatgaaaagcgaactgaaatatggt

SEQ ID NO: 407841 - DNA, 55 bp, Artificial
  Synthetic oligonucleotide
gcatacaagccacaaagacctatactatagatcaagtattagtaggactacatgg

SEQ ID NO: 407842 - DNA, 60 bp, Artificial
  Synthetic oligonucleotide
gcatacaatagatcttgcagactcagaaatgaacaaactttacgaacgcgtcagaaaaca

SEQ ID NO: 407843 - DNA, 55 bp, Artificial
  Synthetic oligonucleotide
gcatacacaaaaggtaccagcacttagtgctagcgaaactggggccacacttccc

SEQ ID NO: 407844 - DNA, 54 bp, Artificial
  Synthetic oligonucleotide
gcatacacacccccagggggccctttgcctaaagacagagccacagctatgctg

SEQ ID NO: 407845 - DNA, 57 bp, Artificial
  Synthetic oligonucleotide
gcatacacccctccaggggggcccaaaccagctaaccgtgagacagccatgctaggc

SEQ ID NO: 407846 - DNA, 55 bp, Artificial
  Synthetic oligonucleotide
gcatacacgagttgcaagcattggaagtataagtctcgttactaagagtccacac

SEQ ID NO: 407847 - DNA, 51 bp, Artificial
  Synthetic oligonucleotide
gcatacagaaataagaatacctcagtatatagctcacggtggaaatacatc

SEQ ID NO: 407848 - DNA, 60 bp, Artificial
  Synthetic oligonucleotide
gcatacagaagaccgggcaagtacatgaaagttgcctgtattctttattatgcatgacgt

SEQ ID NO: 407849 - DNA, 56 bp, Artificial
  Synthetic oligonucleotide
gcatacagcataaataaagatcccgcatggtatacaaccctaagactgcagcaaat

SEQ ID NO: 407850 - DNA, 55 bp, Artificial
  Synthetic oligonucleotide
gcatacaggggaataatgacaatgctacagcgacggtgtattacaacaggagact

SEQ ID NO: 407851 - DNA, 60 bp, Artificial
  Synthetic oligonucleotide
gcatacagttaggccgtgaacagtcctgtaaaactatagactctaatgattgtcttgtca

SEQ ID NO: 407852 - DNA, 55 bp, Artificial
  Synthetic oligonucleotide
gcatacatatgatagaccttgatggtttccttaatctttacacgaacccgtacct

SEQ ID NO: 407853 - DNA, 60 bp, Artificial
  Synthetic oligonucleotide
gcatacatgaagtcacctgtctatgaggactcaccctatgagcccgcagttctttctatc

SEQ ID NO: 407854 - DNA, 55 bp, Artificial
  Synthetic oligonucleotide
gcatacattaaggacctatttaaatactcatcagaaataccaattggggaggtcg

SEQ ID NO: 407855 - DNA, 55 bp, Artificial
  Synthetic oligonucleotide
gcatacattgtgccaatgttccacacctgggagtgcctgacagtttgttggctgc

SEQ ID NO: 407856 - DNA, 55 bp, Artificial
  Synthetic oligonucleotide
gcatacatttgacgagttgttcggagcaatcattcacagtcatggcaatctcagc

SEQ ID NO: 407857 - DNA, 55 bp, Artificial
  Synthetic oligonucleotide
gcataccaccaacagacccgtggcttactggggacaatcgtcactagcctcacgg

SEQ ID NO: 407858 - DNA, 55 bp, Artificial
  Synthetic oligonucleotide
gcataccagatgcactcacctgcccaatcggcctattcatgagagcgacatttcc

SEQ ID NO: 407859 - DNA, 55 bp, Artificial
  Synthetic oligonucleotide
gcataccagccttgggtggaatgagcgttggctataacattcagacaaaagataa

SEQ ID NO: 407860 - DNA, 55 bp, Artificial
  Synthetic oligonucleotide
gcataccataatttaaaggatgtaagatatcaggcattacaggcagttgggaatg

SEQ ID NO: 407861 - DNA, 60 bp, Artificial
  Synthetic oligonucleotide
gcataccatggacgcatgcctctatggtcgagctgcaccacattggcgagtaccgcaaga

SEQ ID NO: 407862 - DNA, 57 bp, Artificial
  Synthetic oligonucleotide
gcatacccaacaataacaaggagttacaataacaccaatcaagaagatcttttggta

SEQ ID NO: 407863 - DNA, 55 bp, Artificial
  Synthetic oligonucleotide
gcatacccattaaacccgtcaggaagtgttgtgtcatctgtcatccttgattcac

SEQ ID NO: 407864 - DNA, 54 bp, Artificial
  Synthetic oligonucleotide
gcatacccggaacttcttgacccaaaccaacaggtcctatcctacttcaagaac

SEQ ID NO: 407865 - DNA, 60 bp, Artificial
  Synthetic oligonucleotide
gcataccctcttcagaatttgacaaaggtgaacaacggtgattatgcaagactttacata

SEQ ID NO: 407866 - DNA, 55 bp, Artificial
  Synthetic oligonucleotide
gcataccgtcccagtatgtattcttgagctgttgggcatcgagattgcggactat

SEQ ID NO: 407867 - DNA, 55 bp, Artificial
  Synthetic oligonucleotide
gcataccgttccggtatgtattcttgaaatgttgggcattgagattgcggactac

SEQ ID NO: 407868 - DNA, 59 bp, Artificial
  Synthetic oligonucleotide
gcatacctatgctaaccattcaagctagggagaacgacgaccaaatcatattgggttcc

SEQ ID NO: 407869 - DNA, 55 bp, Artificial
  Synthetic oligonucleotide
gcatacctggtttggcaccacatcagggatagcaagaactggtagtttagagtcc

SEQ ID NO: 407870 - DNA, 54 bp, Artificial
  Synthetic oligonucleotide
gcatacctttcagtcccgattgtcaatacactgccatcagcgatgtcgactatt

SEQ ID NO: 407871 - DNA, 55 bp, Artificial
  Synthetic oligonucleotide
gcataccttttgggaagagaaaaggcattgagggaatcacaccttgcggagattg

SEQ ID NO: 407872 - DNA, 60 bp, Artificial
  Synthetic oligonucleotide
gcatacgaaaggcaaaatcactgtgcgtcgagaaaatctcaagagttgggcagctgcagt

SEQ ID NO: 407873 - DNA, 55 bp, Artificial
  Synthetic oligonucleotide
gcatacgataatgaccacacagaggaaagcgatattgcataccactatgcactcc

SEQ ID NO: 407874 - DNA, 55 bp, Artificial
  Synthetic oligonucleotide
gcatacgctatcgcaaaagcagttaaagctaaagggcatacagttgcttttatgc

SEQ ID NO: 407875 - DNA, 59 bp, Artificial
  Synthetic oligonucleotide
gcatacgctgtcggcaacaccattctaggcggagtttggggtggtttagaaggcatggc

SEQ ID NO: 407876 - DNA, 51 bp, Artificial
  Synthetic oligonucleotide
gcatacggaatataggaggtcgctgagtagtaagcttgcagacttggctgt

SEQ ID NO: 407877 - DNA, 58 bp, Artificial
  Synthetic oligonucleotide
gcatacggagatgtttcaaagtggacgatacgacagttacgaggtcatgggttcattt

SEQ ID NO: 407878 - DNA, 60 bp, Artificial
  Synthetic oligonucleotide
gcatacgtatatcaggggatcaagtccggtaatccatccatactccacataaatgcttat

SEQ ID NO: 407879 - DNA, 60 bp, Artificial
  Synthetic oligonucleotide
gcatactacgcttaacaggagcataagccataataaacgcatcagctaagtttggtgact

SEQ ID NO: 407880 - DNA, 55 bp, Artificial
  Synthetic oligonucleotide
gcatactagatttgacatacctgaaggagtagcccaagacagcgctatggacgcc

SEQ ID NO: 407881 - DNA, 54 bp, Artificial
  Synthetic oligonucleotide
gcatactataggcgacgcaacgtccttgttaaggtcgagagagatcctgatgtc

SEQ ID NO: 407882 - DNA, 57 bp, Artificial
  Synthetic oligonucleotide
gcatactatcattttaagtacaaacaaaaagtaacgcctgcaatagacgaagcgtta

SEQ ID NO: 407883 - DNA, 55 bp, Artificial
  Synthetic oligonucleotide
gcatactccaggaactgcactctcggtcagacctcatgattcaggagcatcagcc

SEQ ID NO: 407884 - DNA, 55 bp, Artificial
  Synthetic oligonucleotide
gcatactctctggaaggcgggcattctatataggagggagacaacacgtagcgcc

SEQ ID NO: 407885 - DNA, 60 bp, Artificial
  Synthetic oligonucleotide
gcatactgagggttttggattgccagtactagagtcaatggtagctggtactgtaccaat

SEQ ID NO: 407886 - DNA, 60 bp, Artificial
  Synthetic oligonucleotide
gcatactgccgccagagtcacccaggggcgccgggttgtcattgacgaggctccatccct

SEQ ID NO: 407887 - DNA, 60 bp, Artificial
  Synthetic oligonucleotide
gcatacttactgacagtcagacagcgaccaaaagaattcgaatggccatcaattagtgtc

SEQ ID NO: 407888 - DNA, 56 bp, Artificial
  Synthetic oligonucleotide
gcatacttagatgtcaacacggtgtcgtagggatagtctctaccgggggaaacggc

SEQ ID NO: 407889 - DNA, 60 bp, Artificial
  Synthetic oligonucleotide
gcatacttaggccgcgagccatacccactatggtcgaactagagacggatgccgctctgc

SEQ ID NO: 407890 - DNA, 55 bp, Artificial
  Synthetic oligonucleotide
gcatacttagtagcctatcaggccacagtgtgcgccagagccaaagctcctcccc

SEQ ID NO: 407891 - DNA, 55 bp, Artificial
  Synthetic oligonucleotide
gcatacttgcattcatcctaaccgttattaatggacacgcgtcagccgttaagga

SEQ ID NO: 407892 - DNA, 55 bp, Artificial
  Synthetic oligonucleotide
gcatacttgcatttatcttgtccgctcttagtggacacgcgtcagccatcaagtg

SEQ ID NO: 407893 - DNA, 60 bp, Artificial
  Synthetic oligonucleotide
gcatactttctgctaaaattagcaggaagatggccagtaaaagtagtacacacagacaat

SEQ ID NO: 407894 - DNA, 55 bp, Artificial
  Synthetic oligonucleotide
gcatactttgcttggggttcgtaacatgtgatcatgtgtctactgggatgaaata

SEQ ID NO: 407895 - DNA, 55 bp, Artificial
  Synthetic oligonucleotide
gcatactttgtcaaagacaaggtctctcctgttctgaaagtcgatcttacacaac

SEQ ID NO: 407896 - DNA, 57 bp, Artificial
  Synthetic oligonucleotide
gcatagaattttaccaaatgaacatagactttctaaggcgtcccgagatttatgtac

SEQ ID NO: 407897 - DNA, 60 bp, Artificial
  Synthetic oligonucleotide
gcatagacccaaagaacgtagataattaaaatctgctgccactttaacacagagtagaga

SEQ ID NO: 407898 - DNA, 60 bp, Artificial
  Synthetic oligonucleotide
gcatagagatcggtatcaggtgttgaggaaatggcatgcaactgtcactggtggacaata

SEQ ID NO: 407899 - DNA, 55 bp, Artificial
  Synthetic oligonucleotide
gcatagagtctgtcgaaaatggtacctatgactatcccaaataccaggatgagag

SEQ ID NO: 407900 - DNA, 52 bp, Artificial
  Synthetic oligonucleotide
gcatagatcccgatttatcgggtggtgcgaccattgtttattccgaagatga

SEQ ID NO: 407901 - DNA, 55 bp, Artificial
  Synthetic oligonucleotide
gcatagattcaatcaggaatgggacctatgatcatgacatatatagggatgaagc

SEQ ID NO: 407902 - DNA, 51 bp, Artificial
  Synthetic oligonucleotide
gcatagattcagtgggactagacgacactaaagcccacaacccaatggcat

SEQ ID NO: 407903 - DNA, 55 bp, Artificial
  Synthetic oligonucleotide
gcatagcatggtccagctcaagttgccacgatggaagagcatggttgcatgtttg

SEQ ID NO: 407904 - DNA, 57 bp, Artificial
  Synthetic oligonucleotide
gcatagccccaattgggcgccgttcttgcgctaccgtgtcaaaccgaaacaatcgta

SEQ ID NO: 407905 - DNA, 57 bp, Artificial
  Synthetic oligonucleotide
gcatagcccctataatgttctcaaacaaaatggcaaggttagggaaaggatatatgt

SEQ ID NO: 407906 - DNA, 55 bp, Artificial
  Synthetic oligonucleotide
gcatagccgaagacccgcgttactatgcgggcacagataacatgacgcaactcgc

SEQ ID NO: 407907 - DNA, 55 bp, Artificial
  Synthetic oligonucleotide
gcatagcgcattgctgaaagaaccaagggccagaactcttctgtcgactgggtac

SEQ ID NO: 407908 - DNA, 55 bp, Artificial
  Synthetic oligonucleotide
gcatagcggccagagggtacatctcaacccgagtgggtatgggtgaagcagccgc

SEQ ID NO: 407909 - DNA, 55 bp, Artificial
  Synthetic oligonucleotide
gcatagctccgaggacaatgctgctcgcgtagcagccagtttagccaaagtcacg

SEQ ID NO: 407910 - DNA, 55 bp, Artificial
  Synthetic oligonucleotide
gcataggaaaattccgatgggcgaggaccaagatgtggatgtctcattgaaatgg

SEQ ID NO: 407911 - DNA, 52 bp, Artificial
  Synthetic oligonucleotide
gcataggaaatgaaaccaaggaggggtgtaatggcactatcatacttccatg

SEQ ID NO: 407912 - DNA, 55 bp, Artificial
  Synthetic oligonucleotide
gcataggacatatgcaggcacgatggccttaatagtctttcgtgatacacgatgg

SEQ ID NO: 407913 - DNA, 60 bp, Artificial
  Synthetic oligonucleotide
gcataggacgtggacgtctgggttgtgcgcgagttgtggcgaatggttcgtggcaggagt

SEQ ID NO: 407914 - DNA, 55 bp, Artificial
  Synthetic oligonucleotide
gcataggatcaatcagaaatggaacttatgaccatgatgtatacagagatgaggc

SEQ ID NO: 407915 - DNA, 53 bp, Artificial
  Synthetic oligonucleotide
gcataggcactgaaaactactttactacaccagacggactatggggggaccct

SEQ ID NO: 407916 - DNA, 60 bp, Artificial
  Synthetic oligonucleotide
gcataggcattcacaccttaggagtagaaggtacccaatacagatgttacacagctaaca

SEQ ID NO: 407917 - DNA, 56 bp, Artificial
  Synthetic oligonucleotide
gcataggcctgggtaagatactggtggacgttttggccgggtacggcgcaggcatt

SEQ ID NO: 407918 - DNA, 60 bp, Artificial
  Synthetic oligonucleotide
gcataggccttatgttcgaccaacaacaaaatgtgcgggtgaaagagcgtacacaagata

SEQ ID NO: 407919 - DNA, 60 bp, Artificial
  Synthetic oligonucleotide
gcataggcgcggtggtgacgttataggctatccatcaagagctgtttcgagtcttgtatc

SEQ ID NO: 407920 - DNA, 59 bp, Artificial
  Synthetic oligonucleotide
gcatagggggggcatttagcactgtccaacttactttgagttctataattgatctcaaa

SEQ ID NO: 407921 - DNA, 55 bp, Artificial
  Synthetic oligonucleotide
gcatagggtactacaataatttgcaacagcagacactctatgtcttcctggagtc

SEQ ID NO: 407922 - DNA, 59 bp, Artificial
  Synthetic oligonucleotide
gcataggttgagggatcgtagtactcaagtgaaatactcaggtacatcccttgtccgag

SEQ ID NO: 407923 - DNA, 53 bp, Artificial
  Synthetic oligonucleotide
gcatagtaaaactcggtgggctaggttataaatggtcagaaatttcgtttaaa

SEQ ID NO: 407924 - DNA, 60 bp, Artificial
  Synthetic oligonucleotide
gcatagtagaatttctgatacatattaattcgcaaaatataactgaagaggttagagaat

SEQ ID NO: 407925 - DNA, 60 bp, Artificial
  Synthetic oligonucleotide
gcatagtagctctctgtggatccaaaaagcgattaggatcatggtcctggcatgatggtg

SEQ ID NO: 407926 - DNA, 60 bp, Artificial
  Synthetic oligonucleotide
gcatagtatcctgcttcttgcgactcgtgagattacgtatgcgtttcactggtaaccccc

SEQ ID NO: 407927 - DNA, 55 bp, Artificial
  Synthetic oligonucleotide
gcatagtcaccaacagtacactgttcgatattttaggacgcggcggtacaaatgg

SEQ ID NO: 407928 - DNA, 55 bp, Artificial
  Synthetic oligonucleotide
gcatagtcagatcacttggtctggtttgtttaaccccttgactgggaattctctc

SEQ ID NO: 407929 - DNA, 55 bp, Artificial
  Synthetic oligonucleotide
gcatagtcaggatgacaaagcatgtataaccacaagttccgcttctagctgctga

SEQ ID NO: 407930 - DNA, 60 bp, Artificial
  Synthetic oligonucleotide
gcatagtctcaagtctacacctcagtatcagaggtcactccaattataaggcggtgtcct

SEQ ID NO: 407931 - DNA, 55 bp, Artificial
  Synthetic oligonucleotide
gcatagtgatgagattcatgaggtgtgccatcaatatatgccattgcgtgaccat

SEQ ID NO: 407932 - DNA, 55 bp, Artificial
  Synthetic oligonucleotide
gcatagttaagtacgttttcttggcggggaggtgtgagttgagaaaatatgttat

SEQ ID NO: 407933 - DNA, 55 bp, Artificial
  Synthetic oligonucleotide
gcatagttatatgtgggccacccaatacaggaaagtcactattcagtgtcagctt

SEQ ID NO: 407934 - DNA, 55 bp, Artificial
  Synthetic oligonucleotide
gcatagttgtccaagacctaaagaagactagagagagttacttaaaatgtgtcgt

SEQ ID NO: 407935 - DNA, 60 bp, Artificial
  Synthetic oligonucleotide
gcatagtttctattcgcgcgtgcataccgttgcgtttccgcaaatctcaccacaactcga

SEQ ID NO: 407936 - DNA, 55 bp, Artificial
  Synthetic oligonucleotide
gcatagtttgctatcttgcattcacacgccttccccagcgatcttggcctcttgg

SEQ ID NO: 407937 - DNA, 57 bp, Artificial
  Synthetic oligonucleotide
gcatagtttggccacgtggtaggttcttagaatgtcgcgttcttcaacgctggtatt

SEQ ID NO: 407938 - DNA, 55 bp, Artificial
  Synthetic oligonucleotide
gcatagttttctggtgactcgctcttggtatagcaccggacataccctgagcccg

SEQ ID NO: 407939 - DNA, 50 bp, Artificial
  Synthetic oligonucleotide
gcatataacctgttacgatccgatccgcgagtattacgtgagttcatcaa

SEQ ID NO: 407940 - DNA, 60 bp, Artificial
  Synthetic oligonucleotide
gcatataactatctatcaacaggaaaggccaaagtgtgttgtgttaaattaactgctatg

SEQ ID NO: 407941 - DNA, 60 bp, Artificial
  Synthetic oligonucleotide
gcatataataagagctgcaagaaatgtaattgctgtggcttagcttatcatccatttaca

SEQ ID NO: 407942 - DNA, 57 bp, Artificial
  Synthetic oligonucleotide
gcatataatccgcccgatttcaagtataatttacttaatcgcaattgtcaaacgttc

SEQ ID NO: 407943 - DNA, 55 bp, Artificial
  Synthetic oligonucleotide
gcatataatgcagaattgcttgttctgctggagaaccaaaagacactagacgagc

SEQ ID NO: 407944 - DNA, 60 bp, Artificial
  Synthetic oligonucleotide
gcatatacggctaaaactgcttcattgacgtacggcgtactggctgaagacacttcaaaa

SEQ ID NO: 407945 - DNA, 55 bp, Artificial
  Synthetic oligonucleotide
gcatatactcgtgagcatggtcaaaaggcgtagctaaatttgggttataaccgcc

SEQ ID NO: 407946 - DNA, 57 bp, Artificial
  Synthetic oligonucleotide
gcatatatacccaccccgtggttctgtgaccgtactttggggctatgctacacaggg

SEQ ID NO: 407947 - DNA, 60 bp, Artificial
  Synthetic oligonucleotide
gcatatatgacgtcgaccatcaaacttcagaatcagttggaatcttagctgggatcacgg

SEQ ID NO: 407948 - DNA, 60 bp, Artificial
  Synthetic oligonucleotide
gcatatatgtacggtgtaatttacaataagtcatgcaaaaagtgcaagctatgcggccta

SEQ ID NO: 407949 - DNA, 59 bp, Artificial
  Synthetic oligonucleotide
gcatatcaacaaccattttgagcttaccaactaagaaatctttttccatatatagcttg

SEQ ID NO: 407950 - DNA, 60 bp, Artificial
  Synthetic oligonucleotide
gcatatcacgcactatttggaacacgaagacaaccgccacctaagcaaatagaacttgaa

SEQ ID NO: 407951 - DNA, 60 bp, Artificial
  Synthetic oligonucleotide
gcatatcactcggaaatgttcacgagtatgaagctgtgaaggttatggcaagctttggag

SEQ ID NO: 407952 - DNA, 60 bp, Artificial
  Synthetic oligonucleotide
gcatatcattggctacgcgactctgatgtggtcaccgagaaattatgtcttgctatcccg

SEQ ID NO: 407953 - DNA, 60 bp, Artificial
  Synthetic oligonucleotide
gcatatccaagttctggggctatggggcaattgcgccctatcctcagagtggagggaacc

SEQ ID NO: 407954 - DNA, 55 bp, Artificial
  Synthetic oligonucleotide
gcatatcccatcagacctagcacgtcttgttcccagtgcgggattccaagctgcg

SEQ ID NO: 407955 - DNA, 55 bp, Artificial
  Synthetic oligonucleotide
gcatatcgaggtgacaaccgtgaacacacatgttatacgggattggacgtcaccg

SEQ ID NO: 407956 - DNA, 58 bp, Artificial
  Synthetic oligonucleotide
gcatatcggacgtcacccgtggcaacggtatcactcatcgcgttggtaagcgtttttg

SEQ ID NO: 407957 - DNA, 59 bp, Artificial
  Synthetic oligonucleotide
gcatatcgtgaactcaattggagctgactacactcccaagcaatctcttgcaaggggta

SEQ ID NO: 407958 - DNA, 55 bp, Artificial
  Synthetic oligonucleotide
gcatatcttaagaggtccactgcattttcaaaggcgcgcgatcttaggtgcgctt

SEQ ID NO: 407959 - DNA, 55 bp, Artificial
  Synthetic oligonucleotide
gcatatcttacttctcgacgtagaacgtgcgattttgttatgcgtgcggctagtg

SEQ ID NO: 407960 - DNA, 60 bp, Artificial
  Synthetic oligonucleotide
gcatatcttctcagtagaccacaattgtgaaaccattgctaaggatatttttggtaccca

SEQ ID NO: 407961 - DNA, 55 bp, Artificial
  Synthetic oligonucleotide
gcatatgagttcgcttacagctacatccataagaaggtcatgcacaatggtcacg

SEQ ID NO: 407962 - DNA, 60 bp, Artificial
  Synthetic oligonucleotide
gcatatgataaagacagatataaaacctgtcgtcactgatacgttgcatttagatagagc

SEQ ID NO: 407963 - DNA, 58 bp, Artificial
  Synthetic oligonucleotide
gcatatgataccggttctgaacaccgggagcggtcacaagagagtaggtacaacgaag

SEQ ID NO: 407964 - DNA, 56 bp, Artificial
  Synthetic oligonucleotide
gcatatgcgaatatacacctattggattctcagaagccccgcttcaaagtccttgg

SEQ ID NO: 407965 - DNA, 55 bp, Artificial
  Synthetic oligonucleotide
gcatatgctggtttaatcagctatttgtcacagtagtagacaacacgcgtaacac

SEQ ID NO: 407966 - DNA, 60 bp, Artificial
  Synthetic oligonucleotide
gcatatggaaagataccatcagacgtgaccacctcgttagagcttgaaatcgcaaggagc

SEQ ID NO: 407967 - DNA, 60 bp, Artificial
  Synthetic oligonucleotide
gcatatggagggtacttcatatgatcgcacgcttagagagcatatgtgccaccgttatga

SEQ ID NO: 407968 - DNA, 60 bp, Artificial
  Synthetic oligonucleotide
gcatatggctcaataaactagcaggagtctataaaagcgtggagacagttcaggaggggg

SEQ ID NO: 407969 - DNA, 60 bp, Artificial
  Synthetic oligonucleotide
gcatatggtgaatggccatcgttcctaaatgacaaagaggccaacccagttgatgcaccc

SEQ ID NO: 407970 - DNA, 52 bp, Artificial
  Synthetic oligonucleotide
gcatatggttggtctaaatggcaccaacggatctgctcttccatgtggtatg

SEQ ID NO: 407971 - DNA, 55 bp, Artificial
  Synthetic oligonucleotide
gcatatgtaatgacacctttgcaagttagtgcaatagtaggactggtagtagcgc

SEQ ID NO: 407972 - DNA, 60 bp, Artificial
  Synthetic oligonucleotide
gcatatgtaatgcagctattagatatattggcaatagtaggactaatagtagcagcctta

SEQ ID NO: 407973 - DNA, 52 bp, Artificial
  Synthetic oligonucleotide
gcatatgtgcgtgaaactggagccacctcttgtgtgcttcatcaaacaaaag

SEQ ID NO: 407974 - DNA, 57 bp, Artificial
  Synthetic oligonucleotide
gcatatgtgtacgatggcaggaagagaagcgtgactagcagccaatacgttagtgaa

SEQ ID NO: 407975 - DNA, 55 bp, Artificial
  Synthetic oligonucleotide
gcatatgtgtgcactagatgctgtggcgtattgcactatggggagatgcatggtg

SEQ ID NO: 407976 - DNA, 55 bp, Artificial
  Synthetic oligonucleotide
gcatatgttaaggacattatgaagtatgctgagcctattgagattggcagagtag

SEQ ID NO: 407977 - DNA, 55 bp, Artificial
  Synthetic oligonucleotide
gcatattacatcaagcatggttctgacaaagcacttaagatcgatttaaccccgc

SEQ ID NO: 407978 - DNA, 53 bp, Artificial
  Synthetic oligonucleotide
gcatattagaactggaaattgtaattcacgtttttgttatagtaaataagttt

SEQ ID NO: 407979 - DNA, 58 bp, Artificial
  Synthetic oligonucleotide
gcatattcacgatgtcagtattcgattattcacttcagaccaaagttctagattttgg

SEQ ID NO: 407980 - DNA, 55 bp, Artificial
  Synthetic oligonucleotide
gcatattcatgaaggataaggcaataagctgtccaaggcaagactggatgggagt

SEQ ID NO: 407981 - DNA, 58 bp, Artificial
  Synthetic oligonucleotide
gcatattccaaagttggttggcacttttgaaggggaagtggagcaacacagtccgcta

SEQ ID NO: 407982 - DNA, 60 bp, Artificial
  Synthetic oligonucleotide
gcatattcgatgatattcaatttcgtagacaacatttatagcgtctgggtacacatgttt

SEQ ID NO: 407983 - DNA, 53 bp, Artificial
  Synthetic oligonucleotide
gcatattctaaggggacctttgcactttcaacgtcgagccatcctgggagcgc

SEQ ID NO: 407984 - DNA, 55 bp, Artificial
  Synthetic oligonucleotide
gcatattctccgattattcagccacattgacgatgctgatatgactcaagcagca

SEQ ID NO: 407985 - DNA, 55 bp, Artificial
  Synthetic oligonucleotide
gcatattgaacttcgccccttgcagccttccattgctactgccccaggggactcc

SEQ ID NO: 407986 - DNA, 55 bp, Artificial
  Synthetic oligonucleotide
gcatattgaattgggtgctctacaaacctcataggaatggggtgctttgggtgcc

SEQ ID NO: 407987 - DNA, 60 bp, Artificial
  Synthetic oligonucleotide
gcatattgcaagcatgaggagaaactatttcacagcggaagtgtcccattgcagggccac

SEQ ID NO: 407988 - DNA, 55 bp, Artificial
  Synthetic oligonucleotide
gcatattgctactcccattaaccttcaaatagctaaatgactatggtgacactct

SEQ ID NO: 407989 - DNA, 60 bp, Artificial
  Synthetic oligonucleotide
gcatattggcaaggtcatgtgtgtcagtgacgttacacgaggaactggactcacacatcg

SEQ ID NO: 407990 - DNA, 59 bp, Artificial
  Synthetic oligonucleotide
gcatatttcactataccattagatccaaagtttagacagtatacagcatttactgtgcc

SEQ ID NO: 407991 - DNA, 56 bp, Artificial
  Synthetic oligonucleotide
gcatatttttacaagaattaacctattcgatacagggaagactccgggagcgcgga

SEQ ID NO: 407992 - DNA, 55 bp, Artificial
  Synthetic oligonucleotide
gcatcaaaagttatactttgaattattggatcttgaccagctgcttccttgccat

SEQ ID NO: 407993 - DNA, 55 bp, Artificial
  Synthetic oligonucleotide
gcatcaaacgagtaagtatggcatatcttggcaatcagctgcttatcgcaacctt

SEQ ID NO: 407994 - DNA, 60 bp, Artificial
  Synthetic oligonucleotide
gcatcaacatcttacaaggcaccagaagaaagcgatgaggaaagagtcggagcactctta

SEQ ID NO: 407995 - DNA, 58 bp, Artificial
  Synthetic oligonucleotide
gcatcaaccattatggttttatgattgagtacaaagggtcgttattgttcgtgtatcg

SEQ ID NO: 407996 - DNA, 55 bp, Artificial
  Synthetic oligonucleotide
gcatcaacggagcattaatccaatttgcgttttcgttacccgccgcagaacacgg

SEQ ID NO: 407997 - DNA, 55 bp, Artificial
  Synthetic oligonucleotide
gcatcaactatagaagtgggattagagaccacagtcagaagagctaaccgtgtac

SEQ ID NO: 407998 - DNA, 60 bp, Artificial
  Synthetic oligonucleotide
gcatcaactattgagacatttccagaaagatgcaaaagtgctgttccagaactggggaat

SEQ ID NO: 407999 - DNA, 54 bp, Artificial
  Synthetic oligonucleotide
gcatcaagaaggaacccaaatcctaataaaacgatttctgccaattcatttcga

SEQ ID NO: 408000 - DNA, 59 bp, Artificial
  Synthetic oligonucleotide
gcatcaagatgttattaacaagtgtcaacaattcgtaggccctcttactgcaaacgaaa

SEQ ID NO: 408001 - DNA, 55 bp, Artificial
  Synthetic oligonucleotide
gcatcaagattgggtagaacctgctaaatgtattttaggcggaactgaatgtaga

SEQ ID NO: 408002 - DNA, 52 bp, Artificial
  Synthetic oligonucleotide
gcatcaagcgagcaagagaccagccgaagctaagcttgaacagatcgtagct

SEQ ID NO: 408003 - DNA, 55 bp, Artificial
  Synthetic oligonucleotide
gcatcaagtggcgcttccaaattagaattttcacaagacccaagtaaatttactg

SEQ ID NO: 408004 - DNA, 60 bp, Artificial
  Synthetic oligonucleotide
gcatcaatgaactgagcaatcttgcgaagggagagaaggcgaatgtgctaattgggcaag

SEQ ID NO: 408005 - DNA, 55 bp, Artificial
  Synthetic oligonucleotide
gcatcaattgagattattcggaatcaacagcactagttgtttgaaagctcttgag

SEQ ID NO: 408006 - DNA, 60 bp, Artificial
  Synthetic oligonucleotide
gcatcaatttataatcttatatcctcgaaatggtgctacgcaccacatccggatggtgag

SEQ ID NO: 408007 - DNA, 55 bp, Artificial
  Synthetic oligonucleotide
gcatcacaatcgctctgtagtgaggtaaacgcgtgcaaggcatgccaatagcagc

SEQ ID NO: 408008 - DNA, 55 bp, Artificial
  Synthetic oligonucleotide
gcatcacacacgcaagggaacgtgtctgttaagtacaagtacactcatccaggtg

SEQ ID NO: 408009 - DNA, 60 bp, Artificial
  Synthetic oligonucleotide
gcatcacactctctccgatgatagattcgatcaagtttgggtcgaggcgtgtgatatata

SEQ ID NO: 408010 - DNA, 51 bp, Artificial
  Synthetic oligonucleotide
gcatcacaggaccagtacatggttgcatttgaggttgccgttatggaatat

SEQ ID NO: 408011 - DNA, 53 bp, Artificial
  Synthetic oligonucleotide
gcatcaccaatagtaggtttcagtcatggaccatgcagttagcagagttgtgc

SEQ ID NO: 408012 - DNA, 60 bp, Artificial
  Synthetic oligonucleotide
gcatcaccacacaagaagcggcgaaagccgttgttgcatatggcatgtggcctacataca

SEQ ID NO: 408013 - DNA, 60 bp, Artificial
  Synthetic oligonucleotide
gcatcaccatgcaaacgagtcattcttcttagggtttgatctaagcattgatttagtgca

SEQ ID NO: 408014 - DNA, 55 bp, Artificial
  Synthetic oligonucleotide
gcatcacccgtctttcggataacgggtattacaccgttcctagaagaatgctaga

SEQ ID NO: 408015 - DNA, 55 bp, Artificial
  Synthetic oligonucleotide
gcatcaccgacatcatctgcgaaaactgcaaataccttccaacgaaacgctccag

SEQ ID NO: 408016 - DNA, 59 bp, Artificial
  Synthetic oligonucleotide
gcatcaccgcctgaggtacgagcttggacgtcgacgaagtacgaatggggcaagcaacg

SEQ ID NO: 408017 - DNA, 55 bp, Artificial
  Synthetic oligonucleotide
gcatcacgcgaagttcccgcaacaaaagagtgtacgtattgcggtccacctcggc

SEQ ID NO: 408018 - DNA, 60 bp, Artificial
  Synthetic oligonucleotide
gcatcacgtgcagatccagaagttggaacacttgcttggcttcaacatggtcaggcccta

SEQ ID NO: 408019 - DNA, 60 bp, Artificial
  Synthetic oligonucleotide
gcatcactacaatgacaaatacgggcgcatttggacaacaatcaggggcagtatacgtag

SEQ ID NO: 408020 - DNA, 60 bp, Artificial
  Synthetic oligonucleotide
gcatcactattagagatgtgccatagcacacagattggtggactaaggatggtagacatc

SEQ ID NO: 408021 - DNA, 60 bp, Artificial
  Synthetic oligonucleotide
gcatcacttacactgatctggcgaggtatgtggtgctagtcgccgccgttttcgcagaag

SEQ ID NO: 408022 - DNA, 60 bp, Artificial
  Synthetic oligonucleotide
gcatcagaaggaacctccattcctttggatgggatatgaactccatcctgacagatggac

SEQ ID NO: 408023 - DNA, 57 bp, Artificial
  Synthetic oligonucleotide
gcatcagattttgaattatctatgccacgacaaccgaagatttacccaacgttaagg

SEQ ID NO: 408024 - DNA, 55 bp, Artificial
  Synthetic oligonucleotide
gcatcagcagtctgattctccttgcactgacacaccatgagctccggttgtcgca

SEQ ID NO: 408025 - DNA, 55 bp, Artificial
  Synthetic oligonucleotide
gcatcagcttggcggtctggcaggggcttggtgatggctcagtgcgtgcaaatcg

SEQ ID NO: 408026 - DNA, 55 bp, Artificial
  Synthetic oligonucleotide
gcatcaggatttaatccaaccgaccgattctcattagcgaagggcattgaaggcg

SEQ ID NO: 408027 - DNA, 55 bp, Artificial
  Synthetic oligonucleotide
gcatcaggctagtaagcgaccctctgaagcaaagttggagcaaatagttgctttt

SEQ ID NO: 408028 - DNA, 56 bp, Artificial
  Synthetic oligonucleotide
gcatcagtatgtgctgtcttgacgaaaggcttcgtagtgtcgtttcataaagagtc

SEQ ID NO: 408029 - DNA, 59 bp, Artificial
  Synthetic oligonucleotide
gcatcagtgcaggaggaacgcactctcgggaccagtaggtattcgaacgtaacggccaa

SEQ ID NO: 408030 - DNA, 55 bp, Artificial
  Synthetic oligonucleotide
gcatcagttaacagccacagattcagacacactaggccaatacggccgtgcctcc

SEQ ID NO: 408031 - DNA, 55 bp, Artificial
  Synthetic oligonucleotide
gcatcatacccatttgaattagactcagagaaaattgcacaacaagggactaagt

SEQ ID NO: 408032 - DNA, 60 bp, Artificial
  Synthetic oligonucleotide
gcatcatatcctgccaaccacacacctggcgccagggtgcggtattgccttactcataaa

SEQ ID NO: 408033 - DNA, 60 bp, Artificial
  Synthetic oligonucleotide
gcatcatatgttaatctggacaatgtcaaatctgtgaaaatcaattggaccgaagctggt

SEQ ID NO: 408034 - DNA, 55 bp, Artificial
  Synthetic oligonucleotide
gcatcatcagtctatttcctcagtgcagccattttccaggactctggcaggcagg

SEQ ID NO: 408035 - DNA, 59 bp, Artificial
  Synthetic oligonucleotide
gcatcatcatacctcacagatcctgatgatacatttgaacttagtgcatgttttataac

SEQ ID NO: 408036 - DNA, 60 bp, Artificial
  Synthetic oligonucleotide
gcatcatcatttcgagctcttgggttacgcgtgagtgtaccaccagcaaaaccatggtta

SEQ ID NO: 408037 - DNA, 60 bp, Artificial
  Synthetic oligonucleotide
gcatcatccctagcatgtttgaaccagaacgtgagaaagtggatgccatagacggggagt

SEQ ID NO: 408038 - DNA, 55 bp, Artificial
  Synthetic oligonucleotide
gcatcatgcatccagtcagcaataacctccatactacaaattgctgcctcggctc

SEQ ID NO: 408039 - DNA, 55 bp, Artificial
  Synthetic oligonucleotide
gcatcatggcggaattcagcatactaatttggaaagatactcgtacttcgaaggt

SEQ ID NO: 408040 - DNA, 60 bp, Artificial
  Synthetic oligonucleotide
gcatcatgggcgcccaggtatctagacaaaatgttggtacacactcaacccaaaattcag

SEQ ID NO: 408041 - DNA, 55 bp, Artificial
  Synthetic oligonucleotide
gcatcatgtatactactccgagacgcgggtatagatcatcgtataagcctcgtgc

SEQ ID NO: 408042 - DNA, 60 bp, Artificial
  Synthetic oligonucleotide
gcatcattccgtttggcaaagaggtgggtcgtgtacctcactctagatttaatgttggca

SEQ ID NO: 408043 - DNA, 55 bp, Artificial
  Synthetic oligonucleotide
gcatcattttaaatggtcttatggtttggtgcatagagaatggaacatccccgaa

SEQ ID NO: 408044 - DNA, 60 bp, Artificial
  Synthetic oligonucleotide
gcatcattttgcgggtcaccatattcttgggaacaagagctacagcattcgcaaaggcat

SEQ ID NO: 408045 - DNA, 60 bp, Artificial
  Synthetic oligonucleotide
gcatccaaagatgtgagtagatatacagaggaagctgatgctttttttcaatccaagaaa

SEQ ID NO: 408046 - DNA, 58 bp, Artificial
  Synthetic oligonucleotide
gcatccaaccggtgattgttgaaccgcctacttctggcttaggtagagccattaaggc

SEQ ID NO: 408047 - DNA, 55 bp, Artificial
  Synthetic oligonucleotide
gcatccaagacacacccacaccctgtgtctaagattattgaaaatcatctcctct

SEQ ID NO: 408048 - DNA, 60 bp, Artificial
  Synthetic oligonucleotide
gcatccaaggttctaaatttattggatatcgtaagttcatgatcgaatattcgcgtctga

SEQ ID NO: 408049 - DNA, 55 bp, Artificial
  Synthetic oligonucleotide
gcatccacaaactctcaaaccttgaacccaccaacagtacttaatcctgaagcac

SEQ ID NO: 408050 - DNA, 58 bp, Artificial
  Synthetic oligonucleotide
gcatccacaagggaggtcaactcgtcgtctcctcgttgttcgcttggctattttgtgt

SEQ ID NO: 408051 - DNA, 59 bp, Artificial
  Synthetic oligonucleotide
gcatccaccatgcaccgcgagggtttcttgtgttgcaaggtgacggacacgcttaacgg

SEQ ID NO: 408052 - DNA, 55 bp, Artificial
  Synthetic oligonucleotide
gcatccacgaacagccaggcgtcgccgctcatctatcggatcgccacactcgcaa

SEQ ID NO: 408053 - DNA, 57 bp, Artificial
  Synthetic oligonucleotide
gcatccagaattgacaggactggactgcatgagaccttgcttctgggttgaactaat

SEQ ID NO: 408054 - DNA, 54 bp, Artificial
  Synthetic oligonucleotide
gcatccagacacagactttgtaattaactacagcagacaaccaccatgggaact

SEQ ID NO: 408055 - DNA, 59 bp, Artificial
  Synthetic oligonucleotide
gcatccagagtactataaagactgctgacaaagaagtttctaactaggacttccgctgg

SEQ ID NO: 408056 - DNA, 58 bp, Artificial
  Synthetic oligonucleotide
gcatccagcacagactcatcagtgggatgacccctggggagaggtactggcatggaag

SEQ ID NO: 408057 - DNA, 55 bp, Artificial
  Synthetic oligonucleotide
gcatccagccaatctgtgcaagacagcacagagcctcccacaatgggcaactgca

SEQ ID NO: 408058 - DNA, 55 bp, Artificial
  Synthetic oligonucleotide
gcatccagccagcgaccatgccattcaacctgacgagagacgtcaccaaggcaag

SEQ ID NO: 408059 - DNA, 58 bp, Artificial
  Synthetic oligonucleotide
gcatccagtcaactacgtaatggtgttgcttttgggcgtagttacaattgttctgtaa

SEQ ID NO: 408060 - DNA, 55 bp, Artificial
  Synthetic oligonucleotide
gcatccatcaaaactagaactgttgaacaggagatggatgcggaattctccaatg

SEQ ID NO: 408061 - DNA, 58 bp, Artificial
  Synthetic oligonucleotide
gcatccatccaccagcacaagtgggtatttccttcttacttaaaggaaattctatatc

SEQ ID NO: 408062 - DNA, 55 bp, Artificial
  Synthetic oligonucleotide
gcatccatgggctacctggggatttcttgtcgaattaccctagactgcctacgcc

SEQ ID NO: 408063 - DNA, 60 bp, Artificial
  Synthetic oligonucleotide
gcatccattctgctggctctatgggaatagccgccgcctcgattgtgtcacaggagatga

SEQ ID NO: 408064 - DNA, 60 bp, Artificial
  Synthetic oligonucleotide
gcatcccaaatgacaagccatttcagaatgtaaataagatcacctacggggcatgtccca

SEQ ID NO: 408065 - DNA, 54 bp, Artificial
  Synthetic oligonucleotide
gcatcccaaatttcaatcattatgaggctatggcttgtgatttcaatggtggca

SEQ ID NO: 408066 - DNA, 55 bp, Artificial
  Synthetic oligonucleotide
gcatcccagcagtaagcaacaatggctgatccagaaggtacagacggggagggca

SEQ ID NO: 408067 - DNA, 55 bp, Artificial
  Synthetic oligonucleotide
gcatcccataccataccgttcgtcaccgcgttatcagatacactctcggccgcac

SEQ ID NO: 408068 - DNA, 55 bp, Artificial
  Synthetic oligonucleotide
gcatccccaaccgtacttatctcactgtataacaactgctacatcgaacaggcaa

SEQ ID NO: 408069 - DNA, 58 bp, Artificial
  Synthetic oligonucleotide
gcatccccgcaaacaaccaagtagtgccatgtcctgaagtagtagaatacaggaattg

SEQ ID NO: 408070 - DNA, 55 bp, Artificial
  Synthetic oligonucleotide
gcatcccgaatgcaccatgcccatcaacattatgcatacactattagtgtgcttc

SEQ ID NO: 408071 - DNA, 55 bp, Artificial
  Synthetic oligonucleotide
gcatcccgcctcgcgaagatccttatttctcgttggctttccgacttttggccag

SEQ ID NO: 408072 - DNA, 55 bp, Artificial
  Synthetic oligonucleotide
gcatcccgctgtgctgacagccggaagaatcagtgaaatgggtgtctgctttgga

SEQ ID NO: 408073 - DNA, 60 bp, Artificial
  Synthetic oligonucleotide
gcatccctgcaaaccgtgcccagtgctttaattcaggttgcgtgcgtgataatatcgcat

SEQ ID NO: 408074 - DNA, 60 bp, Artificial
  Synthetic oligonucleotide
gcatccgacatttattcgggaactacataactaatgatagctattcaaaaatgtctgtgg

SEQ ID NO: 408075 - DNA, 51 bp, Artificial
  Synthetic oligonucleotide
gcatccgcacgagaggtagtttccctaatcagtgaggtatgttcgcctgta

SEQ ID NO: 408076 - DNA, 55 bp, Artificial
  Synthetic oligonucleotide
gcatccgcactattaaatgacggtgtaactctcggtgtttcttcccgtggtatgg

SEQ ID NO: 408077 - DNA, 60 bp, Artificial
  Synthetic oligonucleotide
gcatccgcagtcgaggtctatgcgcttacgtctgactggcttagtcttcgctatgcggtg

SEQ ID NO: 408078 - DNA, 55 bp, Artificial
  Synthetic oligonucleotide
gcatccgcttcgtcgaataatgtatagcatcgctttgagattctccatagctatc

SEQ ID NO: 408079 - DNA, 55 bp, Artificial
  Synthetic oligonucleotide
gcatccgcttggacggaagtgtcaaattcgatcgcagatgtttctacgacagttg

SEQ ID NO: 408080 - DNA, 59 bp, Artificial
  Synthetic oligonucleotide
gcatccggaagatgattgataatttactcggttaccgcgaggaatgcaggaaattccaa

SEQ ID NO: 408081 - DNA, 60 bp, Artificial
  Synthetic oligonucleotide
gcatccggaaggtggcagcaccagtgctgtcaacactcttccccatggcggcaccactca

SEQ ID NO: 408082 - DNA, 60 bp, Artificial
  Synthetic oligonucleotide
gcatccggagtggttctgcaaagaccgctgacacaggagttgctgacagggactttccgc

SEQ ID NO: 408083 - DNA, 54 bp, Artificial
  Synthetic oligonucleotide
gcatccggcttatcctccgttgtcataaaccaacgaggaggaatatcgtcggag

SEQ ID NO: 408084 - DNA, 60 bp, Artificial
  Synthetic oligonucleotide
gcatccgtcatgatggatcccatgatgttgatagccaccgagggattcatacctcgtttg

SEQ ID NO: 408085 - DNA, 60 bp, Artificial
  Synthetic oligonucleotide
gcatccgtcggaagaatgattggtggaattgggcgattctacatccaaatgtgtaccgag

SEQ ID NO: 408086 - DNA, 57 bp, Artificial
  Synthetic oligonucleotide
gcatccgtcgggaagatgattgatggaattggacgattctacatccaaatgtgcacc

SEQ ID NO: 408087 - DNA, 60 bp, Artificial
  Synthetic oligonucleotide
gcatcctactaagttcactcctcaaaaatgatgtgccgctagctgggccactaatagctg

SEQ ID NO: 408088 - DNA, 60 bp, Artificial
  Synthetic oligonucleotide
gcatcctcaatcagtagatctacatcgatacgatcagtaggcagtaatacaacgatgcga

SEQ ID NO: 408089 - DNA, 56 bp, Artificial
  Synthetic oligonucleotide
gcatcctcaggaacattggaattcacagcagagggattcacatggacaggtgtcac

SEQ ID NO: 408090 - DNA, 60 bp, Artificial
  Synthetic oligonucleotide
gcatcctccaccccgtatgtaggagtgcgattcaactcacaatcagacattctctggcag

SEQ ID NO: 408091 - DNA, 55 bp, Artificial
  Synthetic oligonucleotide
gcatcctcgccttgaaaatagtacaatatatgttggagatccctattgcccgccc

SEQ ID NO: 408092 - DNA, 55 bp, Artificial
  Synthetic oligonucleotide
gcatcctgttcatgccggccccatagctccaggacagctaagagaaccacggggt

SEQ ID NO: 408093 - DNA, 60 bp, Artificial
  Synthetic oligonucleotide
gcatccttgatgttggactctcctgatagttggatgagacagtgtaagtgtgggaacccg

SEQ ID NO: 408094 - DNA, 60 bp, Artificial
  Synthetic oligonucleotide
gcatcctttgatcccaagcaagtacaaatgttcatattgggatgtgtgccttgtttagga

SEQ ID NO: 408095 - DNA, 60 bp, Artificial
  Synthetic oligonucleotide
gcatcgaagactattgggacatcagaggagaagttgcggaagaaatcctctttctaccag

SEQ ID NO: 408096 - DNA, 55 bp, Artificial
  Synthetic oligonucleotide
gcatcgaatattggatcgtgtggtagagtgagtataccgacatgaggcttgtacg

SEQ ID NO: 408097 - DNA, 53 bp, Artificial
  Synthetic oligonucleotide
gcatcgaatgcactagagtcatagttggggtatccttcgactttcttcacacg

SEQ ID NO: 408098 - DNA, 55 bp, Artificial
  Synthetic oligonucleotide
gcatcgactggtccgaaactcatcgcattcccgcaattgagaatgcgtacctgcc

SEQ ID NO: 408099 - DNA, 55 bp, Artificial
  Synthetic oligonucleotide
gcatcgataacttccttgcagtcgctgcggtacataagcgccagaaactctgcgt

SEQ ID NO: 408100 - DNA, 55 bp, Artificial
  Synthetic oligonucleotide
gcatcgatactctcgttgacatgttcgtgtgtttgatggctctgcctcttgtcac

SEQ ID NO: 408101 - DNA, 55 bp, Artificial
  Synthetic oligonucleotide
gcatcgatatttctgataaaagtaatgtcacaccgcaagatgtccgagcacaagc

SEQ ID NO: 408102 - DNA, 55 bp, Artificial
  Synthetic oligonucleotide
gcatcgatcaactttcacttttcttcgagttgaaatacaggaagtctggggcgga

SEQ ID NO: 408103 - DNA, 55 bp, Artificial
  Synthetic oligonucleotide
gcatcgatcgtttcctaagggttcgagatcagcggggaaacgtgctcctatcccc

SEQ ID NO: 408104 - DNA, 54 bp, Artificial
  Synthetic oligonucleotide
gcatcgcaactccaaaagaacaccaagtccactccagaaagagaggaggcgcaa

SEQ ID NO: 408105 - DNA, 55 bp, Artificial
  Synthetic oligonucleotide
gcatcgccgatttgcctcagagcacaccgaacataggtatcacaccgcagccgtc

SEQ ID NO: 408106 - DNA, 55 bp, Artificial
  Synthetic oligonucleotide
gcatcgccttccttgcgtcacgtaccacatgccttctactcggatcgccgcgtag

SEQ ID NO: 408107 - DNA, 60 bp, Artificial
  Synthetic oligonucleotide
gcatcgccttggatgagcaccacttccggagtttccaggaacggatcatccgacatgcct

SEQ ID NO: 408108 - DNA, 55 bp, Artificial
  Synthetic oligonucleotide
gcatcgcgagaagacacctgggaccaggcccaacacaacatacacctagcaggcg

SEQ ID NO: 408109 - DNA, 59 bp, Artificial
  Synthetic oligonucleotide
gcatcgctttggtccagaaacgtgcgaactgatcaaaagcttgggaatcccaatttgtc

SEQ ID NO: 408110 - DNA, 55 bp, Artificial
  Synthetic oligonucleotide
gcatcggcgttcgaagtggatggtacactgtacgatatctcgcagactatagttc

SEQ ID NO: 408111 - DNA, 50 bp, Artificial
  Synthetic oligonucleotide
gcatcggctgtgtacagcccttgggatgacccaaacttctcaatagtggc

SEQ ID NO: 408112 - DNA, 52 bp, Artificial
  Synthetic oligonucleotide
gcatcggggcaatgtctcccggatatctctctgcgcactccttaggtggggc

SEQ ID NO: 408113 - DNA, 55 bp, Artificial
  Synthetic oligonucleotide
gcatcgggtgagagtgactaggaccgagacggctctgagttatgtcaggcggcag

SEQ ID NO: 408114 - DNA, 60 bp, Artificial
  Synthetic oligonucleotide
gcatcggtaagtgtcagcctctgagtagcgttgacaaattagaaccgtatgcacagttaa

SEQ ID NO: 408115 - DNA, 58 bp, Artificial
  Synthetic oligonucleotide
gcatcggtatgagacattcctattgaactttttgtgacccaagactctcctggtttta

SEQ ID NO: 408116 - DNA, 57 bp, Artificial
  Synthetic oligonucleotide
gcatcgtaacggacggccgcgatattctccatacgctggaattccgctgtaaccccg

SEQ ID NO: 408117 - DNA, 50 bp, Artificial
  Synthetic oligonucleotide
gcatcgtacagaatcttcaaaatcgagaaggggagagttactaaatcaat

SEQ ID NO: 408118 - DNA, 55 bp, Artificial
  Synthetic oligonucleotide
gcatcgtatgggaaatgtccatgacgcttgtaatgattcgtcgtcagtcattcgt

SEQ ID NO: 408119 - DNA, 55 bp, Artificial
  Synthetic oligonucleotide
gcatcgtcagttcggtagtgtttgggcctgtccaaggggtggagccgggtggtgt

SEQ ID NO: 408120 - DNA, 60 bp, Artificial
  Synthetic oligonucleotide
gcatcgtctatatcacgtaacgcttccatcagatcggttgggtcatctgcctcggtgtgg

SEQ ID NO: 408121 - DNA, 60 bp, Artificial
  Synthetic oligonucleotide
gcatcgtgtttgtatctcagtccaagtacttgccacaagccatcctggaaaattgtgcca

SEQ ID NO: 408122 - DNA, 59 bp, Artificial
  Synthetic oligonucleotide
gcatcgttcagcgatcttgaacgggattcatgtaatggcgtttacggtaacataaccaa

SEQ ID NO: 408123 - DNA, 57 bp, Artificial
  Synthetic oligonucleotide
gcatctaacaaattcatgtatgatccaaacccggtaacggaaggagacttcgctagg

SEQ ID NO: 408124 - DNA, 60 bp, Artificial
  Synthetic oligonucleotide
gcatctacacgtggagaaaggtgcccatggtcacttcggccaagtttcttatagagcggc

SEQ ID NO: 408125 - DNA, 55 bp, Artificial
  Synthetic oligonucleotide
gcatctacgaacaccgaaaatagaacccacgatggtcgcaaccaccttagaacac

SEQ ID NO: 408126 - DNA, 55 bp, Artificial
  Synthetic oligonucleotide
gcatctactaaggaacttgatcgcacaagacccatacttgttgttgctttcattg

SEQ ID NO: 408127 - DNA, 60 bp, Artificial
  Synthetic oligonucleotide
gcatctaggcaaggcaagggtgatgtattcgtattcagtgatgacgatattatagtgcat

SEQ ID NO: 408128 - DNA, 55 bp, Artificial
  Synthetic oligonucleotide
gcatctagggcgcaaagtgtacccgtttccgatacctgagctgtcagtgaactac

SEQ ID NO: 408129 - DNA, 60 bp, Artificial
  Synthetic oligonucleotide
gcatctagtatgggcaagcagggaactagaaagatttgcgatagatcccggtcttctaga

SEQ ID NO: 408130 - DNA, 55 bp, Artificial
  Synthetic oligonucleotide
gcatctagtccatgggactttaaccttaccaagaacatttacggcaactggttcg

SEQ ID NO: 408131 - DNA, 60 bp, Artificial
  Synthetic oligonucleotide
gcatctagtgacactgtcgtcacgcgaatcgtatttccacctgaggcagtgaaggttgaa

SEQ ID NO: 408132 - DNA, 55 bp, Artificial
  Synthetic oligonucleotide
gcatctatagacactttccaatcataaatcatcaagcaggccttttcaccattag

SEQ ID NO: 408133 - DNA, 59 bp, Artificial
  Synthetic oligonucleotide
gcatctatgcatatgctaacatccaatttaactttcactgtatattccgatcttcttgc

SEQ ID NO: 408134 - DNA, 55 bp, Artificial
  Synthetic oligonucleotide
gcatctatgtcaatatccgtgagctcccaacgcatggcagcggcctcgttgatgc

SEQ ID NO: 408135 - DNA, 50 bp, Artificial
  Synthetic oligonucleotide
gcatctattcgggtcttccccgttgaaaattgtgacatacttatactcag

SEQ ID NO: 408136 - DNA, 60 bp, Artificial
  Synthetic oligonucleotide
gcatctattctcacgaaataatggagccctagaagttaatacttcattggggcagttcac

SEQ ID NO: 408137 - DNA, 55 bp, Artificial
  Synthetic oligonucleotide
gcatctattttccaaatacagttgtaggatcacagggacctggccaaacgaatgg

SEQ ID NO: 408138 - DNA, 60 bp, Artificial
  Synthetic oligonucleotide
gcatctcaagatttggctaggcatggagcaattactagcagcaatacagctgccaataat

SEQ ID NO: 408139 - DNA, 59 bp, Artificial
  Synthetic oligonucleotide
gcatctcaatgtcttcctttcccatcgtccgtagtccacgtgtgagaaatccacgtcct

SEQ ID NO: 408140 - DNA, 55 bp, Artificial
  Synthetic oligonucleotide
gcatctccacaacttgaaggattctcagctgaatcaaggaaattacttctcattg

SEQ ID NO: 408141 - DNA, 55 bp, Artificial
  Synthetic oligonucleotide
gcatctcccacccggtaagagaaccatccgaaaccaaactgtaaatcatccctgt

SEQ ID NO: 408142 - DNA, 60 bp, Artificial
  Synthetic oligonucleotide
gcatctccgcgaacagtcaggtagtgccatgtgaaccaactacagagaaagaggtctgtt

SEQ ID NO: 408143 - DNA, 60 bp, Artificial
  Synthetic oligonucleotide
gcatctcctatggcaggaagaagcggaagtaccgacgaggaacttctcagagcagtgagg

SEQ ID NO: 408144 - DNA, 60 bp, Artificial
  Synthetic oligonucleotide
gcatctcctatggcaggaagaagcggagacagcgacgaagatctcctaggcacagtccgg

SEQ ID NO: 408145 - DNA, 55 bp, Artificial
  Synthetic oligonucleotide
gcatctcgacaggaacgttagtgaacgatgagaggggaaacggaggaacccaagg

SEQ ID NO: 408146 - DNA, 60 bp, Artificial
  Synthetic oligonucleotide
gcatctcggagtaattaatgatgctggcgcggagaggttactaatttttcgtgacgttgc

SEQ ID NO: 408147 - DNA, 56 bp, Artificial
  Synthetic oligonucleotide
gcatctcgtccgggacggcagtgaaggaggagagttgaaacggaggaacccacggc

SEQ ID NO: 408148 - DNA, 60 bp, Artificial
  Synthetic oligonucleotide
gcatctctatgagacttttcatgccaacccaggcacggtcactggctcagctgtcgggtg

SEQ ID NO: 408149 - DNA, 60 bp, Artificial
  Synthetic oligonucleotide
gcatctctcacgccggtccaaggcgtaagatgcctaagatgttcgtgcctcctccaagca

SEQ ID NO: 408150 - DNA, 60 bp, Artificial
  Synthetic oligonucleotide
gcatctctcagtcctgcctggttcgaggcactgaagatggtgctcgagaaaatcgggttt

SEQ ID NO: 408151 - DNA, 60 bp, Artificial
  Synthetic oligonucleotide
gcatctctcgagaggccctctgggactgcctcacagccacctgccccgactcattcctcg

SEQ ID NO: 408152 - DNA, 55 bp, Artificial
  Synthetic oligonucleotide
gcatctcttacatgaataacaatgaagacgtacactagtagtatgcatcaaacgg

SEQ ID NO: 408153 - DNA, 56 bp, Artificial
  Synthetic oligonucleotide
gcatctcttcctccttgaaatcaaagatgttagagtcatggtacatgatctctagc

SEQ ID NO: 408154 - DNA, 57 bp, Artificial
  Synthetic oligonucleotide
gcatctctttagaggtttccatgacttgtgtgaggaagggaaagtgtgttatttaac

SEQ ID NO: 408155 - DNA, 60 bp, Artificial
  Synthetic oligonucleotide
gcatctgactcaccactaagtagtctaatgaagagtcccactgcaagcctttgaaccacc

SEQ ID NO: 408156 - DNA, 60 bp, Artificial
  Synthetic oligonucleotide
gcatctgagatcaagattcattgtgccagtgggaaaactatcgtcccttgaaattaagaa

SEQ ID NO: 408157 - DNA, 55 bp, Artificial
  Synthetic oligonucleotide
gcatctgatcggaaaagtccacgacgcttgcaacgactcgttttccgtcattctc

SEQ ID NO: 408158 - DNA, 60 bp, Artificial
  Synthetic oligonucleotide
gcatctgattatacgaatagattgactattgaagatgtatcgatatcattgggtaaagta

SEQ ID NO: 408159 - DNA, 55 bp, Artificial
  Synthetic oligonucleotide
gcatctgattatattccgaagctagcctctattaggaaacccttacagagtaagc

SEQ ID NO: 408160 - DNA, 60 bp, Artificial
  Synthetic oligonucleotide
gcatctgattgggaaagtccatgatgattgtagagattcgttgtctgtcattcttttgtc

SEQ ID NO: 408161 - DNA, 55 bp, Artificial
  Synthetic oligonucleotide
gcatctgcaacagacatatataaaacctgcaagcaatcaggcacatgtccgcctg

SEQ ID NO: 408162 - DNA, 59 bp, Artificial
  Synthetic oligonucleotide
gcatctgcaccttttctagactcctacttccttcctctgtaagtattagatatggaaaa

SEQ ID NO: 408163 - DNA, 56 bp, Artificial
  Synthetic oligonucleotide
gcatctggaatagaggtcgaagaacctttggttcctcgtttgttgcttcccttcga

SEQ ID NO: 408164 - DNA, 50 bp, Artificial
  Synthetic oligonucleotide
gcatctgggggattgcagctttgagggatggattgtagggaacccttctt

SEQ ID NO: 408165 - DNA, 55 bp, Artificial
  Synthetic oligonucleotide
gcatctggtcgtaggagcgccatggacatcctgactggacttggtggagtcccag

SEQ ID NO: 408166 - DNA, 60 bp, Artificial
  Synthetic oligonucleotide
gcatctgtaatgatctgaaggagcggatcttcttaacataggcgcgtttttttcctctgg

SEQ ID NO: 408167 - DNA, 55 bp, Artificial
  Synthetic oligonucleotide
gcatctgtacgtgtcactggttacggacaaatacgtggcggatttgcgcacgtgg

SEQ ID NO: 408168 - DNA, 60 bp, Artificial
  Synthetic oligonucleotide
gcatctgtagaaattaattgtacaagacccaacaacaatacaagaagaggtatacatata

SEQ ID NO: 408169 - DNA, 55 bp, Artificial
  Synthetic oligonucleotide
gcatctgtagtctctacatggctcatgggagacaaaacggtgtacttgaatcaga

SEQ ID NO: 408170 - DNA, 59 bp, Artificial
  Synthetic oligonucleotide
gcatctgtcggaagaatggtaggcggaattggaaggttttatatacagatgtgcactga

SEQ ID NO: 408171 - DNA, 60 bp, Artificial
  Synthetic oligonucleotide
gcatctgttggaagaatggttggtgcaattgggaggttttatatacagatgtgtactgaa

SEQ ID NO: 408172 - DNA, 60 bp, Artificial
  Synthetic oligonucleotide
gcatctgttggaaggatggttggtggaattggaagattctacatacagatgtgcactgaa

SEQ ID NO: 408173 - DNA, 56 bp, Artificial
  Synthetic oligonucleotide
gcatcttaaaggaaaagtccatgaagcttgtaaagactcattgtctgtcattcttc

SEQ ID NO: 408174 - DNA, 55 bp, Artificial
  Synthetic oligonucleotide
gcatcttaacgggaacgtccatgacgcctgcagagattcgttgtctgtcatcctc

SEQ ID NO: 408175 - DNA, 55 bp, Artificial
  Synthetic oligonucleotide
gcatcttaagggaaatgtccaagacgcctgtaaggattcatcgtcagtcatcctc

SEQ ID NO: 408176 - DNA, 60 bp, Artificial
  Synthetic oligonucleotide
gcatcttacaagagaataaggctatttgattattccaggtggaatgtgactcgttctgga

SEQ ID NO: 408177 - DNA, 55 bp, Artificial
  Synthetic oligonucleotide
gcatcttacgatgcatccatggaccaattggtttgttgacagcaggtgggagtgg

SEQ ID NO: 408178 - DNA, 55 bp, Artificial
  Synthetic oligonucleotide
gcatcttatcgggaaagtccacgacgcttgtaacgactcatcgtcagtcattctc

SEQ ID NO: 408179 - DNA, 55 bp, Artificial
  Synthetic oligonucleotide
gcatcttatcgggaacgtccaagacgcttgaagtgattcgttgtcagtcattctc

SEQ ID NO: 408180 - DNA, 60 bp, Artificial
  Synthetic oligonucleotide
gcatcttcatcctaccatacctttcgccctgtgtcaagccccctgctctaagcgttgccg

SEQ ID NO: 408181 - DNA, 60 bp, Artificial
  Synthetic oligonucleotide
gcatcttcccgccatgtgtatggaaacaagatttatctgatgcttggtggcatgccttct

SEQ ID NO: 408182 - DNA, 55 bp, Artificial
  Synthetic oligonucleotide
gcatcttccttggttcctgtatttattgcccttgcgtacgccgtcgtttgctgtt

SEQ ID NO: 408183 - DNA, 55 bp, Artificial
  Synthetic oligonucleotide
gcatcttctatggcaggaagaagcggaagctccgacgaggaactccttacagcag

SEQ ID NO: 408184 - DNA, 55 bp, Artificial
  Synthetic oligonucleotide
gcatcttggttcaactccttccagacatatgcactgagatagttgtggcaatgct

SEQ ID NO: 408185 - DNA, 55 bp, Artificial
  Synthetic oligonucleotide
gcatcttggtttaactccttcctcacacatgcactaaaatagttgtggcagtgct

SEQ ID NO: 408186 - DNA, 50 bp, Artificial
  Synthetic oligonucleotide
gcatcttgtctgggtagcgaaggaactagatcgattcggcctgcatgaga

SEQ ID NO: 408187 - DNA, 59 bp, Artificial
  Synthetic oligonucleotide
gcatctttagctgcgcgtattcttggcagcgaacgtaaggctgttttaggttctttcgc

SEQ ID NO: 408188 - DNA, 57 bp, Artificial
  Synthetic oligonucleotide
gcatctttatcaagtttctgatcgtggacagattcgaaccgtccctggtaaaacaac

SEQ ID NO: 408189 - DNA, 59 bp, Artificial
  Synthetic oligonucleotide
gcatctttcgaagctatataaacgtggattttcatatagagtaaacgattctttctctc

SEQ ID NO: 408190 - DNA, 55 bp, Artificial
  Synthetic oligonucleotide
gcatctttcggacctaacctgttaaacttaacatacttggagagacttgatctat

SEQ ID NO: 408191 - DNA, 60 bp, Artificial
  Synthetic oligonucleotide
gcatctttgatgttatctgcaacccagcactcaatctcctctgggacttgatcaaaggac

SEQ ID NO: 408192 - DNA, 55 bp, Artificial
  Synthetic oligonucleotide
gcatcttttatcaagctgtataagacagtgaagatgaggggagccatcctgatga

SEQ ID NO: 408193 - DNA, 59 bp, Artificial
  Synthetic oligonucleotide
gcatcttttcacggataatagctagagcagcgtctgcagagtcggggtttagggcctcc

SEQ ID NO: 408194 - DNA, 53 bp, Artificial
  Synthetic oligonucleotide
gcatcttttgaaattgagagctttcgaatctcccataacgaaggaaaaactgc

SEQ ID NO: 408195 - DNA, 60 bp, Artificial
  Synthetic oligonucleotide
gcatgaaaagcgtaactatgtacgatcgatatacgaggcgagatacattatatctaggat

SEQ ID NO: 408196 - DNA, 60 bp, Artificial
  Synthetic oligonucleotide
gcatgaacaacgttattatgagggcctgcctgctagagttagtgacttcctacaattgtt

SEQ ID NO: 408197 - DNA, 57 bp, Artificial
  Synthetic oligonucleotide
gcatgaacgtgttcacatcgtctgtaggttctgtggaatttgatcatcctctacttt

SEQ ID NO: 408198 - DNA, 55 bp, Artificial
  Synthetic oligonucleotide
gcatgaactatgagacacctatgtttaataaggtggctattttaatttgcgaggc

SEQ ID NO: 408199 - DNA, 59 bp, Artificial
  Synthetic oligonucleotide
gcatgaagacacgtaaacaagtcactacggcccccgactgggctgctatattcgagaga

SEQ ID NO: 408200 - DNA, 57 bp, Artificial
  Synthetic oligonucleotide
gcatgaagacatttttcggctggaaagagccaaacataataaaaccacatgaaaagg

SEQ ID NO: 408201 - DNA, 57 bp, Artificial
  Synthetic oligonucleotide
gcatgaagacctttttcggttggaaagagcccaacattgtcaagccgcatgaaaaag

SEQ ID NO: 408202 - DNA, 60 bp, Artificial
  Synthetic oligonucleotide
gcatgaagcaatcattgcgtctgactcgagattgtcaagtagtgttgtaaatccttatgc

SEQ ID NO: 408203 - DNA, 60 bp, Artificial
  Synthetic oligonucleotide
gcatgaagctgttatcataatcacaacgaccatctactattggaactagtgtgatgcccg

SEQ ID NO: 408204 - DNA, 55 bp, Artificial
  Synthetic oligonucleotide
gcatgaaggagcaggcgttggtgaagaggttttacaggttgaatcatcacgtgac

SEQ ID NO: 408205 - DNA, 53 bp, Artificial
  Synthetic oligonucleotide
gcatgaagtgcatagcactcctttatggattaaccactatgattacgtgaacg

SEQ ID NO: 408206 - DNA, 60 bp, Artificial
  Synthetic oligonucleotide
gcatgaagtgcatagcactctcttatagattgactactatgattacgtgaatgcatagca

SEQ ID NO: 408207 - DNA, 54 bp, Artificial
  Synthetic oligonucleotide
gcatgaagttttcgacttaacgtctgacccgcccggagtacaaccgtttatgga

SEQ ID NO: 408208 - DNA, 55 bp, Artificial
  Synthetic oligonucleotide
gcatgaatacggtgggatcacattccatgggcatgtcggaatattgagatgcgaa

SEQ ID NO: 408209 - DNA, 55 bp, Artificial
  Synthetic oligonucleotide
gcatgaatccgaaatcaaaagctagaatgcacggagtatttacacgttgttgagg

SEQ ID NO: 408210 - DNA, 60 bp, Artificial
  Synthetic oligonucleotide
gcatgaattaccctgttattcagaatgctcaagggcagatggtccaccaagcactttccc

SEQ ID NO: 408211 - DNA, 60 bp, Artificial
  Synthetic oligonucleotide
gcatgaatttagcagatcgttcctgaagaagtgtgcagatcacggaaagaccatcttgag

SEQ ID NO: 408212 - DNA, 55 bp, Artificial
  Synthetic oligonucleotide
gcatgaattttgccaagggcccggaaattgcagcaagacccgctgtgaatggcca

SEQ ID NO: 408213 - DNA, 55 bp, Artificial
  Synthetic oligonucleotide
gcatgacaacaacatcaaagagagttgaaccagttgcaatcatgtttcatggaga

SEQ ID NO: 408214 - DNA, 55 bp, Artificial
  Synthetic oligonucleotide
gcatgacaaccccatacaacaagcgtgcgacccttgactcataatactccccacc

SEQ ID NO: 408215 - DNA, 55 bp, Artificial
  Synthetic oligonucleotide
gcatgacaacgtagccattctaccaactcacgcctcaccaggagagacaatagtt

SEQ ID NO: 408216 - DNA, 60 bp, Artificial
  Synthetic oligonucleotide
gcatgacaatagagagaatggttctctctgcatttgatgaaaggaggaacaaatacctgg

SEQ ID NO: 408217 - DNA, 55 bp, Artificial
  Synthetic oligonucleotide
gcatgacacaacagatcacctccacaggatatagatcaaaagtgtactcaaatcc

SEQ ID NO: 408218 - DNA, 55 bp, Artificial
  Synthetic oligonucleotide
gcatgacattttacttatcagacttccaaaagatttcccaccatttccagtgaag

SEQ ID NO: 408219 - DNA, 58 bp, Artificial
  Synthetic oligonucleotide
gcatgaccaacgcatcattgactggtgcgaagaccagggatacatttttgaaccacac

SEQ ID NO: 408220 - DNA, 51 bp, Artificial
  Synthetic oligonucleotide
gcatgaccagctaggtggtgcaaccctatatcttggtgaagggagcggctc

SEQ ID NO: 408221 - DNA, 58 bp, Artificial
  Synthetic oligonucleotide
gcatgaccgggaaatcttcaacaagaacttcgggtatagtaacgccatccagggagca

SEQ ID NO: 408222 - DNA, 60 bp, Artificial
  Synthetic oligonucleotide
gcatgaccttttcgcaggagtttctcacagactttagacgagcggatacgatatgggtat

SEQ ID NO: 408223 - DNA, 60 bp, Artificial
  Synthetic oligonucleotide
gcatgacgcacttatacagctggatgcgtggagtttatctcagcacattcaaagtagagg

SEQ ID NO: 408224 - DNA, 55 bp, Artificial
  Synthetic oligonucleotide
gcatgacgccaatgtcagaaatttgcatgagcaagtgcgaagaacactaaaggcc

SEQ ID NO: 408225 - DNA, 55 bp, Artificial
  Synthetic oligonucleotide
gcatgacgctaacgtgaagaatctgtatgaaaaggtcaaatcacaactacgagac

SEQ ID NO: 408226 - DNA, 55 bp, Artificial
  Synthetic oligonucleotide
gcatgactaaagatgttgctgaagactcgtctagatcactgaatgagctgcctag

SEQ ID NO: 408227 - DNA, 60 bp, Artificial
  Synthetic oligonucleotide
gcatgactgcggaaagacgcttagggccagcgtcgtgcattttgatgaggcactgatggc

SEQ ID NO: 408228 - DNA, 55 bp, Artificial
  Synthetic oligonucleotide
gcatgactgggagaaggttgattcacttatttatggtgatgataggttgtctact

SEQ ID NO: 408229 - DNA, 55 bp, Artificial
  Synthetic oligonucleotide
gcatgactggtcagacaataaagataaggaacaacccattggactagtcctacta

SEQ ID NO: 408230 - DNA, 56 bp, Artificial
  Synthetic oligonucleotide
gcatgacttcgaaagggaaggatattcactggtcgggatagaccccttcaaactac

SEQ ID NO: 408231 - DNA, 55 bp, Artificial
  Synthetic oligonucleotide
gcatgacttgtcttgtaaatttcttccactttatgctagtgaggcaaagaggatc

SEQ ID NO: 408232 - DNA, 60 bp, Artificial
  Synthetic oligonucleotide
gcatgactttgcttcagtgaggtacattcgtgacgccatggcatgtactagtggtatttt

SEQ ID NO: 408233 - DNA, 51 bp, Artificial
  Synthetic oligonucleotide
gcatgagcaaaattacgcacaggtcttataccaacagaagaccatcgaaaa

SEQ ID NO: 408234 - DNA, 60 bp, Artificial
  Synthetic oligonucleotide
gcatgagccgtttttgctagtgctagcaatgcagtcaccatcagttttactggcattatt

SEQ ID NO: 408235 - DNA, 59 bp, Artificial
  Synthetic oligonucleotide
gcatgagcgccgagttcttagagggaatcccaaccttagtgccctcggatgaaaagaga

SEQ ID NO: 408236 - DNA, 55 bp, Artificial
  Synthetic oligonucleotide
gcatgaggagccgtgggtatattcacgattctattctctcccgttaccacgcccc

SEQ ID NO: 408237 - DNA, 60 bp, Artificial
  Synthetic oligonucleotide
gcatgaggaggaattactttacagctgaagtgtctcactgcagggcaacggaatacataa

SEQ ID NO: 408238 - DNA, 60 bp, Artificial
  Synthetic oligonucleotide
gcatgaggaggaattatttcacagcagaggtgtcccattgtagagccactgagtacataa

SEQ ID NO: 408239 - DNA, 53 bp, Artificial
  Synthetic oligonucleotide
gcatgagggagctttcaacccaagcaaggaaatactgctctaaagtcggagag

SEQ ID NO: 408240 - DNA, 60 bp, Artificial
  Synthetic oligonucleotide
gcatgagtccctctgagccgttagttgtgatatacttatcactaactagcttagagagtc

SEQ ID NO: 408241 - DNA, 55 bp, Artificial
  Synthetic oligonucleotide
gcatgagttcagtgtttcttacttgaaggaggcttgcaatcatgctaagctagtc

SEQ ID NO: 408242 - DNA, 60 bp, Artificial
  Synthetic oligonucleotide
gcatgataaaggcagtccgaggtgatctaaatttcgtaaacagagcgaaccaacgactga

SEQ ID NO: 408243 - DNA, 55 bp, Artificial
  Synthetic oligonucleotide
gcatgataaatctgataaaccgtttcgtaacaagtttggactgcctaaggtaccc

SEQ ID NO: 408244 - DNA, 55 bp, Artificial
  Synthetic oligonucleotide
gcatgataatttaatgggaactatgtggcttaatgctggatcagagattcaagtg

SEQ ID NO: 408245 - DNA, 55 bp, Artificial
  Synthetic oligonucleotide
gcatgataggaaactgatcatgattcttggaactttcggttgtggcaagagctcc

SEQ ID NO: 408246 - DNA, 60 bp, Artificial
  Synthetic oligonucleotide
gcatgatataactttcttatcggaacaatacgttggagatgatacattattttactgtaa

SEQ ID NO: 408247 - DNA, 60 bp, Artificial
  Synthetic oligonucleotide
gcatgatcctgtgcatgttactagataatctgctattgtggtctctatcttagaggtaga

SEQ ID NO: 408248 - DNA, 55 bp, Artificial
  Synthetic oligonucleotide
gcatgatgcgaatgtaaacaatctatataacaaggtgaagagagctttgggttct

SEQ ID NO: 408249 - DNA, 52 bp, Artificial
  Synthetic oligonucleotide
gcatgattaaacacgtactaggtgtctgtttgttcaaagcatgattcaccct

SEQ ID NO: 408250 - DNA, 60 bp, Artificial
  Synthetic oligonucleotide
gcatgattattcatactacataaataacgaagtaaggacagatcagcattgggtaactag

SEQ ID NO: 408251 - DNA, 51 bp, Artificial
  Synthetic oligonucleotide
gcatgattgggcctaaacctaccctcgaggacattgtcctagatttgcaac

SEQ ID NO: 408252 - DNA, 54 bp, Artificial
  Synthetic oligonucleotide
gcatgattttactgcgaaccaaaagtacaagattctcaagtatgacaaaggaac

SEQ ID NO: 408253 - DNA, 60 bp, Artificial
  Synthetic oligonucleotide
gcatgcaaattaatgataccaaaagggactggaggtaaacagatctctaatcaaatcaag

SEQ ID NO: 408254 - DNA, 55 bp, Artificial
  Synthetic oligonucleotide
gcatgcaacccagcatgtatgcagtcgtaatgggcaactatgggatggaaccaac

SEQ ID NO: 408255 - DNA, 55 bp, Artificial
  Synthetic oligonucleotide
gcatgcaagatagcatacactctccaaacagatccttcatcgatacagaggacaa

SEQ ID NO: 408256 - DNA, 60 bp, Artificial
  Synthetic oligonucleotide
gcatgcaatagcaatggtataagattgtataaacagccaaagtacccaagaataatgact

SEQ ID NO: 408257 - DNA, 55 bp, Artificial
  Synthetic oligonucleotide
gcatgcaatatgatgaaaagctgtttgattgcattgggaccatacagagtacagg

SEQ ID NO: 408258 - DNA, 55 bp, Artificial
  Synthetic oligonucleotide
gcatgcaatccagcatgtctctagtcgtaatgagtaattgcgggatgggaccaac

SEQ ID NO: 408259 - DNA, 55 bp, Artificial
  Synthetic oligonucleotide
gcatgcaattgtaagtgcaggaacagaaccaaactgattgttaagcttcgaaggg

SEQ ID NO: 408260 - DNA, 53 bp, Artificial
  Synthetic oligonucleotide
gcatgcacaggaccatacacagctaaattaccagctggtacctcaatagaagg

SEQ ID NO: 408261 - DNA, 60 bp, Artificial
  Synthetic oligonucleotide
gcatgcactcatgcctctaaccctgtatatgcaacgcttaagattcggatctacttctac

SEQ ID NO: 408262 - DNA, 55 bp, Artificial
  Synthetic oligonucleotide
gcatgcagtttctagttaagcgccgcaagcgatctcgccgtcataaccccgagaa

SEQ ID NO: 408263 - DNA, 55 bp, Artificial
  Synthetic oligonucleotide
gcatgcatggtccaattggcctgttaacagcaggcgggagtggttatgtgtgctt

SEQ ID NO: 408264 - DNA, 60 bp, Artificial
  Synthetic oligonucleotide
gcatgccactctgccgcatttgaggatctgagagtgtcaggcttcatcagagggaaaaaa

SEQ ID NO: 408265 - DNA, 60 bp, Artificial
  Synthetic oligonucleotide
gcatgccattctgcagcatttgaggacttgagggtgtcaagtttcatccgaggcgcacga

SEQ ID NO: 408266 - DNA, 60 bp, Artificial
  Synthetic oligonucleotide
gcatgcccatacaatggtagatcttcctttttcaggaatgtagtgtggttgatcaagaag

SEQ ID NO: 408267 - DNA, 55 bp, Artificial
  Synthetic oligonucleotide
gcatgccccaataatatgatgggtactttctcggtgcgaactgtggggtcatcga

SEQ ID NO: 408268 - DNA, 58 bp, Artificial
  Synthetic oligonucleotide
gcatgccccagcgtttatgttccgcaaggaactgggaactctggctttcaagcaaggg

SEQ ID NO: 408269 - DNA, 60 bp, Artificial
  Synthetic oligonucleotide
gcatgcccggagacagcacctacgtgcccataaggcagagggccaagtggtacgcatgtc

SEQ ID NO: 408270 - DNA, 55 bp, Artificial
  Synthetic oligonucleotide
gcatgccctcctatagagcttagaaacacagtaatcgaggatggcgatatggctg

SEQ ID NO: 408271 - DNA, 56 bp, Artificial
  Synthetic oligonucleotide
gcatgccgatcagctaaagaatttgccatattacaagatgacttaacagtattgag

SEQ ID NO: 408272 - DNA, 59 bp, Artificial
  Synthetic oligonucleotide
gcatgccgtcccttcgtggaggttcctggtctccgcgtgattacacgccgcagactcaa

SEQ ID NO: 408273 - DNA, 55 bp, Artificial
  Synthetic oligonucleotide
gcatgcgaattgacagattcaagttggattgaactagatgagataggggaagacg

SEQ ID NO: 408274 - DNA, 55 bp, Artificial
  Synthetic oligonucleotide
gcatgcgacatattgggatgcttaaatcaaaatgtgacaagctaagatgctcaca

SEQ ID NO: 408275 - DNA, 55 bp, Artificial
  Synthetic oligonucleotide
gcatgcgagaataagctacgagcgtgcaggcaacttaagatgattggagcagacg

SEQ ID NO: 408276 - DNA, 55 bp, Artificial
  Synthetic oligonucleotide
gcatgcgagacgtatgattagatctaaaactgtccaccctatctacctaggttcg

SEQ ID NO: 408277 - DNA, 51 bp, Artificial
  Synthetic oligonucleotide
gcatgcgataaatgggaagctgctagacctaaggcaattaggacagcatac

SEQ ID NO: 408278 - DNA, 60 bp, Artificial
  Synthetic oligonucleotide
gcatgcgcactggactggggactttccagactgacgtcgggtgggggagtggccagccca

SEQ ID NO: 408279 - DNA, 60 bp, Artificial
  Synthetic oligonucleotide
gcatgcgcagcgctacatacgttattgtggtatcgattcgcgtgagttaattaatccgac

SEQ ID NO: 408280 - DNA, 55 bp, Artificial
  Synthetic oligonucleotide
gcatgcgcagtgtgatgactcatgttgaggcgtagaagcgccattctgggcgcgg

SEQ ID NO: 408281 - DNA, 55 bp, Artificial
  Synthetic oligonucleotide
gcatgcgcccaatcacgatccgacccttctgccggcctccatcaataagcgcttg

SEQ ID NO: 408282 - DNA, 59 bp, Artificial
  Synthetic oligonucleotide
gcatgcgccgagaaacttaagacagtgcgcatgcgtgagtcaacgcatgcgtactgtac

SEQ ID NO: 408283 - DNA, 60 bp, Artificial
  Synthetic oligonucleotide
gcatgcgctcagtgacgttgttctccacccccgccgcctgtctatatattgcctcgcatc

SEQ ID NO: 408284 - DNA, 60 bp, Artificial
  Synthetic oligonucleotide
gcatgcgtcgaatgacaagctcctgcgctgggaaaattgcttacacactgcaaatcgaca

SEQ ID NO: 408285 - DNA, 55 bp, Artificial
  Synthetic oligonucleotide
gcatgctaagaaggataacgatagatacgttctgggtttatttaagtttttaatg

SEQ ID NO: 408286 - DNA, 60 bp, Artificial
  Synthetic oligonucleotide
gcatgctaagattgcggacacaatttttgatgcgctcacatttcctaacgcgcatcgttt

SEQ ID NO: 408287 - DNA, 55 bp, Artificial
  Synthetic oligonucleotide
gcatgctacaagacatgccactatacatgctaacatatggctacctagactatgt

SEQ ID NO: 408288 - DNA, 60 bp, Artificial
  Synthetic oligonucleotide
gcatgctacatcagttctgttaagcctatggtgtacaccttccaaggcatggcaagtgac

SEQ ID NO: 408289 - DNA, 55 bp, Artificial
  Synthetic oligonucleotide
gcatgctatagtataccttgtgatagctccgctatcccgttttgcatggcacacg

SEQ ID NO: 408290 - DNA, 51 bp, Artificial
  Synthetic oligonucleotide
gcatgctattctactgtgcccccgaatcccagttatgatctctgtataggt

SEQ ID NO: 408291 - DNA, 55 bp, Artificial
  Synthetic oligonucleotide
gcatgctattgaggctcactcccacttactatcatggcttcttagttcaggctct

SEQ ID NO: 408292 - DNA, 55 bp, Artificial
  Synthetic oligonucleotide
gcatgctcataaccaacaaccgcttcacaaatttcctgagctgtggtgtttctca

SEQ ID NO: 408293 - DNA, 50 bp, Artificial
  Synthetic oligonucleotide
gcatgctgaacataatgaataggaggaaaagatccgtgaccatgctcctt

SEQ ID NO: 408294 - DNA, 60 bp, Artificial
  Synthetic oligonucleotide
gcatgctgaagatgatgataggaagaggagcgaaaaggcactcgaatggttactgatggc

SEQ ID NO: 408295 - DNA, 60 bp, Artificial
  Synthetic oligonucleotide
gcatgctgagactgcaggctgtagcatgatcgaggatattgagtcaccatcatcgatatg

SEQ ID NO: 408296 - DNA, 60 bp, Artificial
  Synthetic oligonucleotide
gcatgctgtatctgcgcgatcacccgtggactgaggtcgacgtgcccggttgggggctcg

SEQ ID NO: 408297 - DNA, 52 bp, Artificial
  Synthetic oligonucleotide
gcatgcttaaccttcatgcagggtcacaaaaagtacatgagcatggtggagg

SEQ ID NO: 408298 - DNA, 55 bp, Artificial
  Synthetic oligonucleotide
gcatgcttacccacagacccagcccctcaagaggtacaattaaacatcacagggg

SEQ ID NO: 408299 - DNA, 55 bp, Artificial
  Synthetic oligonucleotide
gcatgcttagacataataacctaacactactcattattcctctggtgccactgcg

SEQ ID NO: 408300 - DNA, 60 bp, Artificial
  Synthetic oligonucleotide
gcatgcttgcactatcaaaagcatactcaactgagatcaaggattggcctgtagcactca

SEQ ID NO: 408301 - DNA, 59 bp, Artificial
  Synthetic oligonucleotide
gcatgctttagtgttaaaagaattcctggaaaatcatcgtctatagtgaaatgtactag

SEQ ID NO: 408302 - DNA, 58 bp, Artificial
  Synthetic oligonucleotide
gcatggaaagtgtaagaaatggaacgtatgactatacacaatactcagaagaatcaag

SEQ ID NO: 408303 - DNA, 55 bp, Artificial
  Synthetic oligonucleotide
gcatggaacgagtggtactcggaaaataccatttgttgtttatgcacatggggct

SEQ ID NO: 408304 - DNA, 52 bp, Artificial
  Synthetic oligonucleotide
gcatggaactttcggtcccgttcatttccgaaaccaagttaaaatacgccgc

SEQ ID NO: 408305 - DNA, 56 bp, Artificial
  Synthetic oligonucleotide
gcatggaagcaagtactggcagaaatacaggacattgaggatgagaagaaaattcc

SEQ ID NO: 408306 - DNA, 60 bp, Artificial
  Synthetic oligonucleotide
gcatggaatatgatgctgttgctactacacactcctggatccctaagaggaaccgctcta

SEQ ID NO: 408307 - DNA, 60 bp, Artificial
  Synthetic oligonucleotide
gcatggaattttctctcactgaccctagattagaaccacacaagtgggagaaatattgtg

SEQ ID NO: 408308 - DNA, 55 bp, Artificial
  Synthetic oligonucleotide
gcatggacgtagaactgggagcaccaagattgctacacccagaatgctcactccc

SEQ ID NO: 408309 - DNA, 60 bp, Artificial
  Synthetic oligonucleotide
gcatggactggcgccttcttccttctagtattagacgatcacttctcttggctaggggtc

SEQ ID NO: 408310 - DNA, 50 bp, Artificial
  Synthetic oligonucleotide
gcatggactgtctgataccattctgcccgctatgcgcgtatattataggc

SEQ ID NO: 408311 - DNA, 60 bp, Artificial
  Synthetic oligonucleotide
gcatggagagcgtcagaaatgggacttatgattacctaaagtactcagaagaatcaaaac

SEQ ID NO: 408312 - DNA, 60 bp, Artificial
  Synthetic oligonucleotide
gcatggagataccgaatgattgccccgggagttgaagccgtgaccacacgcgttgagaaa

SEQ ID NO: 408313 - DNA, 53 bp, Artificial
  Synthetic oligonucleotide
gcatggagccctgaaggaaaactgaaatacccgtttggattaacgtaacaaac

SEQ ID NO: 408314 - DNA, 60 bp, Artificial
  Synthetic oligonucleotide
gcatggagctatacgcaagtttacagcgcaaacttgaacgcgatttcacatgggatgagt

SEQ ID NO: 408315 - DNA, 55 bp, Artificial
  Synthetic oligonucleotide
gcatggagtcaatcagaaatggaacttacgaccatgacgaatacagagacgaagc

SEQ ID NO: 408316 - DNA, 55 bp, Artificial
  Synthetic oligonucleotide
gcatggagtggtgcggttgatactacacatgtaacctttgatatggttgacgggg

SEQ ID NO: 408317 - DNA, 60 bp, Artificial
  Synthetic oligonucleotide
gcatggagttgcctagctttggagtgtctgggattaatgaatcggctgacatgagcattg

SEQ ID NO: 408318 - DNA, 55 bp, Artificial
  Synthetic oligonucleotide
gcatggatagccttgaaggagcgtcccctgctttgcccgcagtagctttgcctcg

SEQ ID NO: 408319 - DNA, 55 bp, Artificial
  Synthetic oligonucleotide
gcatggatattagctgttagacattttcctatgacctggctccatggtttaggac

SEQ ID NO: 408320 - DNA, 55 bp, Artificial
  Synthetic oligonucleotide
gcatggatcaacggtgattggtccactccatgtgctggttcatggttacgtgacg

SEQ ID NO: 408321 - DNA, 60 bp, Artificial
  Synthetic oligonucleotide
gcatggatcaagacaggagaactacgaatccgtatcgagatgggcgcttacccatacatg

SEQ ID NO: 408322 - DNA, 55 bp, Artificial
  Synthetic oligonucleotide
gcatggattattaagtggtccctacgcactaatgttgacaggcaattgtatggcg

SEQ ID NO: 408323 - DNA, 55 bp, Artificial
  Synthetic oligonucleotide
gcatggatttaggcactttccccggtgactgcgggtgcccctactttttcaagcg

SEQ ID NO: 408324 - DNA, 55 bp, Artificial
  Synthetic oligonucleotide
gcatggcaagagatacaaatctacataaacaaagtggtgtgattgcacaaaatcc

SEQ ID NO: 408325 - DNA, 55 bp, Artificial
  Synthetic oligonucleotide
gcatggcaatactacaacaattagcttttgcacaggcactaaactacgaacaccg

SEQ ID NO: 408326 - DNA, 55 bp, Artificial
  Synthetic oligonucleotide
gcatggcacacatacgattacggttcgcgtagccaacgctgaggatgggttcgcc

SEQ ID NO: 408327 - DNA, 58 bp, Artificial
  Synthetic oligonucleotide
gcatggcacgcagccagcggactgggtaggttaaatccccgctccgtcgccggttaca

SEQ ID NO: 408328 - DNA, 55 bp, Artificial
  Synthetic oligonucleotide
gcatggcactacaagaagacacttgctctgatcaacagcgagagggtgatgctca

SEQ ID NO: 408329 - DNA, 59 bp, Artificial
  Synthetic oligonucleotide
gcatggccaggagatcaaaactggccacctataaatgcagaccaaacaaattttaactg

SEQ ID NO: 408330 - DNA, 55 bp, Artificial
  Synthetic oligonucleotide
gcatggccattttccagcacaggttcagctggtatggcatgcatgcatcgactgc

SEQ ID NO: 408331 - DNA, 51 bp, Artificial
  Synthetic oligonucleotide
gcatggcgattcacgaccagtggcggcagacgtatttctcgacgccgtcga

SEQ ID NO: 408332 - DNA, 52 bp, Artificial
  Synthetic oligonucleotide
gcatggcgattccaatgttatggctgttcttagcgtcaccagcgatcttaga

SEQ ID NO: 408333 - DNA, 55 bp, Artificial
  Synthetic oligonucleotide
gcatggcgcgagcctgcaccttagaacgagaacgattgaagcgtaagttactcct

SEQ ID NO: 408334 - DNA, 55 bp, Artificial
  Synthetic oligonucleotide
gcatggcgggcggtggtgtcaaatgtcaaaggtcacagcctgtcatgcttgcaca

SEQ ID NO: 408335 - DNA, 55 bp, Artificial
  Synthetic oligonucleotide
gcatggcgtaaagcagttgagacaccaacatcgtcaggtgagcggaaacaagtcg

SEQ ID NO: 408336 - DNA, 55 bp, Artificial
  Synthetic oligonucleotide
gcatggctactcaatcgcagctacgtgcagtcaccgacgacgagcgagtgccgga

SEQ ID NO: 408337 - DNA, 55 bp, Artificial
  Synthetic oligonucleotide
gcatggctagcgatgagattgtccgtaatctgatctcccgtgaggaggtgatggg

SEQ ID NO: 408338 - DNA, 55 bp, Artificial
  Synthetic oligonucleotide
gcatggctcccagcatagcgggatgattggatatgaaactgacgaagatagagcg

SEQ ID NO: 408339 - DNA, 59 bp, Artificial
  Synthetic oligonucleotide
gcatggctctcctcgggtcgacctgacgggtttatacatgttcagggccacctacagga

SEQ ID NO: 408340 - DNA, 55 bp, Artificial
  Synthetic oligonucleotide
gcatggctgcaccaatggggtagctgatcatgagctaaacactcgtctcccagcc

SEQ ID NO: 408341 - DNA, 56 bp, Artificial
  Synthetic oligonucleotide
gcatggctgcagacaaagagtcaacacaaaaggctattgatcaaataacaaccaag

SEQ ID NO: 408342 - DNA, 60 bp, Artificial
  Synthetic oligonucleotide
gcatggcttgggatatgataatgaattggtcacctacaacagccctagtggtatcgcagc

SEQ ID NO: 408343 - DNA, 54 bp, Artificial
  Synthetic oligonucleotide
gcatgggaatgtgttgttaatagagcccaccaggcccctttgcgaaaacgtttg

SEQ ID NO: 408344 - DNA, 55 bp, Artificial
  Synthetic oligonucleotide
gcatgggagaacaccactgttgatcttgagggcaaaccatcagtgaaccaccctc

SEQ ID NO: 408345 - DNA, 55 bp, Artificial
  Synthetic oligonucleotide
gcatgggagaagcacgggagtgtccagccacacgccagtcaggatacccctgacc

SEQ ID NO: 408346 - DNA, 60 bp, Artificial
  Synthetic oligonucleotide
gcatgggcatcactcatagagttgggaaacgattttgtgctaagtctatctgggttactg

SEQ ID NO: 408347 - DNA, 60 bp, Artificial
  Synthetic oligonucleotide
gcatgggcccataccgagatggatgcagcccctctgcaagcggctatgcaccctcttacc

SEQ ID NO: 408348 - DNA, 60 bp, Artificial
  Synthetic oligonucleotide
gcatgggccccatatacaacagaatgggaacagtgaccacagaggtggcttttggtctag

SEQ ID NO: 408349 - DNA, 55 bp, Artificial
  Synthetic oligonucleotide
gcatgggcggggcttacataacctctcgctattggtcggttcccgcccacgtgac

SEQ ID NO: 408350 - DNA, 55 bp, Artificial
  Synthetic oligonucleotide
gcatggggataccccgatttagttcatgaaattcgaaagttttacgcgtggcttc

SEQ ID NO: 408351 - DNA, 55 bp, Artificial
  Synthetic oligonucleotide
gcatggggtcacaaggaattattgtatgagatacgattgttctacaaatgggtca

SEQ ID NO: 408352 - DNA, 52 bp, Artificial
  Synthetic oligonucleotide
gcatgggtaaaggtgatagaagagaaggcttttagcccagaagtgataccca

SEQ ID NO: 408353 - DNA, 60 bp, Artificial
  Synthetic oligonucleotide
gcatgggtctcatatacaacagaatgggaacggtgaccacagaagtggcctttggcctgg

SEQ ID NO: 408354 - DNA, 55 bp, Artificial
  Synthetic oligonucleotide
gcatgggttagctctaccggcattgtgaagaaggggcttgagtggttcgagaaga

SEQ ID NO: 408355 - DNA, 60 bp, Artificial
  Synthetic oligonucleotide
gcatgggttcacaggtgtccactcaacgctccggctcgcatgaaaactctaactcagcta

SEQ ID NO: 408356 - DNA, 58 bp, Artificial
  Synthetic oligonucleotide
gcatggtaaagttgggcaggggatatctgcatggagtaaaaccttttgcgccttgtta

SEQ ID NO: 408357 - DNA, 55 bp, Artificial
  Synthetic oligonucleotide
gcatggtagggtccaatttccaaacgaaaagcataaccagtgtggtctcggaaac

SEQ ID NO: 408358 - DNA, 55 bp, Artificial
  Synthetic oligonucleotide
gcatggtataccagacaagttgtatgagatgttatgggacatagtttgcaaatac

SEQ ID NO: 408359 - DNA, 58 bp, Artificial
  Synthetic oligonucleotide
gcatggtccacacaggttaggcccgatactaaactcagtgaggatggttgcccctacc

SEQ ID NO: 408360 - DNA, 60 bp, Artificial
  Synthetic oligonucleotide
gcatggtctacatcctgatataactaagtgcacttccgaatggctgagttttccacgccc

SEQ ID NO: 408361 - DNA, 56 bp, Artificial
  Synthetic oligonucleotide
gcatggtctctaaggggtggaggctgctggcgcccattacggcctacgcccagcag

SEQ ID NO: 408362 - DNA, 60 bp, Artificial
  Synthetic oligonucleotide
gcatggtcttgacaaaatatgccttggacatcatgcagtccccaatggcaccatcgtaaa

SEQ ID NO: 408363 - DNA, 57 bp, Artificial
  Synthetic oligonucleotide
gcatggtgaaaagtattacaggactgtggcttcccgggtctccaaggaggccgccca

SEQ ID NO: 408364 - DNA, 55 bp, Artificial
  Synthetic oligonucleotide
gcatggtgagcctgatggatgcttgggaatcaactgcaagcacactaaaacgccg

SEQ ID NO: 408365 - DNA, 55 bp, Artificial
  Synthetic oligonucleotide
gcatggtgcccacgcccaccacgagctgtgccttatcaacacactcactccacca

SEQ ID NO: 408366 - DNA, 54 bp, Artificial
  Synthetic oligonucleotide
gcatggtgtcctagagcaccaagggctgtgccttatacacatgctcacgtcacc

SEQ ID NO: 408367 - DNA, 60 bp, Artificial
  Synthetic oligonucleotide
gcatggttagttaaacatggttttgaatcaaccatggctaactatacacatcattgggga

SEQ ID NO: 408368 - DNA, 55 bp, Artificial
  Synthetic oligonucleotide
gcatggttctttgtcccatcagggtgtgatctagacgacgtgcacaatccgacaa

SEQ ID NO: 408369 - DNA, 55 bp, Artificial
  Synthetic oligonucleotide
gcatgtaagcttgttaaaaacgtcagtgcgtactttgacatgctgaaaacatcac

SEQ ID NO: 408370 - DNA, 60 bp, Artificial
  Synthetic oligonucleotide
gcatgtacacaatcagacttggtggagagactgatattaaggaggccatttttgcaatga

SEQ ID NO: 408371 - DNA, 55 bp, Artificial
  Synthetic oligonucleotide
gcatgtacagcagccaagggcctagagtggattggcgacaagctctcaaagtttg

SEQ ID NO: 408372 - DNA, 55 bp, Artificial
  Synthetic oligonucleotide
gcatgtacatacccctgttttccagggtagacggtgacaatggagaaatcactgt

SEQ ID NO: 408373 - DNA, 55 bp, Artificial
  Synthetic oligonucleotide
gcatgtaccgagtgtttgaagtaggtgttataaggaatccaggcttgggggcccc

SEQ ID NO: 408374 - DNA, 60 bp, Artificial
  Synthetic oligonucleotide
gcatgtacgtcacattcgcatccgcttggaacactacgcttcccgggagagcattcgaga

SEQ ID NO: 408375 - DNA, 58 bp, Artificial
  Synthetic oligonucleotide
gcatgtacgttcgaacctcgttcattgcaacagttatcacttagaacttttgtagaaa

SEQ ID NO: 408376 - DNA, 55 bp, Artificial
  Synthetic oligonucleotide
gcatgtactgacgaactatcatgtcgatgagagggaagcatcgagcttcgatttc

SEQ ID NO: 408377 - DNA, 55 bp, Artificial
  Synthetic oligonucleotide
gcatgtacttcgcaaaagtcgtgtggaacatcctactcactacgcaagttcctcc

SEQ ID NO: 408378 - DNA, 60 bp, Artificial
  Synthetic oligonucleotide
gcatgtagtatgggcagcaaacgaattggacagatttggattagcagaaagcctgttgga

SEQ ID NO: 408379 - DNA, 54 bp, Artificial
  Synthetic oligonucleotide
gcatgtagtgaagggtaagtgtccgtattttgaacaatacttgagagagaggag

SEQ ID NO: 408380 - DNA, 55 bp, Artificial
  Synthetic oligonucleotide
gcatgtagttggttcgttacttcagtagtgacaatttcacgaccccaccgaagct

SEQ ID NO: 408381 - DNA, 60 bp, Artificial
  Synthetic oligonucleotide
gcatgtataaccacaagttccgcttctagctgctgaatcatgtaacagctgacgcttagg

SEQ ID NO: 408382 - DNA, 60 bp, Artificial
  Synthetic oligonucleotide
gcatgtataacgactcgagaacgttgtacatgacacaaagacatcaagagctactactag

SEQ ID NO: 408383 - DNA, 55 bp, Artificial
  Synthetic oligonucleotide
gcatgtataacgatgaatatgcaacacgtacaaacattaacgaccgagaaattgc

SEQ ID NO: 408384 - DNA, 55 bp, Artificial
  Synthetic oligonucleotide
gcatgtataagatcatggataatggtgatcaatgttttctctggagtgcaatgag

SEQ ID NO: 408385 - DNA, 60 bp, Artificial
  Synthetic oligonucleotide
gcatgtatcgtatgttttgacacagtatcgttcgtcgactgtccaactcggttcagatct

SEQ ID NO: 408386 - DNA, 55 bp, Artificial
  Synthetic oligonucleotide
gcatgtatgatgacagaccatcaccttcaaccgacgggtgataggcaagccgaca

SEQ ID NO: 408387 - DNA, 55 bp, Artificial
  Synthetic oligonucleotide
gcatgtcaaacagtttcctgatgtcatctgacccttgtgctgtgaacaccatgga

SEQ ID NO: 408388 - DNA, 55 bp, Artificial
  Synthetic oligonucleotide
gcatgtcaaccaagacatgcaaagattgccatcaaccatctaatttcaagaaatg

SEQ ID NO: 408389 - DNA, 55 bp, Artificial
  Synthetic oligonucleotide
gcatgtcaatgacaacttttaattttcccacgagagaatccttgatcatgtacag

SEQ ID NO: 408390 - DNA, 60 bp, Artificial
  Synthetic oligonucleotide
gcatgtcagaatggatttatgccagaattaatgaagtagaaggcgaaggacattggtcat

SEQ ID NO: 408391 - DNA, 55 bp, Artificial
  Synthetic oligonucleotide
gcatgtcaggagatagggactacaccctataagatgaatatgttagctcaagctc

SEQ ID NO: 408392 - DNA, 55 bp, Artificial
  Synthetic oligonucleotide
gcatgtcaggcttcaggccgacccgcggctacgtacaagagacctatggggtcga

SEQ ID NO: 408393 - DNA, 60 bp, Artificial
  Synthetic oligonucleotide
gcatgtcattgattcttatggatcactaactgttgggtatcacgtgctcaaggccggaac

SEQ ID NO: 408394 - DNA, 55 bp, Artificial
  Synthetic oligonucleotide
gcatgtcgagatgtgggatccgaaggatttaagatgcaattattagcacaagctt

SEQ ID NO: 408395 - DNA, 55 bp, Artificial
  Synthetic oligonucleotide
gcatgtcggggctatcgaagtcattttcaacagctatgcatcacctacaagtgat

SEQ ID NO: 408396 - DNA, 59 bp, Artificial
  Synthetic oligonucleotide
gcatgtcgtacaaacgaagagcatgggtaaatcggcctatgaatcggaaacccagattc

SEQ ID NO: 408397 - DNA, 55 bp, Artificial
  Synthetic oligonucleotide
gcatgtctggtggggcggggatgtacttaacgcctgcaacgttagctgacgtggc

SEQ ID NO: 408398 - DNA, 59 bp, Artificial
  Synthetic oligonucleotide
gcatgtctgtactcggagcctggactagacacaccagcaaaagactactacaagactgt

SEQ ID NO: 408399 - DNA, 56 bp, Artificial
  Synthetic oligonucleotide
gcatgtctgtgattattctttagacatcgacggaacagttaggctaccccgtatcc

SEQ ID NO: 408400 - DNA, 55 bp, Artificial
  Synthetic oligonucleotide
gcatgtctgtgttggtacggccacacccggagggacctcaccttgtaggcaggag

SEQ ID NO: 408401 - DNA, 57 bp, Artificial
  Synthetic oligonucleotide
gcatgtcttattacaggttgtactatgttaaggattggtttgaatgtaacccagttc

SEQ ID NO: 408402 - DNA, 60 bp, Artificial
  Synthetic oligonucleotide
gcatgtgaatgaccaaaatttctcgcctgatttgggctcctaatgaaccaggctatacgt

SEQ ID NO: 408403 - DNA, 55 bp, Artificial
  Synthetic oligonucleotide
gcatgtgaatgttccaaaagttgatcgcaaagtcgtcagtctggtagtgcgacca

SEQ ID NO: 408404 - DNA, 55 bp, Artificial
  Synthetic oligonucleotide
gcatgtgactcttgatagcgaataccgcctgtcttttgctatgagtcacgtcgtt

SEQ ID NO: 408405 - DNA, 60 bp, Artificial
  Synthetic oligonucleotide
gcatgtgatgaccaggagaccagttgtgtacttcatcatgtctatgtccttcgtcagacc

SEQ ID NO: 408406 - DNA, 60 bp, Artificial
  Synthetic oligonucleotide
gcatgtgattctgccatgtgttatggagccacagtgacaaatctgcttagagggtctaac

SEQ ID NO: 408407 - DNA, 60 bp, Artificial
  Synthetic oligonucleotide
gcatgtgcaagggacacccactgcatatccatgtttgaacctgcgacacgtgggattgac

SEQ ID NO: 408408 - DNA, 55 bp, Artificial
  Synthetic oligonucleotide
gcatgtgcaccagatagatgcccgcctacagccctgtatgttgcaggagtaccag

SEQ ID NO: 408409 - DNA, 60 bp, Artificial
  Synthetic oligonucleotide
gcatgtgcatgcattttactagtgaaaaggataggatgtggctgcattggccggccactg

SEQ ID NO: 408410 - DNA, 55 bp, Artificial
  Synthetic oligonucleotide
gcatgtgcccagaggtgatgatggtgttcctaagagaactaggaataaaaggacc

SEQ ID NO: 408411 - DNA, 53 bp, Artificial
  Synthetic oligonucleotide
gcatgtgctacccaccaagttgaaggtctcaactgtccccagctcacctcccc

SEQ ID NO: 408412 - DNA, 55 bp, Artificial
  Synthetic oligonucleotide
gcatgtgctattggctgcaggcctctcagaaccgggtgactgtggtggaatcctg

SEQ ID NO: 408413 - DNA, 56 bp, Artificial
  Synthetic oligonucleotide
gcatgtggaggaatgttcctgttacccccggtatccagaagtaaggtgtgtttgta

SEQ ID NO: 408414 - DNA, 55 bp, Artificial
  Synthetic oligonucleotide
gcatgtggaggattgactagctgagattccatatgaagaagaaaggccgcgcagc

SEQ ID NO: 408415 - DNA, 55 bp, Artificial
  Synthetic oligonucleotide
gcatgtggatagggaacacccataccgaacgtggcagtactggggtagctatcgc

SEQ ID NO: 408416 - DNA, 55 bp, Artificial
  Synthetic oligonucleotide
gcatgtggcacgcaaccagttaggattacagcaagagatattgttaacgctacat

SEQ ID NO: 408417 - DNA, 55 bp, Artificial
  Synthetic oligonucleotide
gcatgtggcatatggtcgctatgcggatcctagtggaaacattacacatgttagc

SEQ ID NO: 408418 - DNA, 55 bp, Artificial
  Synthetic oligonucleotide
gcatgtggccaatacaattataccatctgatagctatattcctggagctctggcg

SEQ ID NO: 408419 - DNA, 57 bp, Artificial
  Synthetic oligonucleotide
gcatgtgtacttagggtggatgagtcagcgtttcatttgcccccctgttttgggaac

SEQ ID NO: 408420 - DNA, 55 bp, Artificial
  Synthetic oligonucleotide
gcatgtgttaaggagcttgtagctgaactgaggtggcaatataataggttcgctg

SEQ ID NO: 408421 - DNA, 60 bp, Artificial
  Synthetic oligonucleotide
gcatgtgttggatccagctgaggcggaagggaagaatctgtctgattcggagactgtcta

SEQ ID NO: 408422 - DNA, 60 bp, Artificial
  Synthetic oligonucleotide
gcatgtgtttaaacgagtgatatccgttgagaaggattctacgatgattgacctcgaagg

SEQ ID NO: 408423 - DNA, 52 bp, Artificial
  Synthetic oligonucleotide
gcatgttacagatagtcatcttttatcagatcctcctagaagtaggagcgta

SEQ ID NO: 408424 - DNA, 60 bp, Artificial
  Synthetic oligonucleotide
gcatgttagcaataaagctcagtcccctgcgcacgataacctgtgtcccctatataagga

SEQ ID NO: 408425 - DNA, 54 bp, Artificial
  Synthetic oligonucleotide
gcatgttcacaatctctctgtaccatggacagcgctggttaatcatacagcccc

SEQ ID NO: 408426 - DNA, 55 bp, Artificial
  Synthetic oligonucleotide
gcatgttcacggataattatggaaactttgacttcttcccgaacacatcaatgcc

SEQ ID NO: 408427 - DNA, 59 bp, Artificial
  Synthetic oligonucleotide
gcatgttcccaccatcaataagacaggctccagctttcacagcagctgacaaactgagg

SEQ ID NO: 408428 - DNA, 59 bp, Artificial
  Synthetic oligonucleotide
gcatgttcctggggcatggttatgttaatgcttgtaagatttaaatgtgcaaaaactag

SEQ ID NO: 408429 - DNA, 59 bp, Artificial
  Synthetic oligonucleotide
gcatgttctacttcttggatccatcaagatatctcccaaaaaaacaacattatccccta

SEQ ID NO: 408430 - DNA, 55 bp, Artificial
  Synthetic oligonucleotide
gcatgttctcaatagaatgacattaaaagccaaggttcagtacacaatggaaccc

SEQ ID NO: 408431 - DNA, 50 bp, Artificial
  Synthetic oligonucleotide
gcatgttgagagcatcgttgcgatgaatcacttcttgcattgcgcgaaag

SEQ ID NO: 408432 - DNA, 57 bp, Artificial
  Synthetic oligonucleotide
gcatgttggctcggatatgtttggtaacatttatggtgggtttgaagaccaacctag

SEQ ID NO: 408433 - DNA, 60 bp, Artificial
  Synthetic oligonucleotide
gcatgttggtggacaggcatacaacatgagtttgggataccatataatccacaaagtcaa

SEQ ID NO: 408434 - DNA, 60 bp, Artificial
  Synthetic oligonucleotide
gcatgttgtagttgaactgtatctgaactgtaatgatgtcgtgttcccgtaggaatggcc

SEQ ID NO: 408435 - DNA, 55 bp, Artificial
  Synthetic oligonucleotide
gcatgttgtggccctagaaattacaatgctatatcgagtgttatttgtcatctcg

SEQ ID NO: 408436 - DNA, 56 bp, Artificial
  Synthetic oligonucleotide
gcatgttgttaaaggaaagtgcccctattttgcacaatatctttcagtgaatcaag

SEQ ID NO: 408437 - DNA, 60 bp, Artificial
  Synthetic oligonucleotide
gcatgtttagcgctactcacggacttcaagctggggacaatacggaggatgcagtcacca

SEQ ID NO: 408438 - DNA, 53 bp, Artificial
  Synthetic oligonucleotide
gcatgtttcccgaatttgatccctcccctcctgatcccactcgccctgagcca

SEQ ID NO: 408439 - DNA, 55 bp, Artificial
  Synthetic oligonucleotide
gcattaaacgatgctacaattggtgacgctcataatatccctaatagagacagcc

SEQ ID NO: 408440 - DNA, 55 bp, Artificial
  Synthetic oligonucleotide
gcattaaagttccagttgaggctaaaataaatcaagaaagagaaggaatagggta

SEQ ID NO: 408441 - DNA, 56 bp, Artificial
  Synthetic oligonucleotide
gcattaacaattcagtcagaaacacaattcttaacaggcataaattcgcaagcagc

SEQ ID NO: 408442 - DNA, 60 bp, Artificial
  Synthetic oligonucleotide
gcattaacagatatagtaccactgactgaggaagcagaattagaattggcagagaacagg

SEQ ID NO: 408443 - DNA, 58 bp, Artificial
  Synthetic oligonucleotide
gcattaacataggtaacagatacgtggacgtgcctatacgcccagtgtctgttgccga

SEQ ID NO: 408444 - DNA, 60 bp, Artificial
  Synthetic oligonucleotide
gcattaacgttccttggcaacatgacaccgccatccataggaaactcgttcctatcagtc

SEQ ID NO: 408445 - DNA, 60 bp, Artificial
  Synthetic oligonucleotide
gcattaagatgatgggtgatgcggtggttatctcgcacagtgaaatgttgggtgccatta

SEQ ID NO: 408446 - DNA, 55 bp, Artificial
  Synthetic oligonucleotide
gcattaagtactttggaattgggaagatacaaattggtaaaaatgaggacaacta

SEQ ID NO: 408447 - DNA, 59 bp, Artificial
  Synthetic oligonucleotide
gcattaatggacaatgcccttattgcatgacaataactgaggcaactgaaagtgccttg

SEQ ID NO: 408448 - DNA, 59 bp, Artificial
  Synthetic oligonucleotide
gcattacaagtccatccttgttaagatcatgtggtggtgtcagtacttcctcaccagat

SEQ ID NO: 408449 - DNA, 55 bp, Artificial
  Synthetic oligonucleotide
gcattaccacagactttatcacaagtaactaaagaagaaggaattctagtcgcct

SEQ ID NO: 408450 - DNA, 60 bp, Artificial
  Synthetic oligonucleotide
gcattaccggtaggtgcatatccagtaatgagtggcggtgcagtaacactgtcaccagcg

SEQ ID NO: 408451 - DNA, 60 bp, Artificial
  Synthetic oligonucleotide
gcattacctcaccggagtgctggccagtttccaaaacaggctcgctcgctcactcggggc

SEQ ID NO: 408452 - DNA, 60 bp, Artificial
  Synthetic oligonucleotide
gcattacctgtaactcaactatcacaggtctattattgacaagagatggtggtcagaata

SEQ ID NO: 408453 - DNA, 55 bp, Artificial
  Synthetic oligonucleotide
gcattacctgtaggaaattttccagttatgtcaggaggcgccgtatcgttgcatc

SEQ ID NO: 408454 - DNA, 51 bp, Artificial
  Synthetic oligonucleotide
gcattacgacacgcctcatcgggaatgttatcgccgttattgggccaccaa

SEQ ID NO: 408455 - DNA, 55 bp, Artificial
  Synthetic oligonucleotide
gcattacgataaacccactaacggaaatcattacattctgggtactctgacgcag

SEQ ID NO: 408456 - DNA, 51 bp, Artificial
  Synthetic oligonucleotide
gcattacgggtattcagtttctattagcagaagttggcttcatcatagact

SEQ ID NO: 408457 - DNA, 57 bp, Artificial
  Synthetic oligonucleotide
gcattacgtcgctgttatatggcttcatttagacgatcgtcacattgattcgacccg

SEQ ID NO: 408458 - DNA, 55 bp, Artificial
  Synthetic oligonucleotide
gcattacgtggtgtcagcaataggatgttcggactggacggtagggtaggcacac

SEQ ID NO: 408459 - DNA, 60 bp, Artificial
  Synthetic oligonucleotide
gcattactaggggctagacatagcaatgggaccattaaagacagaacaccatataggtct

SEQ ID NO: 408460 - DNA, 55 bp, Artificial
  Synthetic oligonucleotide
gcattactatggcttacaaatccatcactcttgctaagcgtgctgtgaacaaggc

SEQ ID NO: 408461 - DNA, 60 bp, Artificial
  Synthetic oligonucleotide
gcattactcattagctgacttggcagtatgacacagcacttcagccagctggcccttcca

SEQ ID NO: 408462 - DNA, 60 bp, Artificial
  Synthetic oligonucleotide
gcattacttacatactttgtggaaggctggcattctatataagagagaaactacacgcag

SEQ ID NO: 408463 - DNA, 58 bp, Artificial
  Synthetic oligonucleotide
gcattacttgctctgggctactcaaagagaccgagccacagctgaacaaatgtggtgt

SEQ ID NO: 408464 - DNA, 55 bp, Artificial
  Synthetic oligonucleotide
gcattagagggtctgtctgaggccgaggctcttgctagcctaggaatctctgctg

SEQ ID NO: 408465 - DNA, 55 bp, Artificial
  Synthetic oligonucleotide
gcattagcccgtgtccgtgctgccacccaacgtaaggtggaagaggttaccgccc

SEQ ID NO: 408466 - DNA, 56 bp, Artificial
  Synthetic oligonucleotide
gcattagccgaggcgattcggaaagcaaggaacaagtcattaggggcgcggggtaa

SEQ ID NO: 408467 - DNA, 55 bp, Artificial
  Synthetic oligonucleotide
gcattagcttcagcaattgagaagttcaacatgtcaccctcgtgtgtagctatcg

SEQ ID NO: 408468 - DNA, 55 bp, Artificial
  Synthetic oligonucleotide
gcattaggaaacatggagacaaaagaatcaaaggcaatacgccagcatgctgaga

SEQ ID NO: 408469 - DNA, 58 bp, Artificial
  Synthetic oligonucleotide
gcattaggaatcatacaagcacaaccagataagagtgaatcagagttagttaaccaga

SEQ ID NO: 408470 - DNA, 60 bp, Artificial
  Synthetic oligonucleotide
gcattaggagcgctaggtggagggttattcggtatagcgctggctgtgatagctacatcg

SEQ ID NO: 408471 - DNA, 55 bp, Artificial
  Synthetic oligonucleotide
gcattagggatcattcaagcacaaccagacaaaagtgagtcagatttagtcaatc

SEQ ID NO: 408472 - DNA, 52 bp, Artificial
  Synthetic oligonucleotide
gcattagtagtatcagctataatagcaatagttgtgtggaccatagtgggca

SEQ ID NO: 408473 - DNA, 55 bp, Artificial
  Synthetic oligonucleotide
gcattagtattgtatatggcttgtactcatgctagcaatcctgtgtatgctacgc

SEQ ID NO: 408474 - DNA, 57 bp, Artificial
  Synthetic oligonucleotide
gcattagttaaatgctttacgactaaaatacggaatttatgttatgtaccgcattca

SEQ ID NO: 408475 - DNA, 55 bp, Artificial
  Synthetic oligonucleotide
gcattatagagaattgctaagatgcagtaatataagagccacgctgctcagcaag

SEQ ID NO: 408476 - DNA, 55 bp, Artificial
  Synthetic oligonucleotide
gcattatataccgctctagttagtagtgggttatctgtttgaatcacttcaccct

SEQ ID NO: 408477 - DNA, 60 bp, Artificial
  Synthetic oligonucleotide
gcattatatatgttgtcgacacgtgggaggcagactgtgaaggaaaacaaggggacaaga

SEQ ID NO: 408478 - DNA, 60 bp, Artificial
  Synthetic oligonucleotide
gcattatctgagggagcaactccttatgacttaaatagtatgcttaatgctattggggat

SEQ ID NO: 408479 - DNA, 51 bp, Artificial
  Synthetic oligonucleotide
gcattatgcttcagttatcttggacaaagatgttactgtgtgtacacccaa

SEQ ID NO: 408480 - DNA, 55 bp, Artificial
  Synthetic oligonucleotide
gcattatggatgtgtttagaagaatgtattggagcacttctctatcagtcgcctc

SEQ ID NO: 408481 - DNA, 55 bp, Artificial
  Synthetic oligonucleotide
gcattatggcagttgttcggagaagggagccatgctggtcatgaaattagtctgc

SEQ ID NO: 408482 - DNA, 60 bp, Artificial
  Synthetic oligonucleotide
gcattatggcttaatctaggatgtaatttgttatctggagaataggttatatggtgactc

SEQ ID NO: 408483 - DNA, 54 bp, Artificial
  Synthetic oligonucleotide
gcattatggtccaaattgttccccgagtgtattactatcccgaaaaagcaatcc

SEQ ID NO: 408484 - DNA, 55 bp, Artificial
  Synthetic oligonucleotide
gcattatgttgggactcatggtatcgaggaagtgttcgcctggtgtcaacgtctg

SEQ ID NO: 408485 - DNA, 60 bp, Artificial
  Synthetic oligonucleotide
gcattattaaaatgcgaagaatggtgctggtatgctacttccccacataatgagacagga

SEQ ID NO: 408486 - DNA, 51 bp, Artificial
  Synthetic oligonucleotide
gcattattgagaaataccctaatgtcagatgggctccagtatcctacatat

SEQ ID NO: 408487 - DNA, 60 bp, Artificial
  Synthetic oligonucleotide
gcattattggatgcctgcgtgcaccctaagcaatccccggccctcttctctataagagga

SEQ ID NO: 408488 - DNA, 60 bp, Artificial
  Synthetic oligonucleotide
gcattatttgacccctcaagatgctacagctattgacaagccaactcagcccgacacttc

SEQ ID NO: 408489 - DNA, 60 bp, Artificial
  Synthetic oligonucleotide
gcattcaagccttgtgatgtggacactaaaataggcaatgctcggtgttgtccatttatc

SEQ ID NO: 408490 - DNA, 55 bp, Artificial
  Synthetic oligonucleotide
gcattcaaggtgagtgttattgggtgatgactgatggaccagcaaacaggcaagc

SEQ ID NO: 408491 - DNA, 60 bp, Artificial
  Synthetic oligonucleotide
gcattcaatacggataatgggggtatgctcccagaagtttggatgagtggaactactctg

SEQ ID NO: 408492 - DNA, 55 bp, Artificial
  Synthetic oligonucleotide
gcattcaatgccttggcgtatgagtcgttagcactctggcagcctcctctagcac

SEQ ID NO: 408493 - DNA, 55 bp, Artificial
  Synthetic oligonucleotide
gcattcaatggggagatgattgatccttttcagttgggccttctggtgatctttc

SEQ ID NO: 408494 - DNA, 55 bp, Artificial
  Synthetic oligonucleotide
gcattcacagagccgtcccttgtagaagttccacagagtggtgaggtttcgggac

SEQ ID NO: 408495 - DNA, 50 bp, Artificial
  Synthetic oligonucleotide
gcattcacgtaatcttctagataggctggcgtacgttccgcgcgtctttc

SEQ ID NO: 408496 - DNA, 55 bp, Artificial
  Synthetic oligonucleotide
gcattcacgtgcagtgcaatactagtaaattccaccaaggagcactcctagtcgc

SEQ ID NO: 408497 - DNA, 57 bp, Artificial
  Synthetic oligonucleotide
gcattcactgacaactcgtctccccccgcagtaccgcaaacataccaagtggggtat

SEQ ID NO: 408498 - DNA, 56 bp, Artificial
  Synthetic oligonucleotide
gcattcacttgattcagattttagtgatagcgctttatttgactcatttgtgtgcg

SEQ ID NO: 408499 - DNA, 55 bp, Artificial
  Synthetic oligonucleotide
gcattcagggcgagtgttattgggtaatgacagatgggccagcgaacagacaagc

SEQ ID NO: 408500 - DNA, 58 bp, Artificial
  Synthetic oligonucleotide
gcattcagtagaaaaggctaatattgaaggtgggaagtattacgaacacgctcctata

SEQ ID NO: 408501 - DNA, 60 bp, Artificial
  Synthetic oligonucleotide
gcattcagtattacaatggtgccttacatcattcgataacatgtacatcaataatgtcca

SEQ ID NO: 408502 - DNA, 60 bp, Artificial
  Synthetic oligonucleotide
gcattcagttctagctgacatcgaagaagtcaacaaacaagttgcattagccagaagcaa

SEQ ID NO: 408503 - DNA, 55 bp, Artificial
  Synthetic oligonucleotide
gcattcatactatgtgcttctgcctagtaaacgccgtttggttgattattggcgt

SEQ ID NO: 408504 - DNA, 50 bp, Artificial
  Synthetic oligonucleotide
gcattcatagcattgcttacaaaaatcagtctaacatagagattgatgag

SEQ ID NO: 408505 - DNA, 55 bp, Artificial
  Synthetic oligonucleotide
gcattccaccccattgtgtttagctaatcgtttcgtcatcaaagtatggcgagtg

SEQ ID NO: 408506 - DNA, 60 bp, Artificial
  Synthetic oligonucleotide
gcattccactaaggataatgcctggatgttgaatcctaccatttatcgcacgactcccat

SEQ ID NO: 408507 - DNA, 57 bp, Artificial
  Synthetic oligonucleotide
gcattccactccgggcccaaaacttatgcccggtgggtggagacagtgcgtgccaag

SEQ ID NO: 408508 - DNA, 55 bp, Artificial
  Synthetic oligonucleotide
gcattccacttagactatgagaagtggaacaatcatcagagattggaatcaacaa

SEQ ID NO: 408509 - DNA, 55 bp, Artificial
  Synthetic oligonucleotide
gcattccagaagacgaagacccggaagaacgggcatacaatgaagaaggacaagg

SEQ ID NO: 408510 - DNA, 55 bp, Artificial
  Synthetic oligonucleotide
gcattccagatggtatgcccttttgggtggactggacaagttgagtgcaccactg

SEQ ID NO: 408511 - DNA, 55 bp, Artificial
  Synthetic oligonucleotide
gcattccaggtcaaatgatcgtgtttgatagctcgtaaacggaagtaggagtatc

SEQ ID NO: 408512 - DNA, 60 bp, Artificial
  Synthetic oligonucleotide
gcattccatcacgtggcccgagagttgcatccggagtactacaaggactgctgacatcga

SEQ ID NO: 408513 - DNA, 60 bp, Artificial
  Synthetic oligonucleotide
gcattccgagtggttactattccatcaccattctagcctgtacacggaaagtcaagatgg

SEQ ID NO: 408514 - DNA, 55 bp, Artificial
  Synthetic oligonucleotide
gcattccgattcctcaagtgtatccatgcatcacagcccgccgtgttcactacgc

SEQ ID NO: 408515 - DNA, 51 bp, Artificial
  Synthetic oligonucleotide
gcattccgcaagaccaacaaggcggtgtgatgtttgattccggaactagca

SEQ ID NO: 408516 - DNA, 50 bp, Artificial
  Synthetic oligonucleotide
gcattccgctctctggtcacccacaatcgaagcagattctccggggtcta

SEQ ID NO: 408517 - DNA, 60 bp, Artificial
  Synthetic oligonucleotide
gcattcctagacggggagaactcatggctcggaaggacgattagcaaagactccagatca

SEQ ID NO: 408518 - DNA, 55 bp, Artificial
  Synthetic oligonucleotide
gcattcctaggaaagtagaagtgaaggctgttgaggcaaactgcaaatctctgct

SEQ ID NO: 408519 - DNA, 60 bp, Artificial
  Synthetic oligonucleotide
gcattcctcgctccactgaggccaacctcctaggagttaggcgctacctggcaacatatt

SEQ ID NO: 408520 - DNA, 60 bp, Artificial
  Synthetic oligonucleotide
gcattcctctgtgtacgtgcagataaaatctgcctaggacatcatgctgtgtctaatgga

SEQ ID NO: 408521 - DNA, 58 bp, Artificial
  Synthetic oligonucleotide
gcattcgaagcaaatgctccgctaatagagcggaaagtgtgggtttcaacgtctcggt

SEQ ID NO: 408522 - DNA, 59 bp, Artificial
  Synthetic oligonucleotide
gcattcgaagtgttaagttatttatatgcaactgtattcttatgcaggcccgtcgggac

SEQ ID NO: 408523 - DNA, 55 bp, Artificial
  Synthetic oligonucleotide
gcattcgaatcgattgttgggcgcaggagattaaaattaaggaaggcgtttggcg

SEQ ID NO: 408524 - DNA, 55 bp, Artificial
  Synthetic oligonucleotide
gcattcgaccgagacgctgccaaacctccgcccaacgacctcgcttccctctaca

SEQ ID NO: 408525 - DNA, 60 bp, Artificial
  Synthetic oligonucleotide
gcattcgacgttgatgctacgcctcagatacgtgatttattactaacagacccgacgata

SEQ ID NO: 408526 - DNA, 55 bp, Artificial
  Synthetic oligonucleotide
gcattcgatgccaatgaggtcctgatcgaggttattccaccattcggagacagtc

SEQ ID NO: 408527 - DNA, 55 bp, Artificial
  Synthetic oligonucleotide
gcattcgcattgaacaaggggtctggttctggaattatggtgtctgatgctcagg

SEQ ID NO: 408528 - DNA, 55 bp, Artificial
  Synthetic oligonucleotide
gcattcgcgggcagcataaccaaatcaagcgtgaggttgagagacaaataaacac

SEQ ID NO: 408529 - DNA, 60 bp, Artificial
  Synthetic oligonucleotide
gcattcgcgttcaagcgatgacacctccacgtggtatcaacacctcaatcatccaagtcg

SEQ ID NO: 408530 - DNA, 51 bp, Artificial
  Synthetic oligonucleotide
gcattcgctacggcgctacggaggacgaacttgcactggagcgcgggacgt

SEQ ID NO: 408531 - DNA, 55 bp, Artificial
  Synthetic oligonucleotide
gcattcggacgttccgacaagtcaaatgaatcagttgttcatatgcactcaacgg

SEQ ID NO: 408532 - DNA, 60 bp, Artificial
  Synthetic oligonucleotide
gcattcgggatgcaacgaatgcattatagaaacggggacccacagacaccatttcaaata

SEQ ID NO: 408533 - DNA, 55 bp, Artificial
  Synthetic oligonucleotide
gcattcgtaccttacgatagtgatctgccaactttggtttcacaaggagatgtcg

SEQ ID NO: 408534 - DNA, 60 bp, Artificial
  Synthetic oligonucleotide
gcattcgtatcggctgatacagtagaacctataaatgcggttgcgtttgataacatgcgc

SEQ ID NO: 408535 - DNA, 60 bp, Artificial
  Synthetic oligonucleotide
gcattcgtatgtccctgcaagtgaaatgttgatgacatatctcgagaggcaaacttcaaa

SEQ ID NO: 408536 - DNA, 60 bp, Artificial
  Synthetic oligonucleotide
gcattcgtgactcgtttgacgtcaatatgtccactgcagtgtgccattttcgctcactct

SEQ ID NO: 408537 - DNA, 60 bp, Artificial
  Synthetic oligonucleotide
gcattctaagtcgtttcaatgtgacgccagaacagttaaatttgtatcgcaaattcatga

SEQ ID NO: 408538 - DNA, 55 bp, Artificial
  Synthetic oligonucleotide
gcattctacatgcttaatcatgacacgttgtgtggcccatacatcggtgcccgca

SEQ ID NO: 408539 - DNA, 60 bp, Artificial
  Synthetic oligonucleotide
gcattctactgctgggccgtgtacagcacgtggaccagctggcttgacctgatcgacgaa

SEQ ID NO: 408540 - DNA, 60 bp, Artificial
  Synthetic oligonucleotide
gcattctatcaatcttacttgagaagaactcaatctatggggatacaactggatcagaag

SEQ ID NO: 408541 - DNA, 55 bp, Artificial
  Synthetic oligonucleotide
gcattctcatacagaacgccacaggaggagctcttgaacagactgccccagtctc

SEQ ID NO: 408542 - DNA, 55 bp, Artificial
  Synthetic oligonucleotide
gcattctgtcaacaccggtcaaatgaacctatgcactggagcattagccatgaga

SEQ ID NO: 408543 - DNA, 57 bp, Artificial
  Synthetic oligonucleotide
gcattcttaccacccgcaacgggcataccacctccacaacccaatcgagtgtaggag

SEQ ID NO: 408544 - DNA, 60 bp, Artificial
  Synthetic oligonucleotide
gcattcttaggacaacctgatgcattcgcagtcttcttcgaccgcgtagacacaactgta

SEQ ID NO: 408545 - DNA, 60 bp, Artificial
  Synthetic oligonucleotide
gcattcttgctcgactttcgtgtagcgaaaagcgtatcaacgacagagcgtttaccatcc

SEQ ID NO: 408546 - DNA, 59 bp, Artificial
  Synthetic oligonucleotide
gcattctttacatctcttccgttttagtccaatatgggatggcagtcctgacgccccga

SEQ ID NO: 408547 - DNA, 55 bp, Artificial
  Synthetic oligonucleotide
gcattctttacggttgccacaacagggtcagacgagtctgtacgaggtacagcgg

SEQ ID NO: 408548 - DNA, 55 bp, Artificial
  Synthetic oligonucleotide
gcattgaaaatggaacctcgccaaatgtcaacggagtttgggttatgatggatgg

SEQ ID NO: 408549 - DNA, 55 bp, Artificial
  Synthetic oligonucleotide
gcattgaaagcataaggaacgggacatatgaccatgatatttacagagacgaggc

SEQ ID NO: 408550 - DNA, 55 bp, Artificial
  Synthetic oligonucleotide
gcattgaaagtttatatcccgtgtttgatagcatttattggaacgagcaagcacg

SEQ ID NO: 408551 - DNA, 55 bp, Artificial
  Synthetic oligonucleotide
gcattgaacaaggggtctgactccggaattataacatcagatgctccagttcaca

SEQ ID NO: 408552 - DNA, 56 bp, Artificial
  Synthetic oligonucleotide
gcattgaacatgatacaatccatcaatgcacagtgagcatttgtagacgcaggctt

SEQ ID NO: 408553 - DNA, 60 bp, Artificial
  Synthetic oligonucleotide
gcattgaagacccgagtcatgagggagaggggataccgctatacgatgcaatcaaatgca

SEQ ID NO: 408554 - DNA, 55 bp, Artificial
  Synthetic oligonucleotide
gcattgaatcacgcgggtaatttagaacagagacgaggtgattcaccacttgtgg

SEQ ID NO: 408555 - DNA, 60 bp, Artificial
  Synthetic oligonucleotide
gcattgaatctgcggtttgcgaatctgtgcttgcggatgcttcagaaactttattggcaa

SEQ ID NO: 408556 - DNA, 60 bp, Artificial
  Synthetic oligonucleotide
gcattgacactgaacacaatgacaaaggacgctgagagaggcaagttaaagagaagagca

SEQ ID NO: 408557 - DNA, 55 bp, Artificial
  Synthetic oligonucleotide
gcattgacatatagcaggtacaagcgtagataatacttactaggccccagccggt

SEQ ID NO: 408558 - DNA, 59 bp, Artificial
  Synthetic oligonucleotide
gcattgaccgacgaaaggtcaaagcccactcaaggtcagacaatcgtcttaaacactga

SEQ ID NO: 408559 - DNA, 60 bp, Artificial
  Synthetic oligonucleotide
gcattgacgggaggacaagacttgaccagggatcccacagtagcagaacatgcttctcta

SEQ ID NO: 408560 - DNA, 58 bp, Artificial
  Synthetic oligonucleotide
gcattgactgttcagggtcaggctttgaagtcccactaactggtccccaaatgctcct

SEQ ID NO: 408561 - DNA, 60 bp, Artificial
  Synthetic oligonucleotide
gcattgaggatccaagtcatgaaggagagggaataccactatatgatgcgatcaagtgca

SEQ ID NO: 408562 - DNA, 57 bp, Artificial
  Synthetic oligonucleotide
gcattgaggtatcatgaagcaagttcacgagttgaaaatttggcccgagttttattt

SEQ ID NO: 408563 - DNA, 60 bp, Artificial
  Synthetic oligonucleotide
gcattgataggtatctgcctctctacgcattgttatcaccgggtgttctcatcgctatgt

SEQ ID NO: 408564 - DNA, 58 bp, Artificial
  Synthetic oligonucleotide
gcattgatgcgtttaggattatgggggtatcggaatggacggatggagaattggagat

SEQ ID NO: 408565 - DNA, 55 bp, Artificial
  Synthetic oligonucleotide
gcattgatggcgttactagcaatgatgtttggttcagacaggagcgatgccgtgt

SEQ ID NO: 408566 - DNA, 55 bp, Artificial
  Synthetic oligonucleotide
gcattgatgggacctgtgtagtcgctgttacagatggtcctgcagctaacagtgc

SEQ ID NO: 408567 - DNA, 60 bp, Artificial
  Synthetic oligonucleotide
gcattgattaaagtcaacacgttaacacctgacgatgctgttaaggctagtgtggctctt

SEQ ID NO: 408568 - DNA, 55 bp, Artificial
  Synthetic oligonucleotide
gcattgattgcataaaatatcccacaggacagcttatcacccatggaagagtgag

SEQ ID NO: 408569 - DNA, 55 bp, Artificial
  Synthetic oligonucleotide
gcattgcaaagaaggacattcaacagcaaaaggatcgtgatgagccaataaagct

SEQ ID NO: 408570 - DNA, 55 bp, Artificial
  Synthetic oligonucleotide
gcattgcacaggcccgccttgacctcacgtaagggcaccgtgcgctttagccgat

SEQ ID NO: 408571 - DNA, 55 bp, Artificial
  Synthetic oligonucleotide
gcattgcacggcgaatccttcgaggagttgtctgcccacttcctcccagctcacg

SEQ ID NO: 408572 - DNA, 53 bp, Artificial
  Synthetic oligonucleotide
gcattgcactggtataagcgagcacttactcgcaatatgtatactcgttcagc

SEQ ID NO: 408573 - DNA, 57 bp, Artificial
  Synthetic oligonucleotide
gcattgcagctccccttaccaaagttaaccactccgtaggattagcattaggtgacg

SEQ ID NO: 408574 - DNA, 60 bp, Artificial
  Synthetic oligonucleotide
gcattgctacgagttccgtgatctgagggtggcagcgtttaaaggggatgattcagtggt

SEQ ID NO: 408575 - DNA, 55 bp, Artificial
  Synthetic oligonucleotide
gcattgctactgtatatggcatgtactcatgcctctaaccctgtatatgctacgc

SEQ ID NO: 408576 - DNA, 55 bp, Artificial
  Synthetic oligonucleotide
gcattgctcagggtgaagcggaaaagagtcgacccaaccttccgccggccgtcac

SEQ ID NO: 408577 - DNA, 53 bp, Artificial
  Synthetic oligonucleotide
gcattgctgaagagttgtgcatgcgtgatgagctcgaggttaatgagccctct

SEQ ID NO: 408578 - DNA, 60 bp, Artificial
  Synthetic oligonucleotide
gcattgcttgtcaaagatgaagctagaatcagtatgagagagagtaattcagaatctata

SEQ ID NO: 408579 - DNA, 58 bp, Artificial
  Synthetic oligonucleotide
gcattggaatttcccctggaactggataaggacgtggagatgaggctccccattttca

SEQ ID NO: 408580 - DNA, 60 bp, Artificial
  Synthetic oligonucleotide
gcattggacaaatggtcaactctgtggacttggtttgacatatcaaattggctatggtat

SEQ ID NO: 408581 - DNA, 59 bp, Artificial
  Synthetic oligonucleotide
gcattggaccgtgttggaaccatagctaaggcgtacgcgttgtggagacctaagcattg

SEQ ID NO: 408582 - DNA, 60 bp, Artificial
  Synthetic oligonucleotide
gcattggactcgggagggtcattgtggacgttctcgcgggatacggtgcgggcatatctg

SEQ ID NO: 408583 - DNA, 55 bp, Artificial
  Synthetic oligonucleotide
gcattggagtgacagtgataaggaacaacatgataaacaatgatcttgggccagc

SEQ ID NO: 408584 - DNA, 55 bp, Artificial
  Synthetic oligonucleotide
gcattggataccactccaacaactccacagaaaaggttgacacaattctagagcg

SEQ ID NO: 408585 - DNA, 60 bp, Artificial
  Synthetic oligonucleotide
gcattggatgaggttgtgaatgcaggctctcgattagttagaggaactagggctaaacgt

SEQ ID NO: 408586 - DNA, 55 bp, Artificial
  Synthetic oligonucleotide
gcattggatggctaccccgtcagtattgatagaaagcacaaagcagcggttcaaa

SEQ ID NO: 408587 - DNA, 60 bp, Artificial
  Synthetic oligonucleotide
gcattggcagagggggcaataccatatgacatcaatcaactgctgaatgccataggagaa

SEQ ID NO: 408588 - DNA, 60 bp, Artificial
  Synthetic oligonucleotide
gcattggcgcatttgttagtgcgatagtggtcccatttatccgacatatcctcagtgcgt

SEQ ID NO: 408589 - DNA, 60 bp, Artificial
  Synthetic oligonucleotide
gcattggcgccacgtctgtatatattgtgtatacctagtaggtgcattggcacgagtggt

SEQ ID NO: 408590 - DNA, 60 bp, Artificial
  Synthetic oligonucleotide
gcattggctctatgtcgtaaaccctcatttatctattgatacgcgccgtgactggtttgg

SEQ ID NO: 408591 - DNA, 60 bp, Artificial
  Synthetic oligonucleotide
gcattggctgactctgaaagaataagattagacgattcgctttcagcactgccatacatc

SEQ ID NO: 408592 - DNA, 55 bp, Artificial
  Synthetic oligonucleotide
gcattgggaagaggttaaatcttttagcctccaggttgcccttgcagacttctgg

SEQ ID NO: 408593 - DNA, 57 bp, Artificial
  Synthetic oligonucleotide
gcattgggagtccgagatttaaaaatctacaatcgagggagagtagatagattagtt

SEQ ID NO: 408594 - DNA, 55 bp, Artificial
  Synthetic oligonucleotide
gcattggggaagtttaaagagacattcgggctgagttttatggatttggtgcggg

SEQ ID NO: 408595 - DNA, 60 bp, Artificial
  Synthetic oligonucleotide
gcattggggccagcagctacactagaagaaatgatgacagcatgtcagggagtgggagga

SEQ ID NO: 408596 - DNA, 55 bp, Artificial
  Synthetic oligonucleotide
gcattggggtaagaagtgccatttctgtccgcgctgtctactgtgatgacgtgtg

SEQ ID NO: 408597 - DNA, 55 bp, Artificial
  Synthetic oligonucleotide
gcattgggttattgagtggcaacgtcgaggggttccgcaccttcactgcgctgct

SEQ ID NO: 408598 - DNA, 57 bp, Artificial
  Synthetic oligonucleotide
gcattggtaacaaagcatgttgttaaaggaaagtgcccctattttgcacaatatctt

SEQ ID NO: 408599 - DNA, 58 bp, Artificial
  Synthetic oligonucleotide
gcattggtaccctttttcaaactatttcaggtgcaagtggactggtagcagctgggat

SEQ ID NO: 408600 - DNA, 60 bp, Artificial
  Synthetic oligonucleotide
gcattggtcacactgagacaggcatgactgagatccctgtcgcaattgcaactgaagcgg

SEQ ID NO: 408601 - DNA, 60 bp, Artificial
  Synthetic oligonucleotide
gcattggtccaggcactatagcatccatgctttgatagacagcattgacaacctgtgtta

SEQ ID NO: 408602 - DNA, 55 bp, Artificial
  Synthetic oligonucleotide
gcattggttggatctgggaactggacccgaagcgcgaccgttgtcttttctgccg

SEQ ID NO: 408603 - DNA, 57 bp, Artificial
  Synthetic oligonucleotide
gcattgtaccaaatttgacaataggcttagggtagctaaagctggacaaacccttgc

SEQ ID NO: 408604 - DNA, 58 bp, Artificial
  Synthetic oligonucleotide
gcattgtatatgttgtccacaaggggaaggcaaacagtcaaagagaataagggaacac

SEQ ID NO: 408605 - DNA, 58 bp, Artificial
  Synthetic oligonucleotide
gcattgtccactgagggggagataccattctatggtaaggccatccccctaaattaca

SEQ ID NO: 408606 - DNA, 60 bp, Artificial
  Synthetic oligonucleotide
gcattgtccccctaactccggatgtgattgcccagttacatagcctgaatcctcttatac

SEQ ID NO: 408607 - DNA, 60 bp, Artificial
  Synthetic oligonucleotide
gcattgtcgagttgcctgcatggtacaaggtgacaatcaagtaatagccgtaacgagaga

SEQ ID NO: 408608 - DNA, 60 bp, Artificial
  Synthetic oligonucleotide
gcattgtctatagatggtccactttacttggtcttcaagacatacggaactatgctggta

SEQ ID NO: 408609 - DNA, 60 bp, Artificial
  Synthetic oligonucleotide
gcattgtgaccatgggaggtgagggcgtcgttggctttgctgacgtgcgcgaccttctat

SEQ ID NO: 408610 - DNA, 55 bp, Artificial
  Synthetic oligonucleotide
gcattgtgccgccatctagtagcggtgggatagcgccatctagttctcacacttt

SEQ ID NO: 408611 - DNA, 60 bp, Artificial
  Synthetic oligonucleotide
gcattgtggcgagagacggtcaccgcgctttcgacggagctgttgctgccgtgatgtccg

SEQ ID NO: 408612 - DNA, 58 bp, Artificial
  Synthetic oligonucleotide
gcattgttgcacacaccacctctaggccctatgtaggtacagtcccgttagcagaccg

SEQ ID NO: 408613 - DNA, 60 bp, Artificial
  Synthetic oligonucleotide
gcatttaaaatctcattcacaatggatgtgctgttctccattgcgaaaacggtttcagag

SEQ ID NO: 408614 - DNA, 55 bp, Artificial
  Synthetic oligonucleotide
gcatttaaaggtaacagtcggactttaactcaacagtcctccgcggcgtcgtctg

SEQ ID NO: 408615 - DNA, 55 bp, Artificial
  Synthetic oligonucleotide
gcatttaaagtgaagatctctggagtaaactcagtcacttatcttgacaagcaag

SEQ ID NO: 408616 - DNA, 60 bp, Artificial
  Synthetic oligonucleotide
gcatttaacatttggagtactatccatttcagataatatgattccggatgtagtaaagct

SEQ ID NO: 408617 - DNA, 58 bp, Artificial
  Synthetic oligonucleotide
gcatttaagcaaattgtaatcaatgtcagcaaataaactggaaaaagtgcgttgtttc

SEQ ID NO: 408618 - DNA, 55 bp, Artificial
  Synthetic oligonucleotide
gcatttaagtccagatggaatctacaagaaacctcaattggtatttgagaggatg

SEQ ID NO: 408619 - DNA, 52 bp, Artificial
  Synthetic oligonucleotide
gcatttaatggttttggtcttaacatttcggaatgttaatccggttaagttg

SEQ ID NO: 408620 - DNA, 51 bp, Artificial
  Synthetic oligonucleotide
gcatttaattcggccaccaaacattttgacggttacaaacagcaggctgtc

SEQ ID NO: 408621 - DNA, 58 bp, Artificial
  Synthetic oligonucleotide
gcatttacagttcgaatgccaagtccattgctgaaattagggtttcttttgaagtgct

SEQ ID NO: 408622 - DNA, 55 bp, Artificial
  Synthetic oligonucleotide
gcatttaccgggtgcccgagccgtcagtgcctccacttgagcccgaaaccacaca

SEQ ID NO: 408623 - DNA, 60 bp, Artificial
  Synthetic oligonucleotide
gcatttactgtgggcacgacacaacagcattcacaaggatcactgattccccattgacgt

SEQ ID NO: 408624 - DNA, 57 bp, Artificial
  Synthetic oligonucleotide
gcatttacttccaaaatagccactaccaacctgttgctggagacaatttgcaccgtt

SEQ ID NO: 408625 - DNA, 55 bp, Artificial
  Synthetic oligonucleotide
gcatttagcaagttgaagggaaaggggatggatagtttagttagagattttcgtc

SEQ ID NO: 408626 - DNA, 55 bp, Artificial
  Synthetic oligonucleotide
gcatttagtgtactggtgaaggaatggggtatggagacgaacatactggacgaac

SEQ ID NO: 408627 - DNA, 60 bp, Artificial
  Synthetic oligonucleotide
gcatttagttttatccgggaccacacacagcaacaaaagctgaccaatcagaatgcgcgt

SEQ ID NO: 408628 - DNA, 60 bp, Artificial
  Synthetic oligonucleotide
gcatttataaaaacgcgcgcgcgctttgaatcgtcactcctcgcctagctaatatcgaca

SEQ ID NO: 408629 - DNA, 58 bp, Artificial
  Synthetic oligonucleotide
gcatttataaaagatcttacgaaatatgcaaagccaacctatatcggtgaggttaatc

SEQ ID NO: 408630 - DNA, 55 bp, Artificial
  Synthetic oligonucleotide
gcatttatactgccttagcatcagaccaccctggggacctgcctccgaacacccc

SEQ ID NO: 408631 - DNA, 55 bp, Artificial
  Synthetic oligonucleotide
gcatttatcctctatatgaagtgttggatgaagacactacactcaatacagttcc

SEQ ID NO: 408632 - DNA, 60 bp, Artificial
  Synthetic oligonucleotide
gcatttatgacaagtgggccgttttgccacgtcatgctaaacctggaccaaccattctga

SEQ ID NO: 408633 - DNA, 55 bp, Artificial
  Synthetic oligonucleotide
gcatttatggctaacaacgtgctggcaggatattttaatgaaaatgaattgcagc

SEQ ID NO: 408634 - DNA, 57 bp, Artificial
  Synthetic oligonucleotide
gcatttattctaaaacgctgaactgatggcattctcgtaataaaaaggctggacacc

SEQ ID NO: 408635 - DNA, 55 bp, Artificial
  Synthetic oligonucleotide
gcatttattggccctccaaacacaggcaagtctatgctctgcaactcattaattc

SEQ ID NO: 408636 - DNA, 55 bp, Artificial
  Synthetic oligonucleotide
gcatttattgtgaatttattaggaggaggcattgactggtcaattggtgtctctc

SEQ ID NO: 408637 - DNA, 59 bp, Artificial
  Synthetic oligonucleotide
gcatttcaaatttagtcaaggacttatttacctctggtgttgaaacgcagagcaagcga

SEQ ID NO: 408638 - DNA, 56 bp, Artificial
  Synthetic oligonucleotide
gcatttcaagcaatatgaatgcaatccccctgcaaacaaccaagtaatgccgtgtg

SEQ ID NO: 408639 - DNA, 59 bp, Artificial
  Synthetic oligonucleotide
gcatttcagagtaacgtaccttagcaagcgctagtccgccgcgagcggttctcgcaagt

SEQ ID NO: 408640 - DNA, 60 bp, Artificial
  Synthetic oligonucleotide
gcatttcagattcattttaaataggtggacgggtcgctgtacccagtgcagagaataatg

SEQ ID NO: 408641 - DNA, 57 bp, Artificial
  Synthetic oligonucleotide
gcatttcagttaggtttgccagtcttagattctgaccgtttttctcaggttgtcttg

SEQ ID NO: 408642 - DNA, 55 bp, Artificial
  Synthetic oligonucleotide
gcatttcatcacatggcccgagagctgcatccggaatacttcaagaactgctgac

SEQ ID NO: 408643 - DNA, 56 bp, Artificial
  Synthetic oligonucleotide
gcatttcatcccgaagtgggtttgaaatcctattgatagaagacggttggaccaaa

SEQ ID NO: 408644 - DNA, 59 bp, Artificial
  Synthetic oligonucleotide
gcatttccagaaggatgcaaaagtgctgtttcaaaactggggaatcgaacccattgaca

SEQ ID NO: 408645 - DNA, 60 bp, Artificial
  Synthetic oligonucleotide
gcatttcctatggcaggaagaagcggagacagcgacgaagcactcctccaagcagtgagg

SEQ ID NO: 408646 - DNA, 56 bp, Artificial
  Synthetic oligonucleotide
gcatttcgtcccgaagtggttttgaaatcctattaatagaagatggttggattaga

SEQ ID NO: 408647 - DNA, 60 bp, Artificial
  Synthetic oligonucleotide
gcatttctgttagaaggctatagggctgtcagcttgggttcctgtgagtggttcgaccac

SEQ ID NO: 408648 - DNA, 55 bp, Artificial
  Synthetic oligonucleotide
gcatttgactcagggaacctgttgggaacaaatgtacactccaggaggagaagtg

SEQ ID NO: 408649 - DNA, 55 bp, Artificial
  Synthetic oligonucleotide
gcatttgagatgattccacaacttcagggagaaactgtgataggatacacaagtg

SEQ ID NO: 408650 - DNA, 60 bp, Artificial
  Synthetic oligonucleotide
gcatttgatatggcatatagcgacgataatcacctcccttattacatacagagatcgatt

SEQ ID NO: 408651 - DNA, 55 bp, Artificial
  Synthetic oligonucleotide
gcatttgatcggaatagtgaactcagcctgtttcgtgtccccttccgtcaacctc

SEQ ID NO: 408652 - DNA, 57 bp, Artificial
  Synthetic oligonucleotide
gcatttgatgaaaggaggaacagatacctggacgaacaccccagtgcggggaaggac

SEQ ID NO: 408653 - DNA, 60 bp, Artificial
  Synthetic oligonucleotide
gcatttgatgagaggaggaacagatatctcgaagagcatcccagtgctggtaaagaccct

SEQ ID NO: 408654 - DNA, 54 bp, Artificial
  Synthetic oligonucleotide
gcatttggaattataaccaggataccatgtataccgtttcccggcctaatggtt

SEQ ID NO: 408655 - DNA, 60 bp, Artificial
  Synthetic oligonucleotide
gcatttgggcgagtgccctagggcagcgtcggtcaggtgactagcagccggctctacgga

SEQ ID NO: 408656 - DNA, 55 bp, Artificial
  Synthetic oligonucleotide
gcatttgggtgattgcgcgcgctccattggctatgttcctgggatttaatgtggg

SEQ ID NO: 408657 - DNA, 55 bp, Artificial
  Synthetic oligonucleotide
gcatttgtacgcattctcatttacacaagtcaaagcaatggcaaccaacttcagc

SEQ ID NO: 408658 - DNA, 55 bp, Artificial
  Synthetic oligonucleotide
gcatttgtagtacccatgctttacggatcttgttcattgctcggtcaaattcgag

SEQ ID NO: 408659 - DNA, 55 bp, Artificial
  Synthetic oligonucleotide
gcatttgtccgagatgatcagccacccagtacgtctgaccattcaccaagagcgc

SEQ ID NO: 408660 - DNA, 55 bp, Artificial
  Synthetic oligonucleotide
gcatttgtgcaactacttcaacttcgtcgctcacctcgactccatcacctgctac

SEQ ID NO: 408661 - DNA, 59 bp, Artificial
  Synthetic oligonucleotide
gcattttacagtgtcctcggatatgaagcttctaaacactccgggagatggtcaaactg

SEQ ID NO: 408662 - DNA, 51 bp, Artificial
  Synthetic oligonucleotide
gcattttatcaatcctacttgaggcgaactcagtcaatggggattcaactg

SEQ ID NO: 408663 - DNA, 58 bp, Artificial
  Synthetic oligonucleotide
gcattttcctctttctcgaggaaatctttatatgaccccccctctcctggattgcaca

SEQ ID NO: 408664 - DNA, 60 bp, Artificial
  Synthetic oligonucleotide
gcattttctctgttgagggcagaagttgtatcaatagatgtttttatgtggagttgataa

SEQ ID NO: 408665 - DNA, 58 bp, Artificial
  Synthetic oligonucleotide
gcattttgaattacgtggaggaagtccacggaatgttgccagtagttatgacttccga

SEQ ID NO: 408666 - DNA, 56 bp, Artificial
  Synthetic oligonucleotide
gcattttgcacgaaaacaaggcctaacaaaattaggtctgcaaccacttcccacat

SEQ ID NO: 408667 - DNA, 52 bp, Artificial
  Synthetic oligonucleotide
gcattttgtactttgttcagacagaacggaaaagagttaaaccctaacgacg

SEQ ID NO: 408668 - DNA, 55 bp, Artificial
  Synthetic oligonucleotide
gcatttttgtaataaagggtgagtaccaattgggtctcactcaaacttggtgaaa

SEQ ID NO: 408669 - DNA, 53 bp, Artificial
  Synthetic oligonucleotide
gcattttttttcacaactaggtaagaggcttggggctcctagcctctgaggcc

SEQ ID NO: 408670 - DNA, 60 bp, Artificial
  Synthetic oligonucleotide
gccaaaacaaccatagcttggttgatcacagaattgtccataaaacactttgtggtcaga

SEQ ID NO: 408671 - DNA, 55 bp, Artificial
  Synthetic oligonucleotide
gccaaaaccataatagtacaacttaacgagactgtacaaattaattgttccagac

SEQ ID NO: 408672 - DNA, 57 bp, Artificial
  Synthetic oligonucleotide
gccaaaaccataatagtacagctggatgaatctgtagtaattaattgtacaagaccc

SEQ ID NO: 408673 - DNA, 56 bp, Artificial
  Synthetic oligonucleotide
gccaaaaccataatagtacagtttaatcagtctataacaattaattgtaccagacc

SEQ ID NO: 408674 - DNA, 55 bp, Artificial
  Synthetic oligonucleotide
gccaaaaccccgaaggatgccgtcgtagccagaatggacgctaggagagctgata

SEQ ID NO: 408675 - DNA, 55 bp, Artificial
  Synthetic oligonucleotide
gccaaaacgtaattgtatagttatacatgggccaccaaatacaggcaagtcatat

SEQ ID NO: 408676 - DNA, 54 bp, Artificial
  Synthetic oligonucleotide
gccaaaagcgaactcctaataaacattgtaatgttcaacagtgttttggtaaaa

SEQ ID NO: 408677 - DNA, 60 bp, Artificial
  Synthetic oligonucleotide
gccaaaagcgcaattgagatgcagcttatgctgcagtcgctgtgtgactctccgtgggcg

SEQ ID NO: 408678 - DNA, 55 bp, Artificial
  Synthetic oligonucleotide
gccaaaaggaatgtctcgcatgacactggctttcttcactatgttggtaacgggg

SEQ ID NO: 408679 - DNA, 60 bp, Artificial
  Synthetic oligonucleotide
gccaaaaggatgtgaaggcccatgtaaggtccaatcgtatgaacagaggcacgacatatc

SEQ ID NO: 408680 - DNA, 56 bp, Artificial
  Synthetic oligonucleotide
gccaaaatcataatagtacagcttaataaagctgtagagattacgtgtaccagacc

SEQ ID NO: 408681 - DNA, 56 bp, Artificial
  Synthetic oligonucleotide
gccaaaatcgtaagatacacacttataattggaggatgggtaccaacttgtcaagt

SEQ ID NO: 408682 - DNA, 58 bp, Artificial
  Synthetic oligonucleotide
gccaaaatctgttaacaactgtgaattttgccaaatgtactgtgaatatttccaggtg

SEQ ID NO: 408683 - DNA, 58 bp, Artificial
  Synthetic oligonucleotide
gccaaaatgggtaggagtaatgttcattcctgttgtccaattttggatgtccacgatg

SEQ ID NO: 408684 - DNA, 55 bp, Artificial
  Synthetic oligonucleotide
gccaaacacacctgacacaaaactaattacagccactagtgggtcaaacgtaact

SEQ ID NO: 408685 - DNA, 59 bp, Artificial
  Synthetic oligonucleotide
gccaaacacgacaccaccgagtatgtacatcgcaaaagatggatattgttatattaaca

SEQ ID NO: 408686 - DNA, 60 bp, Artificial
  Synthetic oligonucleotide
gccaaacacggtacactggagagtgactactcacgctttgatggctcaatcagcgaatgg

SEQ ID NO: 408687 - DNA, 55 bp, Artificial
  Synthetic oligonucleotide
gccaaacactggaatctggcagagtgcacatttgaagcatcgggagaaggggtca

SEQ ID NO: 408688 - DNA, 52 bp, Artificial
  Synthetic oligonucleotide
gccaaacagatcttacacacctagtaacctacatgggagtgatacatgaaaa

SEQ ID NO: 408689 - DNA, 53 bp, Artificial
  Synthetic oligonucleotide
gccaaacagtctaacgctcaaaacgggctaaattctgatggtgtggacctatc

SEQ ID NO: 408690 - DNA, 60 bp, Artificial
  Synthetic oligonucleotide
gccaaacattagccctgatgcacgactacgtgatccttgtgctcggacctgtcaagaagt

SEQ ID NO: 408691 - DNA, 60 bp, Artificial
  Synthetic oligonucleotide
gccaaacctcttgctttgacatgcagctcttcatagtcaaacttgacagtcgatcgtcgg

SEQ ID NO: 408692 - DNA, 53 bp, Artificial
  Synthetic oligonucleotide
gccaaacgggactaaagtaaacacattaactgaaagaggagtggaagtcgtta

SEQ ID NO: 408693 - DNA, 58 bp, Artificial
  Synthetic oligonucleotide
gccaaacgtcggctgtttgagctaccggacagtgggtatggccaaacacaggtggata

SEQ ID NO: 408694 - DNA, 50 bp, Artificial
  Synthetic oligonucleotide
gccaaactactgctttcctttaagcgccgtaggcatagtaaatgactaca

SEQ ID NO: 408695 - DNA, 50 bp, Artificial
  Synthetic oligonucleotide
gccaaactagctagtaggattcgtgatttgccctttgtaagatcattgag

SEQ ID NO: 408696 - DNA, 59 bp, Artificial
  Synthetic oligonucleotide
gccaaacttatacaatatccggaatctccacattccggaagtctgcctgaagtgggagc

SEQ ID NO: 408697 - DNA, 60 bp, Artificial
  Synthetic oligonucleotide
gccaaacttgtgacatcgtcaatggtgctcttggaagcccaggctgtgatcatttgaatg

SEQ ID NO: 408698 - DNA, 56 bp, Artificial
  Synthetic oligonucleotide
gccaaagaaagactattaagtgtttcaattgtggcaaagaagggcacctagccaaa

SEQ ID NO: 408699 - DNA, 60 bp, Artificial
  Synthetic oligonucleotide
gccaaagaaatagcactcagttattctgctggtgcacttgccagttgtatgggcctcata

SEQ ID NO: 408700 - DNA, 55 bp, Artificial
  Synthetic oligonucleotide
gccaaagaaatcatcaatagctgccctaagtgtcatgtaaaaggggaagctaggc

SEQ ID NO: 408701 - DNA, 55 bp, Artificial
  Synthetic oligonucleotide
gccaaagaaccatggtcccttacagacctaagctgggagagatatcaggctgccc

SEQ ID NO: 408702 - DNA, 54 bp, Artificial
  Synthetic oligonucleotide
gccaaagaaggctattgttacttgaatatctttttggctatgcttgttaatgtc

SEQ ID NO: 408703 - DNA, 55 bp, Artificial
  Synthetic oligonucleotide
gccaaagagaattacttttccgttggagatgattctttacatggccaacttcatg

SEQ ID NO: 408704 - DNA, 59 bp, Artificial
  Synthetic oligonucleotide
gccaaagaggatgctacgaagcacacctccaatacggaggaagaggacgggaatgctaa

SEQ ID NO: 408705 - DNA, 55 bp, Artificial
  Synthetic oligonucleotide
gccaaagaggcgagaagaattatatatttgatacaaaacacgtccggtgtgcacc

SEQ ID NO: 408706 - DNA, 55 bp, Artificial
  Synthetic oligonucleotide
gccaaagatcttgtgcgctatgatcaattctctttcggtctgccaagtgttgcca

SEQ ID NO: 408707 - DNA, 59 bp, Artificial
  Synthetic oligonucleotide
gccaaagcaatcttatgatagtcgtcctcagacattttgctatttgttagttaataaac

SEQ ID NO: 408708 - DNA, 55 bp, Artificial
  Synthetic oligonucleotide
gccaaagcacagcttctccggctggacattcacgaaggagactttcctgactggc

SEQ ID NO: 408709 - DNA, 55 bp, Artificial
  Synthetic oligonucleotide
gccaaagcactacaaccatgtacaaattgcccaaaaccagcatgcttcaaacagt

SEQ ID NO: 408710 - DNA, 55 bp, Artificial
  Synthetic oligonucleotide
gccaaagccacagaacaggccgaggtgaaagcatgaacgatttcgctatcacggt

SEQ ID NO: 408711 - DNA, 54 bp, Artificial
  Synthetic oligonucleotide
gccaaagcggacacctccaggaggttaagatacttgtacaatcgggaacctcga

SEQ ID NO: 408712 - DNA, 53 bp, Artificial
  Synthetic oligonucleotide
gccaaaggaccccgtgcgagttccaaaacttcttataagaggaggcgtagaag

SEQ ID NO: 408713 - DNA, 55 bp, Artificial
  Synthetic oligonucleotide
gccaaaggatactcttgctggtactttattggctcggatcgacgttcgagcaaag

SEQ ID NO: 408714 - DNA, 60 bp, Artificial
  Synthetic oligonucleotide
gccaaaggatggtcttatagacatcactttgaaagcaggaatccaagagtaagctcagaa

SEQ ID NO: 408715 - DNA, 55 bp, Artificial
  Synthetic oligonucleotide
gccaaaggcgatatgtccacgtattgtaacgacaagggatccgcattcggatcgc

SEQ ID NO: 408716 - DNA, 55 bp, Artificial
  Synthetic oligonucleotide
gccaaaggtattgcaccgtcgcaagcgtgcatctgtcacagacctgtaccgctcc

SEQ ID NO: 408717 - DNA, 56 bp, Artificial
  Synthetic oligonucleotide
gccaaaggtggaactggtctaacatttgacgccacgaacactatttctagtgcctt

SEQ ID NO: 408718 - DNA, 55 bp, Artificial
  Synthetic oligonucleotide
gccaaaggtttcaggaaatcagtttagagttttcagattacagtttccagatcct

SEQ ID NO: 408719 - DNA, 53 bp, Artificial
  Synthetic oligonucleotide
gccaaagtaaatgtctaatagctaatttaccactgtggatggcctgcaatgga

SEQ ID NO: 408720 - DNA, 55 bp, Artificial
  Synthetic oligonucleotide
gccaaagtaactggtggtcagtatgccagtaacgagcaggcattggttcggcgat

SEQ ID NO: 408721 - DNA, 55 bp, Artificial
  Synthetic oligonucleotide
gccaaataaaacctttgggcataacattctctgagtctaacattaccaaagtact

SEQ ID NO: 408722 - DNA, 55 bp, Artificial
  Synthetic oligonucleotide
gccaaataaggagttgttaaatgggacggaggtttatgatgttacatatgatgac

SEQ ID NO: 408723 - DNA, 55 bp, Artificial
  Synthetic oligonucleotide
gccaaatacaaagtagcaccgggtgtggtgtacgtgggcggcttgcgtgccgagc

SEQ ID NO: 408724 - DNA, 55 bp, Artificial
  Synthetic oligonucleotide
gccaaatagatattccgatctatttgtaacggaaaaggctagagatttctggtgt

SEQ ID NO: 408725 - DNA, 59 bp, Artificial
  Synthetic oligonucleotide
gccaaatcaacatcacgtttatgtcactcaaaagtgccttaaatgtggcttcttgttta

SEQ ID NO: 408726 - DNA, 55 bp, Artificial
  Synthetic oligonucleotide
gccaaatccagtgcaggtgctccctattggagacacaagggagaatgccttgacc

SEQ ID NO: 408727 - DNA, 55 bp, Artificial
  Synthetic oligonucleotide
gccaaatcctgccacagttttgtttcgctgcgaggaaactcgtcggcatgagtca

SEQ ID NO: 408728 - DNA, 55 bp, Artificial
  Synthetic oligonucleotide
gccaaatcgcgtttggtaattgggagtagtggaaaggtcgatatcaatcccagac

SEQ ID NO: 408729 - DNA, 60 bp, Artificial
  Synthetic oligonucleotide
gccaaatctacggttcacatgctcctcttgtcatcgccaacgtcatcaactccatccaca

SEQ ID NO: 408730 - DNA, 58 bp, Artificial
  Synthetic oligonucleotide
gccaaatgcattgaccgacgataggtcaaaacccactcaaggccaaacaatcgtatta

SEQ ID NO: 408731 - DNA, 60 bp, Artificial
  Synthetic oligonucleotide
gccaaatgggggaggtgctaggagcaccagaggcagcagagcaaaaatccgggtttcatc

SEQ ID NO: 408732 - DNA, 55 bp, Artificial
  Synthetic oligonucleotide
gccaaatgtgtttgttaacacgcggatgacttctgaagagttgagtcgcacagcc

SEQ ID NO: 408733 - DNA, 55 bp, Artificial
  Synthetic oligonucleotide
gccaaatgttactcaggaacatctaattcagggcttcagctgatcaacattaccc

SEQ ID NO: 408734 - DNA, 52 bp, Artificial
  Synthetic oligonucleotide
gccaaattacattcggtcagtctagaatgtttattccgcatataacattaag

SEQ ID NO: 408735 - DNA, 60 bp, Artificial
  Synthetic oligonucleotide
gccaaattagtagtggacaattgttcgaccagagggaaagacaatgagcgctgcacttgt

SEQ ID NO: 408736 - DNA, 57 bp, Artificial
  Synthetic oligonucleotide
gccaaattatactcagtgttgggtggtacaacagcctgaacggtacgcgtcaattta

SEQ ID NO: 408737 - DNA, 50 bp, Artificial
  Synthetic oligonucleotide
gccaaattgcttcatagctcgagtggtagagcgcaggaaagtttcgagag

SEQ ID NO: 408738 - DNA, 57 bp, Artificial
  Synthetic oligonucleotide
gccaaatttcaagagggataatcatgcctttatcagtcttccctcggcccaccaaag

SEQ ID NO: 408739 - DNA, 55 bp, Artificial
  Synthetic oligonucleotide
gccaaatttgcacgggatacggttccaatttatcgaacatctgtatctcaggggt

SEQ ID NO: 408740 - DNA, 57 bp, Artificial
  Synthetic oligonucleotide
gccaacaaacccttatgaccatatcttggttagacttggtagggcacatcttggaac

SEQ ID NO: 408741 - DNA, 60 bp, Artificial
  Synthetic oligonucleotide
gccaacaacgctgacctattcgtgggaattgcaatagcaggactcgtcatcgggctagtt

SEQ ID NO: 408742 - DNA, 55 bp, Artificial
  Synthetic oligonucleotide
gccaacaactctcaccactacatcagtatggggaaatctggactggagctgacct

SEQ ID NO: 408743 - DNA, 60 bp, Artificial
  Synthetic oligonucleotide
gccaacaagagaagatacgaagaagcctttagcgcagctaaagaaggtcggatggatgat

SEQ ID NO: 408744 - DNA, 55 bp, Artificial
  Synthetic oligonucleotide
gccaacaagataaaatccgagagaacacacattcacatcttttcatttactgggg

SEQ ID NO: 408745 - DNA, 57 bp, Artificial
  Synthetic oligonucleotide
gccaacaaggggcgccaattctctccgcgttccggcgtggctgccccctgatgttct

SEQ ID NO: 408746 - DNA, 53 bp, Artificial
  Synthetic oligonucleotide
gccaacaatacgaccccgtatggtggggcgtcgatctcgggacaccgatgcgt

SEQ ID NO: 408747 - DNA, 51 bp, Artificial
  Synthetic oligonucleotide
gccaacaatcatggaattggacaccacttgaaagaacaagaaacaatcctt

SEQ ID NO: 408748 - DNA, 56 bp, Artificial
  Synthetic oligonucleotide
gccaacaatctgctgaagagcagcctgacggagacaagagaagcactggagaccat

SEQ ID NO: 408749 - DNA, 59 bp, Artificial
  Synthetic oligonucleotide
gccaacacagatgagtgggagtgcctcagaattgatgaccctaccgactttgaccccga

SEQ ID NO: 408750 - DNA, 60 bp, Artificial
  Synthetic oligonucleotide
gccaacagatgctccattaccatatacaggaagatatgacttaaattttgataggtgggt

SEQ ID NO: 408751 - DNA, 54 bp, Artificial
  Synthetic oligonucleotide
gccaacagccccgccagcagagagttttgggttcggggaggagataaccccctc

SEQ ID NO: 408752 - DNA, 55 bp, Artificial
  Synthetic oligonucleotide
gccaacagctctctagaatcaaacaagggatagaaacctactcccttgcaagagg

SEQ ID NO: 408753 - DNA, 53 bp, Artificial
  Synthetic oligonucleotide
gccaacaggttacgttcccgaatctggagaaccttcctcctctcctctgaaag

SEQ ID NO: 408754 - DNA, 56 bp, Artificial
  Synthetic oligonucleotide
gccaacagtgcgtccgtctatgatctcagaagcgacattactcgttgagcgcactc

SEQ ID NO: 408755 - DNA, 55 bp, Artificial
  Synthetic oligonucleotide
gccaacagtgtcttccgcccctagagaatctgggacatgggtagaatagaagggg

SEQ ID NO: 408756 - DNA, 59 bp, Artificial
  Synthetic oligonucleotide
gccaacatacaccttgtaaaatgattcaaacccttactcacacaggtgtgtatgcaccg

SEQ ID NO: 408757 - DNA, 55 bp, Artificial
  Synthetic oligonucleotide
gccaacatagcagaataggtgttgtgcggcaaagaagaggtagaaatggatccag

SEQ ID NO: 408758 - DNA, 60 bp, Artificial
  Synthetic oligonucleotide
gccaacatcagtggtcccgctgtggaaaagccttactgctggcactacccgcctagacca

SEQ ID NO: 408759 - DNA, 55 bp, Artificial
  Synthetic oligonucleotide
gccaacatgccaacactcgtcgaccaaggcttttggatcggcggccagtacgctc

SEQ ID NO: 408760 - DNA, 55 bp, Artificial
  Synthetic oligonucleotide
gccaacattatgtccacagtgtctactaatgctctgacagtggctcaacactcac

SEQ ID NO: 408761 - DNA, 53 bp, Artificial
  Synthetic oligonucleotide
gccaaccaaacacttgcgggtgtgtcccgacccttgcggcaaggttcgtttct

SEQ ID NO: 408762 - DNA, 55 bp, Artificial
  Synthetic oligonucleotide
gccaaccagctaacaagtaaacaaagcacaaggggaagtggaaagcagccaaggg

SEQ ID NO: 408763 - DNA, 60 bp, Artificial
  Synthetic oligonucleotide
gccaaccatcatatgctccagccagaccaactgtggaaacagtatcgggaccgcctagct

SEQ ID NO: 408764 - DNA, 55 bp, Artificial
  Synthetic oligonucleotide
gccaacccagggacaatcaccggctcagcagtcggttgcaacccagatactttct

SEQ ID NO: 408765 - DNA, 59 bp, Artificial
  Synthetic oligonucleotide
gccaacccagtggtcggctatggggaattcagcgaaaagattcctctgactcccacgca

SEQ ID NO: 408766 - DNA, 55 bp, Artificial
  Synthetic oligonucleotide
gccaacccctcaatctgacacaatacatgaacagcaaaattgctatataagtggc

SEQ ID NO: 408767 - DNA, 51 bp, Artificial
  Synthetic oligonucleotide
gccaacccctcgtgctagaaaaagtcagggggtcgcgggggaggtctaggg

SEQ ID NO: 408768 - DNA, 59 bp, Artificial
  Synthetic oligonucleotide
gccaaccctctcgacccgaagagtgcccgagagcggtttctcatgctcgactcttgcct

SEQ ID NO: 408769 - DNA, 52 bp, Artificial
  Synthetic oligonucleotide
gccaaccctgcaccactagactatgtcaattttgaggcatgctcgaggcgca

SEQ ID NO: 408770 - DNA, 60 bp, Artificial
  Synthetic oligonucleotide
gccaaccctggagactgtggtgggattctcaggtgtcaacatggagtgatgggtatcatc

SEQ ID NO: 408771 - DNA, 54 bp, Artificial
  Synthetic oligonucleotide
gccaaccgacaggactttacgcaagatccaggaaagtttacagagccggttaaa

SEQ ID NO: 408772 - DNA, 55 bp, Artificial
  Synthetic oligonucleotide
gccaacctatcagagaagatcgaaatgcttgcttataatttgcaacttactagtc

SEQ ID NO: 408773 - DNA, 60 bp, Artificial
  Synthetic oligonucleotide
gccaacctcattggcggcgaagttagtgccatggtagagtgtatggaattatgcgacgcg

SEQ ID NO: 408774 - DNA, 57 bp, Artificial
  Synthetic oligonucleotide
gccaacctgtacctacactggtgtagtgactcaaaaactcagagagtttctcaaact

SEQ ID NO: 408775 - DNA, 56 bp, Artificial
  Synthetic oligonucleotide
gccaaccttactaacgtgagacagtcccgtcgtgccacctatatccctacaaacac

SEQ ID NO: 408776 - DNA, 55 bp, Artificial
  Synthetic oligonucleotide
gccaacgaatctatacctactccacttcatacaccgactttaccacccatacctg

SEQ ID NO: 408777 - DNA, 60 bp, Artificial
  Synthetic oligonucleotide
gccaacgattcgctccatcaaatacgcttcactaatacatagcatgctcgcaaagcacgc

SEQ ID NO: 408778 - DNA, 55 bp, Artificial
  Synthetic oligonucleotide
gccaacgcaatgcactataccatgtggagtaaggtgtattacacggatgtcaacg

SEQ ID NO: 408779 - DNA, 57 bp, Artificial
  Synthetic oligonucleotide
gccaacggccccaccagcagagagcttcatgttcggggagacaacccccgctccgaa

SEQ ID NO: 408780 - DNA, 55 bp, Artificial
  Synthetic oligonucleotide
gccaacggcgtcgctgagtggctttctaataactcacgcagtcaagcttatcgcg

SEQ ID NO: 408781 - DNA, 50 bp, Artificial
  Synthetic oligonucleotide
gccaacggggtctacaatctgcctcagtcttattatgaaaccatgccaac

SEQ ID NO: 408782 - DNA, 54 bp, Artificial
  Synthetic oligonucleotide
gccaacgtattgataggacaaggagacgtagtgttggtaatgaaacggaaacgg

SEQ ID NO: 408783 - DNA, 57 bp, Artificial
  Synthetic oligonucleotide
gccaacgttcaggtatgtactttcctctgcttgggtgcaaccgaaactggttgctac

SEQ ID NO: 408784 - DNA, 55 bp, Artificial
  Synthetic oligonucleotide
gccaacgttgtcgttagtgtgatagatagtattaagcgtggtttgtgtatgctta

SEQ ID NO: 408785 - DNA, 60 bp, Artificial
  Synthetic oligonucleotide
gccaacgtttcttcctccaatacatctagtcatgagcatacacagaagatagtactaaac

SEQ ID NO: 408786 - DNA, 60 bp, Artificial
  Synthetic oligonucleotide
gccaacgtttcttcttctaacacatctagtcatgaacatgtacagaagatagtattaaac

SEQ ID NO: 408787 - DNA, 55 bp, Artificial
  Synthetic oligonucleotide
gccaactaaagctgtgccatgtgagtttgtgttttacacatggcccctgtgagtc

SEQ ID NO: 408788 - DNA, 58 bp, Artificial
  Synthetic oligonucleotide
gccaactactgatagacactttctaattttggtgacaaactcctttatggacaattca

SEQ ID NO: 408789 - DNA, 55 bp, Artificial
  Synthetic oligonucleotide
gccaactattattagcaaagcagcatgttattgttcagagttatgcaagaacagg

SEQ ID NO: 408790 - DNA, 55 bp, Artificial
  Synthetic oligonucleotide
gccaactcaagctagccactggactcagaaatgtgccagctatatcgaatagagg

SEQ ID NO: 408791 - DNA, 57 bp, Artificial
  Synthetic oligonucleotide
gccaactcccccgccactccaactcaaatcctccgcatttatggcggtcaatccttc

SEQ ID NO: 408792 - DNA, 55 bp, Artificial
  Synthetic oligonucleotide
gccaactccgccctggcgaatgctgtggtggttcggcctttcctatcccggctac

SEQ ID NO: 408793 - DNA, 60 bp, Artificial
  Synthetic oligonucleotide
gccaactcgccacaatgtcatttcctacattctctcattcgatctatgacatcgcaatta

SEQ ID NO: 408794 - DNA, 56 bp, Artificial
  Synthetic oligonucleotide
gccaactcggttgtgaatcggattcacaactggttggtgcagtaccgtaaataggg

SEQ ID NO: 408795 - DNA, 55 bp, Artificial
  Synthetic oligonucleotide
gccaactgacctgccataagtccacacctcctgtattctgtcaacacttcagggt

SEQ ID NO: 408796 - DNA, 55 bp, Artificial
  Synthetic oligonucleotide
gccaactgcacagtccacaatgaaggcagatgaactcactcctggtaggttccgg

SEQ ID NO: 408797 - DNA, 55 bp, Artificial
  Synthetic oligonucleotide
gccaactgcacagtccactatgaaggctgaagaaatcacgccaggacgatttagg

SEQ ID NO: 408798 - DNA, 58 bp, Artificial
  Synthetic oligonucleotide
gccaactgcccagtccacaatgaaagcagacgagttaacaccaggtcggtttaggaca

SEQ ID NO: 408799 - DNA, 54 bp, Artificial
  Synthetic oligonucleotide
gccaactgtcccggttcaaccgcaaacttggtgttcatcttcctaagaccaccc

SEQ ID NO: 408800 - DNA, 55 bp, Artificial
  Synthetic oligonucleotide
gccaacttagggagagctgtatatggaagacatgaaggttggtcgcgcatgggag

SEQ ID NO: 408801 - DNA, 60 bp, Artificial
  Synthetic oligonucleotide
gccaactttaccagataatgtgcagtatataattcagtgtataggatccagaacctatca

SEQ ID NO: 408802 - DNA, 55 bp, Artificial
  Synthetic oligonucleotide
gccaacttttgaacctcccactggctttgaaacctgctggtcttccacctcatcc

SEQ ID NO: 408803 - DNA, 55 bp, Artificial
  Synthetic oligonucleotide
gccaagaagactgtggaagctctcaacgggtatctagacaagcacaaggacgaag

SEQ ID NO: 408804 - DNA, 54 bp, Artificial
  Synthetic oligonucleotide
gccaagaaggatggtaaattcgctcgaagcatctgcaacattattcgacgcaac

SEQ ID NO: 408805 - DNA, 55 bp, Artificial
  Synthetic oligonucleotide
gccaagaagtgcctaaaatccctaacaagtgtagaatggctgcttgggttcaaac

SEQ ID NO: 408806 - DNA, 55 bp, Artificial
  Synthetic oligonucleotide
gccaagaatagttagagtcacgggtgcacctatcaagaagagatcaggggtaagc

SEQ ID NO: 408807 - DNA, 59 bp, Artificial
  Synthetic oligonucleotide
gccaagaattactcgacccttatctgtggtcctgccgctatgatccacccagtaaagga

SEQ ID NO: 408808 - DNA, 55 bp, Artificial
  Synthetic oligonucleotide
gccaagaattcgaagcagctgcatggtgggcaaatattcatcacaccacaggggt

SEQ ID NO: 408809 - DNA, 55 bp, Artificial
  Synthetic oligonucleotide
gccaagacaattaggctagaaggagaagtggctgcaatcaagggtgctctcagga

SEQ ID NO: 408810 - DNA, 55 bp, Artificial
  Synthetic oligonucleotide
gccaagacagaggatgtggtaaaagcgcaacaatttgcgagtgaagcacaagtcg

SEQ ID NO: 408811 - DNA, 55 bp, Artificial
  Synthetic oligonucleotide
gccaagagcaagaaatgtcgtgcaaacatacgggcagtacagcgattctggcata

SEQ ID NO: 408812 - DNA, 58 bp, Artificial
  Synthetic oligonucleotide
gccaagataaccaacggctttagtacagatctagccatagccacggtatcggtagctt

SEQ ID NO: 408813 - DNA, 55 bp, Artificial
  Synthetic oligonucleotide
gccaagataagagcgaatatccccgagcttctatgcgcgggggtcacattcgtaa

SEQ ID NO: 408814 - DNA, 60 bp, Artificial
  Synthetic oligonucleotide
gccaagatcactagcgagctggatccagagtgaattcaacaaggcatgtgagttgaccga

SEQ ID NO: 408815 - DNA, 55 bp, Artificial
  Synthetic oligonucleotide
gccaagatcagcattcctgctattctggtcgctcttgcagtcctagtgcttgggg

SEQ ID NO: 408816 - DNA, 60 bp, Artificial
  Synthetic oligonucleotide
gccaagatgatataaccttacctaccaaagcgaatggtgatctgatatgttgtcaagtct

SEQ ID NO: 408817 - DNA, 52 bp, Artificial
  Synthetic oligonucleotide
gccaagatggcttccccgacgaattctaccgctcacgatctatcgatgacct

SEQ ID NO: 408818 - DNA, 56 bp, Artificial
  Synthetic oligonucleotide
gccaagatgtagagatccgaaaccttaaggtattgggtgacgacagcgcttttcgt

SEQ ID NO: 408819 - DNA, 55 bp, Artificial
  Synthetic oligonucleotide
gccaagcacaacaattggggaattgccatcctaccactagcagagctagattttg

SEQ ID NO: 408820 - DNA, 55 bp, Artificial
  Synthetic oligonucleotide
gccaagcaccggtactgtgaagaatgatatcagagacaggtttcaagtgattcgc

SEQ ID NO: 408821 - DNA, 51 bp, Artificial
  Synthetic oligonucleotide
gccaagcactccgagcgccagcgaggagtgcgaccccccccccggtagcaa

SEQ ID NO: 408822 - DNA, 51 bp, Artificial
  Synthetic oligonucleotide
gccaagcagggctcggtggatatcattcaccgactatataactggaacggg

SEQ ID NO: 408823 - DNA, 55 bp, Artificial
  Synthetic oligonucleotide
gccaagcatacgcgagttgcaagcattggaagttcaagcctcgttacaacaaccg

SEQ ID NO: 408824 - DNA, 51 bp, Artificial
  Synthetic oligonucleotide
gccaagcccgttccaaagggaactgggtgattacttcgcctcaaccgattt

SEQ ID NO: 408825 - DNA, 55 bp, Artificial
  Synthetic oligonucleotide
gccaagccgatattagaactagcaccagtcgatcagacagcctacatcagggaga

SEQ ID NO: 408826 - DNA, 55 bp, Artificial
  Synthetic oligonucleotide
gccaagccttcattcagacagataatggcgcactttagcaatcttgctgaagcgt

SEQ ID NO: 408827 - DNA, 60 bp, Artificial
  Synthetic oligonucleotide
gccaagcgtagtatccactattttggagtatcgtacgaaggagattccagataatgcatt

SEQ ID NO: 408828 - DNA, 60 bp, Artificial
  Synthetic oligonucleotide
gccaaggaatgaacagaccgggtctagccccacgtgtctgtctatggcgccatcaaagta

SEQ ID NO: 408829 - DNA, 58 bp, Artificial
  Synthetic oligonucleotide
gccaaggacattcttgagaaaacgcataatggaaaattgtgcaaactgaacggagtcc

SEQ ID NO: 408830 - DNA, 60 bp, Artificial
  Synthetic oligonucleotide
gccaaggaggactgctcgaatcgtcttgctaggatcgcgtatctgattgctttgttacct

SEQ ID NO: 408831 - DNA, 55 bp, Artificial
  Synthetic oligonucleotide
gccaaggcaatagaaagctgcttagtgggactccctctactaccttctgagtgag

SEQ ID NO: 408832 - DNA, 55 bp, Artificial
  Synthetic oligonucleotide
gccaaggccttagtgtcagaagggtaaaactggtcatagatagggactggggcct

SEQ ID NO: 408833 - DNA, 55 bp, Artificial
  Synthetic oligonucleotide
gccaaggctctataattcaccaactcaaatcaccactcatcacacataacactcc

SEQ ID NO: 408834 - DNA, 53 bp, Artificial
  Synthetic oligonucleotide
gccaaggggtactactcccagagctcccgtaagattccctacctccctcctaa

SEQ ID NO: 408835 - DNA, 60 bp, Artificial
  Synthetic oligonucleotide
gccaagggtgcgccaacaattgcgcaacgcgtaaagcacgcagagaaagcaagattatgc

SEQ ID NO: 408836 - DNA, 55 bp, Artificial
  Synthetic oligonucleotide
gccaaggtaagtcacattgaagcgttcaaacactttgctgatctcagaagcctga

SEQ ID NO: 408837 - DNA, 60 bp, Artificial
  Synthetic oligonucleotide
gccaaggtacgtgagctacgacactgggagcactccagctacggatccacagtggaacaa

SEQ ID NO: 408838 - DNA, 60 bp, Artificial
  Synthetic oligonucleotide
gccaaggtagtagaaccagccttggcatacctcccctatgctaccagtgcactgaaaatg

SEQ ID NO: 408839 - DNA, 55 bp, Artificial
  Synthetic oligonucleotide
gccaaggtcactggtggacagtatgccagcaatgagcaggcgctagtcaagcggt

SEQ ID NO: 408840 - DNA, 55 bp, Artificial
  Synthetic oligonucleotide
gccaaggtcactggtggtcaatatgccagcaacgaacaggctctggtgaagaggt

SEQ ID NO: 408841 - DNA, 54 bp, Artificial
  Synthetic oligonucleotide
gccaaggtctgtgatgtcacccctgactatgtagattgggcacccatatggata

SEQ ID NO: 408842 - DNA, 55 bp, Artificial
  Synthetic oligonucleotide
gccaaggttatgcacgggtatactaaccgtatgtctgggcgtgtaggtatggcct

SEQ ID NO: 408843 - DNA, 55 bp, Artificial
  Synthetic oligonucleotide
gccaagtaacagggtcggctaacataatgatgcagagaggcaattttaggaacca

SEQ ID NO: 408844 - DNA, 58 bp, Artificial
  Synthetic oligonucleotide
gccaagtacctaaaagacgcggtgacaatgtgcagacactacaagcgtgcagagaggg

SEQ ID NO: 408845 - DNA, 60 bp, Artificial
  Synthetic oligonucleotide
gccaagtacgcaatgatttgtgacaagcagcactggcgcgtcaaacgtgcaaagggcgtc

SEQ ID NO: 408846 - DNA, 55 bp, Artificial
  Synthetic oligonucleotide
gccaagtagcaagcgtgcaggtgccttttaccggagggttactatcatcgacgtt

SEQ ID NO: 408847 - DNA, 57 bp, Artificial
  Synthetic oligonucleotide
gccaagtcagaggtcgtaaacgagtccaaatgcggaagattaaaaaacatctgtgaa

SEQ ID NO: 408848 - DNA, 58 bp, Artificial
  Synthetic oligonucleotide
gccaagtctgaggacgtaaacgagtccagatctggaagattagaaaacactggtgtat

SEQ ID NO: 408849 - DNA, 55 bp, Artificial
  Synthetic oligonucleotide
gccaagtgacaaattcagctaccataatgatgcagaaaggcaattttaagaacca

SEQ ID NO: 408850 - DNA, 60 bp, Artificial
  Synthetic oligonucleotide
gccaagtgatggttctggggcagccccggctcagcctagtgctcctccagtggcttcacc

SEQ ID NO: 408851 - DNA, 55 bp, Artificial
  Synthetic oligonucleotide
gccaagttcacagcggcagctgagaaagtaatcttgacgcttggtgactacgggg

SEQ ID NO: 408852 - DNA, 56 bp, Artificial
  Synthetic oligonucleotide
gccaagttccgaacaaggattccgcgggaggatagatcagcgcccgagaggggtaa

SEQ ID NO: 408853 - DNA, 60 bp, Artificial
  Synthetic oligonucleotide
gccaagttggagtacacagagcaggcctcaaattacgtaccaatcacagtaactgtagcg

SEQ ID NO: 408854 - DNA, 50 bp, Artificial
  Synthetic oligonucleotide
gccaagttttgacgatctgtttgggtgcaatctgtacagcaatgggagcc

SEQ ID NO: 408855 - DNA, 59 bp, Artificial
  Synthetic oligonucleotide
gccaataaagaacagtaaataaagcgagtagtcatgtcttttgttgatcaccctccaga

SEQ ID NO: 408856 - DNA, 55 bp, Artificial
  Synthetic oligonucleotide
gccaataattatgtcgaagcgtgcagccgatatgatcatttcatcaagcggctcg

SEQ ID NO: 408857 - DNA, 55 bp, Artificial
  Synthetic oligonucleotide
gccaatacagtggatttgtaagaacactattccagcaaatgcgtgatgtgctggg

SEQ ID NO: 408858 - DNA, 60 bp, Artificial
  Synthetic oligonucleotide
gccaatacagtgggtttgtgaggacactgttccaacaaatgcgagatgtgcttgggacat

SEQ ID NO: 408859 - DNA, 60 bp, Artificial
  Synthetic oligonucleotide
gccaatacttaggagcatgcactggtctgttgtaacctgtgggttccagatgagtgttat

SEQ ID NO: 408860 - DNA, 55 bp, Artificial
  Synthetic oligonucleotide
gccaatacttgtttgactatcctgttgtgaagttagactctagggtccacagggc

SEQ ID NO: 408861 - DNA, 60 bp, Artificial
  Synthetic oligonucleotide
gccaatataatgtaatcttgatgtacatgcaccacagacagttgcagtagttgttaaaca

SEQ ID NO: 408862 - DNA, 60 bp, Artificial
  Synthetic oligonucleotide
gccaatatacaaatctaacatactgtaggggatgcgctctatatcatgtatgtcaatggt

SEQ ID NO: 408863 - DNA, 55 bp, Artificial
  Synthetic oligonucleotide
gccaatatacgatacggagtgcatgatcactccttgggtaatgtacggaggggcc

SEQ ID NO: 408864 - DNA, 51 bp, Artificial
  Synthetic oligonucleotide
gccaatataggcaattgcatggaagcactattccaagggccactacagtac

SEQ ID NO: 408865 - DNA, 60 bp, Artificial
  Synthetic oligonucleotide
gccaatatatgcaatcggatgtaattctagattttactcttatgagtagccctatgattg

SEQ ID NO: 408866 - DNA, 60 bp, Artificial
  Synthetic oligonucleotide
gccaatatcacttgagaaaagacgtgcgcaaatatcagctttactgactatgctacaaaa

SEQ ID NO: 408867 - DNA, 60 bp, Artificial
  Synthetic oligonucleotide
gccaatatctggctcccatactttaacagaactatgtatagtgcgctacccattctgcct

SEQ ID NO: 408868 - DNA, 52 bp, Artificial
  Synthetic oligonucleotide
gccaatcaaatgacgcgctcaaagcttaaataatttcccgcctattataagt

SEQ ID NO: 408869 - DNA, 60 bp, Artificial
  Synthetic oligonucleotide
gccaatcatgtcgcgtagaggatacctgcggcaagtcttaattgtggccggtagcagttg

SEQ ID NO: 408870 - DNA, 55 bp, Artificial
  Synthetic oligonucleotide
gccaatcccagagtagatgtgggtgccatctatagaaggtggattatcctggggt

SEQ ID NO: 408871 - DNA, 55 bp, Artificial
  Synthetic oligonucleotide
gccaatcccatagcaggaaacatttcctgtaactcaaatattacaggtctactat

SEQ ID NO: 408872 - DNA, 55 bp, Artificial
  Synthetic oligonucleotide
gccaatccggctatgcagagtgcttacttgcgtaaagcagtaagaagctgactgc

SEQ ID NO: 408873 - DNA, 60 bp, Artificial
  Synthetic oligonucleotide
gccaatccttgcagtacagggtatctgggcaaagaggaaaatcagcacaaacctctgagc

SEQ ID NO: 408874 - DNA, 52 bp, Artificial
  Synthetic oligonucleotide
gccaatcgctaattcagttaccgtaagacaagatttagagagacaattaggc

SEQ ID NO: 408875 - DNA, 59 bp, Artificial
  Synthetic oligonucleotide
gccaatcggtaatggcagtgaaacatacaggctaataaattgtaatacctcaaccatta

SEQ ID NO: 408876 - DNA, 55 bp, Artificial
  Synthetic oligonucleotide
gccaatctcagacggggtttgctggaaagggtcttctacgtggaagataaggtca

SEQ ID NO: 408877 - DNA, 60 bp, Artificial
  Synthetic oligonucleotide
gccaatctttggcgttatagatacgccttgctggatagtgaaagcagccccttcttgctc

SEQ ID NO: 408878 - DNA, 59 bp, Artificial
  Synthetic oligonucleotide
gccaatgaacagcctggtactaaattttataaaatgcgcggtgagtggtgggatggata

SEQ ID NO: 408879 - DNA, 55 bp, Artificial
  Synthetic oligonucleotide
gccaatgaacgtcgatggtacactgcattgagtcgattccggaagaacatctgtc

SEQ ID NO: 408880 - DNA, 55 bp, Artificial
  Synthetic oligonucleotide
gccaatgaaggagagaacaactgtttgatgcaccctataagcctgcatggaatgg

SEQ ID NO: 408881 - DNA, 55 bp, Artificial
  Synthetic oligonucleotide
gccaatgacaatgacttgagtagttcgtgcttaaagttggctagtcaagtgaaag

SEQ ID NO: 408882 - DNA, 51 bp, Artificial
  Synthetic oligonucleotide
gccaatgagatgtgtgcgttgaaagttagataagtggatgctgacatgcgc

SEQ ID NO: 408883 - DNA, 55 bp, Artificial
  Synthetic oligonucleotide
gccaatgaggaaataagcagcatgatatttaacgctgtcagtaagatcgacttag

SEQ ID NO: 408884 - DNA, 55 bp, Artificial
  Synthetic oligonucleotide
gccaatgagggagatctatgagtccattcgatggaccaaggacgcacgaaacact

SEQ ID NO: 408885 - DNA, 60 bp, Artificial
  Synthetic oligonucleotide
gccaatgagggagattcacgaatccattcgttggaccaaagatgcacgaagtactcaaga

SEQ ID NO: 408886 - DNA, 55 bp, Artificial
  Synthetic oligonucleotide
gccaatgcaaaggttatgtagtcagaattccaaattacgttgccagtactggtgg

SEQ ID NO: 408887 - DNA, 59 bp, Artificial
  Synthetic oligonucleotide
gccaatgccctatgtcccatatcctcgctccactgaggtttacgttcggtccatctttg

SEQ ID NO: 408888 - DNA, 55 bp, Artificial
  Synthetic oligonucleotide
gccaatgcctgttcagctttctttaaggtggagttaacaagattataatacacca

SEQ ID NO: 408889 - DNA, 60 bp, Artificial
  Synthetic oligonucleotide
gccaatgctcaaactacaccgacataatgtctgcggaggcatacagcgacccgcccgcgc

SEQ ID NO: 408890 - DNA, 55 bp, Artificial
  Synthetic oligonucleotide
gccaatgctttggatggttgccatgcagactgtgttcatgctacgtcctgccctg

SEQ ID NO: 408891 - DNA, 55 bp, Artificial
  Synthetic oligonucleotide
gccaatggcaacgaccaacaggatgttagggacaacatatctgtggacaacaaac

SEQ ID NO: 408892 - DNA, 55 bp, Artificial
  Synthetic oligonucleotide
gccaatggcgagccgactgtgaaactttacacctcagtcgagaatgctcagcagg

SEQ ID NO: 408893 - DNA, 60 bp, Artificial
  Synthetic oligonucleotide
gccaatggctgatattcatgagtctatcagatggactaaagatccaaagaacactcagga

SEQ ID NO: 408894 - DNA, 60 bp, Artificial
  Synthetic oligonucleotide
gccaatgggaggttttccagttatgtcaggaggcgctgtatcattgcatccttctggagt

SEQ ID NO: 408895 - DNA, 55 bp, Artificial
  Synthetic oligonucleotide
gccaatggggatgacatcatactttctgtgcaagagacggatctctgggtccttg

SEQ ID NO: 408896 - DNA, 53 bp, Artificial
  Synthetic oligonucleotide
gccaatggtacctgcgaaccaaatcctcggctgaacttttacccggtttttgc

SEQ ID NO: 408897 - DNA, 55 bp, Artificial
  Synthetic oligonucleotide
gccaatggtgatgatattattttggcagttagggatgaggatgtgtggctgtatg

SEQ ID NO: 408898 - DNA, 60 bp, Artificial
  Synthetic oligonucleotide
gccaatgtaccaggctatcacacattgttttgcacacgagactttgctatgcgtaatgtt

SEQ ID NO: 408899 - DNA, 60 bp, Artificial
  Synthetic oligonucleotide
gccaatgtcagtgaagacgtgtgatgaggagtgttgtccagtcaactttaagaagtgttg

SEQ ID NO: 408900 - DNA, 60 bp, Artificial
  Synthetic oligonucleotide
gccaatgttttgtgggtggagactttgctgtgatggattgattaaggaaccatgcttaat

SEQ ID NO: 408901 - DNA, 54 bp, Artificial
  Synthetic oligonucleotide
gccaattacaggttcaatggatactgcgtatgcaaattctacgcaaagtgagcc

SEQ ID NO: 408902 - DNA, 53 bp, Artificial
  Synthetic oligonucleotide
gccaattagccccctgagcaactcactgttacgccatcacaacatggtgtacg

SEQ ID NO: 408903 - DNA, 60 bp, Artificial
  Synthetic oligonucleotide
gccaattccaaatcgcagataaatagacaagtcatagttgacagcgacaactggtctggg

SEQ ID NO: 408904 - DNA, 55 bp, Artificial
  Synthetic oligonucleotide
gccaattctattgtggattttcttggttttcagattactaatgaaggccggggcc

SEQ ID NO: 408905 - DNA, 55 bp, Artificial
  Synthetic oligonucleotide
gccaattctcaaagttgatctgacaccacacattcctcttaaagtatgtgagtct

SEQ ID NO: 408906 - DNA, 59 bp, Artificial
  Synthetic oligonucleotide
gccaattgaatgagggtgtaatgaatacaagcaaacctttccagaacactagtaagcac

SEQ ID NO: 408907 - DNA, 57 bp, Artificial
  Synthetic oligonucleotide
gccaattgagctttattgtgatggtaatttggttactgattgttctgctttgggtgt

SEQ ID NO: 408908 - DNA, 57 bp, Artificial
  Synthetic oligonucleotide
gccaattgatgtttgattactttgaatccgattcttgggccaagtggtcgtactacc

SEQ ID NO: 408909 - DNA, 60 bp, Artificial
  Synthetic oligonucleotide
gccaattgcaagataacaacatgtagatgtgcagaccccccgggtatcatatcacaaaat

SEQ ID NO: 408910 - DNA, 60 bp, Artificial
  Synthetic oligonucleotide
gccaattgccccgagtggagaaactgctaagatgccagtggtagtgcaaattgacgaaat

SEQ ID NO: 408911 - DNA, 55 bp, Artificial
  Synthetic oligonucleotide
gccaattgtggtgatgactgtgtactctatttggagaaggaggacctacctaagc

SEQ ID NO: 408912 - DNA, 55 bp, Artificial
  Synthetic oligonucleotide
gccaatttaagaggcgatgtgagaaatacgattgttgcgccagtacggataagag

SEQ ID NO: 408913 - DNA, 55 bp, Artificial
  Synthetic oligonucleotide
gccaatttatggtgtctgagtgcaagagagcggcatcaatgggtagtgacacctc

SEQ ID NO: 408914 - DNA, 60 bp, Artificial
  Synthetic oligonucleotide
gccaatttcagtatggagctacccagctttggggtgtctgggattaatgaatcggctgat

SEQ ID NO: 408915 - DNA, 60 bp, Artificial
  Synthetic oligonucleotide
gccaatttcagtatggagcttcctagttttggagtatctgggattaatgagtctgcagac

SEQ ID NO: 408916 - DNA, 57 bp, Artificial
  Synthetic oligonucleotide
gccaattttagcatggaacttcctagttttggggtgtctggggttaatgagtctgca

SEQ ID NO: 408917 - DNA, 55 bp, Artificial
  Synthetic oligonucleotide
gccaattttctttaatggtttcagcattaatattggaagaaatgaaggtgttcgg

SEQ ID NO: 408918 - DNA, 60 bp, Artificial
  Synthetic oligonucleotide
gccaattttggcgctcatagggtcattgacagtaggaagtgcgtgaaaccagtcattctg

SEQ ID NO: 408919 - DNA, 57 bp, Artificial
  Synthetic oligonucleotide
gccacaaaaaggtcctgcagtgacaattggagttggaggtattgttcctgttcaagg

SEQ ID NO: 408920 - DNA, 58 bp, Artificial
  Synthetic oligonucleotide
gccacaaaaaggtgggtatgtatgcagttcgtgtgggtgtccaaacagcatcagccag

SEQ ID NO: 408921 - DNA, 55 bp, Artificial
  Synthetic oligonucleotide
gccacaaaagagagagcggagatgcgtaaggacattgaagtgcatgaaggaagac

SEQ ID NO: 408922 - DNA, 57 bp, Artificial
  Synthetic oligonucleotide
gccacaaaagatataacgagggacaatataaacagccgggtaaacatcagttgcaaa

SEQ ID NO: 408923 - DNA, 52 bp, Artificial
  Synthetic oligonucleotide
gccacaaacattatagagaatggcgtcacacttgatatagaagccgttattg

SEQ ID NO: 408924 - DNA, 60 bp, Artificial
  Synthetic oligonucleotide
gccacaaacccagtaactttaacaggtgttgcccattgatatgcggcaaggccatcagtc

SEQ ID NO: 408925 - DNA, 55 bp, Artificial
  Synthetic oligonucleotide
gccacaaagcccagtagaagtcttaggacgcgataatatgcaaaaggtgggaatc

SEQ ID NO: 408926 - DNA, 58 bp, Artificial
  Synthetic oligonucleotide
gccacaacaatgactctatattaaacttagcaagtttgaggaatgttcttagcagaac

SEQ ID NO: 408927 - DNA, 55 bp, Artificial
  Synthetic oligonucleotide
gccacaacagagatgtttagcaggaatttgcttaagacgacatctgacgatggcc

SEQ ID NO: 408928 - DNA, 55 bp, Artificial
  Synthetic oligonucleotide
gccacaacattaattggagagattgccaattattatacacattggactggcagct

SEQ ID NO: 408929 - DNA, 54 bp, Artificial
  Synthetic oligonucleotide
gccacaacggaaaactatgtagactagggggaatagccccattacaactgggta

SEQ ID NO: 408930 - DNA, 55 bp, Artificial
  Synthetic oligonucleotide
gccacaagcaggaagtttgtcgattttctcacttgaaagtagttgttcttcccac

SEQ ID NO: 408931 - DNA, 60 bp, Artificial
  Synthetic oligonucleotide
gccacaaggcaagagtgttggctgaggcaatgagcagagtaaacaacacaaacataatga

SEQ ID NO: 408932 - DNA, 51 bp, Artificial
  Synthetic oligonucleotide
gccacaagtgacagtcagcaaatgaacactgatcataaagcagtgttggat

SEQ ID NO: 408933 - DNA, 59 bp, Artificial
  Synthetic oligonucleotide
gccacaatcacccgattcaactatggtctctaccatccgttggttgtccgcgatatggt

SEQ ID NO: 408934 - DNA, 60 bp, Artificial
  Synthetic oligonucleotide
gccacaatgcaaaatcacaggatttgcacctttctccaaggacaattcaattcgactctc

SEQ ID NO: 408935 - DNA, 55 bp, Artificial
  Synthetic oligonucleotide
gccacaatggtcacacagtggtccggagtccaatcagcccttgctggaggaacct

SEQ ID NO: 408936 - DNA, 55 bp, Artificial
  Synthetic oligonucleotide
gccacaatggtgtctgcccggtagtgttcacagatgggtctgccactggacctgc

SEQ ID NO: 408937 - DNA, 55 bp, Artificial
  Synthetic oligonucleotide
gccacaatgtcccatatactggaaacgtcttccaagtggagaccgttcacacgta

SEQ ID NO: 408938 - DNA, 55 bp, Artificial
  Synthetic oligonucleotide
gccacaattccagctcgcccacttctggaattggaattcttgaaacgtgggttca

SEQ ID NO: 408939 - DNA, 55 bp, Artificial
  Synthetic oligonucleotide
gccacaattgagtacatacggctctgacatagctaccagacacaccgggcaatcc

SEQ ID NO: 408940 - DNA, 59 bp, Artificial
  Synthetic oligonucleotide
gccacacaaggtggcaacaatgtcgcaatacaactatccgttggtaagttgtactgtaa

SEQ ID NO: 408941 - DNA, 55 bp, Artificial
  Synthetic oligonucleotide
gccacacagataattatgtggtcccaatgatctagcccacatcgtcttaccggtc

SEQ ID NO: 408942 - DNA, 55 bp, Artificial
  Synthetic oligonucleotide
gccacacatgccaatctctgctcagagatatattctatggtcattggaccatggg

SEQ ID NO: 408943 - DNA, 56 bp, Artificial
  Synthetic oligonucleotide
gccacaccaaggcaaataagactagagaatgtaaaattaatcgtaaagataaaata

SEQ ID NO: 408944 - DNA, 57 bp, Artificial
  Synthetic oligonucleotide
gccacaccccggagtccttatgcaccatcttattaacaaggttgcaagggcttggga

SEQ ID NO: 408945 - DNA, 58 bp, Artificial
  Synthetic oligonucleotide
gccacaccgaaagacctattctcacttgcctggacttgctaccacaacgggtcgtcac

SEQ ID NO: 408946 - DNA, 60 bp, Artificial
  Synthetic oligonucleotide
gccacacgcagaggcctggcttacgacatagcagcacagctgtatatgtgccctaagtgc

SEQ ID NO: 408947 - DNA, 58 bp, Artificial
  Synthetic oligonucleotide
gccacacggtggagcctacagggacggcacaaaggcaatcttgtacaattcaccaaac

SEQ ID NO: 408948 - DNA, 60 bp, Artificial
  Synthetic oligonucleotide
gccacacgtgctgactggaaattccaagatcgcgattctcttatcgcttccctctacgag

SEQ ID NO: 408949 - DNA, 51 bp, Artificial
  Synthetic oligonucleotide
gccacacgttctttaattaagcgacctgccccatgataagacatgcaggtt

SEQ ID NO: 408950 - DNA, 59 bp, Artificial
  Synthetic oligonucleotide
gccacactacagaagcacggggactttcctcgaattcacgagagcgactgtagttcaag

SEQ ID NO: 408951 - DNA, 54 bp, Artificial
  Synthetic oligonucleotide
gccacactctgctctgccctttacgtgggggacttctgcggagggctgatgctc

SEQ ID NO: 408952 - DNA, 55 bp, Artificial
  Synthetic oligonucleotide
gccacactctggtcaatgattgtgtcaatggtctctgctaactgatgtggttcct

SEQ ID NO: 408953 - DNA, 55 bp, Artificial
  Synthetic oligonucleotide
gccacactcttcccgctgatccaaacggctccagttgcggggtcacggtacccat

SEQ ID NO: 408954 - DNA, 60 bp, Artificial
  Synthetic oligonucleotide
gccacacttgggttcggggcatatatgtctcaagcccatggcatagaccccaacatacgt

SEQ ID NO: 408955 - DNA, 60 bp, Artificial
  Synthetic oligonucleotide
gccacagaatacataatgaagggggtatacattaatactgctttgcttaatgcatcctgt

SEQ ID NO: 408956 - DNA, 55 bp, Artificial
  Synthetic oligonucleotide
gccacagaccacccaggtgtaagttccctccagctctcccaatatgggccaggcc

SEQ ID NO: 408957 - DNA, 55 bp, Artificial
  Synthetic oligonucleotide
gccacagaccagcgactcaggctcttatacaagatgcgcctcaccgttgggccgg

SEQ ID NO: 408958 - DNA, 55 bp, Artificial
  Synthetic oligonucleotide
gccacagactaccaaataaatttcaatcttgttaaacaaagattagcccccttca

SEQ ID NO: 408959 - DNA, 60 bp, Artificial
  Synthetic oligonucleotide
gccacagagaaatatatgccccgatatggacttcagcgaaacctaacagaactcagtttg

SEQ ID NO: 408960 - DNA, 60 bp, Artificial
  Synthetic oligonucleotide
gccacagagaatatttaaagctatagaaaatctaggatagcatatggctaccaaagctgc

SEQ ID NO: 408961 - DNA, 60 bp, Artificial
  Synthetic oligonucleotide
gccacagaggatggcgtacttcgaaggccccgctctcgcagataattgggacgttctctc

SEQ ID NO: 408962 - DNA, 55 bp, Artificial
  Synthetic oligonucleotide
gccacagatgaatctgctgaggtaattgaaacctactcagctccaggaggagcac

SEQ ID NO: 408963 - DNA, 55 bp, Artificial
  Synthetic oligonucleotide
gccacagatgccctcatgcttgcccctctgctgcccctcaaccctacaactcttc

SEQ ID NO: 408964 - DNA, 58 bp, Artificial
  Synthetic oligonucleotide
gccacagcaagctagacgggacgaacaacatccttgttacctaattgaaacacagtgt

SEQ ID NO: 408965 - DNA, 55 bp, Artificial
  Synthetic oligonucleotide
gccacagcatcttcgagccttcgctgagaagcgcgggtcatcctctccttatctc

SEQ ID NO: 408966 - DNA, 55 bp, Artificial
  Synthetic oligonucleotide
gccacagccattttggaaccctgcaattgacgcaggacgcaagacattcgagcag

SEQ ID NO: 408967 - DNA, 55 bp, Artificial
  Synthetic oligonucleotide
gccacagcgaatcaaaggctgatcttgtgcagttgtagtccattgaacggtaggc

SEQ ID NO: 408968 - DNA, 55 bp, Artificial
  Synthetic oligonucleotide
gccacaggactttggagaggtgttcaatatgttcgacaacgagcctagcactgct

SEQ ID NO: 408969 - DNA, 55 bp, Artificial
  Synthetic oligonucleotide
gccacaggattcattttagcgataccaatctgtgtgataggcttatactacgtct

SEQ ID NO: 408970 - DNA, 60 bp, Artificial
  Synthetic oligonucleotide
gccacagggataacctatgcctcatacggttacttctgtcagatgccacaacctaagctg

SEQ ID NO: 408971 - DNA, 60 bp, Artificial
  Synthetic oligonucleotide
gccacagggtctatggctatgctccagatggggtgctccctctggagaccgggagagact

SEQ ID NO: 408972 - DNA, 60 bp, Artificial
  Synthetic oligonucleotide
gccacaggtaacgctgtgcgtgtcctcaatcgtcgcggtaaggctttcctgctggtcaca

SEQ ID NO: 408973 - DNA, 60 bp, Artificial
  Synthetic oligonucleotide
gccacaggtgcaagggacacaacctaatgctgtccaagaagtagtaatggaacaaatgca

SEQ ID NO: 408974 - DNA, 60 bp, Artificial
  Synthetic oligonucleotide
gccacagtacacgcaggtactcgagaaatcgacttgcctagactgctgactgcacttaaa

SEQ ID NO: 408975 - DNA, 60 bp, Artificial
  Synthetic oligonucleotide
gccacagtcactcattgtccggtacagccgtgagtgccggtgcacatgcgcatacagttg

SEQ ID NO: 408976 - DNA, 55 bp, Artificial
  Synthetic oligonucleotide
gccacagtcatgactcaactgtgttgctggggataggacgggttagggaattggc

SEQ ID NO: 408977 - DNA, 60 bp, Artificial
  Synthetic oligonucleotide
gccacagtccaaggaccgagcttagactttgccttatccctcctaaggcgcaacatcaga

SEQ ID NO: 408978 - DNA, 54 bp, Artificial
  Synthetic oligonucleotide
gccacagtccagatcagttacctagtggggtgagagtgttatgcatattaaata

SEQ ID NO: 408979 - DNA, 55 bp, Artificial
  Synthetic oligonucleotide
gccacagtccagatctacccttctacgcctcacttgtctcttcttggcgatgtgg

SEQ ID NO: 408980 - DNA, 55 bp, Artificial
  Synthetic oligonucleotide
gccacagttatcatttcgggtcgctttctagtttgctataatatagtaattgcac

SEQ ID NO: 408981 - DNA, 60 bp, Artificial
  Synthetic oligonucleotide
gccacagtttaggtctattctcttgcgacgaatcctggactttgcaatcttgtgcttagg

SEQ ID NO: 408982 - DNA, 60 bp, Artificial
  Synthetic oligonucleotide
gccacatacgcttgatcgcgtcacatgtgcgccacactttcttgtccagaatatacgagg

SEQ ID NO: 408983 - DNA, 59 bp, Artificial
  Synthetic oligonucleotide
gccacatactctcggtgtggctccggtccctgggtgacgcccaggtgcctggttgacta

SEQ ID NO: 408984 - DNA, 55 bp, Artificial
  Synthetic oligonucleotide
gccacatacttgccagtgtccagtctctctgagtcatttggtcaacatgcgtccg

SEQ ID NO: 408985 - DNA, 51 bp, Artificial
  Synthetic oligonucleotide
gccacatattattgcagacataagaatagatactacccaattaaagtaact

SEQ ID NO: 408986 - DNA, 56 bp, Artificial
  Synthetic oligonucleotide
gccacatcacggttgggaaccttcccgaaagactcatgggtcgagccaggactcgt

SEQ ID NO: 408987 - DNA, 55 bp, Artificial
  Synthetic oligonucleotide
gccacatcagggtcccacggcttcgaggaaataccaatgcagaccttcgcgacct

SEQ ID NO: 408988 - DNA, 55 bp, Artificial
  Synthetic oligonucleotide
gccacatcgtccgctttgcttgagaccgtccgaggtaacaataccttggtcaacg

SEQ ID NO: 408989 - DNA, 55 bp, Artificial
  Synthetic oligonucleotide
gccacatgcttacagtgggtgcgtggaatgcaatgttaaaagttatagaggaacc

SEQ ID NO: 408990 - DNA, 55 bp, Artificial
  Synthetic oligonucleotide
gccacatggacatactttgatacctacctcagaaatggcctagatggcacgcctg

SEQ ID NO: 408991 - DNA, 55 bp, Artificial
  Synthetic oligonucleotide
gccacattagagcgtacagcggtcactagcgcatcggcacctctctcgattagca

SEQ ID NO: 408992 - DNA, 55 bp, Artificial
  Synthetic oligonucleotide
gccacattggagttgacacacacaggcgtcattcatgaaggaaagagcaacctag

SEQ ID NO: 408993 - DNA, 55 bp, Artificial
  Synthetic oligonucleotide
gccacatttaccatgaggctgctatcaccagttagggttccaaactacaacctga

SEQ ID NO: 408994 - DNA, 55 bp, Artificial
  Synthetic oligonucleotide
gccaccaaacatcgcatgatggggaagatcattaaatcgctggggaagttcggga

SEQ ID NO: 408995 - DNA, 55 bp, Artificial
  Synthetic oligonucleotide
gccaccaaacattgcatgatggggaagatcatcaagtcgttgggcaaatttggca

SEQ ID NO: 408996 - DNA, 60 bp, Artificial
  Synthetic oligonucleotide
gccaccaacagcaaacgggtttttgtagagtatgaagctttcaatggtcttcatcattca

SEQ ID NO: 408997 - DNA, 55 bp, Artificial
  Synthetic oligonucleotide
gccaccaaccaggcagttttcgaaatttcacaaggactcgaggcaactgcaactg

SEQ ID NO: 408998 - DNA, 55 bp, Artificial
  Synthetic oligonucleotide
gccaccaagcaagactttagccaagatccatcaaagtttacacaacctgtggtgg

SEQ ID NO: 408999 - DNA, 60 bp, Artificial
  Synthetic oligonucleotide
gccaccaatgcaacccaggtcacacgtgggcgattgagcagctctgaaccacaagtgcag

SEQ ID NO: 409000 - DNA, 55 bp, Artificial
  Synthetic oligonucleotide
gccaccacaactagcatgcagactagacgacttaacatcagtagagcgctcgcca

SEQ ID NO: 409001 - DNA, 60 bp, Artificial
  Synthetic oligonucleotide
gccaccacataggttgcaagagtggaacgggaagtcctatagacaagccgcgcgattctg

SEQ ID NO: 409002 - DNA, 55 bp, Artificial
  Synthetic oligonucleotide
gccaccacctcacgtagtgcttcccttcgtcaacggaaggtgacatttgaccgcg

SEQ ID NO: 409003 - DNA, 55 bp, Artificial
  Synthetic oligonucleotide
gccaccacttagtgtaaccaaaacaaaggcatgtcaggccattgcagtgcaccta

SEQ ID NO: 409004 - DNA, 58 bp, Artificial
  Synthetic oligonucleotide
gccaccagaccggactccactgagcccaccacctcccatccagagccagtctaccccg

SEQ ID NO: 409005 - DNA, 55 bp, Artificial
  Synthetic oligonucleotide
gccaccagcaaccgttcagaagccgtggctaagccgacagttgaaatctctgaca

SEQ ID NO: 409006 - DNA, 55 bp, Artificial
  Synthetic oligonucleotide
gccaccagcggtatctccgcacccaggctatatccaaggggatccgtcgtcttga

SEQ ID NO: 409007 - DNA, 56 bp, Artificial
  Synthetic oligonucleotide
gccaccaggagcaacggagcctacagatcaaggcggataccagtggcagaccgcag

SEQ ID NO: 409008 - DNA, 55 bp, Artificial
  Synthetic oligonucleotide
gccaccaggtggcccggtaccagataaggttgactcatatgtgtggcagacgtcc

SEQ ID NO: 409009 - DNA, 60 bp, Artificial
  Synthetic oligonucleotide
gccaccaggtggtgccctgtttacaagtgtgtaaagcaaaggcatgcgttgctatagaac

SEQ ID NO: 409010 - DNA, 55 bp, Artificial
  Synthetic oligonucleotide
gccaccagtacagtcgatgtaactgtactagggagtttgttacaattggacttcc

SEQ ID NO: 409011 - DNA, 55 bp, Artificial
  Synthetic oligonucleotide
gccaccatagaacagagtgcaccgtcacaaagtgatcaagagcagctcttttcca

SEQ ID NO: 409012 - DNA, 55 bp, Artificial
  Synthetic oligonucleotide
gccaccatagcaggataggcattattcgagggagaggagtcaggaatggatccag

SEQ ID NO: 409013 - DNA, 60 bp, Artificial
  Synthetic oligonucleotide
gccaccatcgagctcacacctatatcgctttactggaggcctgtttatgtccccaactac

SEQ ID NO: 409014 - DNA, 55 bp, Artificial
  Synthetic oligonucleotide
gccaccatgaatgtgagacagcaaaagtgttagaatcacataaacaaagctgcat

SEQ ID NO: 409015 - DNA, 60 bp, Artificial
  Synthetic oligonucleotide
gccaccattcgtcctgctcagcctttctcttgcgtcccgtaagcctcttgtcgcacggta

SEQ ID NO: 409016 - DNA, 59 bp, Artificial
  Synthetic oligonucleotide
gccacccactcggacgacatagactgcagcgtagcctacgggggaggtatgacggccac

SEQ ID NO: 409017 - DNA, 55 bp, Artificial
  Synthetic oligonucleotide
gccacccagaagagggtgcaggaagtgaaaggctacacgaaaggagggcccggtc

SEQ ID NO: 409018 - DNA, 58 bp, Artificial
  Synthetic oligonucleotide
gccaccccagggatgcaaatacggggattcgtatattttgttgagacactagcgagaa

SEQ ID NO: 409019 - DNA, 59 bp, Artificial
  Synthetic oligonucleotide
gccacccccccgggatcggtggaggcctttccacagagcaatgcagttatccaagatga

SEQ ID NO: 409020 - DNA, 53 bp, Artificial
  Synthetic oligonucleotide
gccacccccgggcgctcccctcggagaggccccaggtgggttcacatccccaa

SEQ ID NO: 409021 - DNA, 51 bp, Artificial
  Synthetic oligonucleotide
gccaccccctcagatttaaactccatgttaaatacagtagggggacatcaa

SEQ ID NO: 409022 - DNA, 55 bp, Artificial
  Synthetic oligonucleotide
gccacccctcctagtaaatccagaatggcagctgctaaggttgttttcccactgt

SEQ ID NO: 409023 - DNA, 55 bp, Artificial
  Synthetic oligonucleotide
gccacccctgctatattagatgtaacctccactaccacacctattagagtgtctg

SEQ ID NO: 409024 - DNA, 55 bp, Artificial
  Synthetic oligonucleotide
gccacccctgtgtccaaggtcctcagcacggatgattatgtctcccgaaccacca

SEQ ID NO: 409025 - DNA, 60 bp, Artificial
  Synthetic oligonucleotide
gccaccccttcatccgctcgcattactatgggcggtctcgcccttatgcatcaagctacc

SEQ ID NO: 409026 - DNA, 60 bp, Artificial
  Synthetic oligonucleotide
gccaccccttctgagctatgcttaataacataggcagggatcggggaatcatagatcgta

SEQ ID NO: 409027 - DNA, 54 bp, Artificial
  Synthetic oligonucleotide
gccacccctttgattatatagtagtcgtaagggtagtggtactgtggcttaccc

SEQ ID NO: 409028 - DNA, 55 bp, Artificial
  Synthetic oligonucleotide
gccaccctagttattccttggattagtaacactcacttcaggggcactagcacca

SEQ ID NO: 409029 - DNA, 51 bp, Artificial
  Synthetic oligonucleotide
gccaccctccgctacgagagtttaccaggcaaagagcatcaactctgctac

SEQ ID NO: 409030 - DNA, 57 bp, Artificial
  Synthetic oligonucleotide
gccacccttgcgtttaccaggcgttagcggccgtgctgagaaggccaccgcaaagcc

SEQ ID NO: 409031 - DNA, 51 bp, Artificial
  Synthetic oligonucleotide
gccaccctttgactatcaactggacgcctcatgaggtcttgtctaggcctg

SEQ ID NO: 409032 - DNA, 58 bp, Artificial
  Synthetic oligonucleotide
gccaccgctgggcaattggttcggctgtacctggatgaactcaactggatttaccaaa

SEQ ID NO: 409033 - DNA, 51 bp, Artificial
  Synthetic oligonucleotide
gccaccggcagtccctgcgtcgcactccacactcacgttgtgagcacgcgg

SEQ ID NO: 409034 - DNA, 54 bp, Artificial
  Synthetic oligonucleotide
gccaccggcgagggacgcgatggtaagagtggaggaaagttcggaagggaatcc

SEQ ID NO: 409035 - DNA, 56 bp, Artificial
  Synthetic oligonucleotide
gccaccgggagtcgccagagcaatctcggaagcggagctagacgagtacatccacc

SEQ ID NO: 409036 - DNA, 60 bp, Artificial
  Synthetic oligonucleotide
gccaccgggctacccccgctatgcgagctgcaagagctctgctgcggagagccaaacgcg

SEQ ID NO: 409037 - DNA, 60 bp, Artificial
  Synthetic oligonucleotide
gccaccggggagtcaatactgattgagaattgtgggccaagcgaggccctagctgctaca

SEQ ID NO: 409038 - DNA, 59 bp, Artificial
  Synthetic oligonucleotide
gccaccggggtgtggcaagagtagatgggccaatgagcagccggggactaaatattata

SEQ ID NO: 409039 - DNA, 55 bp, Artificial
  Synthetic oligonucleotide
gccaccgttttcaataacacgcacacgagtaaatggattgtacggattaccagcc

SEQ ID NO: 409040 - DNA, 60 bp, Artificial
  Synthetic oligonucleotide
gccacctacaatgttagctgcatcaaaggcgctcccatggttgagaggatcagggagccc

SEQ ID NO: 409041 - DNA, 55 bp, Artificial
  Synthetic oligonucleotide
gccacctacccaaaaggtggaagtaagggtgccagtttgctgtgcacccaagtgg

SEQ ID NO: 409042 - DNA, 52 bp, Artificial
  Synthetic oligonucleotide
gccacctagaggaccgtgtagtaaaacaggccttcggtgggggacacgcgac

SEQ ID NO: 409043 - DNA, 56 bp, Artificial
  Synthetic oligonucleotide
gccacctagcacttcggcacctagcccgagagaaacatccggagttttacaaggac

SEQ ID NO: 409044 - DNA, 55 bp, Artificial
  Synthetic oligonucleotide
gccacctagcatacgctatcgcaaaagcagtcaaagctaaagggcatacggttgc

SEQ ID NO: 409045 - DNA, 55 bp, Artificial
  Synthetic oligonucleotide
gccacctatatttcctccaaacgatcgagatagcatattgacccttttgttgctg

SEQ ID NO: 409046 - DNA, 60 bp, Artificial
  Synthetic oligonucleotide
gccacctatcagagaacaagggcacttgttcgcactgggatggatcccaggatgtgctcc

SEQ ID NO: 409047 - DNA, 55 bp, Artificial
  Synthetic oligonucleotide
gccacctcaatttctctaagacaacttggacacaagctactcacccgtgataggc

SEQ ID NO: 409048 - DNA, 55 bp, Artificial
  Synthetic oligonucleotide
gccacctccaaggctacctgcaattgaagggtcagagaacccttaaccaggtaaa

SEQ ID NO: 409049 - DNA, 55 bp, Artificial
  Synthetic oligonucleotide
gccacctccactggtttggaactccctactgctcatctcgcccagatgcccgtcg

SEQ ID NO: 409050 - DNA, 60 bp, Artificial
  Synthetic oligonucleotide
gccacctccttctgccagaaacttgtaacacatgccaattgtacagaaatcttgatccat

SEQ ID NO: 409051 - DNA, 55 bp, Artificial
  Synthetic oligonucleotide
gccacctcgatctacggggctccaggacaggcagagccaccccaagcattcatag

SEQ ID NO: 409052 - DNA, 60 bp, Artificial
  Synthetic oligonucleotide
gccacctctatctcacatccagatcacctcctatttccttccatacttgccaggacgttg

SEQ ID NO: 409053 - DNA, 55 bp, Artificial
  Synthetic oligonucleotide
gccacctgaaattgccagcgcagtctcttatgttgttccggctaatgctgcgccg

SEQ ID NO: 409054 - DNA, 55 bp, Artificial
  Synthetic oligonucleotide
gccacctgggacatgttgcccagaggaatcactcaagtcccaagtgaagaagcca

SEQ ID NO: 409055 - DNA, 56 bp, Artificial
  Synthetic oligonucleotide
gccacctgggtgggaagtaatttggaagacccagcatccagggaattagtagtgtg

SEQ ID NO: 409056 - DNA, 57 bp, Artificial
  Synthetic oligonucleotide
gccacctggttacattgaagcctatttgttccaccatgccaacaccgaacttttcat

SEQ ID NO: 409057 - DNA, 56 bp, Artificial
  Synthetic oligonucleotide
gccacctgttccaatacaacaagtggagtctctaaaattagaaagctcctgtaatt

SEQ ID NO: 409058 - DNA, 55 bp, Artificial
  Synthetic oligonucleotide
gccaccttggacgaagatttgactatgagactgaaagtgaggaatacttctctga

SEQ ID NO: 409059 - DNA, 55 bp, Artificial
  Synthetic oligonucleotide
gccacctttattatgcaaggtagtaaactgtcaggctcggaatgctacataccct

SEQ ID NO: 409060 - DNA, 55 bp, Artificial
  Synthetic oligonucleotide
gccacgaagaacagtaccaaggttaacgtagttcggagtaggtgccgacagctgc

SEQ ID NO: 409061 - DNA, 55 bp, Artificial
  Synthetic oligonucleotide
gccacgaaggtacgtgcagtctcagtcaaagcgttcggtaatgagctgtcgttca

SEQ ID NO: 409062 - DNA, 55 bp, Artificial
  Synthetic oligonucleotide
gccacgaagtctctagaggttatttgcgacatatgccaccgatcaaaatgcaacc

SEQ ID NO: 409063 - DNA, 57 bp, Artificial
  Synthetic oligonucleotide
gccacgaatactagacatttcgttgagagcgttcgacgatcggaaaagaataataac

SEQ ID NO: 409064 - DNA, 60 bp, Artificial
  Synthetic oligonucleotide
gccacgacacgtactattgggactcgcagtgggatacgcattggccctgaggtacacgtc

SEQ ID NO: 409065 - DNA, 59 bp, Artificial
  Synthetic oligonucleotide
gccacgagcgaaaatgcgcgtcgcctaatctacgaccaatggtcaaaggacacgacgaa

SEQ ID NO: 409066 - DNA, 55 bp, Artificial
  Synthetic oligonucleotide
gccacgagtactcacaacttcagtggctcaaggtcgggaaattcgagtggtgcga

SEQ ID NO: 409067 - DNA, 55 bp, Artificial
  Synthetic oligonucleotide
gccacgagtcgatcagagaaagatgccgggtggatctcaacttctacgcaggatt

SEQ ID NO: 409068 - DNA, 55 bp, Artificial
  Synthetic oligonucleotide
gccacgagtgaggccaactgtgactttcagcagctcgcaacatggcggctcagat

SEQ ID NO: 409069 - DNA, 55 bp, Artificial
  Synthetic oligonucleotide
gccacgatcagtgtctcactctatagctacaacaatgagtcttcctatacagacc

SEQ ID NO: 409070 - DNA, 55 bp, Artificial
  Synthetic oligonucleotide
gccacgattaacgatgtgttcttctacaggaacaggctagggttcttgtcaggcg

SEQ ID NO: 409071 - DNA, 59 bp, Artificial
  Synthetic oligonucleotide
gccacgcacaacgactggcaaaactgtgtgtgggaagactattacagagatcttttagt

SEQ ID NO: 409072 - DNA, 55 bp, Artificial
  Synthetic oligonucleotide
gccacgcagggaactccacccctatcttatcgctacgagaataaagcatggtgga

SEQ ID NO: 409073 - DNA, 55 bp, Artificial
  Synthetic oligonucleotide
gccacgcagtggggctatacgggtgcgtgaaccacaacaacaaacagtttccttt

SEQ ID NO: 409074 - DNA, 51 bp, Artificial
  Synthetic oligonucleotide
gccacgccactaatgtctttgccccaattgcgggaggttacatacctgacg

SEQ ID NO: 409075 - DNA, 55 bp, Artificial
  Synthetic oligonucleotide
gccacgcgcttgagggagaatgcacgttaatcatccctccgctagtgatggagcg

SEQ ID NO: 409076 - DNA, 53 bp, Artificial
  Synthetic oligonucleotide
gccacggactcttcaagaagatgagggtctcctttcaagaacgagtcaaggaa

SEQ ID NO: 409077 - DNA, 60 bp, Artificial
  Synthetic oligonucleotide
gccacggagtccattagtcaatttcgaggggtgctgatgctgatgagacctttctacact

SEQ ID NO: 409078 - DNA, 55 bp, Artificial
  Synthetic oligonucleotide
gccacggcacacactgatcccttctgtggcgacatcgtatatagcactcgcagcc

SEQ ID NO: 409079 - DNA, 55 bp, Artificial
  Synthetic oligonucleotide
gccacggccctccacttcctcaacgcaatgtcaaaggtcagaaaagacatccagg

SEQ ID NO: 409080 - DNA, 56 bp, Artificial
  Synthetic oligonucleotide
gccacggcgtcagtgtataaaaccgaaagaaggcacagatttaggcggaatttaca

SEQ ID NO: 409081 - DNA, 60 bp, Artificial
  Synthetic oligonucleotide
gccacggggcctcagacgcgcttgggtgtacagctcaagttcactgatgcctagtcattc

SEQ ID NO: 409082 - DNA, 55 bp, Artificial
  Synthetic oligonucleotide
gccacggtatggacttcaaaggaacttgaccgattatggtttggctaggtatgct

SEQ ID NO: 409083 - DNA, 60 bp, Artificial
  Synthetic oligonucleotide
gccacggtctgccaattgtcagcgcaatatgctatccctttgcgctggaaaccggatacc

SEQ ID NO: 409084 - DNA, 57 bp, Artificial
  Synthetic oligonucleotide
gccacggttagatcggattgtcgcgtttgcggcgacgatctaatcggcgtgggtccg

SEQ ID NO: 409085 - DNA, 60 bp, Artificial
  Synthetic oligonucleotide
gccacgtaatggtgttggagattcgaatttgagtgatactcgcggaaactcactctccat

SEQ ID NO: 409086 - DNA, 55 bp, Artificial
  Synthetic oligonucleotide
gccacgtagaggccaacattttccaccacgggttctagctgcaggcggcacgtaa

SEQ ID NO: 409087 - DNA, 55 bp, Artificial
  Synthetic oligonucleotide
gccacgtcgtggattcgtatggatccataacaactgggtatcacatactgaaggc

SEQ ID NO: 409088 - DNA, 55 bp, Artificial
  Synthetic oligonucleotide
gccacgtctagcttgcaatacaaggatgtcgctggtccacaacctgctgatcgag

SEQ ID NO: 409089 - DNA, 59 bp, Artificial
  Synthetic oligonucleotide
gccacgtgaatatttgactaattgtatttctcaatgccatactctctttaaccgttcca

SEQ ID NO: 409090 - DNA, 56 bp, Artificial
  Synthetic oligonucleotide
gccacgtgaatgtggcggaattgtccgagcctgaggccccttgttttacgttacca

SEQ ID NO: 409091 - DNA, 50 bp, Artificial
  Synthetic oligonucleotide
gccacgtgacacccccccccgttttgaggctccacgtcggggagggtacc

SEQ ID NO: 409092 - DNA, 60 bp, Artificial
  Synthetic oligonucleotide
gccacgtgctcatggggaccatacctgccagaagaaccaagacccatccctatgaggcat

SEQ ID NO: 409093 - DNA, 55 bp, Artificial
  Synthetic oligonucleotide
gccacgtgcttgatgcaagcgctatggcattcaggagcttgttggcagagtatga

SEQ ID NO: 409094 - DNA, 53 bp, Artificial
  Synthetic oligonucleotide
gccacgtggtccgggtacagctaatgcgtatttattattggataccggcgtaa

SEQ ID NO: 409095 - DNA, 60 bp, Artificial
  Synthetic oligonucleotide
gccacgtgtagctacggatgctacacccacacatggcgcaatatcccatatcaccggcgg

SEQ ID NO: 409096 - DNA, 55 bp, Artificial
  Synthetic oligonucleotide
gccacgtgttgatcaaatcgcatgtctgtgactactctttggacattgacgggcc

SEQ ID NO: 409097 - DNA, 55 bp, Artificial
  Synthetic oligonucleotide
gccacgttgctaagtaagtttaaggaattgtatgggctggcatttggggagctgg

SEQ ID NO: 409098 - DNA, 52 bp, Artificial
  Synthetic oligonucleotide
gccactaactactctaggcagtaaacaaacccttaacggtgtttcattaaac

SEQ ID NO: 409099 - DNA, 55 bp, Artificial
  Synthetic oligonucleotide
gccactaagaatgagggatcctttagccccgtggcgagtcttctctcccagggag

SEQ ID NO: 409100 - DNA, 60 bp, Artificial
  Synthetic oligonucleotide
gccactaaggcagattacactcttgacgaggagagcagagcaagaatcaagaccagacta

SEQ ID NO: 409101 - DNA, 52 bp, Artificial
  Synthetic oligonucleotide
gccactaaggcaggctactgcgggggagccgttctcgctaaggacggggctg

SEQ ID NO: 409102 - DNA, 50 bp, Artificial
  Synthetic oligonucleotide
gccactacaaatagggtgtcattgttcgtcatatctgtttatgtgagagg

SEQ ID NO: 409103 - DNA, 55 bp, Artificial
  Synthetic oligonucleotide
gccactacagaagagtacaacagtctattacaccccatttgccagcatggaatgg

SEQ ID NO: 409104 - DNA, 55 bp, Artificial
  Synthetic oligonucleotide
gccactaccaacctgttgctggagacaatttgcaccgtttgccttttggtggcca

SEQ ID NO: 409105 - DNA, 55 bp, Artificial
  Synthetic oligonucleotide
gccactaccctcataggtgaacttgcaagttattatacacactggactggtagtt

SEQ ID NO: 409106 - DNA, 60 bp, Artificial
  Synthetic oligonucleotide
gccactagatacactgttaggtgggaaagtctgtgtggacgacttcaacaatcagttcta

SEQ ID NO: 409107 - DNA, 60 bp, Artificial
  Synthetic oligonucleotide
gccactagttcagctacaagctgcagcctgcgatgtacaatttgttagacttggatgctg

SEQ ID NO: 409108 - DNA, 55 bp, Artificial
  Synthetic oligonucleotide
gccactatcaacgtagacacgtcactagtggagctaggcgctgacattcgtgcgg

SEQ ID NO: 409109 - DNA, 55 bp, Artificial
  Synthetic oligonucleotide
gccactattgttgatgtaaatcactttaccgcaatcgtccctgtagtagggttcg

SEQ ID NO: 409110 - DNA, 60 bp, Artificial
  Synthetic oligonucleotide
gccactatttacacactctatgggaggcgggcattctatataaacgagagacaacacgta

SEQ ID NO: 409111 - DNA, 60 bp, Artificial
  Synthetic oligonucleotide
gccactcaagaagtgctgaaacgcagatggactgggaagttgaccctgacctcactagcg

SEQ ID NO: 409112 - DNA, 60 bp, Artificial
  Synthetic oligonucleotide
gccactcaatgaaggagcttcctcaatgactggcttcttcggagttcttggcttactgac

SEQ ID NO: 409113 - DNA, 60 bp, Artificial
  Synthetic oligonucleotide
gccactcagcgacttcaacaaggcctctcgacggcctgacggagttcagacttactgtcg

SEQ ID NO: 409114 - DNA, 55 bp, Artificial
  Synthetic oligonucleotide
gccactcccctgaagcatgtccacttgatccctacctgatctctcacacaaactt

SEQ ID NO: 409115 - DNA, 55 bp, Artificial
  Synthetic oligonucleotide
gccactcgcgaaatcgttaccgtagtattggcctcacttggcttcgtacacaatc

SEQ ID NO: 409116 - DNA, 55 bp, Artificial
  Synthetic oligonucleotide
gccactctaacccacagactcatgtcacctctaagagctccaaactacaacctct

SEQ ID NO: 409117 - DNA, 55 bp, Artificial
  Synthetic oligonucleotide
gccactctagcaatgaggagttgcaagatcaccaatgatctagaggactcctttg

SEQ ID NO: 409118 - DNA, 60 bp, Artificial
  Synthetic oligonucleotide
gccactctcgtggccaaccactcccgttctgaccccgactggcgccacacagcagtcaaa

SEQ ID NO: 409119 - DNA, 60 bp, Artificial
  Synthetic oligonucleotide
gccactctctgctcgatccgcagtgatggactcccctgtgcgtgaatccgtgatcatggc

SEQ ID NO: 409120 - DNA, 55 bp, Artificial
  Synthetic oligonucleotide
gccactctgacccatcgcatgttagagccaaccagagtcaccaattgggaagtcg

SEQ ID NO: 409121 - DNA, 55 bp, Artificial
  Synthetic oligonucleotide
gccactgaagcggcttttatgtgtttcgcatacggattgaaagttataacacata

SEQ ID NO: 409122 - DNA, 60 bp, Artificial
  Synthetic oligonucleotide
gccactgaatcttccactgagatacccattacactgaccattgctcccatgtgctgcgaa

SEQ ID NO: 409123 - DNA, 60 bp, Artificial
  Synthetic oligonucleotide
gccactgagcatacgcagtctttgcttatcctgggacctaaactttgagagtatccttct

SEQ ID NO: 409124 - DNA, 60 bp, Artificial
  Synthetic oligonucleotide
gccactgcattgtggagcgcacgactatggctgttaagtaaggcggccagacgttacggc

SEQ ID NO: 409125 - DNA, 55 bp, Artificial
  Synthetic oligonucleotide
gccactgctccgatgtaggtagctcccaaaggtcaaccttgattggtaagagccc

SEQ ID NO: 409126 - DNA, 55 bp, Artificial
  Synthetic oligonucleotide
gccactgctgaaggaggagaaatagtattccaaaatgctgcttttactatgtgga

SEQ ID NO: 409127 - DNA, 60 bp, Artificial
  Synthetic oligonucleotide
gccactggatatttcccagagtatctgtaagtatcctgactatgtgaaaatggcttcaga

SEQ ID NO: 409128 - DNA, 55 bp, Artificial
  Synthetic oligonucleotide
gccactgggaatttgatagcaccatggtatgctttcgcactgaataagggatctg

SEQ ID NO: 409129 - DNA, 55 bp, Artificial
  Synthetic oligonucleotide
gccactgtggaaaggctcacccgggaacgggaagagtcaagagctgcggcactct

SEQ ID NO: 409130 - DNA, 60 bp, Artificial
  Synthetic oligonucleotide
gccactgttgagctcactgccggcccagggcggcttgagtgtcgcactattttgggtaac

SEQ ID NO: 409131 - DNA, 55 bp, Artificial
  Synthetic oligonucleotide
gccactgttggtcatactgggattatccccgtcctgtctggcaatgctgaccatg

SEQ ID NO: 409132 - DNA, 54 bp, Artificial
  Synthetic oligonucleotide
gccacttaacacgcaaaacttgccccccatccgccggataatttacgcggacac

SEQ ID NO: 409133 - DNA, 55 bp, Artificial
  Synthetic oligonucleotide
gccacttacgccaaatgtgggtctggcccatggcttaccccgaggtgtctggtgg

SEQ ID NO: 409134 - DNA, 55 bp, Artificial
  Synthetic oligonucleotide
gccacttactctcgatgtggctccggaccctggcttacgcccaggtgtctagtcg

SEQ ID NO: 409135 - DNA, 50 bp, Artificial
  Synthetic oligonucleotide
gccacttcagaagtatcttacggatcggcgcattattgtaaacagccaat

SEQ ID NO: 409136 - DNA, 55 bp, Artificial
  Synthetic oligonucleotide
gccacttccaaccaaggcggcgcaggttctaatccgagcagccagaccttcggtc

SEQ ID NO: 409137 - DNA, 55 bp, Artificial
  Synthetic oligonucleotide
gccacttctgtaaacagctcactcaactgaggagtcgaatacactgtcccacgtg

SEQ ID NO: 409138 - DNA, 57 bp, Artificial
  Synthetic oligonucleotide
gccacttgaaactagcggatgagcccggctaccctggatttggggacctcctcagaa

SEQ ID NO: 409139 - DNA, 54 bp, Artificial
  Synthetic oligonucleotide
gccacttgaaccaggccgataggtagctcgtataggtataagccgtcgagtccg

SEQ ID NO: 409140 - DNA, 57 bp, Artificial
  Synthetic oligonucleotide
gccacttgagaaacttactcttaattgtagcgaggactgtggaacttctggggataa

SEQ ID NO: 409141 - DNA, 58 bp, Artificial
  Synthetic oligonucleotide
gccacttgagagacttactcttaattgtagtgaggattctagagaggggactgagggg

SEQ ID NO: 409142 - DNA, 60 bp, Artificial
  Synthetic oligonucleotide
gccacttgagagacttcatattaactgcagcgaggattgtacaccggggactgagaaggg

SEQ ID NO: 409143 - DNA, 59 bp, Artificial
  Synthetic oligonucleotide
gccacttgagagacttcgtcttgattgtgacgaggactgtggaacttctggggagacgg

SEQ ID NO: 409144 - DNA, 55 bp, Artificial
  Synthetic oligonucleotide
gccacttgagtccgttatgcgagctcattgtgatgaattcggtcccgtcttacag

SEQ ID NO: 409145 - DNA, 60 bp, Artificial
  Synthetic oligonucleotide
gccacttgtcacatacatcaaagatgaacttagaggtagggataaggttagattaggcaa

SEQ ID NO: 409146 - DNA, 55 bp, Artificial
  Synthetic oligonucleotide
gccactttagcaaatcgtaatggaggcaaattactcgctgaacaacagatcggag

SEQ ID NO: 409147 - DNA, 55 bp, Artificial
  Synthetic oligonucleotide
gccactttgacgttacgatcttggaaatagcccactagatggtcaatcgtggctc

SEQ ID NO: 409148 - DNA, 60 bp, Artificial
  Synthetic oligonucleotide
gccagaaaacctgtgcctttacgcaattcttacagcataataggcacaggctaccttgcc

SEQ ID NO: 409149 - DNA, 52 bp, Artificial
  Synthetic oligonucleotide
gccagaaaatggatatggtgattaagcaaatgtctgaagaactcggtatacc

SEQ ID NO: 409150 - DNA, 52 bp, Artificial
  Synthetic oligonucleotide
gccagaaagaagggtagtggcacaaggtcctgaggaagaatttggcagatca

SEQ ID NO: 409151 - DNA, 57 bp, Artificial
  Synthetic oligonucleotide
gccagaaagctagactaatggcagaagccttaaaggaggccatgggaccacccccta

SEQ ID NO: 409152 - DNA, 55 bp, Artificial
  Synthetic oligonucleotide
gccagaaagctcagagcgtctcttgaacacggtcacacgactgcggcggttcgcg

SEQ ID NO: 409153 - DNA, 55 bp, Artificial
  Synthetic oligonucleotide
gccagaaaggaccctccaaaaccttgagcgtgagtacacgcgggtcctggcacgt

SEQ ID NO: 409154 - DNA, 55 bp, Artificial
  Synthetic oligonucleotide
gccagaaatgtctcagtctgtggtgattgatatgatgcagggctctgatgacagc

SEQ ID NO: 409155 - DNA, 51 bp, Artificial
  Synthetic oligonucleotide
gccagaacaatcattcaaaaccttgtacaacttggaggaaaaagctgggaa

SEQ ID NO: 409156 - DNA, 57 bp, Artificial
  Synthetic oligonucleotide
gccagaacatacaaaggaaaaccacatccaacacatgtacgggtattcaaaaaggca

SEQ ID NO: 409157 - DNA, 58 bp, Artificial
  Synthetic oligonucleotide
gccagaacattaatgagccctgcccagaaccccatacggtgtttcatttgcagcgcga

SEQ ID NO: 409158 - DNA, 55 bp, Artificial
  Synthetic oligonucleotide
gccagaaccagtcctgatgtcttacagggtatcaggcaggtcatacgcttactca

SEQ ID NO: 409159 - DNA, 55 bp, Artificial
  Synthetic oligonucleotide
gccagaactcccaaagcctcataaaatgttatctaaattaccagctgttctgaga

SEQ ID NO: 409160 - DNA, 55 bp, Artificial
  Synthetic oligonucleotide
gccagaagaagtagagaaagctactgaaggagagaacagctgcctattacatcct

SEQ ID NO: 409161 - DNA, 55 bp, Artificial
  Synthetic oligonucleotide
gccagaagacatgtctgtatgggccttgaacaactggaatttcagcagacctagc

SEQ ID NO: 409162 - DNA, 54 bp, Artificial
  Synthetic oligonucleotide
gccagaagggaagaatgacgaggacttttcggacttctgggacccgaactccta

SEQ ID NO: 409163 - DNA, 56 bp, Artificial
  Synthetic oligonucleotide
gccagaagtaccaacaacatgggaagattgggatagctattacaagaaggaatttt

SEQ ID NO: 409164 - DNA, 55 bp, Artificial
  Synthetic oligonucleotide
gccagaagtaggaaataagtacccggagctgatgtttgatttcaataagggtctt

SEQ ID NO: 409165 - DNA, 58 bp, Artificial
  Synthetic oligonucleotide
gccagaagtgtccgtgctaagctactgtcccagggggggagggccgccacttgcggca

SEQ ID NO: 409166 - DNA, 51 bp, Artificial
  Synthetic oligonucleotide
gccagaagttagttgtgacattcttttggttgacgaggttagtatgttgac

SEQ ID NO: 409167 - DNA, 60 bp, Artificial
  Synthetic oligonucleotide
gccagaatagcacctgggtgccaacaactacagttcctgtcgacatctccaataacgccc

SEQ ID NO: 409168 - DNA, 59 bp, Artificial
  Synthetic oligonucleotide
gccagaatgccactgagatcagagcatccgttggaaaaatggttggtggaataggaaga

SEQ ID NO: 409169 - DNA, 60 bp, Artificial
  Synthetic oligonucleotide
gccagaatgctaccgagatcagagcatctgttggaagaatggttagtggcattgggagat

SEQ ID NO: 409170 - DNA, 55 bp, Artificial
  Synthetic oligonucleotide
gccagaattatgcaacgagaggctagagaacgtgaaatagctaggcaacgacgta

SEQ ID NO: 409171 - DNA, 60 bp, Artificial
  Synthetic oligonucleotide
gccagaattgagccatttttgaagacaacaccacgccctctcagattacctgatgggcct

SEQ ID NO: 409172 - DNA, 55 bp, Artificial
  Synthetic oligonucleotide
gccagacaaggggaaaccctttgactcaagatttgttctatgtagcactaaccac

SEQ ID NO: 409173 - DNA, 55 bp, Artificial
  Synthetic oligonucleotide
gccagacaaggtagaagaggccaatgaaggggaaaacaactgcttgttacaccct

SEQ ID NO: 409174 - DNA, 54 bp, Artificial
  Synthetic oligonucleotide
gccagacaccgcccaccccgggcgcctctaccggtgcgggccccgcctgtggac

SEQ ID NO: 409175 - DNA, 55 bp, Artificial
  Synthetic oligonucleotide
gccagacagatggtaagcccagtcatgagtgtaattggattccttgccttggcta

SEQ ID NO: 409176 - DNA, 53 bp, Artificial
  Synthetic oligonucleotide
gccagacataccctggacacaatacgagctactgaaacgcggaaaaagacacg

SEQ ID NO: 409177 - DNA, 55 bp, Artificial
  Synthetic oligonucleotide
gccagacatcgtccatgccatgttcattggatgtcggttctgtaggtgaagaggc

SEQ ID NO: 409178 - DNA, 56 bp, Artificial
  Synthetic oligonucleotide
gccagacccaaaaccgtctccatgttccacttggccggctttgccggctgtggaaa

SEQ ID NO: 409179 - DNA, 55 bp, Artificial
  Synthetic oligonucleotide
gccagacgaagggtggaatggtttgggcgatgtgggagattgtgatctttacttc

SEQ ID NO: 409180 - DNA, 59 bp, Artificial
  Synthetic oligonucleotide
gccagacgatcaaagctttttcagcacggttgttgagtttagctatcaagaaatagcct

SEQ ID NO: 409181 - DNA, 55 bp, Artificial
  Synthetic oligonucleotide
gccagacgatcagtttaatgtgttattagcgaatatggtggcaggcgcgcaagag

SEQ ID NO: 409182 - DNA, 60 bp, Artificial
  Synthetic oligonucleotide
gccagacgccaacaaggtaggggctcagtgcttgccagcaaatccgcctcctgctcgcaa

SEQ ID NO: 409183 - DNA, 60 bp, Artificial
  Synthetic oligonucleotide
gccagacggacagaattatataccagtagagtacagatttaggtggtacccatgcatgtt

SEQ ID NO: 409184 - DNA, 55 bp, Artificial
  Synthetic oligonucleotide
gccagacgtcttgctgagaagaagttatggtgtgagcggggctgggactattcgg

SEQ ID NO: 409185 - DNA, 55 bp, Artificial
  Synthetic oligonucleotide
gccagactacctgacgtctatctacatgaagtgatcggaggaggccaccgcacag

SEQ ID NO: 409186 - DNA, 55 bp, Artificial
  Synthetic oligonucleotide
gccagactcactctcataagcccctatacaaagcctcaactaataggacctacac

SEQ ID NO: 409187 - DNA, 60 bp, Artificial
  Synthetic oligonucleotide
gccagactccaataactataacttcgagatcgaacataggaaaattattctcgcaatgta

SEQ ID NO: 409188 - DNA, 55 bp, Artificial
  Synthetic oligonucleotide
gccagactgatgttagaatggttaaagacagggaatagaccttaccggatgacct

SEQ ID NO: 409189 - DNA, 55 bp, Artificial
  Synthetic oligonucleotide
gccagactggacagcgggtgtattgatgagcaagggccggagcacgctatacaca

SEQ ID NO: 409190 - DNA, 55 bp, Artificial
  Synthetic oligonucleotide
gccagacttgaagaaccagagtgtttcagaatagtcagcgactgtcacaggtgtc

SEQ ID NO: 409191 - DNA, 60 bp, Artificial
  Synthetic oligonucleotide
gccagacttgggcacgaaactgcattcgctaccctggtcgtgaaatggctagcctttgga

SEQ ID NO: 409192 - DNA, 60 bp, Artificial
  Synthetic oligonucleotide
gccagagacaacgaacccgtatgagcatgtgttggttcgacttggcagggcgcatttagg

SEQ ID NO: 409193 - DNA, 55 bp, Artificial
  Synthetic oligonucleotide
gccagagagagatttccggagttctaccaagatgactgaggccgctgacacagag

SEQ ID NO: 409194 - DNA, 55 bp, Artificial
  Synthetic oligonucleotide
gccagagagatgcatccggagtactacaaagattgctgacacagaagctgctgac

SEQ ID NO: 409195 - DNA, 60 bp, Artificial
  Synthetic oligonucleotide
gccagagagcaacacccagaattctaccaagacgactgctgacacagagattgctgacac

SEQ ID NO: 409196 - DNA, 55 bp, Artificial
  Synthetic oligonucleotide
gccagagaggctaaggtgatagagggtcaggacatcattctgctgagagttggcg

SEQ ID NO: 409197 - DNA, 55 bp, Artificial
  Synthetic oligonucleotide
gccagagagggtcatagccacacttgtgtttccaccagagatattggcgggttcc

SEQ ID NO: 409198 - DNA, 58 bp, Artificial
  Synthetic oligonucleotide
gccagagatctgtatagaagtgggtcttggttttatacacgtggcggttctggggata

SEQ ID NO: 409199 - DNA, 55 bp, Artificial
  Synthetic oligonucleotide
gccagagatgttaatagagctctcatccttagtcacaatttgcaagcattcgtgc

SEQ ID NO: 409200 - DNA, 55 bp, Artificial
  Synthetic oligonucleotide
gccagagatgttaatggagctctcgtccttagttacgatctgcaagcattcatgc

SEQ ID NO: 409201 - DNA, 55 bp, Artificial
  Synthetic oligonucleotide
gccagagatgtttatactggattgctgttcggtgatgactcccaaaactgggtgc

SEQ ID NO: 409202 - DNA, 55 bp, Artificial
  Synthetic oligonucleotide
gccagagcaggaaacgacgactttacctttggttggatgataggtccaccccagc

SEQ ID NO: 409203 - DNA, 60 bp, Artificial
  Synthetic oligonucleotide
gccagagcatggctaggtttaagtaatcaagctaagatagttaaagatgtctgcactatg

SEQ ID NO: 409204 - DNA, 55 bp, Artificial
  Synthetic oligonucleotide
gccagagccacggttggatgatattgagaggtttaggcaggaaggcttctactac

SEQ ID NO: 409205 - DNA, 52 bp, Artificial
  Synthetic oligonucleotide
gccagaggaactactaagggaagccacggaactagacatagtggtgaggcgc

SEQ ID NO: 409206 - DNA, 55 bp, Artificial
  Synthetic oligonucleotide
gccagaggagaccggcaacaggattgatcccaatgtcactaatgcagacctagca

SEQ ID NO: 409207 - DNA, 55 bp, Artificial
  Synthetic oligonucleotide
gccagaggatttccaaagaaaatttaggcatggggtgaagtcaatcactgacggt

SEQ ID NO: 409208 - DNA, 55 bp, Artificial
  Synthetic oligonucleotide
gccagaggtggggagcaaataccctgaactcatgtttgacttcaataagggcctt

SEQ ID NO: 409209 - DNA, 55 bp, Artificial
  Synthetic oligonucleotide
gccagagtagttatcagaagcccctacactacacctcaaatgatagacaccaacg

SEQ ID NO: 409210 - DNA, 54 bp, Artificial
  Synthetic oligonucleotide
gccagagtcaacaagcgccgcccataaattaaactagaacgacgtgggcatatg

SEQ ID NO: 409211 - DNA, 55 bp, Artificial
  Synthetic oligonucleotide
gccagagtgattacgattcagaaaaggaccgttccgttctaggtagtgtgcggtc

SEQ ID NO: 409212 - DNA, 60 bp, Artificial
  Synthetic oligonucleotide
gccagatactttgatcacagtaaacccaacatttacgatgacgaagattcatatgcggaa

SEQ ID NO: 409213 - DNA, 55 bp, Artificial
  Synthetic oligonucleotide
gccagatagcacgatccaagtccaaatcgggaatgacgtgtatgattgggcaacc

SEQ ID NO: 409214 - DNA, 55 bp, Artificial
  Synthetic oligonucleotide
gccagatatgcaagtcagaaacacgttccatcaagtaccacaggtgtgatagatc

SEQ ID NO: 409215 - DNA, 55 bp, Artificial
  Synthetic oligonucleotide
gccagatatgttgatactagactgctgctcagtgatgacccctaagactggatgc

SEQ ID NO: 409216 - DNA, 55 bp, Artificial
  Synthetic oligonucleotide
gccagatcaggaagagcttgggttaacaatgagttaactgatgaattcttcacca

SEQ ID NO: 409217 - DNA, 55 bp, Artificial
  Synthetic oligonucleotide
gccagatcaggtagaaaaggccaatgaaggagagaacatcagtttgttacaccct

SEQ ID NO: 409218 - DNA, 55 bp, Artificial
  Synthetic oligonucleotide
gccagatccagtttggggaccgctcaccagttacaatgactcaacacactctccg

SEQ ID NO: 409219 - DNA, 58 bp, Artificial
  Synthetic oligonucleotide
gccagatcgaatttttttatttgccgagtgataggtggtatactagacgtgtctatag

SEQ ID NO: 409220 - DNA, 60 bp, Artificial
  Synthetic oligonucleotide
gccagatcgcgtgaatccttccaagtcggtagaatgagtctcgatgtcgcgagaccgagt

SEQ ID NO: 409221 - DNA, 54 bp, Artificial
  Synthetic oligonucleotide
gccagatcggctagttgccagcctgcgccctattcacaaatatagccgcgcgtg

SEQ ID NO: 409222 - DNA, 60 bp, Artificial
  Synthetic oligonucleotide
gccagatctacggggcctgctactccattgaaccacttgacctacctcagatcattcaac

SEQ ID NO: 409223 - DNA, 55 bp, Artificial
  Synthetic oligonucleotide
gccagatctgatcttcgttgttttaacacgctcggattaggactctcgccaatgg

SEQ ID NO: 409224 - DNA, 55 bp, Artificial
  Synthetic oligonucleotide
gccagatgcccgtatgccagatgcctgtgatcccgatgcctgtgatcccgatgcc

SEQ ID NO: 409225 - DNA, 55 bp, Artificial
  Synthetic oligonucleotide
gccagatggtgggtcggatgatgagatccgattgactaaactggcgcacgcccac

SEQ ID NO: 409226 - DNA, 55 bp, Artificial
  Synthetic oligonucleotide
gccagatggttggatatactgcgacgccgatggatcacagttcgatagctctttg

SEQ ID NO: 409227 - DNA, 55 bp, Artificial
  Synthetic oligonucleotide
gccagattaatggcagaaatgatgagaacagtggtaggacaatcacaaaattttg

SEQ ID NO: 409228 - DNA, 60 bp, Artificial
  Synthetic oligonucleotide
gccagattagtgctttccatcagttggctgaggagctcggccacagacctgcccctgttg

SEQ ID NO: 409229 - DNA, 55 bp, Artificial
  Synthetic oligonucleotide
gccagattcatacgaagtcgattcatatgtcggagttcgaacgcaagttcgcgag

SEQ ID NO: 409230 - DNA, 60 bp, Artificial
  Synthetic oligonucleotide
gccagattgtttaccatgggcatggctgggctgcacattaccactgagccatcttataag

SEQ ID NO: 409231 - DNA, 55 bp, Artificial
  Synthetic oligonucleotide
gccagatttgcagcagaatgtgcattcaactctattggtggaagacactatcaag

SEQ ID NO: 409232 - DNA, 55 bp, Artificial
  Synthetic oligonucleotide
gccagcaaggaagatgatgtttctgggcactttgttctctatcaaagagacacag

SEQ ID NO: 409233 - DNA, 51 bp, Artificial
  Synthetic oligonucleotide
gccagcaagtttgttatcttaaggtccaacaagagttactccagcgcaaaa

SEQ ID NO: 409234 - DNA, 55 bp, Artificial
  Synthetic oligonucleotide
gccagcacaacataagcgtgtttctctccattggagcagggcccgtcattaccgg

SEQ ID NO: 409235 - DNA, 53 bp, Artificial
  Synthetic oligonucleotide
gccagcaccacccacgggacgaagtaccaccacgtaacccagattaaagcggg

SEQ ID NO: 409236 - DNA, 58 bp, Artificial
  Synthetic oligonucleotide
gccagcacgagacttcggtcattttggattatcccactactctagggcgactacccca

SEQ ID NO: 409237 - DNA, 60 bp, Artificial
  Synthetic oligonucleotide
gccagcagctgatttcaattttgtgtacctgaccccccccattgagaggaccatctatcg

SEQ ID NO: 409238 - DNA, 60 bp, Artificial
  Synthetic oligonucleotide
gccagcaggactaaattctgtgtttagtgctgacacgcttttcgacttttacgagctgac

SEQ ID NO: 409239 - DNA, 55 bp, Artificial
  Synthetic oligonucleotide
gccagcaggattcttcagtatcgtctgggaggacctcaggaacctcctcatctgg

SEQ ID NO: 409240 - DNA, 59 bp, Artificial
  Synthetic oligonucleotide
gccagcaggtagagctcaggtacgaccgcgaccgggacaatacctccagacatgtgttg

SEQ ID NO: 409241 - DNA, 55 bp, Artificial
  Synthetic oligonucleotide
gccagcagtttggtataacggccacaagagatttgacaacacaggaagcctgggg

SEQ ID NO: 409242 - DNA, 59 bp, Artificial
  Synthetic oligonucleotide
gccagcatacacaaagttgattcatgaactacgaaccaaaacgcacgctaaagttacga

SEQ ID NO: 409243 - DNA, 55 bp, Artificial
  Synthetic oligonucleotide
gccagcatactcgatctgaccagcaaaagtcacaacatcagctttatgagcagtc

SEQ ID NO: 409244 - DNA, 55 bp, Artificial
  Synthetic oligonucleotide
gccagcatagcagaataggacttttacgacagagaagagcaagaagtggagccag

SEQ ID NO: 409245 - DNA, 55 bp, Artificial
  Synthetic oligonucleotide
gccagcatcgaatgaggtagaggtggaacacgaagcaaagtccatgttgataggc

SEQ ID NO: 409246 - DNA, 55 bp, Artificial
  Synthetic oligonucleotide
gccagcatggaatggaggatgaggacagagaagtattacagtggaagcttgacag

SEQ ID NO: 409247 - DNA, 60 bp, Artificial
  Synthetic oligonucleotide
gccagcatgtagctatattaagctattcagactctacaagtaagattgtgatttcacatt

SEQ ID NO: 409248 - DNA, 55 bp, Artificial
  Synthetic oligonucleotide
gccagccagattttatcctaaggttaccaaatattttcctacggacaaaggcatc

SEQ ID NO: 409249 - DNA, 55 bp, Artificial
  Synthetic oligonucleotide
gccagccaggctaggcaaatggtacaggcaatgagaacaattgggactcacccta

SEQ ID NO: 409250 - DNA, 59 bp, Artificial
  Synthetic oligonucleotide
gccagcccccgaggcgaaagctcattcttcggatgagccgccaaaagagaaggtcgcgc

SEQ ID NO: 409251 - DNA, 55 bp, Artificial
  Synthetic oligonucleotide
gccagccccgtcccgccccttttcggtcctccgtgctaatgatgttttgtggctc

SEQ ID NO: 409252 - DNA, 60 bp, Artificial
  Synthetic oligonucleotide
gccagcccctaatggggcgacactccaccatgatcactcccctgtgaggaactattgtct

SEQ ID NO: 409253 - DNA, 55 bp, Artificial
  Synthetic oligonucleotide
gccagccctacccttgaagagtccatcgttctcgcccaggaaataaccaatgctc

SEQ ID NO: 409254 - DNA, 52 bp, Artificial
  Synthetic oligonucleotide
gccagccgtcgcaggaggggacctagaagttacaacacatagctttaactgt

SEQ ID NO: 409255 - DNA, 55 bp, Artificial
  Synthetic oligonucleotide
gccagcctggggagttgatccttgacaccggaaggaagcttggggcaataccaat

SEQ ID NO: 409256 - DNA, 55 bp, Artificial
  Synthetic oligonucleotide
gccagcctggtaacaggtgccccagtgtgcgtaaccttcttccgtctccagacgg

SEQ ID NO: 409257 - DNA, 60 bp, Artificial
  Synthetic oligonucleotide
gccagcctggtactgataatagggaatgcttgtctatggatgctaagcagacccagctat

SEQ ID NO: 409258 - DNA, 57 bp, Artificial
  Synthetic oligonucleotide
gccagcgcaaaatgctataagtactacattcccttacactggagaccctccatatag

SEQ ID NO: 409259 - DNA, 60 bp, Artificial
  Synthetic oligonucleotide
gccagcgctcctcatcttgccaacgcttttccatagctcgccaaagctcctctatagctc

SEQ ID NO: 409260 - DNA, 60 bp, Artificial
  Synthetic oligonucleotide
gccagcggaagaagaccatgatttcgacgatacagattggttcgctggtaacgaatgggc

SEQ ID NO: 409261 - DNA, 52 bp, Artificial
  Synthetic oligonucleotide
gccagcggagccacgagagttgccatcggagctttcactaagctcagcggtt

SEQ ID NO: 409262 - DNA, 59 bp, Artificial
  Synthetic oligonucleotide
gccagcggtgttgaccttgctcagactgtcatcttggagcttgacaagacctcagaaca

SEQ ID NO: 409263 - DNA, 55 bp, Artificial
  Synthetic oligonucleotide
gccagcgtagaacatgaactaagtccacggctagacgccataaagctggggagac

SEQ ID NO: 409264 - DNA, 55 bp, Artificial
  Synthetic oligonucleotide
gccagctaagaaacaatgccaaggaaattgggaatggctgctttgagttctacca

SEQ ID NO: 409265 - DNA, 59 bp, Artificial
  Synthetic oligonucleotide
gccagctacgtccagcaccctcacaagaccgtccgggtcaagttccatacagagaccag

SEQ ID NO: 409266 - DNA, 60 bp, Artificial
  Synthetic oligonucleotide
gccagctagtggccaaataccgcttcagctttatatggggaggtaacactgtccactctc

SEQ ID NO: 409267 - DNA, 60 bp, Artificial
  Synthetic oligonucleotide
gccagctattggtgagccatcattcgaaataacacggacgcgtgaacgaagactatatgg

SEQ ID NO: 409268 - DNA, 55 bp, Artificial
  Synthetic oligonucleotide
gccagctctttcaaaggagcgtatgcttctagagcaagtggaacacctagtcacg

SEQ ID NO: 409269 - DNA, 60 bp, Artificial
  Synthetic oligonucleotide
gccagctgatatcgaagtagtcgcaccaagagtgttggagccaccaacactatcactcgc

SEQ ID NO: 409270 - DNA, 60 bp, Artificial
  Synthetic oligonucleotide
gccagctgcatgggtctcatctacaataggatgggaacagtgaccacagaagtggctttt

SEQ ID NO: 409271 - DNA, 55 bp, Artificial
  Synthetic oligonucleotide
gccagctggcatgtgaaggtactcccagaattggacaagctgggattcctgagac

SEQ ID NO: 409272 - DNA, 60 bp, Artificial
  Synthetic oligonucleotide
gccagcttcacaggacgtatgtagagcttcgccgggactatgatgatttgcgtgttcagt

SEQ ID NO: 409273 - DNA, 60 bp, Artificial
  Synthetic oligonucleotide
gccagcttccgaacgaggataacgcgagaggaaggatcagaggacgagaagggatgatcg

SEQ ID NO: 409274 - DNA, 53 bp, Artificial
  Synthetic oligonucleotide
gccagctttaccagtagtattcccccgccgaggaaatccttctttgggcttgt

SEQ ID NO: 409275 - DNA, 57 bp, Artificial
  Synthetic oligonucleotide
gccagctttcctggacaaattccttagtgacaacaagattccacagaggttttacaa

SEQ ID NO: 409276 - DNA, 59 bp, Artificial
  Synthetic oligonucleotide
gccagcttttaggaaaggattgttgaagtacaatgagccagttcgagttgggtcagtga

SEQ ID NO: 409277 - DNA, 51 bp, Artificial
  Synthetic oligonucleotide
gccaggaaccctagggttcgaactctgttcggagttaatccgtatcttcag

SEQ ID NO: 409278 - DNA, 55 bp, Artificial
  Synthetic oligonucleotide
gccaggaatttcagaccctagtcagtcaggaggaaaagcaccatgccgcgcagtg

SEQ ID NO: 409279 - DNA, 55 bp, Artificial
  Synthetic oligonucleotide
gccaggacatctggcgaggcaatgtaggcagggaattatatgtcaccactgtgga

SEQ ID NO: 409280 - DNA, 55 bp, Artificial
  Synthetic oligonucleotide
gccaggaccggacagtattacaaagcaagagggagagtattcggtcaagggcata

SEQ ID NO: 409281 - DNA, 57 bp, Artificial
  Synthetic oligonucleotide
gccaggacctaaattcctggatcaaagagttagggcctacacaggaggaacagacaa

SEQ ID NO: 409282 - DNA, 56 bp, Artificial
  Synthetic oligonucleotide
gccaggacggtttaggacaattgcttgtggcctctttccagcacaggtcaaagctc

SEQ ID NO: 409283 - DNA, 60 bp, Artificial
  Synthetic oligonucleotide
gccaggagaaggttcctgccggtggcaggagcaacatcagctgagttcatagaaatgcta

SEQ ID NO: 409284 - DNA, 58 bp, Artificial
  Synthetic oligonucleotide
gccaggagacacgttattcatcgattacgtgttcaaacgaagttccaacatcgcccca

SEQ ID NO: 409285 - DNA, 55 bp, Artificial
  Synthetic oligonucleotide
gccaggagcccagaaattgcggcaaggcctgctgtgaatggtcagagaggcagaa

SEQ ID NO: 409286 - DNA, 53 bp, Artificial
  Synthetic oligonucleotide
gccaggaggcatgcaatcttggaactgcatgcccaaaatgaatggggaataat

SEQ ID NO: 409287 - DNA, 55 bp, Artificial
  Synthetic oligonucleotide
gccaggataaagttgatcccataaataaactcatgcttttgatgaagtggggcgc

SEQ ID NO: 409288 - DNA, 54 bp, Artificial
  Synthetic oligonucleotide
gccaggataatagatctaaacaatgaacatttggtatcgggactgtatttgcta

SEQ ID NO: 409289 - DNA, 56 bp, Artificial
  Synthetic oligonucleotide
gccaggatacgtcccaagacccgaagaaatttactgaccctgtcatggacgttata

SEQ ID NO: 409290 - DNA, 58 bp, Artificial
  Synthetic oligonucleotide
gccaggatccgacaatgaacaaggggttgatcttccacctcctccgttgtacgctcag

SEQ ID NO: 409291 - DNA, 55 bp, Artificial
  Synthetic oligonucleotide
gccaggatcttcggacattctcgttccccttggacacgtcaatagagcacacagt

SEQ ID NO: 409292 - DNA, 55 bp, Artificial
  Synthetic oligonucleotide
gccaggatgataaccaatgagagtgatgtgtattctttgccacctgaccctaagt

SEQ ID NO: 409293 - DNA, 55 bp, Artificial
  Synthetic oligonucleotide
gccaggatgattgaactggcaatgggcgataccagcaatttcatgctggacagcg

SEQ ID NO: 409294 - DNA, 60 bp, Artificial
  Synthetic oligonucleotide
gccaggatgctacagaaatcagagcatctgtcggaagaatgattggtggaatcgggagat

SEQ ID NO: 409295 - DNA, 55 bp, Artificial
  Synthetic oligonucleotide
gccaggatggctctgcagtcctggagctcgacctatgtaaccgtgatgtgtcccg

SEQ ID NO: 409296 - DNA, 59 bp, Artificial
  Synthetic oligonucleotide
gccaggattgacccattcttgagaaacacaccacgccctctaagattacctgatggacc

SEQ ID NO: 409297 - DNA, 60 bp, Artificial
  Synthetic oligonucleotide
gccaggcaatccgactgatcttactgtcgtcgcaacatatgggcacgaacgtaatatgga

SEQ ID NO: 409298 - DNA, 55 bp, Artificial
  Synthetic oligonucleotide
gccaggcacctacagatatgtaacaccgggagaacgtccctctggcatgttcgac

SEQ ID NO: 409299 - DNA, 57 bp, Artificial
  Synthetic oligonucleotide
gccaggcaccttcaagacccctgaaggtgaagttggagctatagctctagacttcaa

SEQ ID NO: 409300 - DNA, 55 bp, Artificial
  Synthetic oligonucleotide
gccaggcagttgacccaaactgttctattattcgttccatcaaagctcgtaagag

SEQ ID NO: 409301 - DNA, 50 bp, Artificial
  Synthetic oligonucleotide
gccaggcataccgcgccttcctacgaattgtgacgctggagatgttgcga

SEQ ID NO: 409302 - DNA, 56 bp, Artificial
  Synthetic oligonucleotide
gccaggccacgctctgagaattggccacacggagaaagggttgagtgaagttccaa

SEQ ID NO: 409303 - DNA, 55 bp, Artificial
  Synthetic oligonucleotide
gccaggccataatcagcttctatgataagacggctatcaagaaacccagcagagt

SEQ ID NO: 409304 - DNA, 55 bp, Artificial
  Synthetic oligonucleotide
gccaggcctctgtctttggcaatggcacagtccagtcaagtgctggacaaagttg

SEQ ID NO: 409305 - DNA, 55 bp, Artificial
  Synthetic oligonucleotide
gccaggcgaagacttctgttcagtgcaattttgagaagattgtagcatttatggc

SEQ ID NO: 409306 - DNA, 59 bp, Artificial
  Synthetic oligonucleotide
gccaggctggtaatggattgttgccagcctcgcgcctttgcgttgctatttacggtccc

SEQ ID NO: 409307 - DNA, 55 bp, Artificial
  Synthetic oligonucleotide
gccaggctttgaaaggatcaagtcaagagaggaagtattataacgtatctcaact

SEQ ID NO: 409308 - DNA, 55 bp, Artificial
  Synthetic oligonucleotide
gccagggaatttccttcagagcagaccagagccaactgccccgccagcagagagc

SEQ ID NO: 409309 - DNA, 54 bp, Artificial
  Synthetic oligonucleotide
gccagggattcttaccttcttatcggaacaatacgtgggggacgatacactgtt

SEQ ID NO: 409310 - DNA, 55 bp, Artificial
  Synthetic oligonucleotide
gccagggatttccttaagcagtcggtaggtaactataccaccagtcagcggccta

SEQ ID NO: 409311 - DNA, 55 bp, Artificial
  Synthetic oligonucleotide
gccagggcctaccaagacgtcacatacaaccccaactgtgacaggggagttaaca

SEQ ID NO: 409312 - DNA, 55 bp, Artificial
  Synthetic oligonucleotide
gccagggctacgagcatcgaggcaggaatcatgatgcccatgagagaactggccc

SEQ ID NO: 409313 - DNA, 55 bp, Artificial
  Synthetic oligonucleotide
gccaggggaaagagaggatcagttaggacatggagttagtatagaatggcagtac

SEQ ID NO: 409314 - DNA, 59 bp, Artificial
  Synthetic oligonucleotide
gccaggggacaggaataatccctaggagtgagcctatggcttatatccgttctgaatac

SEQ ID NO: 409315 - DNA, 55 bp, Artificial
  Synthetic oligonucleotide
gccaggggacgtagcacagtgctcgagatagggccgtctctgcacagcgcactta

SEQ ID NO: 409316 - DNA, 55 bp, Artificial
  Synthetic oligonucleotide
gccaggggtttaattcagtcatcccgggcacatgctatagttgcactcacccgcc

SEQ ID NO: 409317 - DNA, 55 bp, Artificial
  Synthetic oligonucleotide
gccagggtctatgaaacaaaccacgggcgtgtcccaaaccaagagcagatgaagg

SEQ ID NO: 409318 - DNA, 55 bp, Artificial
  Synthetic oligonucleotide
gccagggttcaccccaccacacggcggtcttttgggttggagccctcaagctcag

SEQ ID NO: 409319 - DNA, 53 bp, Artificial
  Synthetic oligonucleotide
gccaggtaagcccttggttaaacaagcggttatgttcttgagggactcggtcc

SEQ ID NO: 409320 - DNA, 59 bp, Artificial
  Synthetic oligonucleotide
gccaggtatacctctttcggtgcagttcttatgccaagtctattgttgctttttgccaa

SEQ ID NO: 409321 - DNA, 55 bp, Artificial
  Synthetic oligonucleotide
gccaggtcaacggcgcgtcaggttaagagggaggcgtatggtatggctaaagacc

SEQ ID NO: 409322 - DNA, 56 bp, Artificial
  Synthetic oligonucleotide
gccaggtgcccaaggggctatttgaggtcttgacgggcgggagagagttcgggcat

SEQ ID NO: 409323 - DNA, 59 bp, Artificial
  Synthetic oligonucleotide
gccaggtggtttgggtagggcagtatctagaagcattctatgcccgtaaggatccatgg

SEQ ID NO: 409324 - DNA, 60 bp, Artificial
  Synthetic oligonucleotide
gccaggtgtaggtgctcacgtctatattcggagtaatcgtggtgggatgagaaatatgag

SEQ ID NO: 409325 - DNA, 55 bp, Artificial
  Synthetic oligonucleotide
gccaggttccagcccgtgtgtgtggatgtgacggaggacctgcgacccgatcatt

SEQ ID NO: 409326 - DNA, 55 bp, Artificial
  Synthetic oligonucleotide
gccagtaagcacacattggtttcagcttcacaacagaacagtgaggagttttgct

SEQ ID NO: 409327 - DNA, 55 bp, Artificial
  Synthetic oligonucleotide
gccagtagatgtcaataagacagtatctgatatgtcgttgacgcaaagagaccgc

SEQ ID NO: 409328 - DNA, 60 bp, Artificial
  Synthetic oligonucleotide
gccagtaggatattaggcaagggtgacacagtgcccatgcattataatttaaccaaacag

SEQ ID NO: 409329 - DNA, 55 bp, Artificial
  Synthetic oligonucleotide
gccagtagtatcaactcaattgctgttaaatggcagtctagcaataggaaaggta

SEQ ID NO: 409330 - DNA, 60 bp, Artificial
  Synthetic oligonucleotide
gccagtataaggaacaacacttatgatcacaacaaatacagagaagaagcaatgcaaaat

SEQ ID NO: 409331 - DNA, 53 bp, Artificial
  Synthetic oligonucleotide
gccagtcaaggagtcactcaccacaaccgagtgaccattttgctagacaagca

SEQ ID NO: 409332 - DNA, 55 bp, Artificial
  Synthetic oligonucleotide
gccagtcagttgctacaccttctgcacacttacctataaagccttccacattgtc

SEQ ID NO: 409333 - DNA, 60 bp, Artificial
  Synthetic oligonucleotide
gccagtcatctctcaggtccaatcattagctcctatagttagtggctttgacccaaatct

SEQ ID NO: 409334 - DNA, 55 bp, Artificial
  Synthetic oligonucleotide
gccagtcccactgtggtactaaaatcgagtagaagctactcagaggcagcaggat

SEQ ID NO: 409335 - DNA, 53 bp, Artificial
  Synthetic oligonucleotide
gccagtccctctgggcccccatgaactctttaaagtgctttaggtagtggggg

SEQ ID NO: 409336 - DNA, 57 bp, Artificial
  Synthetic oligonucleotide
gccagtccctctgggcccccatgaattccttgaagtgctttaaataatgcgggtcta

SEQ ID NO: 409337 - DNA, 60 bp, Artificial
  Synthetic oligonucleotide
gccagtcgtacgctatggaatgcttgcagatccgcttatcgggcaatcctcgaacatcca

SEQ ID NO: 409338 - DNA, 57 bp, Artificial
  Synthetic oligonucleotide
gccagtcgtggacgtgtccctacacgggcccagtgtccagcccgcattggagataca

SEQ ID NO: 409339 - DNA, 55 bp, Artificial
  Synthetic oligonucleotide
gccagtctatgccgcagctaatagaggttgtatcactcttaaccctaagctcgtc

SEQ ID NO: 409340 - DNA, 55 bp, Artificial
  Synthetic oligonucleotide
gccagtctgaaattggagggatcaacactaatagaagcttccacagtgtccatag

SEQ ID NO: 409341 - DNA, 60 bp, Artificial
  Synthetic oligonucleotide
gccagtctttgtcatcagcccaagtgtaagcattaggataagtttcataagcccatcttg

SEQ ID NO: 409342 - DNA, 55 bp, Artificial
  Synthetic oligonucleotide
gccagtgaagatggatagaaatacaggacaggttcgaatgacacagtaccacacc

SEQ ID NO: 409343 - DNA, 60 bp, Artificial
  Synthetic oligonucleotide
gccagtgaattccaggatgacaacagtagtcacacttggtcagataacaggcaataaaga

SEQ ID NO: 409344 - DNA, 55 bp, Artificial
  Synthetic oligonucleotide
gccagtgagtactaccctgccaggtatcaatcacacctgatgcttgcggaaggcc

SEQ ID NO: 409345 - DNA, 55 bp, Artificial
  Synthetic oligonucleotide
gccagtgatcgtcaaatctatccagcacttgtgaagattcaagaatcgccggagg

SEQ ID NO: 409346 - DNA, 54 bp, Artificial
  Synthetic oligonucleotide
gccagtgcaaaagcaggtactgattcgaaatggaagattttgtgcgacaatgct

SEQ ID NO: 409347 - DNA, 55 bp, Artificial
  Synthetic oligonucleotide
gccagtgcagaagactacataaccttaatatcagatccctatgggttctcacccg

SEQ ID NO: 409348 - DNA, 53 bp, Artificial
  Synthetic oligonucleotide
gccagtgccctgcatcggtttaaagacgtgtatggagctttagggttgcagcc

SEQ ID NO: 409349 - DNA, 55 bp, Artificial
  Synthetic oligonucleotide
gccagtgcttacacggaacttgtgttgtagcagtgacagatggaccagcagacaa

SEQ ID NO: 409350 - DNA, 60 bp, Artificial
  Synthetic oligonucleotide
gccagtgcttcagaagtgcccttaaatcctgtatggaatgataatgcccatggggtaggg

SEQ ID NO: 409351 - DNA, 55 bp, Artificial
  Synthetic oligonucleotide
gccagtggaaaacagccagttttggaagcactggattagcaccaaagacggtcaa

SEQ ID NO: 409352 - DNA, 60 bp, Artificial
  Synthetic oligonucleotide
gccagtggattggggaccaggtgaaacgcctgattctacgttagtgcagccagtacttga

SEQ ID NO: 409353 - DNA, 55 bp, Artificial
  Synthetic oligonucleotide
gccagtggctacatggaggcagaggttattccagcagaaacgggacaagaaacag

SEQ ID NO: 409354 - DNA, 60 bp, Artificial
  Synthetic oligonucleotide
gccagtgggtactgcaaagacaatcatgtgcggtcaataccccgtcatccacgcggtagg

SEQ ID NO: 409355 - DNA, 59 bp, Artificial
  Synthetic oligonucleotide
gccagtgggtatgactttgagagagagggatactctctggtcggaatagatcctttccg

SEQ ID NO: 409356 - DNA, 56 bp, Artificial
  Synthetic oligonucleotide
gccagtggtaaagtatatctaccaccttcaacacctgtggcgagggtacaaagtac

SEQ ID NO: 409357 - DNA, 55 bp, Artificial
  Synthetic oligonucleotide
gccagtggtatcaactcgattactgctaaatggtagtttagcagaagaaagtata

SEQ ID NO: 409358 - DNA, 57 bp, Artificial
  Synthetic oligonucleotide
gccagtggtgtccttactaccagtctggggaacaccctgacatgctacctgaaggca

SEQ ID NO: 409359 - DNA, 54 bp, Artificial
  Synthetic oligonucleotide
gccagtgtagctttaaagcttatgctaactggcgctgtttaaagtgtgacatgg

SEQ ID NO: 409360 - DNA, 60 bp, Artificial
  Synthetic oligonucleotide
gccagtgtctgttcctggtgcgtccgctgtcactgctagctgtccaccggagcctagacc

SEQ ID NO: 409361 - DNA, 55 bp, Artificial
  Synthetic oligonucleotide
gccagtgtgtgggctggtgaagagtccagaatggtgctagaaccaatggccagaa

SEQ ID NO: 409362 - DNA, 57 bp, Artificial
  Synthetic oligonucleotide
gccagttaaagccgcgcgtttaacgcatggctcaagcggtctaatcttcaaaccgaa

SEQ ID NO: 409363 - DNA, 54 bp, Artificial
  Synthetic oligonucleotide
gccagttaccagtgaatgacatcatagaggattatggttccctacagagcgaat

SEQ ID NO: 409364 - DNA, 55 bp, Artificial
  Synthetic oligonucleotide
gccagttactactaagcctcagggatcaacacaacaagtagacgctgctgtgaat

SEQ ID NO: 409365 - DNA, 56 bp, Artificial
  Synthetic oligonucleotide
gccagttagcgaggtctgtccccacacgacagataatcgggtgcaactcccgcccc

SEQ ID NO: 409366 - DNA, 57 bp, Artificial
  Synthetic oligonucleotide
gccagttagttgccacgtgttcatggggaccatacccgccagaagaaccaagaccca

SEQ ID NO: 409367 - DNA, 55 bp, Artificial
  Synthetic oligonucleotide
gccagttcaaaaggctgtttctggatgaaggtctgatgttacaccctggttgcgt

SEQ ID NO: 409368 - DNA, 55 bp, Artificial
  Synthetic oligonucleotide
gccagttcaccgtagcacttgaagcgcaaagctgtctcaagttcatagaaccagc

SEQ ID NO: 409369 - DNA, 59 bp, Artificial
  Synthetic oligonucleotide
gccagttcctgatgcgaagattaaggggtggtgtttagaatgttgtcaaatagctgatt

SEQ ID NO: 409370 - DNA, 55 bp, Artificial
  Synthetic oligonucleotide
gccagttcgctactttgtctcagaatattggtatggcccttcgaggtaattgccg

SEQ ID NO: 409371 - DNA, 55 bp, Artificial
  Synthetic oligonucleotide
gccagttcggaaggtaattaaggagccaaagagtcgcttgttcactgtcttgcct

SEQ ID NO: 409372 - DNA, 50 bp, Artificial
  Synthetic oligonucleotide
gccagttcgtcaccctttcccccccatgccctgaatttccttatgaaata

SEQ ID NO: 409373 - DNA, 55 bp, Artificial
  Synthetic oligonucleotide
gccagttgagaattcatttgaaatatctaggccgcgcagcggcactcttctgcaa

SEQ ID NO: 409374 - DNA, 59 bp, Artificial
  Synthetic oligonucleotide
gccagttgggatttccagtatggtggaggccatggtttctagggcccgtattgatgcac

SEQ ID NO: 409375 - DNA, 55 bp, Artificial
  Synthetic oligonucleotide
gccagtttcgtgtgtggcacataccaccttctctgggtctaaatccgagtgggtg

SEQ ID NO: 409376 - DNA, 57 bp, Artificial
  Synthetic oligonucleotide
gccagtttgctagtgaagcacaggtcgttttcgctacgccccgattattccctgaag

SEQ ID NO: 409377 - DNA, 60 bp, Artificial
  Synthetic oligonucleotide
gccagttttgcgcttactacgcaaaagtggtgtggaacctgatgctggctactaacgatc

SEQ ID NO: 409378 - DNA, 60 bp, Artificial
  Synthetic oligonucleotide
gccagtttttgagttgatgaagagccttttgttgcatactgatgcggttgggattagtag

SEQ ID NO: 409379 - DNA, 60 bp, Artificial
  Synthetic oligonucleotide
gccataaaaaaagttgtgctgatgggcagtgcccatactgtatgactattaccgaggcaa

SEQ ID NO: 409380 - DNA, 59 bp, Artificial
  Synthetic oligonucleotide
gccataaacgtggacatagcctctcatcctttagcaactacattattaggggaaattgc

SEQ ID NO: 409381 - DNA, 56 bp, Artificial
  Synthetic oligonucleotide
gccataaagacgatgacctggtttcttgaaggagctagggaacttttctattatgg

SEQ ID NO: 409382 - DNA, 55 bp, Artificial
  Synthetic oligonucleotide
gccataaccagcatatcagggctgagaaaggggttctttacccggttagaagcat

SEQ ID NO: 409383 - DNA, 55 bp, Artificial
  Synthetic oligonucleotide
gccataagctgtcttcaccgcttcaactgatagttcagagaagtcagcatcggaa

SEQ ID NO: 409384 - DNA, 60 bp, Artificial
  Synthetic oligonucleotide
gccataaggaccagaagtggaggaaacactaatcaacagagagcatccgcgggccagatc

SEQ ID NO: 409385 - DNA, 60 bp, Artificial
  Synthetic oligonucleotide
gccataatagcatttaattgctctgtatgacttttggtataaaagtgttctccagtatgt

SEQ ID NO: 409386 - DNA, 60 bp, Artificial
  Synthetic oligonucleotide
gccataataggagatataagacaagcatattgtaacattagtgaacatagatggaataaa

SEQ ID NO: 409387 - DNA, 55 bp, Artificial
  Synthetic oligonucleotide
gccataatgagattctcaggcgaggctagtacattcttgttcaacacaatggcga

SEQ ID NO: 409388 - DNA, 55 bp, Artificial
  Synthetic oligonucleotide
gccataattatatgggggaaattacctaaatttaagctgccagttactagagaaa

SEQ ID NO: 409389 - DNA, 60 bp, Artificial
  Synthetic oligonucleotide
gccataattgaggtggaccgcactgaagcacgcagggctaggcgcgagaacaacatagtg

SEQ ID NO: 409390 - DNA, 51 bp, Artificial
  Synthetic oligonucleotide
gccataattttcagtacctgctatatatcttcctccgctaattaattgtcg

SEQ ID NO: 409391 - DNA, 60 bp, Artificial
  Synthetic oligonucleotide
gccatacaaggaggatacgtagcatatgcaggcgctaaaataccaggagcgggagcaata

SEQ ID NO: 409392 - DNA, 52 bp, Artificial
  Synthetic oligonucleotide
gccatacaatgaatggctgttagaactggtagaagatcttaaacaagaggct

SEQ ID NO: 409393 - DNA, 52 bp, Artificial
  Synthetic oligonucleotide
gccatacaatgaatggctgttagaagtgttagaggatctgaaacatgaagct

SEQ ID NO: 409394 - DNA, 50 bp, Artificial
  Synthetic oligonucleotide
gccatacagaggacaccactacatgcctttagcgttaaagaaatatcgcc

SEQ ID NO: 409395 - DNA, 58 bp, Artificial
  Synthetic oligonucleotide
gccatacagatacacccacttatccatggatgctaaaaaacccagaattcaaagtaac

SEQ ID NO: 409396 - DNA, 60 bp, Artificial
  Synthetic oligonucleotide
gccatacatgcctcgttatggcgctcagagaaatctgagagacaggacgctagctcgcta

SEQ ID NO: 409397 - DNA, 57 bp, Artificial
  Synthetic oligonucleotide
gccataccaaaagtcaacagggttatcatgggtaaccctaataatagcagacggcga

SEQ ID NO: 409398 - DNA, 55 bp, Artificial
  Synthetic oligonucleotide
gccataccgtttgacttcactaagtttgataagactaaatgtcctattcaagccg

SEQ ID NO: 409399 - DNA, 50 bp, Artificial
  Synthetic oligonucleotide
gccatacctaaaactcactacaggagatttaagacccttatttgacatcc

SEQ ID NO: 409400 - DNA, 52 bp, Artificial
  Synthetic oligonucleotide
gccatacgtcgaaattatgcgaaaacgccgtataaaccggtaacgaaaccgc

SEQ ID NO: 409401 - DNA, 55 bp, Artificial
  Synthetic oligonucleotide
gccatactcacagaagtaaatgaactacttgacactacacagttgcaagtagcta

SEQ ID NO: 409402 - DNA, 55 bp, Artificial
  Synthetic oligonucleotide
gccatactctagtggatctcaacgtccacgtggtgtgcctaatgcacgtcgcaac

SEQ ID NO: 409403 - DNA, 55 bp, Artificial
  Synthetic oligonucleotide
gccatactgcaattactcgaaattctggtatctagagcatgcaaggactggtgag

SEQ ID NO: 409404 - DNA, 57 bp, Artificial
  Synthetic oligonucleotide
gccatagaaaaacacgtaaccgcctgcgttataatacaaacagctagtatataaata

SEQ ID NO: 409405 - DNA, 55 bp, Artificial
  Synthetic oligonucleotide
gccatagaaatcagatgcgttatgcaagattccctgacccatgtcaataaggctg

SEQ ID NO: 409406 - DNA, 53 bp, Artificial
  Synthetic oligonucleotide
gccatagactacctgttcgcgtatcgacttggagaccagctttacgatatatt

SEQ ID NO: 409407 - DNA, 57 bp, Artificial
  Synthetic oligonucleotide
gccatagagaaaagatcggttcagggttcgtacatcttgagggggacaatgtaatct

SEQ ID NO: 409408 - DNA, 60 bp, Artificial
  Synthetic oligonucleotide
gccatagatctaggcgacacgattgaggacgcattcgatctacttgacgtaagcaatgac

SEQ ID NO: 409409 - DNA, 56 bp, Artificial
  Synthetic oligonucleotide
gccatagattacagtgaatatgatacacaccttactcgatataattttcggactgg

SEQ ID NO: 409410 - DNA, 55 bp, Artificial
  Synthetic oligonucleotide
gccatagcatggatgtactatacaccgcgttccgttaaactgcccaaggaaatag

SEQ ID NO: 409411 - DNA, 55 bp, Artificial
  Synthetic oligonucleotide
gccatagcccgagaagaactcagaatcgctctgagcaatccggtcctgtggagcg

SEQ ID NO: 409412 - DNA, 55 bp, Artificial
  Synthetic oligonucleotide
gccatagcgtgttaatgggatccatcgtgttttacaacggattaattgtttaccg

SEQ ID NO: 409413 - DNA, 55 bp, Artificial
  Synthetic oligonucleotide
gccatagctcgacgtctgcaagtgcagttcgctcagcctggggccctcgcgccct

SEQ ID NO: 409414 - DNA, 60 bp, Artificial
  Synthetic oligonucleotide
gccatagctgcttcagcggaacctgcgtttaaagcgtcggcgcatgcgtcgttagcattc

SEQ ID NO: 409415 - DNA, 52 bp, Artificial
  Synthetic oligonucleotide
gccatagctggacatcagcgctcactcggctaagcgtcaccgctgtggatgg

SEQ ID NO: 409416 - DNA, 60 bp, Artificial
  Synthetic oligonucleotide
gccataggaggtgtgctcgtgttcttagcgaccaatgtgcatgctgacactggatgtgca

SEQ ID NO: 409417 - DNA, 59 bp, Artificial
  Synthetic oligonucleotide
gccataggggctatgagaatgcgtagtggcctcactgttggccctcgtgtacacgtgta

SEQ ID NO: 409418 - DNA, 60 bp, Artificial
  Synthetic oligonucleotide
gccatagtgtgtgtagaactcaccagtcaggaaaggcagtgtagcttggttgaggcgggc

SEQ ID NO: 409419 - DNA, 51 bp, Artificial
  Synthetic oligonucleotide
gccatatagcattataatccggcttccgtttagataacacgtagtgataca

SEQ ID NO: 409420 - DNA, 60 bp, Artificial
  Synthetic oligonucleotide
gccatatatccagatatatggacataattcatgtacgtgtttcaatgaatatcatatgaa

SEQ ID NO: 409421 - DNA, 60 bp, Artificial
  Synthetic oligonucleotide
gccatatatgctcgtatttgtttaagtttgagtctgactgctgttacttcggtcttagac

SEQ ID NO: 409422 - DNA, 55 bp, Artificial
  Synthetic oligonucleotide
gccatatcaggtgaccaacagtcatcacttgaacttgcgaatttcttcatgaatg

SEQ ID NO: 409423 - DNA, 59 bp, Artificial
  Synthetic oligonucleotide
gccatatccactttcatcagctaccctgagttatgcaaagcccaaccgaaccgaactag

SEQ ID NO: 409424 - DNA, 59 bp, Artificial
  Synthetic oligonucleotide
gccatatggctacccagcatacccagtacccggatgcacgtttatcttcacctatagtc

SEQ ID NO: 409425 - DNA, 55 bp, Artificial
  Synthetic oligonucleotide
gccatatggttcatgtggctaggcgccagattcctggagtttgaagccctgggct

SEQ ID NO: 409426 - DNA, 55 bp, Artificial
  Synthetic oligonucleotide
gccatatgtatcatgcgacccatcaggatgtaaaatgtatgctctacaccaaggg

SEQ ID NO: 409427 - DNA, 55 bp, Artificial
  Synthetic oligonucleotide
gccatattacaagatgacttaacggtattgagatacgctaatgaaattgaagggt

SEQ ID NO: 409428 - DNA, 54 bp, Artificial
  Synthetic oligonucleotide
gccatattactgtcgcccaaggtaatgtggtaaggcgttaggggttggcgcccc

SEQ ID NO: 409429 - DNA, 55 bp, Artificial
  Synthetic oligonucleotide
gccatattaggacacatagttagccctaggtgtgactacccagcaggacataacc

SEQ ID NO: 409430 - DNA, 60 bp, Artificial
  Synthetic oligonucleotide
gccatattaggacatatagttaggcctaagtgtgaatatccaacaggacatagcaaggta

SEQ ID NO: 409431 - DNA, 55 bp, Artificial
  Synthetic oligonucleotide
gccatattaggacgggtagttagacataggtgtgaatatccagcaggacacagta

SEQ ID NO: 409432 - DNA, 60 bp, Artificial
  Synthetic oligonucleotide
gccatattgacttacatggagttgactactatggggttagtccatgtagacaaactatac

SEQ ID NO: 409433 - DNA, 60 bp, Artificial
  Synthetic oligonucleotide
gccatatttgatggacacccatctgatgtaactgcagtccaatttactgttggacggcaa

SEQ ID NO: 409434 - DNA, 56 bp, Artificial
  Synthetic oligonucleotide
gccatcaactagttccacagataccctaaaggggatagcctttgcgggcgtcccaa

SEQ ID NO: 409435 - DNA, 55 bp, Artificial
  Synthetic oligonucleotide
gccatcaaggaccgcctcgatcttttccgaccatcgaacccactttcatttgctg

SEQ ID NO: 409436 - DNA, 60 bp, Artificial
  Synthetic oligonucleotide
gccatcaaggcatatgatagccagctgaaggccttcgatggacttttgaagaaaaactct

SEQ ID NO: 409437 - DNA, 55 bp, Artificial
  Synthetic oligonucleotide
gccatcaagtatttgcagctggtagaaaatacatactcccctgatactttagggt

SEQ ID NO: 409438 - DNA, 55 bp, Artificial
  Synthetic oligonucleotide
gccatcaattacgtaggtacaagcgtactaataaacatgatgtaaacaccttacg

SEQ ID NO: 409439 - DNA, 60 bp, Artificial
  Synthetic oligonucleotide
gccatcacgacagcaagttcacagcatgatcgtacctcagaggggtgctgctggaaaggt

SEQ ID NO: 409440 - DNA, 52 bp, Artificial
  Synthetic oligonucleotide
gccatcacgccaagtttcgcaatggccagagggactacgacggcagccccgt

SEQ ID NO: 409441 - DNA, 60 bp, Artificial
  Synthetic oligonucleotide
gccatcacgcttgtagattcttgtcacatgctcatccatagctagatcttcaagcacctt

SEQ ID NO: 409442 - DNA, 55 bp, Artificial
  Synthetic oligonucleotide
gccatcagctacgcgctgaaagttatcagattactgtatccgtcagtggagtggg

SEQ ID NO: 409443 - DNA, 55 bp, Artificial
  Synthetic oligonucleotide
gccatcagtagatatttggctgagttccatagtggttgatacgccaactcttgtg

SEQ ID NO: 409444 - DNA, 55 bp, Artificial
  Synthetic oligonucleotide
gccatcagtatctactagttctggctcttctgtactggtaggatcaccatcttgg

SEQ ID NO: 409445 - DNA, 55 bp, Artificial
  Synthetic oligonucleotide
gccatcataccctttccagtgatcgttccaaaattgagtcaagcgtgtcatacta

SEQ ID NO: 409446 - DNA, 58 bp, Artificial
  Synthetic oligonucleotide
gccatcatagaccaaccgaaaatagcgatgttccatatgttgccggggttctccgggc

SEQ ID NO: 409447 - DNA, 55 bp, Artificial
  Synthetic oligonucleotide
gccatcataggagatataagacaagcacattgtaacatcagtagagcagaatgga

SEQ ID NO: 409448 - DNA, 55 bp, Artificial
  Synthetic oligonucleotide
gccatcataggtcgtgatgccttacaacaatgccaaggcgtcctgtacctccctg

SEQ ID NO: 409449 - DNA, 55 bp, Artificial
  Synthetic oligonucleotide
gccatccaccattggcagaagtacccttttggggaatctccgatgtggggaggtt

SEQ ID NO: 409450 - DNA, 60 bp, Artificial
  Synthetic oligonucleotide
gccatcccaaagggggtcatcttacaggtctgcctgcccatcacgggagcgcagcctggc

SEQ ID NO: 409451 - DNA, 55 bp, Artificial
  Synthetic oligonucleotide
gccatcccatacattgatgagtaccttaatattgaaatgtcaacactcattgagc

SEQ ID NO: 409452 - DNA, 58 bp, Artificial
  Synthetic oligonucleotide
gccatcccgtagtagataaccttcgtggggtccaagctggtacctgacgtctgcagcg

SEQ ID NO: 409453 - DNA, 55 bp, Artificial
  Synthetic oligonucleotide
gccatccggtgaaagtcaaagttactatctatttatctgttggattttaccctaa

SEQ ID NO: 409454 - DNA, 55 bp, Artificial
  Synthetic oligonucleotide
gccatccgtgcatatcgttacagcggtcaactgcctcaagaaggtgcatccattc

SEQ ID NO: 409455 - DNA, 55 bp, Artificial
  Synthetic oligonucleotide
gccatcctaggcacgaatgttagcatccctttcctcagtgcaacgcgtcgcctgc

SEQ ID NO: 409456 - DNA, 60 bp, Artificial
  Synthetic oligonucleotide
gccatcctagggcagagagtactgaccaagtgtgaataccctgcaggacatagtcaggta

SEQ ID NO: 409457 - DNA, 59 bp, Artificial
  Synthetic oligonucleotide
gccatcctcgtgtgaattccgggctccgcttgcactgatggtacctcttacgaaacttg

SEQ ID NO: 409458 - DNA, 52 bp, Artificial
  Synthetic oligonucleotide
gccatcctgaaaggtaaggggggcaaccctcctcggcaaaagccgaaagtgg

SEQ ID NO: 409459 - DNA, 60 bp, Artificial
  Synthetic oligonucleotide
gccatcctggcaactactgtgacattgcattttaaactaatagaaaggaacataacagag

SEQ ID NO: 409460 - DNA, 60 bp, Artificial
  Synthetic oligonucleotide
gccatcctggtaactactgtaacattgcatttcaagcaatatgagtgcgactcccccgcg

SEQ ID NO: 409461 - DNA, 50 bp, Artificial
  Synthetic oligonucleotide
gccatcgatgacacgattgcggttgaagtttatcgaacgtaccctctgtt

SEQ ID NO: 409462 - DNA, 55 bp, Artificial
  Synthetic oligonucleotide
gccatcgcccgcagacttggcagggcctttactaatcgcaggctgactcaacagg

SEQ ID NO: 409463 - DNA, 55 bp, Artificial
  Synthetic oligonucleotide
gccatcgccgagcaatggaaaacacttggtgtgccaggcgaagcggtcactacgc

SEQ ID NO: 409464 - DNA, 55 bp, Artificial
  Synthetic oligonucleotide
gccatcgcgcttttctcgccgcagcaactgcccgtcgccctctacaaactgagtc

SEQ ID NO: 409465 - DNA, 59 bp, Artificial
  Synthetic oligonucleotide
gccatcgcttagcttataaggaagtgtcggggaaggtatctcgatggatcaggtcttta

SEQ ID NO: 409466 - DNA, 55 bp, Artificial
  Synthetic oligonucleotide
gccatcggatctcggtgaaatggccacggcaggagaaagcaagtatcgggaggac

SEQ ID NO: 409467 - DNA, 60 bp, Artificial
  Synthetic oligonucleotide
gccatcgtggtggagtactcaagctcagtgaagttaacatcaggccacctgaaatgtagg

SEQ ID NO: 409468 - DNA, 56 bp, Artificial
  Synthetic oligonucleotide
gccatctaatcaaaactggcctaatacaaacagagacaaaacaaactttgactggg

SEQ ID NO: 409469 - DNA, 58 bp, Artificial
  Synthetic oligonucleotide
gccatctagttctaagtatacatataaaagacatcttacaaacccagttaatgaccaa

SEQ ID NO: 409470 - DNA, 55 bp, Artificial
  Synthetic oligonucleotide
gccatctatgtgagcaactacagagtggtgaatagacacttggctacccacacag

SEQ ID NO: 409471 - DNA, 57 bp, Artificial
  Synthetic oligonucleotide
gccatctccagcaatgttaaagattatatagcagagaagttttccccttatacaaag

SEQ ID NO: 409472 - DNA, 55 bp, Artificial
  Synthetic oligonucleotide
gccatctcgcaactcgaaacgggatatggtgtgcgaatattcaaccccaaaggga

SEQ ID NO: 409473 - DNA, 55 bp, Artificial
  Synthetic oligonucleotide
gccatctgaacggaagctctccgaggtcgctcggcatctggtcatccctgacgga

SEQ ID NO: 409474 - DNA, 60 bp, Artificial
  Synthetic oligonucleotide
gccatctgataggattcgttggaatgatctcgactagaggatgaatctcgtgaagttaac

SEQ ID NO: 409475 - DNA, 55 bp, Artificial
  Synthetic oligonucleotide
gccatctgcagtggtatccactggtttctcgtgttagagaaccatgtcgatgcgt

SEQ ID NO: 409476 - DNA, 55 bp, Artificial
  Synthetic oligonucleotide
gccatcttagaatgggagagaagtgatgagctgtttagaacgagaagtgcctcga

SEQ ID NO: 409477 - DNA, 55 bp, Artificial
  Synthetic oligonucleotide
gccatcttatattgccccaagcgaagccaacccagttgatgcgccaacagaaccc

SEQ ID NO: 409478 - DNA, 60 bp, Artificial
  Synthetic oligonucleotide
gccatcttctaagcttaagctttgccattttcctgccgctgtcggacctgtttgtgagcc

SEQ ID NO: 409479 - DNA, 55 bp, Artificial
  Synthetic oligonucleotide
gccatcttgacacacaccgccagaaacacaaggacaatttggaagctaaactgcc

SEQ ID NO: 409480 - DNA, 50 bp, Artificial
  Synthetic oligonucleotide
gccatctttagatggtccgttcttcttatcacaacaggatgcttagcctt

SEQ ID NO: 409481 - DNA, 57 bp, Artificial
  Synthetic oligonucleotide
gccatctttgacaatttacgttatcttatacctgcagtaacatcattatactctggg

SEQ ID NO: 409482 - DNA, 60 bp, Artificial
  Synthetic oligonucleotide
gccatctttgcaaaatacaagggcaatgttgatgccacacttccagaagaggcccttata

SEQ ID NO: 409483 - DNA, 55 bp, Artificial
  Synthetic oligonucleotide
gccatgaaagctcagcgctactatattgtctcatggtcatgtacctgaatcctgg

SEQ ID NO: 409484 - DNA, 60 bp, Artificial
  Synthetic oligonucleotide
gccatgaacatgccctggaaagcctctctcgcctatgtcactcaacatggtgatagagaa

SEQ ID NO: 409485 - DNA, 55 bp, Artificial
  Synthetic oligonucleotide
gccatgaagtagcgtgcgaatattacctatgcctttattcgcagcgttagtggca

SEQ ID NO: 409486 - DNA, 57 bp, Artificial
  Synthetic oligonucleotide
gccatgacaccagagagagtgtaccgacttaaatgcacgaacactacccaatttacg

SEQ ID NO: 409487 - DNA, 55 bp, Artificial
  Synthetic oligonucleotide
gccatgacctgttagttacgcaatccggtgcagtgactaagagaggtggcctgtc

SEQ ID NO: 409488 - DNA, 55 bp, Artificial
  Synthetic oligonucleotide
gccatgactagagatgctgtgttcgcaatcatacgagatcataccaccttgcgac

SEQ ID NO: 409489 - DNA, 55 bp, Artificial
  Synthetic oligonucleotide
gccatgactgacacaaccccgtttgggcagcaaagggtgtttaaagagaaagtgg

SEQ ID NO: 409490 - DNA, 55 bp, Artificial
  Synthetic oligonucleotide
gccatgactgtggcgaacggggcgtatgtcaagtttggtgcccgtccattgacgg

SEQ ID NO: 409491 - DNA, 56 bp, Artificial
  Synthetic oligonucleotide
gccatgagagctcaaggagcccagattgacactgtttttagcagctactactggct

SEQ ID NO: 409492 - DNA, 55 bp, Artificial
  Synthetic oligonucleotide
gccatgagccaggcatcaggtgcagtaacagcagcaataatgatgcagaaaagta

SEQ ID NO: 409493 - DNA, 57 bp, Artificial
  Synthetic oligonucleotide
gccatgagggtcgcctttggaaacctgtatgccgcctttcacaaaaatccaggaatc

SEQ ID NO: 409494 - DNA, 55 bp, Artificial
  Synthetic oligonucleotide
gccatgagtaatcctcttggcctcgacattatttccggcacgaagacctggcaac

SEQ ID NO: 409495 - DNA, 55 bp, Artificial
  Synthetic oligonucleotide
gccatgatggaacaggatggctaacaatcggaatttccggtccagataatggcgc

SEQ ID NO: 409496 - DNA, 55 bp, Artificial
  Synthetic oligonucleotide
gccatgatgtgtctcatattggtaaggttatgtgtatatctgatgttacacgtgg

SEQ ID NO: 409497 - DNA, 55 bp, Artificial
  Synthetic oligonucleotide
gccatgcaacctacgtgaaccggagactaagccccacagggaggcagaattggga

SEQ ID NO: 409498 - DNA, 55 bp, Artificial
  Synthetic oligonucleotide
gccatgcaagccattgttagactcggcattgtgccaaactgattgttcaggagtg

SEQ ID NO: 409499 - DNA, 55 bp, Artificial
  Synthetic oligonucleotide
gccatgcacaatagtaaggcatatgaacaaggactatatcattgggttacaaggg

SEQ ID NO: 409500 - DNA, 60 bp, Artificial
  Synthetic oligonucleotide
gccatgcatggacaagtagactgtagtccaggaatatggcaattagattgcacacaccta

SEQ ID NO: 409501 - DNA, 55 bp, Artificial
  Synthetic oligonucleotide
gccatgcattgtccatggactgtcgcattaaatgtctgggttgtaagtgtggcgg

SEQ ID NO: 409502 - DNA, 60 bp, Artificial
  Synthetic oligonucleotide
gccatgccagtagagaattgatgattagggggactaatcatttccaagatctcatggcta

SEQ ID NO: 409503 - DNA, 53 bp, Artificial
  Synthetic oligonucleotide
gccatgcgagtcgagccgaacccccgcaggggctgcagcaacgctaggtcggc

SEQ ID NO: 409504 - DNA, 60 bp, Artificial
  Synthetic oligonucleotide
gccatgcgctcgatggctggttccagagcgctatccaccgtatggtggtgtaccgttaga

SEQ ID NO: 409505 - DNA, 55 bp, Artificial
  Synthetic oligonucleotide
gccatgcgtggtaatgtaccacaagtaaaggacatagtgttggagttaacaccac

SEQ ID NO: 409506 - DNA, 55 bp, Artificial
  Synthetic oligonucleotide
gccatgctagggacacatgttatttgggacttcgggttacaatcgtcagtgactc

SEQ ID NO: 409507 - DNA, 60 bp, Artificial
  Synthetic oligonucleotide
gccatgctatcatggacggtaagagaggggaagaatccgaagccggacgccaatcatggg

SEQ ID NO: 409508 - DNA, 55 bp, Artificial
  Synthetic oligonucleotide
gccatgcttcgcagtctggaacattgcctcgcgcacgtagcgaatatcggggctg

SEQ ID NO: 409509 - DNA, 60 bp, Artificial
  Synthetic oligonucleotide
gccatggaagttctcagacgagcaagttgacttgtgtggtttaattgcggccaatggagc

SEQ ID NO: 409510 - DNA, 53 bp, Artificial
  Synthetic oligonucleotide
gccatggaatgttccttataacgtacagttctgctttacctctgcgcaagaag

SEQ ID NO: 409511 - DNA, 55 bp, Artificial
  Synthetic oligonucleotide
gccatggatctagagcttccagtttccgcaaagttactacaccacccaacgacgg

SEQ ID NO: 409512 - DNA, 55 bp, Artificial
  Synthetic oligonucleotide
gccatggctccatgacttagggcaacatatctataacacctatggagatacttgg

SEQ ID NO: 409513 - DNA, 60 bp, Artificial
  Synthetic oligonucleotide
gccatggctctcactcacagaacgccagtagaggaggtaatcgcccgttcacatccgagg

SEQ ID NO: 409514 - DNA, 52 bp, Artificial
  Synthetic oligonucleotide
gccatgggatgacgcgcttgtatgccgcactccacttgccccctgaggtcct

SEQ ID NO: 409515 - DNA, 55 bp, Artificial
  Synthetic oligonucleotide
gccatgggcacgaatctttctgttcccaacgctctgggattctttgccgatcatc

SEQ ID NO: 409516 - DNA, 60 bp, Artificial
  Synthetic oligonucleotide
gccatgggcccgtacatggagcggttggcgggaaaacatcctagcatctactgtgggcac

SEQ ID NO: 409517 - DNA, 55 bp, Artificial
  Synthetic oligonucleotide
gccatggggaatgcaagtgaaatattaggggaaacacctgagtggataacaagac

SEQ ID NO: 409518 - DNA, 55 bp, Artificial
  Synthetic oligonucleotide
gccatggggcatgaatttcttgagagccttctagctggcactggtttaaccattg

SEQ ID NO: 409519 - DNA, 60 bp, Artificial
  Synthetic oligonucleotide
gccatggggcattcgatgggcctcatacaagtatgcagagaggatacgcgccatgctgcc

SEQ ID NO: 409520 - DNA, 60 bp, Artificial
  Synthetic oligonucleotide
gccatgggtgctttccctgttgagaaaatccctgctgctctgtcaagccatgacaagcgt

SEQ ID NO: 409521 - DNA, 57 bp, Artificial
  Synthetic oligonucleotide
gccatgggtggctaactcagcatctacggtcaggagaaagggtttcaacagaccgct

SEQ ID NO: 409522 - DNA, 55 bp, Artificial
  Synthetic oligonucleotide
gccatgggttcgattctgatatgtgcatgcgagccatcggctttgcctggtgcgc

SEQ ID NO: 409523 - DNA, 55 bp, Artificial
  Synthetic oligonucleotide
gccatggtagagctgtttgtgatggttgatcctacaaccaaaagacgccgcattc

SEQ ID NO: 409524 - DNA, 60 bp, Artificial
  Synthetic oligonucleotide
gccatggtatctagggccaggattgatgcacggattgatttcgagtctggaaggattaag

SEQ ID NO: 409525 - DNA, 55 bp, Artificial
  Synthetic oligonucleotide
gccatggtcagatttgacggaacaatgcaccaagaaatctttcgactgttgaaga

SEQ ID NO: 409526 - DNA, 55 bp, Artificial
  Synthetic oligonucleotide
gccatggtgcagcatgtagctaagggagtacggatcttggaagctcgagtggcac

SEQ ID NO: 409527 - DNA, 55 bp, Artificial
  Synthetic oligonucleotide
gccatggtgctggacagacctcttacaatggataaaaccgtaatcgaattgaccg

SEQ ID NO: 409528 - DNA, 60 bp, Artificial
  Synthetic oligonucleotide
gccatggtgctggtgttcacccctgacgtccacgagatcagaatgatggcaggattggcg

SEQ ID NO: 409529 - DNA, 60 bp, Artificial
  Synthetic oligonucleotide
gccatgtaatagagatctacataccggcttatgttgcatcctacccttgagcttggctag

SEQ ID NO: 409530 - DNA, 55 bp, Artificial
  Synthetic oligonucleotide
gccatgtacctcccagtctgtacaactggttattaaactgcacagctagctgttt

SEQ ID NO: 409531 - DNA, 55 bp, Artificial
  Synthetic oligonucleotide
gccatgtacgaggcaccgaccgcagacaagtgggtggctgcgacgaacttcaagc

SEQ ID NO: 409532 - DNA, 55 bp, Artificial
  Synthetic oligonucleotide
gccatgtagcctccataaatgttaacctccgagaatttatgcttgcaacaatgcc

SEQ ID NO: 409533 - DNA, 55 bp, Artificial
  Synthetic oligonucleotide
gccatgtatccatgtggccgaatcacttgcacaaagtgtgttggagaccacacct

SEQ ID NO: 409534 - DNA, 55 bp, Artificial
  Synthetic oligonucleotide
gccatgtattcacgcgcgtaatatctgtcgagaaagacacaatgatggtggatat

SEQ ID NO: 409535 - DNA, 60 bp, Artificial
  Synthetic oligonucleotide
gccatgtctacatcaggtttattctcaatggctataattaagcatcggattccaaggttt

SEQ ID NO: 409536 - DNA, 60 bp, Artificial
  Synthetic oligonucleotide
gccatgtgaaccaatcataatagagaggaacataacagagatagtgtatttgaataatac

SEQ ID NO: 409537 - DNA, 60 bp, Artificial
  Synthetic oligonucleotide
gccatgtgaattccctgcatcaataccagcttatagaacaacaaattatcatttcgatac

SEQ ID NO: 409538 - DNA, 60 bp, Artificial
  Synthetic oligonucleotide
gccatgtgcacataactctaatcatcacgccttgcgactcaactgcaagcgatagtgatg

SEQ ID NO: 409539 - DNA, 56 bp, Artificial
  Synthetic oligonucleotide
gccatgtgtaaagttaaccccactctgtgtcactttaatttgtagtaataacatta

SEQ ID NO: 409540 - DNA, 50 bp, Artificial
  Synthetic oligonucleotide
gccatgtgtcacatgtcgcacgaacaggcgcttgctcgcatcaaacgcgc

SEQ ID NO: 409541 - DNA, 60 bp, Artificial
  Synthetic oligonucleotide
gccatgtgtttaaacgagttatatccgttgagaaagacacgatgatgatcgacgttgatg

SEQ ID NO: 409542 - DNA, 55 bp, Artificial
  Synthetic oligonucleotide
gccatgttattattcaggccttgctgttggaatcaacccatataaagattggcac

SEQ ID NO: 409543 - DNA, 55 bp, Artificial
  Synthetic oligonucleotide
gccatgttccacgttcccaggttcatcgtttgtgatccagtagaactccagcacg

SEQ ID NO: 409544 - DNA, 60 bp, Artificial
  Synthetic oligonucleotide
gccatgttcctcgagccaatcactgcctgtgatgttgttgaattaccacttcaagcactt

SEQ ID NO: 409545 - DNA, 51 bp, Artificial
  Synthetic oligonucleotide
gccatgttgttcgatcgcgaaggtcgtctaccgttgcttaaatgccggtgg

SEQ ID NO: 409546 - DNA, 55 bp, Artificial
  Synthetic oligonucleotide
gccatgtttacgatcttggcgatgcaaatgtgctatcggtcgtagcctcaggaga

SEQ ID NO: 409547 - DNA, 60 bp, Artificial
  Synthetic oligonucleotide
gccatgtttccccatgatgatacaagaactgtacttggcccgaagcacatgcactcaatt

SEQ ID NO: 409548 - DNA, 60 bp, Artificial
  Synthetic oligonucleotide
gccattactacccttggctcacaagtgtctactcagcgatccggctcccacgagaactcc

SEQ ID NO: 409549 - DNA, 55 bp, Artificial
  Synthetic oligonucleotide
gccattactccctctttgaaggaccgcttttacatacggcacgtgttgaagcggg

SEQ ID NO: 409550 - DNA, 60 bp, Artificial
  Synthetic oligonucleotide
gccattactctatttactctgaccaaaaccttgactgcgtgccgccactatatctttgag

SEQ ID NO: 409551 - DNA, 55 bp, Artificial
  Synthetic oligonucleotide
gccattactgccacattgaaagagcgattctatatacgtcatgtttataagcgtg

SEQ ID NO: 409552 - DNA, 55 bp, Artificial
  Synthetic oligonucleotide
gccattagaggccaatacagtgggtttgttaggactctattccaacaaatgaggg

SEQ ID NO: 409553 - DNA, 55 bp, Artificial
  Synthetic oligonucleotide
gccattagtggatgcaaaagtggccatgttagatgatgttacagcaggctgttgg

SEQ ID NO: 409554 - DNA, 60 bp, Artificial
  Synthetic oligonucleotide
gccattcaatatggcgctacggcatcaggcgaaaaacagactaagatcatgaattcaata

SEQ ID NO: 409555 - DNA, 55 bp, Artificial
  Synthetic oligonucleotide
gccattcactgtccctatcttaactgttgaggaaatgtccaattcaagattcccc

SEQ ID NO: 409556 - DNA, 55 bp, Artificial
  Synthetic oligonucleotide
gccattcagaaggattggagtagttgttccagaatacagcactatgctctacaga

SEQ ID NO: 409557 - DNA, 55 bp, Artificial
  Synthetic oligonucleotide
gccattcattacacccgtgcctcagaggtccgcatacgatagttgtctcggtcgt

SEQ ID NO: 409558 - DNA, 57 bp, Artificial
  Synthetic oligonucleotide
gccattccaaaacatcaaccctagaactgtggggagatgccctcggtatgttaaaca

SEQ ID NO: 409559 - DNA, 60 bp, Artificial
  Synthetic oligonucleotide
gccattccagtctctggtccctagagcagcccgaagtcaatacagtgggttcgtgaggac

SEQ ID NO: 409560 - DNA, 55 bp, Artificial
  Synthetic oligonucleotide
gccattccctcttatctgcattgagtgtcccaaagatgagagaagagccttggac

SEQ ID NO: 409561 - DNA, 55 bp, Artificial
  Synthetic oligonucleotide
gccattccctggccctacacacttaaaaccaccttctaaactatacaagttctca

SEQ ID NO: 409562 - DNA, 57 bp, Artificial
  Synthetic oligonucleotide
gccattcgaacatcatgctacagtagggctcacgcttaggattgaatctgcaatttg

SEQ ID NO: 409563 - DNA, 60 bp, Artificial
  Synthetic oligonucleotide
gccattcgatattagtgatttatagtcgtcaatctgacaacgaccatgaaggacaattaa

SEQ ID NO: 409564 - DNA, 55 bp, Artificial
  Synthetic oligonucleotide
gccattcgtgtagctcttgcaacgtgtcctactgcagatgagacggctctccaac

SEQ ID NO: 409565 - DNA, 60 bp, Artificial
  Synthetic oligonucleotide
gccattcgttgaatgagctgcagtgatgcgttcccctgtgcgagaatccatggttgtggc

SEQ ID NO: 409566 - DNA, 55 bp, Artificial
  Synthetic oligonucleotide
gccattctacaaagaacaaagagcacctcagaaaccaatcctgtcaccagcggcc

SEQ ID NO: 409567 - DNA, 60 bp, Artificial
  Synthetic oligonucleotide
gccattctctgcttgagctgcagtgatgagttcccctgtgcgagaatccatgtgatgcgc

SEQ ID NO: 409568 - DNA, 60 bp, Artificial
  Synthetic oligonucleotide
gccattctctgtgaagatcaacatcctgcattcaaccccctggttcacctattccagagt

SEQ ID NO: 409569 - DNA, 55 bp, Artificial
  Synthetic oligonucleotide
gccattcttatagtcaatatgtgcttgaaactaagggtttgttgatgggagcgag

SEQ ID NO: 409570 - DNA, 58 bp, Artificial
  Synthetic oligonucleotide
gccattcttccatatctgtagaggcggtagaatccagtatgtaagagtagctaaccca

SEQ ID NO: 409571 - DNA, 55 bp, Artificial
  Synthetic oligonucleotide
gccattcttgaagacaacaccacgccctctcaagttaccggatgggcatccttgc

SEQ ID NO: 409572 - DNA, 60 bp, Artificial
  Synthetic oligonucleotide
gccattcttgagaaatttatcggaagggtctcctatgtgaggagcgacgttatgtattga

SEQ ID NO: 409573 - DNA, 55 bp, Artificial
  Synthetic oligonucleotide
gccattcttgcctggaaatctttgcatgatccaatgacagcggcggctgtctgct

SEQ ID NO: 409574 - DNA, 60 bp, Artificial
  Synthetic oligonucleotide
gccattgacttggtcaatcggtgtctctactaattctctatcaatcggtgtactggagtc

SEQ ID NO: 409575 - DNA, 55 bp, Artificial
  Synthetic oligonucleotide
gccattgagacgcgccatattgacgccaaagcagtttacgaccagtggtacggag

SEQ ID NO: 409576 - DNA, 55 bp, Artificial
  Synthetic oligonucleotide
gccattgagcgatcgttgaattcagttgaggggcgagagtcctgtcctgatgtcg

SEQ ID NO: 409577 - DNA, 60 bp, Artificial
  Synthetic oligonucleotide
gccattgcagtcctagatgtttctccaacagagccccctaccaaacgcatagctttagga

SEQ ID NO: 409578 - DNA, 55 bp, Artificial
  Synthetic oligonucleotide
gccattgcgcagaaatgcaacattaatacgtctgatcaagccgtagtccaagcag

SEQ ID NO: 409579 - DNA, 54 bp, Artificial
  Synthetic oligonucleotide
gccattgcggcgtacactctcaggcattcgtccgtatagcactttgtctgttcg

SEQ ID NO: 409580 - DNA, 55 bp, Artificial
  Synthetic oligonucleotide
gccattgctaatcagcgcataagagttagccaggaacttgtatacgcttggtgag

SEQ ID NO: 409581 - DNA, 55 bp, Artificial
  Synthetic oligonucleotide
gccattgctggagagtgtatacgcatcacatttatcgatgatgaagcttgctact

SEQ ID NO: 409582 - DNA, 56 bp, Artificial
  Synthetic oligonucleotide
gccattggatagtgtaacgggtcgccataggcttcggcgtgcgttttaggccttcc

SEQ ID NO: 409583 - DNA, 53 bp, Artificial
  Synthetic oligonucleotide
gccattggtccgtgtagggggtcgccataggcttcgacctcccttttaggcct

SEQ ID NO: 409584 - DNA, 55 bp, Artificial
  Synthetic oligonucleotide
gccattggtgccttctggaccaatagacacaacatatgcaataaccattcagggt

SEQ ID NO: 409585 - DNA, 60 bp, Artificial
  Synthetic oligonucleotide
gccattgtatgcttttgcactgagtagaggctttgagtcaggaatcatcgtctcaaatgc

SEQ ID NO: 409586 - DNA, 59 bp, Artificial
  Synthetic oligonucleotide
gccattgttgatgtcatgtgccacgccacttatgtcaatcgccgactcttgccacaggg

SEQ ID NO: 409587 - DNA, 55 bp, Artificial
  Synthetic oligonucleotide
gccatttacccaagaaagtagatttgggatctttagacattggtggatcccaccc

SEQ ID NO: 409588 - DNA, 55 bp, Artificial
  Synthetic oligonucleotide
gccatttcaatccttggtacctaaggctgccagagcgcaatacagtgggtttgtg

SEQ ID NO: 409589 - DNA, 55 bp, Artificial
  Synthetic oligonucleotide
gccatttcagtccttggtacctaaagctgccagaggtcaatatagcggatttgtg

SEQ ID NO: 409590 - DNA, 55 bp, Artificial
  Synthetic oligonucleotide
gccatttctaaggacaacaccacgtcccctcagattgcctaatgggcatccctgc

SEQ ID NO: 409591 - DNA, 58 bp, Artificial
  Synthetic oligonucleotide
gccatttctacgtttatcagctaccccagcaagggcaagatggaacccaaccgatcga

SEQ ID NO: 409592 - DNA, 59 bp, Artificial
  Synthetic oligonucleotide
gccatttctagtgatgtaataccaatgaattgggacacctctccaggtattaagtataa

SEQ ID NO: 409593 - DNA, 58 bp, Artificial
  Synthetic oligonucleotide
gccatttgacgtcttccgcctgcagaggtctacggggttatccagcaaaccacagttc

SEQ ID NO: 409594 - DNA, 55 bp, Artificial
  Synthetic oligonucleotide
gccatttgatggtcaatcgattactgaattagcattaaaagttgtaggacacagc

SEQ ID NO: 409595 - DNA, 59 bp, Artificial
  Synthetic oligonucleotide
gccatttgcaagtggaaacagtttgcatatgatccgcgctcaaaagaacgcattacagc

SEQ ID NO: 409596 - DNA, 60 bp, Artificial
  Synthetic oligonucleotide
gccatttgccaatctgattacagcagtcctgaggcaatgccagaccatgagacacatctt

SEQ ID NO: 409597 - DNA, 55 bp, Artificial
  Synthetic oligonucleotide
gccatttggtatattagccgatgatgtccacttatgcgagccaccaaacacgcgt

SEQ ID NO: 409598 - DNA, 57 bp, Artificial
  Synthetic oligonucleotide
gccatttggtcaatgtaccccgattgaccagttatttcatttgacgcctggtattgg

SEQ ID NO: 409599 - DNA, 59 bp, Artificial
  Synthetic oligonucleotide
gccatttggtctcaaaaatgcgcccgctatatttcaaaggaagatggacaacgtcttca

SEQ ID NO: 409600 - DNA, 55 bp, Artificial
  Synthetic oligonucleotide
gccatttgtcgagggtgtgatcaatgagtcgggaaaagagtctcggcctgatcga

SEQ ID NO: 409601 - DNA, 55 bp, Artificial
  Synthetic oligonucleotide
gccatttgttcagtggttcgtaggactttcccccactgtttggctttcagttata

SEQ ID NO: 409602 - DNA, 60 bp, Artificial
  Synthetic oligonucleotide
gccattttaagtaagcatggcgggcggtgacgtgcaatgtcaaaggtcacagcctgtcat

SEQ ID NO: 409603 - DNA, 58 bp, Artificial
  Synthetic oligonucleotide
gccattttccagcaggtatcataattgcatagtcatcatagaccatttcttgaaaatc

SEQ ID NO: 409604 - DNA, 57 bp, Artificial
  Synthetic oligonucleotide
gccattttgatacaattggttcttctgtcactggttattctttttctcttgcgggta

SEQ ID NO: 409605 - DNA, 56 bp, Artificial
  Synthetic oligonucleotide
gccattttgcccgattgctggaattggactcctggctttaagtggcggcatttcta

SEQ ID NO: 409606 - DNA, 51 bp, Artificial
  Synthetic oligonucleotide
gcccaaaaaaagttttggttgttcaacactaatggcttttggggctcttta

SEQ ID NO: 409607 - DNA, 60 bp, Artificial
  Synthetic oligonucleotide
gcccaaaacataacactataatccctcgtctgaggagaggcacgttcagtgactcgacga

SEQ ID NO: 409608 - DNA, 55 bp, Artificial
  Synthetic oligonucleotide
gcccaaaactaccactcattagatgcatggaaattgttgctagagcctccgcggg

SEQ ID NO: 409609 - DNA, 56 bp, Artificial
  Synthetic oligonucleotide
gcccaaaagccacggtttgagcaaaccgtgctgcctgtagctccgtcgtggggacg

SEQ ID NO: 409610 - DNA, 55 bp, Artificial
  Synthetic oligonucleotide
gcccaaaagcctcacactcatataagccagcaagagatctgctctcaatgtacat

SEQ ID NO: 409611 - DNA, 51 bp, Artificial
  Synthetic oligonucleotide
gcccaaaatcgaaagtacttagtgatttgagcccacagttagctgcaatat

SEQ ID NO: 409612 - DNA, 60 bp, Artificial
  Synthetic oligonucleotide
gcccaaaatgcaaagcatgaaagactgcaagcctcactcaaaacaactagtggacttgtt

SEQ ID NO: 409613 - DNA, 60 bp, Artificial
  Synthetic oligonucleotide
gcccaaaatgcagccgcctgagactgcagtcgtgatccccttgggtaaagccattgagcc

SEQ ID NO: 409614 - DNA, 55 bp, Artificial
  Synthetic oligonucleotide
gcccaaaattcggctatctctacgtttatcagttacccagacctgggcaaggtag

SEQ ID NO: 409615 - DNA, 53 bp, Artificial
  Synthetic oligonucleotide
gcccaaacagatagcaactttggagcatgccccagcgtttatgtttcgtaagg

SEQ ID NO: 409616 - DNA, 57 bp, Artificial
  Synthetic oligonucleotide
gcccaaaccctcagcgttatagcacccaaacatgactcgaaatatgacccgacttta

SEQ ID NO: 409617 - DNA, 60 bp, Artificial
  Synthetic oligonucleotide
gcccaaactcctcatctccatcaccgctcaacccaccgctccccccgcatcgacctgcat

SEQ ID NO: 409618 - DNA, 55 bp, Artificial
  Synthetic oligonucleotide
gcccaaactgtctcaactgcacagatctggacgtggccttgggcagaccaaagtg

SEQ ID NO: 409619 - DNA, 55 bp, Artificial
  Synthetic oligonucleotide
gcccaaagatggctttaatgctttaagtgagggtgtacacagactaggtcagtgg

SEQ ID NO: 409620 - DNA, 55 bp, Artificial
  Synthetic oligonucleotide
gcccaaaggcatgagtaggatgtctatggcaatggggactatggctggcagcggg

SEQ ID NO: 409621 - DNA, 55 bp, Artificial
  Synthetic oligonucleotide
gcccaaaggttgtgaaggcccatgtaaggtccaatcttatgaacagaggcacgac

SEQ ID NO: 409622 - DNA, 59 bp, Artificial
  Synthetic oligonucleotide
gcccaaagtgaatggtcaggccgggaggatcgactttcattggatgctattggacccag

SEQ ID NO: 409623 - DNA, 51 bp, Artificial
  Synthetic oligonucleotide
gcccaaagtggccggggcatgtaacagagtcgcacgtcacacagcgctggt

SEQ ID NO: 409624 - DNA, 55 bp, Artificial
  Synthetic oligonucleotide
gcccaaagtgtcaaataaaaggtgaacctatacatggacaagtagatgcctctcc

SEQ ID NO: 409625 - DNA, 60 bp, Artificial
  Synthetic oligonucleotide
gcccaaatcgctagcaagttggatccagagtgaattcaacaaggcatgtgaactggccga

SEQ ID NO: 409626 - DNA, 55 bp, Artificial
  Synthetic oligonucleotide
gcccaaatggcagttcagcaatatctacgagttggatacatcgaggaacgtcggt

SEQ ID NO: 409627 - DNA, 55 bp, Artificial
  Synthetic oligonucleotide
gcccaaatggtctcgaccacagggttcatcccgcccatggcatcactcgaggaca

SEQ ID NO: 409628 - DNA, 56 bp, Artificial
  Synthetic oligonucleotide
gcccaaatgtcatatgttaagcagattataaagtggttagttaaggtagttgcctc

SEQ ID NO: 409629 - DNA, 56 bp, Artificial
  Synthetic oligonucleotide
gcccaaattctgaggacttttggagcaaattggactccactccatacttaaaggct

SEQ ID NO: 409630 - DNA, 59 bp, Artificial
  Synthetic oligonucleotide
gcccaaattgtgacatagattgctacccttattacccagccaacttagttgactgctct

SEQ ID NO: 409631 - DNA, 55 bp, Artificial
  Synthetic oligonucleotide
gcccaacaagatggttatgtcgtcttaggaattaagtgaaagtgggtaactaatg

SEQ ID NO: 409632 - DNA, 55 bp, Artificial
  Synthetic oligonucleotide
gcccaacactggagagatccccttctatggcagagccatccccatcgagttcatc

SEQ ID NO: 409633 - DNA, 55 bp, Artificial
  Synthetic oligonucleotide
gcccaaccaagatgaaaataggggtcaaaactattgacttcctaggagcctctat

SEQ ID NO: 409634 - DNA, 51 bp, Artificial
  Synthetic oligonucleotide
gcccaaccaccggatttggagagaactccggcccgaagggttgagtagcac

SEQ ID NO: 409635 - DNA, 53 bp, Artificial
  Synthetic oligonucleotide
gcccaacctatccgggtttcccaaatggatcattttacccgaataggatccgc

SEQ ID NO: 409636 - DNA, 58 bp, Artificial
  Synthetic oligonucleotide
gcccaacctgtgatgcggaatcacctgggtctaatacgcttgggcccaattggtgaag

SEQ ID NO: 409637 - DNA, 59 bp, Artificial
  Synthetic oligonucleotide
gcccaacgggggagccgttggattttcagatcggcaggaatcagtatgactgcaacgtg

SEQ ID NO: 409638 - DNA, 55 bp, Artificial
  Synthetic oligonucleotide
gcccaactatactgagtcacactgatgctgaagggtctaaccctgatttctgcca

SEQ ID NO: 409639 - DNA, 60 bp, Artificial
  Synthetic oligonucleotide
gcccaactggatatgccccggctacgtctcagcaaggactattaggctcaacagcacctg

SEQ ID NO: 409640 - DNA, 53 bp, Artificial
  Synthetic oligonucleotide
gcccaacttaaagttcttcttccccgcgcccacctcgaagctcaaaagggatc

SEQ ID NO: 409641 - DNA, 53 bp, Artificial
  Synthetic oligonucleotide
gcccaacttatattaattcttgacaggcctttaaaataccctctatattgccc

SEQ ID NO: 409642 - DNA, 60 bp, Artificial
  Synthetic oligonucleotide
gcccaacttccgatctactagcccatgattcgttcggaccaatcgcaagatgtgggacgc

SEQ ID NO: 409643 - DNA, 54 bp, Artificial
  Synthetic oligonucleotide
gcccaactttcataggctctacactctgcgcaatcttaaacaaacaagtgagga

SEQ ID NO: 409644 - DNA, 55 bp, Artificial
  Synthetic oligonucleotide
gcccaagaacccacggaagaggatagcagtgacggaagagagttcggaggacgaa

SEQ ID NO: 409645 - DNA, 59 bp, Artificial
  Synthetic oligonucleotide
gcccaagaagcggacccactctaccatagagtggcgtctaataccgcgcccgccaggca

SEQ ID NO: 409646 - DNA, 60 bp, Artificial
  Synthetic oligonucleotide
gcccaagacccacacactgtggagcaatggagtgctggaaagccagatgctcattccaaa

SEQ ID NO: 409647 - DNA, 60 bp, Artificial
  Synthetic oligonucleotide
gcccaagcaggaaaagactatggattagtcatgacaccagcagacaagggtgctactttc

SEQ ID NO: 409648 - DNA, 54 bp, Artificial
  Synthetic oligonucleotide
gcccaaggaatatttgggactgctttcgggatcttggggtatgtaaaacctatc

SEQ ID NO: 409649 - DNA, 55 bp, Artificial
  Synthetic oligonucleotide
gcccaaggagaaacctgggatcatgtggtaatgtttcgtctgtcgaagactacaa

SEQ ID NO: 409650 - DNA, 55 bp, Artificial
  Synthetic oligonucleotide
gcccaaggatctacatactatgggcctggaccttgtaaccagattaagtcctgca

SEQ ID NO: 409651 - DNA, 57 bp, Artificial
  Synthetic oligonucleotide
gcccaagggtaggcgctcaaacgcacaaacatcaggtgtcggtgaagtgttctgggc

SEQ ID NO: 409652 - DNA, 55 bp, Artificial
  Synthetic oligonucleotide
gcccaagggtcgatattcgtatagtacaggatgagtttggtgagattagacggca

SEQ ID NO: 409653 - DNA, 60 bp, Artificial
  Synthetic oligonucleotide
gcccaagggtgcgacaccattgctcgatgtaactgccagactggagtgtactattgtaac

SEQ ID NO: 409654 - DNA, 50 bp, Artificial
  Synthetic oligonucleotide
gcccaaggtacagactccatcgccaggtgtagctgcaatgctggagtata

SEQ ID NO: 409655 - DNA, 55 bp, Artificial
  Synthetic oligonucleotide
gcccaaggtcagtaagtccttggacaacatcgtttaagggttctcctccttgctc

SEQ ID NO: 409656 - DNA, 54 bp, Artificial
  Synthetic oligonucleotide
gcccaaggtttctggcttacaataccgggtgtttagagtgcgtttgcctgaccc

SEQ ID NO: 409657 - DNA, 55 bp, Artificial
  Synthetic oligonucleotide
gcccaagtagatttccctgtccttgttggaccgacgatgtagaggctctgcttcc

SEQ ID NO: 409658 - DNA, 55 bp, Artificial
  Synthetic oligonucleotide
gcccaagtcccagggtaagatggacaagggtactcgcgcagatcttgagtatcgt

SEQ ID NO: 409659 - DNA, 55 bp, Artificial
  Synthetic oligonucleotide
gcccaagtcttgcagtattgtgtggattctacagggtcagaagaggaagggtgta

SEQ ID NO: 409660 - DNA, 55 bp, Artificial
  Synthetic oligonucleotide
gcccaagtgatgaagaagctccggcatgagaagctggttcaactgtacgcagtgg

SEQ ID NO: 409661 - DNA, 55 bp, Artificial
  Synthetic oligonucleotide
gcccaagtggacaaccttgccgccagggttcttgcaactgttgtacacggacctc

SEQ ID NO: 409662 - DNA, 55 bp, Artificial
  Synthetic oligonucleotide
gcccaagtgtatggaggcgatgacaagtcaatcaattcaccaatcaccgtccgca

SEQ ID NO: 409663 - DNA, 60 bp, Artificial
  Synthetic oligonucleotide
gcccaataattatcatccatgtgtcgttaacaatagtggggctgaaatccatattcacaa

SEQ ID NO: 409664 - DNA, 60 bp, Artificial
  Synthetic oligonucleotide
gcccaatacagaaacgtgtgggatgtggactattcggcctttgatgctaaccactgtagc

SEQ ID NO: 409665 - DNA, 60 bp, Artificial
  Synthetic oligonucleotide
gcccaatacccaaggctgatatagatgctagcagagccctgttttcaacaacacaaccat

SEQ ID NO: 409666 - DNA, 60 bp, Artificial
  Synthetic oligonucleotide
gcccaatataccaacaacgagggaaagaatattctcttcatgtggggcatacatcaccca

SEQ ID NO: 409667 - DNA, 55 bp, Artificial
  Synthetic oligonucleotide
gcccaatcaggaaaagactacggactaaccatgactccagctgacaagtcagcca

SEQ ID NO: 409668 - DNA, 58 bp, Artificial
  Synthetic oligonucleotide
gcccaatccaagtacgccgcgttaggtcacacctgcaaggagtactacccgtgcaaga

SEQ ID NO: 409669 - DNA, 55 bp, Artificial
  Synthetic oligonucleotide
gcccaatctaactctacaagcgatgtatgtaccaactggtgcacgaaaacccagc

SEQ ID NO: 409670 - DNA, 54 bp, Artificial
  Synthetic oligonucleotide
gcccaatgcatgttcggctaacaactctcaccactacatcagcatgggaacttc

SEQ ID NO: 409671 - DNA, 60 bp, Artificial
  Synthetic oligonucleotide
gcccaatgcgactgtgcccactatcatagccttattctgctgcgtgaggccgtctcatgc

SEQ ID NO: 409672 - DNA, 52 bp, Artificial
  Synthetic oligonucleotide
gcccaatgcgtaaccaaaactatctattcaaagccaacccaaattatgccgg

SEQ ID NO: 409673 - DNA, 55 bp, Artificial
  Synthetic oligonucleotide
gcccaattaatgacacttgatattgacccaaggaacatgaccctcgaagatagtg

SEQ ID NO: 409674 - DNA, 58 bp, Artificial
  Synthetic oligonucleotide
gcccaatttcactagtgcaacagttaaggcggcctgttggtgggcaggtgtccaacag

SEQ ID NO: 409675 - DNA, 55 bp, Artificial
  Synthetic oligonucleotide
gcccaatttgactcaagtcaatatggtcgtatatccgatgctcatgcagacggag

SEQ ID NO: 409676 - DNA, 55 bp, Artificial
  Synthetic oligonucleotide
gcccacaaattcaactcttcaggctgtcctgagagactggccagctgtcgacccc

SEQ ID NO: 409677 - DNA, 55 bp, Artificial
  Synthetic oligonucleotide
gcccacaaggaaggagacctaagaggtctgttgcgcatttcgaagcctacaaggc

SEQ ID NO: 409678 - DNA, 60 bp, Artificial
  Synthetic oligonucleotide
gcccacaatgctgaacagtctgccaacataggaagtgtagttccctacaaaggcaagcaa

SEQ ID NO: 409679 - DNA, 60 bp, Artificial
  Synthetic oligonucleotide
gcccacacccatgggctacttatcactgatagcacagagaacaagacaactatacatttc

SEQ ID NO: 409680 - DNA, 55 bp, Artificial
  Synthetic oligonucleotide
gcccacaccgacgtggcattccttcttgaccggttcaccaaggttgggagaacca

SEQ ID NO: 409681 - DNA, 55 bp, Artificial
  Synthetic oligonucleotide
gcccacacctgcatgcagcaatcacaaaagttttcttagtaagtatcacgagtct

SEQ ID NO: 409682 - DNA, 56 bp, Artificial
  Synthetic oligonucleotide
gcccacacctgtgaatattatagggagaaatatcttaactcaaattgggtgtactc

SEQ ID NO: 409683 - DNA, 55 bp, Artificial
  Synthetic oligonucleotide
gcccacactaaggcaagcaaaagtgcaaggccccgcttttgaatttgctgtggcc

SEQ ID NO: 409684 - DNA, 55 bp, Artificial
  Synthetic oligonucleotide
gcccacagagcagggaaggcctcgcacataactcacgttgtgcatggtcagcgtg

SEQ ID NO: 409685 - DNA, 55 bp, Artificial
  Synthetic oligonucleotide
gcccacagtgccaccctttccgtcattgtatgaaatccgaaaactctactccaag

SEQ ID NO: 409686 - DNA, 55 bp, Artificial
  Synthetic oligonucleotide
gcccacatagtcttgcccgtacgactatctccctctaagactaaactcagaggtc

SEQ ID NO: 409687 - DNA, 57 bp, Artificial
  Synthetic oligonucleotide
gcccacatcgtcttcccggtccgactatcaccttcaatcacaatacttttgggtctc

SEQ ID NO: 409688 - DNA, 54 bp, Artificial
  Synthetic oligonucleotide
gcccacatgatagcttgtcatggactccatcatggtatccttgatcttaagtta

SEQ ID NO: 409689 - DNA, 58 bp, Artificial
  Synthetic oligonucleotide
gcccacattgtcttccccgttctactctcaccctccaacactatactcatgggtctta

SEQ ID NO: 409690 - DNA, 59 bp, Artificial
  Synthetic oligonucleotide
gcccacattgtcttgcccgtacgactatcaccctcaatgacaatacttttaggtctcaa

SEQ ID NO: 409691 - DNA, 55 bp, Artificial
  Synthetic oligonucleotide
gcccacattgtcttgcctgttcgactatctccttcgactatcaaactaacaggcc

SEQ ID NO: 409692 - DNA, 55 bp, Artificial
  Synthetic oligonucleotide
gcccacattgttttacccgtacgactatcaccttctatcacaatacttttgggtc

SEQ ID NO: 409693 - DNA, 56 bp, Artificial
  Synthetic oligonucleotide
gcccacatttcaagccattttattactcaagattttctgatttcctttgccaactg

SEQ ID NO: 409694 - DNA, 55 bp, Artificial
  Synthetic oligonucleotide
gcccaccaatacaccggatgtcgggagtgcttcctgtccacagcagggcttgctg

SEQ ID NO: 409695 - DNA, 55 bp, Artificial
  Synthetic oligonucleotide
gcccaccagagtaacaatgatcaatggtcgagttagcatgatcaccccagtgact

SEQ ID NO: 409696 - DNA, 60 bp, Artificial
  Synthetic oligonucleotide
gcccacccaacccggtgtgtcagcagagcgcttctacactttaccatctgttcagtggac

SEQ ID NO: 409697 - DNA, 55 bp, Artificial
  Synthetic oligonucleotide
gcccacccactaacagattagtcagatagatcaaccatcaatgataaagccacct

SEQ ID NO: 409698 - DNA, 59 bp, Artificial
  Synthetic oligonucleotide
gcccacccgcccatggagggctctattgctgggagtcagaatacatcgagtgtcccccg

SEQ ID NO: 409699 - DNA, 49 bp, Artificial
  Synthetic oligonucleotide
gcccacccgggaaattcggtcgggttcccctcgtcttggccaccctaaa

SEQ ID NO: 409700 - DNA, 55 bp, Artificial
  Synthetic oligonucleotide
gcccacccttaggactgctaccgtccaagggccctcgctggatttttccatatcc

SEQ ID NO: 409701 - DNA, 55 bp, Artificial
  Synthetic oligonucleotide
gcccaccgacccttgtggagaggctgaattatatcctcaccggatacccaccacc

SEQ ID NO: 409702 - DNA, 59 bp, Artificial
  Synthetic oligonucleotide
gcccacctctggagcttgctagcaccactatacaggatggtgacatggtggatactggc

SEQ ID NO: 409703 - DNA, 53 bp, Artificial
  Synthetic oligonucleotide
gcccacgaaaagtggaggtcgtcgtgtggtggcggttccgaatcctttgaaat

SEQ ID NO: 409704 - DNA, 55 bp, Artificial
  Synthetic oligonucleotide
gcccacgacggcactggaaagagggtctattacctcacccgtgaccctacaactc

SEQ ID NO: 409705 - DNA, 55 bp, Artificial
  Synthetic oligonucleotide
gcccacgatacgggcatcctatccaatttgtgtccctttacctcctatgggctga

SEQ ID NO: 409706 - DNA, 55 bp, Artificial
  Synthetic oligonucleotide
gcccacgattcgttcggaccgattgcaaaatgtgggacgcgcaacgatcttgaac

SEQ ID NO: 409707 - DNA, 51 bp, Artificial
  Synthetic oligonucleotide
gcccacgctttaatattaccgtgggcgagcggtgatcgatggcttcttggt

SEQ ID NO: 409708 - DNA, 55 bp, Artificial
  Synthetic oligonucleotide
gcccacggtagcgggagagaagtcattgacgccatgtgtcatgccaccctaactt

SEQ ID NO: 409709 - DNA, 52 bp, Artificial
  Synthetic oligonucleotide
gcccacgtggcggctagcactctggtatcacggtacctttgtgcgcctgttt

SEQ ID NO: 409710 - DNA, 55 bp, Artificial
  Synthetic oligonucleotide
gcccacgtttagaggcaatatcactgcaagagagatcaggacgggcaaggagaaa

SEQ ID NO: 409711 - DNA, 55 bp, Artificial
  Synthetic oligonucleotide
gcccactactgctaagatccgaatggatctgagggatagaatgcaggtgttgaag

SEQ ID NO: 409712 - DNA, 60 bp, Artificial
  Synthetic oligonucleotide
gcccactcaagctgtctacgatgctgccacgaatgcccggttcgcgacattcatggccca

SEQ ID NO: 409713 - DNA, 55 bp, Artificial
  Synthetic oligonucleotide
gcccactcactcatgaaagctctggtccaagccagcacaaaggatgctatctgag

SEQ ID NO: 409714 - DNA, 54 bp, Artificial
  Synthetic oligonucleotide
gcccactcggacatccaatggaggtaaaggtatgtttgacgtaaactacaaagt

SEQ ID NO: 409715 - DNA, 55 bp, Artificial
  Synthetic oligonucleotide
gcccactgcttcaatgctgcattcttctcttcgtccaaatattccttatagctgc

SEQ ID NO: 409716 - DNA, 56 bp, Artificial
  Synthetic oligonucleotide
gcccactgtctttaactcaaaatgtctaagcgcgatggctcttggcgctctatcgc

SEQ ID NO: 409717 - DNA, 57 bp, Artificial
  Synthetic oligonucleotide
gcccacttaggctgccatgtgggcccccctgctttcaacgatccaaatttcttttga

SEQ ID NO: 409718 - DNA, 55 bp, Artificial
  Synthetic oligonucleotide
gcccacttcccaggattcgggcagagcctcctctatggataccccgtctatgtgt

SEQ ID NO: 409719 - DNA, 55 bp, Artificial
  Synthetic oligonucleotide
gcccacttctcaggacgtgacgtgtatgaccaccttttcaagcccttcattcgtg

SEQ ID NO: 409720 - DNA, 60 bp, Artificial
  Synthetic oligonucleotide
gcccacttctgtgcggtcaagccttagtcctacgtgacaggaggacttcagccagctacc

SEQ ID NO: 409721 - DNA, 55 bp, Artificial
  Synthetic oligonucleotide
gcccactttgtatggcgggagccttcagtcgttgtggtcctcaaccacaattcga

SEQ ID NO: 409722 - DNA, 55 bp, Artificial
  Synthetic oligonucleotide
gcccagaaaagctagtgggatacgtgtagttgctgtttacggcgcgatgggctaa

SEQ ID NO: 409723 - DNA, 55 bp, Artificial
  Synthetic oligonucleotide
gcccagaagatgcgacaaggtaagttctttattgctaagtctgcgtcaaaagggt

SEQ ID NO: 409724 - DNA, 55 bp, Artificial
  Synthetic oligonucleotide
gcccagaagtaatacctatgttctcagcattatcagaaggagccactccacaaga

SEQ ID NO: 409725 - DNA, 55 bp, Artificial
  Synthetic oligonucleotide
gcccagaagtaatccaccacacatccatgagccctccttgttgaccacaaccaca

SEQ ID NO: 409726 - DNA, 57 bp, Artificial
  Synthetic oligonucleotide
gcccagaagttccttggagcatacagacaacgtgttacacagtaacagtggaagcaa

SEQ ID NO: 409727 - DNA, 60 bp, Artificial
  Synthetic oligonucleotide
gcccagaatctgcacaagagcagagttctgcaacaaagtgagaagcaacgcagctctggg

SEQ ID NO: 409728 - DNA, 54 bp, Artificial
  Synthetic oligonucleotide
gcccagacccctgggaatccgatggtgggatgggaccccagggagaaccctcca

SEQ ID NO: 409729 - DNA, 60 bp, Artificial
  Synthetic oligonucleotide
gcccagacgtaagtgactactgcactgttctccacttctcaagacctgtcatctctattg

SEQ ID NO: 409730 - DNA, 55 bp, Artificial
  Synthetic oligonucleotide
gcccagagaattgtatacgatgatgagctgcagatgcacatactacggggaccac

SEQ ID NO: 409731 - DNA, 60 bp, Artificial
  Synthetic oligonucleotide
gcccagagatgtcaacgcttggaccacactattcatcgtttctccaccctggacagtcat

SEQ ID NO: 409732 - DNA, 57 bp, Artificial
  Synthetic oligonucleotide
gcccagaggatcagaggatttgttcacgacgcttttcaattttgaagcgaagttccc

SEQ ID NO: 409733 - DNA, 60 bp, Artificial
  Synthetic oligonucleotide
gcccagatcgctagcaagctggatccagagtgaattcaacaaagcgtgtgaattgactga

SEQ ID NO: 409734 - DNA, 55 bp, Artificial
  Synthetic oligonucleotide
gcccagatggcccttcagctattcatcaaagactacaggtacacataccggtgtc

SEQ ID NO: 409735 - DNA, 55 bp, Artificial
  Synthetic oligonucleotide
gcccagattcgatcgaaactagtactagtgcttatcagtttgatactaaccgtgc

SEQ ID NO: 409736 - DNA, 60 bp, Artificial
  Synthetic oligonucleotide
gcccagcacggcgactgtgaagaatgttcatcgtgatagataccaggtattaaggaagtg

SEQ ID NO: 409737 - DNA, 55 bp, Artificial
  Synthetic oligonucleotide
gcccagcagacttactgtggaagggagaaggagcggtccttattaaggtagggac

SEQ ID NO: 409738 - DNA, 55 bp, Artificial
  Synthetic oligonucleotide
gcccagcagatagaatcccgacatgaggtaataccacaggaggatagtgtcatcg

SEQ ID NO: 409739 - DNA, 50 bp, Artificial
  Synthetic oligonucleotide
gcccagcagcgcatcgatgacggcgaatttggttatctctctgcggtttt

SEQ ID NO: 409740 - DNA, 55 bp, Artificial
  Synthetic oligonucleotide
gcccagcagtcgctgaaacatgccgctagattcgttataacgcccaaaagtcccg

SEQ ID NO: 409741 - DNA, 55 bp, Artificial
  Synthetic oligonucleotide
gcccagcagttgttagttcaaagggagctagcgtatgcttgaggagctgacaccc

SEQ ID NO: 409742 - DNA, 60 bp, Artificial
  Synthetic oligonucleotide
gcccagcatatgatgagttactgcagaatattgtgaggtgtacagccaggagagccaaac

SEQ ID NO: 409743 - DNA, 60 bp, Artificial
  Synthetic oligonucleotide
gcccagcatctgcacatatcatacacccaatgtcaaatattgacctgcactcagattcag

SEQ ID NO: 409744 - DNA, 60 bp, Artificial
  Synthetic oligonucleotide
gcccagccaaaagcatggagtacgatgctgttgcaactacacactcctgggtccctaaaa

SEQ ID NO: 409745 - DNA, 60 bp, Artificial
  Synthetic oligonucleotide
gcccagccataaagcaagagttctggctgaggcaatgagccaagcaacaaattcagttac

SEQ ID NO: 409746 - DNA, 56 bp, Artificial
  Synthetic oligonucleotide
gcccagcccactacagtcggggcaacccggtcaggaggaaacattcttgttggatc

SEQ ID NO: 409747 - DNA, 52 bp, Artificial
  Synthetic oligonucleotide
gcccagccgcgcaataaggacggatattcatcctggtgcaagtcatgccaga

SEQ ID NO: 409748 - DNA, 53 bp, Artificial
  Synthetic oligonucleotide
gcccagcgacgtccgtttagatcaaaagtcacgtatactgcgacgctgtttac

SEQ ID NO: 409749 - DNA, 55 bp, Artificial
  Synthetic oligonucleotide
gcccagcggaatattctaagtggctttacaagccaattttccgactcccgactag

SEQ ID NO: 409750 - DNA, 60 bp, Artificial
  Synthetic oligonucleotide
gcccagcgtatacatgagaaccagtttgggcctgagtttgttatgggccataattcagcc

SEQ ID NO: 409751 - DNA, 60 bp, Artificial
  Synthetic oligonucleotide
gcccagcgtcctcggattttgatggaatgatcctggctcagagccgcacttggaatctcg

SEQ ID NO: 409752 - DNA, 55 bp, Artificial
  Synthetic oligonucleotide
gcccagctgagcgctacgacagaaagtgcaccagacaccactgagccacagtcca

SEQ ID NO: 409753 - DNA, 60 bp, Artificial
  Synthetic oligonucleotide
gcccagcttatgctgggacgccttaagtatgacatggtgtgaagacccgcatgtgcttaa

SEQ ID NO: 409754 - DNA, 55 bp, Artificial
  Synthetic oligonucleotide
gcccaggacaacagcggttgttcgtttcagggacacatgtaggtttagcaaggcc

SEQ ID NO: 409755 - DNA, 55 bp, Artificial
  Synthetic oligonucleotide
gcccaggacaataacctatagatgtcctagggatgttaccgccattttgagcgag

SEQ ID NO: 409756 - DNA, 51 bp, Artificial
  Synthetic oligonucleotide
gcccaggaccaactaccccgggcgttttacaaacctgttggacgtggccga

SEQ ID NO: 409757 - DNA, 58 bp, Artificial
  Synthetic oligonucleotide
gcccaggatatatcgtacgttgagagggcctgatgttcctaaagggtgtgaaggccca

SEQ ID NO: 409758 - DNA, 58 bp, Artificial
  Synthetic oligonucleotide
gcccaggatgtacagaatgttcagaagccctgacgtccctcgtggttgtgagggtccg

SEQ ID NO: 409759 - DNA, 55 bp, Artificial
  Synthetic oligonucleotide
gcccaggcaactgtatcaatcactcgtgctaggcttcctgcgtggcaacattgca

SEQ ID NO: 409760 - DNA, 51 bp, Artificial
  Synthetic oligonucleotide
gcccaggcactgattgatcagaaggtgaaggagatctctaatcaggaacca

SEQ ID NO: 409761 - DNA, 58 bp, Artificial
  Synthetic oligonucleotide
gcccaggcccaagcgccctctcttgatggtggaagggaccacatacaaaagacaaata

SEQ ID NO: 409762 - DNA, 55 bp, Artificial
  Synthetic oligonucleotide
gcccaggcctgttctggggtgcgtctcagattggtgtggggtatggaagtcatgg

SEQ ID NO: 409763 - DNA, 55 bp, Artificial
  Synthetic oligonucleotide
gcccaggcgaacgtggaattcaaacgaagttaagagaattagaggatgagcagag

SEQ ID NO: 409764 - DNA, 55 bp, Artificial
  Synthetic oligonucleotide
gcccaggcgacaggaaacggatcgatatactacaaaccacgcggcctctggtggg

SEQ ID NO: 409765 - DNA, 55 bp, Artificial
  Synthetic oligonucleotide
gcccaggcgacttacagactttcttggatgcgcttacccgtagaatggagaaagt

SEQ ID NO: 409766 - DNA, 51 bp, Artificial
  Synthetic oligonucleotide
gcccaggcgagggaaatgttagcacgagtggttgctagggccgctgagatg

SEQ ID NO: 409767 - DNA, 53 bp, Artificial
  Synthetic oligonucleotide
gcccaggcgtaaacgttactaggatttctaacgtgaaattctaaactatctcc

SEQ ID NO: 409768 - DNA, 55 bp, Artificial
  Synthetic oligonucleotide
gcccaggcgttcgctacggtaaaacgttgaattctctttggactaagtatgttgc

SEQ ID NO: 409769 - DNA, 55 bp, Artificial
  Synthetic oligonucleotide
gcccaggctaatggcagtgtaactaatgttactagtctatgtgttcagacgagac

SEQ ID NO: 409770 - DNA, 55 bp, Artificial
  Synthetic oligonucleotide
gcccagggctacaaggtgctagttctcaacccctccgttgccgcaacactgggct

SEQ ID NO: 409771 - DNA, 55 bp, Artificial
  Synthetic oligonucleotide
gcccagggtcataacaatggtatatgctggtttaatcaattgtttgtcacggtgg

SEQ ID NO: 409772 - DNA, 59 bp, Artificial
  Synthetic oligonucleotide
gcccagggtgaaatagtcaacaagtgcaaggtacaggatgtaggtctcaaacccatcaa

SEQ ID NO: 409773 - DNA, 57 bp, Artificial
  Synthetic oligonucleotide
gcccagggtgctagtactattcctgggtaatatatttttgtgtcatttcttctacta

SEQ ID NO: 409774 - DNA, 60 bp, Artificial
  Synthetic oligonucleotide
gcccaggtcgctagcaagctggatccaaagtgagttcaacaaggcatgtgaattgaccga

SEQ ID NO: 409775 - DNA, 60 bp, Artificial
  Synthetic oligonucleotide
gcccaggtggacagtgacgacctttcagcatccaacaggcacttcattttgcagttgacg

SEQ ID NO: 409776 - DNA, 50 bp, Artificial
  Synthetic oligonucleotide
gcccaggtgttttttacgtgaatttccgcgttccgggtcaaagtctccgt

SEQ ID NO: 409777 - DNA, 55 bp, Artificial
  Synthetic oligonucleotide
gcccaggttctacatagactgtgatttggacacctttgattttgagaagggttgc

SEQ ID NO: 409778 - DNA, 52 bp, Artificial
  Synthetic oligonucleotide
gcccagtaccgggttgtccgggctacaatccgctaccgccctttggttccga

SEQ ID NO: 409779 - DNA, 60 bp, Artificial
  Synthetic oligonucleotide
gcccagtacggctaccgtgaagaacgtgcatcgtgataggtatcaggtgctcaggaagtg

SEQ ID NO: 409780 - DNA, 60 bp, Artificial
  Synthetic oligonucleotide
gcccagtacggctactgtgaagaatgttcatcgtgataggtatcaagttcttcggaaatg

SEQ ID NO: 409781 - DNA, 55 bp, Artificial
  Synthetic oligonucleotide
gcccagtagtttaagtaccgggaagagactatacaatatacttgatattgatgtc

SEQ ID NO: 409782 - DNA, 53 bp, Artificial
  Synthetic oligonucleotide
gcccagtatcgtgttatccgggccactattcgctatcgcccgctggtcccaaa

SEQ ID NO: 409783 - DNA, 59 bp, Artificial
  Synthetic oligonucleotide
gcccagtcaaacggaaatgctttccgtatcatggacaaatattcgtccctgcttgtggc

SEQ ID NO: 409784 - DNA, 55 bp, Artificial
  Synthetic oligonucleotide
gcccagtcacgaatccacttacagcccatgccggtgaggctcaagcacacggtgc

SEQ ID NO: 409785 - DNA, 55 bp, Artificial
  Synthetic oligonucleotide
gcccagtcagtatcctagacattaagcagggacctaaggagcctttcagggacta

SEQ ID NO: 409786 - DNA, 55 bp, Artificial
  Synthetic oligonucleotide
gcccagtcatacgggaggctgctctgcactagagaaaggtactcttccctactag

SEQ ID NO: 409787 - DNA, 55 bp, Artificial
  Synthetic oligonucleotide
gcccagtcattgagtgatttgttcttctcttcgctgagatactctttatatgatg

SEQ ID NO: 409788 - DNA, 60 bp, Artificial
  Synthetic oligonucleotide
gcccagtctgtcataacagacggcacttgactaaagtcggaaggcttgtaatatgacgtg

SEQ ID NO: 409789 - DNA, 57 bp, Artificial
  Synthetic oligonucleotide
gcccagtgacagcccaagcccacaaagagaccaaacctaaagatgagccgggggcaa

SEQ ID NO: 409790 - DNA, 55 bp, Artificial
  Synthetic oligonucleotide
gcccagtgacataatccaatgttatttgggtcgtaatgagtaattccgggatggg

SEQ ID NO: 409791 - DNA, 58 bp, Artificial
  Synthetic oligonucleotide
gcccagtgctaaggggagtagggagaggcattggtcacaaagggtcgagaggatacgc

SEQ ID NO: 409792 - DNA, 55 bp, Artificial
  Synthetic oligonucleotide
gcccagtgctccatgctacaattgttttgactaatacttactttacatgtcttac

SEQ ID NO: 409793 - DNA, 55 bp, Artificial
  Synthetic oligonucleotide
gcccagtggctcggaagggtagtctcagacatgggagcgagtaactccacagtgg

SEQ ID NO: 409794 - DNA, 55 bp, Artificial
  Synthetic oligonucleotide
gcccagtgtcagaccacacctgatgtgccactctgcggagagtgcagtctgcgat

SEQ ID NO: 409795 - DNA, 54 bp, Artificial
  Synthetic oligonucleotide
gcccagttacgaagctactgggccttatatgtgttttctaagtaaacgttagtc

SEQ ID NO: 409796 - DNA, 53 bp, Artificial
  Synthetic oligonucleotide
gcccagttattttgcccggcccactatccagaatccgaatatgactgttcacg

SEQ ID NO: 409797 - DNA, 55 bp, Artificial
  Synthetic oligonucleotide
gcccataaacctttgtccaaaagtgaggtaaaagccttagtcacagaaattgcca

SEQ ID NO: 409798 - DNA, 56 bp, Artificial
  Synthetic oligonucleotide
gcccataatatcttcagtagtgtactctgtaagctcattctcgttacttaacttag

SEQ ID NO: 409799 - DNA, 55 bp, Artificial
  Synthetic oligonucleotide
gcccataatgattttcagtgacatgatagacccttcgctgatagctgcttacacc

SEQ ID NO: 409800 - DNA, 55 bp, Artificial
  Synthetic oligonucleotide
gcccatactcgattcgaaattcgcacgtcaagtgctcgtgtggcgttgtggcgag

SEQ ID NO: 409801 - DNA, 57 bp, Artificial
  Synthetic oligonucleotide
gcccatactctgggatcgggtccaactatgccaccaagaaacccgttgtgagacaag

SEQ ID NO: 409802 - DNA, 55 bp, Artificial
  Synthetic oligonucleotide
gcccatagaaggagcagacacgtattacgtagacggtgcagcccaccgagagtca

SEQ ID NO: 409803 - DNA, 55 bp, Artificial
  Synthetic oligonucleotide
gcccatagcatgttgaaagatgggcctatcaagaagtgtaagtggtgtggctacg

SEQ ID NO: 409804 - DNA, 59 bp, Artificial
  Synthetic oligonucleotide
gcccataggcttgatatcccggaaatcgccacacgttttggtggcgctttctaggcata

SEQ ID NO: 409805 - DNA, 55 bp, Artificial
  Synthetic oligonucleotide
gcccataggtgtaggatgatatagagcgtgcaggatcagcaacgcagtgcggatt

SEQ ID NO: 409806 - DNA, 56 bp, Artificial
  Synthetic oligonucleotide
gcccatataggtttggacttgtaaacctgattaggtacctactgccactaaagtca

SEQ ID NO: 409807 - DNA, 56 bp, Artificial
  Synthetic oligonucleotide
gcccatatcgaaagggttccgctacaagggaccaggagctccgaagaaggagccaa

SEQ ID NO: 409808 - DNA, 55 bp, Artificial
  Synthetic oligonucleotide
gcccatatgagcagccaatccatattgcgtcataggtcgagcatgaggcactttc

SEQ ID NO: 409809 - DNA, 54 bp, Artificial
  Synthetic oligonucleotide
gcccatatgggcccgtgactggtgggttgctttcgcagctcgctattgagcccc

SEQ ID NO: 409810 - DNA, 55 bp, Artificial
  Synthetic oligonucleotide
gcccatattaagcgtactggcatgcaaacggtcggcgcagcagaccaaacatgac

SEQ ID NO: 409811 - DNA, 59 bp, Artificial
  Synthetic oligonucleotide
gcccatcaacatgctgaagaatggacaggcccggcaatcccccgattatgatccaaata

SEQ ID NO: 409812 - DNA, 55 bp, Artificial
  Synthetic oligonucleotide
gcccatcaacgcactaagcaactcgttactgcgtcaccacaatcttgtgtattca

SEQ ID NO: 409813 - DNA, 60 bp, Artificial
  Synthetic oligonucleotide
gcccatcaagtaaagcccatgatgagcctaaaatgaagttgcaacgcatacatgaaaatc

SEQ ID NO: 409814 - DNA, 59 bp, Artificial
  Synthetic oligonucleotide
gcccatcagacaacccccaccaattctccgccgatgaaataatactggggaatcatctg

SEQ ID NO: 409815 - DNA, 55 bp, Artificial
  Synthetic oligonucleotide
gcccatcaggcacaattgcaggttttccagagcgtgaaggtgaagtacggcaaag

SEQ ID NO: 409816 - DNA, 60 bp, Artificial
  Synthetic oligonucleotide
gcccatcatatccaattgatgagcaagttggctgttgaatgcaaatcagcctcagatgtt

SEQ ID NO: 409817 - DNA, 55 bp, Artificial
  Synthetic oligonucleotide
gcccatcattctcacctacgggcgtctcagcgcctcaacgcatgagtgcacctcg

SEQ ID NO: 409818 - DNA, 58 bp, Artificial
  Synthetic oligonucleotide
gcccatccactaatcgtgactacttgaatcaaagacagggggcgcttgcaaaaatgga

SEQ ID NO: 409819 - DNA, 55 bp, Artificial
  Synthetic oligonucleotide
gcccatcgaggctactcacaggctcccttccctccacccgtccatttacaccctc

SEQ ID NO: 409820 - DNA, 55 bp, Artificial
  Synthetic oligonucleotide
gcccatctgacgtaccagaaagaggtcctcaagtaggattagtatcacagctttc

SEQ ID NO: 409821 - DNA, 52 bp, Artificial
  Synthetic oligonucleotide
gcccatcttcgtgaagttctctgcaaatcttgatgaacttcttgttaactgg

SEQ ID NO: 409822 - DNA, 54 bp, Artificial
  Synthetic oligonucleotide
gcccatgaactcatctcgtctggaacgttagtaaaggaggagagttgaaacgga

SEQ ID NO: 409823 - DNA, 55 bp, Artificial
  Synthetic oligonucleotide
gcccatgacacaggcgctggattggaacggcacaaggtattgggcaccaggctcc

SEQ ID NO: 409824 - DNA, 60 bp, Artificial
  Synthetic oligonucleotide
gcccatgactcgcctggtaataattctattgggcttggtagcccaattcttgccattgag

SEQ ID NO: 409825 - DNA, 55 bp, Artificial
  Synthetic oligonucleotide
gcccatgagaattgaaccctgacatctgcctgagagtattttcttatgtgggtct

SEQ ID NO: 409826 - DNA, 56 bp, Artificial
  Synthetic oligonucleotide
gcccatgatacgtacccttgttcgttcaagggtcgaaggaaattgaagtgcaatcg

SEQ ID NO: 409827 - DNA, 55 bp, Artificial
  Synthetic oligonucleotide
gcccatgattctcctggtcttaattccagtggagtctttaacccaacccttgaca

SEQ ID NO: 409828 - DNA, 54 bp, Artificial
  Synthetic oligonucleotide
gcccatggactgttggtataaccaaatttaaaggcaggtggaacgactttctac

SEQ ID NO: 409829 - DNA, 50 bp, Artificial
  Synthetic oligonucleotide
gcccatggcactaccgatcttgtctgtactatcccaccaaccaactactc

SEQ ID NO: 409830 - DNA, 60 bp, Artificial
  Synthetic oligonucleotide
gcccatgggattgatcctaacatcaggactggggcaaggacaattactactggcagctcc

SEQ ID NO: 409831 - DNA, 55 bp, Artificial
  Synthetic oligonucleotide
gcccatgggcgggagcccgaggtgagtgaaaccaccgaggtctaggggcaactcg

SEQ ID NO: 409832 - DNA, 55 bp, Artificial
  Synthetic oligonucleotide
gcccatggggtagggtctgtaccgatgcacacagatttagagctggacttttccc

SEQ ID NO: 409833 - DNA, 60 bp, Artificial
  Synthetic oligonucleotide
gcccatgggtctccaacattttggatgggaagtcatgaagtaaatgggacatggatgatc

SEQ ID NO: 409834 - DNA, 56 bp, Artificial
  Synthetic oligonucleotide
gcccatggtaacgcgcagaaagagagtaccgaggaaaaatcacccgaggaaccagc

SEQ ID NO: 409835 - DNA, 55 bp, Artificial
  Synthetic oligonucleotide
gcccatggtatgaacttagttcacgacctttagacgaatattttacgaatgcgag

SEQ ID NO: 409836 - DNA, 60 bp, Artificial
  Synthetic oligonucleotide
gcccatgtacaggaagcccaggatctatcgcacaatgagaggcccagacatccccaaggg

SEQ ID NO: 409837 - DNA, 56 bp, Artificial
  Synthetic oligonucleotide
gcccatgtaggtaaggtcctttgtgtctccgatgtcacccgtggtaatgggcttac

SEQ ID NO: 409838 - DNA, 55 bp, Artificial
  Synthetic oligonucleotide
gcccatgtatcgcaagccgagactatacagaatgtacagaacccctgatgtgccc

SEQ ID NO: 409839 - DNA, 60 bp, Artificial
  Synthetic oligonucleotide
gcccatgtatcggaagcccatgatgtaccggatgtacagaagccctgatgttcccagggg

SEQ ID NO: 409840 - DNA, 55 bp, Artificial
  Synthetic oligonucleotide
gcccatgtctcaccgggttttaatgtaattgggctgtgaagcccatatcgagatg

SEQ ID NO: 409841 - DNA, 60 bp, Artificial
  Synthetic oligonucleotide
gcccatgtgcgtcagccagcatagcaccagtgttgtttggaagttcaagatcaattatgc

SEQ ID NO: 409842 - DNA, 60 bp, Artificial
  Synthetic oligonucleotide
gcccatgtgggtaaagtcatatgtgtttctgatgtcactcgtggtaatgggctcacacat

SEQ ID NO: 409843 - DNA, 55 bp, Artificial
  Synthetic oligonucleotide
gcccatgtttcgccaggtagaatggttatgggcctgtgggcgatgggtctttgac

SEQ ID NO: 409844 - DNA, 57 bp, Artificial
  Synthetic oligonucleotide
gcccatgtttctcctggttggaccgtgatgggcctatatctaggcccagtgtcataa

SEQ ID NO: 409845 - DNA, 59 bp, Artificial
  Synthetic oligonucleotide
gcccattaaaactctgtataaatgtacccgctttctgcattgtaaccagtcgctctgcg

SEQ ID NO: 409846 - DNA, 59 bp, Artificial
  Synthetic oligonucleotide
gcccattactttaatatcactaaacgaagcgactttgatatcatcatacttcggattta

SEQ ID NO: 409847 - DNA, 55 bp, Artificial
  Synthetic oligonucleotide
gcccattagatttcgctcgtcaagacgattccagcaagctctcgctcacctcgaa

SEQ ID NO: 409848 - DNA, 55 bp, Artificial
  Synthetic oligonucleotide
gcccattcattagccgttgagttatgtgtgccaggtttgcatggatgggcaactg

SEQ ID NO: 409849 - DNA, 60 bp, Artificial
  Synthetic oligonucleotide
gcccattctattgctattgagttgtgtgttccagggtttcatggctgggccacagctgca

SEQ ID NO: 409850 - DNA, 55 bp, Artificial
  Synthetic oligonucleotide
gcccattgacaacgtaatgggaatgatcgggatactacccgacatgaccccaagc

SEQ ID NO: 409851 - DNA, 60 bp, Artificial
  Synthetic oligonucleotide
gcccattgacaggaagtgctcagcatatagaggaatgttcctgttatcctcgatacccaa

SEQ ID NO: 409852 - DNA, 55 bp, Artificial
  Synthetic oligonucleotide
gcccattgatacaattgatcctgtggagcctacagcatcgtccgtggttcctctt

SEQ ID NO: 409853 - DNA, 55 bp, Artificial
  Synthetic oligonucleotide
gcccattgatgaccaattcgccgatgcactgacccacttgaattccatgtcaaag

SEQ ID NO: 409854 - DNA, 57 bp, Artificial
  Synthetic oligonucleotide
gcccattggagaatcacctaaaggagtggaagaaggttccattgggaaagtgtgcag

SEQ ID NO: 409855 - DNA, 56 bp, Artificial
  Synthetic oligonucleotide
gcccattggggcggtgggataggtaattgtggggcgaagcggagtacttgaagaga

SEQ ID NO: 409856 - DNA, 57 bp, Artificial
  Synthetic oligonucleotide
gcccattgtaccatgtgaaggacgtggctatttttcgaccatgccgctgcgtttatt

SEQ ID NO: 409857 - DNA, 57 bp, Artificial
  Synthetic oligonucleotide
gccccaaaaagaagtatggacagtcaatgacatccaaaagctagtaggtgtcctaaa

SEQ ID NO: 409858 - DNA, 53 bp, Artificial
  Synthetic oligonucleotide
gccccaaactatccccggaacatttcgaccgttccgcacaaccaaaatgtcaa

SEQ ID NO: 409859 - DNA, 55 bp, Artificial
  Synthetic oligonucleotide
gccccaaactatccgcggaacatatcaactgtcccgcacacccaaaacgttaagc

SEQ ID NO: 409860 - DNA, 60 bp, Artificial
  Synthetic oligonucleotide
gccccaaagcctctgccccatcttcagagggcatcatctctttatgagggaaccatgaga

SEQ ID NO: 409861 - DNA, 56 bp, Artificial
  Synthetic oligonucleotide
gccccaaatacgttggagtaaagagtctcaaactggcagtcggtccgaggaatgta

SEQ ID NO: 409862 - DNA, 55 bp, Artificial
  Synthetic oligonucleotide
gccccaaattaccactatgaggagtgttcctgttatcctgatgctagtgaggtaa

SEQ ID NO: 409863 - DNA, 55 bp, Artificial
  Synthetic oligonucleotide
gccccaacaaatgtgacatcttttagttcaggctagattgtcgtacaatggcgac

SEQ ID NO: 409864 - DNA, 60 bp, Artificial
  Synthetic oligonucleotide
gccccaacaacactggacgacgcctgctcagacgcagagtcctacagctcaatgcccccc

SEQ ID NO: 409865 - DNA, 60 bp, Artificial
  Synthetic oligonucleotide
gccccaaccagaatacgacttggagctgataacatcatgttcctccaatgtgtcggtcgc

SEQ ID NO: 409866 - DNA, 57 bp, Artificial
  Synthetic oligonucleotide
gccccaaggtgggtttgactgtctcggcaacacgccctatggtaagggcgccatgtc

SEQ ID NO: 409867 - DNA, 54 bp, Artificial
  Synthetic oligonucleotide
gccccaataacttgggaccctgccgaaggtattattggaaagtattgcctcaag

SEQ ID NO: 409868 - DNA, 55 bp, Artificial
  Synthetic oligonucleotide
gccccaatgaacaaagagcgtggaacatttgggaagttgaggactatgggtttgg

SEQ ID NO: 409869 - DNA, 60 bp, Artificial
  Synthetic oligonucleotide
gccccaatggacgcagagtataacgggctgcgcttagcttcacaccaaggattaccagtc

SEQ ID NO: 409870 - DNA, 55 bp, Artificial
  Synthetic oligonucleotide
gccccaatgggatttccagaagaagagggtagatggaggcagacaggagcaccac

SEQ ID NO: 409871 - DNA, 55 bp, Artificial
  Synthetic oligonucleotide
gccccaattcaaacctgcacaaccatgaggagctgcatggtaggcttgggcttac

SEQ ID NO: 409872 - DNA, 60 bp, Artificial
  Synthetic oligonucleotide
gccccaattgagcacattgcaagcatgaggaggaattatttcacggcggaggtgtctcat

SEQ ID NO: 409873 - DNA, 55 bp, Artificial
  Synthetic oligonucleotide
gccccaccagaagagagcttcaggttcagggaagagacaacaactccctctcaga

SEQ ID NO: 409874 - DNA, 55 bp, Artificial
  Synthetic oligonucleotide
gccccaccagaggagagcttcaggtttggggaagagacaacccctcccgctcaga

SEQ ID NO: 409875 - DNA, 54 bp, Artificial
  Synthetic oligonucleotide
gccccaccagtggttacactgacagggctagttttacgcgggtacaaagtccca

SEQ ID NO: 409876 - DNA, 53 bp, Artificial
  Synthetic oligonucleotide
gccccaccgaggcgctagacgtcaccgcggccaacatggagcccaccttctat

SEQ ID NO: 409877 - DNA, 55 bp, Artificial
  Synthetic oligonucleotide
gccccacctagttgcagaagtttgagtttttgtcacttttagtccctctgcttta

SEQ ID NO: 409878 - DNA, 59 bp, Artificial
  Synthetic oligonucleotide
gccccacgatgttgtttataacgtctataacgtctgagactccaagcttgtgatgccac

SEQ ID NO: 409879 - DNA, 51 bp, Artificial
  Synthetic oligonucleotide
gccccacgttgctcgcatgatagctccgttcccttgttactcggcgtccgt

SEQ ID NO: 409880 - DNA, 60 bp, Artificial
  Synthetic oligonucleotide
gccccactacaattgggtaattgcagcattgccggatggatcttaggaaacccagaatgc

SEQ ID NO: 409881 - DNA, 53 bp, Artificial
  Synthetic oligonucleotide
gccccactcgacctaaggggatgtaccatagaaggttggatcttagggaaccc

SEQ ID NO: 409882 - DNA, 56 bp, Artificial
  Synthetic oligonucleotide
gccccactcgacttaagaggatgtaccatggagggttggatgttggggaatcccca

SEQ ID NO: 409883 - DNA, 54 bp, Artificial
  Synthetic oligonucleotide
gccccactgaggctgacgccaccacctgatcacactagaaccctttttccacta

SEQ ID NO: 409884 - DNA, 55 bp, Artificial
  Synthetic oligonucleotide
gccccactggctctctggtctctttccaaaattcatggggttcacaaatggacct

SEQ ID NO: 409885 - DNA, 55 bp, Artificial
  Synthetic oligonucleotide
gccccacttctactcaagggagtgtggttatggcgatagtatacgatgcacaaga

SEQ ID NO: 409886 - DNA, 54 bp, Artificial
  Synthetic oligonucleotide
gccccacttgttggaacggtcaagatgggggcttagaagggttgagacagaagg

SEQ ID NO: 409887 - DNA, 59 bp, Artificial
  Synthetic oligonucleotide
gccccactttcgacgcaaacactgagtgctccatcgcttataaccacaccaggtacttc

SEQ ID NO: 409888 - DNA, 55 bp, Artificial
  Synthetic oligonucleotide
gccccagaagaccaacccggcatggcctagccaagacaacacagactccgatcca

SEQ ID NO: 409889 - DNA, 60 bp, Artificial
  Synthetic oligonucleotide
gccccagaagtggtggccctcttccaggctctatcagaaggcatgattccctatgacatc

SEQ ID NO: 409890 - DNA, 55 bp, Artificial
  Synthetic oligonucleotide
gccccagcatttatgtttcgcaaggagttagggacactggctttcaagcaagggg

SEQ ID NO: 409891 - DNA, 50 bp, Artificial
  Synthetic oligonucleotide
gccccagccgcataacgcgatcccacttgtattcgcggtcaggcacacga

SEQ ID NO: 409892 - DNA, 60 bp, Artificial
  Synthetic oligonucleotide
gccccaggcgtatctgatgcggagaagagagttttgacgcatgaggaatctatcacgggt

SEQ ID NO: 409893 - DNA, 53 bp, Artificial
  Synthetic oligonucleotide
gccccagggatcagtctgtgtcaatttgctacctctcttgttgtgttactagc

SEQ ID NO: 409894 - DNA, 55 bp, Artificial
  Synthetic oligonucleotide
gccccagtcatccaaggaatcaccgtctgcaagacagcttacacatccacagcta

SEQ ID NO: 409895 - DNA, 59 bp, Artificial
  Synthetic oligonucleotide
gccccagtggcttatccgactgtaccatctggttagatcagcctggactttacaagccc

SEQ ID NO: 409896 - DNA, 55 bp, Artificial
  Synthetic oligonucleotide
gccccagttcaacagtcttgggaagtgcttaatgaaaagggagacgttgtatggg

SEQ ID NO: 409897 - DNA, 58 bp, Artificial
  Synthetic oligonucleotide
gccccataatggggcagctggtctcattctttggggaaatcccatcaattgttaacga

SEQ ID NO: 409898 - DNA, 55 bp, Artificial
  Synthetic oligonucleotide
gccccatacatgaggtacattgagtacaagcttcaggctgcatcgcccagcaact

SEQ ID NO: 409899 - DNA, 55 bp, Artificial
  Synthetic oligonucleotide
gccccatacttaagctacatttggggttgtagtgacccaagccacaatgttggac

SEQ ID NO: 409900 - DNA, 56 bp, Artificial
  Synthetic oligonucleotide
gccccatccttacggactccccacccagtctgctggggcttacgccagagcgggaa

SEQ ID NO: 409901 - DNA, 55 bp, Artificial
  Synthetic oligonucleotide
gccccatcgacatagtaatgttggattccgctctctgggcccctacaattgaggc

SEQ ID NO: 409902 - DNA, 55 bp, Artificial
  Synthetic oligonucleotide
gccccatcgctgatgagcaaagttgccaaattcctgcgctctgaggaactcaaag

SEQ ID NO: 409903 - DNA, 55 bp, Artificial
  Synthetic oligonucleotide
gccccatcgcttccaccgcatctacttttactccatatgcagagggcttcgtcag

SEQ ID NO: 409904 - DNA, 58 bp, Artificial
  Synthetic oligonucleotide
gccccatctgtaatacctgtaagtgagggcacaaacctatccacagaggtccctgtta

SEQ ID NO: 409905 - DNA, 60 bp, Artificial
  Synthetic oligonucleotide
gccccattccagagaagtcactcaactgccccccctttcaatgcagtccttctgctcaca

SEQ ID NO: 409906 - DNA, 59 bp, Artificial
  Synthetic oligonucleotide
gccccattgacgacagaaaggagtgttgattgtgagacgcaaggttaagaacacaaagc

SEQ ID NO: 409907 - DNA, 55 bp, Artificial
  Synthetic oligonucleotide
gccccatttcatctgatactattgaaatgcaatccttggcctcctctacgcagcc

SEQ ID NO: 409908 - DNA, 59 bp, Artificial
  Synthetic oligonucleotide
gccccattttcctctagcgaccgaagatgacgtcagacatcactttacccctagtgagc

SEQ ID NO: 409909 - DNA, 51 bp, Artificial
  Synthetic oligonucleotide
gcccccaagtttacgtaggagtactaatagagttccaaacgtgactctcat

SEQ ID NO: 409910 - DNA, 51 bp, Artificial
  Synthetic oligonucleotide
gcccccaattaccactacgaggaatgttcttgttatcctgatgctagcgaa

SEQ ID NO: 409911 - DNA, 56 bp, Artificial
  Synthetic oligonucleotide
gcccccacagtgtcggacagtagggcgctcgctaggaggttccactttgacatgaa

SEQ ID NO: 409912 - DNA, 59 bp, Artificial
  Synthetic oligonucleotide
gcccccacccactacgtagcggagtctgacgcctcgctgcgtgtaacgcaggtgctaag

SEQ ID NO: 409913 - DNA, 60 bp, Artificial
  Synthetic oligonucleotide
gcccccacgctgctatgtgcgggtgtcccgacgctgtcgctcattttaatcatcttgctt

SEQ ID NO: 409914 - DNA, 59 bp, Artificial
  Synthetic oligonucleotide
gcccccactgtcctcgtcacaaacagaaggagatcatgggctcaaaggcccatgtttcg

SEQ ID NO: 409915 - DNA, 54 bp, Artificial
  Synthetic oligonucleotide
gcccccagaaacgacgatacggaagaaaagactctagtcctacagccaccccca

SEQ ID NO: 409916 - DNA, 56 bp, Artificial
  Synthetic oligonucleotide
gcccccatacagtcagttttggtgagaatagtgtaattgggtatgtggaattaccc

SEQ ID NO: 409917 - DNA, 58 bp, Artificial
  Synthetic oligonucleotide
gcccccatgaattccttgtagtgctttaaataatgcgggtctacgtcatcaatgacgt

SEQ ID NO: 409918 - DNA, 60 bp, Artificial
  Synthetic oligonucleotide
gcccccatgatgcccgtttggaagttgtaatgccaagtgtggtgaaaagtgcagctgcca

SEQ ID NO: 409919 - DNA, 48 bp, Artificial
  Synthetic oligonucleotide
gccccccaaaccccccgcgtcggatggggggggctgcgccccccccaa

SEQ ID NO: 409920 - DNA, 51 bp, Artificial
  Synthetic oligonucleotide
gccccccacgggggagcattgggggaaaggcacaccatgcacctcaggtgc

SEQ ID NO: 409921 - DNA, 59 bp, Artificial
  Synthetic oligonucleotide
gccccccactctgtatacagacaaatggtacttccaaaaagatatctgcaacctgccgc

SEQ ID NO: 409922 - DNA, 51 bp, Artificial
  Synthetic oligonucleotide
gccccccccggggaccccccacaaccagaatacgatttagagcttataaca

SEQ ID NO: 409923 - DNA, 49 bp, Artificial
  Synthetic oligonucleotide
gcccccccgtgagggggggtccggccggaatgtgcgaacccccttacaa

SEQ ID NO: 409924 - DNA, 51 bp, Artificial
  Synthetic oligonucleotide
gccccccgaagccacgtacttgggcccccaaacgtccaaccgtcagacgaa

SEQ ID NO: 409925 - DNA, 53 bp, Artificial
  Synthetic oligonucleotide
gccccccgagaggggaagagtgaggcttatcccggggaactcggcgtatcgtc

SEQ ID NO: 409926 - DNA, 53 bp, Artificial
  Synthetic oligonucleotide
gccccccgctttatggtggccccccccacgtggagatgtcccccactcagaac

SEQ ID NO: 409927 - DNA, 56 bp, Artificial
  Synthetic oligonucleotide
gccccccttgtcagtatctctgtgccgcgtcattggttccgtgaccgaaacaccct

SEQ ID NO: 409928 - DNA, 52 bp, Artificial
  Synthetic oligonucleotide
gcccccgaaaatattgaagtcaaacgacttggggataaccgaaaagtgttga

SEQ ID NO: 409929 - DNA, 57 bp, Artificial
  Synthetic oligonucleotide
gcccccgacaagctacccgggtgtgtggtcacattataccatggtgagactttcttg

SEQ ID NO: 409930 - DNA, 56 bp, Artificial
  Synthetic oligonucleotide
gcccccgccactaagaaatgtccgccactcagaactctccctcaaagcttatttag

SEQ ID NO: 409931 - DNA, 52 bp, Artificial
  Synthetic oligonucleotide
gcccccgcgacctgacccctcacagtgtcatggccgtcgccctagtggccga

SEQ ID NO: 409932 - DNA, 57 bp, Artificial
  Synthetic oligonucleotide
gccccctatcatcccacagaaactatagtccctcccaaggataaactcagcaacaaa

SEQ ID NO: 409933 - DNA, 50 bp, Artificial
  Synthetic oligonucleotide
gccccctcatccggtacgctggggacatgacagccgcgcctacttggtcc

SEQ ID NO: 409934 - DNA, 60 bp, Artificial
  Synthetic oligonucleotide
gccccctcctaagagattgagtccaacgaaaggatgggataggttggtcactcatgatga

SEQ ID NO: 409935 - DNA, 50 bp, Artificial
  Synthetic oligonucleotide
gccccctcgattagctcttgggtgcgcgaagctatgtcgtctagcgtcgg

SEQ ID NO: 409936 - DNA, 60 bp, Artificial
  Synthetic oligonucleotide
gccccctggaagtcattccctttgatcctgtgctgttcgcggagtgcattgctctcaacg

SEQ ID NO: 409937 - DNA, 60 bp, Artificial
  Synthetic oligonucleotide
gccccctgtaggagtgcaatagatgttgcgtgaagatatttcttcatttgccctaccaaa

SEQ ID NO: 409938 - DNA, 58 bp, Artificial
  Synthetic oligonucleotide
gcccccttactttctcatggatgcttctccgcgagttagcgtttagttgttcacctga

SEQ ID NO: 409939 - DNA, 54 bp, Artificial
  Synthetic oligonucleotide
gcccccttggtgagttttccatttcacctcgaaacaccccaggtgagatactgt

SEQ ID NO: 409940 - DNA, 60 bp, Artificial
  Synthetic oligonucleotide
gccccgaatgtacatattgttccagctcagacatgcctcaagtggaaacccaatgaggtg

SEQ ID NO: 409941 - DNA, 55 bp, Artificial
  Synthetic oligonucleotide
gccccgacagtgaaggatatctttcctcacccggatactctgacagcgttcccct

SEQ ID NO: 409942 - DNA, 54 bp, Artificial
  Synthetic oligonucleotide
gccccgaccatcggccttactgctggcactaccccccaaaaccttgcggtacta

SEQ ID NO: 409943 - DNA, 52 bp, Artificial
  Synthetic oligonucleotide
gccccgactgggcctccccggtttgccaacgccactcccccgactgttcgcg

SEQ ID NO: 409944 - DNA, 56 bp, Artificial
  Synthetic oligonucleotide
gccccgagggtacctcgacctagccatccactccgactcgtccatcgagtttgtta

SEQ ID NO: 409945 - DNA, 58 bp, Artificial
  Synthetic oligonucleotide
gccccgatgttcaatgctcgggttaaaccatgtgatatagagttggcggagagaaaaa

SEQ ID NO: 409946 - DNA, 53 bp, Artificial
  Synthetic oligonucleotide
gccccgattctgttggccgggttggtcaaggtcgcctcgagtttcttccggtc

SEQ ID NO: 409947 - DNA, 55 bp, Artificial
  Synthetic oligonucleotide
gccccgattgtcactgaaagcggatgcccaccgactgacttgcaaaagatggtca

SEQ ID NO: 409948 - DNA, 50 bp, Artificial
  Synthetic oligonucleotide
gccccgccctttgcaatagaaaagtcgttgggtccactcattggggagct

SEQ ID NO: 409949 - DNA, 60 bp, Artificial
  Synthetic oligonucleotide
gccccgcctctcagtgttgggaagaatcaaggacaacagtccgaggtgtcgaagcagcaa

SEQ ID NO: 409950 - DNA, 55 bp, Artificial
  Synthetic oligonucleotide
gccccgcgacgctcgagaaggtcagtcgagatcacgagccacataacggaagggt

SEQ ID NO: 409951 - DNA, 55 bp, Artificial
  Synthetic oligonucleotide
gccccgcgatcggtgtatcggttttagagcacgtgggtggtccctctaatacgtg

SEQ ID NO: 409952 - DNA, 60 bp, Artificial
  Synthetic oligonucleotide
gccccgcgctcttttcctttgcttcgtgtgacaggcacaatggcgtgtatgacattcagt

SEQ ID NO: 409953 - DNA, 56 bp, Artificial
  Synthetic oligonucleotide
gccccgcgggtaccctctgcagctccgtccgccggaggcttgccgtggagtcgcgt

SEQ ID NO: 409954 - DNA, 60 bp, Artificial
  Synthetic oligonucleotide
gccccgcttagccctctactcccacttcaggatggcaccaacactcatattatggctact

SEQ ID NO: 409955 - DNA, 55 bp, Artificial
  Synthetic oligonucleotide
gccccggcatctgctccttatgtgaaagagattatacattacttacagactctgg

SEQ ID NO: 409956 - DNA, 56 bp, Artificial
  Synthetic oligonucleotide
gccccggcattcatgtttcgcaaagaggtggggacattagctttcaaacaagggga

SEQ ID NO: 409957 - DNA, 53 bp, Artificial
  Synthetic oligonucleotide
gccccggcccatttcctacttgaaaggctcctcggggggcccactgttgtgcc

SEQ ID NO: 409958 - DNA, 58 bp, Artificial
  Synthetic oligonucleotide
gccccggcccttttgccgatgaggggtgttaattcagatgtggcgactgtgaatggcc

SEQ ID NO: 409959 - DNA, 55 bp, Artificial
  Synthetic oligonucleotide
gccccggctaggcctccaataattattgaacctgtggcccctactgaaccttcta

SEQ ID NO: 409960 - DNA, 55 bp, Artificial
  Synthetic oligonucleotide
gccccgggaccagatatgcatggactgtccttccacaggggtttaaaaacagccc

SEQ ID NO: 409961 - DNA, 54 bp, Artificial
  Synthetic oligonucleotide
gccccgggtcttgggacccttcctgatgttgtcaggtttgccgggcggctctca

SEQ ID NO: 409962 - DNA, 55 bp, Artificial
  Synthetic oligonucleotide
gccccggtacctgacaaaattccttcggaaagtgtctcagccgtgatgtggcggg

SEQ ID NO: 409963 - DNA, 55 bp, Artificial
  Synthetic oligonucleotide
gccccggtcatttcggcgttctcgaatctggcgcgtctgttcaacgcgccgttga

SEQ ID NO: 409964 - DNA, 49 bp, Artificial
  Synthetic oligonucleotide
gccccggtcgttaaggaaggaccttacgagggaccggtgaaaaagcctg

SEQ ID NO: 409965 - DNA, 57 bp, Artificial
  Synthetic oligonucleotide
gccccgtactactactacgttaaagttaccgaccacagtcatgatgaccacgactca

SEQ ID NO: 409966 - DNA, 54 bp, Artificial
  Synthetic oligonucleotide
gccccgtatgcttggagaccaggtttgtttgccgacttacggaatgtcgttaaa

SEQ ID NO: 409967 - DNA, 55 bp, Artificial
  Synthetic oligonucleotide
gccccgtcaaagtccatgagggggtcggtgaagaggtcagacttctttgcgaaag

SEQ ID NO: 409968 - DNA, 54 bp, Artificial
  Synthetic oligonucleotide
gccccgtcaaagtccattagggggtcatcgcctaggcccgtctgctgaaaggtt

SEQ ID NO: 409969 - DNA, 59 bp, Artificial
  Synthetic oligonucleotide
gccccgtcaagtacacagactgccccagattctcctactccgtctactccaatggcgga

SEQ ID NO: 409970 - DNA, 55 bp, Artificial
  Synthetic oligonucleotide
gccccgtctaaaagcgaaaagaaaggggatgcagttactgctgagagtatgtcgg

SEQ ID NO: 409971 - DNA, 60 bp, Artificial
  Synthetic oligonucleotide
gccccgtctatcacagagccccactagagctctttgaggaggggtctatgtgtgaaacaa

SEQ ID NO: 409972 - DNA, 55 bp, Artificial
  Synthetic oligonucleotide
gccccgtggaggtatgggccctaaagctgctgcctgggttaacaggcccatgtac

SEQ ID NO: 409973 - DNA, 60 bp, Artificial
  Synthetic oligonucleotide
gccccgtggattagatccactgctgtgagcggtgcaaccccagcaccctgattcgatggt

SEQ ID NO: 409974 - DNA, 56 bp, Artificial
  Synthetic oligonucleotide
gccccgttagaggcatacaacagaacactgaccactttactcaccccccttggtga

SEQ ID NO: 409975 - DNA, 55 bp, Artificial
  Synthetic oligonucleotide
gccccgttcggtggttgatctgattgatgttctggaaaacgaactgaaacgccag

SEQ ID NO: 409976 - DNA, 57 bp, Artificial
  Synthetic oligonucleotide
gcccctaagccagattctagggaatccctcgcatggcaaaccgccactaacccctca

SEQ ID NO: 409977 - DNA, 55 bp, Artificial
  Synthetic oligonucleotide
gcccctaatattgaacatggaacgctattagtgggttcttcgcgtgtatacaagc

SEQ ID NO: 409978 - DNA, 55 bp, Artificial
  Synthetic oligonucleotide
gcccctaatggaagaggggccatccatggctcacttaacgagctatacagtagcc

SEQ ID NO: 409979 - DNA, 55 bp, Artificial
  Synthetic oligonucleotide
gcccctacagcggagttgagtcctgctacttcagtatgtctagttcattcgcgcg

SEQ ID NO: 409980 - DNA, 49 bp, Artificial
  Synthetic oligonucleotide
gcccctaccttaactagtttcggcgggactactaacttggaaaaacttc

SEQ ID NO: 409981 - DNA, 55 bp, Artificial
  Synthetic oligonucleotide
gcccctacttcttcaagcggggcaacgagtgggtggtctttggagtccacgctgc

SEQ ID NO: 409982 - DNA, 50 bp, Artificial
  Synthetic oligonucleotide
gcccctaggcaagctcctttcctgcgtgagggggcacccggagtccgtag

SEQ ID NO: 409983 - DNA, 55 bp, Artificial
  Synthetic oligonucleotide
gcccctatagttctgaacctgaggactctgatgagaacaaccgtgtaaccctcct

SEQ ID NO: 409984 - DNA, 54 bp, Artificial
  Synthetic oligonucleotide
gcccctatcttatcaacacttccggaaactactgttgttagacgaagggaccca

SEQ ID NO: 409985 - DNA, 56 bp, Artificial
  Synthetic oligonucleotide
gcccctatcttatcaacacttccggaaactactgttgttagacgacgaggcaggac

SEQ ID NO: 409986 - DNA, 55 bp, Artificial
  Synthetic oligonucleotide
gcccctatgattttccttcgtatagagtgtatgttattctatccgcttctcgcgc

SEQ ID NO: 409987 - DNA, 54 bp, Artificial
  Synthetic oligonucleotide
gcccctcaaacgattataccttggggccttaatctgcctttgaatttgaaacga

SEQ ID NO: 409988 - DNA, 53 bp, Artificial
  Synthetic oligonucleotide
gcccctcaaagcttaattattcaatggtcccctatataaacttggtccccaag

SEQ ID NO: 409989 - DNA, 55 bp, Artificial
  Synthetic oligonucleotide
gcccctcacatctgtaatcaactcgctcaatcactgtttatatgttggctgtgca

SEQ ID NO: 409990 - DNA, 59 bp, Artificial
  Synthetic oligonucleotide
gcccctcacggttagcaccactagtgcggcacagattaaggtctacgccaacattgccc

SEQ ID NO: 409991 - DNA, 60 bp, Artificial
  Synthetic oligonucleotide
gcccctcattctgaaggattgcagtgtagctggatggcttcttggaaacccaatgtgtga

SEQ ID NO: 409992 - DNA, 55 bp, Artificial
  Synthetic oligonucleotide
gcccctcccatccaaggacaaattagctgttcatcaaatatcacagggttgctgt

SEQ ID NO: 409993 - DNA, 54 bp, Artificial
  Synthetic oligonucleotide
gcccctcccatccaaggactaattaaatgttcaacgaatattacaggggtgttg

SEQ ID NO: 409994 - DNA, 55 bp, Artificial
  Synthetic oligonucleotide
gcccctcccattagcggagtaattagctgtgtatcaaatattacagggctgctat

SEQ ID NO: 409995 - DNA, 51 bp, Artificial
  Synthetic oligonucleotide
gcccctcccccttcaaagaaagaagacattcccacaatttctacccctatt

SEQ ID NO: 409996 - DNA, 55 bp, Artificial
  Synthetic oligonucleotide
gcccctcccctcttagtaaccagtaatattgatgtgcatgcagaggaaaagtatt

SEQ ID NO: 409997 - DNA, 55 bp, Artificial
  Synthetic oligonucleotide
gcccctccgccgcattaggcctcgaattcgacacggtcactgtagtctcctccca

SEQ ID NO: 409998 - DNA, 55 bp, Artificial
  Synthetic oligonucleotide
gcccctcctatccaaggactaattagctgtttatcaaatattacagggctgctat

SEQ ID NO: 409999 - DNA, 53 bp, Artificial
  Synthetic oligonucleotide
gcccctcctcgcaaaccttccgaggttagcgcgttggggtcgcctaaactcaa

SEQ ID NO: 410000 - DNA, 55 bp, Artificial
  Synthetic oligonucleotide
gcccctctaatggtggcatacatgttagaaagggaattggtccgtaaaaccagat

SEQ ID NO: 410001 - DNA, 60 bp, Artificial
  Synthetic oligonucleotide
gcccctctcatgcccccagtatgtctatgggtctgtttcagtcacttgcgtgtggggttc

SEQ ID NO: 410002 - DNA, 54 bp, Artificial
  Synthetic oligonucleotide
gcccctctcgacctaaagggatgtaccattgagggttggatcttgggaaatccc

SEQ ID NO: 410003 - DNA, 57 bp, Artificial
  Synthetic oligonucleotide
gcccctctcgatctaagggaatgtaccatagagggttggatcttggggaatcctcag

SEQ ID NO: 410004 - DNA, 57 bp, Artificial
  Synthetic oligonucleotide
gcccctctcgatttaagagactgcaccatagaaggttggatattggggaatccccga

SEQ ID NO: 410005 - DNA, 55 bp, Artificial
  Synthetic oligonucleotide
gcccctctggaatgtacttcgccggtgctaaaaccggcatataccgcgctcaaac

SEQ ID NO: 410006 - DNA, 51 bp, Artificial
  Synthetic oligonucleotide
gcccctctggcctccagccggaaagcccttctctcgagcccctcggtctca

SEQ ID NO: 410007 - DNA, 60 bp, Artificial
  Synthetic oligonucleotide
gcccctgaatgcggctaatcccaaccacggagcaggtaatcgcaaaccagcaatcagcct

SEQ ID NO: 410008 - DNA, 59 bp, Artificial
  Synthetic oligonucleotide
gcccctgaatgcggctaatcctaactgcggagcacatacccttaatccaaagggcagtg

SEQ ID NO: 410009 - DNA, 56 bp, Artificial
  Synthetic oligonucleotide
gcccctgactttgagttcacgttcttagtgccaccaaccgtagaatcaaagactaa

SEQ ID NO: 410010 - DNA, 58 bp, Artificial
  Synthetic oligonucleotide
gcccctgagccgtcaccaatgccttatgttccatacccccggtcgacagaggtgtatg

SEQ ID NO: 410011 - DNA, 55 bp, Artificial
  Synthetic oligonucleotide
gcccctgaggctgccctcctgaacacgagcaatcccacagcctaccacaaggaac

SEQ ID NO: 410012 - DNA, 52 bp, Artificial
  Synthetic oligonucleotide
gcccctgattataatcccccgacggtgtcggggtgtgccctccctcctaagg

SEQ ID NO: 410013 - DNA, 55 bp, Artificial
  Synthetic oligonucleotide
gcccctgatttgaaaacagcatataagtcaatcctatcagggatgaatgctgcca

SEQ ID NO: 410014 - DNA, 55 bp, Artificial
  Synthetic oligonucleotide
gcccctgccaagtccccgctccggagttcttcactgagatagatggcgtgaggat

SEQ ID NO: 410015 - DNA, 60 bp, Artificial
  Synthetic oligonucleotide
gcccctgcgtcgagaccgaggcaactcggatatgtcgtgcgtctgcgatgacagtgacgg

SEQ ID NO: 410016 - DNA, 58 bp, Artificial
  Synthetic oligonucleotide
gcccctgctcctaccgctatggcactggcgtttaccaccaaagttcttctgatccacg

SEQ ID NO: 410017 - DNA, 55 bp, Artificial
  Synthetic oligonucleotide
gcccctggatattattgtgtaaggttctgacacgtgttatgttattaaactcgca

SEQ ID NO: 410018 - DNA, 56 bp, Artificial
  Synthetic oligonucleotide
gcccctggctcgggcatagattttacactgttcggtacctgccgtatgtactttaa

SEQ ID NO: 410019 - DNA, 55 bp, Artificial
  Synthetic oligonucleotide
gcccctgggccaagacaatgcagcactaacacttctaaccctccagagagccttc

SEQ ID NO: 410020 - DNA, 56 bp, Artificial
  Synthetic oligonucleotide
gcccctgggttaccgcactaactccctgcaagggaggagtgagtgcgggacatccc

SEQ ID NO: 410021 - DNA, 55 bp, Artificial
  Synthetic oligonucleotide
gcccctggtaatgacagccgggacaatgtatccatggattataagcaaacacaat

SEQ ID NO: 410022 - DNA, 58 bp, Artificial
  Synthetic oligonucleotide
gcccctggtggagagttcacagtatcccctagaaacgctccaggtgaaatactatgga

SEQ ID NO: 410023 - DNA, 57 bp, Artificial
  Synthetic oligonucleotide
gcccctgtaggttgatcaactattcagggtacttcctcttagtgcactgtccccctg

SEQ ID NO: 410024 - DNA, 55 bp, Artificial
  Synthetic oligonucleotide
gcccctgtccttttgtcctatatatacctcaagacacataaagcctctaggggac

SEQ ID NO: 410025 - DNA, 51 bp, Artificial
  Synthetic oligonucleotide
gcccctgttagctcaggctgttgagatgctcgcctctgcagatcgtttgcg

SEQ ID NO: 410026 - DNA, 55 bp, Artificial
  Synthetic oligonucleotide
gcccctgttgatgcaggcgtaggggctaatgacccctctgtcatcacacttactg

SEQ ID NO: 410027 - DNA, 55 bp, Artificial
  Synthetic oligonucleotide
gccccttaactgctgctagcccatcaggagaggaaatcgttaacgacactatgtc

SEQ ID NO: 410028 - DNA, 57 bp, Artificial
  Synthetic oligonucleotide
gccccttctcctaccgagacgagctagttagcacccaactgactgccaagtacacct

SEQ ID NO: 410029 - DNA, 55 bp, Artificial
  Synthetic oligonucleotide
gccccttgaatgttaggatggaagtgggctgatcttgttggggataccagatcga

SEQ ID NO: 410030 - DNA, 55 bp, Artificial
  Synthetic oligonucleotide
gccccttgagcagggcggtattattctgaagcagtggtgtacaacctcttgtgcc

SEQ ID NO: 410031 - DNA, 52 bp, Artificial
  Synthetic oligonucleotide
gccccttgcccatttcaaccagggctggggccctatcagctatgccaacgga

SEQ ID NO: 410032 - DNA, 55 bp, Artificial
  Synthetic oligonucleotide
gccccttgctactgggcttaaattaaataaacatcataggggcccaaagagatcc

SEQ ID NO: 410033 - DNA, 55 bp, Artificial
  Synthetic oligonucleotide
gccccttggttagggtcattctgactaacactgggagtcatccggtcaaacagcg

SEQ ID NO: 410034 - DNA, 55 bp, Artificial
  Synthetic oligonucleotide
gccccttgtctgttctctgatgggtctccccaaaaggccgcctatgtaatttggg

SEQ ID NO: 410035 - DNA, 52 bp, Artificial
  Synthetic oligonucleotide
gcccctttctccaatgagacttgcccgaattcggtgatactaacccccgggc

SEQ ID NO: 410036 - DNA, 55 bp, Artificial
  Synthetic oligonucleotide
gcccctttcttcgttgtaggcgccacacttgagtcggcacgctaacctgatcccg

SEQ ID NO: 410037 - DNA, 58 bp, Artificial
  Synthetic oligonucleotide
gcccctttgatggttgcatacatgctggaaagagagttggtccgcaaaacgaggttcc

SEQ ID NO: 410038 - DNA, 59 bp, Artificial
  Synthetic oligonucleotide
gccccttttacacaatgtggttaccctgctttaatgcccttgtatgcatgtatccaatc

SEQ ID NO: 410039 - DNA, 60 bp, Artificial
  Synthetic oligonucleotide
gcccgaaacatactgcggacacaagaatctgaatgcgtatgccacaacggtgtctgcccg

SEQ ID NO: 410040 - DNA, 60 bp, Artificial
  Synthetic oligonucleotide
gcccgaaacatattgagaacccaagagtctgagtgtgtgtgccacaatggagtatgtcca

SEQ ID NO: 410041 - DNA, 60 bp, Artificial
  Synthetic oligonucleotide
gcccgaaaccacacagactcaatcacatggcaatctgttcctgtggcttctataagcaac

SEQ ID NO: 410042 - DNA, 55 bp, Artificial
  Synthetic oligonucleotide
gcccgaaatgttttgcatgggttggctggaggaattaaggagctatcgctcccaa

SEQ ID NO: 410043 - DNA, 54 bp, Artificial
  Synthetic oligonucleotide
gcccgaacagggtaaaagcgtgggcatttccctagttcgggtagtctagtgctc

SEQ ID NO: 410044 - DNA, 55 bp, Artificial
  Synthetic oligonucleotide
gcccgaacatcagacaccaaaacagcaaaacaatgacttccaatactatgagact

SEQ ID NO: 410045 - DNA, 55 bp, Artificial
  Synthetic oligonucleotide
gcccgaactcaccgcaaaatccacccccgttgagcaatgcccagacctaccaccc

SEQ ID NO: 410046 - DNA, 53 bp, Artificial
  Synthetic oligonucleotide
gcccgaagattgagcctactatcatagctacaacattggagcatcgatttaaa

SEQ ID NO: 410047 - DNA, 60 bp, Artificial
  Synthetic oligonucleotide
gcccgaaggattataccaactggcagatcataccatactccggtggcccacgcattctca

SEQ ID NO: 410048 - DNA, 55 bp, Artificial
  Synthetic oligonucleotide
gcccgaatacagcatccggagttctacaaagactgctgacaccagtactacaagg

SEQ ID NO: 410049 - DNA, 53 bp, Artificial
  Synthetic oligonucleotide
gcccgaattctttacagaattggacggggtgcgcctacataggtttgcgcccc

SEQ ID NO: 410050 - DNA, 55 bp, Artificial
  Synthetic oligonucleotide
gcccgaccaagttgacttatacaacacgcgagcgacacacgcacaattcaaaacg

SEQ ID NO: 410051 - DNA, 53 bp, Artificial
  Synthetic oligonucleotide
gcccgacccctttcaacacttaaacagcttcgaacccatactcctggccgccc

SEQ ID NO: 410052 - DNA, 52 bp, Artificial
  Synthetic oligonucleotide
gcccgacctgtatacgggaaggaaagcaaacccgtgaccttagaactacctc

SEQ ID NO: 410053 - DNA, 54 bp, Artificial
  Synthetic oligonucleotide
gcccgacgttaacgggctgcaaccacacgcttgtaccgctttcccctgcgttaa

SEQ ID NO: 410054 - DNA, 55 bp, Artificial
  Synthetic oligonucleotide
gcccgactagcgatgagtggcggttacatcacgatgcgtatgatccggatacgga

SEQ ID NO: 410055 - DNA, 58 bp, Artificial
  Synthetic oligonucleotide
gcccgactctcaccacattaccggatctgacaagaccctgaaactttgcgtaacacca

SEQ ID NO: 410056 - DNA, 54 bp, Artificial
  Synthetic oligonucleotide
gcccgacttggttgatgatcgaaacaacgagcccccttagcgcgaacccgggac

SEQ ID NO: 410057 - DNA, 56 bp, Artificial
  Synthetic oligonucleotide
gcccgagacaaatgaagtcgtgaaatcttccaacggtgttatgaacgcaagtgtaa

SEQ ID NO: 410058 - DNA, 55 bp, Artificial
  Synthetic oligonucleotide
gcccgagagcaacacccggagttactacaaagactgctgacaaggacttctacag

SEQ ID NO: 410059 - DNA, 55 bp, Artificial
  Synthetic oligonucleotide
gcccgagaggatgcacgtgattcaaacgtgcgttccattcccatcatctctggtg

SEQ ID NO: 410060 - DNA, 55 bp, Artificial
  Synthetic oligonucleotide
gcccgagccgtgacctattggtcacttgcggcaaacctcgtgaccactgccatcc

SEQ ID NO: 410061 - DNA, 59 bp, Artificial
  Synthetic oligonucleotide
gcccgagcgatttgatttaaagtttagatctgctttgtttgatttatctaaagcagcca

SEQ ID NO: 410062 - DNA, 55 bp, Artificial
  Synthetic oligonucleotide
gcccgaggatccatatgctggctactcgttttggagtgtggacctgagtgagcgc

SEQ ID NO: 410063 - DNA, 60 bp, Artificial
  Synthetic oligonucleotide
gcccgagggaccatctacggagaacctcacgtatatgtacagtgtgatagatgcaccata

SEQ ID NO: 410064 - DNA, 57 bp, Artificial
  Synthetic oligonucleotide
gcccgagggcaggacctgggctcagcccgggtacccttggcccctctatggcaatga

SEQ ID NO: 410065 - DNA, 59 bp, Artificial
  Synthetic oligonucleotide
gcccgaggtaggcctatatatggcttagaagtgccggacgtgcttgagtcaatgagagg

SEQ ID NO: 410066 - DNA, 52 bp, Artificial
  Synthetic oligonucleotide
gcccgagtgccccgagtcgctgcatgaccttatgtgccagtgctggcggagg

SEQ ID NO: 410067 - DNA, 60 bp, Artificial
  Synthetic oligonucleotide
gcccgagtgtattaaagctgctaatgcctggaatgctagtgtcaccggtgagaagcgcgc

SEQ ID NO: 410068 - DNA, 55 bp, Artificial
  Synthetic oligonucleotide
gcccgatatgaccccaagtactgaaatgtcgctgaggggaataagagtcagcaag

SEQ ID NO: 410069 - DNA, 60 bp, Artificial
  Synthetic oligonucleotide
gcccgatccaatctgccaagctcccacctcgacgccagggttcaaaggcttgagtctgaa

SEQ ID NO: 410070 - DNA, 55 bp, Artificial
  Synthetic oligonucleotide
gcccgatcgtaaacagggcccctcgccctctaaacaaacgctcgcgctcgcgtaa

SEQ ID NO: 410071 - DNA, 55 bp, Artificial
  Synthetic oligonucleotide
gcccgatcgttacccgatgtatcagttcactaacctccgcgggaccaaatacacg

SEQ ID NO: 410072 - DNA, 55 bp, Artificial
  Synthetic oligonucleotide
gcccgatgatgcaatcgacacgtaaatatttcagtaatactttattcattcaccg

SEQ ID NO: 410073 - DNA, 60 bp, Artificial
  Synthetic oligonucleotide
gcccgatgcattcatcaacatgatactgtcaggtggagatagtgtagttatgcgtactta

SEQ ID NO: 410074 - DNA, 60 bp, Artificial
  Synthetic oligonucleotide
gcccgatggaaaaggttggtgacagaagcaggtgttttgccgttgtcatcaagaggcatg

SEQ ID NO: 410075 - DNA, 58 bp, Artificial
  Synthetic oligonucleotide
gcccgatgggctcccacactaccccataggcaagtgtatcctagcaaatgagacgggt

SEQ ID NO: 410076 - DNA, 55 bp, Artificial
  Synthetic oligonucleotide
gcccgattcacaccattcgatcatcagcgagatgaatttatagtttccccggttc

SEQ ID NO: 410077 - DNA, 60 bp, Artificial
  Synthetic oligonucleotide
gcccgatttcgtacgttcgggtggatgacgatatgtggagtggagatgtgaaccagcttc

SEQ ID NO: 410078 - DNA, 53 bp, Artificial
  Synthetic oligonucleotide
gcccgatttctggggcttgggtctttcttgtttcgccggagttctttttgcaa

SEQ ID NO: 410079 - DNA, 55 bp, Artificial
  Synthetic oligonucleotide
gcccgatttgccaggtgtgatgagatcaaattatgatatccgcgaattacggcaa

SEQ ID NO: 410080 - DNA, 59 bp, Artificial
  Synthetic oligonucleotide
gcccgcacgcatctctcggccagttccggagattgcaccgcgaggtgggcctccggaaa

SEQ ID NO: 410081 - DNA, 55 bp, Artificial
  Synthetic oligonucleotide
gcccgcagaattgcagctacgtccttccacaatcctacattccagccaccatttg

SEQ ID NO: 410082 - DNA, 55 bp, Artificial
  Synthetic oligonucleotide
gcccgcaggctaactttatagtctcactgtgtggtaagaaaaccacctgtcacgc

SEQ ID NO: 410083 - DNA, 55 bp, Artificial
  Synthetic oligonucleotide
gcccgcaggctatctgagttccatgtacgaaacgatgggcgctactcagttcagc

SEQ ID NO: 410084 - DNA, 59 bp, Artificial
  Synthetic oligonucleotide
gcccgcataggtaattgtggggtcctaatgacctggcccacattgtcttgcctgtacga

SEQ ID NO: 410085 - DNA, 55 bp, Artificial
  Synthetic oligonucleotide
gcccgccaaaatcgcttcccggcgcgttttagtgacgtcacgggcgccatcttgt

SEQ ID NO: 410086 - DNA, 58 bp, Artificial
  Synthetic oligonucleotide
gcccgccaagaagaggcctctaatctaatgacttcagttactgagggaggtgggtcat

SEQ ID NO: 410087 - DNA, 55 bp, Artificial
  Synthetic oligonucleotide
gcccgccagatgtaaatagggtgaccactagagaggaactcgaggcgttaccgtc

SEQ ID NO: 410088 - DNA, 51 bp, Artificial
  Synthetic oligonucleotide
gcccgcccattgaaggtcaccggcccagggtggattagtgcgtatgccatc

SEQ ID NO: 410089 - DNA, 52 bp, Artificial
  Synthetic oligonucleotide
gcccgccgcgccctttaaaagtgggccccacaaatggaccacgcgtcttttc

SEQ ID NO: 410090 - DNA, 55 bp, Artificial
  Synthetic oligonucleotide
gcccgccgctcgtcccacacgacgacgtgaggacagacgagtgaatttctcagac

SEQ ID NO: 410091 - DNA, 55 bp, Artificial
  Synthetic oligonucleotide
gcccgcctggtgctaaacctcccacaaccaggaaggaggctatgttaggtaccca

SEQ ID NO: 410092 - DNA, 60 bp, Artificial
  Synthetic oligonucleotide
gcccgcgatattggctaatgagtctggcagtgcaaattctgcgtatacatacgcttttgc

SEQ ID NO: 410093 - DNA, 54 bp, Artificial
  Synthetic oligonucleotide
gcccgcggtaccacgaaagttagcgcagtggtcccgttctgtgcacctacatct

SEQ ID NO: 410094 - DNA, 58 bp, Artificial
  Synthetic oligonucleotide
gcccgcgtcggcagaactgtcgatgcagagacgaggacgcacgggtagaggcaggtct

SEQ ID NO: 410095 - DNA, 56 bp, Artificial
  Synthetic oligonucleotide
gcccgctaaatacaacttgacattaacatgtgtaaggccaggaaataagacctacc

SEQ ID NO: 410096 - DNA, 55 bp, Artificial
  Synthetic oligonucleotide
gcccgctctgtgtgctatacattgcgtacggtccaattatttatcgttcgagagg

SEQ ID NO: 410097 - DNA, 55 bp, Artificial
  Synthetic oligonucleotide
gcccgctgtaattgtcagacaggggtgtattactgcagttcaaggagaaagcact

SEQ ID NO: 410098 - DNA, 55 bp, Artificial
  Synthetic oligonucleotide
gcccgcttctgtactcaatatatagccctaacctcactgacgtaaaggccaaggt

SEQ ID NO: 410099 - DNA, 55 bp, Artificial
  Synthetic oligonucleotide
gcccgcttctgttgggaaagggctcacatcggttgttttccgagtgggtcagtgc

SEQ ID NO: 410100 - DNA, 55 bp, Artificial
  Synthetic oligonucleotide
gcccgcttgtgtcgaatccgtgcggtcgcgtcgcatttgttgcgttattcctccg

SEQ ID NO: 410101 - DNA, 55 bp, Artificial
  Synthetic oligonucleotide
gcccggaaagccttgtctgtcggggttcgggctgtggataacccagaattggcaa

SEQ ID NO: 410102 - DNA, 55 bp, Artificial
  Synthetic oligonucleotide
gcccggaatgtcgcacccttggtctgcagggttgcgccttccagtctactattgc

SEQ ID NO: 410103 - DNA, 55 bp, Artificial
  Synthetic oligonucleotide
gcccggagtcggtgctagtcaatacctatcaatggatcatcaggaattgggagac

SEQ ID NO: 410104 - DNA, 55 bp, Artificial
  Synthetic oligonucleotide
gcccggataactcacgtcgacacagagtcctacttcattgtactcagtatagcct

SEQ ID NO: 410105 - DNA, 55 bp, Artificial
  Synthetic oligonucleotide
gcccggatgatgacacttatttgggtgaaggtgaccctattaaccctaagactca

SEQ ID NO: 410106 - DNA, 53 bp, Artificial
  Synthetic oligonucleotide
gcccggatttgaccctgatcataaacaggtatatttgttgctagttcaatcaa

SEQ ID NO: 410107 - DNA, 55 bp, Artificial
  Synthetic oligonucleotide
gcccggcaaaagcttagagatgcagagaaagcagtggaaatggacccagatgacg

SEQ ID NO: 410108 - DNA, 55 bp, Artificial
  Synthetic oligonucleotide
gcccggccaaacaattaagctcatggtgcgaaacatctcaaactttcccatcact

SEQ ID NO: 410109 - DNA, 55 bp, Artificial
  Synthetic oligonucleotide
gcccggcccaggcccaaacgcaaagctattctcgtccttttatgggaccaccaca

SEQ ID NO: 410110 - DNA, 60 bp, Artificial
  Synthetic oligonucleotide
gcccggcccgctaacacgtgcaattgcgcgcgccgcttatgtgtagtccactttgcacgg

SEQ ID NO: 410111 - DNA, 59 bp, Artificial
  Synthetic oligonucleotide
gcccggcctcacgtttagcaacgagttgatttcgcgcgacgaaggaatgcacacagact

SEQ ID NO: 410112 - DNA, 57 bp, Artificial
  Synthetic oligonucleotide
gcccgggcgcctttgacctctttgaggatgacaacgatgggtggtaccactctgagg

SEQ ID NO: 410113 - DNA, 55 bp, Artificial
  Synthetic oligonucleotide
gcccgggctggtcgttgcttggaggtcggggctcacccgaggtccattaatgata

SEQ ID NO: 410114 - DNA, 51 bp, Artificial
  Synthetic oligonucleotide
gcccggggcgtttctcatacccaacagccgaacagccgaggaacacacatg

SEQ ID NO: 410115 - DNA, 54 bp, Artificial
  Synthetic oligonucleotide
gcccggggttaattcctgaagcaattggacctactgaactaatacctttggaca

SEQ ID NO: 410116 - DNA, 55 bp, Artificial
  Synthetic oligonucleotide
gcccgggtcttgttccagtctcagaacaagttagaaatcgcgctttggagagcag

SEQ ID NO: 410117 - DNA, 55 bp, Artificial
  Synthetic oligonucleotide
gcccgggttccataaacacgagctcaatgtttcgccttatcatccgctacttgtc

SEQ ID NO: 410118 - DNA, 53 bp, Artificial
  Synthetic oligonucleotide
gcccggtaaggagctgtcgggggagtatcgggtacccgctggggtgactggtg

SEQ ID NO: 410119 - DNA, 55 bp, Artificial
  Synthetic oligonucleotide
gcccggtaatacaaatgccagggtcacccgtgtgaaggtgacggccccacatacc

SEQ ID NO: 410120 - DNA, 55 bp, Artificial
  Synthetic oligonucleotide
gcccggtctattagcactagacgtccctcgtgcgagcgaaccttcgggtggtcct

SEQ ID NO: 410121 - DNA, 52 bp, Artificial
  Synthetic oligonucleotide
gcccggtgcccgggcccctcccctgtgacgtcatttccttaaacgtcacttc

SEQ ID NO: 410122 - DNA, 56 bp, Artificial
  Synthetic oligonucleotide
gcccggtggtcctaccacgcgcgttagcgccccctcgcaacgtgcgcgtaactggc

SEQ ID NO: 410123 - DNA, 55 bp, Artificial
  Synthetic oligonucleotide
gcccggttccacgtcgaggcatatggtttgctctcgcttatggagctacgcagcg

SEQ ID NO: 410124 - DNA, 55 bp, Artificial
  Synthetic oligonucleotide
gcccgtaaagattcccaggccaactttgacgttccaatccgtatagtcgtctctc

SEQ ID NO: 410125 - DNA, 55 bp, Artificial
  Synthetic oligonucleotide
gcccgtaactcgatacaacattccgtatcgtacgcgttccattcaaacattcaac

SEQ ID NO: 410126 - DNA, 56 bp, Artificial
  Synthetic oligonucleotide
gcccgtaataaattgcggcctatcgaaggcaattacgttgagtcgcgacagtcccg

SEQ ID NO: 410127 - DNA, 57 bp, Artificial
  Synthetic oligonucleotide
gcccgtaattttgctgagcctagcgacacctactggaagcctagtagaaataaatgg

SEQ ID NO: 410128 - DNA, 51 bp, Artificial
  Synthetic oligonucleotide
gcccgtacaaattaagtttcctccattgttactcacatctaatattaatgt

SEQ ID NO: 410129 - DNA, 55 bp, Artificial
  Synthetic oligonucleotide
gcccgtacagacatcacttacgtgctaaatagtctcgtagttgtaaccacaagac

SEQ ID NO: 410130 - DNA, 51 bp, Artificial
  Synthetic oligonucleotide
gcccgtacgctctcctccggcttgatggactcgtttgggtcctcgtacacc

SEQ ID NO: 410131 - DNA, 58 bp, Artificial
  Synthetic oligonucleotide
gcccgtagatgtaccccccgcatacctgggtgtatggtgtcaaacgtgcagctaaggc

SEQ ID NO: 410132 - DNA, 60 bp, Artificial
  Synthetic oligonucleotide
gcccgtaggacattgtgtgactgagtgccagttgaacgaaggagtgatgaatacaagcaa

SEQ ID NO: 410133 - DNA, 52 bp, Artificial
  Synthetic oligonucleotide
gcccgtaggagagtcggtaaagtcccaacgaatacgtagcaacatgctagat

SEQ ID NO: 410134 - DNA, 59 bp, Artificial
  Synthetic oligonucleotide
gcccgtatcagaaccgtgtgcctgtcctcactgcccgaggcacacgaaaacagttatgg

SEQ ID NO: 410135 - DNA, 55 bp, Artificial
  Synthetic oligonucleotide
gcccgtcacgaccagtacgcataccccacccgttcgactcgatagttaggtcgtc

SEQ ID NO: 410136 - DNA, 55 bp, Artificial
  Synthetic oligonucleotide
gcccgtcagataatacaggctggggaagcattggtacagctcttatgagagccac

SEQ ID NO: 410137 - DNA, 55 bp, Artificial
  Synthetic oligonucleotide
gcccgtccaaactcattcgccgagtttctaaacaagacgtattcgagcgactctt

SEQ ID NO: 410138 - DNA, 55 bp, Artificial
  Synthetic oligonucleotide
gcccgtcctactatcaccctctaatactattcctatgggtctattcgggcgcgca

SEQ ID NO: 410139 - DNA, 60 bp, Artificial
  Synthetic oligonucleotide
gcccgtcgcagatatcctcgcatcaaaaggaacggcgctgaagtctccaacggtagagga

SEQ ID NO: 410140 - DNA, 55 bp, Artificial
  Synthetic oligonucleotide
gcccgtcgcctcgtatatttcagggtaagtagcgcgcatgttaatcaactcttta

SEQ ID NO: 410141 - DNA, 55 bp, Artificial
  Synthetic oligonucleotide
gcccgtcgtcctacgtggtcgctgcatgactggctgaccaatgtacttggtgtgc

SEQ ID NO: 410142 - DNA, 55 bp, Artificial
  Synthetic oligonucleotide
gcccgtcgttgaaggatcgttattatatccgccacgtgtgcaaacgtgttctgtc

SEQ ID NO: 410143 - DNA, 58 bp, Artificial
  Synthetic oligonucleotide
gcccgtctgttgtttgactctggtagctagagatccctcagaccattttagtcagtgt

SEQ ID NO: 410144 - DNA, 55 bp, Artificial
  Synthetic oligonucleotide
gcccgtgaaatcaatcaataccttcgccatgtggaggaatatgaactacagtttg

SEQ ID NO: 410145 - DNA, 54 bp, Artificial
  Synthetic oligonucleotide
gcccgtgacattaaacgtggaacgattccgaaaggataggcaacgagtgttacc

SEQ ID NO: 410146 - DNA, 55 bp, Artificial
  Synthetic oligonucleotide
gcccgtgacttgtacagaagtgggtcctggttctacacacgtggtggttctgctg

SEQ ID NO: 410147 - DNA, 57 bp, Artificial
  Synthetic oligonucleotide
gcccgtgataaggttcattgatttcctctcgtcaagacgaatccaacgggcccatgg

SEQ ID NO: 410148 - DNA, 55 bp, Artificial
  Synthetic oligonucleotide
gcccgtgataccaacggatcgagagggctttatctcgagttcgttggaggagcac

SEQ ID NO: 410149 - DNA, 55 bp, Artificial
  Synthetic oligonucleotide
gcccgtgatgtgttttggaaactcaacaacctaagcactaaagacgacgcatggc

SEQ ID NO: 410150 - DNA, 57 bp, Artificial
  Synthetic oligonucleotide
gcccgtgcacttggggaacttatcatgcaacttggaagggaatgcgtggaagaattt

SEQ ID NO: 410151 - DNA, 50 bp, Artificial
  Synthetic oligonucleotide
gcccgtgccaccacagggctgatcgcgcattatgcgttcgcgaaaaggta

SEQ ID NO: 410152 - DNA, 60 bp, Artificial
  Synthetic oligonucleotide
gcccgtgggacaatgtgtgactgaatgtcaactgaatgagggtgtaatgaatacaagcaa

SEQ ID NO: 410153 - DNA, 55 bp, Artificial
  Synthetic oligonucleotide
gcccgtggtattggacttacccatcgagttggcaaacgtttctgtgtcaagtcac

SEQ ID NO: 410154 - DNA, 55 bp, Artificial
  Synthetic oligonucleotide
gcccgtgtccttattaggacgattgcggaacagtacagcggcagttccttagcag

SEQ ID NO: 410155 - DNA, 57 bp, Artificial
  Synthetic oligonucleotide
gcccgttcttgggcatcgaaaggaatagctaatggctctgcccgctaacggcggtac

SEQ ID NO: 410156 - DNA, 52 bp, Artificial
  Synthetic oligonucleotide
gcccgtttcagagggccgcgtttgaatcgcattataagtactgtctccggtg

SEQ ID NO: 410157 - DNA, 60 bp, Artificial
  Synthetic oligonucleotide
gcccgtttggacgaatataaaccattgttgtattctgatttgctattcgctgaatcatac

SEQ ID NO: 410158 - DNA, 55 bp, Artificial
  Synthetic oligonucleotide
gcccgtttgtcctctaattccaggatctacaacaacgagtacgggaccttgcaag

SEQ ID NO: 410159 - DNA, 55 bp, Artificial
  Synthetic oligonucleotide
gccctaaaacgaaagtttgtaggtagtcccgcatcaagctcctgtgcgacatggg

SEQ ID NO: 410160 - DNA, 55 bp, Artificial
  Synthetic oligonucleotide
gccctaaactgatgagggagataatacatgaacagccatacatgctggtgatgag

SEQ ID NO: 410161 - DNA, 58 bp, Artificial
  Synthetic oligonucleotide
gccctaaactgccggagtaggctagtaagtcagctgcctatcttggcccttataatac

SEQ ID NO: 410162 - DNA, 60 bp, Artificial
  Synthetic oligonucleotide
gccctaaagtattggtggagcatcctgcaatattggagtcaggagctaaagaatagtgct

SEQ ID NO: 410163 - DNA, 55 bp, Artificial
  Synthetic oligonucleotide
gccctaaatgggaatggagacccgaataacatggatagggcagtcaagctataca

SEQ ID NO: 410164 - DNA, 58 bp, Artificial
  Synthetic oligonucleotide
gccctaaggaagttgatcctcagacacccaacattcaccgtgcatacactcggggtcc

SEQ ID NO: 410165 - DNA, 55 bp, Artificial
  Synthetic oligonucleotide
gccctaaggatgaaaagttgcctctgcgcaagatttatgacaccccaaagacgcg

SEQ ID NO: 410166 - DNA, 55 bp, Artificial
  Synthetic oligonucleotide
gccctaaggcagggcagccatctttagtagttcaatcctctctattaatcttcga

SEQ ID NO: 410167 - DNA, 55 bp, Artificial
  Synthetic oligonucleotide
gccctaagttgttgttgggcctatatatgaaaagcgtattgggctttagtgttta

SEQ ID NO: 410168 - DNA, 60 bp, Artificial
  Synthetic oligonucleotide
gccctaataaacttaggtgccctgttatgtcatgggggatacatgtttgactgtcagaca

SEQ ID NO: 410169 - DNA, 59 bp, Artificial
  Synthetic oligonucleotide
gccctaatagacactatccgtcgagacttgcaaggttacaagctgaggctagggatccc

SEQ ID NO: 410170 - DNA, 55 bp, Artificial
  Synthetic oligonucleotide
gccctaatccggtgagccctcaagagaagccactcgataataggtgagtctagga

SEQ ID NO: 410171 - DNA, 53 bp, Artificial
  Synthetic oligonucleotide
gccctaattgtgggttcaaattaggaggtgttgtggctggtgtattagctggt

SEQ ID NO: 410172 - DNA, 50 bp, Artificial
  Synthetic oligonucleotide
gccctaattttaaaggttaaacatgtgggatcctttacttaacgatttcc

SEQ ID NO: 410173 - DNA, 55 bp, Artificial
  Synthetic oligonucleotide
gccctacaacagatgcttctaccaaatacagcaaatgatgtagtgtgtgcaatct

SEQ ID NO: 410174 - DNA, 53 bp, Artificial
  Synthetic oligonucleotide
gccctaccacgcagtggacatgtctaagtttgccttcatagcccctgggagtg

SEQ ID NO: 410175 - DNA, 58 bp, Artificial
  Synthetic oligonucleotide
gccctaccaggacgacgatacagtacggctgacatccagggcctaaggtggaacgtca

SEQ ID NO: 410176 - DNA, 53 bp, Artificial
  Synthetic oligonucleotide
gccctaccagtattctggacataagacaaggaccaaaggaaccctttagagat

SEQ ID NO: 410177 - DNA, 54 bp, Artificial
  Synthetic oligonucleotide
gccctaccctgtgtcccctgccctaccctgtgtcctactttgttacactactaa

SEQ ID NO: 410178 - DNA, 53 bp, Artificial
  Synthetic oligonucleotide
gccctaccgttaaccggcagtctacttcgggaagcccagtaactacattgaaa

SEQ ID NO: 410179 - DNA, 60 bp, Artificial
  Synthetic oligonucleotide
gccctacgtcatgatacttcgagctctacctctttagcaccgcgcgttgtgccacgtcat

SEQ ID NO: 410180 - DNA, 58 bp, Artificial
  Synthetic oligonucleotide
gccctactattccgaacccaactggcaaattgatggctgcactggtagatccaaacat

SEQ ID NO: 410181 - DNA, 56 bp, Artificial
  Synthetic oligonucleotide
gccctactcggtacggcggttacttggctggttgctcacaaccatggtccttgggc

SEQ ID NO: 410182 - DNA, 59 bp, Artificial
  Synthetic oligonucleotide
gccctactgtcgtcacataccggcgacatgaaaactagcggtgcctacattcccgattc

SEQ ID NO: 410183 - DNA, 55 bp, Artificial
  Synthetic oligonucleotide
gccctagaaagcatagtaatatggggaaaggttcctaaatctaggctacccatcc

SEQ ID NO: 410184 - DNA, 55 bp, Artificial
  Synthetic oligonucleotide
gccctagacaaccaaactaacccaactgcctatcggaagcggcccatcacccgct

SEQ ID NO: 410185 - DNA, 55 bp, Artificial
  Synthetic oligonucleotide
gccctagaggatatggaggcatacaagcgttcacttgttttgtctacatgcttct

SEQ ID NO: 410186 - DNA, 54 bp, Artificial
  Synthetic oligonucleotide
gccctagaggtgaacttttacggccctagagataagataaacgtgtggccggta

SEQ ID NO: 410187 - DNA, 60 bp, Artificial
  Synthetic oligonucleotide
gccctagattgtcagatctacggggcctgttactccattgagccacttgacctacctcag

SEQ ID NO: 410188 - DNA, 51 bp, Artificial
  Synthetic oligonucleotide
gccctagcgtctcgtacctatgcgcggtcgtactattcagaaaacgagcaa

SEQ ID NO: 410189 - DNA, 59 bp, Artificial
  Synthetic oligonucleotide
gccctaggcagaccaaaatgcatggggaacacaccctccgcaaaagtctcaatactcca

SEQ ID NO: 410190 - DNA, 55 bp, Artificial
  Synthetic oligonucleotide
gccctaggtgaagaccaagggccacagagggagccacacaatgaatggacactag

SEQ ID NO: 410191 - DNA, 60 bp, Artificial
  Synthetic oligonucleotide
gccctagtgcgcaacccactctcgcggaattccacgcatgaaatgtactgggtgtcaaat

SEQ ID NO: 410192 - DNA, 53 bp, Artificial
  Synthetic oligonucleotide
gccctagtggttcacacaaacgccggcaaagggaatcggtaattagaagtccg

SEQ ID NO: 410193 - DNA, 53 bp, Artificial
  Synthetic oligonucleotide
gccctagtggttctcataaacgccgacaaagggaaagtgtaattcgaagtccg

SEQ ID NO: 410194 - DNA, 58 bp, Artificial
  Synthetic oligonucleotide
gccctataaaagctgaaccgcttaggttgttgcacccaagcacttctaggactcagga

SEQ ID NO: 410195 - DNA, 55 bp, Artificial
  Synthetic oligonucleotide
gccctatagttgttggagtgcttaatacgagcatctttgagcaggcagttgagtc

SEQ ID NO: 410196 - DNA, 55 bp, Artificial
  Synthetic oligonucleotide
gccctatcaatataccgagctatagaggaaggagcatccaagctggggttgatta

SEQ ID NO: 410197 - DNA, 60 bp, Artificial
  Synthetic oligonucleotide
gccctatcaatgcaacttgagccacaccaaggtcttgctagagcccgaaagcatgtccaa

SEQ ID NO: 410198 - DNA, 60 bp, Artificial
  Synthetic oligonucleotide
gccctatcagtcatgccagcggaagtggccccgacgaacgcccttactgctggcactacc

SEQ ID NO: 410199 - DNA, 55 bp, Artificial
  Synthetic oligonucleotide
gccctatctaagttgaagcacgccggttgattgtactgaatggtcgtgtccgacg

SEQ ID NO: 410200 - DNA, 55 bp, Artificial
  Synthetic oligonucleotide
gccctatgccatcttggatctccgcaccaacacagaaattgaccttgtggttcca

SEQ ID NO: 410201 - DNA, 60 bp, Artificial
  Synthetic oligonucleotide
gccctatgcttctgaaccttggacattaccagaagtcagtgcagaattgattaacacgcc

SEQ ID NO: 410202 - DNA, 55 bp, Artificial
  Synthetic oligonucleotide
gccctatgtaaggttgacaccgctctactgaaatttgtcgattacaaaggcacct

SEQ ID NO: 410203 - DNA, 56 bp, Artificial
  Synthetic oligonucleotide
gccctattattgtacatggcatgtactcatgcctcaaaccctgtatatgcaacgct

SEQ ID NO: 410204 - DNA, 58 bp, Artificial
  Synthetic oligonucleotide
gccctattggtctcatatccaccttgactaacggtatctgatagtcctcaaaagggac

SEQ ID NO: 410205 - DNA, 60 bp, Artificial
  Synthetic oligonucleotide
gccctatttgtcctgcgattcccaaggctgcaggatgtttgctctaagccaaggcacaac

SEQ ID NO: 410206 - DNA, 58 bp, Artificial
  Synthetic oligonucleotide
gccctattttcctaaagaaagaaacgtatcatatgtaaatgctgtatcattggtaaga

SEQ ID NO: 410207 - DNA, 56 bp, Artificial
  Synthetic oligonucleotide
gccctcaaatatctgtggaatctcctgaggttttggggccaggaactaaagaagag

SEQ ID NO: 410208 - DNA, 59 bp, Artificial
  Synthetic oligonucleotide
gccctcaaatattgggggaatctcctccagtattggagccaggaactacagaatagtgc

SEQ ID NO: 410209 - DNA, 59 bp, Artificial
  Synthetic oligonucleotide
gccctcaaatattgttggaatctcctacagtattggattcaggaactaaggaatagtgc

SEQ ID NO: 410210 - DNA, 55 bp, Artificial
  Synthetic oligonucleotide
gccctcaagaggcgcgtccaccttcggatcaacgtcacctccaatggcgtgaggt

SEQ ID NO: 410211 - DNA, 50 bp, Artificial
  Synthetic oligonucleotide
gccctcactcggggcatacattcgtgtgtgtctgtcgtggcacacactga

SEQ ID NO: 410212 - DNA, 58 bp, Artificial
  Synthetic oligonucleotide
gccctcagagtaggcggtacgttcgaagctatgggttgttgcgtgagtgccgcaccat

SEQ ID NO: 410213 - DNA, 60 bp, Artificial
  Synthetic oligonucleotide
gccctcagagtagtcaatgagcacaacccagcacggattacatcgcgcatgagggtgtac

SEQ ID NO: 410214 - DNA, 60 bp, Artificial
  Synthetic oligonucleotide
gccctcagcagagttcaggagaacagccctacccagtctctatggtcgctacaactgcaa

SEQ ID NO: 410215 - DNA, 60 bp, Artificial
  Synthetic oligonucleotide
gccctcagccaaggcaccacactaaggggtcgacatgcaaatgggaccatacatgacaga

SEQ ID NO: 410216 - DNA, 60 bp, Artificial
  Synthetic oligonucleotide
gccctcagcccttcattggcgaagtcaagggaagcaatgttggtggatgtcatcatgtaa

SEQ ID NO: 410217 - DNA, 59 bp, Artificial
  Synthetic oligonucleotide
gccctcaggtacactgtctaagatcatggacactacagagggtgtacacaagccgcttg

SEQ ID NO: 410218 - DNA, 55 bp, Artificial
  Synthetic oligonucleotide
gccctcagtgatgttagcttgccaaggcgcttcactcgaaggcagctggagtaca

SEQ ID NO: 410219 - DNA, 57 bp, Artificial
  Synthetic oligonucleotide
gccctcatacagtcaattttggggaaaacagtgtggtcgggtatgtagagctaccac

SEQ ID NO: 410220 - DNA, 54 bp, Artificial
  Synthetic oligonucleotide
gccctcatagaagttcggttttacacactggttttgacccagtaactcgcggtc

SEQ ID NO: 410221 - DNA, 55 bp, Artificial
  Synthetic oligonucleotide
gccctcatcaggtcttcaatgtaacctggagggttaccaacttaatgacaggaca

SEQ ID NO: 410222 - DNA, 55 bp, Artificial
  Synthetic oligonucleotide
gccctcatcattggcggcgcctagaagtgtaccgatccagggctacatacctccc

SEQ ID NO: 410223 - DNA, 60 bp, Artificial
  Synthetic oligonucleotide
gccctcatccaggcagatctaggacaaatcaaggcgcaggatgatgctctgtacaatcag

SEQ ID NO: 410224 - DNA, 55 bp, Artificial
  Synthetic oligonucleotide
gccctcatgacacagcgggacttggtgaccgtgcactatggactcatattcttcc

SEQ ID NO: 410225 - DNA, 55 bp, Artificial
  Synthetic oligonucleotide
gccctccactagagcttaagcataaacctatagaagacggggatatgatggatat

SEQ ID NO: 410226 - DNA, 54 bp, Artificial
  Synthetic oligonucleotide
gccctcccgggacacaaggcgagtggtgacgtgaactcggagcccgccaaaccc

SEQ ID NO: 410227 - DNA, 55 bp, Artificial
  Synthetic oligonucleotide
gccctccctgcagcaagtcatgagagaccagctgaaacccttcacagagcccagg

SEQ ID NO: 410228 - DNA, 55 bp, Artificial
  Synthetic oligonucleotide
gccctccctggcgcattgcattgtgggcagaatgttgcttgggcgctttgctgcc

SEQ ID NO: 410229 - DNA, 55 bp, Artificial
  Synthetic oligonucleotide
gccctccgctataattcttgcgtagtcaatcaaatctccgcttcgttcctttcct

SEQ ID NO: 410230 - DNA, 55 bp, Artificial
  Synthetic oligonucleotide
gccctccgcttgtgtgaactcgattgtctagacgcctttccccgtacaggtctga

SEQ ID NO: 410231 - DNA, 60 bp, Artificial
  Synthetic oligonucleotide
gccctccggtcaaggagtgcgctgtgacttgcaggtacgataaagatgctgacatcaacg

SEQ ID NO: 410232 - DNA, 58 bp, Artificial
  Synthetic oligonucleotide
gccctcctagtagccctgttttcatacgtgggctaccaagcgttgtctaagaggcaca

SEQ ID NO: 410233 - DNA, 53 bp, Artificial
  Synthetic oligonucleotide
gccctcctctcctcgtcggagaatactcccttgttactcttcttccccggacc

SEQ ID NO: 410234 - DNA, 55 bp, Artificial
  Synthetic oligonucleotide
gccctcctgaggctaaatccaccgaggttgttcaatttgcaattgatctcatagg

SEQ ID NO: 410235 - DNA, 54 bp, Artificial
  Synthetic oligonucleotide
gccctcctttcaattagaaaacttgaggaagagttgagccgaggtccaataggg

SEQ ID NO: 410236 - DNA, 60 bp, Artificial
  Synthetic oligonucleotide
gccctcgaactggatgagcacgtggagatgaggttccccattctcgtgaagctctctgca

SEQ ID NO: 410237 - DNA, 55 bp, Artificial
  Synthetic oligonucleotide
gccctcgatgacgatactattaggtctccatggtcgcgcagcggaacccatcacg

SEQ ID NO: 410238 - DNA, 55 bp, Artificial
  Synthetic oligonucleotide
gccctcgcagcgcctgagactggggtttcggcaaccactgagccagagcaaatga

SEQ ID NO: 410239 - DNA, 49 bp, Artificial
  Synthetic oligonucleotide
gccctcgccccgggggggccccccccgggatcgggggagtggtcctgca

SEQ ID NO: 410240 - DNA, 55 bp, Artificial
  Synthetic oligonucleotide
gccctcgcgggcctccgtaggcgcgttttaatgacgtcacggcagccattttgac

SEQ ID NO: 410241 - DNA, 55 bp, Artificial
  Synthetic oligonucleotide
gccctcgctctggtcaacttctgtttcgactcgggctcttccgcaaccacccgct

SEQ ID NO: 410242 - DNA, 60 bp, Artificial
  Synthetic oligonucleotide
gccctcgtccgataggaccctgaagacctccgagaacagcctcaccaggctgctgacgta

SEQ ID NO: 410243 - DNA, 55 bp, Artificial
  Synthetic oligonucleotide
gccctcgtcgctttcaaaatcatgagcggcgagatgccatccgcagaagacatgg

SEQ ID NO: 410244 - DNA, 55 bp, Artificial
  Synthetic oligonucleotide
gccctctacagggcactcaacattccgcaagatattgccgctcgagcagcccggc

SEQ ID NO: 410245 - DNA, 55 bp, Artificial
  Synthetic oligonucleotide
gccctctacggcgactgttaagaatgaccagcgtgatcgctttcaagtcctacgg

SEQ ID NO: 410246 - DNA, 55 bp, Artificial
  Synthetic oligonucleotide
gccctctatggaaaactcttgtgttatcgcatcctcaatcacaacctccctaatg

SEQ ID NO: 410247 - DNA, 60 bp, Artificial
  Synthetic oligonucleotide
gccctctcaaattacctgatgggcctccctgctctcagcgatcaaaattcttgctgatgg

SEQ ID NO: 410248 - DNA, 60 bp, Artificial
  Synthetic oligonucleotide
gccctctcagaagcggtcaccaatcgaggtatggctattcctcgcacgcgccttggcttc

SEQ ID NO: 410249 - DNA, 60 bp, Artificial
  Synthetic oligonucleotide
gccctctcagattacctgatgggcctccttgttctcaacggtcgaaattcttgctgatgg

SEQ ID NO: 410250 - DNA, 59 bp, Artificial
  Synthetic oligonucleotide
gccctctcgtgtgtggaaaggccatacaattcattgacagaaggacgcaggttaggtat

SEQ ID NO: 410251 - DNA, 57 bp, Artificial
  Synthetic oligonucleotide
gccctctgatttgtggcaaagccttaagcttggttgacagacgtacaaatgttaggt

SEQ ID NO: 410252 - DNA, 55 bp, Artificial
  Synthetic oligonucleotide
gccctctgatttgtggtaaagctctcagcttagttgataaacacactaatgtaag

SEQ ID NO: 410253 - DNA, 60 bp, Artificial
  Synthetic oligonucleotide
gccctctgcaacccggtttgtgatgctgaatcacctgggtctaacgcgctggatcctaaa

SEQ ID NO: 410254 - DNA, 55 bp, Artificial
  Synthetic oligonucleotide
gccctcttggagaacgcacgtttgaaggaacaaatcaaagatctgcaaggcaaga

SEQ ID NO: 410255 - DNA, 55 bp, Artificial
  Synthetic oligonucleotide
gccctctttggggatttgaagccccatcttgagaagcagcgagctcgccgtactg

SEQ ID NO: 410256 - DNA, 55 bp, Artificial
  Synthetic oligonucleotide
gccctgaaaggagctgccctagaggtatcgggtaacggagccgagctgtttcgcg

SEQ ID NO: 410257 - DNA, 60 bp, Artificial
  Synthetic oligonucleotide
gccctgaagcacgtgccaggcgggaacgcatggacgtgcttgactctgtgggtttttaga

SEQ ID NO: 410258 - DNA, 55 bp, Artificial
  Synthetic oligonucleotide
gccctgacaaattggacttagtgactctaggtaaaatgttaatgccttcaacaag

SEQ ID NO: 410259 - DNA, 55 bp, Artificial
  Synthetic oligonucleotide
gccctgacgatgtagcagactacgaatgagaatttcgggtttggtattacgcccc

SEQ ID NO: 410260 - DNA, 58 bp, Artificial
  Synthetic oligonucleotide
gccctgacgtcccaaagggttgtgaaggcccatgtaaggtccagtcgtatgagcagag

SEQ ID NO: 410261 - DNA, 55 bp, Artificial
  Synthetic oligonucleotide
gccctgactggttacaccatcacaccctgcaccataaaatggcaagctaggtttt

SEQ ID NO: 410262 - DNA, 58 bp, Artificial
  Synthetic oligonucleotide
gccctgagggtctttagagtgtcactacattgggtcccctgaagactaagtcatgtgg

SEQ ID NO: 410263 - DNA, 55 bp, Artificial
  Synthetic oligonucleotide
gccctgagtaggtcgggaactagtctagaaaactaggccactgcgatgagcggtg

SEQ ID NO: 410264 - DNA, 55 bp, Artificial
  Synthetic oligonucleotide
gccctgagtcagtgctagttaacacctatcaatggattatcagaaactgggagac

SEQ ID NO: 410265 - DNA, 55 bp, Artificial
  Synthetic oligonucleotide
gccctgagtgccgtactcttggcctgcagggttgtgcttttcagtttactgttgc

SEQ ID NO: 410266 - DNA, 51 bp, Artificial
  Synthetic oligonucleotide
gccctgagttcttaccgactcgtcggtctcctgtattagagccattcaagg

SEQ ID NO: 410267 - DNA, 53 bp, Artificial
  Synthetic oligonucleotide
gccctgagtttccaggacagtttagaaagaagtgtaactttgctactaccccg

SEQ ID NO: 410268 - DNA, 55 bp, Artificial
  Synthetic oligonucleotide
gccctgataaagtgtaatgacaacccatggacaggtagaggcaagtgtcataaca

SEQ ID NO: 410269 - DNA, 55 bp, Artificial
  Synthetic oligonucleotide
gccctgatcctgcagttatattagagaaagtagcaataggcccctggcgagggtt

SEQ ID NO: 410270 - DNA, 58 bp, Artificial
  Synthetic oligonucleotide
gccctgatgtcccctttggttgtgaaggtccttgtaaagtccagtcgtatgagcagcg

SEQ ID NO: 410271 - DNA, 55 bp, Artificial
  Synthetic oligonucleotide
gccctgatgtccctaagggatgtgaagggccttgcaaggtccaatcctatgaggc

SEQ ID NO: 410272 - DNA, 58 bp, Artificial
  Synthetic oligonucleotide
gccctgatgtgcctaaggggtgtgaaggcccgtgtaaggtccagtcattcgagaagaa

SEQ ID NO: 410273 - DNA, 60 bp, Artificial
  Synthetic oligonucleotide
gccctgcagacagccgcgccccttgtaactaacgctggcacccttcgcttacagagcgcc

SEQ ID NO: 410274 - DNA, 53 bp, Artificial
  Synthetic oligonucleotide
gccctgcgtaacaccaagggtcagcatctccagtccgcctacacaactcccgt

SEQ ID NO: 410275 - DNA, 60 bp, Artificial
  Synthetic oligonucleotide
gccctgcgtatggcgtgtcgtcggactcatatgaggtccccgtgaaactgcgtgtgtggt

SEQ ID NO: 410276 - DNA, 59 bp, Artificial
  Synthetic oligonucleotide
gccctgcgtctttagcaagtctagagacaggggctactcggcagttcactgcaagcgcg

SEQ ID NO: 410277 - DNA, 53 bp, Artificial
  Synthetic oligonucleotide
gccctgctaaggcaacaaggtaaggagtggggatgcaggtttgacgcattggt

SEQ ID NO: 410278 - DNA, 55 bp, Artificial
  Synthetic oligonucleotide
gccctgctaggaaagagactaacagtgtgctacttccactggggacataaaggga

SEQ ID NO: 410279 - DNA, 60 bp, Artificial
  Synthetic oligonucleotide
gccctgctctgtcatacaggcaatggttaatgctggcatggagccaaactgattgatcat

SEQ ID NO: 410280 - DNA, 55 bp, Artificial
  Synthetic oligonucleotide
gccctggaaacagttgcattttgaatggctcaatagatttacagagtagattggc

SEQ ID NO: 410281 - DNA, 55 bp, Artificial
  Synthetic oligonucleotide
gccctggaaagcataataatatggggaaagcctcctagatttagattacccatcc

SEQ ID NO: 410282 - DNA, 55 bp, Artificial
  Synthetic oligonucleotide
gccctggaagcatccaggaagtcagcctaggactgcgtgtaacaagtgctactgt

SEQ ID NO: 410283 - DNA, 55 bp, Artificial
  Synthetic oligonucleotide
gccctggaatgctagttggagtaataaatctcagaatgagatatgggagaacatg

SEQ ID NO: 410284 - DNA, 55 bp, Artificial
  Synthetic oligonucleotide
gccctggagtcgcgggttttcgtgttgatgacccgccaaccgaactgcgtcccaa

SEQ ID NO: 410285 - DNA, 60 bp, Artificial
  Synthetic oligonucleotide
gccctggatcgattgccgaatcgtccaatccgctcaggtttttatatggtctgctggtga

SEQ ID NO: 410286 - DNA, 55 bp, Artificial
  Synthetic oligonucleotide
gccctggcagatagaatacgctcattttctgattcgccaactgaggaacctcttg

SEQ ID NO: 410287 - DNA, 60 bp, Artificial
  Synthetic oligonucleotide
gccctggcatgcaggaattccaattcacttacacggcttgtgaagcttgcataccctgaa

SEQ ID NO: 410288 - DNA, 55 bp, Artificial
  Synthetic oligonucleotide
gccctggcattggacacacagaatctgagtcacactaagcgtgagcaaatagtta

SEQ ID NO: 410289 - DNA, 55 bp, Artificial
  Synthetic oligonucleotide
gccctggcctattccctaacctaaatcagtcagtctgtgacaacaatgcactccc

SEQ ID NO: 410290 - DNA, 60 bp, Artificial
  Synthetic oligonucleotide
gccctgggatagtgccatgctgcaaataccttgcgataatgtggataggtttattaatga

SEQ ID NO: 410291 - DNA, 57 bp, Artificial
  Synthetic oligonucleotide
gccctggtatcggtacattggtaccaatatatagtgtggtacctaatggtataattg

SEQ ID NO: 410292 - DNA, 55 bp, Artificial
  Synthetic oligonucleotide
gccctggtcaaagagtagttattgagcaggatattaactcattgcataaattcac

SEQ ID NO: 410293 - DNA, 55 bp, Artificial
  Synthetic oligonucleotide
gccctggttttcgctgtgcggtgttggactttgatgggcacgtgagaacaatggc

SEQ ID NO: 410294 - DNA, 55 bp, Artificial
  Synthetic oligonucleotide
gccctggttttgaaagatcttagaactggtgtcaagtattctgtagatgaagtgg

SEQ ID NO: 410295 - DNA, 60 bp, Artificial
  Synthetic oligonucleotide
gccctgtacgctcagttgctgatttgagcccgagcttgcaagctgttcacatatctccac

SEQ ID NO: 410296 - DNA, 60 bp, Artificial
  Synthetic oligonucleotide
gccctgtcattgactagtgtgaccatttgacccaggatgagaccagaccttctcaaagag

SEQ ID NO: 410297 - DNA, 57 bp, Artificial
  Synthetic oligonucleotide
gccctgtccaggactggaatgttgacccccaggagcccttcatcccgtccaagctta

SEQ ID NO: 410298 - DNA, 60 bp, Artificial
  Synthetic oligonucleotide
gccctgtccaggattggaacatcgacccccaggagcctttcatcccatccaagctcagga

SEQ ID NO: 410299 - DNA, 54 bp, Artificial
  Synthetic oligonucleotide
gccctgtccatttcagaaaccaagtcaaaatacgccgaagggttgacataaacc

SEQ ID NO: 410300 - DNA, 55 bp, Artificial
  Synthetic oligonucleotide
gccctgtggagttcagggtgggagtgtgtgaagacacataccgtcattcggaagc

SEQ ID NO: 410301 - DNA, 55 bp, Artificial
  Synthetic oligonucleotide
gccctgttagcattttggacataaaacaagggccaaaagaacccttcagagacta

SEQ ID NO: 410302 - DNA, 60 bp, Artificial
  Synthetic oligonucleotide
gccctgttagtctattactgctggatgtcggatacgcctgctaaggcatccacttttgta

SEQ ID NO: 410303 - DNA, 50 bp, Artificial
  Synthetic oligonucleotide
gccctgttcccacggcagggcggttctgttccatctacggacacgtggga

SEQ ID NO: 410304 - DNA, 55 bp, Artificial
  Synthetic oligonucleotide
gccctgttctacactgcactgtggtgctactctaccggttgctctgagcgactcg

SEQ ID NO: 410305 - DNA, 52 bp, Artificial
  Synthetic oligonucleotide
gccctgttgatggtctaacagggaatatccaaagatactttagtcagcccac

SEQ ID NO: 410306 - DNA, 56 bp, Artificial
  Synthetic oligonucleotide
gccctgttgatggttttgcttctatgggttggaatgttcgtgggagcaagaagttt

SEQ ID NO: 410307 - DNA, 55 bp, Artificial
  Synthetic oligonucleotide
gccctgtttgacatcaagagatgccagcctgctcgactccatagcttcggatacc

SEQ ID NO: 410308 - DNA, 57 bp, Artificial
  Synthetic oligonucleotide
gccctgtttgaggcagtgcaaacagtaggcaatccccttaggctagtgtaccacctt

SEQ ID NO: 410309 - DNA, 55 bp, Artificial
  Synthetic oligonucleotide
gcccttaaaataacaggtcctgttttaatcattactgacagcttttacgtagctg

SEQ ID NO: 410310 - DNA, 58 bp, Artificial
  Synthetic oligonucleotide
gcccttaaacatgtgtctggtaagcgcgtgggagtggactgtaaaagtagatattctc

SEQ ID NO: 410311 - DNA, 58 bp, Artificial
  Synthetic oligonucleotide
gcccttaaactgcaaaagtacgtaagccataagacgccaagagagcgcagaggactaa

SEQ ID NO: 410312 - DNA, 55 bp, Artificial
  Synthetic oligonucleotide
gcccttaaccggatacactgggttaaagctggcattgcaaacagggcaccatgcg

SEQ ID NO: 410313 - DNA, 53 bp, Artificial
  Synthetic oligonucleotide
gcccttaactacaaataaacggtggccgtgggagtttcacttgtcggtgtcta

SEQ ID NO: 410314 - DNA, 58 bp, Artificial
  Synthetic oligonucleotide
gcccttaataatgtcgccgtccacagagttggtgagttcactcagttccgtttctcca

SEQ ID NO: 410315 - DNA, 55 bp, Artificial
  Synthetic oligonucleotide
gcccttaatgggaatggggatccaaacaacatggacagagcggtcaaactgtaca

SEQ ID NO: 410316 - DNA, 55 bp, Artificial
  Synthetic oligonucleotide
gcccttactgactgcgtggctcatgggtggaagcaaactcgagatgcgagggatg

SEQ ID NO: 410317 - DNA, 54 bp, Artificial
  Synthetic oligonucleotide
gcccttactttttagttatatcgcgcgtcgtagtgcgcttaaaaagttatcgtc

SEQ ID NO: 410318 - DNA, 59 bp, Artificial
  Synthetic oligonucleotide
gcccttagaacatgataaggcggtcctagcacgcccccaagcaatggtggagtataatg

SEQ ID NO: 410319 - DNA, 51 bp, Artificial
  Synthetic oligonucleotide
gcccttagcggggctccccggctacggtcggatccctacggggaggatagg

SEQ ID NO: 410320 - DNA, 55 bp, Artificial
  Synthetic oligonucleotide
gcccttatctgtgattgagtacaaaacacgtgtttgtcgacagtcggccagagct

SEQ ID NO: 410321 - DNA, 55 bp, Artificial
  Synthetic oligonucleotide
gcccttatctgtttctgttttgtcctacctggattctgcgtctccatcttgctgg

SEQ ID NO: 410322 - DNA, 52 bp, Artificial
  Synthetic oligonucleotide
gcccttattctactggtgatccgtctttctacagaaacctcctatggataat

SEQ ID NO: 410323 - DNA, 54 bp, Artificial
  Synthetic oligonucleotide
gcccttcaatatctcaagggcgaataaggcagctttaaccgcaccattcattga

SEQ ID NO: 410324 - DNA, 55 bp, Artificial
  Synthetic oligonucleotide
gcccttcacgatgcacagatctctcataccgcataccgtggtgtcgagtacaatg

SEQ ID NO: 410325 - DNA, 55 bp, Artificial
  Synthetic oligonucleotide
gcccttcaggtaccccgaggtaacacgcgacactcgggatctgagaaggggactg

SEQ ID NO: 410326 - DNA, 55 bp, Artificial
  Synthetic oligonucleotide
gcccttcataaggatgatgagagctgctacgagactgggcacaaggttttaactg

SEQ ID NO: 410327 - DNA, 54 bp, Artificial
  Synthetic oligonucleotide
gcccttcatggggccccacggacccccggcatagatcacgcaatttgggtaagg

SEQ ID NO: 410328 - DNA, 52 bp, Artificial
  Synthetic oligonucleotide
gcccttccaaaatgtaaacaagatcacatacggagcatgtcccaaatatgtg

SEQ ID NO: 410329 - DNA, 59 bp, Artificial
  Synthetic oligonucleotide
gcccttccacaagagttcgtctcgtggttcgcgagcaacggattcacggtgcagtcgga

SEQ ID NO: 410330 - DNA, 55 bp, Artificial
  Synthetic oligonucleotide
gcccttccctcctttccaggtaccatacgttcgtcttgatcgtgatagagtaccc

SEQ ID NO: 410331 - DNA, 55 bp, Artificial
  Synthetic oligonucleotide
gcccttcgcggatatcaggaccccagggcacacctcctcctccagaaacaacagc

SEQ ID NO: 410332 - DNA, 54 bp, Artificial
  Synthetic oligonucleotide
gcccttcggaactgttcagaaaactggcaaacccgtcaaatatatctgggagtt

SEQ ID NO: 410333 - DNA, 51 bp, Artificial
  Synthetic oligonucleotide
gcccttcgggcgactagactcttggccctcgctttgtccccctagccctgc

SEQ ID NO: 410334 - DNA, 60 bp, Artificial
  Synthetic oligonucleotide
gcccttcgtatgcactttcaaggtctaactagctcagagattgctacagagttaggtatt

SEQ ID NO: 410335 - DNA, 55 bp, Artificial
  Synthetic oligonucleotide
gcccttctcattggagtgggaaacttagttttcaacacagtcatacatgagaaaa

SEQ ID NO: 410336 - DNA, 49 bp, Artificial
  Synthetic oligonucleotide
gcccttgacacttaacaaaccaaaccctttattaccaacccaaaccggc

SEQ ID NO: 410337 - DNA, 59 bp, Artificial
  Synthetic oligonucleotide
gcccttgagaccggatgttcactacttaacaatgacacaagcagataaagctagtttac

SEQ ID NO: 410338 - DNA, 55 bp, Artificial
  Synthetic oligonucleotide
gcccttgaggactctggcgtgcaggtgacttggaacatcttcgattcgatggacc

SEQ ID NO: 410339 - DNA, 58 bp, Artificial
  Synthetic oligonucleotide
gcccttgaggattcaatcatcgggatagggcctattagttttgtctcattgggacgaa

SEQ ID NO: 410340 - DNA, 58 bp, Artificial
  Synthetic oligonucleotide
gcccttgcaaaaaattggacagagcgggttgaggaatggcttgacctcccgtgcaagc

SEQ ID NO: 410341 - DNA, 50 bp, Artificial
  Synthetic oligonucleotide
gcccttggatactccgacgtcgcctgcccaatctgcttcgggaacggatt

SEQ ID NO: 410342 - DNA, 55 bp, Artificial
  Synthetic oligonucleotide
gcccttggattatttaagatgtactatcgaaaatgggagagcaactcaagagttt

SEQ ID NO: 410343 - DNA, 51 bp, Artificial
  Synthetic oligonucleotide
gcccttggcaccgactcgattgcaaggtgcagctgtaacacgggcgtgtac

SEQ ID NO: 410344 - DNA, 55 bp, Artificial
  Synthetic oligonucleotide
gcccttggcaggtggactggcacttacatctatgaccacctcacccccatgtcgg

SEQ ID NO: 410345 - DNA, 60 bp, Artificial
  Synthetic oligonucleotide
gcccttggcattttcgctgtcgtatagcaatcggggggcactcaaagtctgtagcaatcg

SEQ ID NO: 410346 - DNA, 57 bp, Artificial
  Synthetic oligonucleotide
gcccttgggcccctaatagagggaaacacaagtctgctatggaatggtcctatggcc

SEQ ID NO: 410347 - DNA, 53 bp, Artificial
  Synthetic oligonucleotide
gcccttggggtccctccaaaccggggaattatccggcacaagaggtgactcca

SEQ ID NO: 410348 - DNA, 55 bp, Artificial
  Synthetic oligonucleotide
gcccttgggtaaatccaagttgaggttaggcaaccaagagatgcggaggatgttt

SEQ ID NO: 410349 - DNA, 59 bp, Artificial
  Synthetic oligonucleotide
gcccttgggttgttaacatagattatcacccaacacatatgaaagctatattatcttac

SEQ ID NO: 410350 - DNA, 55 bp, Artificial
  Synthetic oligonucleotide
gcccttggtgcctgtaagggatcatgaatttcttcttggctagtgctggtgaccg

SEQ ID NO: 410351 - DNA, 56 bp, Artificial
  Synthetic oligonucleotide
gcccttggttcccacaagagggaacaatagacataaaaagatggcgcagggtagga

SEQ ID NO: 410352 - DNA, 55 bp, Artificial
  Synthetic oligonucleotide
gcccttgtagttgcacctgattcagcacttccttatgtcaggggtcttccaccag

SEQ ID NO: 410353 - DNA, 58 bp, Artificial
  Synthetic oligonucleotide
gcccttgtcaccatgcccaaaatcttctgccccgagtctatgaacgccaaccgcccac

SEQ ID NO: 410354 - DNA, 55 bp, Artificial
  Synthetic oligonucleotide
gcccttgtgaaatcaaaccacatgggagatctgtgggaaaatggagtattcaagc

SEQ ID NO: 410355 - DNA, 60 bp, Artificial
  Synthetic oligonucleotide
gcccttgttaatgccgccactcgacaatcacctgattttgattcccatgcaatagcgctc

SEQ ID NO: 410356 - DNA, 55 bp, Artificial
  Synthetic oligonucleotide
gcccttgttcatcctataaatgatgttttcgagaccacagatacaccagacacct

SEQ ID NO: 410357 - DNA, 60 bp, Artificial
  Synthetic oligonucleotide
gccctttaaatactcacctgcgctgaagagtgctcactcttgagtgcggagcgagtagag

SEQ ID NO: 410358 - DNA, 60 bp, Artificial
  Synthetic oligonucleotide
gccctttaagaagtactcccttatcatcccgcgcaatcagtcgagctagagatttgtata

SEQ ID NO: 410359 - DNA, 56 bp, Artificial
  Synthetic oligonucleotide
gccctttatactgtcgactacagttggtattagaattgttcttagaatagttctaa

SEQ ID NO: 410360 - DNA, 58 bp, Artificial
  Synthetic oligonucleotide
gccctttatatgctgacaacaagagggagacagacaaccaaggataacaaggggacaa

SEQ ID NO: 410361 - DNA, 59 bp, Artificial
  Synthetic oligonucleotide
gccctttcagggcctctttgagattcctagctacagatcactttacctgcgttgggtga

SEQ ID NO: 410362 - DNA, 60 bp, Artificial
  Synthetic oligonucleotide
gccctttcagtccttggtgcctaaggctgccagaggccagtatagtggatttgtgaggac

SEQ ID NO: 410363 - DNA, 55 bp, Artificial
  Synthetic oligonucleotide
gccctttcgagctatcttgccagccctcctctcttatagccgcccgacacagtcc

SEQ ID NO: 410364 - DNA, 55 bp, Artificial
  Synthetic oligonucleotide
gccctttctcaaacagagtgtggaactctttccagattgaggagtttggcatggg

SEQ ID NO: 410365 - DNA, 55 bp, Artificial
  Synthetic oligonucleotide
gccctttctccgttctacgtgctaatgatgtgctgtggctttcgctaactgctgc

SEQ ID NO: 410366 - DNA, 54 bp, Artificial
  Synthetic oligonucleotide
gccctttctctgcccttcgagctaacgatgtgctttggctctctctcactgctg

SEQ ID NO: 410367 - DNA, 55 bp, Artificial
  Synthetic oligonucleotide
gccctttgaatcggcatgggttagtctcggcatagagattgtctgttgggtagag

SEQ ID NO: 410368 - DNA, 55 bp, Artificial
  Synthetic oligonucleotide
gccctttgcctggctcctacatatgccacacgatgcacacacctgcagaaccggg

SEQ ID NO: 410369 - DNA, 55 bp, Artificial
  Synthetic oligonucleotide
gccctttggcgggtcgtctgtaccttgtagacatgtcagcaattctgttcgtcgg

SEQ ID NO: 410370 - DNA, 56 bp, Artificial
  Synthetic oligonucleotide
gccctttgtagctgagcagttcaatcccgttaactcgtcgaatgctagtttggaga

SEQ ID NO: 410371 - DNA, 52 bp, Artificial
  Synthetic oligonucleotide
gcccttttaacttcacgtcttaccggccttgctttacgaaatcgccgaggat

SEQ ID NO: 410372 - DNA, 60 bp, Artificial
  Synthetic oligonucleotide
gcccttttcaagagtgattctatcatgcatagtggccgaggtacggcaatgtttgttgtc

SEQ ID NO: 410373 - DNA, 58 bp, Artificial
  Synthetic oligonucleotide
gcccttttgaaaatgcgtgactccggactggaggacgtcgcgaaagtcatcattacga

SEQ ID NO: 410374 - DNA, 55 bp, Artificial
  Synthetic oligonucleotide
gcccttttggatggataaaggcgaattaagcaaaatcgctgtgctattcggaaaa

SEQ ID NO: 410375 - DNA, 55 bp, Artificial
  Synthetic oligonucleotide
gcccttttggtggatcctttccctgttgtgcagaacttgctccaaaagactgaac

SEQ ID NO: 410376 - DNA, 57 bp, Artificial
  Synthetic oligonucleotide
gcccttttgttaagtacagcattacacatggaggttagttcaacctcgatcctagcg

SEQ ID NO: 410377 - DNA, 60 bp, Artificial
  Synthetic oligonucleotide
gccgaaaaattgtctagagtcttgggatgtcatgacactatttcgtatgaatcagctgtg

SEQ ID NO: 410378 - DNA, 55 bp, Artificial
  Synthetic oligonucleotide
gccgaaaacaactgatcgacaaccccttttggactggctttcatggactcctccc

SEQ ID NO: 410379 - DNA, 60 bp, Artificial
  Synthetic oligonucleotide
gccgaaaacttggaccctgaattgattgcctcggcatatgcgtcgtttgcagactggcaa

SEQ ID NO: 410380 - DNA, 52 bp, Artificial
  Synthetic oligonucleotide
gccgaaaacttggctaccttaaaagcagaatgggaaactcacaaacgtaacg

SEQ ID NO: 410381 - DNA, 60 bp, Artificial
  Synthetic oligonucleotide
gccgaaaagctatccagagtcttgggatgccatgatattatctcatatgagtcagctgtg

SEQ ID NO: 410382 - DNA, 55 bp, Artificial
  Synthetic oligonucleotide
gccgaaacaaacggatcaactgacgacataacaattgtgactccccaaaagttgc

SEQ ID NO: 410383 - DNA, 55 bp, Artificial
  Synthetic oligonucleotide
gccgaaacacctgacgagcatcagagcctcagcctcaaatgccccacccttccgg

SEQ ID NO: 410384 - DNA, 55 bp, Artificial
  Synthetic oligonucleotide
gccgaaaccattcacgacgaagtgtttgcaagcaacaccgcgttactagttaaca

SEQ ID NO: 410385 - DNA, 55 bp, Artificial
  Synthetic oligonucleotide
gccgaaactcatcccgtacccgcagttggtctacttggaagtccgtcacttgtta

SEQ ID NO: 410386 - DNA, 55 bp, Artificial
  Synthetic oligonucleotide
gccgaaagacggagaaatacatcgtagaaacgaagaaagtcatcgacaggccggg

SEQ ID NO: 410387 - DNA, 60 bp, Artificial
  Synthetic oligonucleotide
gccgaaagagagtagtgtattgtggacatccaatagtatagtagcgctttgtggatccaa

SEQ ID NO: 410388 - DNA, 55 bp, Artificial
  Synthetic oligonucleotide
gccgaaagattaagaagtttgtggacgctcctcacccagattggatatcacttga

SEQ ID NO: 410389 - DNA, 55 bp, Artificial
  Synthetic oligonucleotide
gccgaaagtgagattggaagcgcggcgattgacggattaatacagggaagcgtac

SEQ ID NO: 410390 - DNA, 57 bp, Artificial
  Synthetic oligonucleotide
gccgaaattggttggagaggccctccacagagggttgttccaatccctcgatataca

SEQ ID NO: 410391 - DNA, 53 bp, Artificial
  Synthetic oligonucleotide
gccgaacaagcctgcgctgtctcatgggagagaagagagttcaaatgcggaga

SEQ ID NO: 410392 - DNA, 55 bp, Artificial
  Synthetic oligonucleotide
gccgaacaccggtcaggaacgtatggagcccactgcgtacccatcagctctcgac

SEQ ID NO: 410393 - DNA, 55 bp, Artificial
  Synthetic oligonucleotide
gccgaacacgattgtggttacccccaaggctgagactaacgccgagattacaaac

SEQ ID NO: 410394 - DNA, 55 bp, Artificial
  Synthetic oligonucleotide
gccgaaccaagtatgggactcggcgcaaatctccagatataaccccatctgggtt

SEQ ID NO: 410395 - DNA, 55 bp, Artificial
  Synthetic oligonucleotide
gccgaaccagattacacaacgcatccaagagattcaaagggtatgatgaaggcac

SEQ ID NO: 410396 - DNA, 50 bp, Artificial
  Synthetic oligonucleotide
gccgaaccagcatctgacgcccccgtcgaacccgaagccccttgcaccca

SEQ ID NO: 410397 - DNA, 55 bp, Artificial
  Synthetic oligonucleotide
gccgaaccgcgagaggctcatcctggatatgaattctcaattagcgagaattgac

SEQ ID NO: 410398 - DNA, 58 bp, Artificial
  Synthetic oligonucleotide
gccgaaccgtcgtaacagtctatggaggcctagactcaaagaccacctactgtgccac

SEQ ID NO: 410399 - DNA, 55 bp, Artificial
  Synthetic oligonucleotide
gccgaacgtaacacttggatgcgagtattttgggctctcaaggataccgtgcaga

SEQ ID NO: 410400 - DNA, 55 bp, Artificial
  Synthetic oligonucleotide
gccgaactgctagtagcaatggagaatcagcatacaattgaccttgcagattctg

SEQ ID NO: 410401 - DNA, 55 bp, Artificial
  Synthetic oligonucleotide
gccgaactgttggtcctattggagaatgaaagaaccttggatttccacgactcga

SEQ ID NO: 410402 - DNA, 55 bp, Artificial
  Synthetic oligonucleotide
gccgaacttcccagcacgagtggtgccagacaaggactcgtactcccaaccacta

SEQ ID NO: 410403 - DNA, 55 bp, Artificial
  Synthetic oligonucleotide
gccgaacttgtagttaataagttttgggatgcttacattattgacgaactttctg

SEQ ID NO: 410404 - DNA, 55 bp, Artificial
  Synthetic oligonucleotide
gccgaacttttgcacaaacacggctgagaaatgtgacgtacaagcccattacgcc

SEQ ID NO: 410405 - DNA, 55 bp, Artificial
  Synthetic oligonucleotide
gccgaagatgatcgactaaagggtactgtccatgaagggtataccccgatacggg

SEQ ID NO: 410406 - DNA, 60 bp, Artificial
  Synthetic oligonucleotide
gccgaagcaatgagccatgtgacaaatccagttaacataatgatgcagagaggcagtttc

SEQ ID NO: 410407 - DNA, 60 bp, Artificial
  Synthetic oligonucleotide
gccgaagcacctcagcccctaagttatgcatcagtaccggccatcctgcatcgagtcaag

SEQ ID NO: 410408 - DNA, 55 bp, Artificial
  Synthetic oligonucleotide
gccgaagcagtttctaacctcagtaaaggacggaccaacacaggacacgcagtgt

SEQ ID NO: 410409 - DNA, 56 bp, Artificial
  Synthetic oligonucleotide
gccgaagccaaactacaagcccgtccaggtacaaaaggagccagagcacctacgag

SEQ ID NO: 410410 - DNA, 55 bp, Artificial
  Synthetic oligonucleotide
gccgaagcgaacaggcgatatactaatttcaacgcccgtctcgaaggttcgtcga

SEQ ID NO: 410411 - DNA, 60 bp, Artificial
  Synthetic oligonucleotide
gccgaagcgctcgtactggctgactccttcatacgcgaccttggaaaagcagcaacatca

SEQ ID NO: 410412 - DNA, 55 bp, Artificial
  Synthetic oligonucleotide
gccgaaggcgggaagtgtctttagtgcttgggctcataggatttctcagcgcagc

SEQ ID NO: 410413 - DNA, 59 bp, Artificial
  Synthetic oligonucleotide
gccgaagggtggttatcaatcaatccaatcaaagtatgcccgtcacgagtaatggcgct

SEQ ID NO: 410414 - DNA, 56 bp, Artificial
  Synthetic oligonucleotide
gccgaaggtccaaccagagcttcagtgggcgtggactaacctcgaagagtataaat

SEQ ID NO: 410415 - DNA, 55 bp, Artificial
  Synthetic oligonucleotide
gccgaagtagactagtaaatcagctgcccatcttggcccttataatgctccggcc

SEQ ID NO: 410416 - DNA, 55 bp, Artificial
  Synthetic oligonucleotide
gccgaagtattgaaacgtcacggtttcgaagtagatgagtcggcctctgtcaacg

SEQ ID NO: 410417 - DNA, 53 bp, Artificial
  Synthetic oligonucleotide
gccgaagtgaacatagtaatgtgataggcatgtggtgtttactgcacgcgcga

SEQ ID NO: 410418 - DNA, 55 bp, Artificial
  Synthetic oligonucleotide
gccgaagtgactgggtcacgcaaagatgaacctccttcacttaaaccaagaatgg

SEQ ID NO: 410419 - DNA, 55 bp, Artificial
  Synthetic oligonucleotide
gccgaagtgatccacaagaaaccagaggaggtgatggctttcgttccccacatcc

SEQ ID NO: 410420 - DNA, 55 bp, Artificial
  Synthetic oligonucleotide
gccgaagttggagtgaaaggcctgagtaccagtaccaagtcgcacccgggtacca

SEQ ID NO: 410421 - DNA, 55 bp, Artificial
  Synthetic oligonucleotide
gccgaataacatcgtgaaaacaagaggtaactctgaatatctagatgtgggtccg

SEQ ID NO: 410422 - DNA, 60 bp, Artificial
  Synthetic oligonucleotide
gccgaataatcagaagcatcactcacgccggtccaaggcgcaagatgcctaagatgttcg

SEQ ID NO: 410423 - DNA, 55 bp, Artificial
  Synthetic oligonucleotide
gccgaatcgatacaaagccctatttcgatcgtcgttttataacgagtcaagacga

SEQ ID NO: 410424 - DNA, 58 bp, Artificial
  Synthetic oligonucleotide
gccgaatcgtccaatccgctcaggtttttatatggtctgctggtgacggacgaaagac

SEQ ID NO: 410425 - DNA, 55 bp, Artificial
  Synthetic oligonucleotide
gccgacaaaggcacagatttcaaacaagttacctgggacactgtcacctttctca

SEQ ID NO: 410426 - DNA, 55 bp, Artificial
  Synthetic oligonucleotide
gccgacaaatctgagcgtgagattgagttacctaccgtacgtgatcttacacaac

SEQ ID NO: 410427 - DNA, 60 bp, Artificial
  Synthetic oligonucleotide
gccgacagagtaagcactgtcagcggaataggagcacaagctgtctcacatctgagagcg

SEQ ID NO: 410428 - DNA, 55 bp, Artificial
  Synthetic oligonucleotide
gccgacagtggcagtgcaagatccagcgctcgtggccgtgcaccagctgacggct

SEQ ID NO: 410429 - DNA, 60 bp, Artificial
  Synthetic oligonucleotide
gccgacatcgatgcacgtaggtgacgacatactgatgtcttgcacgttaggccacgctga

SEQ ID NO: 410430 - DNA, 55 bp, Artificial
  Synthetic oligonucleotide
gccgacatgagacaaagagtgaacgcagagcgcaacacagtagattatccggcta

SEQ ID NO: 410431 - DNA, 55 bp, Artificial
  Synthetic oligonucleotide
gccgacatgagacaaagagttaatgctgaacgcaatactgtagattatccagcta

SEQ ID NO: 410432 - DNA, 55 bp, Artificial
  Synthetic oligonucleotide
gccgacatgagcattggagtaactgtgataaagaacaacatggtcaacaacgatc

SEQ ID NO: 410433 - DNA, 54 bp, Artificial
  Synthetic oligonucleotide
gccgacatgttctcagtaaaagagggtatgatgaagaaaaggggagaaaattcc

SEQ ID NO: 410434 - DNA, 59 bp, Artificial
  Synthetic oligonucleotide
gccgacatttgtagacgtaataagttaggccgtctcgcgtgtacctatcgctctgatag

SEQ ID NO: 410435 - DNA, 51 bp, Artificial
  Synthetic oligonucleotide
gccgaccacaaactgacaaccgttacatatacttcccttttttacacatta

SEQ ID NO: 410436 - DNA, 59 bp, Artificial
  Synthetic oligonucleotide
gccgaccacggggcgcacctctctttacgcggtctccccgtctgtgccttctcatctgc

SEQ ID NO: 410437 - DNA, 52 bp, Artificial
  Synthetic oligonucleotide
gccgaccccttaccgattttgaccagggctggggccccattagttacaccga

SEQ ID NO: 410438 - DNA, 55 bp, Artificial
  Synthetic oligonucleotide
gccgacccgaagaggaaagaaggactcggacgcgaactcgtgagtggacacctcg

SEQ ID NO: 410439 - DNA, 60 bp, Artificial
  Synthetic oligonucleotide
gccgacctgatgactggcaaatatacgaatcagaattagttagacattcaactgacggac

SEQ ID NO: 410440 - DNA, 53 bp, Artificial
  Synthetic oligonucleotide
gccgaccttaactttgacacgtggaagattaagtggggtaggaacctaggcgc

SEQ ID NO: 410441 - DNA, 55 bp, Artificial
  Synthetic oligonucleotide
gccgaccttcgatcaatgttacacgaacattacggagatcattccatgaatgcac

SEQ ID NO: 410442 - DNA, 55 bp, Artificial
  Synthetic oligonucleotide
gccgacgaagaatcggatcgataggaagtgggaggcccgagaggggctccaagca

SEQ ID NO: 410443 - DNA, 55 bp, Artificial
  Synthetic oligonucleotide
gccgacgacgtacacgaagaattatactgccagggtaatcgctaacggattgcta

SEQ ID NO: 410444 - DNA, 60 bp, Artificial
  Synthetic oligonucleotide
gccgacgatatgcataaagagtacggtgtcgcttgtttcaagtattacatgaacacgaag

SEQ ID NO: 410445 - DNA, 55 bp, Artificial
  Synthetic oligonucleotide
gccgacgcaccgcccctagctccgcgataagccttatcaggctctccgcctacgg

SEQ ID NO: 410446 - DNA, 55 bp, Artificial
  Synthetic oligonucleotide
gccgacgcaccgcctctagctccgcgatagccttatcaggctccagcagcccgga

SEQ ID NO: 410447 - DNA, 55 bp, Artificial
  Synthetic oligonucleotide
gccgacgcagcatcctgcaagtactccaacgttgggactggcgtggtgtggctca

SEQ ID NO: 410448 - DNA, 60 bp, Artificial
  Synthetic oligonucleotide
gccgacgcattcggggactgtgagtacgtcattcaggcgtgctacagcttggagccggat

SEQ ID NO: 410449 - DNA, 55 bp, Artificial
  Synthetic oligonucleotide
gccgacgtagagagaacttagactacaaatcccaatgcccgatcgtaaccaacct

SEQ ID NO: 410450 - DNA, 60 bp, Artificial
  Synthetic oligonucleotide
gccgacgtcttgataatgtgcaaagatttaattacatgtcgattcaacacaactctaatc

SEQ ID NO: 410451 - DNA, 55 bp, Artificial
  Synthetic oligonucleotide
gccgacgtggaccactgggacgcctacaagggtgccagagttgttctctgggatg

SEQ ID NO: 410452 - DNA, 60 bp, Artificial
  Synthetic oligonucleotide
gccgactacacactagatgaagaaagtagagctagaataaagaccaggctattcaccata

SEQ ID NO: 410453 - DNA, 55 bp, Artificial
  Synthetic oligonucleotide
gccgactatacaaactgcttcggagcctattgcgaccggacctccagagttgggg

SEQ ID NO: 410454 - DNA, 53 bp, Artificial
  Synthetic oligonucleotide
gccgactattgtgacaaggtctcggccatgctcagacgcctgagcctcactag

SEQ ID NO: 410455 - DNA, 54 bp, Artificial
  Synthetic oligonucleotide
gccgactcactccgaatatattcgcacatctccaccccattcgagcaagtcggt

SEQ ID NO: 410456 - DNA, 60 bp, Artificial
  Synthetic oligonucleotide
gccgactcctgcatgtaaaagtcgaagaccatcgatgttcatctatgctctgcagaccta

SEQ ID NO: 410457 - DNA, 50 bp, Artificial
  Synthetic oligonucleotide
gccgactgcgagaacctctgtccttgcggtggcgagacaagtacaggtga

SEQ ID NO: 410458 - DNA, 55 bp, Artificial
  Synthetic oligonucleotide
gccgacttcgagccagcatctcagaaaaggccccaaagttccggcgctgctgttg

SEQ ID NO: 410459 - DNA, 55 bp, Artificial
  Synthetic oligonucleotide
gccgagaaacgcatgaagacgatttatggtgacagagatcccggctgtgtcatgg

SEQ ID NO: 410460 - DNA, 55 bp, Artificial
  Synthetic oligonucleotide
gccgagaaactaaaggaaatatcgacgcccctcaagagtatgcacagacacgacg

SEQ ID NO: 410461 - DNA, 60 bp, Artificial
  Synthetic oligonucleotide
gccgagaacctgcaattgtatgagcatatggttaagtctgacgttaagccagtagtagct

SEQ ID NO: 410462 - DNA, 55 bp, Artificial
  Synthetic oligonucleotide
gccgagaagtctaagctgattggcactgtaggtaaactggctgagatgggtgcgg

SEQ ID NO: 410463 - DNA, 51 bp, Artificial
  Synthetic oligonucleotide
gccgagacgtactgccctcggcctctcttggctgtccacccggatcaggct

SEQ ID NO: 410464 - DNA, 55 bp, Artificial
  Synthetic oligonucleotide
gccgagaggcaagcgacgctaatacacacaaagggtagtgcttgaatagcactac

SEQ ID NO: 410465 - DNA, 55 bp, Artificial
  Synthetic oligonucleotide
gccgagagggacgaagcactatcatctcaactcaaaccacggatctttgcagagg

SEQ ID NO: 410466 - DNA, 60 bp, Artificial
  Synthetic oligonucleotide
gccgagatgttgcgatagcaactatcttagtgtcactcgattgctggtaaaccgatgcaa

SEQ ID NO: 410467 - DNA, 55 bp, Artificial
  Synthetic oligonucleotide
gccgagcaaacagaaagattgagagatctgcggcgaagagagaagagtgggacgc

SEQ ID NO: 410468 - DNA, 55 bp, Artificial
  Synthetic oligonucleotide
gccgagcaagcacacaaatacacaggtgagtttgggcgacaccagttactgatcg

SEQ ID NO: 410469 - DNA, 55 bp, Artificial
  Synthetic oligonucleotide
gccgagcataatcaacattggtattatcctggaaggaacccaactgagattgccg

SEQ ID NO: 410470 - DNA, 55 bp, Artificial
  Synthetic oligonucleotide
gccgagcatgaggctgtataaaacagttccgcgcaagcacacgtcgctgtgcaga

SEQ ID NO: 410471 - DNA, 55 bp, Artificial
  Synthetic oligonucleotide
gccgagcccattgcggaatcggatgttgatggtccggaatgtgaggttttattca

SEQ ID NO: 410472 - DNA, 55 bp, Artificial
  Synthetic oligonucleotide
gccgagcgcacagatcgaactctccgcctcctcgaaacttttccttccctgacaa

SEQ ID NO: 410473 - DNA, 55 bp, Artificial
  Synthetic oligonucleotide
gccgagctcatggttcagtcctccccgtttcagacgatccctcaatccatcccgg

SEQ ID NO: 410474 - DNA, 55 bp, Artificial
  Synthetic oligonucleotide
gccgagctgttagctgcagcagtcggaggggtctcctcaaagaggcaagggaagg

SEQ ID NO: 410475 - DNA, 55 bp, Artificial
  Synthetic oligonucleotide
gccgaggaccaaccaacgcaaccggatgttgccacttgcaggttttatacgcttg

SEQ ID NO: 410476 - DNA, 55 bp, Artificial
  Synthetic oligonucleotide
gccgaggagacgagtctgagactccaagcggcacgctggcttaaacgagctgggt

SEQ ID NO: 410477 - DNA, 55 bp, Artificial
  Synthetic oligonucleotide
gccgaggagtgtaaagtccaagccgactgggctatttgtatacacggcggttacg

SEQ ID NO: 410478 - DNA, 60 bp, Artificial
  Synthetic oligonucleotide
gccgaggcaatgagtcaagcaaattcagccataatgatgcagaaaagtaattttaagggc

SEQ ID NO: 410479 - DNA, 55 bp, Artificial
  Synthetic oligonucleotide
gccgaggcattattgaatgttagtatatgttcctctgggtcgaatttaggcgttg

SEQ ID NO: 410480 - DNA, 53 bp, Artificial
  Synthetic oligonucleotide
gccgaggcccacgtaactatgataacattgcacagagcatatgttcactaacg

SEQ ID NO: 410481 - DNA, 55 bp, Artificial
  Synthetic oligonucleotide
gccgagggctaaggaattttgcccgcgctgcgaaggaaacgcgtcatcaggcgag

SEQ ID NO: 410482 - DNA, 55 bp, Artificial
  Synthetic oligonucleotide
gccgaggggacacaaaaggcagcaccagtaagacaaccgctgtggtgaatctaga

SEQ ID NO: 410483 - DNA, 56 bp, Artificial
  Synthetic oligonucleotide
gccgagggggctggatcgatattacatatttaatcgggttcggtactatgacaaga

SEQ ID NO: 410484 - DNA, 55 bp, Artificial
  Synthetic oligonucleotide
gccgagggtttaccctaaggtaaatttagacaactatgtcatgccaggacctgaa

SEQ ID NO: 410485 - DNA, 55 bp, Artificial
  Synthetic oligonucleotide
gccgaggtatggtttgcttcgaaacttacgggacaggagtttagcccgatatgct

SEQ ID NO: 410486 - DNA, 53 bp, Artificial
  Synthetic oligonucleotide
gccgaggttgaaggaaaacgtccgtcaccgttatcgcgttatagggacgtcga

SEQ ID NO: 410487 - DNA, 55 bp, Artificial
  Synthetic oligonucleotide
gccgagtaaaacgatgataacgccgtactcggtagaaaagacacaaacgcacgcg

SEQ ID NO: 410488 - DNA, 60 bp, Artificial
  Synthetic oligonucleotide
gccgagtagataaagatttggcgagcctgaccacagctcaaagacagcagtacgaaataa

SEQ ID NO: 410489 - DNA, 55 bp, Artificial
  Synthetic oligonucleotide
gccgagtatcttagatctctggctgtgtcacgacatgcctatgaggaccgccgtg

SEQ ID NO: 410490 - DNA, 55 bp, Artificial
  Synthetic oligonucleotide
gccgagtcccgtcggtgatgggtcgatgttcgacgttgttccaaacacagctccc

SEQ ID NO: 410491 - DNA, 55 bp, Artificial
  Synthetic oligonucleotide
gccgagtctcccaccatgccaaactaccactggtgggttgagcatctgaacctga

SEQ ID NO: 410492 - DNA, 60 bp, Artificial
  Synthetic oligonucleotide
gccgagtgcaaaagcatgactcaggatgctgcaggatgctgcagagagtctggcacactc

SEQ ID NO: 410493 - DNA, 52 bp, Artificial
  Synthetic oligonucleotide
gccgagtggacaggggcgtgatgtccgcgatttgccttgccagcactaggcg

SEQ ID NO: 410494 - DNA, 55 bp, Artificial
  Synthetic oligonucleotide
gccgagttagttcccgtcgaccatgagagtagctccatgttcagagggttgcgcg

SEQ ID NO: 410495 - DNA, 55 bp, Artificial
  Synthetic oligonucleotide
gccgagttatttggaccatattcttcggcgtatgttaatcagcacgtgttagacg

SEQ ID NO: 410496 - DNA, 55 bp, Artificial
  Synthetic oligonucleotide
gccgagttcatggactgtgcagagggcttggtcgcatcggttcgtggtgaagagg

SEQ ID NO: 410497 - DNA, 55 bp, Artificial
  Synthetic oligonucleotide
gccgagtttcttacaaggactcgaggtactttatatcatctactcctggtgattg

SEQ ID NO: 410498 - DNA, 59 bp, Artificial
  Synthetic oligonucleotide
gccgataacacactacttactacaatgatgattattcacgaattctccgacctaacgac

SEQ ID NO: 410499 - DNA, 60 bp, Artificial
  Synthetic oligonucleotide
gccgataagctacccacatgcaatcgggaccacgagcaactgtgtgaagtggtcgagcta

SEQ ID NO: 410500 - DNA, 59 bp, Artificial
  Synthetic oligonucleotide
gccgatacaacagtcactatgactgttggtcgccctatcgggatcgcaccgggacggtc

SEQ ID NO: 410501 - DNA, 55 bp, Artificial
  Synthetic oligonucleotide
gccgatacacagcgggaagacgtacgttaaggacggatatctatacgtggccgat

SEQ ID NO: 410502 - DNA, 55 bp, Artificial
  Synthetic oligonucleotide
gccgatacagaaaatcccaccacttatcctgctgcagaaacagacgagcaaagag

SEQ ID NO: 410503 - DNA, 55 bp, Artificial
  Synthetic oligonucleotide
gccgatactagaatattgttcatcaaagaggggaaaatcgtccacattagcccac

SEQ ID NO: 410504 - DNA, 59 bp, Artificial
  Synthetic oligonucleotide
gccgatagccttgaggggcaagggtggcgactcctcgctcccatcacggcctattccca

SEQ ID NO: 410505 - DNA, 53 bp, Artificial
  Synthetic oligonucleotide
gccgatagtaatatagtgagactttggtgtaataaacgtagcaacttggcttt

SEQ ID NO: 410506 - DNA, 60 bp, Artificial
  Synthetic oligonucleotide
gccgatattcgcttagtgcaagaacactttgacataatccgagaagaggcagtcgcaaac

SEQ ID NO: 410507 - DNA, 56 bp, Artificial
  Synthetic oligonucleotide
gccgatcaagtgcacggcgccaggattttagccgttttcccgacgccttcttacag

SEQ ID NO: 410508 - DNA, 55 bp, Artificial
  Synthetic oligonucleotide
gccgatcaataatggtagaattccagacaaggggatacagtgagtgggttcaagg

SEQ ID NO: 410509 - DNA, 60 bp, Artificial
  Synthetic oligonucleotide
gccgatcagctttacggtaaattgtacaggcagtaatttaggcaatgttagcggatgctg

SEQ ID NO: 410510 - DNA, 55 bp, Artificial
  Synthetic oligonucleotide
gccgatccaaccgtccgaggtgctgcaagccaaggtactggatttggctaaccac

SEQ ID NO: 410511 - DNA, 59 bp, Artificial
  Synthetic oligonucleotide
gccgatccgagataacaacatccccccggaagtcctgcgcaatatatggggccttgagc

SEQ ID NO: 410512 - DNA, 58 bp, Artificial
  Synthetic oligonucleotide
gccgatcctaaaaggaaatcgactgttgttagtgggaatggtgtggtggcgattgcga

SEQ ID NO: 410513 - DNA, 58 bp, Artificial
  Synthetic oligonucleotide
gccgatccttggactaaaaagacaaatgacgagttaaagaaagagaatgagatgtggc

SEQ ID NO: 410514 - DNA, 60 bp, Artificial
  Synthetic oligonucleotide
gccgatcgactacaggggaatcaccgcacacaggcttgttggcgcagaacccagacctcc

SEQ ID NO: 410515 - DNA, 60 bp, Artificial
  Synthetic oligonucleotide
gccgatcgcaacatattcacaatcgcaattgactatagtgaatacgatacacacctaacg

SEQ ID NO: 410516 - DNA, 55 bp, Artificial
  Synthetic oligonucleotide
gccgatgaagcgcaatggaataagcggtccaccaagaagaaaggttctgcgccgc

SEQ ID NO: 410517 - DNA, 58 bp, Artificial
  Synthetic oligonucleotide
gccgatgaatcggtacccgttgatggctcgaacgcgtggtgaaattcggtcgatacga

SEQ ID NO: 410518 - DNA, 55 bp, Artificial
  Synthetic oligonucleotide
gccgatgagttatgggcaactctgcggcgtttggtgcggtgagtgctcggacagg

SEQ ID NO: 410519 - DNA, 55 bp, Artificial
  Synthetic oligonucleotide
gccgatgccagcggcccgctttacttacaagcttcgaccactggacggaccgttc

SEQ ID NO: 410520 - DNA, 55 bp, Artificial
  Synthetic oligonucleotide
gccgatggaagcagtgtccatcgaaacccggaatgggtctcacttctaaggagca

SEQ ID NO: 410521 - DNA, 55 bp, Artificial
  Synthetic oligonucleotide
gccgatggatgttggtatgccatggaaatcagaccactgaaaacgacacctggac

SEQ ID NO: 410522 - DNA, 55 bp, Artificial
  Synthetic oligonucleotide
gccgatggctttgaacaagataatcgcaccatttctaagaatggttggcggcgct

SEQ ID NO: 410523 - DNA, 60 bp, Artificial
  Synthetic oligonucleotide
gccgatggttgacgctttgcgctgggcgagcgtctaacatgtgagtggattagcagatgt

SEQ ID NO: 410524 - DNA, 60 bp, Artificial
  Synthetic oligonucleotide
gccgatgtctaccagaatagctgaggcaacgtctgctatagtgtcgaaacatcctgcgcg

SEQ ID NO: 410525 - DNA, 60 bp, Artificial
  Synthetic oligonucleotide
gccgatgtgtgctacgactgaaacagggcgggtcgtgatgatgtgggataaggattccga

SEQ ID NO: 410526 - DNA, 55 bp, Artificial
  Synthetic oligonucleotide
gccgattcccgggtacatggtgtctaatatgttccttatcccctcctccaaggaa

SEQ ID NO: 410527 - DNA, 52 bp, Artificial
  Synthetic oligonucleotide
gccgattctaagtgttgggttgaacccgacttagaaaaaggcccacacgaat

SEQ ID NO: 410528 - DNA, 59 bp, Artificial
  Synthetic oligonucleotide
gccgattgcagagtcggtggtgtaaaagtgtgctacggcttgttccgtaggcataataa

SEQ ID NO: 410529 - DNA, 55 bp, Artificial
  Synthetic oligonucleotide
gccgattgtcaaagtgcccttttatatgtcggaagcaacacagaattcgctgacg

SEQ ID NO: 410530 - DNA, 57 bp, Artificial
  Synthetic oligonucleotide
gccgattgtgaagcttactctgaaaccgggattttcaatataagctcacctacttgt

SEQ ID NO: 410531 - DNA, 55 bp, Artificial
  Synthetic oligonucleotide
gccgattgttcatgccttgctacgtggaccatttaaattccttgttggcagccaa

SEQ ID NO: 410532 - DNA, 55 bp, Artificial
  Synthetic oligonucleotide
gccgatttctgagccggggcgggatatcgacgaaaccaaaccacatggcgcaccc

SEQ ID NO: 410533 - DNA, 52 bp, Artificial
  Synthetic oligonucleotide
gccgatttgaattactttcggcgaccgtgtaacccacgggggcgcaccacag

SEQ ID NO: 410534 - DNA, 55 bp, Artificial
  Synthetic oligonucleotide
gccgcaaaatctcgcaaaatctcgccaaatctcgccaaatctcgccaaatctcgc

SEQ ID NO: 410535 - DNA, 55 bp, Artificial
  Synthetic oligonucleotide
gccgcaaagctggtcgcattgggtgtcaatgccgtggcctattaccgcggtcttg

SEQ ID NO: 410536 - DNA, 54 bp, Artificial
  Synthetic oligonucleotide
gccgcaacagatacccagaaaggtcgggtttggcgaacaaatccatacccgtgt

SEQ ID NO: 410537 - DNA, 55 bp, Artificial
  Synthetic oligonucleotide
gccgcaaccaaactggatatagaagtgagaagaacagtcaaagcgaaagagatgg

SEQ ID NO: 410538 - DNA, 55 bp, Artificial
  Synthetic oligonucleotide
gccgcaacgctaattactctccccgttcaggaattgggccaagaattaacaaggc

SEQ ID NO: 410539 - DNA, 59 bp, Artificial
  Synthetic oligonucleotide
gccgcaactatcaactattggttagccatagttgaaccatttctcacatctgatgagga

SEQ ID NO: 410540 - DNA, 55 bp, Artificial
  Synthetic oligonucleotide
gccgcaactctgtccataatttgcttgctcaccactggtgccctggcctgttcag

SEQ ID NO: 410541 - DNA, 60 bp, Artificial
  Synthetic oligonucleotide
gccgcaactgcattagctaatactatagaggtcttcagatcgaacggcttaacagctaat

SEQ ID NO: 410542 - DNA, 60 bp, Artificial
  Synthetic oligonucleotide
gccgcaagccaagtcagagttcaaaacggaacatgcgtcattttggcaacggacatggga

SEQ ID NO: 410543 - DNA, 60 bp, Artificial
  Synthetic oligonucleotide
gccgcaataataattcgcacatgtcatcgtgagattgacacacgtgttatacccacaaca

SEQ ID NO: 410544 - DNA, 55 bp, Artificial
  Synthetic oligonucleotide
gccgcaatagttgtcccacctggtgtcgatcctgtccaaagcacttccatgctac

SEQ ID NO: 410545 - DNA, 60 bp, Artificial
  Synthetic oligonucleotide
gccgcaatcgatgggctagttcaaggcagtgtgcactcaattatgacgggagagtcttac

SEQ ID NO: 410546 - DNA, 53 bp, Artificial
  Synthetic oligonucleotide
gccgcaatcttggtctacagggctgtgcttttcaatctactatcgctgagctt

SEQ ID NO: 410547 - DNA, 53 bp, Artificial
  Synthetic oligonucleotide
gccgcaatttaagagaatgcattcaagcaatctgggggctgtaccaatcctgg

SEQ ID NO: 410548 - DNA, 52 bp, Artificial
  Synthetic oligonucleotide
gccgcacaacgggttaccgcactggtgggtcggttcccggttgtggtacttc

SEQ ID NO: 410549 - DNA, 56 bp, Artificial
  Synthetic oligonucleotide
gccgcacaagtaattgtgcggtcccaaagaacgcgcccacgcagttttgcccgttc

SEQ ID NO: 410550 - DNA, 51 bp, Artificial
  Synthetic oligonucleotide
gccgcacacgatgaccgactcctcagggtcaggtgaggagataggcttggg

SEQ ID NO: 410551 - DNA, 53 bp, Artificial
  Synthetic oligonucleotide
gccgcacatcgtgtgtgcgagaccctagatatatacaatcggtttaacacgcg

SEQ ID NO: 410552 - DNA, 57 bp, Artificial
  Synthetic oligonucleotide
gccgcacccgccctcttcatgactggttccacaatgagttcccaaaggccactgtcc

SEQ ID NO: 410553 - DNA, 54 bp, Artificial
  Synthetic oligonucleotide
gccgcacggtggtgtgtacaaagacgggacaaagactatcgtttacggaggtcc

SEQ ID NO: 410554 - DNA, 55 bp, Artificial
  Synthetic oligonucleotide
gccgcacgttatctgattgccttcgtaaatgaagtcgatagcgcggtacacatcg

SEQ ID NO: 410555 - DNA, 55 bp, Artificial
  Synthetic oligonucleotide
gccgcactcatggtgctacaccgtgggaaccgcgtgagagacatcacgaagcact

SEQ ID NO: 410556 - DNA, 55 bp, Artificial
  Synthetic oligonucleotide
gccgcagaaactcttccaggtcaccagtgcagtgcttgataacaggagtcttccc

SEQ ID NO: 410557 - DNA, 50 bp, Artificial
  Synthetic oligonucleotide
gccgcagaaagatggaacagcctaggcaatcctgggtggtagtttgctac

SEQ ID NO: 410558 - DNA, 55 bp, Artificial
  Synthetic oligonucleotide
gccgcagaagtcggcctgtacatcctgaacaaaatcagtttgagtggtgataggc

SEQ ID NO: 410559 - DNA, 55 bp, Artificial
  Synthetic oligonucleotide
gccgcagatatcatgtaacggtgtagatgtaaatcaccaattttggatcggtgac

SEQ ID NO: 410560 - DNA, 55 bp, Artificial
  Synthetic oligonucleotide
gccgcagcctacaacgcgtgttttgcacaccgatgagtatgtcaccaggacacgc

SEQ ID NO: 410561 - DNA, 55 bp, Artificial
  Synthetic oligonucleotide
gccgcagcgatgggttcccctgtgggtgaatccatggtcgttaccgactaacagc

SEQ ID NO: 410562 - DNA, 60 bp, Artificial
  Synthetic oligonucleotide
gccgcagctttggaccctgaattgattgcctcggcatatgcgtcgttggcagattgctga

SEQ ID NO: 410563 - DNA, 55 bp, Artificial
  Synthetic oligonucleotide
gccgcaggagctcacggtgtctgatagtgtgttggtcttcgaactcacggatata

SEQ ID NO: 410564 - DNA, 55 bp, Artificial
  Synthetic oligonucleotide
gccgcagggacctctgcctaggaaagccaggtattgtccaaggtttctccccatg

SEQ ID NO: 410565 - DNA, 50 bp, Artificial
  Synthetic oligonucleotide
gccgcagggcggttctgaaggctagatttcgcaccatgctctcaaagggg

SEQ ID NO: 410566 - DNA, 55 bp, Artificial
  Synthetic oligonucleotide
gccgcagtaccggctttctaatcagcttgagttggagagtgcatatcggggtcag

SEQ ID NO: 410567 - DNA, 55 bp, Artificial
  Synthetic oligonucleotide
gccgcagtgatgctctccccggtgcgtgaatccatggtccgcacggtttattgcc

SEQ ID NO: 410568 - DNA, 58 bp, Artificial
  Synthetic oligonucleotide
gccgcagttaacactgtcagcgatttcgtacaaagtgggggtctctcaatacccactg

SEQ ID NO: 410569 - DNA, 60 bp, Artificial
  Synthetic oligonucleotide
gccgcagttaccggacacgtactttgatggagatgagcaatatggtcgtagcttgttctc

SEQ ID NO: 410570 - DNA, 55 bp, Artificial
  Synthetic oligonucleotide
gccgcagttcaagtcaatgcgtcgtcgacggatggctctacgtttggcaatcctg

SEQ ID NO: 410571 - DNA, 55 bp, Artificial
  Synthetic oligonucleotide
gccgcagtttaggtcaatgcgccttctacgaacgcccttcttcttggctattctg

SEQ ID NO: 410572 - DNA, 60 bp, Artificial
  Synthetic oligonucleotide
gccgcagtttgaactgcgcaaaatggttcagtgggctttagatcacaatctaacagatga

SEQ ID NO: 410573 - DNA, 55 bp, Artificial
  Synthetic oligonucleotide
gccgcatctcctagaatgatggccctgtacggggaactgttggattccaaagacg

SEQ ID NO: 410574 - DNA, 57 bp, Artificial
  Synthetic oligonucleotide
gccgcatgatcctttgaagttagggtgcgaaaagcatggcatgccttgttcaccgtt

SEQ ID NO: 410575 - DNA, 58 bp, Artificial
  Synthetic oligonucleotide
gccgcattcgaggtctacccgccgacgtctgacggccctagtcttcgctgtgcggtgt

SEQ ID NO: 410576 - DNA, 55 bp, Artificial
  Synthetic oligonucleotide
gccgcattgctggtattcagcaggcgcggcagtttatgccgttcctgcaagggcc

SEQ ID NO: 410577 - DNA, 57 bp, Artificial
  Synthetic oligonucleotide
gccgccaagaccaaaagtaacttctagttacaacatgaatgccagagccgagtttct

SEQ ID NO: 410578 - DNA, 55 bp, Artificial
  Synthetic oligonucleotide
gccgccaagtagagagaagcactgaggtgatcaaacgggcagtagtgaatcgcac

SEQ ID NO: 410579 - DNA, 60 bp, Artificial
  Synthetic oligonucleotide
gccgccaatcagtttactctctcccaccagattcggattatttggatggttatgagaatc

SEQ ID NO: 410580 - DNA, 53 bp, Artificial
  Synthetic oligonucleotide
gccgccaattttgagagggctatttagcccctcccttaaagagttcttacgag

SEQ ID NO: 410581 - DNA, 50 bp, Artificial
  Synthetic oligonucleotide
gccgccacctgtccctggttcggtcgtttgattttcgtttttcggttaat

SEQ ID NO: 410582 - DNA, 56 bp, Artificial
  Synthetic oligonucleotide
gccgccactacggcagtaaccgccgggcagactatgaccctgaccgtagccgttac

SEQ ID NO: 410583 - DNA, 59 bp, Artificial
  Synthetic oligonucleotide
gccgccactatcgaaaaccacagcggtaggtcgtgcagagattggcctattgacatggg

SEQ ID NO: 410584 - DNA, 52 bp, Artificial
  Synthetic oligonucleotide
gccgccactcacggggagcccacacttgaggccctggagtttcaaggtcccc

SEQ ID NO: 410585 - DNA, 55 bp, Artificial
  Synthetic oligonucleotide
gccgccagaggccaatacagtggatttgtgagggcgctattccagcaaatgcgtg

SEQ ID NO: 410586 - DNA, 55 bp, Artificial
  Synthetic oligonucleotide
gccgccagtataatttatcaacatccccgctaacatctactattgccactggtac

SEQ ID NO: 410587 - DNA, 55 bp, Artificial
  Synthetic oligonucleotide
gccgccatctctcaacgatgattcgctagggaaagtgatcgcgtctctgccaggg

SEQ ID NO: 410588 - DNA, 55 bp, Artificial
  Synthetic oligonucleotide
gccgccatgatggcagataggttgaagttgaggatacaatggacaggggtggata

SEQ ID NO: 410589 - DNA, 59 bp, Artificial
  Synthetic oligonucleotide
gccgccattttaagtaagcatggcgggcggtggtgtcaaatgtcaaaggtcacagcctg

SEQ ID NO: 410590 - DNA, 58 bp, Artificial
  Synthetic oligonucleotide
gccgcccagggcgagtcatcgacccaaaaggtcagaccgtctcacacaaacaatccca

SEQ ID NO: 410591 - DNA, 56 bp, Artificial
  Synthetic oligonucleotide
gccgccccatttacacaatgtggttatcctgctctcatgcctctgtatgcctgtat

SEQ ID NO: 410592 - DNA, 54 bp, Artificial
  Synthetic oligonucleotide
gccgcccgaaatttcgtagtgggccccctatgtcggccaatagagttcgtgcct

SEQ ID NO: 410593 - DNA, 55 bp, Artificial
  Synthetic oligonucleotide
gccgccctagcggagaagctatgcttcgacgtccgacgaaggaggaatgaaagac

SEQ ID NO: 410594 - DNA, 57 bp, Artificial
  Synthetic oligonucleotide
gccgccctctttactctgaaacaccacagggatatgtcagggtaagccgcttaggta

SEQ ID NO: 410595 - DNA, 55 bp, Artificial
  Synthetic oligonucleotide
gccgcccttctctgtgacagcaagtcctgattcgcgcccacttctaggcgtgaaa

SEQ ID NO: 410596 - DNA, 59 bp, Artificial
  Synthetic oligonucleotide
gccgccgaacaaagctgtatgaagcggcccattctgatgttcgtgagtctttagggagg

SEQ ID NO: 410597 - DNA, 58 bp, Artificial
  Synthetic oligonucleotide
gccgccgcgtgtattggttcctgagtgggacacttcctcttgtatccagaaggggctg

SEQ ID NO: 410598 - DNA, 60 bp, Artificial
  Synthetic oligonucleotide
gccgccggcttatgcaggcgtgtaccacttctcccccgcctgcatcacgtatatttcgca

SEQ ID NO: 410599 - DNA, 55 bp, Artificial
  Synthetic oligonucleotide
gccgccggtggttatctgccggcttccaccttgaccctcgggtgcttgtgtttga

SEQ ID NO: 410600 - DNA, 60 bp, Artificial
  Synthetic oligonucleotide
gccgcctaactactatccttactcgccagactgtctgcatgttgatgcaagactgttcgg

SEQ ID NO: 410601 - DNA, 55 bp, Artificial
  Synthetic oligonucleotide
gccgcctacaccgcgtctgtcctttccagtctcttcacatcaggcgccaagcagg

SEQ ID NO: 410602 - DNA, 55 bp, Artificial
  Synthetic oligonucleotide
gccgcctacacctgaatgatcgggtggttgtggcccccgacaaggaaatcttata

SEQ ID NO: 410603 - DNA, 55 bp, Artificial
  Synthetic oligonucleotide
gccgcctactcccctgtctccacctgtaagggacactcatcctcaggccatgcag

SEQ ID NO: 410604 - DNA, 60 bp, Artificial
  Synthetic oligonucleotide
gccgcctagcatttcatcacatggcccgagagctgcatccggagtactacaaagactgct

SEQ ID NO: 410605 - DNA, 60 bp, Artificial
  Synthetic oligonucleotide
gccgcctagcatttcatcacatggcccgggagaaacatccggagtactataaagactgct

SEQ ID NO: 410606 - DNA, 55 bp, Artificial
  Synthetic oligonucleotide
gccgcctataccttacactggacaacctttcagactcaactcccatggctatcac

SEQ ID NO: 410607 - DNA, 58 bp, Artificial
  Synthetic oligonucleotide
gccgcctccatactccccgcagtcatctaatatgcccgtgaccgcgcctgtaaggagc

SEQ ID NO: 410608 - DNA, 55 bp, Artificial
  Synthetic oligonucleotide
gccgcctccctaaccgcaagcctacgaagagagctatagtctaccgcacaccccg

SEQ ID NO: 410609 - DNA, 55 bp, Artificial
  Synthetic oligonucleotide
gccgcctctcttggggatgagacttcggtcggcatcataccccgtgctgatgtgg

SEQ ID NO: 410610 - DNA, 60 bp, Artificial
  Synthetic oligonucleotide
gccgcctgacaaggctagatattatggcttacttagtgcgctgtgggcctatataaagac

SEQ ID NO: 410611 - DNA, 54 bp, Artificial
  Synthetic oligonucleotide
gccgcctgactacattagctcactgaccgagacttaccccgcgcaactgattaa

SEQ ID NO: 410612 - DNA, 59 bp, Artificial
  Synthetic oligonucleotide
gccgcctgagactgcagtcgtgatccccttgggtaaagccattgagcctgtgcggtact

SEQ ID NO: 410613 - DNA, 59 bp, Artificial
  Synthetic oligonucleotide
gccgcctgattctcggggaccatggcgagtcccggcgctcgtactggcgaaaggcactc

SEQ ID NO: 410614 - DNA, 60 bp, Artificial
  Synthetic oligonucleotide
gccgcctggtgtgacagcccagccatgcttcggctaggctatgatggacagccggtgact

SEQ ID NO: 410615 - DNA, 55 bp, Artificial
  Synthetic oligonucleotide
gccgcctgtctatatactatttgactcgcccaatcgggcgtgcatgtgaccttaa

SEQ ID NO: 410616 - DNA, 53 bp, Artificial
  Synthetic oligonucleotide
gccgccttcacgttctgtctcatcggtaccccccccctccagtagcgggggag

SEQ ID NO: 410617 - DNA, 52 bp, Artificial
  Synthetic oligonucleotide
gccgcgaacgtggagggcccacaacgggactcagttcgcaccgagcccacga

SEQ ID NO: 410618 - DNA, 58 bp, Artificial
  Synthetic oligonucleotide
gccgcgaagtgatccatgtaagccctcagaaccgtctcggaaggaggaccccacatgt

SEQ ID NO: 410619 - DNA, 55 bp, Artificial
  Synthetic oligonucleotide
gccgcgactcccgtgggtacggccaagttggtacaggccaacggcatgaatgtca

SEQ ID NO: 410620 - DNA, 59 bp, Artificial
  Synthetic oligonucleotide
gccgcgagtgctggatatcacattgaggggttacgatgaaagacgggcggttgttgaaa

SEQ ID NO: 410621 - DNA, 60 bp, Artificial
  Synthetic oligonucleotide
gccgcgattggcgtgtggcctctgagtcacctattcaattagggcgatcacatgggggtc

SEQ ID NO: 410622 - DNA, 60 bp, Artificial
  Synthetic oligonucleotide
gccgcgcagcggaatccatgacattttcagcggcccagtcgctgataatgtcaggaacgg

SEQ ID NO: 410623 - DNA, 55 bp, Artificial
  Synthetic oligonucleotide
gccgcgcagcgggatctttcacatttctttccgcccatgaagaaatgtaactggg

SEQ ID NO: 410624 - DNA, 58 bp, Artificial
  Synthetic oligonucleotide
gccgcgcagcgtcaccgattgatgaagttgaatcggtgaagaagatggtaaggtctgt

SEQ ID NO: 410625 - DNA, 59 bp, Artificial
  Synthetic oligonucleotide
gccgcgcattaagatccgtatatcagcggctacctcctgtttttctggcgtagttctag

SEQ ID NO: 410626 - DNA, 55 bp, Artificial
  Synthetic oligonucleotide
gccgcgcattatgcagcgttgacagtttgaagataggactagacggtgagtaata

SEQ ID NO: 410627 - DNA, 55 bp, Artificial
  Synthetic oligonucleotide
gccgcgcctgtgcacaaaagaagagttttgcgcaaaggtgagatcaaatgcagcg

SEQ ID NO: 410628 - DNA, 56 bp, Artificial
  Synthetic oligonucleotide
gccgcgccttcagacctgaactcgttacgcgtcctcctcatagccagggacggagc

SEQ ID NO: 410629 - DNA, 55 bp, Artificial
  Synthetic oligonucleotide
gccgcggcaatgataagaaagagggccaaccaaagtggaaatatagtggcaaaca

SEQ ID NO: 410630 - DNA, 54 bp, Artificial
  Synthetic oligonucleotide
gccgcggggacctgaacccacttcagtccccttatggtggcccaagtccttatg

SEQ ID NO: 410631 - DNA, 55 bp, Artificial
  Synthetic oligonucleotide
gccgcggtatctacacatacagttaccaaggcagagtcatcggatccagtgagcg

SEQ ID NO: 410632 - DNA, 55 bp, Artificial
  Synthetic oligonucleotide
gccgcggtgtcaaaaaccgcgtggacgtggttaacatccctgctgggaagatcgg

SEQ ID NO: 410633 - DNA, 50 bp, Artificial
  Synthetic oligonucleotide
gccgcgtaatagccaccgcattcctcttgaacggactggactccgccagc

SEQ ID NO: 410634 - DNA, 55 bp, Artificial
  Synthetic oligonucleotide
gccgcgtacgctggtatgattgcagagagtgtgatctccttaaccgggcgtacgg

SEQ ID NO: 410635 - DNA, 60 bp, Artificial
  Synthetic oligonucleotide
gccgcgtctagtgatcgattaggcagttggtaccgacggatcagtactccgatgtatccc

SEQ ID NO: 410636 - DNA, 60 bp, Artificial
  Synthetic oligonucleotide
gccgcgtgcgaggctaagagatgtaagccaatcctgtaaaatcctgggcaatagcccttg

SEQ ID NO: 410637 - DNA, 52 bp, Artificial
  Synthetic oligonucleotide
gccgcgtgtaccggttggagtatctgtaactggtattctaacacctggaatc

SEQ ID NO: 410638 - DNA, 60 bp, Artificial
  Synthetic oligonucleotide
gccgcgtgtgactcgtatgaatttagtataaagcaaacaatcgcgatcgtaagtctcaga

SEQ ID NO: 410639 - DNA, 55 bp, Artificial
  Synthetic oligonucleotide
gccgcgttcagcagtggctcggtggtatcgaactatgcaccaccacaggactcca

SEQ ID NO: 410640 - DNA, 55 bp, Artificial
  Synthetic oligonucleotide
gccgcgttctatacgggcagatcaataccaggccccttacgatcccgggtcctcc

SEQ ID NO: 410641 - DNA, 55 bp, Artificial
  Synthetic oligonucleotide
gccgcgttctgaactgcttgaggaataccgcagactcagccagaaagaggggcgc

SEQ ID NO: 410642 - DNA, 58 bp, Artificial
  Synthetic oligonucleotide
gccgcgtttgctaattgtgagtcctccggcccctgaatgcggctaatcttaccccaca

SEQ ID NO: 410643 - DNA, 55 bp, Artificial
  Synthetic oligonucleotide
gccgctaaacaacaaggcagagtagctgaatggtgtcaaatgaaatacttttgga

SEQ ID NO: 410644 - DNA, 55 bp, Artificial
  Synthetic oligonucleotide
gccgctaactttcaatcttaaactcagggagtacaagagcacaagtaattgcaac

SEQ ID NO: 410645 - DNA, 54 bp, Artificial
  Synthetic oligonucleotide
gccgctaagaataacacgccggaaactgaacttcgggagtccctcccgtctcat

SEQ ID NO: 410646 - DNA, 55 bp, Artificial
  Synthetic oligonucleotide
gccgctaattataaacattagtacacagttgacttcacaccatctaccgagtacg

SEQ ID NO: 410647 - DNA, 55 bp, Artificial
  Synthetic oligonucleotide
gccgctaccacatctgtgctcgagtcttatgttgcagcagcgtcacaggcggcgt

SEQ ID NO: 410648 - DNA, 55 bp, Artificial
  Synthetic oligonucleotide
gccgctaccgcctcatcatgagcgtttccctcgtggatcaactggtagcccgggt

SEQ ID NO: 410649 - DNA, 54 bp, Artificial
  Synthetic oligonucleotide
gccgctatactggagagcctctgcggcgaacctgtatctccagagctagatctg

SEQ ID NO: 410650 - DNA, 60 bp, Artificial
  Synthetic oligonucleotide
gccgctatatgtattgtcgtgagcgccaaattatgactgtagtatagttactgcgcgtat

SEQ ID NO: 410651 - DNA, 60 bp, Artificial
  Synthetic oligonucleotide
gccgctatcgtgacagatacagattcacgattcaccagaagaatgagccatatgctagag

SEQ ID NO: 410652 - DNA, 55 bp, Artificial
  Synthetic oligonucleotide
gccgctattgaagacgaagactttgttcgtgccgtgatgtttaatcaggatcgat

SEQ ID NO: 410653 - DNA, 55 bp, Artificial
  Synthetic oligonucleotide
gccgctcaagcactggcaaagaaactatccgaccaagaaccatcagttataaacc

SEQ ID NO: 410654 - DNA, 58 bp, Artificial
  Synthetic oligonucleotide
gccgctcaagcttgggtgagtgccgttggggagggtggtagagtgcttaatgatgggg

SEQ ID NO: 410655 - DNA, 60 bp, Artificial
  Synthetic oligonucleotide
gccgctcactggcatgcgctaggtgcggcgcaagaggcgaaggggcgtacgctcagtgag

SEQ ID NO: 410656 - DNA, 51 bp, Artificial
  Synthetic oligonucleotide
gccgctcatcgacctacttacagaagaccccccgccttatagggacccaag

SEQ ID NO: 410657 - DNA, 55 bp, Artificial
  Synthetic oligonucleotide
gccgctccaagagctcttcgacatgccctcagtttcaactgacacagtggaaagg

SEQ ID NO: 410658 - DNA, 55 bp, Artificial
  Synthetic oligonucleotide
gccgctcccattgcaggaaacattatctgtaactcaaatattacgggtctactat

SEQ ID NO: 410659 - DNA, 60 bp, Artificial
  Synthetic oligonucleotide
gccgctccttgcctaaaattactgatgagcagctggatcgtctttggaggggaggaccaa

SEQ ID NO: 410660 - DNA, 59 bp, Artificial
  Synthetic oligonucleotide
gccgctcgagaaagtccaggcgaataaaacacgaacttttactgcagcgccgattgata

SEQ ID NO: 410661 - DNA, 55 bp, Artificial
  Synthetic oligonucleotide
gccgctcgaggtaaacacgtctaccgtcaaaccaagggacagttgcggaaacaca

SEQ ID NO: 410662 - DNA, 60 bp, Artificial
  Synthetic oligonucleotide
gccgctcgagtggccattctgagatcctcccgcaacagcagatccatgccagatgacccc

SEQ ID NO: 410663 - DNA, 59 bp, Artificial
  Synthetic oligonucleotide
gccgctcgatcacacccagaactaacaattcggcctctcgtgacgagccccttggtgaa

SEQ ID NO: 410664 - DNA, 55 bp, Artificial
  Synthetic oligonucleotide
gccgctctccattagtatgatcgatcgactgttggaagtgagagacccgaaatcc

SEQ ID NO: 410665 - DNA, 55 bp, Artificial
  Synthetic oligonucleotide
gccgctctcttgctctaacggtcattcatggtgctgggggtagcggcaagtctca

SEQ ID NO: 410666 - DNA, 60 bp, Artificial
  Synthetic oligonucleotide
gccgctctgagctcaaagttggacgataaggtcggcacatatattagcgacgcgtcacct

SEQ ID NO: 410667 - DNA, 60 bp, Artificial
  Synthetic oligonucleotide
gccgctctgcctcgactagcggccatggtggacgatggcaagcttaaggaaatggtcaat

SEQ ID NO: 410668 - DNA, 55 bp, Artificial
  Synthetic oligonucleotide
gccgctcttcgcatacatccataagcgaggggagtcacgggtttgaagtgaaaag

SEQ ID NO: 410669 - DNA, 59 bp, Artificial
  Synthetic oligonucleotide
gccgctgaaattgaacaagttacattagcatttctaactatgaattcaccatatgatgc

SEQ ID NO: 410670 - DNA, 58 bp, Artificial
  Synthetic oligonucleotide
gccgctgacaacagactcacgccaggctgaccacgtgccattgctacaataacgtgta

SEQ ID NO: 410671 - DNA, 60 bp, Artificial
  Synthetic oligonucleotide
gccgctgacgatccagtattcggttcattcccacacaggcttgtcgctttgactagacat

SEQ ID NO: 410672 - DNA, 55 bp, Artificial
  Synthetic oligonucleotide
gccgctgagtgtacctcaagcaacgcaccatgctcaagattttccgtactctgcg

SEQ ID NO: 410673 - DNA, 55 bp, Artificial
  Synthetic oligonucleotide
gccgctgcacctccggaacaaagcagaatgcaattctcctctttaaccgtgaatg

SEQ ID NO: 410674 - DNA, 55 bp, Artificial
  Synthetic oligonucleotide
gccgctgcataaaacaccctcaatgaagcttaaaacaaatcataagaaggtggcg

SEQ ID NO: 410675 - DNA, 55 bp, Artificial
  Synthetic oligonucleotide
gccgctgcgtatactgccattgcgtatactgccactgcgtatgctgccactgcgt

SEQ ID NO: 410676 - DNA, 55 bp, Artificial
  Synthetic oligonucleotide
gccgctgctactttggctggtagtaacgaagttattggatttggtgacacggaac

SEQ ID NO: 410677 - DNA, 55 bp, Artificial
  Synthetic oligonucleotide
gccgctgcttctaattgcacgcgatgtaatcccgcagtgtccaaccgccagcgtc

SEQ ID NO: 410678 - DNA, 60 bp, Artificial
  Synthetic oligonucleotide
gccgctgcttgggttaacaggcccatgtataggaagcccaggatctatcgcactttgcga

SEQ ID NO: 410679 - DNA, 55 bp, Artificial
  Synthetic oligonucleotide
gccgctgtcaaccgctgtaagtcttgtatccagtattgacctagtgccgacgtac

SEQ ID NO: 410680 - DNA, 55 bp, Artificial
  Synthetic oligonucleotide
gccgctgtctcattagttcaagcacagacaaatgcacgcgcaatagcggcgatga

SEQ ID NO: 410681 - DNA, 55 bp, Artificial
  Synthetic oligonucleotide
gccgctgttagtcagattggggtcgtaatccatgaagtcatgtggagtggcatcg

SEQ ID NO: 410682 - DNA, 57 bp, Artificial
  Synthetic oligonucleotide
gccgcttacaccacgtctagttttactcaactcttcaacccaggcgccaagcagaac

SEQ ID NO: 410683 - DNA, 59 bp, Artificial
  Synthetic oligonucleotide
gccgcttacccaaccactatgagagaaggcaacagatcgattttgtgttacctccaaca

SEQ ID NO: 410684 - DNA, 55 bp, Artificial
  Synthetic oligonucleotide
gccgcttacgcccacagtgttctcttgagtgtctgcaaaatggaaaacaagatcg

SEQ ID NO: 410685 - DNA, 54 bp, Artificial
  Synthetic oligonucleotide
gccgcttatggcttccaatactcaccagcgcagcgggtcgaatatcttttgacc

SEQ ID NO: 410686 - DNA, 60 bp, Artificial
  Synthetic oligonucleotide
gccgcttcagtccacctccttggtgatcccaaccaaatccctgctatcgattttgagcat

SEQ ID NO: 410687 - DNA, 55 bp, Artificial
  Synthetic oligonucleotide
gccgcttctggacttgctggcctcctcagtccaggcgctaagcagaacatccagc

SEQ ID NO: 410688 - DNA, 60 bp, Artificial
  Synthetic oligonucleotide
gccgcttgagagacttcatcttgattgtgacgaggactgtggagattctactgaggcggg

SEQ ID NO: 410689 - DNA, 55 bp, Artificial
  Synthetic oligonucleotide
gccgcttggcgtatccagctgcaaacttccagacaacgtgcaacatatcacgacg

SEQ ID NO: 410690 - DNA, 55 bp, Artificial
  Synthetic oligonucleotide
gccgcttgttcacacccatcatttaattcggcatcctgtgacaagcccctcggtg

SEQ ID NO: 410691 - DNA, 55 bp, Artificial
  Synthetic oligonucleotide
gccgcttgtttctagtacgaacttgatgcatcttccatgctctacactccacgcc

SEQ ID NO: 410692 - DNA, 58 bp, Artificial
  Synthetic oligonucleotide
gccgcttgttttgctcgcagccggtctggagcaaaacttatcgggaccgacaattctg

SEQ ID NO: 410693 - DNA, 58 bp, Artificial
  Synthetic oligonucleotide
gccgctttcactatgtggaaactgacgtatcttgatcatcaattgatgccgatattgg

SEQ ID NO: 410694 - DNA, 60 bp, Artificial
  Synthetic oligonucleotide
gccgctttcttatcgaatgtgccctatgcgcatgcattggatcatctttttctggttcgt

SEQ ID NO: 410695 - DNA, 55 bp, Artificial
  Synthetic oligonucleotide
gccggaacaattcgtgcctacgctagactacctagacgaccacgcaaaagcaaca

SEQ ID NO: 410696 - DNA, 55 bp, Artificial
  Synthetic oligonucleotide
gccggaacatcactggtttgtgcaagaatgcaattgctccatctaccctggtgcc

SEQ ID NO: 410697 - DNA, 54 bp, Artificial
  Synthetic oligonucleotide
gccggaacgccaaaactggcagttcccggcgtcatttttcgacacgcgcggcgg

SEQ ID NO: 410698 - DNA, 54 bp, Artificial
  Synthetic oligonucleotide
gccggaactacaaagacctaggtaattgtcacccgatagggatggtaataggga

SEQ ID NO: 410699 - DNA, 58 bp, Artificial
  Synthetic oligonucleotide
gccggaactatatttcgggattgacttctatgtcacgggagctggggacgattatata

SEQ ID NO: 410700 - DNA, 55 bp, Artificial
  Synthetic oligonucleotide
gccggaagaaaggcgctgacaacagcggagacaacctaaaggtctatggtactga

SEQ ID NO: 410701 - DNA, 55 bp, Artificial
  Synthetic oligonucleotide
gccggaagctaacagcttcaagagcttcactccatgtgttgaggcagttgctgag

SEQ ID NO: 410702 - DNA, 56 bp, Artificial
  Synthetic oligonucleotide
gccggaatactcttgggtaaccccaagcgcttgggacaatcttcagaccttcgcgc

SEQ ID NO: 410703 - DNA, 60 bp, Artificial
  Synthetic oligonucleotide
gccggaatgccataacatgtcatagaagccgtcacgattcccatttgtcggagcttcact

SEQ ID NO: 410704 - DNA, 52 bp, Artificial
  Synthetic oligonucleotide
gccggaccgtacgcgcggcgatgaagaactaccagggcgttctcgactgtga

SEQ ID NO: 410705 - DNA, 55 bp, Artificial
  Synthetic oligonucleotide
gccggacggacaagtcaattttaattacaacacgggaatgctaataatactcgac

SEQ ID NO: 410706 - DNA, 59 bp, Artificial
  Synthetic oligonucleotide
gccggacggtggcttgagttgaactacgcaatcatacccctcctgaatgatattcgagg

SEQ ID NO: 410707 - DNA, 56 bp, Artificial
  Synthetic oligonucleotide
gccggactgagaaatgctgtcactcaaggcttaccggttgagttaaagcctggtag

SEQ ID NO: 410708 - DNA, 58 bp, Artificial
  Synthetic oligonucleotide
gccggagaacctgcctcatagaaggcttctggccgttgagctacggacactggtaccg

SEQ ID NO: 410709 - DNA, 55 bp, Artificial
  Synthetic oligonucleotide
gccggagacatatgaccgtccggagccgcgtattaagcaactggcgcgtcgcagt

SEQ ID NO: 410710 - DNA, 51 bp, Artificial
  Synthetic oligonucleotide
gccggagacatctcggaaggggaaagacggaaggtggaaaagaaggggtgg

SEQ ID NO: 410711 - DNA, 55 bp, Artificial
  Synthetic oligonucleotide
gccggagagaagggtagtggctcagggaccagaagaggaatttggtaggtcactt

SEQ ID NO: 410712 - DNA, 55 bp, Artificial
  Synthetic oligonucleotide
gccggagagcgatgcagctactcgcgtcactgccatacttagtagcctcactgtg

SEQ ID NO: 410713 - DNA, 58 bp, Artificial
  Synthetic oligonucleotide
gccggagccggtaagtctacagccctaaggaagttgatcctcagacacccaacattca

SEQ ID NO: 410714 - DNA, 55 bp, Artificial
  Synthetic oligonucleotide
gccggagcttagctcgcccacgttctaatattggaccactacgctacgcagagcc

SEQ ID NO: 410715 - DNA, 55 bp, Artificial
  Synthetic oligonucleotide
gccggagcttctgcggcacagatgcgtcaacgctttggacgttttctacacgctc

SEQ ID NO: 410716 - DNA, 56 bp, Artificial
  Synthetic oligonucleotide
gccggaggcccatattaaatgtcgctggcgggtcattagacccgtttagacgaagc

SEQ ID NO: 410717 - DNA, 51 bp, Artificial
  Synthetic oligonucleotide
gccggagtagtggtgcatgacaatcggtcataggatagacgacgtgagccg

SEQ ID NO: 410718 - DNA, 55 bp, Artificial
  Synthetic oligonucleotide
gccggagtgtaccacttctctccggcctgcattacgtagatttcgcagttggcgt

SEQ ID NO: 410719 - DNA, 55 bp, Artificial
  Synthetic oligonucleotide
gccggatatcgcgttaacaatcgagaacgtgccataccctttgtcctctttccag

SEQ ID NO: 410720 - DNA, 55 bp, Artificial
  Synthetic oligonucleotide
gccggatcactctcgccagttgcttctctaccactgtgaacggggcgctgttcgc

SEQ ID NO: 410721 - DNA, 60 bp, Artificial
  Synthetic oligonucleotide
gccggatcgtgaggtcctttaccaacagtacgacgagatggaggagtgctcacggcacat

SEQ ID NO: 410722 - DNA, 59 bp, Artificial
  Synthetic oligonucleotide
gccggatgcgggaaatctacctgggcggctatgttcggagacgctatgggaggctacta

SEQ ID NO: 410723 - DNA, 55 bp, Artificial
  Synthetic oligonucleotide
gccggatggacctccctgttcccaaaggtcaaaattcttactgatggatgctctg

SEQ ID NO: 410724 - DNA, 60 bp, Artificial
  Synthetic oligonucleotide
gccggatggctcgcttcttgaattgtctgtggctggctttgattggaacctgagtagagt

SEQ ID NO: 410725 - DNA, 60 bp, Artificial
  Synthetic oligonucleotide
gccggatgtacaaaagattctagatgacattaaagcgttagccgcagagcaggtgtataa

SEQ ID NO: 410726 - DNA, 60 bp, Artificial
  Synthetic oligonucleotide
gccggatgtgcatggtatgatctgacccctgcagagactaccgtgaggttgcgtgcttac

SEQ ID NO: 410727 - DNA, 54 bp, Artificial
  Synthetic oligonucleotide
gccggattggagtcttccggccagaatcagcaaaaggagttgatgcgtatgcag

SEQ ID NO: 410728 - DNA, 60 bp, Artificial
  Synthetic oligonucleotide
gccggcacagaggatgtcgtgtgctgctcaatgtcttactcctggacaggcgcactcgtc

SEQ ID NO: 410729 - DNA, 60 bp, Artificial
  Synthetic oligonucleotide
gccggcacatccaaaacaggtcaaaattttcgaaaatccatctgaccactatgcattata

SEQ ID NO: 410730 - DNA, 52 bp, Artificial
  Synthetic oligonucleotide
gccggcacgtttggtattgttgggtcggaaaggaggcggtaaatcaaggttg

SEQ ID NO: 410731 - DNA, 57 bp, Artificial
  Synthetic oligonucleotide
gccggcagaaaccttttcaccttgataatgttcgaggctgtggaactactgggagta

SEQ ID NO: 410732 - DNA, 60 bp, Artificial
  Synthetic oligonucleotide
gccggcataaattcacaagcagcaaatgattgttttaaaacactaatagcagctatgtta

SEQ ID NO: 410733 - DNA, 55 bp, Artificial
  Synthetic oligonucleotide
gccggcataccctacggatgatcccttaagactgaaggcgtactcccactgagtg

SEQ ID NO: 410734 - DNA, 55 bp, Artificial
  Synthetic oligonucleotide
gccggcatcactggatgcgcgctgataacgctatttctcaacagtcctcagcggc

SEQ ID NO: 410735 - DNA, 55 bp, Artificial
  Synthetic oligonucleotide
gccggcatcgtaggacaatacctgaaagggcttctcaacatggagtgggcgtctg

SEQ ID NO: 410736 - DNA, 60 bp, Artificial
  Synthetic oligonucleotide
gccggcatctacatagtctaccttaaaatctcatcccacgtgcgaagcatcgttaatgaa

SEQ ID NO: 410737 - DNA, 60 bp, Artificial
  Synthetic oligonucleotide
gccggcatgagacggtacaggactgcaactgttcaatctatcccggccacctatcaggtc

SEQ ID NO: 410738 - DNA, 55 bp, Artificial
  Synthetic oligonucleotide
gccggcattagcttgcataaaactggtgcggactatcttgcgggttcttacttgc

SEQ ID NO: 410739 - DNA, 60 bp, Artificial
  Synthetic oligonucleotide
gccggccaggagacatacaccagcacttccggtgagccgtgtcaaggacagacattgatc

SEQ ID NO: 410740 - DNA, 60 bp, Artificial
  Synthetic oligonucleotide
gccggccataattgaaaggctacatgggcttgacgccttctcattgcacacatactctcc

SEQ ID NO: 410741 - DNA, 59 bp, Artificial
  Synthetic oligonucleotide
gccggccatcgtgttgctatctctacctataccactagcctgggtgccggtcccacctc

SEQ ID NO: 410742 - DNA, 56 bp, Artificial
  Synthetic oligonucleotide
gccggccccacctggcagcttttgtcggccactagacaaacccgtccaatcagaat

SEQ ID NO: 410743 - DNA, 53 bp, Artificial
  Synthetic oligonucleotide
gccggccccgatagggaaatgggaccccgatatatcggtaatcaattgggacc

SEQ ID NO: 410744 - DNA, 50 bp, Artificial
  Synthetic oligonucleotide
gccggcccggattaaaagagaaacgaaagtaaactttcttcggccgccgc

SEQ ID NO: 410745 - DNA, 58 bp, Artificial
  Synthetic oligonucleotide
gccggccggcgtgccgcatttgctgaaatgaccatatctcacacgtatgaattggaga

SEQ ID NO: 410746 - DNA, 57 bp, Artificial
  Synthetic oligonucleotide
gccggcggctgatttcaattttgtctacttaacccctcccatcgagagaaccatcta

SEQ ID NO: 410747 - DNA, 59 bp, Artificial
  Synthetic oligonucleotide
gccggcggggtgatagcagaggcagcctgctgtcgccccggcccatttcctacttgaaa

SEQ ID NO: 410748 - DNA, 55 bp, Artificial
  Synthetic oligonucleotide
gccggcgtaatcaagatattggtgtactacgccatggtcgcttaactagcatcgc

SEQ ID NO: 410749 - DNA, 60 bp, Artificial
  Synthetic oligonucleotide
gccggcgtcgttctggtcatcgtaggggcagttactcatgctccacagctgatggtccag

SEQ ID NO: 410750 - DNA, 55 bp, Artificial
  Synthetic oligonucleotide
gccggcgttcaacctacccgccttcattggcgagttgcgagacctaccccgtatg

SEQ ID NO: 410751 - DNA, 55 bp, Artificial
  Synthetic oligonucleotide
gccggctaccgtgcatcaacaatacaaccaggatcaattgtcaaagaggctcagc

SEQ ID NO: 410752 - DNA, 57 bp, Artificial
  Synthetic oligonucleotide
gccggctcacggggcccagtcacgcaaatgtactcaagtgccgagggggacttggtg

SEQ ID NO: 410753 - DNA, 55 bp, Artificial
  Synthetic oligonucleotide
gccggctgaccctgcaatttggttatcaaaactgaacgattacagattcatctta

SEQ ID NO: 410754 - DNA, 60 bp, Artificial
  Synthetic oligonucleotide
gccggctgcaactgcattagccaatactatagaggttttcagatcaaacggtctaacggc

SEQ ID NO: 410755 - DNA, 50 bp, Artificial
  Synthetic oligonucleotide
gccggcttgtgcatgtcgctacaaccccggtgggtcgtcaacaatgctta

SEQ ID NO: 410756 - DNA, 55 bp, Artificial
  Synthetic oligonucleotide
gccgggaaagaagtcacagtcgcatctgtgccttttaattctaccggtgagtacg

SEQ ID NO: 410757 - DNA, 55 bp, Artificial
  Synthetic oligonucleotide
gccgggaagactcgagcaatctttgcatgcgatactgtgaactacctcgctttcg

SEQ ID NO: 410758 - DNA, 55 bp, Artificial
  Synthetic oligonucleotide
gccgggacatagatacttgggtccgttcaacccgatagagaacggggagcctgtg

SEQ ID NO: 410759 - DNA, 55 bp, Artificial
  Synthetic oligonucleotide
gccgggaggctgatttaagtgactgccgatggctgatgcgtcgccgctggatgga

SEQ ID NO: 410760 - DNA, 52 bp, Artificial
  Synthetic oligonucleotide
gccgggataaaccgtaagggagcggccggttacctagagagtaagaacatag

SEQ ID NO: 410761 - DNA, 55 bp, Artificial
  Synthetic oligonucleotide
gccgggataaacgttggaccaatatcgccagattacacacagcatatggcgacga

SEQ ID NO: 410762 - DNA, 59 bp, Artificial
  Synthetic oligonucleotide
gccgggataaggttaggaacaagtgtttcatctgtaaatagacatcaaacagagcaaga

SEQ ID NO: 410763 - DNA, 55 bp, Artificial
  Synthetic oligonucleotide
gccgggcattaccggacaactgctgcggcacctcaactccgatttgatgaacgca

SEQ ID NO: 410764 - DNA, 60 bp, Artificial
  Synthetic oligonucleotide
gccgggccttcaagagatcgcgcgatatggtggctacgccacctatcgtgctgtccggaa

SEQ ID NO: 410765 - DNA, 57 bp, Artificial
  Synthetic oligonucleotide
gccgggcgtcttcgaagtcacacgacgcaggcggtatcgccgtttacctcgcggcca

SEQ ID NO: 410766 - DNA, 55 bp, Artificial
  Synthetic oligonucleotide
gccgggctccgtggacgaatcgttacccaagcttaacgatgccaagcaaactcgc

SEQ ID NO: 410767 - DNA, 55 bp, Artificial
  Synthetic oligonucleotide
gccggggaaggaaaacttaaatctgcgatacgccaaatgcttgacgcgggagact

SEQ ID NO: 410768 - DNA, 55 bp, Artificial
  Synthetic oligonucleotide
gccggggcgggtgcaggaggcctagggccggatcaaggggcttatcgggccgtgc

SEQ ID NO: 410769 - DNA, 58 bp, Artificial
  Synthetic oligonucleotide
gccgggtaccttcaagactcctgaaggcgaagttggagccatagctctagatttcaaa

SEQ ID NO: 410770 - DNA, 54 bp, Artificial
  Synthetic oligonucleotide
gccgggtcccacgaatctaggtacatcgtattaagtctggtcccaggggtagac

SEQ ID NO: 410771 - DNA, 55 bp, Artificial
  Synthetic oligonucleotide
gccgggtcccggactagcgtattacattgttgaggaacccctcatgagcggacaa

SEQ ID NO: 410772 - DNA, 55 bp, Artificial
  Synthetic oligonucleotide
gccgggtgcaaacctttcgtttcgaacagccatgcacagatgaatcgggtgagca

SEQ ID NO: 410773 - DNA, 60 bp, Artificial
  Synthetic oligonucleotide
gccgggttacctgtcgctcaacgaggtccttcgacaacatggcgccctggagatctatga

SEQ ID NO: 410774 - DNA, 53 bp, Artificial
  Synthetic oligonucleotide
gccgggtttacgtcctcatataagtaagcgcacttccgaatggctgagttttc

SEQ ID NO: 410775 - DNA, 54 bp, Artificial
  Synthetic oligonucleotide
gccgggtttgggatagggtttatagtaggtataccctgtacattagctctcacg

SEQ ID NO: 410776 - DNA, 59 bp, Artificial
  Synthetic oligonucleotide
gccggtaacgcttggatccgcgcgatattccaatttttaggtgctggcgtctccatgac

SEQ ID NO: 410777 - DNA, 55 bp, Artificial
  Synthetic oligonucleotide
gccggtaactccagcaaacaggctgcaatagcacggagttcctatgtcatccgtt

SEQ ID NO: 410778 - DNA, 55 bp, Artificial
  Synthetic oligonucleotide
gccggtatatcccacagacccaaactacctatgcctactcttccccatcgttcat

SEQ ID NO: 410779 - DNA, 55 bp, Artificial
  Synthetic oligonucleotide
gccggtatatgtagcaatgcagatagtatttacctactcttgcgaaatgaacact

SEQ ID NO: 410780 - DNA, 55 bp, Artificial
  Synthetic oligonucleotide
gccggtcaagtgtctggcctaggcattaagctcaccatacagattctggagagca

SEQ ID NO: 410781 - DNA, 55 bp, Artificial
  Synthetic oligonucleotide
gccggtcaatgcaacggaggacccgtctagtggctactattctaccacaattaga

SEQ ID NO: 410782 - DNA, 55 bp, Artificial
  Synthetic oligonucleotide
gccggtcaattcgttggccggttccgtcttcataccccgactcgtggacagcgtc

SEQ ID NO: 410783 - DNA, 54 bp, Artificial
  Synthetic oligonucleotide
gccggtcatattacgttatgaaaattaagtcaactttgccgacttcacgttacc

SEQ ID NO: 410784 - DNA, 55 bp, Artificial
  Synthetic oligonucleotide
gccggtcccctccgtgttcaagccaacaatccacagcaacaaggattaaggcgag

SEQ ID NO: 410785 - DNA, 51 bp, Artificial
  Synthetic oligonucleotide
gccggtcccgcctcgggatagttttatacccgatagaccgcctggccgtct

SEQ ID NO: 410786 - DNA, 52 bp, Artificial
  Synthetic oligonucleotide
gccggtccgtgagtcctgcgaattacgggcggcttgagtatcccgagttgcc

SEQ ID NO: 410787 - DNA, 54 bp, Artificial
  Synthetic oligonucleotide
gccggtcgttgaacttctaacatttaatgccaaagtcaagggcgtttgttaggc

SEQ ID NO: 410788 - DNA, 59 bp, Artificial
  Synthetic oligonucleotide
gccggtctgagtgtgatagctacccccttgatcatgtagtaatcgtaggggtagtggta

SEQ ID NO: 410789 - DNA, 60 bp, Artificial
  Synthetic oligonucleotide
gccggtctggagcaaaacttatcgggactgacaattctgtcgtgctatcccgcaagtata

SEQ ID NO: 410790 - DNA, 58 bp, Artificial
  Synthetic oligonucleotide
gccggtgaagacaaattccagagtactaagatctatcgaagttgtgccgataaattcc

SEQ ID NO: 410791 - DNA, 59 bp, Artificial
  Synthetic oligonucleotide
gccggtgaagtgattaaggaatccatgattcctgatctcgttaccgccgacgacatacc

SEQ ID NO: 410792 - DNA, 55 bp, Artificial
  Synthetic oligonucleotide
gccggtgaattgcgttctaaaggatatatgagtatccctcaggtgttgtgtgccg

SEQ ID NO: 410793 - DNA, 55 bp, Artificial
  Synthetic oligonucleotide
gccggtgaattgtgctctaaaggatacatgagcgtccctcaagtgttatgcgctg

SEQ ID NO: 410794 - DNA, 51 bp, Artificial
  Synthetic oligonucleotide
gccggtgaatttaagacggaagttaagtaactcccggtatcccgtgtggtc

SEQ ID NO: 410795 - DNA, 55 bp, Artificial
  Synthetic oligonucleotide
gccggtgaccacacaaaatgtgaccactaacattctgagcaaatgcaccgtgcaa

SEQ ID NO: 410796 - DNA, 57 bp, Artificial
  Synthetic oligonucleotide
gccggtgacgcgttagagattagggtgcctgatctttacgtaactttccacgataga

SEQ ID NO: 410797 - DNA, 55 bp, Artificial
  Synthetic oligonucleotide
gccggtgactgaatcccggcagtggtaccctcgtcttcctgagacgggaaacgag

SEQ ID NO: 410798 - DNA, 55 bp, Artificial
  Synthetic oligonucleotide
gccggtgagataccattgacagatcacattttcgaacaagcagcttccacctggc

SEQ ID NO: 410799 - DNA, 55 bp, Artificial
  Synthetic oligonucleotide
gccggtgcgttctaccgccgcgtcatgattgttgatgttacaaataatgcggtgg

SEQ ID NO: 410800 - DNA, 55 bp, Artificial
  Synthetic oligonucleotide
gccggtgctcgatacgaaaacggggaagatcgtctaccgctgatctcctcccctc

SEQ ID NO: 410801 - DNA, 55 bp, Artificial
  Synthetic oligonucleotide
gccggtggatacgtcgcaggcttcgtaaaagacccagccgacgaaatcccgagtg

SEQ ID NO: 410802 - DNA, 56 bp, Artificial
  Synthetic oligonucleotide
gccggtggccaactgttctattcacgcccagtcgtctcagccaatggcgagccgac

SEQ ID NO: 410803 - DNA, 50 bp, Artificial
  Synthetic oligonucleotide
gccggtgggaccggggtattgcacggaaaagttgtctgcgctgcccacag

SEQ ID NO: 410804 - DNA, 55 bp, Artificial
  Synthetic oligonucleotide
gccggtgggactcgtgtggatgcattcaggatcatgggtgtatcagagtggattg

SEQ ID NO: 410805 - DNA, 59 bp, Artificial
  Synthetic oligonucleotide
gccggtggggaacgccctcatatcttctgtataaatgtacccgctgcttgcattgtact

SEQ ID NO: 410806 - DNA, 55 bp, Artificial
  Synthetic oligonucleotide
gccggtgtatttgacttccaagaccctatcgacgttaaaggtgcacgttgggctg

SEQ ID NO: 410807 - DNA, 56 bp, Artificial
  Synthetic oligonucleotide
gccggtgtcttcagggataggtaggcccctgagggctaggcaaggttgcgtaataa

SEQ ID NO: 410808 - DNA, 60 bp, Artificial
  Synthetic oligonucleotide
gccggttatcacacataatgtgtccgtgagtttattatcgaattgcactgtgcaacaagc

SEQ ID NO: 410809 - DNA, 52 bp, Artificial
  Synthetic oligonucleotide
gccggttatgtccgttttaacccagctcaaaaatgccggctccggcccaaat

SEQ ID NO: 410810 - DNA, 55 bp, Artificial
  Synthetic oligonucleotide
gccggttcagccatttagctatctccactggttctcttccagtctggtcagcccg

SEQ ID NO: 410811 - DNA, 55 bp, Artificial
  Synthetic oligonucleotide
gccggttccatcaatgcaccaacagtttcggacagtcgggctttagctagaaggt

SEQ ID NO: 410812 - DNA, 58 bp, Artificial
  Synthetic oligonucleotide
gccggttctcattttcctataaccagggagcgattcctgatgtattataggggcagga

SEQ ID NO: 410813 - DNA, 55 bp, Artificial
  Synthetic oligonucleotide
gccggttcttgcgctgtttagccacaatgccacagactggttcgtagcggccagg

SEQ ID NO: 410814 - DNA, 55 bp, Artificial
  Synthetic oligonucleotide
gccggttctttaatcaccctaaacaaatgaccctgcaagacatgggtcggatgtt

SEQ ID NO: 410815 - DNA, 56 bp, Artificial
  Synthetic oligonucleotide
gccggttggagcggagttattgttaggaacggagttctcaaccagaatcagagtag

SEQ ID NO: 410816 - DNA, 55 bp, Artificial
  Synthetic oligonucleotide
gccggttggcagagtctacccttgagcctcattgtgcccgttgatgagtgcctca

SEQ ID NO: 410817 - DNA, 55 bp, Artificial
  Synthetic oligonucleotide
gccggttgtcagtggagacaattctgtggacgctagaagagagtttctgtactac

SEQ ID NO: 410818 - DNA, 55 bp, Artificial
  Synthetic oligonucleotide
gccggtttgaccagcactgctcacgacaggctttggagtgggaacactccgtgta

SEQ ID NO: 410819 - DNA, 55 bp, Artificial
  Synthetic oligonucleotide
gccggtttgcacattgtacgtgtccactaaacatctctgtgacttagacagaccc

SEQ ID NO: 410820 - DNA, 55 bp, Artificial
  Synthetic oligonucleotide
gccgtaaacattgactattcaaacgaccaagttacgcaaattatgtcacgtttcc

SEQ ID NO: 410821 - DNA, 53 bp, Artificial
  Synthetic oligonucleotide
gccgtaaagcatgcggaatcgggaagggttgtatgggtcccggctcggaaggt

SEQ ID NO: 410822 - DNA, 54 bp, Artificial
  Synthetic oligonucleotide
gccgtaaagtatccaccacatgattttgctatattcggggttaaaaaaattcac

SEQ ID NO: 410823 - DNA, 58 bp, Artificial
  Synthetic oligonucleotide
gccgtaacgaccgtccctgcgactcacctcgcacttacgccatcgctcttcggtggcc

SEQ ID NO: 410824 - DNA, 60 bp, Artificial
  Synthetic oligonucleotide
gccgtaatcttggcttgcaaggctgtgcttttcaatctactatcgctgaacttcagcgtc

SEQ ID NO: 410825 - DNA, 55 bp, Artificial
  Synthetic oligonucleotide
gccgtaatgtaccacttggtcttgactgcaatttatccaggtgaagtttttacct

SEQ ID NO: 410826 - DNA, 59 bp, Artificial
  Synthetic oligonucleotide
gccgtacaacctggagcattcacgccagtggagcttggatgaccacagaggacatgctg

SEQ ID NO: 410827 - DNA, 56 bp, Artificial
  Synthetic oligonucleotide
gccgtacactctggtggtctcccccctcaatcattttggtggctacctggtcccac

SEQ ID NO: 410828 - DNA, 55 bp, Artificial
  Synthetic oligonucleotide
gccgtacactcttgtggtcccccctcactttaatttgaattaaatgtctgtggac

SEQ ID NO: 410829 - DNA, 58 bp, Artificial
  Synthetic oligonucleotide
gccgtacatagttacaaagaccgtgcaggcatgtcagcatggtccaacgagaatgagt

SEQ ID NO: 410830 - DNA, 52 bp, Artificial
  Synthetic oligonucleotide
gccgtaccacttaaatcgccacccaattgaagctttcctttaaccgaagttg

SEQ ID NO: 410831 - DNA, 60 bp, Artificial
  Synthetic oligonucleotide
gccgtacctatggattccatggttaggcataacaactggagtatagtgattatacccata

SEQ ID NO: 410832 - DNA, 57 bp, Artificial
  Synthetic oligonucleotide
gccgtacgcatcaagaatcctacgcaaaacggttttaccaccattcgtcataatctc

SEQ ID NO: 410833 - DNA, 51 bp, Artificial
  Synthetic oligonucleotide
gccgtacgcgctaccggaatacttcgcgcccggcggagaggtagccctctc

SEQ ID NO: 410834 - DNA, 57 bp, Artificial
  Synthetic oligonucleotide
gccgtacgctcttgtcgtgcatatggtaaaatgggtccgaaagtgtccagcccccga

SEQ ID NO: 410835 - DNA, 59 bp, Artificial
  Synthetic oligonucleotide
gccgtacgtgaaatccccacttagtgggcttcacttagcgaatgcattagccttaatca

SEQ ID NO: 410836 - DNA, 55 bp, Artificial
  Synthetic oligonucleotide
gccgtacgtgtgacggctcgtatgtgcgcctcatcagtcggtatgacgacacccc

SEQ ID NO: 410837 - DNA, 51 bp, Artificial
  Synthetic oligonucleotide
gccgtactcagtgagcagactggtgcccgtgtcaagtccggtgctgttgcc

SEQ ID NO: 410838 - DNA, 55 bp, Artificial
  Synthetic oligonucleotide
gccgtactcgtgtattcaaaagacgatgcacttgagtcggatgagctagtgcttc

SEQ ID NO: 410839 - DNA, 60 bp, Artificial
  Synthetic oligonucleotide
gccgtactgacattaagccgccgtcattcgcagcacagtacggagcaacggccaaaggca

SEQ ID NO: 410840 - DNA, 60 bp, Artificial
  Synthetic oligonucleotide
gccgtacttcgtacgcgcacaagggctcattcgtgcatgcatgttggtgcggaaagcggc

SEQ ID NO: 410841 - DNA, 55 bp, Artificial
  Synthetic oligonucleotide
gccgtagaacatctacctttaggagatttctcgccaggacgtttgtctagaacaa

SEQ ID NO: 410842 - DNA, 53 bp, Artificial
  Synthetic oligonucleotide
gccgtagaacggaaattaatcaactatgccaagggaaaacccttagaagcgga

SEQ ID NO: 410843 - DNA, 55 bp, Artificial
  Synthetic oligonucleotide
gccgtagaagtggtagagaacttcttgccagtcccagggagcacaatggaccgta

SEQ ID NO: 410844 - DNA, 55 bp, Artificial
  Synthetic oligonucleotide
gccgtagaggaagaattgaaggactactatacaaactatccaacgctcggtagtc

SEQ ID NO: 410845 - DNA, 55 bp, Artificial
  Synthetic oligonucleotide
gccgtagccacgctgcgacgattactttcatctggagcacattaaatgacagata

SEQ ID NO: 410846 - DNA, 60 bp, Artificial
  Synthetic oligonucleotide
gccgtagccctctgtctggacttcgatgcgcagcctgagggatctaaaaatccctcattc

SEQ ID NO: 410847 - DNA, 55 bp, Artificial
  Synthetic oligonucleotide
gccgtagctgatgtgctcgttccacacgacggcgtagatgtctacgtcgaaggtg

SEQ ID NO: 410848 - DNA, 60 bp, Artificial
  Synthetic oligonucleotide
gccgtagcttgcgagccctctatggaagcccagatgataccacttgtgtctagttcaccc

SEQ ID NO: 410849 - DNA, 50 bp, Artificial
  Synthetic oligonucleotide
gccgtagcttgcgatccttctatggaggctcaaatgataccattggtgtc

SEQ ID NO: 410850 - DNA, 55 bp, Artificial
  Synthetic oligonucleotide
gccgtaggaactaatccttactctgatgactggactcgtgttgcacaccaccttc

SEQ ID NO: 410851 - DNA, 60 bp, Artificial
  Synthetic oligonucleotide
gccgtaggcccgtgagcaatgaacggcgagatcagatgtcccgagttagtgcgccacgta

SEQ ID NO: 410852 - DNA, 60 bp, Artificial
  Synthetic oligonucleotide
gccgtagtgcctgaccttcgctcctgctgcgttgggtcctccttgtagtgggatccagcc

SEQ ID NO: 410853 - DNA, 55 bp, Artificial
  Synthetic oligonucleotide
gccgtataatatgtcttccccttaacaacaaaactgtgtacgcgcgcatacgccc

SEQ ID NO: 410854 - DNA, 55 bp, Artificial
  Synthetic oligonucleotide
gccgtatatttgctcggcacaaattccagaaggcgtaatcgctaggctacaacta

SEQ ID NO: 410855 - DNA, 55 bp, Artificial
  Synthetic oligonucleotide
gccgtatgaaacatgcccctcatatgagtcatggctccaaacacagtatgacagg

SEQ ID NO: 410856 - DNA, 55 bp, Artificial
  Synthetic oligonucleotide
gccgtatggcagcgccgagtcagcgcaaggcagttctgtcgactttagtcggcag

SEQ ID NO: 410857 - DNA, 55 bp, Artificial
  Synthetic oligonucleotide
gccgtatggtatcctgaatttggctttggctagagctggtgaccgtgtggatacc

SEQ ID NO: 410858 - DNA, 56 bp, Artificial
  Synthetic oligonucleotide
gccgtattacgggccaggggtggattacaaggacgggctagcacccttgtcagtga

SEQ ID NO: 410859 - DNA, 55 bp, Artificial
  Synthetic oligonucleotide
gccgtattcgccaactccctacatgtgagtgatagacctttcccaggggccactc

SEQ ID NO: 410860 - DNA, 52 bp, Artificial
  Synthetic oligonucleotide
gccgtatttacagtttgattgccaatcccgttgggcccccataaactccttg

SEQ ID NO: 410861 - DNA, 57 bp, Artificial
  Synthetic oligonucleotide
gccgtatttatattgggctttggatcgtatttgaattgggccttttatattatatga

SEQ ID NO: 410862 - DNA, 60 bp, Artificial
  Synthetic oligonucleotide
gccgtcaaagtagcccgtgcgacaactcatttctgcgtctccgtcgtccaaatgcgccac

SEQ ID NO: 410863 - DNA, 55 bp, Artificial
  Synthetic oligonucleotide
gccgtcaatgttgtcagacgtcaggtcgatttgaccccggcgaagccccttaacg

SEQ ID NO: 410864 - DNA, 55 bp, Artificial
  Synthetic oligonucleotide
gccgtcacaactatgtgccgggatcccttattgaacgatttcccagaatcggttc

SEQ ID NO: 410865 - DNA, 60 bp, Artificial
  Synthetic oligonucleotide
gccgtcacatgcgactataaattgtctcacaagcgcgattcattcatggatcctcagagt

SEQ ID NO: 410866 - DNA, 57 bp, Artificial
  Synthetic oligonucleotide
gccgtcacctatgccttatgtcccctaccctcgttcaacggaggtgtatgtccgatc

SEQ ID NO: 410867 - DNA, 60 bp, Artificial
  Synthetic oligonucleotide
gccgtcactacactcacgaagtgaaagacgcgcgacccgtaactctgcaccatattgact

SEQ ID NO: 410868 - DNA, 58 bp, Artificial
  Synthetic oligonucleotide
gccgtcactgggaacatagtgaactccgtcaatgtacagtcgaggaaacttttggctc

SEQ ID NO: 410869 - DNA, 55 bp, Artificial
  Synthetic oligonucleotide
gccgtcacttccccgaccgtactaatcgcaatgtataacaattgttacttagaac

SEQ ID NO: 410870 - DNA, 59 bp, Artificial
  Synthetic oligonucleotide
gccgtcagtataatttgtccacgtctccacttacatctactattgctactgggactaac

SEQ ID NO: 410871 - DNA, 55 bp, Artificial
  Synthetic oligonucleotide
gccgtcagtgaggaggaaagcaacggggctagccgtcaggtgttcctccccccga

SEQ ID NO: 410872 - DNA, 51 bp, Artificial
  Synthetic oligonucleotide
gccgtcatgggtgacaaccaatgtattactgtcctctcggttttcccggat

SEQ ID NO: 410873 - DNA, 54 bp, Artificial
  Synthetic oligonucleotide
gccgtcatttccgggttcccacgctacgtcatcaaaacacgactttcaaattcc

SEQ ID NO: 410874 - DNA, 55 bp, Artificial
  Synthetic oligonucleotide
gccgtcattttataacaggagggcggcggtactggaagtacgcaggaaggatggg

SEQ ID NO: 410875 - DNA, 57 bp, Artificial
  Synthetic oligonucleotide
gccgtccacccccgctacatacggcaaacatcgacccacttatgctacggtattcta

SEQ ID NO: 410876 - DNA, 55 bp, Artificial
  Synthetic oligonucleotide
gccgtcccacgcgactataaattgtctcacaagtgcgattcatctatggatcctc

SEQ ID NO: 410877 - DNA, 50 bp, Artificial
  Synthetic oligonucleotide
gccgtccccgtctaggtcggctccgttaaaagaggtgtccaccaggcgac

SEQ ID NO: 410878 - DNA, 56 bp, Artificial
  Synthetic oligonucleotide
gccgtcccgctcaaatcaccgagtgcggaggcatgtggttatagtgacagggtcgc

SEQ ID NO: 410879 - DNA, 58 bp, Artificial
  Synthetic oligonucleotide
gccgtcccgtcaccctttcagaacacactacagaacgtgctagcggccgccaccaaga

SEQ ID NO: 410880 - DNA, 51 bp, Artificial
  Synthetic oligonucleotide
gccgtcccgtgtgtgacgccagccttttagggcgagttgataccagtaccc

SEQ ID NO: 410881 - DNA, 54 bp, Artificial
  Synthetic oligonucleotide
gccgtccgttcgctcacccaaactccgtctacatagatcaggactgacagagca

SEQ ID NO: 410882 - DNA, 55 bp, Artificial
  Synthetic oligonucleotide
gccgtccttctctgtttcaacgagcagggaggctaggcgtacaaagggtgggaaa

SEQ ID NO: 410883 - DNA, 57 bp, Artificial
  Synthetic oligonucleotide
gccgtcgacagtttcagtttccctttgaatttcgcgaagtgggttctctgatgaaca

SEQ ID NO: 410884 - DNA, 56 bp, Artificial
  Synthetic oligonucleotide
gccgtcgagagtttcagtctccctttgaatttagcgaagtgggtactctggtgaac

SEQ ID NO: 410885 - DNA, 60 bp, Artificial
  Synthetic oligonucleotide
gccgtcgagtcacgctatgaggtacaagaggttcagccagtgctgttagccctcgctacg

SEQ ID NO: 410886 - DNA, 55 bp, Artificial
  Synthetic oligonucleotide
gccgtcgcatttctggaaggctgttctaaatgatagttccgaggcagtaaaggcg

SEQ ID NO: 410887 - DNA, 58 bp, Artificial
  Synthetic oligonucleotide
gccgtcgctaggtcacggtttgaggctggaatccgtcgcatcattggtgggggtgaga

SEQ ID NO: 410888 - DNA, 55 bp, Artificial
  Synthetic oligonucleotide
gccgtcgctataccggctgtgggacaagcggatgaactacatcggcaccgtccac

SEQ ID NO: 410889 - DNA, 60 bp, Artificial
  Synthetic oligonucleotide
gccgtcgctcaaaccacttccacctctcaaggagagcacacagcgagcgcacttctgcga

SEQ ID NO: 410890 - DNA, 52 bp, Artificial
  Synthetic oligonucleotide
gccgtcgctgcttgtttcgtcaacgctagagtgctttttggacaccacagtg

SEQ ID NO: 410891 - DNA, 53 bp, Artificial
  Synthetic oligonucleotide
gccgtcggtattacttactttttgaccgtgtgtaaaatgactcgagtatttga

SEQ ID NO: 410892 - DNA, 59 bp, Artificial
  Synthetic oligonucleotide
gccgtcgttgacgtttgagtcttctactttgtatagaagctcccatggcgtctcatctt

SEQ ID NO: 410893 - DNA, 55 bp, Artificial
  Synthetic oligonucleotide
gccgtctcgccaacgtcgaatgctacgttgcaacagcttcgacggacggccatcc

SEQ ID NO: 410894 - DNA, 60 bp, Artificial
  Synthetic oligonucleotide
gccgtctgaacttcgacagcccgtatgtcagccgtgcgaatgcccccactgtcctcgtca

SEQ ID NO: 410895 - DNA, 55 bp, Artificial
  Synthetic oligonucleotide
gccgtctgacttgaggaatccactcacttggaagtactttcactccatacaatcc

SEQ ID NO: 410896 - DNA, 59 bp, Artificial
  Synthetic oligonucleotide
gccgtctttaaccgtgagaaaaagcgtagatttaggcgctgtgtacaatatatcagcta

SEQ ID NO: 410897 - DNA, 53 bp, Artificial
  Synthetic oligonucleotide
gccgtctttcccgacaaatccgatgacgttaacgcgcttaccggacgttggcc

SEQ ID NO: 410898 - DNA, 55 bp, Artificial
  Synthetic oligonucleotide
gccgtgaagtcgcatgttgcagttggcacgccagtccgtgttatcatctctttgg

SEQ ID NO: 410899 - DNA, 59 bp, Artificial
  Synthetic oligonucleotide
gccgtgaattctgggacccacgacttatgcaggttgctgaaagcctgtactacgccgct

SEQ ID NO: 410900 - DNA, 55 bp, Artificial
  Synthetic oligonucleotide
gccgtgacaggtaacggggacaacatacatgcacgtgacctcggtgcaactcgaa

SEQ ID NO: 410901 - DNA, 55 bp, Artificial
  Synthetic oligonucleotide
gccgtgactctgctcaacttgacgggatttggcccgatttcgtacgttcgggtgg

SEQ ID NO: 410902 - DNA, 60 bp, Artificial
  Synthetic oligonucleotide
gccgtgactgcgatcaagatgctacgggaggtggggaccgagctaacttaccaagtgtca

SEQ ID NO: 410903 - DNA, 55 bp, Artificial
  Synthetic oligonucleotide
gccgtgagcaaatacaacgtggtgaaggttcttaacggaaataccagtagagaac

SEQ ID NO: 410904 - DNA, 50 bp, Artificial
  Synthetic oligonucleotide
gccgtgagtatcatgtgggacagagatctcctggtggttgaatcaagggc

SEQ ID NO: 410905 - DNA, 54 bp, Artificial
  Synthetic oligonucleotide
gccgtgataagtacgaacgttactctccatttgttcgtgaacatacggtagacc

SEQ ID NO: 410906 - DNA, 55 bp, Artificial
  Synthetic oligonucleotide
gccgtgatcgtcttgaacgagaacctcatcacccggtttatacttgtggttgggc

SEQ ID NO: 410907 - DNA, 55 bp, Artificial
  Synthetic oligonucleotide
gccgtgatggatatcgggcgacgtgccggtggcattattccgatggggatgacgc

SEQ ID NO: 410908 - DNA, 55 bp, Artificial
  Synthetic oligonucleotide
gccgtgatgggagccgcttacggcttccaatactccccagcgcagcgggtagaat

SEQ ID NO: 410909 - DNA, 60 bp, Artificial
  Synthetic oligonucleotide
gccgtgcacgtatggctttgcggacattgcttctcgctagacgttcaccaatgccatctt

SEQ ID NO: 410910 - DNA, 55 bp, Artificial
  Synthetic oligonucleotide
gccgtgccgctcgatgtctgcatcaccctcagaccagaatcgaaccagctcgcag

SEQ ID NO: 410911 - DNA, 60 bp, Artificial
  Synthetic oligonucleotide
gccgtgccggttataccatctaatcgcgtgacaaatgacggatgtgagagactgtctgag

SEQ ID NO: 410912 - DNA, 55 bp, Artificial
  Synthetic oligonucleotide
gccgtgcggacacttcgactcaccataccgtattgctccaaggtttagtacgtgg

SEQ ID NO: 410913 - DNA, 50 bp, Artificial
  Synthetic oligonucleotide
gccgtgcggaggcgaagcatgcgtctgagacccccatggattctcgggtg

SEQ ID NO: 410914 - DNA, 55 bp, Artificial
  Synthetic oligonucleotide
gccgtgctacgatatcggaggaaattattcccaacacatgttgaaggggaggtca

SEQ ID NO: 410915 - DNA, 55 bp, Artificial
  Synthetic oligonucleotide
gccgtgctactgaacgttctgggggcaggggatgagattccagatccgttaagcc

SEQ ID NO: 410916 - DNA, 58 bp, Artificial
  Synthetic oligonucleotide
gccgtgctagaacagtggtggaacaactcccacctgcaactacgtcccgagtagagga

SEQ ID NO: 410917 - DNA, 55 bp, Artificial
  Synthetic oligonucleotide
gccgtgctagcaatcaacaccagtaagttccccaatatgtacatcccagtaggac

SEQ ID NO: 410918 - DNA, 55 bp, Artificial
  Synthetic oligonucleotide
gccgtgctcgtgtattcaaaagacgatgcgcttgagacggacgaactagtacttc

SEQ ID NO: 410919 - DNA, 60 bp, Artificial
  Synthetic oligonucleotide
gccgtgctgacattatcattgcggatgacgttgagattccgtctaacagtgctactatgg

SEQ ID NO: 410920 - DNA, 60 bp, Artificial
  Synthetic oligonucleotide
gccgtgctgaggcggcacaggaacgggcctatctggcccgaaagtccaagcgagccgcta

SEQ ID NO: 410921 - DNA, 60 bp, Artificial
  Synthetic oligonucleotide
gccgtgctgcccggatgatgtcttggcctctgtttgctctagctccatgttatgaattta

SEQ ID NO: 410922 - DNA, 55 bp, Artificial
  Synthetic oligonucleotide
gccgtggaactccagttggagtaataaatctctaccagaaatttggaagaacatg

SEQ ID NO: 410923 - DNA, 55 bp, Artificial
  Synthetic oligonucleotide
gccgtggaagccaggtaaatgtcacctgttggcagcaggccttgcaggggtctgt

SEQ ID NO: 410924 - DNA, 51 bp, Artificial
  Synthetic oligonucleotide
gccgtggacagccactaggtgtgggcatcagtggccatccccttcttaaca

SEQ ID NO: 410925 - DNA, 55 bp, Artificial
  Synthetic oligonucleotide
gccgtggaccaaatacacttcattaacacaggtcccaactcgcaagcgttctgga

SEQ ID NO: 410926 - DNA, 60 bp, Artificial
  Synthetic oligonucleotide
gccgtggagtcgcgtcggtgagatagctatctttacctttgttgcagttctagctcttta

SEQ ID NO: 410927 - DNA, 60 bp, Artificial
  Synthetic oligonucleotide
gccgtggcaccaacttactgcttcagcatgagcgtcatagtacacctcattgttgtgtgc

SEQ ID NO: 410928 - DNA, 55 bp, Artificial
  Synthetic oligonucleotide
gccgtggcactaacgttgtcaactctgttgaaatcactaacggtcgctccgaccc

SEQ ID NO: 410929 - DNA, 55 bp, Artificial
  Synthetic oligonucleotide
gccgtggcgacctgacggtgtttgtgccgcttgccatcacgcctgacttacgcaa

SEQ ID NO: 410930 - DNA, 55 bp, Artificial
  Synthetic oligonucleotide
gccgtggctgcgtgtagttggataactacagtatggaccactatcaaagagtggg

SEQ ID NO: 410931 - DNA, 55 bp, Artificial
  Synthetic oligonucleotide
gccgtgggaccatacaggagaagttgatctcggtggcaggactcgccgtccactc

SEQ ID NO: 410932 - DNA, 50 bp, Artificial
  Synthetic oligonucleotide
gccgtgggactccccccttggtaacaaggacccgcggggccaaaagccac

SEQ ID NO: 410933 - DNA, 55 bp, Artificial
  Synthetic oligonucleotide
gccgtgggagtggcgtgttcagtatcagatgcggttccagagctggttagaccgc

SEQ ID NO: 410934 - DNA, 55 bp, Artificial
  Synthetic oligonucleotide
gccgtggtcgactcctatttgagagagcatagcatcgaatgcggtctaagtatgt

SEQ ID NO: 410935 - DNA, 51 bp, Artificial
  Synthetic oligonucleotide
gccgtggtctacagaacgtggtgcaaggggtatcaggcgattcgccagaga

SEQ ID NO: 410936 - DNA, 55 bp, Artificial
  Synthetic oligonucleotide
gccgtgtacgacaatcgggcccatacgtgacgatgtgaagaaacgttcgagcgcc

SEQ ID NO: 410937 - DNA, 51 bp, Artificial
  Synthetic oligonucleotide
gccgtgtcgagagggactgcaaagctgagatggttccacgagcgtggctat

SEQ ID NO: 410938 - DNA, 58 bp, Artificial
  Synthetic oligonucleotide
gccgtgtcgttctccacgtcccaatatttggatgacgggctctactcagggtcctcag

SEQ ID NO: 410939 - DNA, 54 bp, Artificial
  Synthetic oligonucleotide
gccgtgtctcatcccaaatgccggtggttgtagagattccgagcaagagtttgg

SEQ ID NO: 410940 - DNA, 55 bp, Artificial
  Synthetic oligonucleotide
gccgtgtgattctatacatgcagttaaaagggtttaaggaatgcactttcataac

SEQ ID NO: 410941 - DNA, 54 bp, Artificial
  Synthetic oligonucleotide
gccgtgtgtacctacgttaagaggtacaactcgagaaaagcattttacacgcgg

SEQ ID NO: 410942 - DNA, 55 bp, Artificial
  Synthetic oligonucleotide
gccgtgttcggagggttcgggttccttcccaggatcctcattggagcaggtctcg

SEQ ID NO: 410943 - DNA, 55 bp, Artificial
  Synthetic oligonucleotide
gccgtgttcttcttggagttgtctgacaaggttgccacggggcctcagacgcgct

SEQ ID NO: 410944 - DNA, 55 bp, Artificial
  Synthetic oligonucleotide
gccgtgttgccagccggtcgtgctgaatggtttccacgttagacactacgaacgc

SEQ ID NO: 410945 - DNA, 55 bp, Artificial
  Synthetic oligonucleotide
gccgtgtttaccgacaccgtccgtggccatattcgcgaggaccttaagaatgtgg

SEQ ID NO: 410946 - DNA, 53 bp, Artificial
  Synthetic oligonucleotide
gccgttaacgtggattgttacgaccaaaccattttcgtaagctaatcgaacac

SEQ ID NO: 410947 - DNA, 53 bp, Artificial
  Synthetic oligonucleotide
gccgttaagtgggagtacatagtgctggccttcttattacttgctgatgcccg

SEQ ID NO: 410948 - DNA, 60 bp, Artificial
  Synthetic oligonucleotide
gccgttacaaggattggtgttggatgcacaactgtatggatttccaggcgttttctcaga

SEQ ID NO: 410949 - DNA, 55 bp, Artificial
  Synthetic oligonucleotide
gccgttactttcggagttcctgagaaggccaacattcacgggacatacatcaaga

SEQ ID NO: 410950 - DNA, 56 bp, Artificial
  Synthetic oligonucleotide
gccgttaggcgaaatgaattagggttccgtggcataattgtaaatataagccagga

SEQ ID NO: 410951 - DNA, 55 bp, Artificial
  Synthetic oligonucleotide
gccgttaggtttaggtgacggtatgtccacataccggaggatctatgtttccgaa

SEQ ID NO: 410952 - DNA, 55 bp, Artificial
  Synthetic oligonucleotide
gccgttatacgtgccaagaactatgtcgaagcgtcctgccgatatagtgatttcc

SEQ ID NO: 410953 - DNA, 56 bp, Artificial
  Synthetic oligonucleotide
gccgttatccgcccgatttgcaccacgtgtatcccactaacagactttatggaaat

SEQ ID NO: 410954 - DNA, 58 bp, Artificial
  Synthetic oligonucleotide
gccgttatcctcagaagacgaagctttcctccgacgcatccaaaggctactcaagaac

SEQ ID NO: 410955 - DNA, 55 bp, Artificial
  Synthetic oligonucleotide
gccgttatctgtgtataaacgagtgtggctacatgtacagtgccgaaatacccac

SEQ ID NO: 410956 - DNA, 60 bp, Artificial
  Synthetic oligonucleotide
gccgttcaatctgcctcgggtgtggagtcttgcgcgttgttactccatgtggaagccaac

SEQ ID NO: 410957 - DNA, 60 bp, Artificial
  Synthetic oligonucleotide
gccgttcactcggccttcagggttgtgcttttcaatctactgttgctgagctgcagcgtc

SEQ ID NO: 410958 - DNA, 60 bp, Artificial
  Synthetic oligonucleotide
gccgttcagtttgatgaaccatgtttcgttctaccagcccgagccgccatcatagtatac

SEQ ID NO: 410959 - DNA, 60 bp, Artificial
  Synthetic oligonucleotide
gccgttccaaagctatgtagatagattctacaaaagcttgagggcagaacaaacagatcc

SEQ ID NO: 410960 - DNA, 58 bp, Artificial
  Synthetic oligonucleotide
gccgttccacaatgtaagtaagtatgcatttggaaactgcccaaaatatgttggagta

SEQ ID NO: 410961 - DNA, 60 bp, Artificial
  Synthetic oligonucleotide
gccgttccagtactatcacgtatccatacactgctcatgctcactgggacgcgaatttca

SEQ ID NO: 410962 - DNA, 56 bp, Artificial
  Synthetic oligonucleotide
gccgttccatcattaactaactccaaacgaggcttccatttagtttccatagtcaa

SEQ ID NO: 410963 - DNA, 57 bp, Artificial
  Synthetic oligonucleotide
gccgttccattgaacgctagattctacagttttaagtcattgagacccggatgggtg

SEQ ID NO: 410964 - DNA, 60 bp, Artificial
  Synthetic oligonucleotide
gccgttccattgacaagttcgctcaggggtggggtcccatcacttatgctgaggttgaca

SEQ ID NO: 410965 - DNA, 60 bp, Artificial
  Synthetic oligonucleotide
gccgttcctgaagacaacaccacgccctctcagattacctgatgggcctccctgttctca

SEQ ID NO: 410966 - DNA, 55 bp, Artificial
  Synthetic oligonucleotide
gccgttcgtcaagtttactctgaagaaatcaggaggtctgtttcgtacccgccga

SEQ ID NO: 410967 - DNA, 60 bp, Artificial
  Synthetic oligonucleotide
gccgttcgtttatccggagcatttaacgcctcagctgcagcgtcattagccgtatgctga

SEQ ID NO: 410968 - DNA, 55 bp, Artificial
  Synthetic oligonucleotide
gccgttcgtttcttgctcgcaatgtcaaagtcatcacgcccaatgccagagagcg

SEQ ID NO: 410969 - DNA, 55 bp, Artificial
  Synthetic oligonucleotide
gccgttgaaaacgcatctaagtacatattgctcgtatatgtcggaagtctacagc

SEQ ID NO: 410970 - DNA, 60 bp, Artificial
  Synthetic oligonucleotide
gccgttgacctctgacataaactgaatgaatgccagcgaatgacgtgtatattccatggt

SEQ ID NO: 410971 - DNA, 55 bp, Artificial
  Synthetic oligonucleotide
gccgttgacgaattattcctcgatcttgaatgtatgctcgcttttccagcgacag

SEQ ID NO: 410972 - DNA, 58 bp, Artificial
  Synthetic oligonucleotide
gccgttgataatttcagttttcctttgaatttggcgaaatgtgttctctgatggacat

SEQ ID NO: 410973 - DNA, 54 bp, Artificial
  Synthetic oligonucleotide
gccgttgatttaaactaatgcgcaacgcgatggacaacacgtgtcatctgacac

SEQ ID NO: 410974 - DNA, 55 bp, Artificial
  Synthetic oligonucleotide
gccgttgcaaacactggtgataacggtggtggccgcaatcctctggttagaccgt

SEQ ID NO: 410975 - DNA, 55 bp, Artificial
  Synthetic oligonucleotide
gccgttggatcgatttcggattccagtgcatcgccgaagaaccgcagtacgacct

SEQ ID NO: 410976 - DNA, 54 bp, Artificial
  Synthetic oligonucleotide
gccgttgttggtaaggcccctatggtgaggtaactggcctcgtgccgggtgtgg

SEQ ID NO: 410977 - DNA, 57 bp, Artificial
  Synthetic oligonucleotide
gccgtttaataatttaagaattgaagaaataccgcaaagacaatatgacacattcga

SEQ ID NO: 410978 - DNA, 55 bp, Artificial
  Synthetic oligonucleotide
gccgtttaggaacccgtgggacattgagaactcgtagtggtgcagaaattggagg

SEQ ID NO: 410979 - DNA, 60 bp, Artificial
  Synthetic oligonucleotide
gccgtttcagtctctggtccctaaggcagcaagaggtcaatacagcggattcgtgaggac

SEQ ID NO: 410980 - DNA, 60 bp, Artificial
  Synthetic oligonucleotide
gccgtttcggcttgcggttactatgcagagaatttcgccagatatgccgagttgttcgtg

SEQ ID NO: 410981 - DNA, 55 bp, Artificial
  Synthetic oligonucleotide
gccgtttctatacttcactacagcatggtcaattgcaggattcgcaagtatcgca

SEQ ID NO: 410982 - DNA, 55 bp, Artificial
  Synthetic oligonucleotide
gccgtttgactacttaaagtacgatcagaaagctatttgtaatgctttaggttgg

SEQ ID NO: 410983 - DNA, 59 bp, Artificial
  Synthetic oligonucleotide
gccgtttgcaacgcagcaatgggagttggtgtggggaacctgaccatctacccccatca

SEQ ID NO: 410984 - DNA, 55 bp, Artificial
  Synthetic oligonucleotide
gccgtttgttggggatttacagcatagtttgccgcacggcggtaggtatcgggac

SEQ ID NO: 410985 - DNA, 57 bp, Artificial
  Synthetic oligonucleotide
gccgttttagcggccatatagcggtgtatcaggacgtctacgcggtagacggaccaa

SEQ ID NO: 410986 - DNA, 60 bp, Artificial
  Synthetic oligonucleotide
gccgttttggtatggccatgttttgccttgaggaatgtatatgacatgaaaattgagtgc

SEQ ID NO: 410987 - DNA, 57 bp, Artificial
  Synthetic oligonucleotide
gcctaaaaagcgcagctttcgtacacgtgtatctgcggtttggcccatgtgtggcag

SEQ ID NO: 410988 - DNA, 54 bp, Artificial
  Synthetic oligonucleotide
gcctaaaaggtccatgagctccatggattcctccctgtttaagactttatccat

SEQ ID NO: 410989 - DNA, 58 bp, Artificial
  Synthetic oligonucleotide
gcctaaaatgggcacaaaccacaggctccattgtcttcttttaccagagcaaatggac

SEQ ID NO: 410990 - DNA, 60 bp, Artificial
  Synthetic oligonucleotide
gcctaaagacatatttgtatgcacaccggatagacgtaatatctatcgtatggtgcagaa

SEQ ID NO: 410991 - DNA, 60 bp, Artificial
  Synthetic oligonucleotide
gcctaaagacctggatgaagaactggtgaaagctaagatgcttgagcgtatgcacgatgt

SEQ ID NO: 410992 - DNA, 60 bp, Artificial
  Synthetic oligonucleotide
gcctaaagcgacttaaatagctcgtcccagaagctcgaactgatgtcgtccagacttgga

SEQ ID NO: 410993 - DNA, 53 bp, Artificial
  Synthetic oligonucleotide
gcctaaatcagctagtatagccttgccagtcgcgctatccttccacgacttac

SEQ ID NO: 410994 - DNA, 56 bp, Artificial
  Synthetic oligonucleotide
gcctaaatctacttaaataagtcgtcccagaagctcgaatcgattccgtccagact

SEQ ID NO: 410995 - DNA, 58 bp, Artificial
  Synthetic oligonucleotide
gcctaaatctatttaagtacgtcgtcccagaagctgtcagagaagtcgtccagacttg

SEQ ID NO: 410996 - DNA, 55 bp, Artificial
  Synthetic oligonucleotide
gcctaaatggaggaagcctacaaaggtcttggaaatattaaatcctaggactgtg

SEQ ID NO: 410997 - DNA, 60 bp, Artificial
  Synthetic oligonucleotide
gcctaaatggatatggggctatcctgacacgtaagcattttgcattcatggagggagcca

SEQ ID NO: 410998 - DNA, 55 bp, Artificial
  Synthetic oligonucleotide
gcctaaatggccgcgcagcttcactgagaacattattacaagcccattcttcaag

SEQ ID NO: 410999 - DNA, 57 bp, Artificial
  Synthetic oligonucleotide
gcctaacaatgcaatcatctctggtttttttgaaaccaaagtcttcaaaagacaaga

SEQ ID NO: 411000 - DNA, 55 bp, Artificial
  Synthetic oligonucleotide
gcctaaccccgtgaacgtgtacctgatagagattaactatccgtatgctgtgggt

SEQ ID NO: 411001 - DNA, 53 bp, Artificial
  Synthetic oligonucleotide
gcctaaccgaagcaggtcctatattaagttgaaacgacttcgtttcaagggga

SEQ ID NO: 411002 - DNA, 55 bp, Artificial
  Synthetic oligonucleotide
gcctaaccgggaatcgcggagcgacaacaagttgagctcacactcgaaggcatga

SEQ ID NO: 411003 - DNA, 57 bp, Artificial
  Synthetic oligonucleotide
gcctaacgcatcccgactaagctggactatcggggatggaatcccttacattggatc

SEQ ID NO: 411004 - DNA, 57 bp, Artificial
  Synthetic oligonucleotide
gcctaactaatggggatctatggtatgtcacaagtggtattccttcgggattccctc

SEQ ID NO: 411005 - DNA, 60 bp, Artificial
  Synthetic oligonucleotide
gcctaactacattggcttcagagacaactttgtgggactcatgtactacaacagtactgg

SEQ ID NO: 411006 - DNA, 55 bp, Artificial
  Synthetic oligonucleotide
gcctaacttggcaacattcacacacgaactggagctaattagtaatattaggtgc

SEQ ID NO: 411007 - DNA, 58 bp, Artificial
  Synthetic oligonucleotide
gcctaactttgtttatagtgctgatgcatttaatgggtctttcaagtttttgactatc

SEQ ID NO: 411008 - DNA, 53 bp, Artificial
  Synthetic oligonucleotide
gcctaagaggttcaaaccccaccaacccatcccaacgtggatggtacggtgtg

SEQ ID NO: 411009 - DNA, 52 bp, Artificial
  Synthetic oligonucleotide
gcctaagcatcgacagactccaacatgtcggtctatgttaccactaaccacg

SEQ ID NO: 411010 - DNA, 55 bp, Artificial
  Synthetic oligonucleotide
gcctaagcgcgatgccccatggcgccatatgacagggacgtccaaaattagccgg

SEQ ID NO: 411011 - DNA, 60 bp, Artificial
  Synthetic oligonucleotide
gcctaagcgcgatgctccttggcgcttatcggctgggaccactaaggtcagtcgttcctc

SEQ ID NO: 411012 - DNA, 58 bp, Artificial
  Synthetic oligonucleotide
gcctaagcgggatgggtcgtggcgcaccactcctggagttgcaaaggtgagtcgccgt

SEQ ID NO: 411013 - DNA, 55 bp, Artificial
  Synthetic oligonucleotide
gcctaaggagtggggttatgagcagggtcttgtcattagggcttctccatcattc

SEQ ID NO: 411014 - DNA, 60 bp, Artificial
  Synthetic oligonucleotide
gcctaaggccgccagaggtcaatatagtggatttgtgaggacgctattccaacagatgcg

SEQ ID NO: 411015 - DNA, 56 bp, Artificial
  Synthetic oligonucleotide
gcctaagggttggtatggtttaagatcctggtctacctccaattatggagacgtga

SEQ ID NO: 411016 - DNA, 57 bp, Artificial
  Synthetic oligonucleotide
gcctaaggtgtctgcatttcagtacagggttttccgtgtgcgtttgcctgaccctaa

SEQ ID NO: 411017 - DNA, 55 bp, Artificial
  Synthetic oligonucleotide
gcctaataaacctgagtagtgttccaacaaaccgcatgatacgctacgagtaccc

SEQ ID NO: 411018 - DNA, 58 bp, Artificial
  Synthetic oligonucleotide
gcctaatagtttatccagacttgggcgtgcgggtctgcgagaaaatggccctatacga

SEQ ID NO: 411019 - DNA, 55 bp, Artificial
  Synthetic oligonucleotide
gcctaatatagcaaacagtcgaccgctctgagcaatgggtaatggaatactgccg

SEQ ID NO: 411020 - DNA, 59 bp, Artificial
  Synthetic oligonucleotide
gcctaatcactactaccgctagtgaccgtcacggctacactccactcccccgtgaggca

SEQ ID NO: 411021 - DNA, 60 bp, Artificial
  Synthetic oligonucleotide
gcctaatcaggccaaatgaaaacccagctcacaagagtcaactggtatggatggcttgcc

SEQ ID NO: 411022 - DNA, 55 bp, Artificial
  Synthetic oligonucleotide
gcctaatgctcccgtttgaggaggccgggtacgagataccttgccacgaacgcct

SEQ ID NO: 411023 - DNA, 56 bp, Artificial
  Synthetic oligonucleotide
gcctaatgggccttttggatgtcggtctcgaccaatggaaacgttccctcatcgct

SEQ ID NO: 411024 - DNA, 55 bp, Artificial
  Synthetic oligonucleotide
gcctaatggtacagaaagcaattcaaccatcacaaagtcaaccatcacactccta

SEQ ID NO: 411025 - DNA, 55 bp, Artificial
  Synthetic oligonucleotide
gcctaattgggactactgctagggcagaatgggccaagttgcttccaggagccgt

SEQ ID NO: 411026 - DNA, 57 bp, Artificial
  Synthetic oligonucleotide
gcctaattggtactattctcttaactgctgggctcatgtcaactattaaaaccccag

SEQ ID NO: 411027 - DNA, 56 bp, Artificial
  Synthetic oligonucleotide
gcctaattggtctaaatacatcatgactaaacgtctaaacctaatcaaataagtcg

SEQ ID NO: 411028 - DNA, 55 bp, Artificial
  Synthetic oligonucleotide
gcctacaacgccaccagataccatattaatgaagacgtcacccaagtatacgccg

SEQ ID NO: 411029 - DNA, 55 bp, Artificial
  Synthetic oligonucleotide
gcctacaactagtactcctacacaaagattggagaccactttagttagagccagg

SEQ ID NO: 411030 - DNA, 58 bp, Artificial
  Synthetic oligonucleotide
gcctacaattttgtttggcaattcgactcagctcctgcttccggtaccgcgaatgtgg

SEQ ID NO: 411031 - DNA, 55 bp, Artificial
  Synthetic oligonucleotide
gcctacacaaagataatgtattttcacaagggattagtgatcaaggaagaagcgc

SEQ ID NO: 411032 - DNA, 55 bp, Artificial
  Synthetic oligonucleotide
gcctacacaaagcctagtacctcctttgacggtatttgtctggtcgctcaggtgt

SEQ ID NO: 411033 - DNA, 53 bp, Artificial
  Synthetic oligonucleotide
gcctacacaacggggccctgtaccccccttcctgcgccaaactactcgtttgc

SEQ ID NO: 411034 - DNA, 56 bp, Artificial
  Synthetic oligonucleotide
gcctacacacaccagttatcagaacgccaacccgggcgagaaaggaggtaccttca

SEQ ID NO: 411035 - DNA, 60 bp, Artificial
  Synthetic oligonucleotide
gcctacacggcactccctaataaatggatagggctgtgcatactggcatcaatcgtaccc

SEQ ID NO: 411036 - DNA, 60 bp, Artificial
  Synthetic oligonucleotide
gcctacagagacatagtatacaacccactcttagacaaaggagagggcaacagaatatgg

SEQ ID NO: 411037 - DNA, 60 bp, Artificial
  Synthetic oligonucleotide
gcctacaggctgtatgatgaatgttgctaagtatactcaattatgtcagtatttgaatac

SEQ ID NO: 411038 - DNA, 55 bp, Artificial
  Synthetic oligonucleotide
gcctacagtatatcatcaagcacttaacgacatagaggatgatttgagtgagaga

SEQ ID NO: 411039 - DNA, 55 bp, Artificial
  Synthetic oligonucleotide
gcctacatgcttacatctgaggatagccagtgtgacttggattggagatgtggag

SEQ ID NO: 411040 - DNA, 53 bp, Artificial
  Synthetic oligonucleotide
gcctacatgtgtacacctagtgggtctctggtgtccagtgatactcaggtttt

SEQ ID NO: 411041 - DNA, 55 bp, Artificial
  Synthetic oligonucleotide
gcctaccaaagccaaagtggggactactggggcgtaggtaactatgtcggctgtg

SEQ ID NO: 411042 - DNA, 55 bp, Artificial
  Synthetic oligonucleotide
gcctaccaaatccccgtgcaatccaatagcgacaatggaaggcaagtgttcgggt

SEQ ID NO: 411043 - DNA, 55 bp, Artificial
  Synthetic oligonucleotide
gcctaccaattttagagaagctatggctatgcccggtgcccgtgcttacagcctt

SEQ ID NO: 411044 - DNA, 58 bp, Artificial
  Synthetic oligonucleotide
gcctaccacaagaggccgctaactcggctggctctcccgtacaccgcaccacaccgcg

SEQ ID NO: 411045 - DNA, 53 bp, Artificial
  Synthetic oligonucleotide
gcctaccacaagggcccgctgactcgactggctctcccatacaccgcaccaca

SEQ ID NO: 411046 - DNA, 54 bp, Artificial
  Synthetic oligonucleotide
gcctaccaccgttccccagatccaatagagttcaattttccacttttcgttgac

SEQ ID NO: 411047 - DNA, 60 bp, Artificial
  Synthetic oligonucleotide
gcctaccagaaacgaatgggggtgcagatgcaacgattcaagtgatcatatcactattgc

SEQ ID NO: 411048 - DNA, 60 bp, Artificial
  Synthetic oligonucleotide
gcctaccagaaacggatgggagtgcagatgcagcgatttaagtgatcctctcgttattgc

SEQ ID NO: 411049 - DNA, 60 bp, Artificial
  Synthetic oligonucleotide
gcctacccatcttcgctcgtgggggtcccaacgtacatgtggttggctcgcgtggcatga

SEQ ID NO: 411050 - DNA, 55 bp, Artificial
  Synthetic oligonucleotide
gcctaccccaatgactccacctttgagagacactcatcctcaggccatgcagtgg

SEQ ID NO: 411051 - DNA, 55 bp, Artificial
  Synthetic oligonucleotide
gcctaccctgacacgctaaaagcgtggccggccatatggaaagttagccgggagc

SEQ ID NO: 411052 - DNA, 55 bp, Artificial
  Synthetic oligonucleotide
gcctaccggcatggtgtttggtctaatttggagctagaggactctgaagcagagg

SEQ ID NO: 411053 - DNA, 55 bp, Artificial
  Synthetic oligonucleotide
gcctaccgggtaatgaaccccggtgccgagattccaccgaacatgtatcggctgg

SEQ ID NO: 411054 - DNA, 55 bp, Artificial
  Synthetic oligonucleotide
gcctacctaggttatctgaacgaactatctgcctactttcttagtcaagcagaca

SEQ ID NO: 411055 - DNA, 57 bp, Artificial
  Synthetic oligonucleotide
gcctaccttttgtacacaccggctttgccaatagttggtgtgttggcagtactacac

SEQ ID NO: 411056 - DNA, 57 bp, Artificial
  Synthetic oligonucleotide
gcctacgagcattcacggatgctatgaccaggtactcagccccccccggggacccgc

SEQ ID NO: 411057 - DNA, 59 bp, Artificial
  Synthetic oligonucleotide
gcctacgatgagacaaaacggtactgggtctttcagggcaaacctgtgatgcccagtca

SEQ ID NO: 411058 - DNA, 55 bp, Artificial
  Synthetic oligonucleotide
gcctacgccacattagtcatgattggcgataagtatgtggcgggtgctctagctt

SEQ ID NO: 411059 - DNA, 55 bp, Artificial
  Synthetic oligonucleotide
gcctacgcggaatggtacaacaccaacattaacgtaaagcgccatattgccctcg

SEQ ID NO: 411060 - DNA, 55 bp, Artificial
  Synthetic oligonucleotide
gcctacggggtggtaacgacgtgctgtaagtgccacagtacagtccggctggtgg

SEQ ID NO: 411061 - DNA, 55 bp, Artificial
  Synthetic oligonucleotide
gcctacggtgacgatatagtcgtcgcctccaaatttgaacttgacttggttatgg

SEQ ID NO: 411062 - DNA, 60 bp, Artificial
  Synthetic oligonucleotide
gcctacgtgatggtctgagctacctagttcttccagtcagtggatctgtccactagtcga

SEQ ID NO: 411063 - DNA, 54 bp, Artificial
  Synthetic oligonucleotide
gcctactaaggtagttcctgattatagtactattgttgatccctttacaggggt

SEQ ID NO: 411064 - DNA, 60 bp, Artificial
  Synthetic oligonucleotide
gcctactactacatcccgcgcctctgctacaagctcactatatgggtccacgcctagcgg

SEQ ID NO: 411065 - DNA, 60 bp, Artificial
  Synthetic oligonucleotide
gcctactagaccagatgtatcagtcaacaggttctacacactcccagcaaaattatgggc

SEQ ID NO: 411066 - DNA, 55 bp, Artificial
  Synthetic oligonucleotide
gcctactatgacctgtcgttcggtaggtccctaaacaccacgaattgggatgagg

SEQ ID NO: 411067 - DNA, 59 bp, Artificial
  Synthetic oligonucleotide
gcctactcaattatgctagaggatacattaaagacctatcaaagttggtaggaccacta

SEQ ID NO: 411068 - DNA, 55 bp, Artificial
  Synthetic oligonucleotide
gcctactcagaaactggcatatttaatattagctcacctacatgtctggtcaaca

SEQ ID NO: 411069 - DNA, 60 bp, Artificial
  Synthetic oligonucleotide
gcctactcagctcactgcattggaattaccgacagggatttcattgagggggtgcatgga

SEQ ID NO: 411070 - DNA, 57 bp, Artificial
  Synthetic oligonucleotide
gcctactcgtagtttgtgtcccagaggcggagatggggtgcgcaggtactgatagag

SEQ ID NO: 411071 - DNA, 55 bp, Artificial
  Synthetic oligonucleotide
gcctactctactgaaatatcccaatggcctgtacccttgaaaatcacatgtggaa

SEQ ID NO: 411072 - DNA, 55 bp, Artificial
  Synthetic oligonucleotide
gcctactggcctgtactcaaatgtatctaagaacgcattagttgtgtactacgtg

SEQ ID NO: 411073 - DNA, 60 bp, Artificial
  Synthetic oligonucleotide
gcctactgttttgatatgtccaccgctgagctagctatgttctcaggggacgattccctc

SEQ ID NO: 411074 - DNA, 57 bp, Artificial
  Synthetic oligonucleotide
gcctacttccccctcttgcgccgcattttatacactgcccgcaccttcctcactttc

SEQ ID NO: 411075 - DNA, 53 bp, Artificial
  Synthetic oligonucleotide
gcctacttcccttttactttctcgaaacgaagtaccttcaccgcgcgagtgag

SEQ ID NO: 411076 - DNA, 60 bp, Artificial
  Synthetic oligonucleotide
gcctacttctggagagataccaacctacagtacagctagaattaatctacccatgttgaa

SEQ ID NO: 411077 - DNA, 53 bp, Artificial
  Synthetic oligonucleotide
gcctactttaaggaatgctattgttttacccttaagatggttaacttactata

SEQ ID NO: 411078 - DNA, 52 bp, Artificial
  Synthetic oligonucleotide
gcctagaaccgtggagaggcctaaaagagtccacgtaccgtcttagggagat

SEQ ID NO: 411079 - DNA, 53 bp, Artificial
  Synthetic oligonucleotide
gcctagaagggtaagtcgtcgtcataatcaacgggctcgtatgtgggtttggg

SEQ ID NO: 411080 - DNA, 53 bp, Artificial
  Synthetic oligonucleotide
gcctagaatatcgggctcctttttcttctcccccggggcccccctgctgttca

SEQ ID NO: 411081 - DNA, 60 bp, Artificial
  Synthetic oligonucleotide
gcctagacgcttaatttcaaagttattatagtccatacgctatcgtgtcactgactgtaa

SEQ ID NO: 411082 - DNA, 55 bp, Artificial
  Synthetic oligonucleotide
gcctagactcggtaaaactcgtcgaagctaacttggcccaagccggcctagactc

SEQ ID NO: 411083 - DNA, 55 bp, Artificial
  Synthetic oligonucleotide
gcctagactgggtggtgtgtgcctttggagtgtatcatgcagtggcagagggcat

SEQ ID NO: 411084 - DNA, 60 bp, Artificial
  Synthetic oligonucleotide
gcctagagacaaccatgagatccccgtcgttcacagacaactcctctccgccagcagtgc

SEQ ID NO: 411085 - DNA, 60 bp, Artificial
  Synthetic oligonucleotide
gcctagagatataccagagctagagactaacacatcctttaagggttcactctttacatg

SEQ ID NO: 411086 - DNA, 55 bp, Artificial
  Synthetic oligonucleotide
gcctagaggtgggccggggacagccattaggtgtgggtgtaagtggacatccttt

SEQ ID NO: 411087 - DNA, 55 bp, Artificial
  Synthetic oligonucleotide
gcctagagtcctggcccacattgtcttgcctgttcttgaatcaccttcgacgatg

SEQ ID NO: 411088 - DNA, 55 bp, Artificial
  Synthetic oligonucleotide
gcctagatatggactactgaggaatttgagagatagggagttagcccgttatgcc

SEQ ID NO: 411089 - DNA, 55 bp, Artificial
  Synthetic oligonucleotide
gcctagatcgttagggtttctaacgcatcatatcaaggccaagttagatgtgtac

SEQ ID NO: 411090 - DNA, 55 bp, Artificial
  Synthetic oligonucleotide
gcctagcaaaaggggagataataattagatctgaaaacctgacagacaatgccaa

SEQ ID NO: 411091 - DNA, 55 bp, Artificial
  Synthetic oligonucleotide
gcctagcaccgctactgtgaagaatatgcatcgagatcgttaccaggtcgtaagg

SEQ ID NO: 411092 - DNA, 60 bp, Artificial
  Synthetic oligonucleotide
gcctagcatctaccatagtgatgggtgcactgggacagcatcgagggtctggagacggga

SEQ ID NO: 411093 - DNA, 53 bp, Artificial
  Synthetic oligonucleotide
gcctagcccaatccccaaggcccccagaggtttatcaacccaccactggttaa

SEQ ID NO: 411094 - DNA, 55 bp, Artificial
  Synthetic oligonucleotide
gcctagcgccggagtatgaacacatcttggacactctgaccgacagattctctga

SEQ ID NO: 411095 - DNA, 58 bp, Artificial
  Synthetic oligonucleotide
gcctagctaggaaccccactgctaagccttcattaaggctgcccttgagtcctccagt

SEQ ID NO: 411096 - DNA, 55 bp, Artificial
  Synthetic oligonucleotide
gcctagcttatgcctcctatgtaggacacctggcagagattgccacagactgggg

SEQ ID NO: 411097 - DNA, 60 bp, Artificial
  Synthetic oligonucleotide
gcctagcttcagggcgtccacagagcttgccattcgatcttcgcctggcacaatgtagtt

SEQ ID NO: 411098 - DNA, 55 bp, Artificial
  Synthetic oligonucleotide
gcctagcttttgcttatccatattgcccgttattctatcaatcttaatctcgtgg

SEQ ID NO: 411099 - DNA, 55 bp, Artificial
  Synthetic oligonucleotide
gcctaggaacggacagggtgtgaagagccccgtgtgctaccaatgagtcctccgg

SEQ ID NO: 411100 - DNA, 50 bp, Artificial
  Synthetic oligonucleotide
gcctaggaccaggacaagcgttttttgcaacaggtgacataataggagat

SEQ ID NO: 411101 - DNA, 55 bp, Artificial
  Synthetic oligonucleotide
gcctaggcaagcaggttccgaagagcggtaagtagtaatgggtggagtccctgaa

SEQ ID NO: 411102 - DNA, 55 bp, Artificial
  Synthetic oligonucleotide
gcctaggcagtatatgatgaaatccgtagatgtaaattggatagcacaggctgag

SEQ ID NO: 411103 - DNA, 54 bp, Artificial
  Synthetic oligonucleotide
gcctaggcgacaaccgcaacttctgctttgcggttagtttcgcttttagggtta

SEQ ID NO: 411104 - DNA, 59 bp, Artificial
  Synthetic oligonucleotide
gcctagggcaacatatctatgaaacttatggggatacctgggcaggagtagaagctctg

SEQ ID NO: 411105 - DNA, 55 bp, Artificial
  Synthetic oligonucleotide
gcctaggggtatgcagagcaattactttcatgggatttccaattgtgagggcgga

SEQ ID NO: 411106 - DNA, 58 bp, Artificial
  Synthetic oligonucleotide
gcctaggggttccaactgaggcgatcaaagaggtgatcatccgtttagtgctcaactg

SEQ ID NO: 411107 - DNA, 55 bp, Artificial
  Synthetic oligonucleotide
gcctagggtagttagagttactggggctcccataaagaaacgatctggtgtcagc

SEQ ID NO: 411108 - DNA, 55 bp, Artificial
  Synthetic oligonucleotide
gcctagggtatctcaagttgatttgaggttttctagtctggtcggaaagtttgac

SEQ ID NO: 411109 - DNA, 50 bp, Artificial
  Synthetic oligonucleotide
gcctagggtatgcaattgggcccttaagttatgggctttgagtactggac

SEQ ID NO: 411110 - DNA, 52 bp, Artificial
  Synthetic oligonucleotide
gcctagggtggagaccttaaactcgagtttcgtcgacttaatcgacaggttt

SEQ ID NO: 411111 - DNA, 54 bp, Artificial
  Synthetic oligonucleotide
gcctaggtagcaagttaaaaggatctgaagtttacttagtccttacaataggcc

SEQ ID NO: 411112 - DNA, 57 bp, Artificial
  Synthetic oligonucleotide
gcctaggttgatttttcccagatcgcctaggtataatcttgtgttggcttctcggct

SEQ ID NO: 411113 - DNA, 60 bp, Artificial
  Synthetic oligonucleotide
gcctagtaattggacgtattgacgctacacgcactgagtgacagggaccgcttccgcacg

SEQ ID NO: 411114 - DNA, 60 bp, Artificial
  Synthetic oligonucleotide
gcctagtaccaccttggaatcttcgacgcgttgcgctcagcactctaccccgagtgtagc

SEQ ID NO: 411115 - DNA, 60 bp, Artificial
  Synthetic oligonucleotide
gcctagtacggctactgtgaagaatatgcatagagatcgttatcaggtgttaagaaagtg

SEQ ID NO: 411116 - DNA, 60 bp, Artificial
  Synthetic oligonucleotide
gcctagtagcagacctaccactgtgggcagcagcatatggttatgtagaattctgctcta

SEQ ID NO: 411117 - DNA, 60 bp, Artificial
  Synthetic oligonucleotide
gcctagtgactatggctttctcatacagaacgccacaggaggagctcttgaacagattgc

SEQ ID NO: 411118 - DNA, 60 bp, Artificial
  Synthetic oligonucleotide
gcctagtgtatcatccattcacagagtgtggcacacattgtgtctgcggtgctcgctatg

SEQ ID NO: 411119 - DNA, 51 bp, Artificial
  Synthetic oligonucleotide
gcctagttattccgtattccggaactgtgccttgcaatcagttggaacaag

SEQ ID NO: 411120 - DNA, 57 bp, Artificial
  Synthetic oligonucleotide
gcctagttctagcctgttaaaagataggaagaaagtagattatataggtgtttgcat

SEQ ID NO: 411121 - DNA, 55 bp, Artificial
  Synthetic oligonucleotide
gcctagtttgtgtctgctcaaaggataaaggtctaacataccacaaagtttctag

SEQ ID NO: 411122 - DNA, 55 bp, Artificial
  Synthetic oligonucleotide
gcctatactaccagggggcttgtgaggctctttacgcctgggccgtcccaaaaca

SEQ ID NO: 411123 - DNA, 58 bp, Artificial
  Synthetic oligonucleotide
gcctatactccaccagggggtgacatgccccggaatagggacgaggcgatgcttggaa

SEQ ID NO: 411124 - DNA, 55 bp, Artificial
  Synthetic oligonucleotide
gcctatagaagaaccaccctcatcagtatggcagatctcacatcaacctcagtaa

SEQ ID NO: 411125 - DNA, 60 bp, Artificial
  Synthetic oligonucleotide
gcctatagagttgtgatgtcctctctctatgaggcaatttatcaaaccccagctcaagaa

SEQ ID NO: 411126 - DNA, 56 bp, Artificial
  Synthetic oligonucleotide
gcctatagcaacttttatgacgggtggtcgcattttcaccagaatggcgtctatgg

SEQ ID NO: 411127 - DNA, 58 bp, Artificial
  Synthetic oligonucleotide
gcctatatcaaccacgctgtctatagttctattggctatcgcctgacttctataaggc

SEQ ID NO: 411128 - DNA, 55 bp, Artificial
  Synthetic oligonucleotide
gcctatatttaatctgggatgccatagcatgtttatagacggagattttagtgga

SEQ ID NO: 411129 - DNA, 54 bp, Artificial
  Synthetic oligonucleotide
gcctatcaaccacggcctcgcttgacctggtggatggaagagtaagggcggtcc

SEQ ID NO: 411130 - DNA, 58 bp, Artificial
  Synthetic oligonucleotide
gcctatcaatggagctaaggtcattcaatctgctgcattaatcgaagcatgcaagtta

SEQ ID NO: 411131 - DNA, 60 bp, Artificial
  Synthetic oligonucleotide
gcctatcacgtccccgcggtgccaacacatcctcctgccacaatcgtcaccacgttccag

SEQ ID NO: 411132 - DNA, 60 bp, Artificial
  Synthetic oligonucleotide
gcctatcagaaacgaatgggggtgcagatgcaacgattcaagtaaccctcttgttgttgc

SEQ ID NO: 411133 - DNA, 55 bp, Artificial
  Synthetic oligonucleotide
gcctatcagaagactttagtaatggagtacttgttgtaggctctggtaataggcg

SEQ ID NO: 411134 - DNA, 56 bp, Artificial
  Synthetic oligonucleotide
gcctatcagtatagacgaagtgccgagagccaacaacgaactcatcccagtggacc

SEQ ID NO: 411135 - DNA, 50 bp, Artificial
  Synthetic oligonucleotide
gcctatcatacaagttatcaaaattggactcacaagggaaatgatcatac

SEQ ID NO: 411136 - DNA, 58 bp, Artificial
  Synthetic oligonucleotide
gcctatccgaagtggggaaacacttggcaggtttcccgctctaatgtgcataggttca

SEQ ID NO: 411137 - DNA, 60 bp, Artificial
  Synthetic oligonucleotide
gcctatctaaagattcatactcagtcggcccatggaatggagtcaaccatgcacgcaagt

SEQ ID NO: 411138 - DNA, 55 bp, Artificial
  Synthetic oligonucleotide
gcctatctacaagagttagaaagtgaagtcatcccggggccttctaccatggcct

SEQ ID NO: 411139 - DNA, 60 bp, Artificial
  Synthetic oligonucleotide
gcctatctaccccgcagcataagctgactatatctgaagtgtctggacaaggactatgca

SEQ ID NO: 411140 - DNA, 55 bp, Artificial
  Synthetic oligonucleotide
gcctatgaacaaagtttggatttggaggtaagaccaattgtgtatggggatgatg

SEQ ID NO: 411141 - DNA, 51 bp, Artificial
  Synthetic oligonucleotide
gcctatgaagtataaggaacacaagactcatatgttcaggaagcctgtatt

SEQ ID NO: 411142 - DNA, 60 bp, Artificial
  Synthetic oligonucleotide
gcctatgactgcagattcagttggcacttaacaccagttctttgccaactcgcctacgta

SEQ ID NO: 411143 - DNA, 60 bp, Artificial
  Synthetic oligonucleotide
gcctatgatagtgaagccgagtatttggaagattgtgggtggcaagagtacctggatgtt

SEQ ID NO: 411144 - DNA, 54 bp, Artificial
  Synthetic oligonucleotide
gcctatgatgtagtttccaaagtgggtttccgacgtcgcaagggagcccgacgg

SEQ ID NO: 411145 - DNA, 55 bp, Artificial
  Synthetic oligonucleotide
gcctatgcaattggcagatcgtctgagctggagcagagattcgtgcttaacggga

SEQ ID NO: 411146 - DNA, 55 bp, Artificial
  Synthetic oligonucleotide
gcctatgcagcaacggtggaaatagatactggccttcctctgagtgctttgcaga

SEQ ID NO: 411147 - DNA, 60 bp, Artificial
  Synthetic oligonucleotide
gcctatgcagcctactcgatctctagttggggtcctgatgggtcagacaatgtctgtttg

SEQ ID NO: 411148 - DNA, 55 bp, Artificial
  Synthetic oligonucleotide
gcctatgcatcccggcgtgctaatcactcatcctcaaagccgaataatcagaagc

SEQ ID NO: 411149 - DNA, 53 bp, Artificial
  Synthetic oligonucleotide
gcctatgccaactcccaccctgggtaccaacgttccccgccttgcggccccaa

SEQ ID NO: 411150 - DNA, 55 bp, Artificial
  Synthetic oligonucleotide
gcctatgccctacgtcccttacccccgctcgacggaggtatatgtccgatctata

SEQ ID NO: 411151 - DNA, 55 bp, Artificial
  Synthetic oligonucleotide
gcctatgccctcggcattctcgctgatggtatagctccactcgatggaacacacg

SEQ ID NO: 411152 - DNA, 60 bp, Artificial
  Synthetic oligonucleotide
gcctatggcccctagtctatgtaaatacaacatgatgcgaaatttgaatctatttaaata

SEQ ID NO: 411153 - DNA, 60 bp, Artificial
  Synthetic oligonucleotide
gcctatgtcatggctgcatgtcgtatcgacgggctcctaggatgtccacccgtatcggta

SEQ ID NO: 411154 - DNA, 55 bp, Artificial
  Synthetic oligonucleotide
gcctatgtctgagtttcaccaagaacttgaacggtgttagtataaaggttgctcc

SEQ ID NO: 411155 - DNA, 55 bp, Artificial
  Synthetic oligonucleotide
gcctatgttgctcaacagggtatcacagacccaagggataaggccgagttcattg

SEQ ID NO: 411156 - DNA, 55 bp, Artificial
  Synthetic oligonucleotide
gcctatgtttaccactagtcataaccaaaacaaggcctcctcctattgccatacc

SEQ ID NO: 411157 - DNA, 55 bp, Artificial
  Synthetic oligonucleotide
gcctattaagctagggagcgggaagatgagtcgaccacaaaggaccgataacgat

SEQ ID NO: 411158 - DNA, 57 bp, Artificial
  Synthetic oligonucleotide
gcctattacagggggttagacgtgtcagtaataccgacgtctggagatgtcgtagta

SEQ ID NO: 411159 - DNA, 50 bp, Artificial
  Synthetic oligonucleotide
gcctattacctctataggccaaattatccaatgtccacacatgatccaaa

SEQ ID NO: 411160 - DNA, 56 bp, Artificial
  Synthetic oligonucleotide
gcctattatccatgctgtcgcccccgattaccggatagaacataaccctaaaaggc

SEQ ID NO: 411161 - DNA, 51 bp, Artificial
  Synthetic oligonucleotide
gcctattatttatagtcgccgaaaaaaacttattacattaagagttggtga

SEQ ID NO: 411162 - DNA, 54 bp, Artificial
  Synthetic oligonucleotide
gcctattccacctgtagaggctagtggtcgtatcattgtgtcgcattcctctat

SEQ ID NO: 411163 - DNA, 58 bp, Artificial
  Synthetic oligonucleotide
gcctattctgagatttccgatgctgccagatttagcttttggaaagccttcgacatct

SEQ ID NO: 411164 - DNA, 51 bp, Artificial
  Synthetic oligonucleotide
gcctattctgattctggccctaatgagtattggcaggatgttgggggctat

SEQ ID NO: 411165 - DNA, 60 bp, Artificial
  Synthetic oligonucleotide
gcctattgagagcttctgaatttgttggcagccactttaatggcctctgagggcacacca

SEQ ID NO: 411166 - DNA, 60 bp, Artificial
  Synthetic oligonucleotide
gcctattgggtgcaaaatgttactgaggcacggccagaactcgagctacgcattaatgca

SEQ ID NO: 411167 - DNA, 55 bp, Artificial
  Synthetic oligonucleotide
gcctattggtcccgcagattatgatgaaagtcaatcctgaagacttgggctatct

SEQ ID NO: 411168 - DNA, 55 bp, Artificial
  Synthetic oligonucleotide
gcctattgtgacaaggtgcgcactccgcttgaattgcaggttgggtgcttggtgg

SEQ ID NO: 411169 - DNA, 59 bp, Artificial
  Synthetic oligonucleotide
gcctattgtgctagagaggttttcctccggagccgtgaatgctgctaatcccaacctcc

SEQ ID NO: 411170 - DNA, 60 bp, Artificial
  Synthetic oligonucleotide
gcctatttccatccttacgacacactacaatggctcaaagtgaggaccctactctgcaac

SEQ ID NO: 411171 - DNA, 53 bp, Artificial
  Synthetic oligonucleotide
gcctatttcctccgaacctaccgactacaagcagccggcgatcgacactgtga

SEQ ID NO: 411172 - DNA, 60 bp, Artificial
  Synthetic oligonucleotide
gcctatttgaccatctgtcatcagcgctacctccgtactcaggcgatatccaagggcatg

SEQ ID NO: 411173 - DNA, 55 bp, Artificial
  Synthetic oligonucleotide
gcctatttgtttcaagttgagggacactctaaggcaacttgaggatgcatataag

SEQ ID NO: 411174 - DNA, 58 bp, Artificial
  Synthetic oligonucleotide
gcctattttataacacgtcaggcacaagtagatgaatcaaaggttgttgacattgagg

SEQ ID NO: 411175 - DNA, 60 bp, Artificial
  Synthetic oligonucleotide
gcctattttcactcttgcctggtgttgcacactcaattgctatcgaattatgtgtacctg

SEQ ID NO: 411176 - DNA, 55 bp, Artificial
  Synthetic oligonucleotide
gcctcaaaacgttggatggatggctctccaatcttatatgccatccactaagcgc

SEQ ID NO: 411177 - DNA, 60 bp, Artificial
  Synthetic oligonucleotide
gcctcaaaatctacaggagtgatggattacatggttttctccatgattagttctatgatc

SEQ ID NO: 411178 - DNA, 60 bp, Artificial
  Synthetic oligonucleotide
gcctcaaacatggtcgctgcaccctcccaccccatattcctctgtcccatactctcgatc

SEQ ID NO: 411179 - DNA, 55 bp, Artificial
  Synthetic oligonucleotide
gcctcaaaccatgtgtaaagttgaccccactctgtgtcacgctaagctgtagcaa

SEQ ID NO: 411180 - DNA, 55 bp, Artificial
  Synthetic oligonucleotide
gcctcaaaccctgtgtatgctactctgaaaatacggatctatttctacgattcgg

SEQ ID NO: 411181 - DNA, 60 bp, Artificial
  Synthetic oligonucleotide
gcctcaaatgaaaacatggatacaatggactccagcactctcgagttgagaagcagatac

SEQ ID NO: 411182 - DNA, 50 bp, Artificial
  Synthetic oligonucleotide
gcctcaaattctacccctcagcgagtatgggctcacctttgcaccctttt

SEQ ID NO: 411183 - DNA, 55 bp, Artificial
  Synthetic oligonucleotide
gcctcaactaactgcaacatgctgtccccacccacaatcgctgaacccgcagccc

SEQ ID NO: 411184 - DNA, 60 bp, Artificial
  Synthetic oligonucleotide
gcctcaactaagacagacatcgtctgttggtatagtgcctccatgctttaagtaagtagg

SEQ ID NO: 411185 - DNA, 52 bp, Artificial
  Synthetic oligonucleotide
gcctcaactaataggacctacacaacccaacaaagggtttgttccgtacgac

SEQ ID NO: 411186 - DNA, 55 bp, Artificial
  Synthetic oligonucleotide
gcctcaagcccactctccatggaccaacacccctgctatacagactgggcgccgt

SEQ ID NO: 411187 - DNA, 60 bp, Artificial
  Synthetic oligonucleotide
gcctcaagcgtcgagaaatggatgttctaactttcgtctcaaaggctatggggcatgagt

SEQ ID NO: 411188 - DNA, 57 bp, Artificial
  Synthetic oligonucleotide
gcctcaaggatcaaattcctgctgttgacaagttgtattccactaaggttaataagt

SEQ ID NO: 411189 - DNA, 60 bp, Artificial
  Synthetic oligonucleotide
gcctcaataacattgtatggaacttcaaccagtttgtgtaagtgccaattgaggagattc

SEQ ID NO: 411190 - DNA, 55 bp, Artificial
  Synthetic oligonucleotide
gcctcaatatagttgtgcaagagttcaattacctatgttgaacacggacatgacc

SEQ ID NO: 411191 - DNA, 60 bp, Artificial
  Synthetic oligonucleotide
gcctcaatggttaatcaggttgtatcatctggtccggtcggcctggattctgcaggcgcc

SEQ ID NO: 411192 - DNA, 55 bp, Artificial
  Synthetic oligonucleotide
gcctcacagcaaccatggaaatgttcgaactagaccgggaagtacaccaggaacg

SEQ ID NO: 411193 - DNA, 55 bp, Artificial
  Synthetic oligonucleotide
gcctcaccaagtggatgctggttgctgcagatatgaaatgctttggcaacacagc

SEQ ID NO: 411194 - DNA, 55 bp, Artificial
  Synthetic oligonucleotide
gcctcaccgcctcaccagatttggcggctgttgtggctagagacctactagcccc

SEQ ID NO: 411195 - DNA, 58 bp, Artificial
  Synthetic oligonucleotide
gcctcacgctacttactacgctttacgcggggtattcgttgagcgactgctgattagg

SEQ ID NO: 411196 - DNA, 54 bp, Artificial
  Synthetic oligonucleotide
gcctcacgggggggttctatgagcccctagtcaggcggtgttcagagctgatgg

SEQ ID NO: 411197 - DNA, 55 bp, Artificial
  Synthetic oligonucleotide
gcctcacttccgaatgacgctgctagatgtatgatcgatagagcttcgaagatag

SEQ ID NO: 411198 - DNA, 51 bp, Artificial
  Synthetic oligonucleotide
gcctcactttatagatgtcatgaactactatcataccaacttcgtgacttc

SEQ ID NO: 411199 - DNA, 55 bp, Artificial
  Synthetic oligonucleotide
gcctcagaactatactcggagcgtagtgttgaattccgatctcttacttacgcgc

SEQ ID NO: 411200 - DNA, 56 bp, Artificial
  Synthetic oligonucleotide
gcctcagacaatggcctttgggggacgtggtccgtgggaacatcttcctgaggtag

SEQ ID NO: 411201 - DNA, 56 bp, Artificial
  Synthetic oligonucleotide
gcctcagacctcccaccaacagagatttccccaaaccccactcttgcccgatgtcg

SEQ ID NO: 411202 - DNA, 57 bp, Artificial
  Synthetic oligonucleotide
gcctcagacctctttcggtcttaccaagagcctcgcctcgacgtggtctccttccga

SEQ ID NO: 411203 - DNA, 55 bp, Artificial
  Synthetic oligonucleotide
gcctcagagaatagcaatttgcaaacttccatggaaatagtgaggcttacacaga

SEQ ID NO: 411204 - DNA, 60 bp, Artificial
  Synthetic oligonucleotide
gcctcagaggaggtaccattagttggatcggggatggcgactgccattgcgaccggacga

SEQ ID NO: 411205 - DNA, 60 bp, Artificial
  Synthetic oligonucleotide
gcctcagcaaggcctatgccaacatgtggtcactgatgtactttcacaaaagggacatga

SEQ ID NO: 411206 - DNA, 57 bp, Artificial
  Synthetic oligonucleotide
gcctcagccaactcttattactccttctgctgacgcttgaacgccctccaaaccccc

SEQ ID NO: 411207 - DNA, 55 bp, Artificial
  Synthetic oligonucleotide
gcctcagcccagtgaatttggctatggcagcaccctccaaggatccgcgaatctc

SEQ ID NO: 411208 - DNA, 55 bp, Artificial
  Synthetic oligonucleotide
gcctcagccgaaggttggacgtgctcggagattcctggtcaaccccaaaacactc

SEQ ID NO: 411209 - DNA, 55 bp, Artificial
  Synthetic oligonucleotide
gcctcagctctatatcgggaagcactagagtctcctgaacattgctctcctcacc

SEQ ID NO: 411210 - DNA, 55 bp, Artificial
  Synthetic oligonucleotide
gcctcagctctctatcgggaagccctaaagtctcctgggcattgctcacctcacc

SEQ ID NO: 411211 - DNA, 55 bp, Artificial
  Synthetic oligonucleotide
gcctcagctctctatcgggaatcattagaatctcctgagcattgctcacctcacc

SEQ ID NO: 411212 - DNA, 55 bp, Artificial
  Synthetic oligonucleotide
gcctcagctctgtatcgggatgccttagaatctcctgagcatgtttcacatcacc

SEQ ID NO: 411213 - DNA, 55 bp, Artificial
  Synthetic oligonucleotide
gcctcagctgaactacgatagaatcgtcctccttcaacctggacatcgatgatga

SEQ ID NO: 411214 - DNA, 55 bp, Artificial
  Synthetic oligonucleotide
gcctcagctttgatcctctacaccgttaaatagataagaagttgtgtttatatgg

SEQ ID NO: 411215 - DNA, 55 bp, Artificial
  Synthetic oligonucleotide
gcctcagctttgtatcgggacgctttagagtctcatgagcattgctcacctcacc

SEQ ID NO: 411216 - DNA, 55 bp, Artificial
  Synthetic oligonucleotide
gcctcaggaaattggcattacgattccgtttggatggacggcgctgtcatcacca

SEQ ID NO: 411217 - DNA, 51 bp, Artificial
  Synthetic oligonucleotide
gcctcaggaaggcgttcaggagtgccgagcatcttggatgtggtaggaatg

SEQ ID NO: 411218 - DNA, 55 bp, Artificial
  Synthetic oligonucleotide
gcctcaggacttctttccttcagtacgagatcttctagataccgcttcagctctg

SEQ ID NO: 411219 - DNA, 55 bp, Artificial
  Synthetic oligonucleotide
gcctcaggattttggagaggtcttcaacatgtttgacaacgagcccagcaccgct

SEQ ID NO: 411220 - DNA, 60 bp, Artificial
  Synthetic oligonucleotide
gcctcaggccgcataaggcagctgactctcgccgctgacaaggggtacgaggtagtcgcg

SEQ ID NO: 411221 - DNA, 57 bp, Artificial
  Synthetic oligonucleotide
gcctcagggaagccgcagctttggaggttgcgaaacccaaaccgagtgccgtgctaa

SEQ ID NO: 411222 - DNA, 59 bp, Artificial
  Synthetic oligonucleotide
gcctcagggacggctcgaggcgcgtcaggaaaagccagggctgcctcaggaagaataag

SEQ ID NO: 411223 - DNA, 58 bp, Artificial
  Synthetic oligonucleotide
gcctcaggggacccaacatcacctgacaacttagaatcccctaatgcaccatgggtat

SEQ ID NO: 411224 - DNA, 55 bp, Artificial
  Synthetic oligonucleotide
gcctcagtcaattcggatgtgactatggctggagcactctatgataagcgtcaca

SEQ ID NO: 411225 - DNA, 59 bp, Artificial
  Synthetic oligonucleotide
gcctcagtccgtttctcatggctcagtttactagtgccatttgttcagtggttcgtagg

SEQ ID NO: 411226 - DNA, 60 bp, Artificial
  Synthetic oligonucleotide
gcctcagtggacatcctctctataacaagctagatgacactgaaaactctaacatagcac

SEQ ID NO: 411227 - DNA, 55 bp, Artificial
  Synthetic oligonucleotide
gcctcagtgtgtgcgtgtagcaatcttgttcagcctccggcaattgcgactgcaa

SEQ ID NO: 411228 - DNA, 59 bp, Artificial
  Synthetic oligonucleotide
gcctcataaccaaaacagttactccaagctacttattcttaggattaagtgaatgctca

SEQ ID NO: 411229 - DNA, 55 bp, Artificial
  Synthetic oligonucleotide
gcctcatacaccgatcgtcaccagcagcagactattaccgtcctccaagataccg

SEQ ID NO: 411230 - DNA, 60 bp, Artificial
  Synthetic oligonucleotide
gcctcatcatcttcttacagttataggcgaaagcttgttaatcctgctaatcaagaagaa

SEQ ID NO: 411231 - DNA, 55 bp, Artificial
  Synthetic oligonucleotide
gcctcatccggcacactggagtttaacaacgaaagcttcaattggactggagtcg

SEQ ID NO: 411232 - DNA, 55 bp, Artificial
  Synthetic oligonucleotide
gcctcatggccaacgcaatctgctcagccgttccggtagactgggtacccacagg

SEQ ID NO: 411233 - DNA, 60 bp, Artificial
  Synthetic oligonucleotide
gcctcatgtacttgtggcgctctccaggcataccaaaactatgacgtattataccgtcac

SEQ ID NO: 411234 - DNA, 56 bp, Artificial
  Synthetic oligonucleotide
gcctcattaacccaagcttatcaatattgtaataaccacaactgttcctcattacg

SEQ ID NO: 411235 - DNA, 60 bp, Artificial
  Synthetic oligonucleotide
gcctcattgacagccgtgtatggagaatactatcttttcacggcctactcctcagacgga

SEQ ID NO: 411236 - DNA, 50 bp, Artificial
  Synthetic oligonucleotide
gcctcattgttttcccccccctagacttccggatagctgaaaagctaatc

SEQ ID NO: 411237 - DNA, 56 bp, Artificial
  Synthetic oligonucleotide
gcctcatttttcaagaatcctcacaatgatatgttaaatgtcaatctggcaaaaac

SEQ ID NO: 411238 - DNA, 59 bp, Artificial
  Synthetic oligonucleotide
gcctccaaaagctctatgcctctctcgtggttccccctgaaagtgacttcaccaccatc

SEQ ID NO: 411239 - DNA, 59 bp, Artificial
  Synthetic oligonucleotide
gcctccaaagtacgccgccggctgaatttcgacagccccgggatcagccgtgccgctgc

SEQ ID NO: 411240 - DNA, 54 bp, Artificial
  Synthetic oligonucleotide
gcctccaaatcagagtgagcgccagacaatgtcacatccagggtcgtctctggt

SEQ ID NO: 411241 - DNA, 55 bp, Artificial
  Synthetic oligonucleotide
gcctccaagctgtgccttgggtggctttagggcatggatagaacaactttgccat

SEQ ID NO: 411242 - DNA, 55 bp, Artificial
  Synthetic oligonucleotide
gcctccaaggtcttccggtcagaggcaattaacgggaaggaattccaggaatcaa

SEQ ID NO: 411243 - DNA, 59 bp, Artificial
  Synthetic oligonucleotide
gcctccaatacaaaataccaggaacgtagtgccagtaagcatagtgtccagagaaatta

SEQ ID NO: 411244 - DNA, 58 bp, Artificial
  Synthetic oligonucleotide
gcctccacaagccagctttgtttttcccactacctgcaccaacttacacgacacacac

SEQ ID NO: 411245 - DNA, 55 bp, Artificial
  Synthetic oligonucleotide
gcctccagatcctaggtatcctcaacgcgatcaatccatacagtgcctacaccgg

SEQ ID NO: 411246 - DNA, 56 bp, Artificial
  Synthetic oligonucleotide
gcctccagccttcgtttatcgacaaggagggacactccatggtagaggcttatcct

SEQ ID NO: 411247 - DNA, 57 bp, Artificial
  Synthetic oligonucleotide
gcctccagcgtttggtttgggcctgtacaggagttgaagtaggtcgtggtcagccat

SEQ ID NO: 411248 - DNA, 50 bp, Artificial
  Synthetic oligonucleotide
gcctccagtgacgcaaccccagaatccacaatagagactaggtatgtata

SEQ ID NO: 411249 - DNA, 55 bp, Artificial
  Synthetic oligonucleotide
gcctccatacgtctctgttcgagccttctaattttaacgactcgactcatcggaa

SEQ ID NO: 411250 - DNA, 55 bp, Artificial
  Synthetic oligonucleotide
gcctccatcaaatgcacgtatagtgtcataccttgcacgaacaacaacctgggga

SEQ ID NO: 411251 - DNA, 58 bp, Artificial
  Synthetic oligonucleotide
gcctccatggaaaagacacttaccttcactacatcaaaattttggatccgtatctgaa

SEQ ID NO: 411252 - DNA, 58 bp, Artificial
  Synthetic oligonucleotide
gcctccatggaaaagacacttatttacactacatcaaaattctggatccctacttgaa

SEQ ID NO: 411253 - DNA, 58 bp, Artificial
  Synthetic oligonucleotide
gcctccatgtctcacccgcacatgttgacgattttgaagagtgctcacaccaacctgc

SEQ ID NO: 411254 - DNA, 54 bp, Artificial
  Synthetic oligonucleotide
gcctcccagttttcgagtagtcccggacctatctaaattggagtcatccgaccg

SEQ ID NO: 411255 - DNA, 59 bp, Artificial
  Synthetic oligonucleotide
gcctcccatccaggaatcatcggcgcccttttccaatacgtcgacactatggtcttaca

SEQ ID NO: 411256 - DNA, 55 bp, Artificial
  Synthetic oligonucleotide
gcctccccaggtagaatggtggctctccctgctcaatgatcgactcgagacggcc

SEQ ID NO: 411257 - DNA, 55 bp, Artificial
  Synthetic oligonucleotide
gcctccccgattatgtgatgttttctgccctgctgggtggagcaccctcgggttg

SEQ ID NO: 411258 - DNA, 60 bp, Artificial
  Synthetic oligonucleotide
gcctcccctacccagtgtccagaagttaacagaagatagatggagcaggcacctgaggat

SEQ ID NO: 411259 - DNA, 54 bp, Artificial
  Synthetic oligonucleotide
gcctcccctttatctcttgccaaaaggggtacaagggtgtgtgggccggcactg

SEQ ID NO: 411260 - DNA, 60 bp, Artificial
  Synthetic oligonucleotide
gcctcccgcaacggcgctactgaagactccttcctgcgagatattgacggtccgcagtac

SEQ ID NO: 411261 - DNA, 50 bp, Artificial
  Synthetic oligonucleotide
gcctcccggatttggtacgggacttcaccctcgttagctagcctcccgga

SEQ ID NO: 411262 - DNA, 55 bp, Artificial
  Synthetic oligonucleotide
gcctcccgtctgaagggagatcagttgctgcaggtgaaactcctgcttctctctc

SEQ ID NO: 411263 - DNA, 55 bp, Artificial
  Synthetic oligonucleotide
gcctccgattccttcggactttacagtctccgcggaaggagacgacagttctcga

SEQ ID NO: 411264 - DNA, 54 bp, Artificial
  Synthetic oligonucleotide
gcctccgattctattactgacggtactgcaaagggaacggttcttggcgttccc

SEQ ID NO: 411265 - DNA, 55 bp, Artificial
  Synthetic oligonucleotide
gcctccggtactaatctggttctctatgctgccccgttgaaccctctcttgcctc

SEQ ID NO: 411266 - DNA, 60 bp, Artificial
  Synthetic oligonucleotide
gcctccggtggcattcaaggtgatgtgtttgctaccgatagcaatgttgtaggcatgggt

SEQ ID NO: 411267 - DNA, 55 bp, Artificial
  Synthetic oligonucleotide
gcctccggttaccaatgtttcctcctgctcattgttgtgaacaatcacagcaacc

SEQ ID NO: 411268 - DNA, 55 bp, Artificial
  Synthetic oligonucleotide
gcctccgtcgttaaaacctagattggaggtggaattcctgaagcgcaaacctggc

SEQ ID NO: 411269 - DNA, 55 bp, Artificial
  Synthetic oligonucleotide
gcctcctaaaatgcctattgcggctaacaactctgtaagcatggtggacgcctta

SEQ ID NO: 411270 - DNA, 55 bp, Artificial
  Synthetic oligonucleotide
gcctcctcaacgttatcgatcctttctgagtcgagtacgaggatggctggactcc

SEQ ID NO: 411271 - DNA, 60 bp, Artificial
  Synthetic oligonucleotide
gcctcctcaccgccttcagctctcagacccactattctgaagagtccatttggcacaccc

SEQ ID NO: 411272 - DNA, 55 bp, Artificial
  Synthetic oligonucleotide
gcctcctcagtacacaatgagcacctccgggtcacggagggccgacagtatgtgc

SEQ ID NO: 411273 - DNA, 55 bp, Artificial
  Synthetic oligonucleotide
gcctcctcatcccaaccatgtgcaggatctgtgatctttggtcaagctgctgtgc

SEQ ID NO: 411274 - DNA, 54 bp, Artificial
  Synthetic oligonucleotide
gcctcctccaatcccttcaacaaatagagagcatgattgaagctgaatcctctg

SEQ ID NO: 411275 - DNA, 55 bp, Artificial
  Synthetic oligonucleotide
gcctcctcgtattaacaaagcgaaatatatacccgtcagcctcagtgaagagggt

SEQ ID NO: 411276 - DNA, 55 bp, Artificial
  Synthetic oligonucleotide
gcctcctctgcagtatagctttaggtcacacccaggaatgtttaatctgcacaag

SEQ ID NO: 411277 - DNA, 57 bp, Artificial
  Synthetic oligonucleotide
gcctcctgcatatacagtgaggcctcgtaactggagatcgtccgatgggcggaggaa

SEQ ID NO: 411278 - DNA, 55 bp, Artificial
  Synthetic oligonucleotide
gcctcctggagctgtggtcaagataggcagagacacccagcattattgcacaatg

SEQ ID NO: 411279 - DNA, 59 bp, Artificial
  Synthetic oligonucleotide
gcctccttcgaacttcccaggttcggaggagtcactcctggcgtcatggagcaactcca

SEQ ID NO: 411280 - DNA, 56 bp, Artificial
  Synthetic oligonucleotide
gcctccttcgagcttcccaggttcggaggtgttactcctggcgtcatggaacaact

SEQ ID NO: 411281 - DNA, 60 bp, Artificial
  Synthetic oligonucleotide
gcctccttgctttcagcgatcaaaatttttgctgatggatgctctgaaactaagtattga

SEQ ID NO: 411282 - DNA, 55 bp, Artificial
  Synthetic oligonucleotide
gcctccttgtgtcatcggaggggtgggtaacaacaccttgcactgccccaccgac

SEQ ID NO: 411283 - DNA, 53 bp, Artificial
  Synthetic oligonucleotide
gcctcgaaggttagcgcaaggctcctcactttggaggaggcgtgccaattgac

SEQ ID NO: 411284 - DNA, 55 bp, Artificial
  Synthetic oligonucleotide
gcctcgaagtgcttgacccaccaggacttgtaaccctactatctctagtgactgc

SEQ ID NO: 411285 - DNA, 55 bp, Artificial
  Synthetic oligonucleotide
gcctcgacacgagcctcgttctgccgagagttcaaaacttacaccacatacggcg

SEQ ID NO: 411286 - DNA, 58 bp, Artificial
  Synthetic oligonucleotide
gcctcgacagataccgcctgggggggtcttgatcgaagttggtgatgtcacaagggcc

SEQ ID NO: 411287 - DNA, 60 bp, Artificial
  Synthetic oligonucleotide
gcctcgagagaatccggccaaacccctcgtgaggctcagaggtcggctgaggcactcttc

SEQ ID NO: 411288 - DNA, 55 bp, Artificial
  Synthetic oligonucleotide
gcctcgagatttagatcgccagtatgagaaatacatcgtgggacgtgtgaaccta

SEQ ID NO: 411289 - DNA, 51 bp, Artificial
  Synthetic oligonucleotide
gcctcgatatcaaatataaccacggcaacgagatgtccaacgcaaggagag

SEQ ID NO: 411290 - DNA, 55 bp, Artificial
  Synthetic oligonucleotide
gcctcgatcaggtatcgatacaaacgcatactacgtcatgtcagttggctccaag

SEQ ID NO: 411291 - DNA, 60 bp, Artificial
  Synthetic oligonucleotide
gcctcgatcgattcgtggctagaattactgcgtcacttataatgcgtgactgctaggtga

SEQ ID NO: 411292 - DNA, 59 bp, Artificial
  Synthetic oligonucleotide
gcctcgcaactatctttggtgcgtcgggtgactcctccctcgcctgccgctttatgggc

SEQ ID NO: 411293 - DNA, 59 bp, Artificial
  Synthetic oligonucleotide
gcctcgcaaggtacttcttagatctattgaagctgtgtttaacggaagcttaagcttca

SEQ ID NO: 411294 - DNA, 53 bp, Artificial
  Synthetic oligonucleotide
gcctcgcactgtccgtggggtatggcgtggcgatcgtaggcttcgatgcgttg

SEQ ID NO: 411295 - DNA, 55 bp, Artificial
  Synthetic oligonucleotide
gcctcgcagatcgatcccacttagatgaaatgtggacatgctcggcatctagagc

SEQ ID NO: 411296 - DNA, 55 bp, Artificial
  Synthetic oligonucleotide
gcctcgcatcaaggattacccacgatgctcacacctggaagcaaccagtttctga

SEQ ID NO: 411297 - DNA, 60 bp, Artificial
  Synthetic oligonucleotide
gcctcgccttggaagcactctcaaatatgatgcagtccatgagtgcacaatgtggggtga

SEQ ID NO: 411298 - DNA, 55 bp, Artificial
  Synthetic oligonucleotide
gcctcgcgacagtggaactcactcccatatccctttactggcgacctgtctacac

SEQ ID NO: 411299 - DNA, 60 bp, Artificial
  Synthetic oligonucleotide
gcctcgctgttatcacctctagtacattgattcacttctaatttcaccagttccactcga

SEQ ID NO: 411300 - DNA, 57 bp, Artificial
  Synthetic oligonucleotide
gcctcggcagcgcaatagcttcaatcgtgattgagcagtcatggcttgcgatccgtc

SEQ ID NO: 411301 - DNA, 60 bp, Artificial
  Synthetic oligonucleotide
gcctcggcgcatgcgtcgttagcactctggcagcctcctctagcacttcggccgtcgacc

SEQ ID NO: 411302 - DNA, 55 bp, Artificial
  Synthetic oligonucleotide
gcctcggcggattgaagaagaagtatggctcccgtgctcactgggagattgccag

SEQ ID NO: 411303 - DNA, 55 bp, Artificial
  Synthetic oligonucleotide
gcctcgggattccataccatagatccagtaaatcctaattcacaatacgatttag

SEQ ID NO: 411304 - DNA, 55 bp, Artificial
  Synthetic oligonucleotide
gcctcgggcaccaatctggtcctctatgctgccccactgaatccccttttacccc

SEQ ID NO: 411305 - DNA, 57 bp, Artificial
  Synthetic oligonucleotide
gcctcgggtaccctctgcagctccggtcgccggaggcttgccgtggagtcgcgtcgg

SEQ ID NO: 411306 - DNA, 55 bp, Artificial
  Synthetic oligonucleotide
gcctcggtacagaggcgccaagttcaaatgtccacgtctatgatacgacacctgg

SEQ ID NO: 411307 - DNA, 55 bp, Artificial
  Synthetic oligonucleotide
gcctcggtatggcttgatcagaaatttgagggacatgtcgctagccaggtatgcc

SEQ ID NO: 411308 - DNA, 60 bp, Artificial
  Synthetic oligonucleotide
gcctcggtggtaggcgtgctgagcttactgttgacatgacggatccaattcttcaaagca

SEQ ID NO: 411309 - DNA, 55 bp, Artificial
  Synthetic oligonucleotide
gcctcgtaaacatcaacggattgacactgtaaccaatgttcataagtggcgtgga

SEQ ID NO: 411310 - DNA, 56 bp, Artificial
  Synthetic oligonucleotide
gcctcgtcagttcacctccttggtgaccccaaccaaatccccgccattgactttga

SEQ ID NO: 411311 - DNA, 55 bp, Artificial
  Synthetic oligonucleotide
gcctcgtctgtcattgcaacttgggacggctcacttcaccacccagaccttggca

SEQ ID NO: 411312 - DNA, 60 bp, Artificial
  Synthetic oligonucleotide
gcctcgtgagcgaaaacaaggtcaggttcgtcgtgggacagcgcgagctgtgtccgacaa

SEQ ID NO: 411313 - DNA, 55 bp, Artificial
  Synthetic oligonucleotide
gcctcgtggaggcgtttccgactcaggttcttatcttccacgtagatttagcagg

SEQ ID NO: 411314 - DNA, 59 bp, Artificial
  Synthetic oligonucleotide
gcctcgtgtctgaggactttgaaaggcagttggcatattatgctactacctggacaagt

SEQ ID NO: 411315 - DNA, 55 bp, Artificial
  Synthetic oligonucleotide
gcctcgtgtttaagagcacccaatctaattaagtataagcctatgacagacgtga

SEQ ID NO: 411316 - DNA, 60 bp, Artificial
  Synthetic oligonucleotide
gcctcgttgtatgcgaataggaaattcgctatgatgctcccttcaaagccgttgaagtcg

SEQ ID NO: 411317 - DNA, 55 bp, Artificial
  Synthetic oligonucleotide
gcctcgtttccttcgtgcttaccggtaccgacttcacatacgaaatcgccgacac

SEQ ID NO: 411318 - DNA, 55 bp, Artificial
  Synthetic oligonucleotide
gcctcgtttgacatgcgtttctctaagatcattcctgatgagactagtgatgcgg

SEQ ID NO: 411319 - DNA, 57 bp, Artificial
  Synthetic oligonucleotide
gcctctaaccctgtgtatgctactttgaaagttaggagttacttctacgattctgta

SEQ ID NO: 411320 - DNA, 50 bp, Artificial
  Synthetic oligonucleotide
gcctctaactaatatcaaagttgtactttcaaccactcacgttacccttc

SEQ ID NO: 411321 - DNA, 60 bp, Artificial
  Synthetic oligonucleotide
gcctctaagccgtggtatgcacagttgcttccctgtacatcacgatgtggtcaccaagat

SEQ ID NO: 411322 - DNA, 60 bp, Artificial
  Synthetic oligonucleotide
gcctctaagttagattcggctgcggatactgaatttggtaagcatgtgattggttataat

SEQ ID NO: 411323 - DNA, 60 bp, Artificial
  Synthetic oligonucleotide
gcctctacaattgtacgctagtttcactcttcgacctggactttaacaattgtgcaatga

SEQ ID NO: 411324 - DNA, 58 bp, Artificial
  Synthetic oligonucleotide
gcctctacacgttgacggcggcgtttgcatttcgctatgaaagcagcgtctcgcatca

SEQ ID NO: 411325 - DNA, 56 bp, Artificial
  Synthetic oligonucleotide
gcctctaccggtgcgggccccgcctgtggacacgcgattgcgccgtagccgaactt

SEQ ID NO: 411326 - DNA, 60 bp, Artificial
  Synthetic oligonucleotide
gcctctagatgagctaatgcaaagaatgaatagagcaattcctgtgggaccggaaccttc

SEQ ID NO: 411327 - DNA, 50 bp, Artificial
  Synthetic oligonucleotide
gcctctagcacagtagcgaccatatgacacctgaatatactacatctatg

SEQ ID NO: 411328 - DNA, 55 bp, Artificial
  Synthetic oligonucleotide
gcctctagctaccggggtgctgaaacccgagagtagtaagcccgcgaccttggac

SEQ ID NO: 411329 - DNA, 51 bp, Artificial
  Synthetic oligonucleotide
gcctctagggaactagtagtcagctatgtcaataacaacatgggtctaaaa

SEQ ID NO: 411330 - DNA, 56 bp, Artificial
  Synthetic oligonucleotide
gcctctagggtaagtgttccgtatgagttcgcaatagacgccccgcaaagggttga

SEQ ID NO: 411331 - DNA, 55 bp, Artificial
  Synthetic oligonucleotide
gcctctaggtcttgcttggacacgtacatcgtctggtaggccgaattagcgctaa

SEQ ID NO: 411332 - DNA, 60 bp, Artificial
  Synthetic oligonucleotide
gcctctagtactctgcggacacactcagggcggcagaaactttgctctcaggagcgatga

SEQ ID NO: 411333 - DNA, 60 bp, Artificial
  Synthetic oligonucleotide
gcctctattgtggtggcccgatgtttaactccaaaggggaatcatgtggctatcgcagat

SEQ ID NO: 411334 - DNA, 58 bp, Artificial
  Synthetic oligonucleotide
gcctctattttttcactcccagggttatatctcacacgcggtccactcgggctctata

SEQ ID NO: 411335 - DNA, 60 bp, Artificial
  Synthetic oligonucleotide
gcctctcaaggacatgtccaagccaaaacccgagagagtagtcatagccagaaggtcact

SEQ ID NO: 411336 - DNA, 60 bp, Artificial
  Synthetic oligonucleotide
gcctctcagaactgctgggatcatattattactgataattctagctatcattgtgatagg

SEQ ID NO: 411337 - DNA, 60 bp, Artificial
  Synthetic oligonucleotide
gcctctcaggtgatgggtggccttacattggttcaagatcacaaattcttggaagatctt

SEQ ID NO: 411338 - DNA, 55 bp, Artificial
  Synthetic oligonucleotide
gcctctccaacattttctgagcgttgtcgatgtgtgtctcgtagatgtgaacgtc

SEQ ID NO: 411339 - DNA, 55 bp, Artificial
  Synthetic oligonucleotide
gcctctccaactggcagacgcctccgcaacgccgaaacatgccgagataaggatc

SEQ ID NO: 411340 - DNA, 59 bp, Artificial
  Synthetic oligonucleotide
gcctctcccctgagccagacttggctcgagtagtgatggatgacctcctagccccctcg

SEQ ID NO: 411341 - DNA, 59 bp, Artificial
  Synthetic oligonucleotide
gcctctcctacttaaagaaaatcgatggagaggctcattgggaatctgtgcgaggaacc

SEQ ID NO: 411342 - DNA, 55 bp, Artificial
  Synthetic oligonucleotide
gcctctccttgtcggtgaatccccccctgagaggcctcttcctaggtccggagtc

SEQ ID NO: 411343 - DNA, 53 bp, Artificial
  Synthetic oligonucleotide
gcctctcgctacccaacggatgttcatcgtatcaaagagtggcgaatggctac

SEQ ID NO: 411344 - DNA, 55 bp, Artificial
  Synthetic oligonucleotide
gcctctctggctcgcaattcccgttgggtttccaaagccttattttccgatttgc

SEQ ID NO: 411345 - DNA, 59 bp, Artificial
  Synthetic oligonucleotide
gcctctcttcgctcacattcgcaaacgaggggagtcacgggtgtaatgtgaaaagacaa

SEQ ID NO: 411346 - DNA, 59 bp, Artificial
  Synthetic oligonucleotide
gcctctgaccctgtcatgattaatgccgcgggtctggtaactttcaataccgcgggcaa

SEQ ID NO: 411347 - DNA, 60 bp, Artificial
  Synthetic oligonucleotide
gcctctgacgtactggcattatccgtgaggcccaatctctctgtggacgtgtaccgcata

SEQ ID NO: 411348 - DNA, 60 bp, Artificial
  Synthetic oligonucleotide
gcctctgacttactgcctgcgttaagtgctgcggcgtaagcgtcatcggctgtctgttgc

SEQ ID NO: 411349 - DNA, 55 bp, Artificial
  Synthetic oligonucleotide
gcctctgatattcaatagacaaggcctgaacggttatggttgtggccagtatggc

SEQ ID NO: 411350 - DNA, 51 bp, Artificial
  Synthetic oligonucleotide
gcctctgatgtagagggactgccgtggtgtgtacacacaactcctttcaga

SEQ ID NO: 411351 - DNA, 60 bp, Artificial
  Synthetic oligonucleotide
gcctctgattttaagcagtttgtaaggcactgtgagatatttgacgtgtcccttgtgttg

SEQ ID NO: 411352 - DNA, 60 bp, Artificial
  Synthetic oligonucleotide
gcctctgcaactgacttatatagaacatgtaagcaatccggtacgtgcccccctgatgtt

SEQ ID NO: 411353 - DNA, 55 bp, Artificial
  Synthetic oligonucleotide
gcctctgccacgcacaccgtccaatttaatcgcccagtacgcatagtcgttctcg

SEQ ID NO: 411354 - DNA, 55 bp, Artificial
  Synthetic oligonucleotide
gcctctgcttccagtgtcccttccgaatggaagccctctaagaaccaacgagctg

SEQ ID NO: 411355 - DNA, 55 bp, Artificial
  Synthetic oligonucleotide
gcctctggaggccccacatcacctgataacattgattctcctaatgcgccatggg

SEQ ID NO: 411356 - DNA, 55 bp, Artificial
  Synthetic oligonucleotide
gcctctggccatttcggaacttcctacattttcacccaggctctttccggaattc

SEQ ID NO: 411357 - DNA, 60 bp, Artificial
  Synthetic oligonucleotide
gcctctgggaatggactctggtatggaggctctacatcagggaatagcttattggcgctg

SEQ ID NO: 411358 - DNA, 60 bp, Artificial
  Synthetic oligonucleotide
gcctctgggtccagtctgcagcgagagtaagtgaggaaggtgttggcattcctatgcttg

SEQ ID NO: 411359 - DNA, 55 bp, Artificial
  Synthetic oligonucleotide
gcctctgtaaccgacatctacaggggctgcaaagctgctggcacctgcccacaag

SEQ ID NO: 411360 - DNA, 55 bp, Artificial
  Synthetic oligonucleotide
gcctcttaaggacatgtctaaacctaaacctgagagggtgatcatagctaggagg

SEQ ID NO: 411361 - DNA, 57 bp, Artificial
  Synthetic oligonucleotide
gcctcttacaggcctcccgtgtcctacacgctacatcggtctcctcttacaaaactc

SEQ ID NO: 411362 - DNA, 55 bp, Artificial
  Synthetic oligonucleotide
gcctcttacctcagtaatcaattcccttaatcattgtctgtatgttgggtgtgcc

SEQ ID NO: 411363 - DNA, 55 bp, Artificial
  Synthetic oligonucleotide
gcctcttatgaagtagttgcgtcatacgtggttagcccgtgtgaaccttgcaacc

SEQ ID NO: 411364 - DNA, 60 bp, Artificial
  Synthetic oligonucleotide
gcctcttatggctcctatgattaattgtattcatgtagtagttatgtctaattttctccc

SEQ ID NO: 411365 - DNA, 53 bp, Artificial
  Synthetic oligonucleotide
gcctcttcaggcctttggcctaagaggttcaaaccccaccaacccatcccaac

SEQ ID NO: 411366 - DNA, 60 bp, Artificial
  Synthetic oligonucleotide
gcctcttccctgcacaagttaaggcaagaaacatcattagtcctgtcatgggagttattg

SEQ ID NO: 411367 - DNA, 60 bp, Artificial
  Synthetic oligonucleotide
gcctcttccttagatagagagcactttggataagtgaggaagtagttcttcgcatttatc

SEQ ID NO: 411368 - DNA, 60 bp, Artificial
  Synthetic oligonucleotide
gcctcttctctccctccgcggttcttcttcgactcggatcggctcatctcgacaagaggc

SEQ ID NO: 411369 - DNA, 60 bp, Artificial
  Synthetic oligonucleotide
gcctcttctttcaaaattgcgagtgccgaagctttggttcctgaattgagtgcctcggca

SEQ ID NO: 411370 - DNA, 57 bp, Artificial
  Synthetic oligonucleotide
gcctcttgacgtgattaagtcgttggtggagtccgtggcggaatacgtgtccacggc

SEQ ID NO: 411371 - DNA, 58 bp, Artificial
  Synthetic oligonucleotide
gcctcttgattcgcgaaatcgcggtaaaacaatccaagaaattatagaacaatccaca

SEQ ID NO: 411372 - DNA, 55 bp, Artificial
  Synthetic oligonucleotide
gcctcttgctgaattggattttgcagaggcctcgtcgaccgaagtgcctataacc

SEQ ID NO: 411373 - DNA, 55 bp, Artificial
  Synthetic oligonucleotide
gcctcttgctgtttacatccgaatcgtggactcgctgatccttgggagggtctcc

SEQ ID NO: 411374 - DNA, 55 bp, Artificial
  Synthetic oligonucleotide
gcctctttaaacaacagcaatgttaaagaggttcaggaaatcttcttacgcccca

SEQ ID NO: 411375 - DNA, 55 bp, Artificial
  Synthetic oligonucleotide
gcctctttatgtgcgggactagctgattctcttgtgtatacgctgcctgtagcgc

SEQ ID NO: 411376 - DNA, 55 bp, Artificial
  Synthetic oligonucleotide
gcctctttcccagtacgttttgcctattactgacgcgattggttggtttcagtac

SEQ ID NO: 411377 - DNA, 55 bp, Artificial
  Synthetic oligonucleotide
gcctctttcttgggaggatgggagtctggaatggctcactaaaggcagaattgcg

SEQ ID NO: 411378 - DNA, 55 bp, Artificial
  Synthetic oligonucleotide
gcctctttgacagtgcccgattcgattgggccgacggggttgggttgagcagcct

SEQ ID NO: 411379 - DNA, 60 bp, Artificial
  Synthetic oligonucleotide
gcctctttgagattccaagctacagatcactttacctgcgttgggtgaacgccgtgtgtg

SEQ ID NO: 411380 - DNA, 54 bp, Artificial
  Synthetic oligonucleotide
gcctcttttattcgagatgtgctgtatggagtcgattttagagtttaatatcaa

SEQ ID NO: 411381 - DNA, 55 bp, Artificial
  Synthetic oligonucleotide
gcctgaaacctcagaggtaagaccaagcccagaggacccttgcagagtgaccctg

SEQ ID NO: 411382 - DNA, 57 bp, Artificial
  Synthetic oligonucleotide
gcctgaaactcggttgatagccgattcccgggtacatggtgtctaatatgttcctta

SEQ ID NO: 411383 - DNA, 60 bp, Artificial
  Synthetic oligonucleotide
gcctgaaacttttccagaactgaaacctggagagtctagacatacttcagatcatatgtc

SEQ ID NO: 411384 - DNA, 58 bp, Artificial
  Synthetic oligonucleotide
gcctgaaaggttacggcaattcgtaggcacatggttgggtcggctaccaagtgcgcta

SEQ ID NO: 411385 - DNA, 55 bp, Artificial
  Synthetic oligonucleotide
gcctgaaagtaatttaacagacagtggccatgtaagagtgagcagattaggcacc

SEQ ID NO: 411386 - DNA, 60 bp, Artificial
  Synthetic oligonucleotide
gcctgaaatatgtgacaactattgcgatgttatgctcttcgacgactctatgagggtgtt

SEQ ID NO: 411387 - DNA, 54 bp, Artificial
  Synthetic oligonucleotide
gcctgaaattggtctcccttataagttgtaccctgttaggggcaaccctgagcg

SEQ ID NO: 411388 - DNA, 60 bp, Artificial
  Synthetic oligonucleotide
gcctgaactacatctgatgcgcgacaatgtcatggattgtggagcgcttgaaactgttat

SEQ ID NO: 411389 - DNA, 55 bp, Artificial
  Synthetic oligonucleotide
gcctgaactatacactcatccaggctgtgtgaatctcccattctcagaatgtaag

SEQ ID NO: 411390 - DNA, 55 bp, Artificial
  Synthetic oligonucleotide
gcctgaaggaactaacacgcgttgaggtatatgattttgcacggtgggatttgag

SEQ ID NO: 411391 - DNA, 55 bp, Artificial
  Synthetic oligonucleotide
gcctgaagtgggaattaatggacgaggattatcaggggcgtttgtgcaacccact

SEQ ID NO: 411392 - DNA, 55 bp, Artificial
  Synthetic oligonucleotide
gcctgaataaacttaccttgttggtgctccatctacttggtcgtgtattcctggg

SEQ ID NO: 411393 - DNA, 55 bp, Artificial
  Synthetic oligonucleotide
gcctgaatactggctgcaaagatggacgttacccattaaatccaataaattctgt

SEQ ID NO: 411394 - DNA, 60 bp, Artificial
  Synthetic oligonucleotide
gcctgaatgaacggtttgcagccattggatgaagaaggaacggctaagggaggcacggca

SEQ ID NO: 411395 - DNA, 55 bp, Artificial
  Synthetic oligonucleotide
gcctgaattaccaaaacctcacaaaatgttgtctaaacttccagccgtgctgaga

SEQ ID NO: 411396 - DNA, 57 bp, Artificial
  Synthetic oligonucleotide
gcctgaatttgttatggcccaaaattcggctatctctacgtttatcagttacccaga

SEQ ID NO: 411397 - DNA, 55 bp, Artificial
  Synthetic oligonucleotide
gcctgaattttgcaggaacaaattgacacttagcgtgtccgtagctcgcaacctc

SEQ ID NO: 411398 - DNA, 55 bp, Artificial
  Synthetic oligonucleotide
gcctgacaaggactttaactttgggagcacgatggcacgtagacacgtgacacct

SEQ ID NO: 411399 - DNA, 55 bp, Artificial
  Synthetic oligonucleotide
gcctgacactgaggactatttacttgcacataacctcaagcctcttcatcccttg

SEQ ID NO: 411400 - DNA, 55 bp, Artificial
  Synthetic oligonucleotide
gcctgaccattcctggtgtgatgtgtgttaactttacacccaccccgggtgaatc

SEQ ID NO: 411401 - DNA, 55 bp, Artificial
  Synthetic oligonucleotide
gcctgaccgagcgtttcgatgctttgcaggagaaccagctccaactgtatgaggc

SEQ ID NO: 411402 - DNA, 55 bp, Artificial
  Synthetic oligonucleotide
gcctgaccgtacccgcttcagcctaccacgtgcgcaactctacggggctttacca

SEQ ID NO: 411403 - DNA, 55 bp, Artificial
  Synthetic oligonucleotide
gcctgaccttgtgcttgaaagattgcagattgctagagagacgagaaatctggaa

SEQ ID NO: 411404 - DNA, 60 bp, Artificial
  Synthetic oligonucleotide
gcctgacgcatttattaacatgatattatctggtggagacagcgtagctatgcgcactta

SEQ ID NO: 411405 - DNA, 60 bp, Artificial
  Synthetic oligonucleotide
gcctgacgttcgcaacaatttctttcattataaccaaggatctgattcgagattgcgctt

SEQ ID NO: 411406 - DNA, 55 bp, Artificial
  Synthetic oligonucleotide
gcctgacgtttggtgagagcactggcatgacgtttgatgttgggtgcgtgttaat

SEQ ID NO: 411407 - DNA, 56 bp, Artificial
  Synthetic oligonucleotide
gcctgactacgaaccacccgtggtccacggctgtccgcttccaccgccacagtccc

SEQ ID NO: 411408 - DNA, 55 bp, Artificial
  Synthetic oligonucleotide
gcctgactgtccccgcttctgccgttaactatcgtaacacctcgggcatctatca

SEQ ID NO: 411409 - DNA, 55 bp, Artificial
  Synthetic oligonucleotide
gcctgagaaactgcgctctatagatgaccgcctcgtttgatttgtaggtgtagca

SEQ ID NO: 411410 - DNA, 55 bp, Artificial
  Synthetic oligonucleotide
gcctgagactccaccccaccagtcagcctctcttcgcctttgagtggagagaccc

SEQ ID NO: 411411 - DNA, 60 bp, Artificial
  Synthetic oligonucleotide
gcctgagataacctagccacaaatgtcatgactctgtaactggaagcgaatgacgtcacc

SEQ ID NO: 411412 - DNA, 55 bp, Artificial
  Synthetic oligonucleotide
gcctgagcaaaactagcaattaggttccagttacaactttgttcttcaggcaggt

SEQ ID NO: 411413 - DNA, 55 bp, Artificial
  Synthetic oligonucleotide
gcctgagcaccattggttcgtgcaagaatgcaattgctccatctaccctggtacc

SEQ ID NO: 411414 - DNA, 55 bp, Artificial
  Synthetic oligonucleotide
gcctgagccacacgcagtactctacgtcacaaacgagctctctcatatcgttaag

SEQ ID NO: 411415 - DNA, 55 bp, Artificial
  Synthetic oligonucleotide
gcctgagcctactgcattccagatcaagttcacacaagaattcagtcaactagtc

SEQ ID NO: 411416 - DNA, 53 bp, Artificial
  Synthetic oligonucleotide
gcctgagcctcactcggactgtggtagccctcgtcaacagggagcctaaggta

SEQ ID NO: 411417 - DNA, 60 bp, Artificial
  Synthetic oligonucleotide
gcctgagcttcatgcgtgctcacaatggctacgtaccgctgcgcactgaagagtgccgct

SEQ ID NO: 411418 - DNA, 60 bp, Artificial
  Synthetic oligonucleotide
gcctgagctttggaccctgcgttgattgcctcggcatatgcgtcgttggcagtttggcaa

SEQ ID NO: 411419 - DNA, 60 bp, Artificial
  Synthetic oligonucleotide
gcctgaggacaatgagccaagtggatatgcacaaacagactgtgtccttgaagcaatggc

SEQ ID NO: 411420 - DNA, 58 bp, Artificial
  Synthetic oligonucleotide
gcctgagggcctccatgccctcacccactgcaaccaacaggccctcgtttcccacgga

SEQ ID NO: 411421 - DNA, 59 bp, Artificial
  Synthetic oligonucleotide
gcctgagtgatggcacccttttagcccaaattcatccgggcgttcagaagagtgggagc

SEQ ID NO: 411422 - DNA, 60 bp, Artificial
  Synthetic oligonucleotide
gcctgagtgcgcttaagaaaatgctgccgcgagctcatttcgagcgtgctatggggagcg

SEQ ID NO: 411423 - DNA, 55 bp, Artificial
  Synthetic oligonucleotide
gcctgagtttggaagactatcttaaaaggatgctgtctgacaacgagtggggatc

SEQ ID NO: 411424 - DNA, 55 bp, Artificial
  Synthetic oligonucleotide
gcctgatacaactgacgacgaaaatcccgtcgctaatcctggccctagcgcacca

SEQ ID NO: 411425 - DNA, 60 bp, Artificial
  Synthetic oligonucleotide
gcctgataggcacgcgaacacgggcaacgtgggctgaaaacatctacgcagccattaacc

SEQ ID NO: 411426 - DNA, 56 bp, Artificial
  Synthetic oligonucleotide
gcctgatagggtcgcggctggccgaccatgacctgtatagtcagttgatttgagca

SEQ ID NO: 411427 - DNA, 52 bp, Artificial
  Synthetic oligonucleotide
gcctgatctctcttacagagttgggtatctgtgtgcagggctgccaagcgac

SEQ ID NO: 411428 - DNA, 59 bp, Artificial
  Synthetic oligonucleotide
gcctgatgaagttaagacggatattgaacagcaactaaattccattgatgtaattaacc

SEQ ID NO: 411429 - DNA, 55 bp, Artificial
  Synthetic oligonucleotide
gcctgatgagcttacagtacatgtgaagagtgaagacccagacatagttgctgct

SEQ ID NO: 411430 - DNA, 56 bp, Artificial
  Synthetic oligonucleotide
gcctgatgatagggttaggccggttggtctttatgtagatatacctggagtaaccg

SEQ ID NO: 411431 - DNA, 55 bp, Artificial
  Synthetic oligonucleotide
gcctgatgatcttaatgtgaaatccccggatagcatcaaaatgcagttcgcacat

SEQ ID NO: 411432 - DNA, 60 bp, Artificial
  Synthetic oligonucleotide
gcctgatgggtataattggcaattccatctcaacagttcagaaccttcaggcaaataaac

SEQ ID NO: 411433 - DNA, 60 bp, Artificial
  Synthetic oligonucleotide
gcctgatggtcaggttgtatcagatgcgaacattacgctgacggcgctgactgtttcacc

SEQ ID NO: 411434 - DNA, 55 bp, Artificial
  Synthetic oligonucleotide
gcctgatgtgcagtgatgagttcccctgtgcgtgaatccatgaccggtgcagcct

SEQ ID NO: 411435 - DNA, 60 bp, Artificial
  Synthetic oligonucleotide
gcctgattactatgacagtattccagatgttgcaccaaattctgatcagttgagagttct

SEQ ID NO: 411436 - DNA, 55 bp, Artificial
  Synthetic oligonucleotide
gcctgattcacactaactcctaccagcgagccgaaaaggtcgctgactccctcgg

SEQ ID NO: 411437 - DNA, 53 bp, Artificial
  Synthetic oligonucleotide
gcctgattcgttattcaaagcaaccgataagttatggggagcgaatacagcgg

SEQ ID NO: 411438 - DNA, 55 bp, Artificial
  Synthetic oligonucleotide
gcctgattttatttgtgacttttactttaattatcgttgtattaggcctatgccg

SEQ ID NO: 411439 - DNA, 55 bp, Artificial
  Synthetic oligonucleotide
gcctgcaaagctggggtgcattagacatctaggaaatcctggagacaaagcatcc

SEQ ID NO: 411440 - DNA, 59 bp, Artificial
  Synthetic oligonucleotide
gcctgcaaatagccctccgacctctcaggcgaccctcacttagggtcattgtcggagct

SEQ ID NO: 411441 - DNA, 60 bp, Artificial
  Synthetic oligonucleotide
gcctgcaaatattcaactgagacattaacagaaaaccttgaccttagaattaagctcgca

SEQ ID NO: 411442 - DNA, 55 bp, Artificial
  Synthetic oligonucleotide
gcctgcaaggatctgttaatggacttgatcagagtcttacccagttgggtgatag

SEQ ID NO: 411443 - DNA, 59 bp, Artificial
  Synthetic oligonucleotide
gcctgcaatgtttgggtctctacatttcgttcgaaatgtgaagtgtattcgcaatttgt

SEQ ID NO: 411444 - DNA, 54 bp, Artificial
  Synthetic oligonucleotide
gcctgcacacgccaaaatcgggatgtggtaccccatttggtcggaaaaggtttc

SEQ ID NO: 411445 - DNA, 55 bp, Artificial
  Synthetic oligonucleotide
gcctgcatagggtcgatcagaaatggaacttatgaccataatgtatacagagacg

SEQ ID NO: 411446 - DNA, 58 bp, Artificial
  Synthetic oligonucleotide
gcctgcatatcgcatttgacattgttactgtttatatggtaagtccaattttcgtaaa

SEQ ID NO: 411447 - DNA, 51 bp, Artificial
  Synthetic oligonucleotide
gcctgccaccctcgctgaggagcatcagagtggaacggtatgcaagagaga

SEQ ID NO: 411448 - DNA, 60 bp, Artificial
  Synthetic oligonucleotide
gcctgccagccgctaacccaatgggagaccaacaatattatgaagcatcaggtaggttct

SEQ ID NO: 411449 - DNA, 60 bp, Artificial
  Synthetic oligonucleotide
gcctgccagtgacaactcgaggcgtgtcaactaacatactttctagatgcacagttaaac

SEQ ID NO: 411450 - DNA, 55 bp, Artificial
  Synthetic oligonucleotide
gcctgccatgaccgtttcgtacccgcgtagtttcacgtgaggatcagaccacccc

SEQ ID NO: 411451 - DNA, 55 bp, Artificial
  Synthetic oligonucleotide
gcctgcccacgtacaattcttgtacacagcatttgtgaggtattggtgccgcaga

SEQ ID NO: 411452 - DNA, 55 bp, Artificial
  Synthetic oligonucleotide
gcctgcccctagaccaattagtggtgcttttgatcgcttgacctggtttcgcaga

SEQ ID NO: 411453 - DNA, 55 bp, Artificial
  Synthetic oligonucleotide
gcctgccgaccgcaaagaagccatgttgggtacacatgtggtgtgggacctggga

SEQ ID NO: 411454 - DNA, 55 bp, Artificial
  Synthetic oligonucleotide
gcctgcctgacaagcacaacatgtcatcttctgtcgcccctggcgactttgtctc

SEQ ID NO: 411455 - DNA, 55 bp, Artificial
  Synthetic oligonucleotide
gcctgcctgatgtaaaggcaacttatgagcatgacacagttgcagacaaaatcct

SEQ ID NO: 411456 - DNA, 60 bp, Artificial
  Synthetic oligonucleotide
gcctgcctgcttgtgtgtatggacttgctgtagccagtggatacgactttgaaagggagg

SEQ ID NO: 411457 - DNA, 55 bp, Artificial
  Synthetic oligonucleotide
gcctgcgaccagatactcgagttgatggcgatggaaacagcctttccccacagga

SEQ ID NO: 411458 - DNA, 60 bp, Artificial
  Synthetic oligonucleotide
gcctgcgacctcacaccatcgcactcagcccggtctaaatacgggtatagtgcgcgggac

SEQ ID NO: 411459 - DNA, 50 bp, Artificial
  Synthetic oligonucleotide
gcctgcgagggggtgctatcaattggtcgaacgtgggctctcgtctctcg

SEQ ID NO: 411460 - DNA, 55 bp, Artificial
  Synthetic oligonucleotide
gcctgcgccattatgcggcatgccagttaacgactggctgtaagaacaggcacgc

SEQ ID NO: 411461 - DNA, 60 bp, Artificial
  Synthetic oligonucleotide
gcctgcgcgtaagcgtcattggctgtttgctgaccccctcttgcagatctgccgtctatt

SEQ ID NO: 411462 - DNA, 56 bp, Artificial
  Synthetic oligonucleotide
gcctgcgtcacctccaacgggtggtacgcgattgatgacgaggacttttacccctg

SEQ ID NO: 411463 - DNA, 58 bp, Artificial
  Synthetic oligonucleotide
gcctgcgtcggaactagttagccaactagctctgtatctggcggacccgtggtggaac

SEQ ID NO: 411464 - DNA, 55 bp, Artificial
  Synthetic oligonucleotide
gcctgcgtgcaccctaagcaatccccggctctcatctctataagaggagcctttg

SEQ ID NO: 411465 - DNA, 55 bp, Artificial
  Synthetic oligonucleotide
gcctgctaatgatagttggagtagtactttgaacgatactggagagtcagatgac

SEQ ID NO: 411466 - DNA, 55 bp, Artificial
  Synthetic oligonucleotide
gcctgctacacccgataaaccagcatggaatagatgacgcggagagagaagtgct

SEQ ID NO: 411467 - DNA, 60 bp, Artificial
  Synthetic oligonucleotide
gcctgctacatgccttcttgcgccacacagctacttacgcagtgatggaggtagagtcca

SEQ ID NO: 411468 - DNA, 55 bp, Artificial
  Synthetic oligonucleotide
gcctgctagaacttacgagattgttaaatatatcgagaaggatggtggtaattct

SEQ ID NO: 411469 - DNA, 55 bp, Artificial
  Synthetic oligonucleotide
gcctgctagaatcagacagggagcagagctcatcctcaactgagttctggggaag

SEQ ID NO: 411470 - DNA, 56 bp, Artificial
  Synthetic oligonucleotide
gcctgctaggttttatcccaaggctactaaatatttgcccttagataaagggatca

SEQ ID NO: 411471 - DNA, 55 bp, Artificial
  Synthetic oligonucleotide
gcctgctaggttttatcctaagcataccaaatatctgcccttggacaagggtatc

SEQ ID NO: 411472 - DNA, 60 bp, Artificial
  Synthetic oligonucleotide
gcctgctagtgggcatatctcacaatttgtgagataaacggcatagccgttgtttgctga

SEQ ID NO: 411473 - DNA, 55 bp, Artificial
  Synthetic oligonucleotide
gcctgctatgtgccacatcacaaagtaggatgggcatggtacacagcctctaggg

SEQ ID NO: 411474 - DNA, 59 bp, Artificial
  Synthetic oligonucleotide
gcctgctattaacaagagatggtgggtccaagaacgagtccgagcccgagaccttcaga

SEQ ID NO: 411475 - DNA, 56 bp, Artificial
  Synthetic oligonucleotide
gcctgctcaccgatacatcgcctattcatcgaactccctacacttctaggacgcgg

SEQ ID NO: 411476 - DNA, 57 bp, Artificial
  Synthetic oligonucleotide
gcctgctctaaggtaagatttcttattttctaggtatgggagctctgatttcggtta

SEQ ID NO: 411477 - DNA, 55 bp, Artificial
  Synthetic oligonucleotide
gcctgctctactaaatctacatttcatgctgtcccggttcatatctgggatcggc

SEQ ID NO: 411478 - DNA, 55 bp, Artificial
  Synthetic oligonucleotide
gcctgctgctacagcattggccaacacaatagaagtgttcagatcaaatggcctc

SEQ ID NO: 411479 - DNA, 60 bp, Artificial
  Synthetic oligonucleotide
gcctgctggaagtactttgacacatacctcagaaatgtgctggatgggtatcccatttgt

SEQ ID NO: 411480 - DNA, 58 bp, Artificial
  Synthetic oligonucleotide
gcctgctggggcgtggatgaatttaatacctgctagttttgccccgtggctgaaccag

SEQ ID NO: 411481 - DNA, 60 bp, Artificial
  Synthetic oligonucleotide
gcctgctggtgtgtacggacttgctgtggccagtggatacgacttcgaaagagaaggatc

SEQ ID NO: 411482 - DNA, 58 bp, Artificial
  Synthetic oligonucleotide
gcctgcttagctaagataaaaatgaccagtgggacgtaatcgggtgaaaattgagaca

SEQ ID NO: 411483 - DNA, 58 bp, Artificial
  Synthetic oligonucleotide
gcctgcttagtcacccgcaactaacaagggtcgtctatgtacacccatagtatgggtg

SEQ ID NO: 411484 - DNA, 54 bp, Artificial
  Synthetic oligonucleotide
gcctgcttatgttacagtagctaaggtttcgcacctctgcacttataagcgcgc

SEQ ID NO: 411485 - DNA, 60 bp, Artificial
  Synthetic oligonucleotide
gcctgcttgacactcacaggcacaaccacgtcattatttgttgccatactaacttgtagg

SEQ ID NO: 411486 - DNA, 59 bp, Artificial
  Synthetic oligonucleotide
gcctgcttggaatcaccctcgtataacctggtatcgtgcatttctataatgacatgccc

SEQ ID NO: 411487 - DNA, 60 bp, Artificial
  Synthetic oligonucleotide
gcctgcttgtgtgtacggacttgcagtggccagtggatatgactttaagagagaagggta

SEQ ID NO: 411488 - DNA, 60 bp, Artificial
  Synthetic oligonucleotide
gcctggaaactagcttgtcaattgaagcaccatggggggccatcaatgcccaatcaactt

SEQ ID NO: 411489 - DNA, 55 bp, Artificial
  Synthetic oligonucleotide
gcctggaaaggcttttgctataagatgggtggcaagttgtcaaaacgcatgaggg

SEQ ID NO: 411490 - DNA, 55 bp, Artificial
  Synthetic oligonucleotide
gcctggaaatcctacggacttgactgtcgtagcgacatatgggcatgagcgcgac

SEQ ID NO: 411491 - DNA, 54 bp, Artificial
  Synthetic oligonucleotide
gcctggaaatgggcccaccggatccttgactgggtccggggcaaagccaaaaca

SEQ ID NO: 411492 - DNA, 58 bp, Artificial
  Synthetic oligonucleotide
gcctggaacagacttaagctagaccaggtaactcataaatcaagtgagggattttatg

SEQ ID NO: 411493 - DNA, 55 bp, Artificial
  Synthetic oligonucleotide
gcctggaagactatcttaagaggatgctgtctgacaacgagtggggatcaactct

SEQ ID NO: 411494 - DNA, 55 bp, Artificial
  Synthetic oligonucleotide
gcctggaattacatgatcatgaacaatgaaccacctgccaattgggcaaagaacc

SEQ ID NO: 411495 - DNA, 57 bp, Artificial
  Synthetic oligonucleotide
gcctggacagactttgcatgaaaggtcggaattacaaagacttaggtaattgtcacc

SEQ ID NO: 411496 - DNA, 51 bp, Artificial
  Synthetic oligonucleotide
gcctggactcctgctgtagtgcattggcctcaagcccatcacagagcggtt

SEQ ID NO: 411497 - DNA, 60 bp, Artificial
  Synthetic oligonucleotide
gcctggactgctgggaccaaataccatctgaatggaagaaattcattggctaatcctggc

SEQ ID NO: 411498 - DNA, 55 bp, Artificial
  Synthetic oligonucleotide
gcctggagcaggagaacccaaaacactggaccaagcaatgcaagcaacttacgcc

SEQ ID NO: 411499 - DNA, 55 bp, Artificial
  Synthetic oligonucleotide
gcctggaggcactgtatctctactccattgtgacatagaaacaaccctggaacca

SEQ ID NO: 411500 - DNA, 57 bp, Artificial
  Synthetic oligonucleotide
gcctggaggccggagtcaaggggcttatcgggcgatgcgaccggctgacgggtgggc

SEQ ID NO: 411501 - DNA, 57 bp, Artificial
  Synthetic oligonucleotide
gcctggagggtgggtgcttcctggttataaataccttggtccattcaatcctcttga

SEQ ID NO: 411502 - DNA, 60 bp, Artificial
  Synthetic oligonucleotide
gcctggataacgaactgttgcgtggacaaatagcgtttatgaggcaggagtatgccacaa

SEQ ID NO: 411503 - DNA, 60 bp, Artificial
  Synthetic oligonucleotide
gcctggatgacaatgtccgtgcttgctatgccggagacgacttagtgcgtgatcgagctt

SEQ ID NO: 411504 - DNA, 55 bp, Artificial
  Synthetic oligonucleotide
gcctggatgatctaatggcaagtgacacagtgacagacctgcctgacagggaagc

SEQ ID NO: 411505 - DNA, 55 bp, Artificial
  Synthetic oligonucleotide
gcctggcaaaccagccaggtctaatggctcttgtggatattggcatggactcccc

SEQ ID NO: 411506 - DNA, 60 bp, Artificial
  Synthetic oligonucleotide
gcctggcaatctgcgtactgatacgccagtcaccagtactgaattcttcgccgacgtgct

SEQ ID NO: 411507 - DNA, 55 bp, Artificial
  Synthetic oligonucleotide
gcctggcacagagtcgagtacaagctcccctgtcaagttcgtggtgctacctacg

SEQ ID NO: 411508 - DNA, 60 bp, Artificial
  Synthetic oligonucleotide
gcctggcatcatacatcgggacagtgtgcccgaatcctttccatgtcgtgatgtcaacgc

SEQ ID NO: 411509 - DNA, 60 bp, Artificial
  Synthetic oligonucleotide
gcctggccacctcctactctggtacactctacctctggcgccaagcccgctctcaactac

SEQ ID NO: 411510 - DNA, 58 bp, Artificial
  Synthetic oligonucleotide
gcctggccataaggcaagagttctggctgaggcaatgagtcaaacaacaggtatagtt

SEQ ID NO: 411511 - DNA, 60 bp, Artificial
  Synthetic oligonucleotide
gcctggcgtcatagattggcactgtgtgtccgaatcctttccacgttgttaactcggctc

SEQ ID NO: 411512 - DNA, 54 bp, Artificial
  Synthetic oligonucleotide
gcctgggaaattcctagggagtctttgaggctggaagttaagttgggccaagga

SEQ ID NO: 411513 - DNA, 57 bp, Artificial
  Synthetic oligonucleotide
gcctgggattttggatccttgggaggagtgtttacatctataggaaaggctctccac

SEQ ID NO: 411514 - DNA, 55 bp, Artificial
  Synthetic oligonucleotide
gcctgggcccaatttatcgatgtgacaggacgtacgtctgctttacgagattggc

SEQ ID NO: 411515 - DNA, 57 bp, Artificial
  Synthetic oligonucleotide
gcctgggcggaattctgcggctacctgatcacccctaaaggccttatcaaagatccc

SEQ ID NO: 411516 - DNA, 57 bp, Artificial
  Synthetic oligonucleotide
gcctgggcgggtgccggagctcctcagagcggagtcaaggggcctatcgggcgggcg

SEQ ID NO: 411517 - DNA, 55 bp, Artificial
  Synthetic oligonucleotide
gcctggggtaaagaggctgtggataatttccaccttggagatgatatggatcctg

SEQ ID NO: 411518 - DNA, 55 bp, Artificial
  Synthetic oligonucleotide
gcctgggtgccttctcaaacagacgttctagcagaggattgggacattgtatcat

SEQ ID NO: 411519 - DNA, 54 bp, Artificial
  Synthetic oligonucleotide
gcctgggtggctataagggtcttgcgggcacccccagagcatggtgcgccctaa

SEQ ID NO: 411520 - DNA, 55 bp, Artificial
  Synthetic oligonucleotide
gcctggtcagaccaaatgaaaacccagcccacaaaagtcaattggtgtggatggc

SEQ ID NO: 411521 - DNA, 57 bp, Artificial
  Synthetic oligonucleotide
gcctggtccattatccttacaggctttggcattacccttgtaccgtcaactacactc

SEQ ID NO: 411522 - DNA, 55 bp, Artificial
  Synthetic oligonucleotide
gcctggtgaactgaagtttcaatttgtgtaaagtcggaggcataaagagttgagc

SEQ ID NO: 411523 - DNA, 52 bp, Artificial
  Synthetic oligonucleotide
gcctggttagatgggcaactgtcaagtttaaccgatcagtttttgtcaccgt

SEQ ID NO: 411524 - DNA, 55 bp, Artificial
  Synthetic oligonucleotide
gcctggttttctaacataccatagtgacagtgttgagctgaatgcaggtaggaag

SEQ ID NO: 411525 - DNA, 51 bp, Artificial
  Synthetic oligonucleotide
gcctgtaaaaccagactttaagaacacagatgacttcttgtccatgagcta

SEQ ID NO: 411526 - DNA, 55 bp, Artificial
  Synthetic oligonucleotide
gcctgtaaacattacttgtgccagacctggcaacaatacaagaacaagtgtacgt

SEQ ID NO: 411527 - DNA, 53 bp, Artificial
  Synthetic oligonucleotide
gcctgtaaagactcgttgtcagtcagtctccggtcgtgaatctccacaattac

SEQ ID NO: 411528 - DNA, 59 bp, Artificial
  Synthetic oligonucleotide
gcctgtaacaaatattcatacccctggcaaactgccaaatgcttctttgagaaggatta

SEQ ID NO: 411529 - DNA, 55 bp, Artificial
  Synthetic oligonucleotide
gcctgtaacaactgctgtaaagtggtttgcagatgttgtcggaactgtggcagct

SEQ ID NO: 411530 - DNA, 60 bp, Artificial
  Synthetic oligonucleotide
gcctgtaatcaaacacattgtcttcctacggtccatttgattgctcctgttcaaacgtgc

SEQ ID NO: 411531 - DNA, 55 bp, Artificial
  Synthetic oligonucleotide
gcctgtaccatcgcgtcctactacctcctctgcagtttctacatattcgcccact

SEQ ID NO: 411532 - DNA, 60 bp, Artificial
  Synthetic oligonucleotide
gcctgtactgggtctctctagttagaccagatttgagcctgggggctctctggctagctg

SEQ ID NO: 411533 - DNA, 57 bp, Artificial
  Synthetic oligonucleotide
gcctgtagaggcttagaaattggtcgtggccagcctttaggtgttggtacaacagga

SEQ ID NO: 411534 - DNA, 54 bp, Artificial
  Synthetic oligonucleotide
gcctgtataagtctttaaaaggagcctgtaaactcaaactgtgcggagttcccg

SEQ ID NO: 411535 - DNA, 55 bp, Artificial
  Synthetic oligonucleotide
gcctgtcaggcttggacaccaaaggataagaccaaagttctagtagttcagcccc

SEQ ID NO: 411536 - DNA, 50 bp, Artificial
  Synthetic oligonucleotide
gcctgtcagtgggactcgcagaacgggtacgcagctcagtcaacgggcgg

SEQ ID NO: 411537 - DNA, 55 bp, Artificial
  Synthetic oligonucleotide
gcctgtccaaccgagcggacacggcttctcctctatacgagacgatattaaagcg

SEQ ID NO: 411538 - DNA, 53 bp, Artificial
  Synthetic oligonucleotide
gcctgtcccccgccgaagtcgctgcaattgacggcacgttgggtcgtgtctct

SEQ ID NO: 411539 - DNA, 55 bp, Artificial
  Synthetic oligonucleotide
gcctgtccggttggattatatccccgcccatacggtccgggtgcacagggatggt

SEQ ID NO: 411540 - DNA, 55 bp, Artificial
  Synthetic oligonucleotide
gcctgtcgtagtatctgacccgcttattcctaacaggaaagcgaggatcaaccag

SEQ ID NO: 411541 - DNA, 60 bp, Artificial
  Synthetic oligonucleotide
gcctgtcgtgcatggttagcttatgctttggaccaatatagaaatagtggtgtggaaatt

SEQ ID NO: 411542 - DNA, 60 bp, Artificial
  Synthetic oligonucleotide
gcctgtctcaagcaatctagctctgcttgacacagtatctcatagaagcaattctatggg

SEQ ID NO: 411543 - DNA, 55 bp, Artificial
  Synthetic oligonucleotide
gcctgtctcgtgcccgaccccgttggttcatgttgtgcctactcctactttctgt

SEQ ID NO: 411544 - DNA, 55 bp, Artificial
  Synthetic oligonucleotide
gcctgtctcttccgtggcttcactcaacgacctaactcccgttgggagactggtg

SEQ ID NO: 411545 - DNA, 55 bp, Artificial
  Synthetic oligonucleotide
gcctgtctgatttgtctgacctaattgataatgctgaatgcgagcaagggaattc

SEQ ID NO: 411546 - DNA, 55 bp, Artificial
  Synthetic oligonucleotide
gcctgtgaagtgccagtacgagaaatgtccaacacccaccgtcgcgattcctccg

SEQ ID NO: 411547 - DNA, 55 bp, Artificial
  Synthetic oligonucleotide
gcctgtgaagtggaaaagatagacacccagggggcccccgtgacccaccgcctca

SEQ ID NO: 411548 - DNA, 51 bp, Artificial
  Synthetic oligonucleotide
gcctgtgactttgtggcaagtagactccctggacatataatagcccaagga

SEQ ID NO: 411549 - DNA, 55 bp, Artificial
  Synthetic oligonucleotide
gcctgtgagagacgagtcgcccgcgacggacttactgatactcaaggcgggtgtc

SEQ ID NO: 411550 - DNA, 55 bp, Artificial
  Synthetic oligonucleotide
gcctgtgagttaggagaatgggtgttctcttcagtacaacctccaaaagtgccca

SEQ ID NO: 411551 - DNA, 59 bp, Artificial
  Synthetic oligonucleotide
gcctgtgataccgagtcccctgggtctaactctggtgtgtgtaatcggtgtagtctctg

SEQ ID NO: 411552 - DNA, 51 bp, Artificial
  Synthetic oligonucleotide
gcctgtgcaatcagcacccattggtcaggaaagaacggtagtaacgtacca

SEQ ID NO: 411553 - DNA, 55 bp, Artificial
  Synthetic oligonucleotide
gcctgtgcaccagatcggtgtccaccaacatgtatctatgttgcagggatggcag

SEQ ID NO: 411554 - DNA, 55 bp, Artificial
  Synthetic oligonucleotide
gcctgtggaaaccctcacgcaccaatggaacgacttcactgcgtttcacaggtct

SEQ ID NO: 411555 - DNA, 55 bp, Artificial
  Synthetic oligonucleotide
gcctgtggaattccagcttccggattcggaacttctccccatccccatgctgtgc

SEQ ID NO: 411556 - DNA, 60 bp, Artificial
  Synthetic oligonucleotide
gcctgtggacccgactggcattgaaccggatgatcaccttaaggagaggtcaagtctcag

SEQ ID NO: 411557 - DNA, 60 bp, Artificial
  Synthetic oligonucleotide
gcctgtggacgcgcgattgcgccgtggccgaactctcatgggaggttgcccaacactgcg

SEQ ID NO: 411558 - DNA, 51 bp, Artificial
  Synthetic oligonucleotide
gcctgtgggaacggcttctttagccagaggtaggcttggcatcaggagata

SEQ ID NO: 411559 - DNA, 60 bp, Artificial
  Synthetic oligonucleotide
gcctgtggggcaacccacaggacgctctaatacaaacatggtgcgaagagtctattgagc

SEQ ID NO: 411560 - DNA, 55 bp, Artificial
  Synthetic oligonucleotide
gcctgtgtacgacggggaaaaatatgtgatggtacggaatcccctagttagccta

SEQ ID NO: 411561 - DNA, 57 bp, Artificial
  Synthetic oligonucleotide
gcctgtgtaggccttgaaataggtagaggacaaccattaggagttggtacttcaggc

SEQ ID NO: 411562 - DNA, 55 bp, Artificial
  Synthetic oligonucleotide
gcctgtgtatacacctaggtttactaggtataatttcaacaagccaagagcacgc

SEQ ID NO: 411563 - DNA, 55 bp, Artificial
  Synthetic oligonucleotide
gcctgtgtcgggtgcatactcacagatgcattcgctacgagccaaactggtggag

SEQ ID NO: 411564 - DNA, 60 bp, Artificial
  Synthetic oligonucleotide
gcctgtgtggagagatgcagaaactaccctattctgtgcatcggatgctaaggcacatga

SEQ ID NO: 411565 - DNA, 60 bp, Artificial
  Synthetic oligonucleotide
gcctgtgttaagtgctgcggcgtaagcgtcgttggctgattgttgaccccctcttgcaga

SEQ ID NO: 411566 - DNA, 60 bp, Artificial
  Synthetic oligonucleotide
gcctgtgttccgcttgagctgaagaataatggttatacatcattcgagctttgcgatggt

SEQ ID NO: 411567 - DNA, 55 bp, Artificial
  Synthetic oligonucleotide
gcctgtgttgcgtcatgactttagtgtaaccaatccaaacactggtgtcgaatcg

SEQ ID NO: 411568 - DNA, 56 bp, Artificial
  Synthetic oligonucleotide
gcctgtgttgctatgagtaaactattagccgagattaacaatgatgacataaagag

SEQ ID NO: 411569 - DNA, 55 bp, Artificial
  Synthetic oligonucleotide
gcctgttaaattcaacaagtttggaaacaagcctgtcaattgaagcaccctgggg

SEQ ID NO: 411570 - DNA, 55 bp, Artificial
  Synthetic oligonucleotide
gcctgttaagaacagagggagtaggattaatttgggcccatccgtctggatggag

SEQ ID NO: 411571 - DNA, 54 bp, Artificial
  Synthetic oligonucleotide
gcctgttaataacttggtccaacaaggtttcttttgccacgtatgttctactaa

SEQ ID NO: 411572 - DNA, 60 bp, Artificial
  Synthetic oligonucleotide
gcctgttagtgtggtgtcacgctgatgggctagcgtaccgctgctaccgtgtgaagtgtg

SEQ ID NO: 411573 - DNA, 60 bp, Artificial
  Synthetic oligonucleotide
gcctgttgagccgcaagagtctgaggagccgccacctgtattaatgaagactcactgccc

SEQ ID NO: 411574 - DNA, 60 bp, Artificial
  Synthetic oligonucleotide
gcctgttgcatctgattactgggatggatatagtggacaattagtgtgtattattgatga

SEQ ID NO: 411575 - DNA, 60 bp, Artificial
  Synthetic oligonucleotide
gcctgttgcgttcgctctcccaagcgcggacatcagcccgtgcctcgggatggacactcc

SEQ ID NO: 411576 - DNA, 50 bp, Artificial
  Synthetic oligonucleotide
gcctgttggagagtaataggatcccctgtgcgaaaatccctgatgacatt

SEQ ID NO: 411577 - DNA, 55 bp, Artificial
  Synthetic oligonucleotide
gcctgttggtagtaccacctctctccggcgaccagttagaaccacagttcggagg

SEQ ID NO: 411578 - DNA, 52 bp, Artificial
  Synthetic oligonucleotide
gcctgttggtgggcagacatcaagcaggaatttggaataccctataatccac

SEQ ID NO: 411579 - DNA, 51 bp, Artificial
  Synthetic oligonucleotide
gcctgttgtgcaagccccgacaccgattaagcacagtcgcgcctcctatga

SEQ ID NO: 411580 - DNA, 60 bp, Artificial
  Synthetic oligonucleotide
gcctgtttagagctctcaaagtcaaaagtgccccgcgcagctgtgttatcaacaaggtca

SEQ ID NO: 411581 - DNA, 57 bp, Artificial
  Synthetic oligonucleotide
gcctgtttagttgtttgtatgggtgtattgcgttttctaattcagagtccgcatcgg

SEQ ID NO: 411582 - DNA, 57 bp, Artificial
  Synthetic oligonucleotide
gcctgtttctccgttggggagtgtccattcggagatgcgtgtgcggcgtacggtacc

SEQ ID NO: 411583 - DNA, 60 bp, Artificial
  Synthetic oligonucleotide
gcctgtttgagctcaatgatccccatggacaaagtgataaaggcagctttttgtggagac

SEQ ID NO: 411584 - DNA, 59 bp, Artificial
  Synthetic oligonucleotide
gcctgtttggggaagtcttacgcccaaatgtggagcttgatgtactttcacagacgtga

SEQ ID NO: 411585 - DNA, 53 bp, Artificial
  Synthetic oligonucleotide
gccttaaaagattttttgcattccgtacctaagcgaaactgtttgttaatcta

SEQ ID NO: 411586 - DNA, 60 bp, Artificial
  Synthetic oligonucleotide
gccttaaagggccttgcacaaagcaagtataacaatgaggaatggacactgcaagataca

SEQ ID NO: 411587 - DNA, 56 bp, Artificial
  Synthetic oligonucleotide
gccttaacaggccttagcacaggtacctctcaaaacactagaatatccttacgccc

SEQ ID NO: 411588 - DNA, 60 bp, Artificial
  Synthetic oligonucleotide
gccttaacgcaggaggctaatgacttctcaaacctcatccaggcggatctaggacaaatc

SEQ ID NO: 411589 - DNA, 59 bp, Artificial
  Synthetic oligonucleotide
gccttaagccttgtgtacaattgaccccactctgtgtcactttaaactgtacagatgcg

SEQ ID NO: 411590 - DNA, 59 bp, Artificial
  Synthetic oligonucleotide
gccttaaggcggggcacactcttgtacttgatgagattcagctgtacccacctggttat

SEQ ID NO: 411591 - DNA, 59 bp, Artificial
  Synthetic oligonucleotide
gccttaagggtatgtcaggggcattacaagaagatggtcatttagctgcaagtgttacc

SEQ ID NO: 411592 - DNA, 55 bp, Artificial
  Synthetic oligonucleotide
gccttaatccagtagatgcacagctcttgcagtcacgtcagtacagcgtggagag

SEQ ID NO: 411593 - DNA, 55 bp, Artificial
  Synthetic oligonucleotide
gccttaatctgggcaaatgtagttccgtcgatcacattggagtcctcgaccttgt

SEQ ID NO: 411594 - DNA, 55 bp, Artificial
  Synthetic oligonucleotide
gccttaatgaagccacagatgccctcatgcttgcccctctgctgcccctcaaccc

SEQ ID NO: 411595 - DNA, 55 bp, Artificial
  Synthetic oligonucleotide
gccttacagagtcgacgtaccctgtggagtgtgcagtcgtcccttaaaactggtg

SEQ ID NO: 411596 - DNA, 60 bp, Artificial
  Synthetic oligonucleotide
gccttacctatctgggcacggccagactacaatcctcctctggttgaggcatggaagcgg

SEQ ID NO: 411597 - DNA, 58 bp, Artificial
  Synthetic oligonucleotide
gccttactactacagaagaaattactacccaaaatggagacgatggagatctagacga

SEQ ID NO: 411598 - DNA, 60 bp, Artificial
  Synthetic oligonucleotide
gccttactcatatagatgcccacttcctatcccagacaaagcagagtggggagaaccttc

SEQ ID NO: 411599 - DNA, 56 bp, Artificial
  Synthetic oligonucleotide
gccttactcctgaaacatatgctgtaattactggagctccgggggctgtagctggg

SEQ ID NO: 411600 - DNA, 55 bp, Artificial
  Synthetic oligonucleotide
gccttactctgaacccacaccaggtatcccacctgccttgctccaaagggcggca

SEQ ID NO: 411601 - DNA, 56 bp, Artificial
  Synthetic oligonucleotide
gccttactgaatgacaagcattcaagggggacctttaaggacagaagcccttatag

SEQ ID NO: 411602 - DNA, 60 bp, Artificial
  Synthetic oligonucleotide
gccttactgtaccagatgttggtcactgaggccaatgctaggaaatcaggatctgctagc

SEQ ID NO: 411603 - DNA, 60 bp, Artificial
  Synthetic oligonucleotide
gccttactgttatacggagggtgttatgcataatgcctctctgtatggttctttggctcc

SEQ ID NO: 411604 - DNA, 55 bp, Artificial
  Synthetic oligonucleotide
gccttactttgtgcgcgcacatatccttttacgcgcgtgcatggttctccgtggc

SEQ ID NO: 411605 - DNA, 55 bp, Artificial
  Synthetic oligonucleotide
gccttagaattatactcagagcgtagtgtggagtttcggtctcttacttacgcgc

SEQ ID NO: 411606 - DNA, 60 bp, Artificial
  Synthetic oligonucleotide
gccttagagtctcctgaacattgttcgcatcatcatacggcactcaggcaagcaattctg

SEQ ID NO: 411607 - DNA, 60 bp, Artificial
  Synthetic oligonucleotide
gccttagagtctcctgagcattgctcacctcaccatactgcactcaggcaagcaattcta

SEQ ID NO: 411608 - DNA, 55 bp, Artificial
  Synthetic oligonucleotide
gccttagatggcaaccaaatatgtgtagacagaaagcatagagcattgttacagc

SEQ ID NO: 411609 - DNA, 54 bp, Artificial
  Synthetic oligonucleotide
gccttagcatatgtgtcattagcagactgctgtcctcctctagcagatctgccg

SEQ ID NO: 411610 - DNA, 57 bp, Artificial
  Synthetic oligonucleotide
gccttaggcagaccaaagtgtatggggaacataccttccgcaaaagcttcaatactc

SEQ ID NO: 411611 - DNA, 59 bp, Artificial
  Synthetic oligonucleotide
gccttaggtatctgtttcaagtctggtgaaccaccattcctcactggggggtgatctgc

SEQ ID NO: 411612 - DNA, 54 bp, Artificial
  Synthetic oligonucleotide
gccttagtcgggtaagtcaaccccgacattaacgggcatgtcacgcggacggtc

SEQ ID NO: 411613 - DNA, 55 bp, Artificial
  Synthetic oligonucleotide
gccttagtctagcaactgagctagttttcatactgtttgttaaggccagacaaac

SEQ ID NO: 411614 - DNA, 55 bp, Artificial
  Synthetic oligonucleotide
gccttatatctatcccaccatgtgcctgctgcctccgcacgacctaggggaagcg

SEQ ID NO: 411615 - DNA, 55 bp, Artificial
  Synthetic oligonucleotide
gccttatccagaaccagggcaagccataccccagtgcctacctgttctgcacccc

SEQ ID NO: 411616 - DNA, 55 bp, Artificial
  Synthetic oligonucleotide
gccttatgccggactccatgatgcaggcaccgggtcgtatgggcttccgtcagca

SEQ ID NO: 411617 - DNA, 52 bp, Artificial
  Synthetic oligonucleotide
gccttatggcaaagttgggagaatcaggtgggtcatagaagaattaggccac

SEQ ID NO: 411618 - DNA, 51 bp, Artificial
  Synthetic oligonucleotide
gccttatggtttggcctgccagttaccaatatgctggttccattatatgca

SEQ ID NO: 411619 - DNA, 55 bp, Artificial
  Synthetic oligonucleotide
gccttatgtgtcatgcggctccggtaaatgttatcaatttgcacttgggcaggga

SEQ ID NO: 411620 - DNA, 55 bp, Artificial
  Synthetic oligonucleotide
gccttattaggatatagagttagtcctagttgtgaatatcgagcaggacatagaa

SEQ ID NO: 411621 - DNA, 60 bp, Artificial
  Synthetic oligonucleotide
gccttattttatatggcacattagtctgacctgtcgcatctatgttcctcagttcttcct

SEQ ID NO: 411622 - DNA, 55 bp, Artificial
  Synthetic oligonucleotide
gccttcaaccgttgcgaagaagtggcagaaatagggctccaatatgccatgtcct

SEQ ID NO: 411623 - DNA, 60 bp, Artificial
  Synthetic oligonucleotide
gccttcaactcccttgctaagttcagagatctctatacaaagaatagctggcgtcattcc

SEQ ID NO: 411624 - DNA, 55 bp, Artificial
  Synthetic oligonucleotide
gccttcaatccaccttggggggacatcaacaaaccaggccgttcggggatagcac

SEQ ID NO: 411625 - DNA, 55 bp, Artificial
  Synthetic oligonucleotide
gccttcacacctgtgcacaaatctttgaacaaatcttgggcctcccacgcatggg

SEQ ID NO: 411626 - DNA, 55 bp, Artificial
  Synthetic oligonucleotide
gccttcagagtctaccggagagtgagagctggaaaatttatccgtagggaagtga

SEQ ID NO: 411627 - DNA, 55 bp, Artificial
  Synthetic oligonucleotide
gccttcaggatctccctgtaccacagttctgaattcactttgtaatctgatgatg

SEQ ID NO: 411628 - DNA, 55 bp, Artificial
  Synthetic oligonucleotide
gccttcagtgaccgtggtctcattttatgcgcccgagcaacacatagcaatagcc

SEQ ID NO: 411629 - DNA, 56 bp, Artificial
  Synthetic oligonucleotide
gccttcagtggtagttcaactatttacacattagtagacttgtcaattagtgctag

SEQ ID NO: 411630 - DNA, 53 bp, Artificial
  Synthetic oligonucleotide
gccttcatcaattacaaggtcttgtttacagtagacttttgcgttattagaca

SEQ ID NO: 411631 - DNA, 57 bp, Artificial
  Synthetic oligonucleotide
gccttccagcaaagggaggccaggaaactttcctcagagcagaccggaaccaacagc

SEQ ID NO: 411632 - DNA, 55 bp, Artificial
  Synthetic oligonucleotide
gccttccctcgctttgtctgtgaccaagctggaatcttggggcccagtccactcc

SEQ ID NO: 411633 - DNA, 53 bp, Artificial
  Synthetic oligonucleotide
gccttccgaagagattaagggacagttccaagccctttcagttctagaagggt

SEQ ID NO: 411634 - DNA, 55 bp, Artificial
  Synthetic oligonucleotide
gccttccggaggttgtggttgaaccgtatctggagtgtgatgatgtcgtgggtca

SEQ ID NO: 411635 - DNA, 60 bp, Artificial
  Synthetic oligonucleotide
gccttccggtcatcattttccgacacgcgcggcagtgcgaacacggaggtgggcaaatca

SEQ ID NO: 411636 - DNA, 60 bp, Artificial
  Synthetic oligonucleotide
gccttccggtgatttgcaagaacgtgtacttattcgccatcatgactatgaccagtgttt

SEQ ID NO: 411637 - DNA, 60 bp, Artificial
  Synthetic oligonucleotide
gccttcctatgggccttcacagaatagtcctgtttggctatgaacatatcatacttgttc

SEQ ID NO: 411638 - DNA, 60 bp, Artificial
  Synthetic oligonucleotide
gccttcctttgacatgagtaacgaaggatcttatttcttcggagacaatgcagaggagta

SEQ ID NO: 411639 - DNA, 55 bp, Artificial
  Synthetic oligonucleotide
gccttcgaaaatgaaattgggcgaaggcggattagaatgcgtaaaagctttggtg

SEQ ID NO: 411640 - DNA, 55 bp, Artificial
  Synthetic oligonucleotide
gccttcgaagttaaccctttaatcccacattgtcatcgatgatgctttaggtgtt

SEQ ID NO: 411641 - DNA, 60 bp, Artificial
  Synthetic oligonucleotide
gccttcgaattggataagcacgtggagatgagggctcccatcctcatgaagttcgctgca

SEQ ID NO: 411642 - DNA, 60 bp, Artificial
  Synthetic oligonucleotide
gccttcgaattggataagcacgtggagatgtggttccccattctcgtggaattctctgca

SEQ ID NO: 411643 - DNA, 52 bp, Artificial
  Synthetic oligonucleotide
gccttcgaggcttgggactcacctgaactccgggcgcaactggggacagaca

SEQ ID NO: 411644 - DNA, 57 bp, Artificial
  Synthetic oligonucleotide
gccttcgataattatctattagcggctggcctgaaggatactgctggtacgtcttac

SEQ ID NO: 411645 - DNA, 55 bp, Artificial
  Synthetic oligonucleotide
gccttcgatacggagacctctattgttaatgataaacctacgattatactctcac

SEQ ID NO: 411646 - DNA, 55 bp, Artificial
  Synthetic oligonucleotide
gccttcgatatggaaatgtccttgatgtaaatgctattgacattgaagagccaag

SEQ ID NO: 411647 - DNA, 55 bp, Artificial
  Synthetic oligonucleotide
gccttcgatgtcaatccatgtaggggcattggggtcaatccctcccataagatct

SEQ ID NO: 411648 - DNA, 55 bp, Artificial
  Synthetic oligonucleotide
gccttcgccgacaagcagtggcgcaaacactacaacttccttgaggactctcgcg

SEQ ID NO: 411649 - DNA, 55 bp, Artificial
  Synthetic oligonucleotide
gccttcgcttccgggttcaatccaactgacagattttcattggcgagagggattg

SEQ ID NO: 411650 - DNA, 53 bp, Artificial
  Synthetic oligonucleotide
gccttcggcttccgtcacccagcttcggaagatgggccgcgtacggatcaccc

SEQ ID NO: 411651 - DNA, 55 bp, Artificial
  Synthetic oligonucleotide
gccttcgtttggtaggcatacgctccactagtgggcaggggatgacgatagacgc

SEQ ID NO: 411652 - DNA, 55 bp, Artificial
  Synthetic oligonucleotide
gccttctaggtgatctctcatattatctagattggtaataccaaaccctggaggt

SEQ ID NO: 411653 - DNA, 60 bp, Artificial
  Synthetic oligonucleotide
gccttctagtaggacgtcatatgtttctggcgttatgtgatgataatccgcttgttggta

SEQ ID NO: 411654 - DNA, 60 bp, Artificial
  Synthetic oligonucleotide
gccttctatcgtgaagtatcgacgtggcaacctgatgaaaaagcgaaagtgatgcagctt

SEQ ID NO: 411655 - DNA, 55 bp, Artificial
  Synthetic oligonucleotide
gccttctccaatcccttcaacaggttgagagcatgatcgaggcggaatcctctgt

SEQ ID NO: 411656 - DNA, 58 bp, Artificial
  Synthetic oligonucleotide
gccttctcttcccctggcgccgcagatccaagaaaccacctcttccgtcccgcatgta

SEQ ID NO: 411657 - DNA, 55 bp, Artificial
  Synthetic oligonucleotide
gccttctgacttctttccatccgtacgagatcttctagataccgcctcagctcta

SEQ ID NO: 411658 - DNA, 55 bp, Artificial
  Synthetic oligonucleotide
gccttctgacttctttccgtcggttcgggatctcctagacaccgccactgctttg

SEQ ID NO: 411659 - DNA, 55 bp, Artificial
  Synthetic oligonucleotide
gccttctgacttctttccttccgtcagagatctcatagacaccgcctcagctctg

SEQ ID NO: 411660 - DNA, 55 bp, Artificial
  Synthetic oligonucleotide
gccttctgcggggacgacagtttgctctattttccgaaagggtgtgagttccctg

SEQ ID NO: 411661 - DNA, 55 bp, Artificial
  Synthetic oligonucleotide
gccttctgggatgcaggaaccccacctgccaggtgtgaagtggactaagtggatc

SEQ ID NO: 411662 - DNA, 55 bp, Artificial
  Synthetic oligonucleotide
gccttctgtgaagagagtgagattccacacattgagatcaccaacgacggagatg

SEQ ID NO: 411663 - DNA, 55 bp, Artificial
  Synthetic oligonucleotide
gccttcttagagagactcaaggaggcctatcgcaggtacactccttatgaccctg

SEQ ID NO: 411664 - DNA, 60 bp, Artificial
  Synthetic oligonucleotide
gccttcttggacaaaggaatctggaacgtatatcgactagagacattctgcagacacgcg

SEQ ID NO: 411665 - DNA, 54 bp, Artificial
  Synthetic oligonucleotide
gccttgaaacaatggaagccgttcaacagacaagggtggacaaactaacccaag

SEQ ID NO: 411666 - DNA, 55 bp, Artificial
  Synthetic oligonucleotide
gccttgaactgcaatgatagccttcagaccggctttgtagcggggcttttctatt

SEQ ID NO: 411667 - DNA, 54 bp, Artificial
  Synthetic oligonucleotide
gccttgaagttcgagcacaagatctacaaacgggtttttaggggtgaccagaat

SEQ ID NO: 411668 - DNA, 55 bp, Artificial
  Synthetic oligonucleotide
gccttgaatataaactgtccatctgataaactaccttttgaactaggatgtgccc

SEQ ID NO: 411669 - DNA, 55 bp, Artificial
  Synthetic oligonucleotide
gccttgacaatagaggagaaattgttgggtgtgactttgattgtctctagcatgt

SEQ ID NO: 411670 - DNA, 55 bp, Artificial
  Synthetic oligonucleotide
gccttgacacgggttctagctcatataccacgtctttgactgtggcgtcgggcta

SEQ ID NO: 411671 - DNA, 55 bp, Artificial
  Synthetic oligonucleotide
gccttgacagagtctgtgagtccattgcggaaacgtggcacgatgcaagtgatgg

SEQ ID NO: 411672 - DNA, 58 bp, Artificial
  Synthetic oligonucleotide
gccttgaccctaaactgccgaagtagactagtaaatcagctgcccatcttggccctta

SEQ ID NO: 411673 - DNA, 55 bp, Artificial
  Synthetic oligonucleotide
gccttgacgatggagagacaggatgagttccaactccaggggcctacgtatgact

SEQ ID NO: 411674 - DNA, 60 bp, Artificial
  Synthetic oligonucleotide
gccttgagagggaattggacttgtgtgccgggggatgcattacgatatgtagctgggccc

SEQ ID NO: 411675 - DNA, 60 bp, Artificial
  Synthetic oligonucleotide
gccttgagcaagcgatggacgttattactggattaattgagcgccctctatcacttaaca

SEQ ID NO: 411676 - DNA, 50 bp, Artificial
  Synthetic oligonucleotide
gccttgagctaatataaatttatccattagttcaatgaacgcaattgaat

SEQ ID NO: 411677 - DNA, 55 bp, Artificial
  Synthetic oligonucleotide
gccttgagggctatatacaagattaaggaagaatctataattaggataggagtag

SEQ ID NO: 411678 - DNA, 60 bp, Artificial
  Synthetic oligonucleotide
gccttgagtcaggcattatgactcaatttgtgcgatatgcatgtgtactgttagtaatgt

SEQ ID NO: 411679 - DNA, 55 bp, Artificial
  Synthetic oligonucleotide
gccttgagttcaccaaatttgcccgaccaaatgccagattctgctaacattacgt

SEQ ID NO: 411680 - DNA, 58 bp, Artificial
  Synthetic oligonucleotide
gccttgataatgacaaggtgggaagagcctattgggctagctggtttcctccggcctc

SEQ ID NO: 411681 - DNA, 55 bp, Artificial
  Synthetic oligonucleotide
gccttgattgtagtgactcgcctgctcaagtgcgtgtgctgtgtagtgccttttt

SEQ ID NO: 411682 - DNA, 55 bp, Artificial
  Synthetic oligonucleotide
gccttgcaactgttgagggcctaagtggagtggaagccttggcctctttggggat

SEQ ID NO: 411683 - DNA, 55 bp, Artificial
  Synthetic oligonucleotide
gccttgcaatacacaatagatagtgctgagggagcgttaagaaaccagatgtttc

SEQ ID NO: 411684 - DNA, 55 bp, Artificial
  Synthetic oligonucleotide
gccttgcacacaatcactcccgcagagagcgtcttagctcaattctcttcagaag

SEQ ID NO: 411685 - DNA, 55 bp, Artificial
  Synthetic oligonucleotide
gccttgcagcttttactcccaatcaacctgttgtcaatacatgggagaattcgcg

SEQ ID NO: 411686 - DNA, 60 bp, Artificial
  Synthetic oligonucleotide
gccttgccaatatgtgcttccaaatctccaccaagacacacctaatccggtcgctgcttg

SEQ ID NO: 411687 - DNA, 60 bp, Artificial
  Synthetic oligonucleotide
gccttgccacattattgatggtcacggatatttcctcctcgcacgctgcccagagggcga

SEQ ID NO: 411688 - DNA, 55 bp, Artificial
  Synthetic oligonucleotide
gccttgccgacaacgggagagatacccttttacggcagagcgatccctcttgact

SEQ ID NO: 411689 - DNA, 55 bp, Artificial
  Synthetic oligonucleotide
gccttgcgattcggaaacgtgcgacgcttgtctcgataagttcgaggaagaacgc

SEQ ID NO: 411690 - DNA, 55 bp, Artificial
  Synthetic oligonucleotide
gccttgcgcaggtgaaggcactcttcggagacctcaaccctcacttggagaaaca

SEQ ID NO: 411691 - DNA, 54 bp, Artificial
  Synthetic oligonucleotide
gccttgcgctgctacgcctattgcttgatcttagctctctatgatttttatggc

SEQ ID NO: 411692 - DNA, 55 bp, Artificial
  Synthetic oligonucleotide
gccttgctccgacgttcgtgcgagatcggtgtgcgggcccgtctactgctttaca

SEQ ID NO: 411693 - DNA, 55 bp, Artificial
  Synthetic oligonucleotide
gccttgctcgattggagagttggggatccatgcatcgacatacatatatcagaac

SEQ ID NO: 411694 - DNA, 60 bp, Artificial
  Synthetic oligonucleotide
gccttgctgaggtctcctcatcccaaccatctgcaagatctgggatctttgatcaagttg

SEQ ID NO: 411695 - DNA, 51 bp, Artificial
  Synthetic oligonucleotide
gccttgcttctgggttgaattaatcaggggacgacctaaagaaaatacaat

SEQ ID NO: 411696 - DNA, 55 bp, Artificial
  Synthetic oligonucleotide
gccttgcttgtcatagcctgtctattagctatcattccatgtttaatcaagtgct

SEQ ID NO: 411697 - DNA, 60 bp, Artificial
  Synthetic oligonucleotide
gccttggaagaatgctggtcagtggagacgactgtgtggtgagacccatggatgatagat

SEQ ID NO: 411698 - DNA, 55 bp, Artificial
  Synthetic oligonucleotide
gccttggaaggtgtacaccataggctttacagaactgatgtagcatgctgggccc

SEQ ID NO: 411699 - DNA, 55 bp, Artificial
  Synthetic oligonucleotide
gccttggacagtatctctatctttggggatttgaactgtatttcggaggactgct

SEQ ID NO: 411700 - DNA, 55 bp, Artificial
  Synthetic oligonucleotide
gccttggacatcatgcagtccccaatggcaccatcgtaaagactctcacaaacga

SEQ ID NO: 411701 - DNA, 55 bp, Artificial
  Synthetic oligonucleotide
gccttggatccagtagtgggcgtaagcgtccttcatcatcagccatgtctacctc

SEQ ID NO: 411702 - DNA, 55 bp, Artificial
  Synthetic oligonucleotide
gccttggcataggtaccggtgctgggtcaggtgggcgcacagggtatgtgcctat

SEQ ID NO: 411703 - DNA, 60 bp, Artificial
  Synthetic oligonucleotide
gccttggctaaggattggggtgatagaattgagcagtggctgagtgaaccctgtaaactc

SEQ ID NO: 411704 - DNA, 60 bp, Artificial
  Synthetic oligonucleotide
gccttggctctgctggagactatgcctttggagcacgccaagtttatgatctttggaggt

SEQ ID NO: 411705 - DNA, 50 bp, Artificial
  Synthetic oligonucleotide
gccttggctgagatctagtcgttggccgttcgagttgacttcgagtgaag

SEQ ID NO: 411706 - DNA, 55 bp, Artificial
  Synthetic oligonucleotide
gccttgggagacatggaaagaattgggaagcctgagtaccaatcgttgttccgtc

SEQ ID NO: 411707 - DNA, 56 bp, Artificial
  Synthetic oligonucleotide
gccttgggcaccatgccgtgtcaaacgggactaaagtaaacacattaactgaaaga

SEQ ID NO: 411708 - DNA, 60 bp, Artificial
  Synthetic oligonucleotide
gccttgggccatggcaattcactcaatttccgatattcccatcacgacagtggtcaaaca

SEQ ID NO: 411709 - DNA, 59 bp, Artificial
  Synthetic oligonucleotide
gccttgggcggtgcaggtgatgtaaagagtgttctattaacagaatcctcgtctcattt

SEQ ID NO: 411710 - DNA, 56 bp, Artificial
  Synthetic oligonucleotide
gccttgggctaatggtcttcgttgtgaaacggattaccggtagtagcatcctagac

SEQ ID NO: 411711 - DNA, 50 bp, Artificial
  Synthetic oligonucleotide
gccttgggctgagaatgtcctagtggttccgtgtgacaatacgtggaggt

SEQ ID NO: 411712 - DNA, 55 bp, Artificial
  Synthetic oligonucleotide
gccttggtcgtatgatattaaggcgaatgctgatgaaaccaccaagctcgctgcg

SEQ ID NO: 411713 - DNA, 60 bp, Artificial
  Synthetic oligonucleotide
gccttgtaaagtccagtcatacgagcaacgccatgatatctcacatgtcgggaaggtcat

SEQ ID NO: 411714 - DNA, 55 bp, Artificial
  Synthetic oligonucleotide
gccttgtaaatactaaattagttggtaagcctatgctagtaaaccaaagcatggc

SEQ ID NO: 411715 - DNA, 51 bp, Artificial
  Synthetic oligonucleotide
gccttgtcaacagctggctgcaacgcggtggtttactaccgcggtaacgaa

SEQ ID NO: 411716 - DNA, 60 bp, Artificial
  Synthetic oligonucleotide
gccttgtccccagttaaactggacaaaggccatggttctgcgccagctgtcacgacaagc

SEQ ID NO: 411717 - DNA, 57 bp, Artificial
  Synthetic oligonucleotide
gccttgtcccgccgattcgcctttgacatggagatatgtcccttaacccaatacact

SEQ ID NO: 411718 - DNA, 55 bp, Artificial
  Synthetic oligonucleotide
gccttgtctggggtcacaaacacactggcccttagaatcgcgagtttggaactga

SEQ ID NO: 411719 - DNA, 55 bp, Artificial
  Synthetic oligonucleotide
gccttgtggactagggtgatggatgcgtagggttgaagccgcagccccggcaaac

SEQ ID NO: 411720 - DNA, 57 bp, Artificial
  Synthetic oligonucleotide
gccttgtgtagattcaacgccttcctcaggttgtagttgaaccggatttggatggtg

SEQ ID NO: 411721 - DNA, 56 bp, Artificial
  Synthetic oligonucleotide
gccttgttagtttattattgttggatgtccgataccttatctaaggcatcgacgtt

SEQ ID NO: 411722 - DNA, 56 bp, Artificial
  Synthetic oligonucleotide
gccttgtttagctacataattgctgtgtacgtgtacaaattgccgcttatattttc

SEQ ID NO: 411723 - DNA, 55 bp, Artificial
  Synthetic oligonucleotide
gccttgtttccacagagcgatgccactcggaaactgacggtcaagatgtcatgct

SEQ ID NO: 411724 - DNA, 55 bp, Artificial
  Synthetic oligonucleotide
gcctttaacttgcggcgacatgcgtgtgttgaggtaaggcgtattgagggagtcc

SEQ ID NO: 411725 - DNA, 59 bp, Artificial
  Synthetic oligonucleotide
gcctttaaggtacatgcttggccagtcccattcaacaccattggattttagttcagtgc

SEQ ID NO: 411726 - DNA, 52 bp, Artificial
  Synthetic oligonucleotide
gcctttaatttgaacgggcttcccgtatttagtattggactgccaatccctt

SEQ ID NO: 411727 - DNA, 53 bp, Artificial
  Synthetic oligonucleotide
gcctttaatttgaattaaaggtttgtactttctcgcgcgacgtgctttattat

SEQ ID NO: 411728 - DNA, 60 bp, Artificial
  Synthetic oligonucleotide
gcctttaccatgtatgataacgaacccactactgctaagatccgaatggatctgagagat

SEQ ID NO: 411729 - DNA, 57 bp, Artificial
  Synthetic oligonucleotide
gcctttacggaaatcgcaaatgcacctcttcagtaccagcttaattgactccttacg

SEQ ID NO: 411730 - DNA, 51 bp, Artificial
  Synthetic oligonucleotide
gcctttacggatccttccttaattgaggttccccaaacaggtgaaacctcg

SEQ ID NO: 411731 - DNA, 58 bp, Artificial
  Synthetic oligonucleotide
gcctttagcggtattggagacttctttagcaggatatttggaggagtcaagagtacaa

SEQ ID NO: 411732 - DNA, 59 bp, Artificial
  Synthetic oligonucleotide
gcctttagggtaacatttccagatcctaataaatttgcactaggagacatgacagtaca

SEQ ID NO: 411733 - DNA, 50 bp, Artificial
  Synthetic oligonucleotide
gcctttagttaatggggcgtttacattcgatttcgtacattgttctaccg

SEQ ID NO: 411734 - DNA, 55 bp, Artificial
  Synthetic oligonucleotide
gcctttatggttgtcgccaatgccatggttggttatgagaatttacctatggacg

SEQ ID NO: 411735 - DNA, 53 bp, Artificial
  Synthetic oligonucleotide
gcctttattggttcctcgtcaaccttccttgggaatggtttggccagggctat

SEQ ID NO: 411736 - DNA, 55 bp, Artificial
  Synthetic oligonucleotide
gcctttcaagtgaagtctccgattcaaccttgatacgacccacagactcaggaag

SEQ ID NO: 411737 - DNA, 55 bp, Artificial
  Synthetic oligonucleotide
gcctttcacctgtagtggcattcaatgggccaataggaagataagggtgaccaag

SEQ ID NO: 411738 - DNA, 55 bp, Artificial
  Synthetic oligonucleotide
gcctttcgggctacgacgcaactaggccagatgggatggcctcgtggaacattag

SEQ ID NO: 411739 - DNA, 58 bp, Artificial
  Synthetic oligonucleotide
gcctttcgtcaccaacaacgtcgaattgttcttcgtcgctttcggtgtgcatcaacac

SEQ ID NO: 411740 - DNA, 60 bp, Artificial
  Synthetic oligonucleotide
gcctttctcatgatgggaaagttgccccattgatccatagaaaggcctaaaaggctcata

SEQ ID NO: 411741 - DNA, 55 bp, Artificial
  Synthetic oligonucleotide
gcctttctcggcgtgttgctgtgtcctccaaccatggaggcagtggatctgaacc

SEQ ID NO: 411742 - DNA, 60 bp, Artificial
  Synthetic oligonucleotide
gcctttctgggagggatacactcgagccctctccatcatattcggtgcggagggagacac

SEQ ID NO: 411743 - DNA, 56 bp, Artificial
  Synthetic oligonucleotide
gcctttcttagggttttcactagcaataacgattatgctgattaagacaggaattc

SEQ ID NO: 411744 - DNA, 58 bp, Artificial
  Synthetic oligonucleotide
gcctttgaagagtttagggagattggagatattcaacactattcccacacaccagaag

SEQ ID NO: 411745 - DNA, 55 bp, Artificial
  Synthetic oligonucleotide
gcctttgaagttagcctgatgaattacctcaatttaccaagagatcttattgagg

SEQ ID NO: 411746 - DNA, 55 bp, Artificial
  Synthetic oligonucleotide
gcctttgacttttatgaagtcacatcacgaacaccagtgagggctagggaagcgc

SEQ ID NO: 411747 - DNA, 52 bp, Artificial
  Synthetic oligonucleotide
gcctttgaggactaccgtggggtaactatgagaccggccttaccggaggtac

SEQ ID NO: 411748 - DNA, 55 bp, Artificial
  Synthetic oligonucleotide
gcctttgatagaaaagtaggccgtgaggtgtacgcagatgactacaccatggagc

SEQ ID NO: 411749 - DNA, 55 bp, Artificial
  Synthetic oligonucleotide
gcctttgattatacaaactatgacggtagcatacatcctgtttggtttcaagccc

SEQ ID NO: 411750 - DNA, 55 bp, Artificial
  Synthetic oligonucleotide
gcctttgattatacgaattatgatggtagcatacaccccatttggtttgaagccc

SEQ ID NO: 411751 - DNA, 60 bp, Artificial
  Synthetic oligonucleotide
gcctttgcagatctcgatacggatgtaactcgttctgtatctccgactcgtcctctgatt

SEQ ID NO: 411752 - DNA, 60 bp, Artificial
  Synthetic oligonucleotide
gcctttgcagctgtgtcgttagccgtctgttgacctcctcgagcacttcttccgtcgacc

SEQ ID NO: 411753 - DNA, 55 bp, Artificial
  Synthetic oligonucleotide
gcctttgccgtcattttcgtttgtgcttatgacaaatgaaggtaatgctgaagac

SEQ ID NO: 411754 - DNA, 60 bp, Artificial
  Synthetic oligonucleotide
gcctttgcctctaggggcaatcacgtgtcacctacccactatgtgcccgagacagatgcc

SEQ ID NO: 411755 - DNA, 55 bp, Artificial
  Synthetic oligonucleotide
gcctttgcgtggtgtttggtttgattagttcaatgacgaatttacgctgaagagg

SEQ ID NO: 411756 - DNA, 59 bp, Artificial
  Synthetic oligonucleotide
gcctttgcttccagaggtaaccacgtcgccccgactcactacgtggcggagtctgatgc

SEQ ID NO: 411757 - DNA, 55 bp, Artificial
  Synthetic oligonucleotide
gcctttggtggaaagtttatgaggagtggctggggttggacaggctcagatggca

SEQ ID NO: 411758 - DNA, 55 bp, Artificial
  Synthetic oligonucleotide
gcctttgtcactgtacaaccgactacttttcgcctcacgatatacggagagggta

SEQ ID NO: 411759 - DNA, 55 bp, Artificial
  Synthetic oligonucleotide
gcctttgtgtctttcggtacgaataactttaaatcaggcagtttcatcgtcgcag

SEQ ID NO: 411760 - DNA, 55 bp, Artificial
  Synthetic oligonucleotide
gcctttgtgttccacttataacacagtgtgcatgaaaacatactataccgaacca

SEQ ID NO: 411761 - DNA, 54 bp, Artificial
  Synthetic oligonucleotide
gcctttgttacggcacgtctccgggttgcgttatggggggataccataacatta

SEQ ID NO: 411762 - DNA, 57 bp, Artificial
  Synthetic oligonucleotide
gcctttgttagtgacgtcgagcctctaccctctggcatacccggtgaatcgaaacca

SEQ ID NO: 411763 - DNA, 58 bp, Artificial
  Synthetic oligonucleotide
gccttttagaaacaccagaaggctgtctacagataatagaacagatacagccagctat

SEQ ID NO: 411764 - DNA, 60 bp, Artificial
  Synthetic oligonucleotide
gccttttagaaacagcaggaggatgtcagcaaatactagaacaattacaaccagctctca

SEQ ID NO: 411765 - DNA, 59 bp, Artificial
  Synthetic oligonucleotide
gccttttcaaaatgtaaacaagatcacttacggagcatgccctaagtatgtcaaacaga

SEQ ID NO: 411766 - DNA, 54 bp, Artificial
  Synthetic oligonucleotide
gccttttttgattggaatgctgccctacgtaacccgtggacaatactcccttct

SEQ ID NO: 411767 - DNA, 51 bp, Artificial
  Synthetic oligonucleotide
gcctttttttacagtaaacgaagggaacttaccaatacagtatcagaaatt

SEQ ID NO: 411768 - DNA, 54 bp, Artificial
  Synthetic oligonucleotide
gcgaaaaaggctagatctttagacggtgaagtggaaggtaaggctttaattgac

SEQ ID NO: 411769 - DNA, 52 bp, Artificial
  Synthetic oligonucleotide
gcgaaaaataccggtccctcccagggcggaatatttaccgagggccgagaga

SEQ ID NO: 411770 - DNA, 51 bp, Artificial
  Synthetic oligonucleotide
gcgaaaaatataatagtacagctgaataaatctgtgaacattacctgcaca

SEQ ID NO: 411771 - DNA, 55 bp, Artificial
  Synthetic oligonucleotide
gcgaaaactttggagttccaactagatctgatgcaacgacaagctgaggtattac

SEQ ID NO: 411772 - DNA, 59 bp, Artificial
  Synthetic oligonucleotide
gcgaaaagatgccccgcatgttccaagcaagacggcatttatgaaagtgccggacgaaa

SEQ ID NO: 411773 - DNA, 60 bp, Artificial
  Synthetic oligonucleotide
gcgaaaaggcttaggcatctcctatggcaggaagaagcggagacagcgacgaagacctgc

SEQ ID NO: 411774 - DNA, 60 bp, Artificial
  Synthetic oligonucleotide
gcgaaaagttcaagtgtgcagggcaaagagcaacgacattgttgagaagctagtcatccg

SEQ ID NO: 411775 - DNA, 55 bp, Artificial
  Synthetic oligonucleotide
gcgaaaatccatacccatgacagttgatactgagataatatgagcagccgcagtc

SEQ ID NO: 411776 - DNA, 54 bp, Artificial
  Synthetic oligonucleotide
gcgaaaatggctggctttcgccataagacggtcgttgtccctgagtgggaaggt

SEQ ID NO: 411777 - DNA, 60 bp, Artificial
  Synthetic oligonucleotide
gcgaaaatggtatctcaacgcatccatgaaaatcagtatggtcctgaatttgttatggcg

SEQ ID NO: 411778 - DNA, 56 bp, Artificial
  Synthetic oligonucleotide
gcgaaaatttgtgaaccgaggtaggtacatggctccgcaaggagacgtcaatttaa

SEQ ID NO: 411779 - DNA, 55 bp, Artificial
  Synthetic oligonucleotide
gcgaaacaacgtgcaaacgagccgcgcatcacgtctacggtagtcatgtccaccg

SEQ ID NO: 411780 - DNA, 60 bp, Artificial
  Synthetic oligonucleotide
gcgaaacatactagagagtatgctgaattctactcacagtcaaatcagttattgtcttat

SEQ ID NO: 411781 - DNA, 56 bp, Artificial
  Synthetic oligonucleotide
gcgaaacggggggcgtacgtaccctgagctttggttatgatacgagcgattttgca

SEQ ID NO: 411782 - DNA, 55 bp, Artificial
  Synthetic oligonucleotide
gcgaaactacttccacgtcctatataggctcagagccggacgggagtgagggtga

SEQ ID NO: 411783 - DNA, 54 bp, Artificial
  Synthetic oligonucleotide
gcgaaactatgtcctaatcatgtgcggtctgtattctggaatgcgcatcagcga

SEQ ID NO: 411784 - DNA, 60 bp, Artificial
  Synthetic oligonucleotide
gcgaaactcctggtcaaaaggaaatgatggaatggacttagtcagatactttggatgcat

SEQ ID NO: 411785 - DNA, 54 bp, Artificial
  Synthetic oligonucleotide
gcgaaactgtacaacgtgacgcaaagcgttacatggataagttagaacgtcgcg

SEQ ID NO: 411786 - DNA, 56 bp, Artificial
  Synthetic oligonucleotide
gcgaaacttgtccttagtcattccaagccttatgcgggtgccgaatttatcgtacc

SEQ ID NO: 411787 - DNA, 55 bp, Artificial
  Synthetic oligonucleotide
gcgaaagaagcacacatgcaaatgaaggcggctgcggttagaggggcaactaatc

SEQ ID NO: 411788 - DNA, 60 bp, Artificial
  Synthetic oligonucleotide
gcgaaagatagccaatgacgctatcacggaatcgaagcagggagtcatgggcgctagtgt

SEQ ID NO: 411789 - DNA, 60 bp, Artificial
  Synthetic oligonucleotide
gcgaaagatagccaatgatgctatctctgaatcgaagcagggagttatgggggcgagcac

SEQ ID NO: 411790 - DNA, 55 bp, Artificial
  Synthetic oligonucleotide
gcgaaagctggaatgagcaacctccaggaattacaggaaaacatcaccgcacacg

SEQ ID NO: 411791 - DNA, 55 bp, Artificial
  Synthetic oligonucleotide
gcgaaagctggcaattggaaatctcattctttcgacaaatttggagagtttgagg

SEQ ID NO: 411792 - DNA, 55 bp, Artificial
  Synthetic oligonucleotide
gcgaaaggcaaggttgaatctaacggtgttgctggtaccgattgtaccaagtcgt

SEQ ID NO: 411793 - DNA, 52 bp, Artificial
  Synthetic oligonucleotide
gcgaaaggcctttcccaattccctcgttatacaatatatggacgacatactc

SEQ ID NO: 411794 - DNA, 60 bp, Artificial
  Synthetic oligonucleotide
gcgaaagtcaggcgcttcaaacacatggatcggtaattctctcgtcactctaggtatatt

SEQ ID NO: 411795 - DNA, 51 bp, Artificial
  Synthetic oligonucleotide
gcgaaagtctccacataacatgcggcggcgtaaatgtaatatccctcaggg

SEQ ID NO: 411796 - DNA, 55 bp, Artificial
  Synthetic oligonucleotide
gcgaaagtgactgcaaagtagaccacattttggtgatagtcaggcacttctaccc

SEQ ID NO: 411797 - DNA, 55 bp, Artificial
  Synthetic oligonucleotide
gcgaaagtgtacgtgggtagatctctatccacattcttgtgtgcctgttccaagc

SEQ ID NO: 411798 - DNA, 55 bp, Artificial
  Synthetic oligonucleotide
gcgaaagttaatagggactcgaaaacgaaagttccagagaagttctctcgacgca

SEQ ID NO: 411799 - DNA, 55 bp, Artificial
  Synthetic oligonucleotide
gcgaaatctagttcacggacgtgcgagtgagggcagcaccatgcattctgaggag

SEQ ID NO: 411800 - DNA, 50 bp, Artificial
  Synthetic oligonucleotide
gcgaaatgataggcgaacattacgacattaccgcgcaacgtgttagtcaa

SEQ ID NO: 411801 - DNA, 57 bp, Artificial
  Synthetic oligonucleotide
gcgaaattaaccaaacaattgactcgattgttgattcagtcagtactgcgtttgttg

SEQ ID NO: 411802 - DNA, 59 bp, Artificial
  Synthetic oligonucleotide
gcgaaattgaactgtacgatgacgatccacagttaagagtattatcattggttagtgaa

SEQ ID NO: 411803 - DNA, 54 bp, Artificial
  Synthetic oligonucleotide
gcgaaattgggtaaccctcttgctccaaattacaaaaacgtcgtgtctgtagaa

SEQ ID NO: 411804 - DNA, 60 bp, Artificial
  Synthetic oligonucleotide
gcgaaattgtagtgacgagagatgtagtagaacttggagtgattcaaagaactcattatg

SEQ ID NO: 411805 - DNA, 55 bp, Artificial
  Synthetic oligonucleotide
gcgaacaaactggatagcgtgtttcttgatgttaaacgcacggtcatagcgatcg

SEQ ID NO: 411806 - DNA, 60 bp, Artificial
  Synthetic oligonucleotide
gcgaacaagaccaacccccagcacaatttcaaggccgggtatacgcgcatccagctgatc

SEQ ID NO: 411807 - DNA, 55 bp, Artificial
  Synthetic oligonucleotide
gcgaacaagtttacgagtgttttgagggttaccatagagactactctgttcaaac

SEQ ID NO: 411808 - DNA, 55 bp, Artificial
  Synthetic oligonucleotide
gcgaacaccggcggggaggatagcgctctgaatgtggcacatcaactcgcagagg

SEQ ID NO: 411809 - DNA, 60 bp, Artificial
  Synthetic oligonucleotide
gcgaacacgcatacccaaacgcatctcatccatgggatgaagatgtaatgccggaccttc

SEQ ID NO: 411810 - DNA, 53 bp, Artificial
  Synthetic oligonucleotide
gcgaacagaagaccctggtaccggggggggataggccatagtacgaggggaga

SEQ ID NO: 411811 - DNA, 60 bp, Artificial
  Synthetic oligonucleotide
gcgaacagaagacgctcacggacggtaggagtaagaccgtagcgataggagaggatgcta

SEQ ID NO: 411812 - DNA, 60 bp, Artificial
  Synthetic oligonucleotide
gcgaacagagaagcgcactgggacgtcaggatgagtccatagcgataggaggggatgcta

SEQ ID NO: 411813 - DNA, 55 bp, Artificial
  Synthetic oligonucleotide
gcgaacagatatgatgtggcaactgcgatcaaattatctagatacgtgtcctcgt

SEQ ID NO: 411814 - DNA, 60 bp, Artificial
  Synthetic oligonucleotide
gcgaacagtcaggtagtgccatgtgaaccaactacagagaaagaggtctattcgaaagta

SEQ ID NO: 411815 - DNA, 54 bp, Artificial
  Synthetic oligonucleotide
gcgaacagttcacttgactccgagatgaaacattacttagttgggggcttgact

SEQ ID NO: 411816 - DNA, 55 bp, Artificial
  Synthetic oligonucleotide
gcgaacatagcaatccaaggaacgtcggagcagacggagtttcttggactaacgg

SEQ ID NO: 411817 - DNA, 55 bp, Artificial
  Synthetic oligonucleotide
gcgaacatagcagtgcaagggacgtcggagcacacagaattcttggacctgacag

SEQ ID NO: 411818 - DNA, 55 bp, Artificial
  Synthetic oligonucleotide
gcgaacatagcgatccagggaacgtcagagcagacggagtttctggacctagtgg

SEQ ID NO: 411819 - DNA, 55 bp, Artificial
  Synthetic oligonucleotide
gcgaacatgacggttgcctacaacacaagcgcggctgtctcgcggctaagagcat

SEQ ID NO: 411820 - DNA, 52 bp, Artificial
  Synthetic oligonucleotide
gcgaacatgggacaattccgagcggctttgagacgtattatggatgacgatg

SEQ ID NO: 411821 - DNA, 55 bp, Artificial
  Synthetic oligonucleotide
gcgaaccaagaagtggtttagacacgagtgcgtactatgtgttcactattggtac

SEQ ID NO: 411822 - DNA, 58 bp, Artificial
  Synthetic oligonucleotide
gcgaaccaggccgtggttaatggtgctcacaaccgtcccaactacactgccgctaatg

SEQ ID NO: 411823 - DNA, 60 bp, Artificial
  Synthetic oligonucleotide
gcgaaccatcattttctatctcgcgaactaggatgagtggcatatacggattaccagctg

SEQ ID NO: 411824 - DNA, 60 bp, Artificial
  Synthetic oligonucleotide
gcgaacccatcagtatatacgatgcccaatgtcagtatttaccaatctaattcagagagg

SEQ ID NO: 411825 - DNA, 55 bp, Artificial
  Synthetic oligonucleotide
gcgaacccttatctcgtggggttgacgattgtaaatatcctaaatatcattccag

SEQ ID NO: 411826 - DNA, 55 bp, Artificial
  Synthetic oligonucleotide
gcgaaccgatattccattataccactagatcaggaggtcgtaaagtgggctcgga

SEQ ID NO: 411827 - DNA, 60 bp, Artificial
  Synthetic oligonucleotide
gcgaaccggggtcatatataagcacaggcgatgcggacagtgagggcgaagatcttattg

SEQ ID NO: 411828 - DNA, 57 bp, Artificial
  Synthetic oligonucleotide
gcgaaccgttcgcccagttgaagaggcaaggtacgtcatttattcaatacgcgtggc

SEQ ID NO: 411829 - DNA, 55 bp, Artificial
  Synthetic oligonucleotide
gcgaacctacttgtatctgatgctacccgtatgggtgaacgtgctaccagtgtgg

SEQ ID NO: 411830 - DNA, 55 bp, Artificial
  Synthetic oligonucleotide
gcgaacctcataatgttaccaacacgcctcggtaagtttgtactccgtgtgaggg

SEQ ID NO: 411831 - DNA, 55 bp, Artificial
  Synthetic oligonucleotide
gcgaacctcatgtggaacttcgaggccaaactcttcaggaagaagtatggttact

SEQ ID NO: 411832 - DNA, 55 bp, Artificial
  Synthetic oligonucleotide
gcgaaccttgaaaagtgaaaggcgcgcgctacgacgtctgctacgaagtgacggg

SEQ ID NO: 411833 - DNA, 55 bp, Artificial
  Synthetic oligonucleotide
gcgaacgagactcacaaacgcctggcacttgatagggcttcctccaaccggaggt

SEQ ID NO: 411834 - DNA, 60 bp, Artificial
  Synthetic oligonucleotide
gcgaacgccatctagtgagcaaactatacactgatgacatgcgaccagaaacggttgaaa

SEQ ID NO: 411835 - DNA, 55 bp, Artificial
  Synthetic oligonucleotide
gcgaacgctacagaaggaggtgcaagtattgtagcatctgcgatagtcaacactc

SEQ ID NO: 411836 - DNA, 57 bp, Artificial
  Synthetic oligonucleotide
gcgaacggaaagatggtggacaacatgaccacaacacaaatcgaggtgggtcccgga

SEQ ID NO: 411837 - DNA, 55 bp, Artificial
  Synthetic oligonucleotide
gcgaacggcggaggtaattgcgttctctactgtatcgttgtagccgccatgtgtc

SEQ ID NO: 411838 - DNA, 55 bp, Artificial
  Synthetic oligonucleotide
gcgaacggggatgatttaatacttgcggttaaggatgaagacagtggcttgctag

SEQ ID NO: 411839 - DNA, 60 bp, Artificial
  Synthetic oligonucleotide
gcgaacggttgaataaccacatttatgcttgcatgcaagaaatgacgtagggaatatcct

SEQ ID NO: 411840 - DNA, 55 bp, Artificial
  Synthetic oligonucleotide
gcgaacgtgagaaccttatgaaagggttaatggacaagcgagatagcgacctgct

SEQ ID NO: 411841 - DNA, 59 bp, Artificial
  Synthetic oligonucleotide
gcgaactcttggttgggtgcatgttcgactgtcggtggagccttcgtagaccaaaatga

SEQ ID NO: 411842 - DNA, 55 bp, Artificial
  Synthetic oligonucleotide
gcgaactggcacatatgaaaggttcgcgtaagcgagttgacctcagattgaacgg

SEQ ID NO: 411843 - DNA, 60 bp, Artificial
  Synthetic oligonucleotide
gcgaactgtctacaaatgttgtttgcgtcaatgcatcccatagtacataattcactgctc

SEQ ID NO: 411844 - DNA, 52 bp, Artificial
  Synthetic oligonucleotide
gcgaactgtctgaacttgacgtagtatgtaacctcacactcataatacattg

SEQ ID NO: 411845 - DNA, 51 bp, Artificial
  Synthetic oligonucleotide
gcgaagaaaccaaggcgacaaaggacacgaggacggagcacaagtgtcact

SEQ ID NO: 411846 - DNA, 60 bp, Artificial
  Synthetic oligonucleotide
gcgaagaacgatcagagcaatccggagacgcagggagctaatgaggtcagcggtacagca

SEQ ID NO: 411847 - DNA, 60 bp, Artificial
  Synthetic oligonucleotide
gcgaagaatctagaccttgtctgcgctgaagcgccccttcccgtcgccacattcacccca

SEQ ID NO: 411848 - DNA, 60 bp, Artificial
  Synthetic oligonucleotide
gcgaagaattcaattcgttgtcacaagaaatagatgtgtcccaacttatagacctagcaa

SEQ ID NO: 411849 - DNA, 55 bp, Artificial
  Synthetic oligonucleotide
gcgaagactggtgaaactagtgttccgaaatgttggcttgtcaccaacggctcct

SEQ ID NO: 411850 - DNA, 51 bp, Artificial
  Synthetic oligonucleotide
gcgaagagaaggaaacgatgtgtgctatcccggaaaattcacaaatgaaga

SEQ ID NO: 411851 - DNA, 60 bp, Artificial
  Synthetic oligonucleotide
gcgaagagacgcttattcgagacagagccaccagacagtgggtatggcaatacgcagatg

SEQ ID NO: 411852 - DNA, 55 bp, Artificial
  Synthetic oligonucleotide
gcgaagagactggaaatttacagccgatttcctcgtcacttataaagatggaaca

SEQ ID NO: 411853 - DNA, 54 bp, Artificial
  Synthetic oligonucleotide
gcgaagaggtatcctcctttcgtttaccacgttgagattttggaacgattcgga

SEQ ID NO: 411854 - DNA, 56 bp, Artificial
  Synthetic oligonucleotide
gcgaagattgtttaaaactacgttcgacgcgtacataaggttagacgagagtgaga

SEQ ID NO: 411855 - DNA, 60 bp, Artificial
  Synthetic oligonucleotide
gcgaagcacatttatcgatacaatatcagaaatttatgccaacattaccagagaatgtac

SEQ ID NO: 411856 - DNA, 53 bp, Artificial
  Synthetic oligonucleotide
gcgaagccatcccagtattttaaacccgcttatcatttcgaaaaagcccgtgg

SEQ ID NO: 411857 - DNA, 60 bp, Artificial
  Synthetic oligonucleotide
gcgaagccccgttggcccctcacagcaggatccgcagtcgcttgcgaggtcctcggccaa

SEQ ID NO: 411858 - DNA, 60 bp, Artificial
  Synthetic oligonucleotide
gcgaagcctgtcctttgcctcacaggttggacagcttcggaggatgtagatgtggcaaat

SEQ ID NO: 411859 - DNA, 60 bp, Artificial
  Synthetic oligonucleotide
gcgaagcgcactcaattgcaaagtaatatgtgcacccgcaaggaaggtcaactctccgtc

SEQ ID NO: 411860 - DNA, 55 bp, Artificial
  Synthetic oligonucleotide
gcgaagcgttggatacggttatgtctaagtactctgagttcactagcgataatga

SEQ ID NO: 411861 - DNA, 55 bp, Artificial
  Synthetic oligonucleotide
gcgaaggaattaatcaggtatggatggttttatacagccggagggaagacccagg

SEQ ID NO: 411862 - DNA, 60 bp, Artificial
  Synthetic oligonucleotide
gcgaaggattggactaagtcgcaaccaactggctgcgaatattttcgcatttgtgccaga

SEQ ID NO: 411863 - DNA, 55 bp, Artificial
  Synthetic oligonucleotide
gcgaaggctatagcaaagcgctttcgtagcacattccttaatgttgacggtgaag

SEQ ID NO: 411864 - DNA, 55 bp, Artificial
  Synthetic oligonucleotide
gcgaaggggctcaggaatgtcccacaaagagaaacaagaggactatttggggcta

SEQ ID NO: 411865 - DNA, 57 bp, Artificial
  Synthetic oligonucleotide
gcgaagggtttccattccagactgtttgatagaactccacatgtacttaaagactaa

SEQ ID NO: 411866 - DNA, 58 bp, Artificial
  Synthetic oligonucleotide
gcgaaggtcaatggtggacgtgtaaaagagtacccgcatttacgtccagcatacgaca

SEQ ID NO: 411867 - DNA, 55 bp, Artificial
  Synthetic oligonucleotide
gcgaaggttttctgcagtttcccttcgccctcggcaaatgcgatacagttctagg

SEQ ID NO: 411868 - DNA, 60 bp, Artificial
  Synthetic oligonucleotide
gcgaagtaggagtccgtcacaagcttttgtgattagaggcgagcatgagggtaagttgta

SEQ ID NO: 411869 - DNA, 53 bp, Artificial
  Synthetic oligonucleotide
gcgaagtcaccgggggtaagattgggcctaaacctgtgttgtccattaggaag

SEQ ID NO: 411870 - DNA, 55 bp, Artificial
  Synthetic oligonucleotide
gcgaagtccctaggggaggaagatgggtgcgagagcgtctgtattgacagggagc

SEQ ID NO: 411871 - DNA, 58 bp, Artificial
  Synthetic oligonucleotide
gcgaagtcgcagttactcgagtttagaaacttaaatgccgaccactcattcactacta

SEQ ID NO: 411872 - DNA, 57 bp, Artificial
  Synthetic oligonucleotide
gcgaagtcgggagaatacccgatagactgtggtctagtattaaaatgactcgagggc

SEQ ID NO: 411873 - DNA, 55 bp, Artificial
  Synthetic oligonucleotide
gcgaagtgaaccatgcttcgaacgcttcaggctgttgcagaaaggtactactgcc

SEQ ID NO: 411874 - DNA, 55 bp, Artificial
  Synthetic oligonucleotide
gcgaagtgatgttgaggatcttagtccacaattacctgtaatatctcgaaatatc

SEQ ID NO: 411875 - DNA, 55 bp, Artificial
  Synthetic oligonucleotide
gcgaagtgggtcctctgatgaacattcgtgtcacttacccggtagtacaatttcc

SEQ ID NO: 411876 - DNA, 60 bp, Artificial
  Synthetic oligonucleotide
gcgaagtgtatgaattcgcattgtctcacagtcggtaagtcggaatagcgcattttccaa

SEQ ID NO: 411877 - DNA, 60 bp, Artificial
  Synthetic oligonucleotide
gcgaagtgtggacatgaagcatcgccaagcaaaacgatgataacgccttactcggtggaa

SEQ ID NO: 411878 - DNA, 54 bp, Artificial
  Synthetic oligonucleotide
gcgaagttaaatttggcgagagtacttataacgtttattctgatttaccaatcg

SEQ ID NO: 411879 - DNA, 54 bp, Artificial
  Synthetic oligonucleotide
gcgaagtttcgacctgccaaaccggcttcctgttggtggtgggactgtccccgc

SEQ ID NO: 411880 - DNA, 56 bp, Artificial
  Synthetic oligonucleotide
gcgaagttttgcttcaaaaatgtgggatccacttctgaacgagttccctgataccg

SEQ ID NO: 411881 - DNA, 60 bp, Artificial
  Synthetic oligonucleotide
gcgaataaatggatatcaatgggctcatcatgtacaattaaagtatgtccacttaataca

SEQ ID NO: 411882 - DNA, 55 bp, Artificial
  Synthetic oligonucleotide
gcgaataactcaaccgacactgttgacacagtactcgaaaagaatgtgaccgtga

SEQ ID NO: 411883 - DNA, 60 bp, Artificial
  Synthetic oligonucleotide
gcgaatacgcctccaaattactattgaaagatagtgctatggatgggataattgcgaatg

SEQ ID NO: 411884 - DNA, 55 bp, Artificial
  Synthetic oligonucleotide
gcgaatacggtgaaaattgcaggcatggaattcatactactctgtgccctggctg

SEQ ID NO: 411885 - DNA, 60 bp, Artificial
  Synthetic oligonucleotide
gcgaatacgtagtgttagtgctggtcgcgcactatatatccctccttatgatttgctctt

SEQ ID NO: 411886 - DNA, 58 bp, Artificial
  Synthetic oligonucleotide
gcgaatagcaacttcgattgacttgagttcgttcaggtctaccgttgataggccgtag

SEQ ID NO: 411887 - DNA, 55 bp, Artificial
  Synthetic oligonucleotide
gcgaataggtcgcttcttagctatcctgtgctgtgcttttatagaggggagcgtg

SEQ ID NO: 411888 - DNA, 55 bp, Artificial
  Synthetic oligonucleotide
gcgaatataagcgtctcattttggcagagggttcatcagcgattcctccgctggt

SEQ ID NO: 411889 - DNA, 55 bp, Artificial
  Synthetic oligonucleotide
gcgaatatggttctgacttgaatacagtactattgctccatgcaaacggtacaag

SEQ ID NO: 411890 - DNA, 57 bp, Artificial
  Synthetic oligonucleotide
gcgaatattcgttcaagattcgaacgaatgttatgattttgaaggacaaagtccttc

SEQ ID NO: 411891 - DNA, 55 bp, Artificial
  Synthetic oligonucleotide
gcgaatcaaggcagaatagttggccaaacagatgtaaactttaatggaggacaca

SEQ ID NO: 411892 - DNA, 52 bp, Artificial
  Synthetic oligonucleotide
gcgaatcacccttaacggcgtggatgctacagtcgaagagattgtaggacct

SEQ ID NO: 411893 - DNA, 55 bp, Artificial
  Synthetic oligonucleotide
gcgaatccctcattacgtcagataatgaaacactttagtaatcttgctgaggctt

SEQ ID NO: 411894 - DNA, 55 bp, Artificial
  Synthetic oligonucleotide
gcgaatccctttgtagcaggaagaatgtatctagcatatagtccttacgatgata

SEQ ID NO: 411895 - DNA, 55 bp, Artificial
  Synthetic oligonucleotide
gcgaatcgaaatgcagcgtccctcctgcggctttatagccgccgtaagtgggcta

SEQ ID NO: 411896 - DNA, 55 bp, Artificial
  Synthetic oligonucleotide
gcgaatcgaacgattcctttgtataagcctcctatttggtatcttgacgtcgctt

SEQ ID NO: 411897 - DNA, 55 bp, Artificial
  Synthetic oligonucleotide
gcgaatcgactcctataccgtgcataagtcacgaacaatgcattgatagttgcaa

SEQ ID NO: 411898 - DNA, 55 bp, Artificial
  Synthetic oligonucleotide
gcgaatcgggattggatacatatggcttgtattaaatttcgaattccgactagcg

SEQ ID NO: 411899 - DNA, 55 bp, Artificial
  Synthetic oligonucleotide
gcgaatcgtacacacgttcttgatagtgatgactacgattcgaccgccaacggta

SEQ ID NO: 411900 - DNA, 60 bp, Artificial
  Synthetic oligonucleotide
gcgaatcgtgcacgacccttcaattcgagcatactatgttcggaacgctgcgaaaacagc

SEQ ID NO: 411901 - DNA, 58 bp, Artificial
  Synthetic oligonucleotide
gcgaatctaggagctttgcttctagctgaagttcttgggggtaacttaactatgcgtg

SEQ ID NO: 411902 - DNA, 55 bp, Artificial
  Synthetic oligonucleotide
gcgaatgaaatagcacgcgtgactggggagacttcgacatggggaccggcgcgtc

SEQ ID NO: 411903 - DNA, 55 bp, Artificial
  Synthetic oligonucleotide
gcgaatgaccctggatgagtacaacctgcagtgtaagcgaatgcgataagccgag

SEQ ID NO: 411904 - DNA, 55 bp, Artificial
  Synthetic oligonucleotide
gcgaatgagattgctcgcgtgacaggggagacttcaacatggggaccagcgcgcc

SEQ ID NO: 411905 - DNA, 55 bp, Artificial
  Synthetic oligonucleotide
gcgaatgcccagggtaattcggttcaaactcaagcgggagtggccgtcagcattg

SEQ ID NO: 411906 - DNA, 60 bp, Artificial
  Synthetic oligonucleotide
gcgaatgctggtcgctcttctggttctagaagaccactcggcattttctcctggacaata

SEQ ID NO: 411907 - DNA, 58 bp, Artificial
  Synthetic oligonucleotide
gcgaatgctgtggtggttcggccgtttctatcccgtggtcaaactgacattcttatta

SEQ ID NO: 411908 - DNA, 59 bp, Artificial
  Synthetic oligonucleotide
gcgaatgctgtggtggttcggccgtttttgtctcgtgtgcaaaccgagatccttatcaa

SEQ ID NO: 411909 - DNA, 60 bp, Artificial
  Synthetic oligonucleotide
gcgaatggaagaatttactcaagatcctaccctacacaacgtacaagctgaggagtctca

SEQ ID NO: 411910 - DNA, 60 bp, Artificial
  Synthetic oligonucleotide
gcgaatgggactatacatgatagaagcccattccgagctctcgtgagctgggagatgggt

SEQ ID NO: 411911 - DNA, 55 bp, Artificial
  Synthetic oligonucleotide
gcgaatgtaaacaatctatataacaaggtgaagagagcattgggttctaatgcga

SEQ ID NO: 411912 - DNA, 60 bp, Artificial
  Synthetic oligonucleotide
gcgaatgtatgagatgatcaatccggttcgccttgagtctttcgagctggattcgaatgt

SEQ ID NO: 411913 - DNA, 59 bp, Artificial
  Synthetic oligonucleotide
gcgaatgttaacatttttcttgctcgcctccctttgctccttagcgagcagctacaagg

SEQ ID NO: 411914 - DNA, 60 bp, Artificial
  Synthetic oligonucleotide
gcgaatgttaccgcagtacgtcaagagtatgctataccagttggaccagtattcccacca

SEQ ID NO: 411915 - DNA, 60 bp, Artificial
  Synthetic oligonucleotide
gcgaatgttgaagacaggcgtgacgtacgaatccctttcatgtgtcgagacatcccagaa

SEQ ID NO: 411916 - DNA, 58 bp, Artificial
  Synthetic oligonucleotide
gcgaattagggagggtgatggaaacttgttagaatgcgcgcgcagatgggaaaaagcg

SEQ ID NO: 411917 - DNA, 51 bp, Artificial
  Synthetic oligonucleotide
gcgaattatacgaacgtactttatctagttgtttatgcggatccacaaagc

SEQ ID NO: 411918 - DNA, 55 bp, Artificial
  Synthetic oligonucleotide
gcgaattccttttggtacatggcagcagcgattctatgttacctgatcactgggt

SEQ ID NO: 411919 - DNA, 53 bp, Artificial
  Synthetic oligonucleotide
gcgaattggcatctacattgtatattactgtatagtcgccaaacacttgtggc

SEQ ID NO: 411920 - DNA, 60 bp, Artificial
  Synthetic oligonucleotide
gcgaattggctgcactttgtaataaacaatcaatttagacaagtagttattgatggtgta

SEQ ID NO: 411921 - DNA, 60 bp, Artificial
  Synthetic oligonucleotide
gcgaatttaattggccactcatagaaatcacacatatctagaatcataatcctctcggtc

SEQ ID NO: 411922 - DNA, 57 bp, Artificial
  Synthetic oligonucleotide
gcgaatttataagacaacatcaaatcgcgaagaaagctaagattgagatacctagtc

SEQ ID NO: 411923 - DNA, 60 bp, Artificial
  Synthetic oligonucleotide
gcgaatttcaagtgaagaatgtgaacatgcggctggcgaccatcagcggtagtaactacc

SEQ ID NO: 411924 - DNA, 57 bp, Artificial
  Synthetic oligonucleotide
gcgaatttcacgccttctatgacgttggagtcttcgacccggtacacgattctccaa

SEQ ID NO: 411925 - DNA, 59 bp, Artificial
  Synthetic oligonucleotide
gcgaatttgaatatcggaaacatatctccagactacatacaaaatttagcaacaattgg

SEQ ID NO: 411926 - DNA, 60 bp, Artificial
  Synthetic oligonucleotide
gcgaatttgggatctagcctgggacgcttgttaggcattcagcactacaagtggaaccca

SEQ ID NO: 411927 - DNA, 51 bp, Artificial
  Synthetic oligonucleotide
gcgaattttcccggtctcgaaattgcgtttagagactcgtgtcattcgtca

SEQ ID NO: 411928 - DNA, 59 bp, Artificial
  Synthetic oligonucleotide
gcgaattttgaaaatggtttcaggatcagattccctgagtcgtctcctttcacagtcga

SEQ ID NO: 411929 - DNA, 57 bp, Artificial
  Synthetic oligonucleotide
gcgaattttgctaagaagcagacttttaacaaggtgaagtggtatcttggtgcccgc

SEQ ID NO: 411930 - DNA, 57 bp, Artificial
  Synthetic oligonucleotide
gcgacaaatggtggacgatggcaagcttaaggacacggtaagcgtcccagaaggaac

SEQ ID NO: 411931 - DNA, 52 bp, Artificial
  Synthetic oligonucleotide
gcgacaacatttctgtggttgccttccaaccacctaccaacactcttaatca

SEQ ID NO: 411932 - DNA, 56 bp, Artificial
  Synthetic oligonucleotide
gcgacaacctttttgggttgacacctgttgcggtacctgtaatgcaagtgttagat

SEQ ID NO: 411933 - DNA, 60 bp, Artificial
  Synthetic oligonucleotide
gcgacaacttgctgacagtctcaaaggtgacgcttctaacattttcacgcgcccctccat

SEQ ID NO: 411934 - DNA, 50 bp, Artificial
  Synthetic oligonucleotide
gcgacaagccatgtgatgcctagtattaatgaagtagtcagttcaagtgg

SEQ ID NO: 411935 - DNA, 52 bp, Artificial
  Synthetic oligonucleotide
gcgacaagcgtaaataaataccgctacatgtcgttcgatcaggatcatactg

SEQ ID NO: 411936 - DNA, 55 bp, Artificial
  Synthetic oligonucleotide
gcgacaagggacaacgcatatgccgataagctacccacatgcaatcgggaccacg

SEQ ID NO: 411937 - DNA, 55 bp, Artificial
  Synthetic oligonucleotide
gcgacaagtatgatggtgactcgtcaggttaattcaaaatgcctaagcgggatgc

SEQ ID NO: 411938 - DNA, 60 bp, Artificial
  Synthetic oligonucleotide
gcgacaatatagccaggtgtcagtgcacgacaggggtttacttttgtgcgtcaaagaaca

SEQ ID NO: 411939 - DNA, 55 bp, Artificial
  Synthetic oligonucleotide
gcgacaatgtgcctcctcatgcagattgccatcttagttacaactatgacactac

SEQ ID NO: 411940 - DNA, 55 bp, Artificial
  Synthetic oligonucleotide
gcgacaattctgcattcttagcgaatacgggtggcatttccaagacaagtcaagc

SEQ ID NO: 411941 - DNA, 60 bp, Artificial
  Synthetic oligonucleotide
gcgacacaatccttcctggcgacctgcgtcaacggcgtgtgttggactgtctatcatggc

SEQ ID NO: 411942 - DNA, 60 bp, Artificial
  Synthetic oligonucleotide
gcgacacacgcttgttgtgatagttaatttcacgcacagcgtgccactgaacaagcgaca

SEQ ID NO: 411943 - DNA, 50 bp, Artificial
  Synthetic oligonucleotide
gcgacacacgttttacgtgattgtcccaacgccatagctgtttccgccag

SEQ ID NO: 411944 - DNA, 55 bp, Artificial
  Synthetic oligonucleotide
gcgacacccgaacgcaattttcgttagccgccatgtcgtacgtaaacgtgacgct

SEQ ID NO: 411945 - DNA, 55 bp, Artificial
  Synthetic oligonucleotide
gcgacaccgacatggttatggtagattgcgaccgttgtattccgacgatggatgc

SEQ ID NO: 411946 - DNA, 55 bp, Artificial
  Synthetic oligonucleotide
gcgacacgagacgttgacgtgtattttggggcatgttcggagcctgtatatcgga

SEQ ID NO: 411947 - DNA, 60 bp, Artificial
  Synthetic oligonucleotide
gcgacacgtagctactgctaatgtcgggagtgtcgggaaatcgagcgtgtcgatagagga

SEQ ID NO: 411948 - DNA, 55 bp, Artificial
  Synthetic oligonucleotide
gcgacactaatgacctgcatttatgctgcccggatacagcgacacatctgctacc

SEQ ID NO: 411949 - DNA, 56 bp, Artificial
  Synthetic oligonucleotide
gcgacactcggcctttcgtttttccgtctggctgttgggccactttcactgacttc

SEQ ID NO: 411950 - DNA, 55 bp, Artificial
  Synthetic oligonucleotide
gcgacactgtggaaggaaattgaaggattaactcagttagatcatgagacagctg

SEQ ID NO: 411951 - DNA, 55 bp, Artificial
  Synthetic oligonucleotide
gcgacagacatggggacatggtgtgaggactcattgtcatacgaatgcgtgacca

SEQ ID NO: 411952 - DNA, 56 bp, Artificial
  Synthetic oligonucleotide
gcgacagacgcgctatccacggggtacactgggaacttcgaatccgtaaccgactg

SEQ ID NO: 411953 - DNA, 60 bp, Artificial
  Synthetic oligonucleotide
gcgacagagtacagaatgtactcggtgatatgcgctccaggcaggtgatcaagtacgccg

SEQ ID NO: 411954 - DNA, 60 bp, Artificial
  Synthetic oligonucleotide
gcgacaggaacagggtataatggatgggctacaatagatgtcgagtatagagatccagcc

SEQ ID NO: 411955 - DNA, 60 bp, Artificial
  Synthetic oligonucleotide
gcgacaggtactgcgcacctagttaagcatacgcccaacattatccatgcagtcgggccg

SEQ ID NO: 411956 - DNA, 55 bp, Artificial
  Synthetic oligonucleotide
gcgacagtactttgcttgattgcaagttagctacctaaaagttctcaatttgacc

SEQ ID NO: 411957 - DNA, 55 bp, Artificial
  Synthetic oligonucleotide
gcgacagttataatcagcacgccaaacagtccggcgtgattaatggtaataggac

SEQ ID NO: 411958 - DNA, 55 bp, Artificial
  Synthetic oligonucleotide
gcgacagttgagacggggaatgcggacgctgtgatcgctagtagcgacgagtcag

SEQ ID NO: 411959 - DNA, 55 bp, Artificial
  Synthetic oligonucleotide
gcgacataattttcgaaccggtatgctccaaggaatcagagaggctatggctccc

SEQ ID NO: 411960 - DNA, 56 bp, Artificial
  Synthetic oligonucleotide
gcgacatacttcagggtctgccggtctccgcgcggctaggtaacttggtcctactt

SEQ ID NO: 411961 - DNA, 55 bp, Artificial
  Synthetic oligonucleotide
gcgacatatgagaccaacagccacatggagatttggcatgtgagtgacgcttggc

SEQ ID NO: 411962 - DNA, 55 bp, Artificial
  Synthetic oligonucleotide
gcgacatcaaagacgcataattggctgaacaattctcaagataacgcatatgccg

SEQ ID NO: 411963 - DNA, 56 bp, Artificial
  Synthetic oligonucleotide
gcgacatctcaacagagcagtactagtcatgcaatccatcgctactgtggtggcag

SEQ ID NO: 411964 - DNA, 60 bp, Artificial
  Synthetic oligonucleotide
gcgacatgcaaacacagcaagccctcgatgtcaaaacgtggccggttatggatcacagaa

SEQ ID NO: 411965 - DNA, 55 bp, Artificial
  Synthetic oligonucleotide
gcgacatgcaattattaaggatatcaactcctggtgaacctagagaagctgaagc

SEQ ID NO: 411966 - DNA, 55 bp, Artificial
  Synthetic oligonucleotide
gcgacatgcctgtgaggcgttttatgtgtctgttggtacgccaagtaacttcgcg

SEQ ID NO: 411967 - DNA, 55 bp, Artificial
  Synthetic oligonucleotide
gcgacatgcgggaatacatagtgggaggaactttgacacaacagaccttcaacac

SEQ ID NO: 411968 - DNA, 55 bp, Artificial
  Synthetic oligonucleotide
gcgacatggagtgcagtatgcggagtacgacttctctggtgataccatccgggcg

SEQ ID NO: 411969 - DNA, 60 bp, Artificial
  Synthetic oligonucleotide
gcgacatgggattatgcgtttggggtaccagccagtgccccccttggcaacatcagagag

SEQ ID NO: 411970 - DNA, 55 bp, Artificial
  Synthetic oligonucleotide
gcgacatggtgtgaagacccgcgtgtgcttaactgtgagtcctccggcccctgaa

SEQ ID NO: 411971 - DNA, 56 bp, Artificial
  Synthetic oligonucleotide
gcgacattattgtccatattatcatattcgtatgacaagtataacgctgtagagcg

SEQ ID NO: 411972 - DNA, 55 bp, Artificial
  Synthetic oligonucleotide
gcgacattcccccaaatgacaaagtcttatagaaatcccaaaaacaaaccagctc

SEQ ID NO: 411973 - DNA, 55 bp, Artificial
  Synthetic oligonucleotide
gcgacattccctgctagagctgaagtgatgggttcccttgtgcgtgaatccatgg

SEQ ID NO: 411974 - DNA, 55 bp, Artificial
  Synthetic oligonucleotide
gcgacattcttggggaaatgagaaactataatgttggtggacggaatcgactagt

SEQ ID NO: 411975 - DNA, 55 bp, Artificial
  Synthetic oligonucleotide
gcgaccaaagttttacgctacacagccctaagaacgaaagagcttcgttccatgc

SEQ ID NO: 411976 - DNA, 56 bp, Artificial
  Synthetic oligonucleotide
gcgaccaagcttgatgacccagccacacaagaatggctttcccgcatgtgggacag

SEQ ID NO: 411977 - DNA, 60 bp, Artificial
  Synthetic oligonucleotide
gcgaccaccggatgatattctgcaaggcttaccgttcacgtacagtacgaatgacagcgg

SEQ ID NO: 411978 - DNA, 55 bp, Artificial
  Synthetic oligonucleotide
gcgaccacgacaaggtcaagctcgccatctctgactgcatagagaaatcggctgg

SEQ ID NO: 411979 - DNA, 60 bp, Artificial
  Synthetic oligonucleotide
gcgaccactactcttgcatccctcaccagcttcatcacttcgcacccgctcgtgttcgta

SEQ ID NO: 411980 - DNA, 55 bp, Artificial
  Synthetic oligonucleotide
gcgaccagcaattcaacactggagccctccggcacgactgcatagccgctgtcga

SEQ ID NO: 411981 - DNA, 55 bp, Artificial
  Synthetic oligonucleotide
gcgaccagccgatattatcatttcaacacccgcgtcgaaggtacgccgacgtctc

SEQ ID NO: 411982 - DNA, 55 bp, Artificial
  Synthetic oligonucleotide
gcgaccaggagatatagtcatttccactcccgtttcgaaggtacgtcgacgactg

SEQ ID NO: 411983 - DNA, 60 bp, Artificial
  Synthetic oligonucleotide
gcgaccaggtcgtcacttatcgacctgtgcaatcggttttgtgcgccaaaaggcatggac

SEQ ID NO: 411984 - DNA, 60 bp, Artificial
  Synthetic oligonucleotide
gcgaccagtcttcgacggtacacaatacaccatgatgagagaccctcgcaccaccatgtc

SEQ ID NO: 411985 - DNA, 55 bp, Artificial
  Synthetic oligonucleotide
gcgacccaaatgctctcttgaaacacagatttgagataattgaagggagagaccg

SEQ ID NO: 411986 - DNA, 56 bp, Artificial
  Synthetic oligonucleotide
gcgacccagtgacttataagggagggcaagtaaaacagtgcaggtggtgtggtttc

SEQ ID NO: 411987 - DNA, 55 bp, Artificial
  Synthetic oligonucleotide
gcgacccatcggaaaagcagatttgaggggcttgtacgacatatcaccaagtgca

SEQ ID NO: 411988 - DNA, 55 bp, Artificial
  Synthetic oligonucleotide
gcgaccccaagcttgtggatgctgggaagatacttgttgctagctatggccagca

SEQ ID NO: 411989 - DNA, 54 bp, Artificial
  Synthetic oligonucleotide
gcgaccccgttactagcactacaccgcccaccgacgttcgcggagaaactgcgt

SEQ ID NO: 411990 - DNA, 55 bp, Artificial
  Synthetic oligonucleotide
gcgacccctgctcctcttccccgcagtagctatggttagagggagtatcctagga

SEQ ID NO: 411991 - DNA, 56 bp, Artificial
  Synthetic oligonucleotide
gcgacccctgtgtcagtgacaggtgcgctgacaacgtcgagactcacgagtgctgc

SEQ ID NO: 411992 - DNA, 52 bp, Artificial
  Synthetic oligonucleotide
gcgacccgcgtgtaaagggtgggccttctctacaacaagtcatgagagatca

SEQ ID NO: 411993 - DNA, 56 bp, Artificial
  Synthetic oligonucleotide
gcgaccctccaacaccgtcgcctgggaaaagagttgacaatcatccacttccccac

SEQ ID NO: 411994 - DNA, 59 bp, Artificial
  Synthetic oligonucleotide
gcgaccctcggtatcgtacagatgccaactatcgtcgtcaagtcgaacagaaagtaatc

SEQ ID NO: 411995 - DNA, 55 bp, Artificial
  Synthetic oligonucleotide
gcgaccctggtcttattaaaagaggggtgcggacgtcctcctgagccgagggagc

SEQ ID NO: 411996 - DNA, 59 bp, Artificial
  Synthetic oligonucleotide
gcgaccgcccccgacctcgtgcctctcttcgagaacacacacgttagctacgcctgctg

SEQ ID NO: 411997 - DNA, 55 bp, Artificial
  Synthetic oligonucleotide
gcgaccggtggacctggatacactcacgtgggtggtcccgttcatacgtggcgca

SEQ ID NO: 411998 - DNA, 55 bp, Artificial
  Synthetic oligonucleotide
gcgaccgttattggtttggagtgacgcccggacattcctgacaagaccggattcg

SEQ ID NO: 411999 - DNA, 60 bp, Artificial
  Synthetic oligonucleotide
gcgacctaaaacagtatgatagtgatgagccagagcctagatcgctagcaagctggatcc

SEQ ID NO: 412000 - DNA, 55 bp, Artificial
  Synthetic oligonucleotide
gcgacctaaacaaaatgtaacactcctacaatggagtctgacaagattgtgttca

SEQ ID NO: 412001 - DNA, 56 bp, Artificial
  Synthetic oligonucleotide
gcgacctaggcttctagcccaggttgatttccctgtccttgtaggcccgacgatgt

SEQ ID NO: 412002 - DNA, 60 bp, Artificial
  Synthetic oligonucleotide
gcgacctgacctcagataaagcagtagggtatatcacatctgcagtgccctaccggtctg

SEQ ID NO: 412003 - DNA, 55 bp, Artificial
  Synthetic oligonucleotide
gcgacctgcagatatcgtcatctctactccgagctcgaaggtacgccgtcgtctg

SEQ ID NO: 412004 - DNA, 59 bp, Artificial
  Synthetic oligonucleotide
gcgacctgcagcatggcggacaataaaggtagtggtcctgaagggttaagtgattggtg

SEQ ID NO: 412005 - DNA, 55 bp, Artificial
  Synthetic oligonucleotide
gcgacctggccagaaggatccttcggtggggatttgacaagtactccaagtggta

SEQ ID NO: 412006 - DNA, 60 bp, Artificial
  Synthetic oligonucleotide
gcgacctgtgtcaacggcgcgtgctggactgtctttcacggtgcgggctcaaagacctta

SEQ ID NO: 412007 - DNA, 60 bp, Artificial
  Synthetic oligonucleotide
gcgaccttagagcgacactaatgacctgcatttatgctgcccggatacagcgacacatct

SEQ ID NO: 412008 - DNA, 58 bp, Artificial
  Synthetic oligonucleotide
gcgacgaacagctaattaaatggctgggaacagacgaccccgccaaactacagcagcg

SEQ ID NO: 412009 - DNA, 50 bp, Artificial
  Synthetic oligonucleotide
gcgacgaagacctactccagacagtcagactcatcaggtttctctaccaa

SEQ ID NO: 412010 - DNA, 55 bp, Artificial
  Synthetic oligonucleotide
gcgacgaagagcttcttcgagcagtcaggatcatcaagatcttgtaccaaagcag

SEQ ID NO: 412011 - DNA, 55 bp, Artificial
  Synthetic oligonucleotide
gcgacgaagcgctcctccaagctgtaaggatcatcaaaatcctctaccagagcag

SEQ ID NO: 412012 - DNA, 55 bp, Artificial
  Synthetic oligonucleotide
gcgacgaatcgtactcaactgtcatcactactatcgagctcgaattccccatggc

SEQ ID NO: 412013 - DNA, 59 bp, Artificial
  Synthetic oligonucleotide
gcgacgacccagtaatactaacaaggcccaagaagatggcaagatgtctactcaacgta

SEQ ID NO: 412014 - DNA, 58 bp, Artificial
  Synthetic oligonucleotide
gcgacgacctagtcgttatctgtgaaagtcagggagtccaggaggacgcggcgagcct

SEQ ID NO: 412015 - DNA, 55 bp, Artificial
  Synthetic oligonucleotide
gcgacgagagatcctcgtctgcccaattactaacgatgagtcacaccttaatctc

SEQ ID NO: 412016 - DNA, 55 bp, Artificial
  Synthetic oligonucleotide
gcgacgagtctgcttctaagtctgcttctgtgtactacagtcagctgatgtgcca

SEQ ID NO: 412017 - DNA, 55 bp, Artificial
  Synthetic oligonucleotide
gcgacgagttgtcgccgcttataagacacataggcgctgtggggtgcaaatcccc

SEQ ID NO: 412018 - DNA, 55 bp, Artificial
  Synthetic oligonucleotide
gcgacgataagtggaatgtcaaaccatctcttgaaaagaagaacattcaatccag

SEQ ID NO: 412019 - DNA, 56 bp, Artificial
  Synthetic oligonucleotide
gcgacgatggtgtacaacgaaagggagttcgtaaataggaaattacaccatatcgc

SEQ ID NO: 412020 - DNA, 56 bp, Artificial
  Synthetic oligonucleotide
gcgacgattggagtgctagcgacgccagaaatccctttcacgacggaggctgcgaa

SEQ ID NO: 412021 - DNA, 55 bp, Artificial
  Synthetic oligonucleotide
gcgacgcagacgaatgcttggccatgtgtcacatgtcgcacgaacaggcgcttgc

SEQ ID NO: 412022 - DNA, 60 bp, Artificial
  Synthetic oligonucleotide
gcgacgcagatggatcacaatttgatagttcactatcaccatacttgatcaacgcagtgc

SEQ ID NO: 412023 - DNA, 60 bp, Artificial
  Synthetic oligonucleotide
gcgacgcaggctttgggcgtctttcaagcgcaagtgcgagtaaagtagcctacacattgc

SEQ ID NO: 412024 - DNA, 60 bp, Artificial
  Synthetic oligonucleotide
gcgacgcatcaatcacgtacgactacttcctatcgctcatttgcggagcaatgcacgagg

SEQ ID NO: 412025 - DNA, 60 bp, Artificial
  Synthetic oligonucleotide
gcgacgccctcagtttggaacaaaaacagtcagctgtattcgaatatatggctcaacaag

SEQ ID NO: 412026 - DNA, 60 bp, Artificial
  Synthetic oligonucleotide
gcgacgcggcgtcatcagtcacgtgtcgcccgcaggccaacccgcgtgttctacgtgcac

SEQ ID NO: 412027 - DNA, 57 bp, Artificial
  Synthetic oligonucleotide
gcgacgcgggtccatgccggactgtacagaaggacgccgtacacagaaccgtccgga

SEQ ID NO: 412028 - DNA, 55 bp, Artificial
  Synthetic oligonucleotide
gcgacgcgtacagtgccgagggtatatcaagcggcgctgcactggactttggctg

SEQ ID NO: 412029 - DNA, 55 bp, Artificial
  Synthetic oligonucleotide
gcgacgcgtgttgatctccgccaaaagattgacgtgctgaagtctctgttcatgc

SEQ ID NO: 412030 - DNA, 55 bp, Artificial
  Synthetic oligonucleotide
gcgacgctgaacctctacccgaagatttcgacgagtatgtggaccaacacccgtc

SEQ ID NO: 412031 - DNA, 60 bp, Artificial
  Synthetic oligonucleotide
gcgacggaccttcgtactctacagcagatgctgttgggcacattacaagttgtgtgcccc

SEQ ID NO: 412032 - DNA, 55 bp, Artificial
  Synthetic oligonucleotide
gcgacggattatgatctcaaacctggaactcactttacgatgccagaaaacttcc

SEQ ID NO: 412033 - DNA, 57 bp, Artificial
  Synthetic oligonucleotide
gcgacggccgaaccgtgttagccatacacgtagtaggactagcagacgggaggacta

SEQ ID NO: 412034 - DNA, 55 bp, Artificial
  Synthetic oligonucleotide
gcgacgggcccctgcctttaaggttggttcacgacgctacaaatcacacgttcca

SEQ ID NO: 412035 - DNA, 57 bp, Artificial
  Synthetic oligonucleotide
gcgacgggtgatataaacgtacccgatgacgagagttcagtcgcctcacaaacttac

SEQ ID NO: 412036 - DNA, 50 bp, Artificial
  Synthetic oligonucleotide
gcgacggttcagccgaccgttctgagttccgcgaccttgcagtaggactg

SEQ ID NO: 412037 - DNA, 55 bp, Artificial
  Synthetic oligonucleotide
gcgacgtaacaggtcctccaggacgcaaatcaagaagttgtgttacaggataatc

SEQ ID NO: 412038 - DNA, 49 bp, Artificial
  Synthetic oligonucleotide
gcgacgtaagtttatttttagaagtttaaagtatactaaacgtttaatc

SEQ ID NO: 412039 - DNA, 56 bp, Artificial
  Synthetic oligonucleotide
gcgacgtaatgaaccgtgccatatggggagataataggtttaaactagtaagagga

SEQ ID NO: 412040 - DNA, 55 bp, Artificial
  Synthetic oligonucleotide
gcgacgtaggcggaagtagtaaatacggctactcctcctgtggccacgtaggttc

SEQ ID NO: 412041 - DNA, 58 bp, Artificial
  Synthetic oligonucleotide
gcgacgtatcctcgcaagtcgatctttatagcaatgtaatactaaattacattggata

SEQ ID NO: 412042 - DNA, 54 bp, Artificial
  Synthetic oligonucleotide
gcgacgtccaggcattcgagggcggcgttatctaccggaagtacggccagcccg

SEQ ID NO: 412043 - DNA, 60 bp, Artificial
  Synthetic oligonucleotide
gcgacgtccggtctctactgtattgcaacatccagaggcgcgagcgaaggttcaaatgct

SEQ ID NO: 412044 - DNA, 52 bp, Artificial
  Synthetic oligonucleotide
gcgacgtgcgactgaaccggacgtgttggcatcggttcgtctcttggatcct

SEQ ID NO: 412045 - DNA, 57 bp, Artificial
  Synthetic oligonucleotide
gcgacgttcatcaaacgttttcctcacaatccacgcgactgggacaggctcccctac

SEQ ID NO: 412046 - DNA, 55 bp, Artificial
  Synthetic oligonucleotide
gcgactaagaacgtctttcgtagagagcttatagctttaactaccaagtcaggtc

SEQ ID NO: 412047 - DNA, 50 bp, Artificial
  Synthetic oligonucleotide
gcgactaaggtgccatacacctactatcgtgactacactgacacgctaca

SEQ ID NO: 412048 - DNA, 55 bp, Artificial
  Synthetic oligonucleotide
gcgactacacattcatggattcccaagaggaatcgttccattctcaacaccagcc

SEQ ID NO: 412049 - DNA, 59 bp, Artificial
  Synthetic oligonucleotide
gcgactacacggatcgcatgcccgagtcccagcacctgccggcgacggacaacccgtcc

SEQ ID NO: 412050 - DNA, 53 bp, Artificial
  Synthetic oligonucleotide
gcgactaccccgggtgggatagccccgcctaggacgcatgacgaaacgctatt

SEQ ID NO: 412051 - DNA, 55 bp, Artificial
  Synthetic oligonucleotide
gcgactacttcattgactgcgtattggccattcctgctgggtggcggtgctatcg

SEQ ID NO: 412052 - DNA, 50 bp, Artificial
  Synthetic oligonucleotide
gcgactagactcttggccctcgctttgtccccctagccctgcgggcttgt

SEQ ID NO: 412053 - DNA, 54 bp, Artificial
  Synthetic oligonucleotide
gcgactagcgagagtctatcctcgttggagtatattgacttcgtgctagacccg

SEQ ID NO: 412054 - DNA, 60 bp, Artificial
  Synthetic oligonucleotide
gcgactagttcagtgctgtgcggtcttcagtttattatcgatgccgagtgacgacggcta

SEQ ID NO: 412055 - DNA, 53 bp, Artificial
  Synthetic oligonucleotide
gcgactattgcatgaaagaggaaactagggtttccggtcccttcgaatttggg

SEQ ID NO: 412056 - DNA, 60 bp, Artificial
  Synthetic oligonucleotide
gcgactatttgccctctcagcgcctggagaggaaggacgcgtaaacactgagcgtcacac

SEQ ID NO: 412057 - DNA, 55 bp, Artificial
  Synthetic oligonucleotide
gcgactcaatctgtccaagcctggaagcagggatttctgactaaaatccagacgt

SEQ ID NO: 412058 - DNA, 60 bp, Artificial
  Synthetic oligonucleotide
gcgactcatacactgtcctatcatatgcagacgatgttaagagcgtgacggaagtgccga

SEQ ID NO: 412059 - DNA, 59 bp, Artificial
  Synthetic oligonucleotide
gcgactcctccccagagaccaccccttgactccttatatcaaaactcagacatggccac

SEQ ID NO: 412060 - DNA, 55 bp, Artificial
  Synthetic oligonucleotide
gcgactcgagctcaatttgcaaagatagacaactggaaggagtggagcgtggctg

SEQ ID NO: 412061 - DNA, 55 bp, Artificial
  Synthetic oligonucleotide
gcgactcggaagacttcggagcggtcgcaacctcgtggaaggcgccaacctatcc

SEQ ID NO: 412062 - DNA, 55 bp, Artificial
  Synthetic oligonucleotide
gcgactgcaccagtggataagctcggattgtactactccatgctctgactcctgg

SEQ ID NO: 412063 - DNA, 56 bp, Artificial
  Synthetic oligonucleotide
gcgactgccgccaacgacgctacgacaggtcttaagaacctcgctaacgttacacc

SEQ ID NO: 412064 - DNA, 55 bp, Artificial
  Synthetic oligonucleotide
gcgactgctaaacgattgcaagaatactttgatacagctgggaaagatggagtaa

SEQ ID NO: 412065 - DNA, 53 bp, Artificial
  Synthetic oligonucleotide
gcgactgggcgtcccgcagtacgtttaaactgtagggactatcctctagtctc

SEQ ID NO: 412066 - DNA, 55 bp, Artificial
  Synthetic oligonucleotide
gcgactggtaagagaccactgcttaacgctcaataaagcctgcctgagagtgtta

SEQ ID NO: 412067 - DNA, 55 bp, Artificial
  Synthetic oligonucleotide
gcgactggtcgccgaatccttgattgacatcacttgctcacgtcagccaatcagt

SEQ ID NO: 412068 - DNA, 60 bp, Artificial
  Synthetic oligonucleotide
gcgactggtgagcacgaaacgatttcttatcatgaagagttggagtccattcaggagcac

SEQ ID NO: 412069 - DNA, 58 bp, Artificial
  Synthetic oligonucleotide
gcgactgtaccaaagacagttatctctggtcttaaaatttgtgcctcctccattggag

SEQ ID NO: 412070 - DNA, 55 bp, Artificial
  Synthetic oligonucleotide
gcgactgtggagggaataccgaacccgtcgacgactgaggtcagcgtagtcctcg

SEQ ID NO: 412071 - DNA, 55 bp, Artificial
  Synthetic oligonucleotide
gcgactgtgtctacaaagtgctcaataagctcaagaatgtcatgggagttgttga

SEQ ID NO: 412072 - DNA, 52 bp, Artificial
  Synthetic oligonucleotide
gcgactgttaccacccgatggtacgtcgttaacagaattacgtcgtgttgcc

SEQ ID NO: 412073 - DNA, 55 bp, Artificial
  Synthetic oligonucleotide
gcgactgttcaagcgattcacagtctcagacaccccagtgtgcttcaaaggcctc

SEQ ID NO: 412074 - DNA, 55 bp, Artificial
  Synthetic oligonucleotide
gcgactgtttggaaggcgtcgtgtcgcagggcgggcgcaactcgtggctgacgca

SEQ ID NO: 412075 - DNA, 57 bp, Artificial
  Synthetic oligonucleotide
gcgacttacaacattggcctaggacaatatctcgaggatgaggccctcctgtaccgt

SEQ ID NO: 412076 - DNA, 58 bp, Artificial
  Synthetic oligonucleotide
gcgacttaggctgtgtcggattacaattactgttaatacattcatggaccgtagtcct

SEQ ID NO: 412077 - DNA, 55 bp, Artificial
  Synthetic oligonucleotide
gcgacttgatgatatcagcaggggtcttcacgggaggaattcttatgatgtggtg

SEQ ID NO: 412078 - DNA, 55 bp, Artificial
  Synthetic oligonucleotide
gcgacttggcagagttggaagaacgaaaccaggttgcgcattgagaattggtcac

SEQ ID NO: 412079 - DNA, 55 bp, Artificial
  Synthetic oligonucleotide
gcgagaaacaagcatcacattcacacagagctcatagcagagcggcaagatcctc

SEQ ID NO: 412080 - DNA, 55 bp, Artificial
  Synthetic oligonucleotide
gcgagaaagctttccgacgaatgctccagaagccgaaccctagcgaagagccttt

SEQ ID NO: 412081 - DNA, 58 bp, Artificial
  Synthetic oligonucleotide
gcgagaaaggtgcggttgaacagcctcataaaccagcgttcaaaactgaacgttggca

SEQ ID NO: 412082 - DNA, 51 bp, Artificial
  Synthetic oligonucleotide
gcgagaacaggaaggaaggggagccaaagagactcactatatatagctgga

SEQ ID NO: 412083 - DNA, 60 bp, Artificial
  Synthetic oligonucleotide
gcgagaacatctcagtgctcgaaggggcgaagtcacagttactcgagtttagaaacctga

SEQ ID NO: 412084 - DNA, 52 bp, Artificial
  Synthetic oligonucleotide
gcgagaacattatccccaacgcatctctggtaaaacaattggcacatggcgt

SEQ ID NO: 412085 - DNA, 60 bp, Artificial
  Synthetic oligonucleotide
gcgagaacgcagtggattctcacagtgttcttaagtggactagcctagtcggatgctagg

SEQ ID NO: 412086 - DNA, 57 bp, Artificial
  Synthetic oligonucleotide
gcgagaacgtcagttgttcctgagtagtcaatatctgtgcttgggtagttcgctcca

SEQ ID NO: 412087 - DNA, 54 bp, Artificial
  Synthetic oligonucleotide
gcgagaactctgaaaatttacaataggggttcgatggatactttaattctaatt

SEQ ID NO: 412088 - DNA, 55 bp, Artificial
  Synthetic oligonucleotide
gcgagaatccatatgacgcacagtcaattcctaaatagtaagagcagccgcaagg

SEQ ID NO: 412089 - DNA, 52 bp, Artificial
  Synthetic oligonucleotide
gcgagaattgttagacctcgaaaaggtcgtttattcgacgtcaaaactaccg

SEQ ID NO: 412090 - DNA, 54 bp, Artificial
  Synthetic oligonucleotide
gcgagacaatctaatatgcaccggttgatgacaactgcttccatacttgatcta

SEQ ID NO: 412091 - DNA, 55 bp, Artificial
  Synthetic oligonucleotide
gcgagacagtctcgggtcggtcaaggagatgaaaccctccgggcactcctgcatc

SEQ ID NO: 412092 - DNA, 58 bp, Artificial
  Synthetic oligonucleotide
gcgagaccaaatgccaaactcccttgggagcaataaatacaacattgccctttcacaa

SEQ ID NO: 412093 - DNA, 56 bp, Artificial
  Synthetic oligonucleotide
gcgagaccaatggtacgccgtggcttcaggggtgtggctggttaccacacccggta

SEQ ID NO: 412094 - DNA, 55 bp, Artificial
  Synthetic oligonucleotide
gcgagaccgttgagattccatccctgcccaaaggcttcaaagtatcaagcgattt

SEQ ID NO: 412095 - DNA, 54 bp, Artificial
  Synthetic oligonucleotide
gcgagacctcaccctactccctaggtttcggcgtacacgccagaactgctcgca

SEQ ID NO: 412096 - DNA, 55 bp, Artificial
  Synthetic oligonucleotide
gcgagacctcttggtcccgacgataagataggggctatggtcggcgatccgcgtg

SEQ ID NO: 412097 - DNA, 55 bp, Artificial
  Synthetic oligonucleotide
gcgagacgacgtcacgcactcatatcaggtgtatggttcgtacacaactcctcgc

SEQ ID NO: 412098 - DNA, 55 bp, Artificial
  Synthetic oligonucleotide
gcgagacgccaccgggtaggagtatatctctggaagactcacatagacccggcaa

SEQ ID NO: 412099 - DNA, 60 bp, Artificial
  Synthetic oligonucleotide
gcgagacgctaccatggctatcgctgtaggtagccggaattccattcctaggaggtttga

SEQ ID NO: 412100 - DNA, 55 bp, Artificial
  Synthetic oligonucleotide
gcgagactagggagaggatatatgttcgagagtaagagcatgaagctgcggacac

SEQ ID NO: 412101 - DNA, 55 bp, Artificial
  Synthetic oligonucleotide
gcgagactggagggcagatccagatgtgtgaggataacaggagctccagtgaaga

SEQ ID NO: 412102 - DNA, 55 bp, Artificial
  Synthetic oligonucleotide
gcgagactgggagactcggtagttacgaatggaggattaagtgggccctacgcac

SEQ ID NO: 412103 - DNA, 55 bp, Artificial
  Synthetic oligonucleotide
gcgagagaaaccgcgtgtcaacaatacaacagttgacgaagagattctcacttgg

SEQ ID NO: 412104 - DNA, 53 bp, Artificial
  Synthetic oligonucleotide
gcgagagaaactctatgatggctaactacggatggcgcaccccgctcggcttt

SEQ ID NO: 412105 - DNA, 55 bp, Artificial
  Synthetic oligonucleotide
gcgagagaatggtccagcatcagaattttcggttagcaagctcatagcagatctt

SEQ ID NO: 412106 - DNA, 57 bp, Artificial
  Synthetic oligonucleotide
gcgagagacgcattgagtagtgaagcattaggaccccgaaatcggttagggcttagt

SEQ ID NO: 412107 - DNA, 55 bp, Artificial
  Synthetic oligonucleotide
gcgagagactatgaggacatggaggggacccagctccgatgacgctattgttatc

SEQ ID NO: 412108 - DNA, 60 bp, Artificial
  Synthetic oligonucleotide
gcgagagacttgcagataggaagatcgctgaacttttctcaactaagacacacattggat

SEQ ID NO: 412109 - DNA, 60 bp, Artificial
  Synthetic oligonucleotide
gcgagagagcaagacaagagagcaacggggctagcgagtggatgttccgcccctcgttgg

SEQ ID NO: 412110 - DNA, 54 bp, Artificial
  Synthetic oligonucleotide
gcgagagagctgcactctacgcttcatataggagcccgagcactatcccgtacc

SEQ ID NO: 412111 - DNA, 55 bp, Artificial
  Synthetic oligonucleotide
gcgagagagtcgcaaaggaacggagtagctccacaatctgaagcgttgaggaaac

SEQ ID NO: 412112 - DNA, 52 bp, Artificial
  Synthetic oligonucleotide
gcgagagatctttacagaagtgggtcctggttctatacacgtggaggatctg

SEQ ID NO: 412113 - DNA, 59 bp, Artificial
  Synthetic oligonucleotide
gcgagagcattgtggatatctctcaagtgatcgttctagtttttgacttgatatttgag

SEQ ID NO: 412114 - DNA, 60 bp, Artificial
  Synthetic oligonucleotide
gcgagagccgcgtgggaaacagcaagacacactccagtcaattcctggctaggtaacata

SEQ ID NO: 412115 - DNA, 58 bp, Artificial
  Synthetic oligonucleotide
gcgagagcctcattgttgtcagggaagaagctagacgcatgggaatcagttaggttac

SEQ ID NO: 412116 - DNA, 55 bp, Artificial
  Synthetic oligonucleotide
gcgagagcgaccgccactgatgcacgctgcatcacgggttcacctccgctctcat

SEQ ID NO: 412117 - DNA, 55 bp, Artificial
  Synthetic oligonucleotide
gcgagagcttaagattgctgggagattcttctccctgatgtcatggcaattgaga

SEQ ID NO: 412118 - DNA, 60 bp, Artificial
  Synthetic oligonucleotide
gcgagaggacacgtgtagaaactactatggtgaaggagtatagggataagatcgatgctt

SEQ ID NO: 412119 - DNA, 60 bp, Artificial
  Synthetic oligonucleotide
gcgagaggacccctgaagagcttaccagctgggcagccgagcactggaacttcaatcgca

SEQ ID NO: 412120 - DNA, 55 bp, Artificial
  Synthetic oligonucleotide
gcgagagggtgaagtattcgttgtgtccaaggcaggtaaagaagatacgcgagtc

SEQ ID NO: 412121 - DNA, 58 bp, Artificial
  Synthetic oligonucleotide
gcgagaggtgcacgaactaggctgctggcaccgttcttctctggcagtgggacagctt

SEQ ID NO: 412122 - DNA, 55 bp, Artificial
  Synthetic oligonucleotide
gcgagagtactcaggcattcgctggttgcacactttcaaggagtatagagagcat

SEQ ID NO: 412123 - DNA, 54 bp, Artificial
  Synthetic oligonucleotide
gcgagagttctaccagaaacacacccctctggtagtcacccccgcaaacaaagg

SEQ ID NO: 412124 - DNA, 60 bp, Artificial
  Synthetic oligonucleotide
gcgagatactcacaaggaccaccgtggaccatatggccataatcaagaaatacacatcgg

SEQ ID NO: 412125 - DNA, 51 bp, Artificial
  Synthetic oligonucleotide
gcgagatatcctcgagtgagtagttctcatcgtagtgaacgggttcgctat

SEQ ID NO: 412126 - DNA, 60 bp, Artificial
  Synthetic oligonucleotide
gcgagatcaggtgacgatccaagcccaaagaggctggtggtgtattcctcactaaggtgt

SEQ ID NO: 412127 - DNA, 58 bp, Artificial
  Synthetic oligonucleotide
gcgagatcgagtacggtatacctttgtttgtcagagacgcgctagtaccacgtattaa

SEQ ID NO: 412128 - DNA, 55 bp, Artificial
  Synthetic oligonucleotide
gcgagatcgccacacagtgtaccagttgcctccgggcgtgtgtcccaaggggaaa

SEQ ID NO: 412129 - DNA, 60 bp, Artificial
  Synthetic oligonucleotide
gcgagatctacggagcctgctactccatagaaccactagatctacctccaatcattcaaa

SEQ ID NO: 412130 - DNA, 55 bp, Artificial
  Synthetic oligonucleotide
gcgagatcttataccagcagtttgacgagatggaggagtgcgcctctagggcggc

SEQ ID NO: 412131 - DNA, 55 bp, Artificial
  Synthetic oligonucleotide
gcgagatgacagagataagtcagagaaactacagaaagcgatcttgaccgtcgcg

SEQ ID NO: 412132 - DNA, 55 bp, Artificial
  Synthetic oligonucleotide
gcgagatgagccagcacagccagcgtacacagcgaggcccgtctgtggcctcgat

SEQ ID NO: 412133 - DNA, 55 bp, Artificial
  Synthetic oligonucleotide
gcgagattaggaaaaggatacatgtttgagagtaaaagcatgaagctacgaacac

SEQ ID NO: 412134 - DNA, 58 bp, Artificial
  Synthetic oligonucleotide
gcgagattagggaaaggatatatgttcgaaagtaagagcatgaaactccgaacacaaa

SEQ ID NO: 412135 - DNA, 60 bp, Artificial
  Synthetic oligonucleotide
gcgagattgagcaagaagagcaacgacctgtaggccaaatctttattagatgccaatatt

SEQ ID NO: 412136 - DNA, 53 bp, Artificial
  Synthetic oligonucleotide
gcgagatttagtctatcttagattgtacaagtattccaagtgtatacggccgt

SEQ ID NO: 412137 - DNA, 55 bp, Artificial
  Synthetic oligonucleotide
gcgagattttcaacgccaaatgcaggcactagcagaaattaatcaagtatcagag

SEQ ID NO: 412138 - DNA, 55 bp, Artificial
  Synthetic oligonucleotide
gcgagcaaaatatatagaggagcgcagcgaaccgaaaacttacacgtggctgcgg

SEQ ID NO: 412139 - DNA, 60 bp, Artificial
  Synthetic oligonucleotide
gcgagcaacacaactcacgctttggtgtgtatggtaacgtgcgacgtcagcgctcaggct

SEQ ID NO: 412140 - DNA, 60 bp, Artificial
  Synthetic oligonucleotide
gcgagcaaggcagtgaagaaaattgttctgatatatctgacctaattgataatgctgaat

SEQ ID NO: 412141 - DNA, 55 bp, Artificial
  Synthetic oligonucleotide
gcgagcaagtgtttaaggcgaatgtcgctgcaatggaggggtcgagaatcggcca

SEQ ID NO: 412142 - DNA, 55 bp, Artificial
  Synthetic oligonucleotide
gcgagcaatggaacgttgcgatacacaaaggaagggtgtagaatgagcggcgaca

SEQ ID NO: 412143 - DNA, 55 bp, Artificial
  Synthetic oligonucleotide
gcgagcacagtttgctctagaagaagcagacctttggatgacaaaacccaaaacc

SEQ ID NO: 412144 - DNA, 60 bp, Artificial
  Synthetic oligonucleotide
gcgagcaccgcattgacagcctagtcacagaccaatttgctgagtgtcataaaggtaaag

SEQ ID NO: 412145 - DNA, 60 bp, Artificial
  Synthetic oligonucleotide
gcgagcactacacaaattggaactctggacatgaccactggattgtgaatcgattcataa

SEQ ID NO: 412146 - DNA, 60 bp, Artificial
  Synthetic oligonucleotide
gcgagcagatgagaggcgagcccatagaaccgtgtccagtaacagttgaatgcgtgagta

SEQ ID NO: 412147 - DNA, 51 bp, Artificial
  Synthetic oligonucleotide
gcgagcagttgccctatcagagcgctcacatgtccgtgaaacaatatgcct

SEQ ID NO: 412148 - DNA, 55 bp, Artificial
  Synthetic oligonucleotide
gcgagcatatgagctagatgacggagctatccttcagtttaaccacccttacggc

SEQ ID NO: 412149 - DNA, 52 bp, Artificial
  Synthetic oligonucleotide
gcgagcatcaccggaggacttatatagggcttgtgcacaaggtgctgactgt

SEQ ID NO: 412150 - DNA, 55 bp, Artificial
  Synthetic oligonucleotide
gcgagcatcttaaagtatcatgtggacctaaatcaatacaattccatgcttgctt

SEQ ID NO: 412151 - DNA, 60 bp, Artificial
  Synthetic oligonucleotide
gcgagccaaaacaggacaacactgaggcgcgtttcaagcacaactgtgttaagcgagcac

SEQ ID NO: 412152 - DNA, 60 bp, Artificial
  Synthetic oligonucleotide
gcgagccaacagtaaagttatatacatctgttgagaatgcgcagcaagataagggcatta

SEQ ID NO: 412153 - DNA, 60 bp, Artificial
  Synthetic oligonucleotide
gcgagccaacgcaagaagccaacaacgcaaacgctaaagcccacacgccagagcgaacgc

SEQ ID NO: 412154 - DNA, 50 bp, Artificial
  Synthetic oligonucleotide
gcgagccaacgttgacctgggagtggggtttacagctgcttacgagccgc

SEQ ID NO: 412155 - DNA, 60 bp, Artificial
  Synthetic oligonucleotide
gcgagccagagctgcgacatcccgttcctatgggtgttggcgcagcgtcggtaccggtct

SEQ ID NO: 412156 - DNA, 60 bp, Artificial
  Synthetic oligonucleotide
gcgagccctatgagtctgggttcgttggatgcgtctcaagtggagaaaatctcccgcact

SEQ ID NO: 412157 - DNA, 59 bp, Artificial
  Synthetic oligonucleotide
gcgagcctcccgatacgagtttgccaggacctatcaagattggagtcatccgggccgta

SEQ ID NO: 412158 - DNA, 55 bp, Artificial
  Synthetic oligonucleotide
gcgagcctgttttggaaactggccagcactccggtgaggtaatgccgtcacgtgg

SEQ ID NO: 412159 - DNA, 57 bp, Artificial
  Synthetic oligonucleotide
gcgagcgacgaaatggtttaaatacaggctacgagttctcctcgtagggtctcttgc

SEQ ID NO: 412160 - DNA, 55 bp, Artificial
  Synthetic oligonucleotide
gcgagcgatagaaggtgcctataaattgaaagcggtgataaccgccttgaccggg

SEQ ID NO: 412161 - DNA, 55 bp, Artificial
  Synthetic oligonucleotide
gcgagcgcgcatagagggagtggccaactccatcatctaggtttgcccactgacg

SEQ ID NO: 412162 - DNA, 55 bp, Artificial
  Synthetic oligonucleotide
gcgagcggaaaacctctgcccgtcacacgacattactcctgatgtcgaggcccac

SEQ ID NO: 412163 - DNA, 60 bp, Artificial
  Synthetic oligonucleotide
gcgagcggtacgtgcgcacagtactatcgcaccaatgttggccgagccacttaatacacg

SEQ ID NO: 412164 - DNA, 55 bp, Artificial
  Synthetic oligonucleotide
gcgagcggtggatttgatcgtatgattgtaacgaagaagcttaaatggcagaacg

SEQ ID NO: 412165 - DNA, 60 bp, Artificial
  Synthetic oligonucleotide
gcgagcgtcgtactaccatgtcccatcgtacgaacttgatgagttggaccagtcaagttg

SEQ ID NO: 412166 - DNA, 55 bp, Artificial
  Synthetic oligonucleotide
gcgagcgtctcgacggatcacgacgacaattcggccgtcatcggcagcaacaagg

SEQ ID NO: 412167 - DNA, 55 bp, Artificial
  Synthetic oligonucleotide
gcgagcgtggcgagctacgtcacgtatgcgtgcgtcatctccggcggaaatcatc

SEQ ID NO: 412168 - DNA, 60 bp, Artificial
  Synthetic oligonucleotide
gcgagctagtgtgtagagagggcaatagcttctggactagtcactatagtcccacatgtt

SEQ ID NO: 412169 - DNA, 59 bp, Artificial
  Synthetic oligonucleotide
gcgagctatattgggtgcgttaaagtttggatgcaaaatacttggagatcgattggacg

SEQ ID NO: 412170 - DNA, 55 bp, Artificial
  Synthetic oligonucleotide
gcgagctgcagatctcgtcatttctatgcacgctctgaaagtacgccggcgtctg

SEQ ID NO: 412171 - DNA, 55 bp, Artificial
  Synthetic oligonucleotide
gcgagctgccgatatagtcatttctacgcccgcgtcgaaagtacgccggcgtgtg

SEQ ID NO: 412172 - DNA, 55 bp, Artificial
  Synthetic oligonucleotide
gcgagctggacttacgataccacttcgcgtattctgtcaattaccgttagtgtgg

SEQ ID NO: 412173 - DNA, 55 bp, Artificial
  Synthetic oligonucleotide
gcgagctggtcctgttctctacgttgagacgtggccgaatatgatctcaggacga

SEQ ID NO: 412174 - DNA, 55 bp, Artificial
  Synthetic oligonucleotide
gcgagcttagacaaacgggaaaaccgcgagcagtggtagcagcaagtatcccggc

SEQ ID NO: 412175 - DNA, 55 bp, Artificial
  Synthetic oligonucleotide
gcgagcttctagatctacctcaagtaaggtaccctctaagcgccgaagaaggggc

SEQ ID NO: 412176 - DNA, 56 bp, Artificial
  Synthetic oligonucleotide
gcgagctttctttatatggaccctatggtgatacttgcggaataatgctgctgtac

SEQ ID NO: 412177 - DNA, 53 bp, Artificial
  Synthetic oligonucleotide
gcgaggaatgacactgtcacaggaattatgaacaccggtctggctttcgtgta

SEQ ID NO: 412178 - DNA, 55 bp, Artificial
  Synthetic oligonucleotide
gcgaggacagctgggctatcatcgccacaaggggtaagatgaaccacttgcaggc

SEQ ID NO: 412179 - DNA, 55 bp, Artificial
  Synthetic oligonucleotide
gcgaggacgcatcgtatcgtcatcgaatttaagaccgaagtgcctgctggggcaa

SEQ ID NO: 412180 - DNA, 60 bp, Artificial
  Synthetic oligonucleotide
gcgaggagcaaagagaatggccatattaggtgacacagcctgggattttggatccctggg

SEQ ID NO: 412181 - DNA, 55 bp, Artificial
  Synthetic oligonucleotide
gcgaggagcggaagtgccccacattgcgtgaactgccatggaaggcgtggctcaa

SEQ ID NO: 412182 - DNA, 50 bp, Artificial
  Synthetic oligonucleotide
gcgaggaggatggctctcgtgtctctccatcatgtggactctcatcaaaa

SEQ ID NO: 412183 - DNA, 55 bp, Artificial
  Synthetic oligonucleotide
gcgaggaggggttacgagtggttcgctgatgagatgcacaagccgaagggtccag

SEQ ID NO: 412184 - DNA, 55 bp, Artificial
  Synthetic oligonucleotide
gcgaggagtatctgtgaggaacttgagcaatctggactcccagttcgagggaatg

SEQ ID NO: 412185 - DNA, 55 bp, Artificial
  Synthetic oligonucleotide
gcgaggatgacgtaatatcacaaaagcgtacgtgtcaatggtgattagtgaaggc

SEQ ID NO: 412186 - DNA, 60 bp, Artificial
  Synthetic oligonucleotide
gcgaggatgactcagattatactgtccttattctggttgtcatatgtcggtgtaattcat

SEQ ID NO: 412187 - DNA, 55 bp, Artificial
  Synthetic oligonucleotide
gcgaggccatgcgtcttggggagaaaagtccaccaagatcaacccattaaggggt

SEQ ID NO: 412188 - DNA, 55 bp, Artificial
  Synthetic oligonucleotide
gcgaggcgtatgattagatcaaagacagtccatccaatctacctaggatccatgc

SEQ ID NO: 412189 - DNA, 60 bp, Artificial
  Synthetic oligonucleotide
gcgaggctcagcctgcatatacgatcaaaaggaggatggcccccgctggctccctgagcg

SEQ ID NO: 412190 - DNA, 55 bp, Artificial
  Synthetic oligonucleotide
gcgaggcttcccctttgtcgatgttggagtgtcggctctcctgctagcagccgga

SEQ ID NO: 412191 - DNA, 55 bp, Artificial
  Synthetic oligonucleotide
gcgaggctttatcactgccaatacaattctgaacgtaattgagaaattaggaacc

SEQ ID NO: 412192 - DNA, 55 bp, Artificial
  Synthetic oligonucleotide
gcgagggacgcttgggtaatccacaacttgaggcgtactctaagggagacttcgc

SEQ ID NO: 412193 - DNA, 55 bp, Artificial
  Synthetic oligonucleotide
gcgagggattagcaaagttctcgaagatagccatgccaaattggacggtttcggg

SEQ ID NO: 412194 - DNA, 55 bp, Artificial
  Synthetic oligonucleotide
gcgagggcgcgggttacagaggtaccgatgagtctgaatataagacgaagagagt

SEQ ID NO: 412195 - DNA, 55 bp, Artificial
  Synthetic oligonucleotide
gcgagggcgctaaccgtaatgcgggcatgttcgaccctgcaagaggctaggatcg

SEQ ID NO: 412196 - DNA, 55 bp, Artificial
  Synthetic oligonucleotide
gcgagggcggccgtttcatgcggcctctcatacacaggggacaataccgcatggt

SEQ ID NO: 412197 - DNA, 55 bp, Artificial
  Synthetic oligonucleotide
gcgagggggaaagtaaagagagcaacggggctagcgagtggatgttccgcctccc

SEQ ID NO: 412198 - DNA, 55 bp, Artificial
  Synthetic oligonucleotide
gcgaggggtagacatgcatcttcggggtccactactctacaaattactttaggaa

SEQ ID NO: 412199 - DNA, 58 bp, Artificial
  Synthetic oligonucleotide
gcgagggtcgttccagcaggggcacagacgaacggcgtagagcgtactgccggtgttc

SEQ ID NO: 412200 - DNA, 60 bp, Artificial
  Synthetic oligonucleotide
gcgagggtgccatatttgccttccaactcgacccgggcagtggatcagttctcaaacgca

SEQ ID NO: 412201 - DNA, 54 bp, Artificial
  Synthetic oligonucleotide
gcgagggtggccctccgaattcccagttgtggttaaggtcgtagtatgttgtac

SEQ ID NO: 412202 - DNA, 55 bp, Artificial
  Synthetic oligonucleotide
gcgagggttccgaagacccctaaactacaacaattgcacacttacacaacttctc

SEQ ID NO: 412203 - DNA, 52 bp, Artificial
  Synthetic oligonucleotide
gcgaggtaccgtcgacggaggacttggtcaatctgctcccggctatactatc

SEQ ID NO: 412204 - DNA, 60 bp, Artificial
  Synthetic oligonucleotide
gcgaggtagatccacggaggagctgatctttggtcctggtgagaggccagccgtcgcttc

SEQ ID NO: 412205 - DNA, 55 bp, Artificial
  Synthetic oligonucleotide
gcgaggtaggacaaagaacggacgagctgtcgcactcaaggggattgattcacac

SEQ ID NO: 412206 - DNA, 55 bp, Artificial
  Synthetic oligonucleotide
gcgaggtattgcactctaaactacttctagcagaatgtcaccaattccatcatcc

SEQ ID NO: 412207 - DNA, 55 bp, Artificial
  Synthetic oligonucleotide
gcgaggtgtcgctagccagagtactaacgagacatctcgccattatggacgcagg

SEQ ID NO: 412208 - DNA, 55 bp, Artificial
  Synthetic oligonucleotide
gcgaggtgtgatcgtttaccccagcaggtggtcggctaattcatggctaatctta

SEQ ID NO: 412209 - DNA, 55 bp, Artificial
  Synthetic oligonucleotide
gcgaggtgtgggtcaggcccttggctcactccccgatgtctagtgaactatcctt

SEQ ID NO: 412210 - DNA, 54 bp, Artificial
  Synthetic oligonucleotide
gcgaggttagtaaatcctcgtcaaaccatttaaaccaattacggaacatcagaa

SEQ ID NO: 412211 - DNA, 59 bp, Artificial
  Synthetic oligonucleotide
gcgaggttagttatcttaaccacacgactattagcctcccggcagtccacacgtcatgc

SEQ ID NO: 412212 - DNA, 55 bp, Artificial
  Synthetic oligonucleotide
gcgaggttatacctccgagattatttggaagggcttctgcgacacactcacagag

SEQ ID NO: 412213 - DNA, 55 bp, Artificial
  Synthetic oligonucleotide
gcgaggttggacaaatgaggatggctcaccccgctacaacccaacatgggcgacc

SEQ ID NO: 412214 - DNA, 55 bp, Artificial
  Synthetic oligonucleotide
gcgaggtttagttggggagggccaacggcatttttccgcgagattcgtctcatat

SEQ ID NO: 412215 - DNA, 55 bp, Artificial
  Synthetic oligonucleotide
gcgaggtttcacctccaacattttaaattcagtatgtgtatcattctctctactc

SEQ ID NO: 412216 - DNA, 57 bp, Artificial
  Synthetic oligonucleotide
gcgaggtttcccccgaactgattaaagccatatacatcggtgagcccatcacctcgg

SEQ ID NO: 412217 - DNA, 51 bp, Artificial
  Synthetic oligonucleotide
gcgagtaacctgttatgatgctcgtaatatccgcgagtacaccccgaacaa

SEQ ID NO: 412218 - DNA, 55 bp, Artificial
  Synthetic oligonucleotide
gcgagtaaggaacaggctttggtcaagaagtttgtcagggttaacaattatgttg

SEQ ID NO: 412219 - DNA, 60 bp, Artificial
  Synthetic oligonucleotide
gcgagtaccactctcaatcgaaagactcatccaatcaccgccttccctccgaaactctca

SEQ ID NO: 412220 - DNA, 55 bp, Artificial
  Synthetic oligonucleotide
gcgagtactacccctcatcgtttatatggtcggtagaggacgccagctacatggg

SEQ ID NO: 412221 - DNA, 60 bp, Artificial
  Synthetic oligonucleotide
gcgagtaggacagactcttcagtctgattctgtggaaatgagagtaattctgacatagca

SEQ ID NO: 412222 - DNA, 60 bp, Artificial
  Synthetic oligonucleotide
gcgagtagtggccatcgtgttaggcggggccaacgaaggtgctcgcactgcgctgtctgt

SEQ ID NO: 412223 - DNA, 58 bp, Artificial
  Synthetic oligonucleotide
gcgagtagtgtgtgtggcccggtatactgtttcactcctagccctgtggtggtgggaa

SEQ ID NO: 412224 - DNA, 55 bp, Artificial
  Synthetic oligonucleotide
gcgagtatagtggctccagaagtaacatacaactagtgacggcggacgtgcatgc

SEQ ID NO: 412225 - DNA, 54 bp, Artificial
  Synthetic oligonucleotide
gcgagtatcaaaacatttggttacatttaaaggtcagccttataattgggaacg

SEQ ID NO: 412226 - DNA, 50 bp, Artificial
  Synthetic oligonucleotide
gcgagtatccaagccggggaggtacggcaccttgggcaacctatcttgga

SEQ ID NO: 412227 - DNA, 55 bp, Artificial
  Synthetic oligonucleotide
gcgagtatgaaatcttcaagtacgtggtgcggtgttaggtttccatagtcgacgt

SEQ ID NO: 412228 - DNA, 55 bp, Artificial
  Synthetic oligonucleotide
gcgagtatgagaaggaattacttcacagcagaagtgtcacactgccgggctactg

SEQ ID NO: 412229 - DNA, 60 bp, Artificial
  Synthetic oligonucleotide
gcgagtcaataatagtagaacttggtgatccaaacgcacttttgaagcacagatttgaaa

SEQ ID NO: 412230 - DNA, 57 bp, Artificial
  Synthetic oligonucleotide
gcgagtcactgagacgagaaacgctcgacgtgacacctacgtaggcgttcgctggga

SEQ ID NO: 412231 - DNA, 55 bp, Artificial
  Synthetic oligonucleotide
gcgagtcagagttccacgctaacaatgcaaggccaaacggtttggatggtcgatg

SEQ ID NO: 412232 - DNA, 55 bp, Artificial
  Synthetic oligonucleotide
gcgagtccaccgagtttacaattacacgagtccatcgagtttacaattacacgag

SEQ ID NO: 412233 - DNA, 55 bp, Artificial
  Synthetic oligonucleotide
gcgagtccagattgttacatctgaaaagagttactggcatgtgtatgatcctgac

SEQ ID NO: 412234 - DNA, 55 bp, Artificial
  Synthetic oligonucleotide
gcgagtccagatttggaagattagaaaacatttgtgtatccccaacgctttcctc

SEQ ID NO: 412235 - DNA, 58 bp, Artificial
  Synthetic oligonucleotide
gcgagtcccggaaatacccgatgtcaagcacttcggaccatcagcccaatcaattaaa

SEQ ID NO: 412236 - DNA, 58 bp, Artificial
  Synthetic oligonucleotide
gcgagtcgaaaatcaaccgcatggaggccaactcgaccatctactctgtccccggcga

SEQ ID NO: 412237 - DNA, 60 bp, Artificial
  Synthetic oligonucleotide
gcgagtcgacatgggaaagatagagagtgaaaattcatgcaaattgaggcaaataatcga

SEQ ID NO: 412238 - DNA, 55 bp, Artificial
  Synthetic oligonucleotide
gcgagtctcgtttgagaggccacgctcgcaccatgctcggacggtctctgccaaa

SEQ ID NO: 412239 - DNA, 55 bp, Artificial
  Synthetic oligonucleotide
gcgagtctggatacatcgggccaaaagtgtccgcgctaagctactgtcccagggg

SEQ ID NO: 412240 - DNA, 60 bp, Artificial
  Synthetic oligonucleotide
gcgagtgagcgttcgtgactgattgcattgacggtctcctaacagtaagaataaggcgta

SEQ ID NO: 412241 - DNA, 55 bp, Artificial
  Synthetic oligonucleotide
gcgagtgagctcttcctcgttgcagccgtgatcgcacagtgtatccataacaatg

SEQ ID NO: 412242 - DNA, 55 bp, Artificial
  Synthetic oligonucleotide
gcgagtgatgaaagacacaacgataagtattgaagcaaaggcgttgtacagttac

SEQ ID NO: 412243 - DNA, 55 bp, Artificial
  Synthetic oligonucleotide
gcgagtgcatatattgttgggagcatgacgctcagtgtcaggccaggaggagaga

SEQ ID NO: 412244 - DNA, 55 bp, Artificial
  Synthetic oligonucleotide
gcgagtgccccgggaggtctcgtagaccgtgcaacatgagcacacttcctaaacc

SEQ ID NO: 412245 - DNA, 60 bp, Artificial
  Synthetic oligonucleotide
gcgagtgccgaagctttggttcctgaattgagtgcctcggcatatgcgtcgttggcagat

SEQ ID NO: 412246 - DNA, 55 bp, Artificial
  Synthetic oligonucleotide
gcgagtgcgtctgtgttaaggggaagcaaattggatacgtgggaacaaattaggc

SEQ ID NO: 412247 - DNA, 56 bp, Artificial
  Synthetic oligonucleotide
gcgagtgcgtttcctaccagcgtcagattagtgaagggaatccttcgagcgaagac

SEQ ID NO: 412248 - DNA, 50 bp, Artificial
  Synthetic oligonucleotide
gcgagtgtaaagatgcagcgttcaggcgctccttgaagaacctatctttt

SEQ ID NO: 412249 - DNA, 58 bp, Artificial
  Synthetic oligonucleotide
gcgagtgtacttacgcatttgggtgttatgcttaatggcgtgagtaaattaggtgaac

SEQ ID NO: 412250 - DNA, 60 bp, Artificial
  Synthetic oligonucleotide
gcgagtgtatcgcactgcgcaacaacaattacgttcatgtatgtagctgcgtcaccttag

SEQ ID NO: 412251 - DNA, 60 bp, Artificial
  Synthetic oligonucleotide
gcgagtgtgcaaggtgaaatccaatgggtgaagcctaacaaggaaactggcagactgaac

SEQ ID NO: 412252 - DNA, 60 bp, Artificial
  Synthetic oligonucleotide
gcgagtgtgcatgcaggactatgaagtggctctgcatcgcatgctacgctatgtttttga

SEQ ID NO: 412253 - DNA, 53 bp, Artificial
  Synthetic oligonucleotide
gcgagtgttgttgccactctggtgcttcccttctgttagtcgacctgccgtta

SEQ ID NO: 412254 - DNA, 60 bp, Artificial
  Synthetic oligonucleotide
gcgagtgtttggatggtaggtccaaggccttactaatagattgcattacgcatcatttgt

SEQ ID NO: 412255 - DNA, 60 bp, Artificial
  Synthetic oligonucleotide
gcgagttcaggagtggcttttgcggaatgatcttgttaggcgtcgtgagatacgtgacat

SEQ ID NO: 412256 - DNA, 60 bp, Artificial
  Synthetic oligonucleotide
gcgagttgatccgtggtgcataccccatgatccagaccactagccgggttctctgttcgt

SEQ ID NO: 412257 - DNA, 55 bp, Artificial
  Synthetic oligonucleotide
gcgagttgcaatgtttgaaggattagatctcccagatgattgtgaaatcgtctcc

SEQ ID NO: 412258 - DNA, 57 bp, Artificial
  Synthetic oligonucleotide
gcgagttgcagagataaccgagtcttcaaacctaagggaaaacatcctgcaaccaat

SEQ ID NO: 412259 - DNA, 55 bp, Artificial
  Synthetic oligonucleotide
gcgagttggaatgtgaaataggcacatccgaacttgaagtcccctgcctgagtgg

SEQ ID NO: 412260 - DNA, 55 bp, Artificial
  Synthetic oligonucleotide
gcgagttggtcgtgtggtgtgctttggctgtcacccgaacccgtggtgacaggct

SEQ ID NO: 412261 - DNA, 55 bp, Artificial
  Synthetic oligonucleotide
gcgagttggtgcaaggccaggcaagtgcacctaatataaaacaacgattggccca

SEQ ID NO: 412262 - DNA, 55 bp, Artificial
  Synthetic oligonucleotide
gcgagttgttcccactcgcacttcctacgtggagtagtacactattattacggta

SEQ ID NO: 412263 - DNA, 55 bp, Artificial
  Synthetic oligonucleotide
gcgagtttacaccagcgctcaaatgttacagtctacggaggcactgcctcgacta

SEQ ID NO: 412264 - DNA, 55 bp, Artificial
  Synthetic oligonucleotide
gcgagtttattgatctttcgaaacaggatgagatacttccggcattcatgactaa

SEQ ID NO: 412265 - DNA, 55 bp, Artificial
  Synthetic oligonucleotide
gcgagtttgagattaagttgccgagtcgtaacaacgggcatgaagaggtcgtgag

SEQ ID NO: 412266 - DNA, 55 bp, Artificial
  Synthetic oligonucleotide
gcgataaaatctcgtatgatgaaagatcacacgtgcgagaacatctcagtgctcg

SEQ ID NO: 412267 - DNA, 55 bp, Artificial
  Synthetic oligonucleotide
gcgataagctttcggggcttaagcaagatccatttccctatcccgcttccctcct

SEQ ID NO: 412268 - DNA, 60 bp, Artificial
  Synthetic oligonucleotide
gcgataataaaattatcatacggcataaaaccacagccgcgatcaagcgtactaatggga

SEQ ID NO: 412269 - DNA, 60 bp, Artificial
  Synthetic oligonucleotide
gcgataatattactctacctgatttgaaagatccagagagagtcacggaagatactaaga

SEQ ID NO: 412270 - DNA, 55 bp, Artificial
  Synthetic oligonucleotide
gcgataattatcctgcctgaaaactgtttcccgactaccttgtttcaacctactc

SEQ ID NO: 412271 - DNA, 55 bp, Artificial
  Synthetic oligonucleotide
gcgatacaaatcgcgattatgtccatacttatcacctccttaggttgataacaac

SEQ ID NO: 412272 - DNA, 60 bp, Artificial
  Synthetic oligonucleotide
gcgatacagtgttcgatatggctgagtgagctaaaaacttaacacacaggtcacgatgtg

SEQ ID NO: 412273 - DNA, 59 bp, Artificial
  Synthetic oligonucleotide
gcgatacagttctaggtgtaaaatgcgggctgcagttccatttacaagtataggaatag

SEQ ID NO: 412274 - DNA, 55 bp, Artificial
  Synthetic oligonucleotide
gcgataccaactgacgaaacatatagatcgtctgaatcagctactggattggttg

SEQ ID NO: 412275 - DNA, 59 bp, Artificial
  Synthetic oligonucleotide
gcgataccagttggaccagtttttccaccaggtatgaattggactgatttgatcactaa

SEQ ID NO: 412276 - DNA, 55 bp, Artificial
  Synthetic oligonucleotide
gcgatactggcagcagccggaaagtcagacaagatctgcatcgggtatcatgcca

SEQ ID NO: 412277 - DNA, 60 bp, Artificial
  Synthetic oligonucleotide
gcgatactttctagggttcgtgtcatgagcgccttcaacatgggcgtcttgtgcctcgtt

SEQ ID NO: 412278 - DNA, 55 bp, Artificial
  Synthetic oligonucleotide
gcgatagagtgaggtctataaccctcggaaactccaccattacaacgcaagagtg

SEQ ID NO: 412279 - DNA, 55 bp, Artificial
  Synthetic oligonucleotide
gcgatagagtgctgcaattaacactgggaaactccactataaccacacaggaagc

SEQ ID NO: 412280 - DNA, 55 bp, Artificial
  Synthetic oligonucleotide
gcgatagatggagtttagggcgggatcaaagccataaattgtaccgaacttgtca

SEQ ID NO: 412281 - DNA, 56 bp, Artificial
  Synthetic oligonucleotide
gcgatagccatgtcacctgaaataacacgcgaaacctttgaaaacggaccgggaga

SEQ ID NO: 412282 - DNA, 60 bp, Artificial
  Synthetic oligonucleotide
gcgatataatccttcaagtcaggacatgatctgatccatgaaatcatagtgttaatcatg

SEQ ID NO: 412283 - DNA, 57 bp, Artificial
  Synthetic oligonucleotide
gcgatatccggtctatattcgaccagttagataaatttactaagaaggaggagattc

SEQ ID NO: 412284 - DNA, 52 bp, Artificial
  Synthetic oligonucleotide
gcgatatcggcgtaaaatttgataccagaaacttccgactggggtgggatcc

SEQ ID NO: 412285 - DNA, 55 bp, Artificial
  Synthetic oligonucleotide
gcgatatgggactgtttgggcagaacatgcaataccactacctgggaaggactgg

SEQ ID NO: 412286 - DNA, 54 bp, Artificial
  Synthetic oligonucleotide
gcgatatgtggcaaatgccccatcgcgatctggcaggggtgctgcggcatgttg

SEQ ID NO: 412287 - DNA, 60 bp, Artificial
  Synthetic oligonucleotide
gcgatattagagaagatcctactctaatatcatacggattccatggatcagacgagaaag

SEQ ID NO: 412288 - DNA, 60 bp, Artificial
  Synthetic oligonucleotide
gcgatattccagaactacgtgatctatcttcacgcatctattcctcaactggctaagctt

SEQ ID NO: 412289 - DNA, 60 bp, Artificial
  Synthetic oligonucleotide
gcgatattgagaaggttaattggaaggctgccgaacttcataacaatgctcaacacttta

SEQ ID NO: 412290 - DNA, 53 bp, Artificial
  Synthetic oligonucleotide
gcgatcaaaatacttggggaacggggaggggctcgacttcgcgataattttaa

SEQ ID NO: 412291 - DNA, 60 bp, Artificial
  Synthetic oligonucleotide
gcgatcaacaaccggctgtcataccacatgcgagtcatgttatccattctcaaccaagaa

SEQ ID NO: 412292 - DNA, 55 bp, Artificial
  Synthetic oligonucleotide
gcgatcaaccatctccaaacgagatgatgggagacgtcgatctgttaatgcaact

SEQ ID NO: 412293 - DNA, 55 bp, Artificial
  Synthetic oligonucleotide
gcgatcaacgtcaacgtgctcgctccacaacatatactaacgcttcccttgaatg

SEQ ID NO: 412294 - DNA, 55 bp, Artificial
  Synthetic oligonucleotide
gcgatcaagaagtcctccaagaaacgcaagtactccgattccagccagagcagca

SEQ ID NO: 412295 - DNA, 60 bp, Artificial
  Synthetic oligonucleotide
gcgatcaagtcaccgcaatccaaatcactggtacgatggcgactggcattcgctggtcgg

SEQ ID NO: 412296 - DNA, 55 bp, Artificial
  Synthetic oligonucleotide
gcgatcaagtgccacattcctgtttgttcaagccagactctaggtcctgagttgg

SEQ ID NO: 412297 - DNA, 58 bp, Artificial
  Synthetic oligonucleotide
gcgatcacaggcgctaaggctggtaagagtgcgggagctttagggctagtgggtggat

SEQ ID NO: 412298 - DNA, 55 bp, Artificial
  Synthetic oligonucleotide
gcgatcagagccgcatatgatgtgctgactgtccccgacaaaatccctgcaatgt

SEQ ID NO: 412299 - DNA, 60 bp, Artificial
  Synthetic oligonucleotide
gcgatcatgaaaagtgatctggagtatggtaactgtgatgtctcatgtcagaccccagtg

SEQ ID NO: 412300 - DNA, 55 bp, Artificial
  Synthetic oligonucleotide
gcgatccaccaccgctatcacagccaccacttcagtggcgcaacctaaactgtac

SEQ ID NO: 412301 - DNA, 60 bp, Artificial
  Synthetic oligonucleotide
gcgatccatcaggatgcaagatgtatgccctacaccaaggaactaccataaggaacaaac

SEQ ID NO: 412302 - DNA, 55 bp, Artificial
  Synthetic oligonucleotide
gcgatccattctccagacaatatgcgcgtaagcaaatctgtgaaacactcgaggg

SEQ ID NO: 412303 - DNA, 55 bp, Artificial
  Synthetic oligonucleotide
gcgatcccatggattagtaacgtaatgtttagaaacctccaatccattgctggcc

SEQ ID NO: 412304 - DNA, 55 bp, Artificial
  Synthetic oligonucleotide
gcgatccggaagcgttgggatggccccgtcagactgtttcccggcgttgtcgtta

SEQ ID NO: 412305 - DNA, 54 bp, Artificial
  Synthetic oligonucleotide
gcgatcctaggagctttgaaatttggatgtaaggtcttgggggaccgtttagac

SEQ ID NO: 412306 - DNA, 60 bp, Artificial
  Synthetic oligonucleotide
gcgatcctcgtatgggatacgcgcctcaggtccttaacgatggcacagtgggatgggtat

SEQ ID NO: 412307 - DNA, 50 bp, Artificial
  Synthetic oligonucleotide
gcgatcgaagcagaggaagttcgcacaaagtggccacttcacaagacacc

SEQ ID NO: 412308 - DNA, 54 bp, Artificial
  Synthetic oligonucleotide
gcgatcgaagcgccacccgaattttaatactccttgcccaacttaaataaggag

SEQ ID NO: 412309 - DNA, 55 bp, Artificial
  Synthetic oligonucleotide
gcgatcgacgaattcaatcgcgacgacgagggaagcctcggcccgaactgggatc

SEQ ID NO: 412310 - DNA, 55 bp, Artificial
  Synthetic oligonucleotide
gcgatcgacgggatcaccaataaagtcaactcaataattgataaaatgaacaccc

SEQ ID NO: 412311 - DNA, 55 bp, Artificial
  Synthetic oligonucleotide
gcgatcgataaaagactatctgacgcacaaaacatgttcgatgaatcagttgaac

SEQ ID NO: 412312 - DNA, 55 bp, Artificial
  Synthetic oligonucleotide
gcgatcgcaatcaactgacttaatcctcggttttgcaatcatatagtgagttcta

SEQ ID NO: 412313 - DNA, 55 bp, Artificial
  Synthetic oligonucleotide
gcgatcgctgagggccgtatggagctgaaggagtacacctggcctgttctccagt

SEQ ID NO: 412314 - DNA, 60 bp, Artificial
  Synthetic oligonucleotide
gcgatcgttgaattcagcagctttctactatagagtctgatatatcttagattagaattg

SEQ ID NO: 412315 - DNA, 60 bp, Artificial
  Synthetic oligonucleotide
gcgatctaaaacaatatgattgtgatgaaccggagcccagatcactagcaagctggatac

SEQ ID NO: 412316 - DNA, 55 bp, Artificial
  Synthetic oligonucleotide
gcgatctatactctcccacgggtacccacagcagctccgacaaccggaggttggt

SEQ ID NO: 412317 - DNA, 58 bp, Artificial
  Synthetic oligonucleotide
gcgatctctacagtgaccccggagcggacttctaccaacaagtacaaagtctacctca

SEQ ID NO: 412318 - DNA, 60 bp, Artificial
  Synthetic oligonucleotide
gcgatctcttcccttgtgatactccctgcttgtgatgccgacggacctggatctattgcc

SEQ ID NO: 412319 - DNA, 55 bp, Artificial
  Synthetic oligonucleotide
gcgatcttaaggttcctcaagaggagctaaataaggatcattcctgtgcggttga

SEQ ID NO: 412320 - DNA, 59 bp, Artificial
  Synthetic oligonucleotide
gcgatctttacaacaaatgtttagagaaccaagaatctcatttgaacaattctctgaac

SEQ ID NO: 412321 - DNA, 55 bp, Artificial
  Synthetic oligonucleotide
gcgatctttctgatggctggatcaaaggaggagattgttctgcaactgtgacttc

SEQ ID NO: 412322 - DNA, 60 bp, Artificial
  Synthetic oligonucleotide
gcgatgaacaaattggcaggatcggagatcattattacacaacaaattgttacactggag

SEQ ID NO: 412323 - DNA, 51 bp, Artificial
  Synthetic oligonucleotide
gcgatgaacgaagagcttatatgccgggtgtcattaattcaatagatcgta

SEQ ID NO: 412324 - DNA, 55 bp, Artificial
  Synthetic oligonucleotide
gcgatgaagagtatgggaccggaaaccagcaatgcctttgttcgtacgctgggga

SEQ ID NO: 412325 - DNA, 55 bp, Artificial
  Synthetic oligonucleotide
gcgatgaagctacgcgtgatcgggccgccatgcatgatcgcaaaagcaaggtcgc

SEQ ID NO: 412326 - DNA, 57 bp, Artificial
  Synthetic oligonucleotide
gcgatgacgcttactgtataccaaatttttctcaaactatagacaaaagagtaatcc

SEQ ID NO: 412327 - DNA, 59 bp, Artificial
  Synthetic oligonucleotide
gcgatgacggataacacttggaagaaggcccatcctatggctggtctgaaaaagtctgg

SEQ ID NO: 412328 - DNA, 55 bp, Artificial
  Synthetic oligonucleotide
gcgatgactcctgcgaaagttaaagcggcaattgatacatttgcggtgactagcg

SEQ ID NO: 412329 - DNA, 55 bp, Artificial
  Synthetic oligonucleotide
gcgatgagttatgaggctgtgtatcccagacacaaaatggatgatgatctcactt

SEQ ID NO: 412330 - DNA, 55 bp, Artificial
  Synthetic oligonucleotide
gcgatgatgatttgatggctcgagcccggcgggaaagggacgtccgggcaattgc

SEQ ID NO: 412331 - DNA, 58 bp, Artificial
  Synthetic oligonucleotide
gcgatgatggctgtcctcgacaagcgtcctcgccgctaatcccttcccacccaacgta

SEQ ID NO: 412332 - DNA, 55 bp, Artificial
  Synthetic oligonucleotide
gcgatgcactacggttcacccatagcgtgtacaaacggttcgtgaagggcaggga

SEQ ID NO: 412333 - DNA, 57 bp, Artificial
  Synthetic oligonucleotide
gcgatgcatagggtttgtccttttccctgtggtgctatgttggacacaaaaagattt

SEQ ID NO: 412334 - DNA, 55 bp, Artificial
  Synthetic oligonucleotide
gcgatgcatccaaggaaatttcagttcgctacagttctacatctcagcgcatcta

SEQ ID NO: 412335 - DNA, 60 bp, Artificial
  Synthetic oligonucleotide
gcgatgccaactcttgctaatctgaacccttcattccaacgtgtacacgagcttctaatg

SEQ ID NO: 412336 - DNA, 56 bp, Artificial
  Synthetic oligonucleotide
gcgatgccttgaaacttgctggggccgtaaaggccccaagaatcctttcaggtgag

SEQ ID NO: 412337 - DNA, 55 bp, Artificial
  Synthetic oligonucleotide
gcgatgcgccagttacagacgatgacacactccctttctaacgaagaattagcgg

SEQ ID NO: 412338 - DNA, 55 bp, Artificial
  Synthetic oligonucleotide
gcgatgcgcggaacatacaccgtatgggacgtcaacgctgcctcaaccctggagt

SEQ ID NO: 412339 - DNA, 55 bp, Artificial
  Synthetic oligonucleotide
gcgatgcgttgtttgcctcgtctagatactctttataggaggatctgggccccgg

SEQ ID NO: 412340 - DNA, 59 bp, Artificial
  Synthetic oligonucleotide
gcgatgctataaaagcgtcatcttaggacaaaagcgacgatgacaggtaaccccatggg

SEQ ID NO: 412341 - DNA, 55 bp, Artificial
  Synthetic oligonucleotide
gcgatgctcggtacacatgtcatatgggactttggcctacaatcatctgtcacca

SEQ ID NO: 412342 - DNA, 55 bp, Artificial
  Synthetic oligonucleotide
gcgatgctctctatatcgttcaggatactccttgttccccttctggtgattatcc

SEQ ID NO: 412343 - DNA, 55 bp, Artificial
  Synthetic oligonucleotide
gcgatgctgggcatgatctagaggattttgtcgataatgcaactgtctctcaggg

SEQ ID NO: 412344 - DNA, 55 bp, Artificial
  Synthetic oligonucleotide
gcgatgctggttttggaagactcacaagtgtaaatgcaacgaaagttagctatac

SEQ ID NO: 412345 - DNA, 60 bp, Artificial
  Synthetic oligonucleotide
gcgatgcttaaccagtgcgtgtctgcgttgtcgcagtcgtaccaaactcaagcggcaaga

SEQ ID NO: 412346 - DNA, 60 bp, Artificial
  Synthetic oligonucleotide
gcgatggacacagctgcccgcgttacagccttcgcttaagttggcgttagaggaggaagc

SEQ ID NO: 412347 - DNA, 55 bp, Artificial
  Synthetic oligonucleotide
gcgatggatcttgtaactgcagctgaacctgagataatcgcatctctcgtaccag

SEQ ID NO: 412348 - DNA, 55 bp, Artificial
  Synthetic oligonucleotide
gcgatggatgagctaggtatcccagtttataagagaggatttcccgtacatctgc

SEQ ID NO: 412349 - DNA, 55 bp, Artificial
  Synthetic oligonucleotide
gcgatggatgctctctggggcacggtcgctcacctcctagtcgttgacctggttc

SEQ ID NO: 412350 - DNA, 55 bp, Artificial
  Synthetic oligonucleotide
gcgatggcaagctgtatacctttcaagtctatggaaccttcaccgaaccgacgtc

SEQ ID NO: 412351 - DNA, 60 bp, Artificial
  Synthetic oligonucleotide
gcgatggcacagagtgttcttagtactcgaccattatatggagggttgcctagttataat

SEQ ID NO: 412352 - DNA, 55 bp, Artificial
  Synthetic oligonucleotide
gcgatggcattggttagcaacgaagatttacagatgcatgtactgcgcggccctg

SEQ ID NO: 412353 - DNA, 51 bp, Artificial
  Synthetic oligonucleotide
gcgatggcccaaatatggaggcacagacgtcaacacgcgcactgtacacga

SEQ ID NO: 412354 - DNA, 60 bp, Artificial
  Synthetic oligonucleotide
gcgatggcgcagggtaactcacagcaaactcaagcaggcgtgactgttagcgttggcgga

SEQ ID NO: 412355 - DNA, 53 bp, Artificial
  Synthetic oligonucleotide
gcgatggctcaaatccacatgcggctggtgcttggaaaacaacaagtgacgcc

SEQ ID NO: 412356 - DNA, 57 bp, Artificial
  Synthetic oligonucleotide
gcgatgggctaggtggttccggtgcattctttaccccagaagggcttgcatgggatt

SEQ ID NO: 412357 - DNA, 54 bp, Artificial
  Synthetic oligonucleotide
gcgatggtgcacagctagtgttgaatggcgggggcaagctggcgcgatgtttcg

SEQ ID NO: 412358 - DNA, 57 bp, Artificial
  Synthetic oligonucleotide
gcgatggttcagaggaagcttaagggcgccggtcaatctagcccggcgaccggctcc

SEQ ID NO: 412359 - DNA, 55 bp, Artificial
  Synthetic oligonucleotide
gcgatggttgacaaactctggcttgaacgtgatggcacacacaatgtactgtcgg

SEQ ID NO: 412360 - DNA, 58 bp, Artificial
  Synthetic oligonucleotide
gcgatgtaactaatactgtagttggtcgtattgacgttacatttagtgcaaaggttgc

SEQ ID NO: 412361 - DNA, 53 bp, Artificial
  Synthetic oligonucleotide
gcgatgtatggcgccaggtactcgaacatgagagtcgtcttccccaggccacg

SEQ ID NO: 412362 - DNA, 55 bp, Artificial
  Synthetic oligonucleotide
gcgatgtcacaggaataccaccatgtactgtagcacggtcaccaaggaggatgcc

SEQ ID NO: 412363 - DNA, 55 bp, Artificial
  Synthetic oligonucleotide
gcgatgtccgccgtgaattaacacccttatttgacattggcgttcccttgaggag

SEQ ID NO: 412364 - DNA, 59 bp, Artificial
  Synthetic oligonucleotide
gcgatgtcgttaccgctgcccaaaagcgggccatcgtagccgtgatacccagacctgta

SEQ ID NO: 412365 - DNA, 57 bp, Artificial
  Synthetic oligonucleotide
gcgatgtctcgagctattagggctacacttgcgtcagggaagggcggtcgacgcacg

SEQ ID NO: 412366 - DNA, 53 bp, Artificial
  Synthetic oligonucleotide
gcgatgtctcggaacacaaagtcgctgcggatctgttacacgaggctgaacgg

SEQ ID NO: 412367 - DNA, 55 bp, Artificial
  Synthetic oligonucleotide
gcgatgtggattcacacctcgacgtattgtagatcaatacatttggaagtgtgac

SEQ ID NO: 412368 - DNA, 56 bp, Artificial
  Synthetic oligonucleotide
gcgatgttaggggattagggataaagtattcatttcaagttaataagccagaattg

SEQ ID NO: 412369 - DNA, 55 bp, Artificial
  Synthetic oligonucleotide
gcgatgttattgtatatggcgtgtacacacgcatcgaatcctgtgtatgcaacat

SEQ ID NO: 412370 - DNA, 60 bp, Artificial
  Synthetic oligonucleotide
gcgatgttcccaaagagtccaatgaaagttcagctacgaagtctagttaattgatatgag

SEQ ID NO: 412371 - DNA, 58 bp, Artificial
  Synthetic oligonucleotide
gcgattacgacttctaatggcccaatggtctgcaaaacgggggcactctgtgggtgcc

SEQ ID NO: 412372 - DNA, 55 bp, Artificial
  Synthetic oligonucleotide
gcgattacgcagattgccgctgattatggttatggtgcagtaaacttcaacaaac

SEQ ID NO: 412373 - DNA, 60 bp, Artificial
  Synthetic oligonucleotide
gcgattagggtcttcctgacagactgatggctcaccgagggattcagcggtatgattgca

SEQ ID NO: 412374 - DNA, 50 bp, Artificial
  Synthetic oligonucleotide
gcgattatagttttgctctgccagttggaaactatccagtgatgactggt

SEQ ID NO: 412375 - DNA, 55 bp, Artificial
  Synthetic oligonucleotide
gcgattatattaacggacgcacacaagccaaaataaaagcaattgagagccgtta

SEQ ID NO: 412376 - DNA, 55 bp, Artificial
  Synthetic oligonucleotide
gcgattatggacagctgttcggttggaattatgacatcgactggtctgacaccgc

SEQ ID NO: 412377 - DNA, 55 bp, Artificial
  Synthetic oligonucleotide
gcgattatgtagccatagccaccactatttacgtgaggaccaagaggatgtatga

SEQ ID NO: 412378 - DNA, 55 bp, Artificial
  Synthetic oligonucleotide
gcgattatgtcaatggacagtataaaattggatttagcgaagctcaacttgatgg

SEQ ID NO: 412379 - DNA, 55 bp, Artificial
  Synthetic oligonucleotide
gcgattattcctctctattgcaggcatttagcaaactgttgcacagaatcttcgc

SEQ ID NO: 412380 - DNA, 55 bp, Artificial
  Synthetic oligonucleotide
gcgattcaactgctgatttagactcagacgtgcttctgtacaaacgttctcctgt

SEQ ID NO: 412381 - DNA, 60 bp, Artificial
  Synthetic oligonucleotide
gcgattcatcattcgtcaagttgtattctgttcttgccgattgaatatagtcgctggata

SEQ ID NO: 412382 - DNA, 55 bp, Artificial
  Synthetic oligonucleotide
gcgattccagaaagcgattctgttgcctataccaatttacgtcaattggtgcgag

SEQ ID NO: 412383 - DNA, 55 bp, Artificial
  Synthetic oligonucleotide
gcgattcccacaaggagcaagaaaagcataccaatttgaagttaattttgggaaa

SEQ ID NO: 412384 - DNA, 50 bp, Artificial
  Synthetic oligonucleotide
gcgattcccacgtggagagggtgttcccataagccagggcgtggatccta

SEQ ID NO: 412385 - DNA, 55 bp, Artificial
  Synthetic oligonucleotide
gcgattcccgtgttgtcatccaggactatgataatcaacatgagcaagaccagcc

SEQ ID NO: 412386 - DNA, 55 bp, Artificial
  Synthetic oligonucleotide
gcgattcgcagtatacgcaccctcgtggctacgttcgcagctagaggaagcagcg

SEQ ID NO: 412387 - DNA, 51 bp, Artificial
  Synthetic oligonucleotide
gcgattcggaagttttataacctccaacgccccccacgggacaccgtggag

SEQ ID NO: 412388 - DNA, 51 bp, Artificial
  Synthetic oligonucleotide
gcgattcggggcataaccctcaagaccatgaagaggtctcatacactgagg

SEQ ID NO: 412389 - DNA, 50 bp, Artificial
  Synthetic oligonucleotide
gcgattcgtcgaaggcggggggccggaggccccccggtggcccccctcca

SEQ ID NO: 412390 - DNA, 55 bp, Artificial
  Synthetic oligonucleotide
gcgattcgtgtaataacatataactccttacggcggctgacatgaaacagaaatc

SEQ ID NO: 412391 - DNA, 50 bp, Artificial
  Synthetic oligonucleotide
gcgattctgaagtgtaatgataagaaattcaatggaacaggaccatgtac

SEQ ID NO: 412392 - DNA, 55 bp, Artificial
  Synthetic oligonucleotide
gcgattgaagatagttgtcccgaagaacactcaggaacaatcgcttgttgattat

SEQ ID NO: 412393 - DNA, 60 bp, Artificial
  Synthetic oligonucleotide
gcgattgacgctatcatgtattattgaacaggacgcaacgagtctacagacgcgcataaa

SEQ ID NO: 412394 - DNA, 60 bp, Artificial
  Synthetic oligonucleotide
gcgattgatggcttagtgcagggtagcgtacattcaatattgacaggcgagtcttacggc

SEQ ID NO: 412395 - DNA, 55 bp, Artificial
  Synthetic oligonucleotide
gcgattgccaaaagacgttgactggtcatttggtaactttgctagcatataaccc

SEQ ID NO: 412396 - DNA, 55 bp, Artificial
  Synthetic oligonucleotide
gcgattgggttccaccaacagaactcaaccaaacttatacccaagatatcactgg

SEQ ID NO: 412397 - DNA, 59 bp, Artificial
  Synthetic oligonucleotide
gcgattggtacaaattcgccggatacaatgtaaacgctatagagcgtcgtattacaata

SEQ ID NO: 412398 - DNA, 56 bp, Artificial
  Synthetic oligonucleotide
gcgattggtagtgagcgcgaggaaggtttaaattgcaaaagaaagctacctttgga

SEQ ID NO: 412399 - DNA, 55 bp, Artificial
  Synthetic oligonucleotide
gcgattgtacttatgccgtttctatacttcactacagcatggtcaattgcgggat

SEQ ID NO: 412400 - DNA, 55 bp, Artificial
  Synthetic oligonucleotide
gcgattgtattggaatatatgcaagcgctattatagtactaggttgtggctatcg

SEQ ID NO: 412401 - DNA, 60 bp, Artificial
  Synthetic oligonucleotide
gcgattgtgtgtgtcagcttacttagtgagaaagcagtactcgtgaagaatttaactgat

SEQ ID NO: 412402 - DNA, 55 bp, Artificial
  Synthetic oligonucleotide
gcgatttacacggctttcacccgctcccgtcatgacatcgctgtcttgaacgcgc

SEQ ID NO: 412403 - DNA, 60 bp, Artificial
  Synthetic oligonucleotide
gcgatttactcaagctgttgcataaacatgcgagggatggtttgagtcgactgggatcgg

SEQ ID NO: 412404 - DNA, 60 bp, Artificial
  Synthetic oligonucleotide
gcgatttactggtgaagctgccacctttctgtttaacactatggcaaatatagtgttcac

SEQ ID NO: 412405 - DNA, 56 bp, Artificial
  Synthetic oligonucleotide
gcgatttcccgtaagctcgcaggcccaacccctgcttcctcaactgctacccccca

SEQ ID NO: 412406 - DNA, 52 bp, Artificial
  Synthetic oligonucleotide
gcgatttcctgcagtgtgcccacgaacacgcaattggtgcccacggacttgt

SEQ ID NO: 412407 - DNA, 57 bp, Artificial
  Synthetic oligonucleotide
gcgatttgccatttgcagacccgccttttaacctaattggaagatgggtagcagtta

SEQ ID NO: 412408 - DNA, 55 bp, Artificial
  Synthetic oligonucleotide
gcgatttggcaagtgatgcaatttatttggccgcggtaaagctttgattgtcagc

SEQ ID NO: 412409 - DNA, 55 bp, Artificial
  Synthetic oligonucleotide
gcgattttgtgttggaccttgatcggtacttgagtacaatggctccgtgagggtg

SEQ ID NO: 412410 - DNA, 60 bp, Artificial
  Synthetic oligonucleotide
gcgatttttgtcagatgatgcacttgtattatatactgatgtgtcgcaatgggattcatc

SEQ ID NO: 412411 - DNA, 60 bp, Artificial
  Synthetic oligonucleotide
gcgcaaaaagattaggtccaggtgtggtagtctgatttcactgggcgacaatctccctga

SEQ ID NO: 412412 - DNA, 59 bp, Artificial
  Synthetic oligonucleotide
gcgcaaaacgaccgagttttacctgtgacacagggttgagcctacttcatatcttgagc

SEQ ID NO: 412413 - DNA, 58 bp, Artificial
  Synthetic oligonucleotide
gcgcaaaactcttacgcctacaaatactttggctgcgagctgctaaactttgtcaacg

SEQ ID NO: 412414 - DNA, 51 bp, Artificial
  Synthetic oligonucleotide
gcgcaaaaggcggttcagtgctgttgatgtctccatgggacacgaataaag

SEQ ID NO: 412415 - DNA, 55 bp, Artificial
  Synthetic oligonucleotide
gcgcaaaatcattactcaacgttggccgccatacaacaacacaatcattgcctgt

SEQ ID NO: 412416 - DNA, 55 bp, Artificial
  Synthetic oligonucleotide
gcgcaaacaggttcatcaaaatgtgtgtgttctgtgattgatcttttacttgatg

SEQ ID NO: 412417 - DNA, 60 bp, Artificial
  Synthetic oligonucleotide
gcgcaaacgccatatgcaggtggagatcattagcaagaagagcgtccgagcgagggtcaa

SEQ ID NO: 412418 - DNA, 60 bp, Artificial
  Synthetic oligonucleotide
gcgcaaacgcggaagtaggccccgtcacgtgtcataccacgtgggcagtgcgtcacagcc

SEQ ID NO: 412419 - DNA, 60 bp, Artificial
  Synthetic oligonucleotide
gcgcaaactgaaatcctgtaatcagcattggttgctcctgagcgaccacgttgaaatatg

SEQ ID NO: 412420 - DNA, 54 bp, Artificial
  Synthetic oligonucleotide
gcgcaaaggtttggcgtgttaagcgccaagaaaagaaggcccaacaggccaaat

SEQ ID NO: 412421 - DNA, 55 bp, Artificial
  Synthetic oligonucleotide
gcgcaaagtgcgacaaggtgtgctagggagcgggacatttatgggtgagcccatc

SEQ ID NO: 412422 - DNA, 55 bp, Artificial
  Synthetic oligonucleotide
gcgcaaataagacgcgaacttttacagcagcgcccttagatacactcttagctgg

SEQ ID NO: 412423 - DNA, 55 bp, Artificial
  Synthetic oligonucleotide
gcgcaaatcccgcttgagtataaccctgcacgtgcggtcggagtcataggcttca

SEQ ID NO: 412424 - DNA, 55 bp, Artificial
  Synthetic oligonucleotide
gcgcaaatgaaggctgcagccctctcgggagttaacaacaagctattcgggcttg

SEQ ID NO: 412425 - DNA, 55 bp, Artificial
  Synthetic oligonucleotide
gcgcaaatgcagacaaaccaattatgttttggattgtcccgatgttacgtctggc

SEQ ID NO: 412426 - DNA, 60 bp, Artificial
  Synthetic oligonucleotide
gcgcaacaacacttgctgcaactctcagtttggggcattaaacagctccaagcaagagtc

SEQ ID NO: 412427 - DNA, 55 bp, Artificial
  Synthetic oligonucleotide
gcgcaacaagctgaacgaaatgacggccaaggggatcgcgtcgggcccagagtac

SEQ ID NO: 412428 - DNA, 60 bp, Artificial
  Synthetic oligonucleotide
gcgcaacaatggggctggtctacattgaggcgaaccgtccgagcatggtgaacttcgaga

SEQ ID NO: 412429 - DNA, 52 bp, Artificial
  Synthetic oligonucleotide
gcgcaacacgtctgtttaccaggcgatttgcaccttagatggcaggttaaag

SEQ ID NO: 412430 - DNA, 55 bp, Artificial
  Synthetic oligonucleotide
gcgcaacagcattccataggatcccattgggtataaagcagtgaccctgtcactc

SEQ ID NO: 412431 - DNA, 55 bp, Artificial
  Synthetic oligonucleotide
gcgcaacgcaagtatcgaagatttaggaggcagatacagcgaatcaatgaactac

SEQ ID NO: 412432 - DNA, 55 bp, Artificial
  Synthetic oligonucleotide
gcgcaacgtcgaatctgcaggggatacttggtcctatagcgatcgtttgtcggtg

SEQ ID NO: 412433 - DNA, 55 bp, Artificial
  Synthetic oligonucleotide
gcgcaactgcatcagtacacacatgaatgatagtgaatggaataaagcgtgcacg

SEQ ID NO: 412434 - DNA, 50 bp, Artificial
  Synthetic oligonucleotide
gcgcaactggagagcacatgagtgcttacctaggacctacagctactagt

SEQ ID NO: 412435 - DNA, 55 bp, Artificial
  Synthetic oligonucleotide
gcgcaactttccttggatgatactagttctcttcgtggatctgtgttgcaaacca

SEQ ID NO: 412436 - DNA, 55 bp, Artificial
  Synthetic oligonucleotide
gcgcaagaatacaatggacatgtatagagtcgagttgagcgacatggctcactct

SEQ ID NO: 412437 - DNA, 55 bp, Artificial
  Synthetic oligonucleotide
gcgcaagacggggaacgtctccgtatcgttgctgaataccccgacggtcagtttc

SEQ ID NO: 412438 - DNA, 56 bp, Artificial
  Synthetic oligonucleotide
gcgcaagaggcaaagtgtactgagtacataaataacgggttaccaccgatacaaaa

SEQ ID NO: 412439 - DNA, 55 bp, Artificial
  Synthetic oligonucleotide
gcgcaagatcctgaaagaaatattgcgttcgatgtacccaggtgttcttcggaga

SEQ ID NO: 412440 - DNA, 55 bp, Artificial
  Synthetic oligonucleotide
gcgcaagcgtttgatgaaatacttgagggaatgacaaatgctattcaacattcag

SEQ ID NO: 412441 - DNA, 55 bp, Artificial
  Synthetic oligonucleotide
gcgcaagctgcgcgaacagggaaagaccatcaaagagtgggcgcaagagcacggt

SEQ ID NO: 412442 - DNA, 55 bp, Artificial
  Synthetic oligonucleotide
gcgcaaggatactaatattcaggcgtactgggaatcatacctcactgctattgct

SEQ ID NO: 412443 - DNA, 52 bp, Artificial
  Synthetic oligonucleotide
gcgcaaggccggagcagcagtagaagttttcgtagacactttctctggatgg

SEQ ID NO: 412444 - DNA, 55 bp, Artificial
  Synthetic oligonucleotide
gcgcaagtgcgtgtatccccacggttgcttctgtgaccgtgggtagggaagattg

SEQ ID NO: 412445 - DNA, 55 bp, Artificial
  Synthetic oligonucleotide
gcgcaagtttcatcatactgtaaccggtggtcagtatgcgagcaaggaacaagct

SEQ ID NO: 412446 - DNA, 57 bp, Artificial
  Synthetic oligonucleotide
gcgcaataaaaagtgcaagtgttatctgtgtggggaagaaggtcacttcgcccggga

SEQ ID NO: 412447 - DNA, 50 bp, Artificial
  Synthetic oligonucleotide
gcgcaataaaggctctcatgtgcttcgaacaccgtaccgtagtaccgtgc

SEQ ID NO: 412448 - DNA, 60 bp, Artificial
  Synthetic oligonucleotide
gcgcaatactggatgagtacttggcgcataagtttgattaccagaagtgtttagctgtct

SEQ ID NO: 412449 - DNA, 55 bp, Artificial
  Synthetic oligonucleotide
gcgcaatatctctcactgcatgatggagcaagacagttctttgagccattgatgg

SEQ ID NO: 412450 - DNA, 55 bp, Artificial
  Synthetic oligonucleotide
gcgcaatcccacgcaatagacctggcagatggggctagacaaaccccaccagcga

SEQ ID NO: 412451 - DNA, 55 bp, Artificial
  Synthetic oligonucleotide
gcgcaatctaacatttattctgacatgattgacaggtatgtcaacgatgagacgg

SEQ ID NO: 412452 - DNA, 55 bp, Artificial
  Synthetic oligonucleotide
gcgcaatgccatcacccaagggctgccagtactcaatacacccggctctgggcag

SEQ ID NO: 412453 - DNA, 60 bp, Artificial
  Synthetic oligonucleotide
gcgcaatgctaatcgcagaatgtttggaatggacggcagtgtcagtaacaaggaagaaaa

SEQ ID NO: 412454 - DNA, 55 bp, Artificial
  Synthetic oligonucleotide
gcgcaattggatctgaaacaaagatggcattcttctccaaaatggcgcgacccgc

SEQ ID NO: 412455 - DNA, 55 bp, Artificial
  Synthetic oligonucleotide
gcgcaatttggttcagaatcagttggccaacgagctatcagcaatacagtatcgg

SEQ ID NO: 412456 - DNA, 60 bp, Artificial
  Synthetic oligonucleotide
gcgcacaaacgaatagtgatggaatcagtgacaagaggatttggtcacaaggactttcca

SEQ ID NO: 412457 - DNA, 60 bp, Artificial
  Synthetic oligonucleotide
gcgcacaagactatatagaagcctcggatcatctacgcgaactagcgcgatatcagaaga

SEQ ID NO: 412458 - DNA, 55 bp, Artificial
  Synthetic oligonucleotide
gcgcacaagagtgtagatagtgagcagttttatactgcaatggaggatgcatggc

SEQ ID NO: 412459 - DNA, 55 bp, Artificial
  Synthetic oligonucleotide
gcgcacacatccaggccacacgtgctcgtgttgaggacttcatgcaagggaaagg

SEQ ID NO: 412460 - DNA, 55 bp, Artificial
  Synthetic oligonucleotide
gcgcacacttactcgctaagcagttaccccacgtgactctgtaatgtcgagccta

SEQ ID NO: 412461 - DNA, 54 bp, Artificial
  Synthetic oligonucleotide
gcgcacagaagtatggaatagtgtagtccgcaaccaccttttcaataccgcgca

SEQ ID NO: 412462 - DNA, 59 bp, Artificial
  Synthetic oligonucleotide
gcgcacaggaatggatcccagaatgtgctccctcatgcagggctcaacactccctagaa

SEQ ID NO: 412463 - DNA, 55 bp, Artificial
  Synthetic oligonucleotide
gcgcacaggagttctttggggtttccatcaaacaaattcagatacacaaatcggg

SEQ ID NO: 412464 - DNA, 60 bp, Artificial
  Synthetic oligonucleotide
gcgcacagtggatcctaggcgatttaagtcacgctgcaaattgtcactgctttctgtttg

SEQ ID NO: 412465 - DNA, 60 bp, Artificial
  Synthetic oligonucleotide
gcgcacagttacgcgatcctaaggaggcgagacgaatcttgtatttggtccagaataatg

SEQ ID NO: 412466 - DNA, 56 bp, Artificial
  Synthetic oligonucleotide
gcgcacatgattcacttgtcacggtgttctgacaaaatctacactgaccaggtagt

SEQ ID NO: 412467 - DNA, 60 bp, Artificial
  Synthetic oligonucleotide
gcgcaccaggtgatagtaaacaatcaaaactggtcagggtattcaggagcgttcatcgat

SEQ ID NO: 412468 - DNA, 54 bp, Artificial
  Synthetic oligonucleotide
gcgcaccatgggactcagatgacgtgttcttctttcattgcgtttcacaccacc

SEQ ID NO: 412469 - DNA, 55 bp, Artificial
  Synthetic oligonucleotide
gcgcaccattcgatatagaatcgaaccactgcgccgatcgataccagaggggagc

SEQ ID NO: 412470 - DNA, 54 bp, Artificial
  Synthetic oligonucleotide
gcgcaccccccttagaagaggggtacgtggtcctagtaggggacgagaggctga

SEQ ID NO: 412471 - DNA, 55 bp, Artificial
  Synthetic oligonucleotide
gcgcaccccccttagaggaggggtacgtgattctggtaggagacgaggacctgaa

SEQ ID NO: 412472 - DNA, 60 bp, Artificial
  Synthetic oligonucleotide
gcgcaccctgatgaatgcgcttctctttggtgtgaaagtagcttgaaagcctcatggcgc

SEQ ID NO: 412473 - DNA, 57 bp, Artificial
  Synthetic oligonucleotide
gcgcaccggggatcctaggcattttggttgcgcaattcaggcttctttcacaatatg

SEQ ID NO: 412474 - DNA, 55 bp, Artificial
  Synthetic oligonucleotide
gcgcaccggggatcctaggcttttaactaacgcattacagagggattcaaccctg

SEQ ID NO: 412475 - DNA, 55 bp, Artificial
  Synthetic oligonucleotide
gcgcaccggttcatagccaggaagtgccagcactgacagcagtggagactggtgc

SEQ ID NO: 412476 - DNA, 55 bp, Artificial
  Synthetic oligonucleotide
gcgcacctacacttagtcatcatcctgtccaggtgcactacaacaatgctttggc

SEQ ID NO: 412477 - DNA, 60 bp, Artificial
  Synthetic oligonucleotide
gcgcacctttgagctcacggacattgggtgggtgtcaaaactagacaaatccagcatact

SEQ ID NO: 412478 - DNA, 60 bp, Artificial
  Synthetic oligonucleotide
gcgcaccttttcaaagggcgcgattacgttcactgctgcatgcctaatctggatgtacgt

SEQ ID NO: 412479 - DNA, 60 bp, Artificial
  Synthetic oligonucleotide
gcgcacgacagacggacgcctatacagcaacgctggacgcgtcaggttatgtctatgaat

SEQ ID NO: 412480 - DNA, 58 bp, Artificial
  Synthetic oligonucleotide
gcgcacgaggcatcctatattcccccgcgtagattgtttagtatatcaggtttaggtc

SEQ ID NO: 412481 - DNA, 55 bp, Artificial
  Synthetic oligonucleotide
gcgcacgcatgttgtgagaaatgcttaacgctgtgtgcgagatatggatcggagc

SEQ ID NO: 412482 - DNA, 57 bp, Artificial
  Synthetic oligonucleotide
gcgcacgcgtactcggccttgtttgagcgggtccattcggtcttcaactacaccgac

SEQ ID NO: 412483 - DNA, 52 bp, Artificial
  Synthetic oligonucleotide
gcgcacgctaccgcccccctcactccaggaagcagtcaacgccctccaagga

SEQ ID NO: 412484 - DNA, 56 bp, Artificial
  Synthetic oligonucleotide
gcgcacggaaagggatatcgaccgagtgtttagccgttgacagcttcagtttaccc

SEQ ID NO: 412485 - DNA, 54 bp, Artificial
  Synthetic oligonucleotide
gcgcacggcggggggttgagatgtggggtctcttgctcccccttcgaccggccc

SEQ ID NO: 412486 - DNA, 60 bp, Artificial
  Synthetic oligonucleotide
gcgcacgtaatgcaaccaattcaatcttgaacttacatccagtgacgacgtaggtttgat

SEQ ID NO: 412487 - DNA, 55 bp, Artificial
  Synthetic oligonucleotide
gcgcacgtggtttcaaatgattctcacgtggagtgtcttaggagcggaggagaag

SEQ ID NO: 412488 - DNA, 55 bp, Artificial
  Synthetic oligonucleotide
gcgcacgttagctggtgtcactgtgagtgtaggtggcgtggacatgagagcggga

SEQ ID NO: 412489 - DNA, 55 bp, Artificial
  Synthetic oligonucleotide
gcgcacgtttcaatgcactgcaagagactttaatggacctgtatgaatcaggtcg

SEQ ID NO: 412490 - DNA, 55 bp, Artificial
  Synthetic oligonucleotide
gcgcactaaggactcttcccgttaggctatctgagactttgtctgtaacaaccta

SEQ ID NO: 412491 - DNA, 55 bp, Artificial
  Synthetic oligonucleotide
gcgcactcaagttgcttccgatagaaggccacgatctactcctcattcaaatgcc

SEQ ID NO: 412492 - DNA, 53 bp, Artificial
  Synthetic oligonucleotide
gcgcactcactacgccgtatatggcccttaaaggctcggttattgccaattgt

SEQ ID NO: 412493 - DNA, 55 bp, Artificial
  Synthetic oligonucleotide
gcgcactgacgtgcttgtgttttcggaaataatactgtccaggacgtttgtgaga

SEQ ID NO: 412494 - DNA, 55 bp, Artificial
  Synthetic oligonucleotide
gcgcactgggaaaagttcaataatgagatcagatgcgcctattgacacatgcatt

SEQ ID NO: 412495 - DNA, 57 bp, Artificial
  Synthetic oligonucleotide
gcgcactgtgagagttacatttggtgagggatcgggcaattgtatggactatgtgtg

SEQ ID NO: 412496 - DNA, 58 bp, Artificial
  Synthetic oligonucleotide
gcgcacttaacacagtataaaaacgaatatggagacttctcagaattcgactttcaaa

SEQ ID NO: 412497 - DNA, 60 bp, Artificial
  Synthetic oligonucleotide
gcgcacttactacaccatatatggctctcaaaggctcggtcattgccaattgcaagatga

SEQ ID NO: 412498 - DNA, 60 bp, Artificial
  Synthetic oligonucleotide
gcgcacttcctggaccctgctagcatagcagcgagaggctgggcggctcatagagcaaga

SEQ ID NO: 412499 - DNA, 55 bp, Artificial
  Synthetic oligonucleotide
gcgcagaaaaggctattcgtgaggcaaaagaagcgttagacctgttcactgccgg

SEQ ID NO: 412500 - DNA, 57 bp, Artificial
  Synthetic oligonucleotide
gcgcagaagagctagttcaagaagggctctgtgatcctatcagactatttgtcaaag

SEQ ID NO: 412501 - DNA, 55 bp, Artificial
  Synthetic oligonucleotide
gcgcagacaacccaagacctacacactgctacattatatgagctaattgcatcta

SEQ ID NO: 412502 - DNA, 60 bp, Artificial
  Synthetic oligonucleotide
gcgcagacactatttggataatatcacaaaggttaccgattaatgctaatgtaatttgga

SEQ ID NO: 412503 - DNA, 59 bp, Artificial
  Synthetic oligonucleotide
gcgcagacggtctcgcactccactagccacgtgagctcgggtttagcgggatcaaaaac

SEQ ID NO: 412504 - DNA, 55 bp, Artificial
  Synthetic oligonucleotide
gcgcagacttagctcgcattccagagatcatcaaaagcttctcgtggacccactc

SEQ ID NO: 412505 - DNA, 60 bp, Artificial
  Synthetic oligonucleotide
gcgcagagaatagtttatgatgaggaactgcaaatgcatatactaaggggacctttgcac

SEQ ID NO: 412506 - DNA, 60 bp, Artificial
  Synthetic oligonucleotide
gcgcagagcgggaaccaatgtgcactgaaggtatatgcggatgaggcggtcagtaagctg

SEQ ID NO: 412507 - DNA, 55 bp, Artificial
  Synthetic oligonucleotide
gcgcagaggctggcagatctcagactctcaactctctaccactagacagctgcga

SEQ ID NO: 412508 - DNA, 59 bp, Artificial
  Synthetic oligonucleotide
gcgcagagttctcgcttgacgatccagtgaggtacaaacacacctgggggttcgaatcg

SEQ ID NO: 412509 - DNA, 58 bp, Artificial
  Synthetic oligonucleotide
gcgcagataagctccaagagttagctgattgcttcgaagtgtcgatttcttacttgct

SEQ ID NO: 412510 - DNA, 51 bp, Artificial
  Synthetic oligonucleotide
gcgcagatccatatgccctcaatatcccttatactcagttgcctactactt

SEQ ID NO: 412511 - DNA, 60 bp, Artificial
  Synthetic oligonucleotide
gcgcagatcgataatgagaaatccttgggagataaatacttgctgtgttgtttactcgtt

SEQ ID NO: 412512 - DNA, 60 bp, Artificial
  Synthetic oligonucleotide
gcgcagcaagacaaggggatcgcaatcccgcatgacatagacctaggagactctcgtgtg

SEQ ID NO: 412513 - DNA, 55 bp, Artificial
  Synthetic oligonucleotide
gcgcagcacctgcgattttcccaacgttgctatacatatccatcgccgattcgcc

SEQ ID NO: 412514 - DNA, 55 bp, Artificial
  Synthetic oligonucleotide
gcgcagcaggataaagggatcgctatcccacatgatatagatctgggtgactccc

SEQ ID NO: 412515 - DNA, 60 bp, Artificial
  Synthetic oligonucleotide
gcgcagccagcactcacaataacggaagacacggcccgcacggccaacctagcattagag

SEQ ID NO: 412516 - DNA, 55 bp, Artificial
  Synthetic oligonucleotide
gcgcagccagcgtataaaacagcaggcgctattcaaagactcttttatggtgtca

SEQ ID NO: 412517 - DNA, 55 bp, Artificial
  Synthetic oligonucleotide
gcgcagcctcgacagactgttggtagataatcgcgagatcgtgtacaagtccgag

SEQ ID NO: 412518 - DNA, 55 bp, Artificial
  Synthetic oligonucleotide
gcgcagcctgagggatctaaaattccctcataccgattcaacgaagtttgggtcg

SEQ ID NO: 412519 - DNA, 55 bp, Artificial
  Synthetic oligonucleotide
gcgcagcgcaaagcctacagaaacacagaaggacggactacgaccctagaaaccc

SEQ ID NO: 412520 - DNA, 55 bp, Artificial
  Synthetic oligonucleotide
gcgcagcgcattgaatcaaaagcggctaaccacctctttgtcttccaacggggca

SEQ ID NO: 412521 - DNA, 56 bp, Artificial
  Synthetic oligonucleotide
gcgcagcggatagtttacgatgatgaattgcaaatgcatatacttagaggaccgtt

SEQ ID NO: 412522 - DNA, 55 bp, Artificial
  Synthetic oligonucleotide
gcgcagctaaattagtcgggcgtggcattactgcagcaagaggtgagattgcacc

SEQ ID NO: 412523 - DNA, 50 bp, Artificial
  Synthetic oligonucleotide
gcgcagctacgccggaagttggaaatgtttacctatttgagattcgacat

SEQ ID NO: 412524 - DNA, 55 bp, Artificial
  Synthetic oligonucleotide
gcgcagctcgccctggatgttgcccagcgccagcagcagcttgtcgttcaaatca

SEQ ID NO: 412525 - DNA, 51 bp, Artificial
  Synthetic oligonucleotide
gcgcagctcttgagcaacaccaaaataagcttatgaagcagcacacagacg

SEQ ID NO: 412526 - DNA, 55 bp, Artificial
  Synthetic oligonucleotide
gcgcagcttggtcaccatcattttggaccctgctcgaattggactgtggtgcatg

SEQ ID NO: 412527 - DNA, 55 bp, Artificial
  Synthetic oligonucleotide
gcgcaggagtatgctcagggtggtaagctaggttttcacagggatgatgagccta

SEQ ID NO: 412528 - DNA, 55 bp, Artificial
  Synthetic oligonucleotide
gcgcaggcccggaaatgccgtcggctccaggttaaatggcacataagacatcggc

SEQ ID NO: 412529 - DNA, 58 bp, Artificial
  Synthetic oligonucleotide
gcgcaggcgaaaccgtccttcatagaactgtttacgatggggattacgagttggcaga

SEQ ID NO: 412530 - DNA, 55 bp, Artificial
  Synthetic oligonucleotide
gcgcagggcgcgtatgtacacgctgacggcttctcggtggcacccgttaagtact

SEQ ID NO: 412531 - DNA, 58 bp, Artificial
  Synthetic oligonucleotide
gcgcaggtcgattgcgcgggaccccgctgggtggtttgggaagctggatcaagactca

SEQ ID NO: 412532 - DNA, 55 bp, Artificial
  Synthetic oligonucleotide
gcgcagtatacgatatgtggttgactaattatagtatcgattggttgaccaaaga

SEQ ID NO: 412533 - DNA, 60 bp, Artificial
  Synthetic oligonucleotide
gcgcagtatgcaaacacccaagcgagcaatcgggttaacatagtggcacctggccacatg

SEQ ID NO: 412534 - DNA, 60 bp, Artificial
  Synthetic oligonucleotide
gcgcagtattatatgtaactggaccagtatcacttgcactcgaacaatctggaatgggtc

SEQ ID NO: 412535 - DNA, 55 bp, Artificial
  Synthetic oligonucleotide
gcgcagtcggggcatgttgattacatcgagctggaaatcaggaatttggttgccg

SEQ ID NO: 412536 - DNA, 60 bp, Artificial
  Synthetic oligonucleotide
gcgcagtgagaagattcattgcggagatgagacaacgcgtacaagctgacaggaacgttg

SEQ ID NO: 412537 - DNA, 58 bp, Artificial
  Synthetic oligonucleotide
gcgcagtgagtccgaggaaaatgttgagagccctcctatcgtaatcgggagttcttcc

SEQ ID NO: 412538 - DNA, 55 bp, Artificial
  Synthetic oligonucleotide
gcgcagtgatgagttcccctgtgcgtgaatccattgtctctgcacgtgaaggcta

SEQ ID NO: 412539 - DNA, 55 bp, Artificial
  Synthetic oligonucleotide
gcgcagtgggttttaaattggaagtaccacccagataatgtgctgtggggttcac

SEQ ID NO: 412540 - DNA, 55 bp, Artificial
  Synthetic oligonucleotide
gcgcagttaattccaagataatacgagcacccacaaggaagatcaaccctccgcc

SEQ ID NO: 412541 - DNA, 60 bp, Artificial
  Synthetic oligonucleotide
gcgcagttaattgagatgcagtcgacggaaattgcagaacaatttctgttaggtcgtgag

SEQ ID NO: 412542 - DNA, 55 bp, Artificial
  Synthetic oligonucleotide
gcgcagttctagcctggttaacgtagatgctgttaccggtgtatacgaaaccctc

SEQ ID NO: 412543 - DNA, 55 bp, Artificial
  Synthetic oligonucleotide
gcgcagttgtctcattagtatagagacacgaggatcgcgtattaaagcctgtgac

SEQ ID NO: 412544 - DNA, 57 bp, Artificial
  Synthetic oligonucleotide
gcgcagttttacagaaaatccctaacctccttggaggtgtctcacaacagcccgatc

SEQ ID NO: 412545 - DNA, 55 bp, Artificial
  Synthetic oligonucleotide
gcgcataatggagattctgtggcacgccatggttggaacagcccgaagtcctctc

SEQ ID NO: 412546 - DNA, 57 bp, Artificial
  Synthetic oligonucleotide
gcgcatacaagttagacacagcccgatgtacgaacccagtaatatgtgcatgttaga

SEQ ID NO: 412547 - DNA, 60 bp, Artificial
  Synthetic oligonucleotide
gcgcataccggtcggcagtaggtatgtcatccggcggtctcggggattgcagcgcctgtg

SEQ ID NO: 412548 - DNA, 60 bp, Artificial
  Synthetic oligonucleotide
gcgcatacgaccaggatcaggccatcactatgaactgtgatgacaccaagaaagtgcttg

SEQ ID NO: 412549 - DNA, 51 bp, Artificial
  Synthetic oligonucleotide
gcgcatacgcacctacaacagtacttattatgaaatccacggaaagcacgc

SEQ ID NO: 412550 - DNA, 60 bp, Artificial
  Synthetic oligonucleotide
gcgcatactaatacggctgttcgagctcatgttgcttgtgagtcataggtagtcaacgca

SEQ ID NO: 412551 - DNA, 55 bp, Artificial
  Synthetic oligonucleotide
gcgcatatttgaaagtttaaaccttgccgaaagggtttatttgcgcgcgttgcag

SEQ ID NO: 412552 - DNA, 60 bp, Artificial
  Synthetic oligonucleotide
gcgcatcagagctaacggggtgctcgccatttaagacggtgaagatcgaagaacatgtgg

SEQ ID NO: 412553 - DNA, 55 bp, Artificial
  Synthetic oligonucleotide
gcgcatccaatgagaatcccataccccttgcagtggaaaacattggctcatcacg

SEQ ID NO: 412554 - DNA, 50 bp, Artificial
  Synthetic oligonucleotide
gcgcatcccctttttagtcgagggtcaacatctcgctgagcaattcaaac

SEQ ID NO: 412555 - DNA, 55 bp, Artificial
  Synthetic oligonucleotide
gcgcatccgaaacgacctagatgcggcactgccagaaacaaacggcaaatatcac

SEQ ID NO: 412556 - DNA, 55 bp, Artificial
  Synthetic oligonucleotide
gcgcatccgtggttcttccaccgctgcaatagcccgccaactgggtgttagctcc

SEQ ID NO: 412557 - DNA, 60 bp, Artificial
  Synthetic oligonucleotide
gcgcatcctaattcaacattatttcgcttcaaccattcatttgggtggcgtctgccaccc

SEQ ID NO: 412558 - DNA, 50 bp, Artificial
  Synthetic oligonucleotide
gcgcatcggggagagacagggattccgcacgcgtgaaggttttaggccat

SEQ ID NO: 412559 - DNA, 54 bp, Artificial
  Synthetic oligonucleotide
gcgcatcgtgttctcttcaagccgctccaagctgtacaaagggtctcctaccag

SEQ ID NO: 412560 - DNA, 60 bp, Artificial
  Synthetic oligonucleotide
gcgcatcttgaagcgaacggccctgagcagtatgttctgtcgtttgacgcttcccagcag

SEQ ID NO: 412561 - DNA, 55 bp, Artificial
  Synthetic oligonucleotide
gcgcatctttaatgacctgcactttgacatttgaacaaaatcctgacagttccct

SEQ ID NO: 412562 - DNA, 59 bp, Artificial
  Synthetic oligonucleotide
gcgcatgaaactggtaacgttgccactggaggctcaacaataaattacacctccataaa

SEQ ID NO: 412563 - DNA, 56 bp, Artificial
  Synthetic oligonucleotide
gcgcatgacgcgcaagggaagaggtactattacctcacccgtgaccctgagattcc

SEQ ID NO: 412564 - DNA, 55 bp, Artificial
  Synthetic oligonucleotide
gcgcatgatcttgataagtctgctgaagagtggaaaaacggtgatgtcgatactg

SEQ ID NO: 412565 - DNA, 55 bp, Artificial
  Synthetic oligonucleotide
gcgcatgatggggatcttgtggcatgccatagcaggcaccgctagaagccccgta

SEQ ID NO: 412566 - DNA, 60 bp, Artificial
  Synthetic oligonucleotide
gcgcatgcggtctgtagaccagcataaaatgacgagcgcatccatctggaccctaagaca

SEQ ID NO: 412567 - DNA, 59 bp, Artificial
  Synthetic oligonucleotide
gcgcatgcgtgggacctttgtgtctcctctgccgatccatactgcggaactcctagccg

SEQ ID NO: 412568 - DNA, 51 bp, Artificial
  Synthetic oligonucleotide
gcgcatgctgactctgaatttcttaacgcgtgctggaccgcccgcttgatg

SEQ ID NO: 412569 - DNA, 60 bp, Artificial
  Synthetic oligonucleotide
gcgcatgcttaagcgcactagcctgacgtgacgattgatgtaacccttggtatgaatcac

SEQ ID NO: 412570 - DNA, 55 bp, Artificial
  Synthetic oligonucleotide
gcgcatggagctgctccgtccaatagatgacattgtagcccaagtttcacctggc

SEQ ID NO: 412571 - DNA, 60 bp, Artificial
  Synthetic oligonucleotide
gcgcatggccctgccaaaagcatggagtatgatgctgttgcaacaacacattcttggatc

SEQ ID NO: 412572 - DNA, 50 bp, Artificial
  Synthetic oligonucleotide
gcgcatgggggccaagtttaccggcacccttgagtatgaggttcgggaga

SEQ ID NO: 412573 - DNA, 57 bp, Artificial
  Synthetic oligonucleotide
gcgcatggtgatttccagggtccgggccctctgccccgtagtgtcgctacctttgtg

SEQ ID NO: 412574 - DNA, 60 bp, Artificial
  Synthetic oligonucleotide
gcgcatgtcaacatgggtctacccctaggtgatttcgcgcctctagcttcttcggacgtg

SEQ ID NO: 412575 - DNA, 55 bp, Artificial
  Synthetic oligonucleotide
gcgcatgtgacaccctcagaagccgtctttcgcgcgagaaatgcagtatccggct

SEQ ID NO: 412576 - DNA, 55 bp, Artificial
  Synthetic oligonucleotide
gcgcatgtgcttcagagcaactatggaagtgagcaataaggccctacttatccgt

SEQ ID NO: 412577 - DNA, 50 bp, Artificial
  Synthetic oligonucleotide
gcgcatgtgctttagggcaactgtagaagtaagcaacaaggctctactaa

SEQ ID NO: 412578 - DNA, 51 bp, Artificial
  Synthetic oligonucleotide
gcgcatgtgggctggtatcttgtcttttaacgacattccatctacgcaagt

SEQ ID NO: 412579 - DNA, 58 bp, Artificial
  Synthetic oligonucleotide
gcgcatgtggtgaggatcgtcctcgattgccttaacatttgataggattgcaagggac

SEQ ID NO: 412580 - DNA, 60 bp, Artificial
  Synthetic oligonucleotide
gcgcattaaagaggtcagcgagatccatgccatgtgaatacttagaatcttgcttaaatt

SEQ ID NO: 412581 - DNA, 55 bp, Artificial
  Synthetic oligonucleotide
gcgcattacggcgcaatgctgctgagatgctatctaaagagcgcagtctggcaag

SEQ ID NO: 412582 - DNA, 55 bp, Artificial
  Synthetic oligonucleotide
gcgcattagatcgttcagggttgtttattcgacttctgagcgatgtgtgtgtcat

SEQ ID NO: 412583 - DNA, 60 bp, Artificial
  Synthetic oligonucleotide
gcgcattagtcgaggctgatagagtggttcaaagactaataccattgagctcttcaacat

SEQ ID NO: 412584 - DNA, 55 bp, Artificial
  Synthetic oligonucleotide
gcgcattatcactgcgttcgattacattgctagttccattggcacttttggaact

SEQ ID NO: 412585 - DNA, 60 bp, Artificial
  Synthetic oligonucleotide
gcgcattcactagactgactgatgcgcctataatatcagagctgctgtgcactgtatcta

SEQ ID NO: 412586 - DNA, 55 bp, Artificial
  Synthetic oligonucleotide
gcgcattcatccgaaaacagcgcaacggtttaagataccacagacgcagaagcct

SEQ ID NO: 412587 - DNA, 54 bp, Artificial
  Synthetic oligonucleotide
gcgcattccagtatggaataacacaaaactaaactccgggaaaattaaatggta

SEQ ID NO: 412588 - DNA, 55 bp, Artificial
  Synthetic oligonucleotide
gcgcattccctctcaaatatcgccagatcttggtcaattggcgttcgatctcgtg

SEQ ID NO: 412589 - DNA, 57 bp, Artificial
  Synthetic oligonucleotide
gcgcattcttgtctgtacatgcggacaaacttgaatcggtatactctgttagttctg

SEQ ID NO: 412590 - DNA, 55 bp, Artificial
  Synthetic oligonucleotide
gcgcattgccttgtaggcatacactgtcttgagagcaagcttcatagcgaccata

SEQ ID NO: 412591 - DNA, 55 bp, Artificial
  Synthetic oligonucleotide
gcgccaaaagagggtgttagagaagttaaggttgcagatgaaagacgatgtggac

SEQ ID NO: 412592 - DNA, 55 bp, Artificial
  Synthetic oligonucleotide
gcgccaaacagttaaattttaagctaccacagacaatacaaacagctgtcaccac

SEQ ID NO: 412593 - DNA, 56 bp, Artificial
  Synthetic oligonucleotide
gcgccaaaggcaagtggattactgaaccgggtaaaaagaatcacacatggggcgtc

SEQ ID NO: 412594 - DNA, 55 bp, Artificial
  Synthetic oligonucleotide
gcgccaaagtaattggaagtattagcgccagaatcctcattaacgcctgtgacat

SEQ ID NO: 412595 - DNA, 51 bp, Artificial
  Synthetic oligonucleotide
gcgccaaagtttctgtccctacatgcgatatttccatggttgatggagttg

SEQ ID NO: 412596 - DNA, 55 bp, Artificial
  Synthetic oligonucleotide
gcgccaacgaattgtgggtctaccgggttttgctgcccctttcacgcaatgtggt

SEQ ID NO: 412597 - DNA, 52 bp, Artificial
  Synthetic oligonucleotide
gcgccaacttgtgttcgggcaacacgcatatctcgagcgcgcccacaaagtt

SEQ ID NO: 412598 - DNA, 60 bp, Artificial
  Synthetic oligonucleotide
gcgccaagcaggacatcaatctggtcaacaccaacggtagttggcacatcaataggacgg

SEQ ID NO: 412599 - DNA, 60 bp, Artificial
  Synthetic oligonucleotide
gcgccaagcgaacaatggagaagacgcaaccgctggtctaacccacatgatgatctggca

SEQ ID NO: 412600 - DNA, 55 bp, Artificial
  Synthetic oligonucleotide
gcgccaatcgaattgatatatgcatgtcgatcagctaaagaatttgctatgttac

SEQ ID NO: 412601 - DNA, 55 bp, Artificial
  Synthetic oligonucleotide
gcgccaattccgacgagacgcggtctatttcacgaatatgctggaggcgcgacca

SEQ ID NO: 412602 - DNA, 60 bp, Artificial
  Synthetic oligonucleotide
gcgccaatttagcgcgtcacattaatgaggcgtttagaatggcattcggcctaactgatg

SEQ ID NO: 412603 - DNA, 60 bp, Artificial
  Synthetic oligonucleotide
gcgccacaatctctccttcgatgccagtcagagcactatggccgctggccctttcagtct

SEQ ID NO: 412604 - DNA, 60 bp, Artificial
  Synthetic oligonucleotide
gcgccacatgcgagcaaattgctgattcccagcaccggtctcacagacaaatggtggcaa

SEQ ID NO: 412605 - DNA, 55 bp, Artificial
  Synthetic oligonucleotide
gcgccaccattgtgtacaacgaacgagagttcgtgaacaggtacctgcatcacat

SEQ ID NO: 412606 - DNA, 58 bp, Artificial
  Synthetic oligonucleotide
gcgccactaacggcttgcgtcattacgcagggaaaaattctagcccaattgcatgcta

SEQ ID NO: 412607 - DNA, 55 bp, Artificial
  Synthetic oligonucleotide
gcgccagaagaaccaaaactggtatgaagggtggttcaatagctccccttggttc

SEQ ID NO: 412608 - DNA, 55 bp, Artificial
  Synthetic oligonucleotide
gcgccagaaggagcaggagaggtaggactggagcaatggctggaaacgtcactgg

SEQ ID NO: 412609 - DNA, 55 bp, Artificial
  Synthetic oligonucleotide
gcgccagagtggtcctctgggatgactttggtatggacaatgtggtgaaggacgc

SEQ ID NO: 412610 - DNA, 56 bp, Artificial
  Synthetic oligonucleotide
gcgccaggaagtgacgtgcaatgccaccctatataagccgggaaacttccggttta

SEQ ID NO: 412611 - DNA, 55 bp, Artificial
  Synthetic oligonucleotide
gcgccaggtgtaggtaacattgaccctgagatctataacgaaggaaggttcatgt

SEQ ID NO: 412612 - DNA, 55 bp, Artificial
  Synthetic oligonucleotide
gcgccagtcatccgatagactgagtcgcccgggtacccgtgttcccaataaagcc

SEQ ID NO: 412613 - DNA, 55 bp, Artificial
  Synthetic oligonucleotide
gcgccagtgattcagtacgacatgcttgcagatccattgttagggcagtcatcgc

SEQ ID NO: 412614 - DNA, 55 bp, Artificial
  Synthetic oligonucleotide
gcgccagtggtctggaactacatgctgttgaatgaacaaccaccggccaattggg

SEQ ID NO: 412615 - DNA, 58 bp, Artificial
  Synthetic oligonucleotide
gcgccagtttgcaagtgaggcacaagttgtatttgccacgcctcggttgtttcccgaa

SEQ ID NO: 412616 - DNA, 55 bp, Artificial
  Synthetic oligonucleotide
gcgccataaagaccgtgggcaatatgttcttcaaggggctgtacatggcaatggt

SEQ ID NO: 412617 - DNA, 55 bp, Artificial
  Synthetic oligonucleotide
gcgccatcactctgtccgtttgttctgtgccagctgaatacagctcttacatgcg

SEQ ID NO: 412618 - DNA, 60 bp, Artificial
  Synthetic oligonucleotide
gcgccatcgtactggatatacgatgtcaagcagtactcagatttaaagtttgagacatgg

SEQ ID NO: 412619 - DNA, 55 bp, Artificial
  Synthetic oligonucleotide
gcgccatggtatcgtttcgctctgagtagaggctttgggtcagggatcatcatat

SEQ ID NO: 412620 - DNA, 60 bp, Artificial
  Synthetic oligonucleotide
gcgccatggtatgctttcgcactgagtagagactttggatcaggaatcatcacctcaaat

SEQ ID NO: 412621 - DNA, 58 bp, Artificial
  Synthetic oligonucleotide
gcgcccaaacattatcgtcaagtacgttctagagatgactcaaacgtaagagagatta

SEQ ID NO: 412622 - DNA, 55 bp, Artificial
  Synthetic oligonucleotide
gcgcccaaccagggactcgaaagcgaaagttacagagaagttctctcgacgcagg

SEQ ID NO: 412623 - DNA, 55 bp, Artificial
  Synthetic oligonucleotide
gcgcccaagtatctagacagaatgttggtacgcactctacacaaaactctgttac

SEQ ID NO: 412624 - DNA, 56 bp, Artificial
  Synthetic oligonucleotide
gcgcccacccagaaatagttttgaggccctgatgcttaactttaagctgttgggaa

SEQ ID NO: 412625 - DNA, 55 bp, Artificial
  Synthetic oligonucleotide
gcgcccaccgaccaaaacgaagagatctcaagtgttacgcgtgacctaacgattg

SEQ ID NO: 412626 - DNA, 55 bp, Artificial
  Synthetic oligonucleotide
gcgcccacgtgtccccactgtttcgtgatagggcaatacacgaattcgacgtcgc

SEQ ID NO: 412627 - DNA, 55 bp, Artificial
  Synthetic oligonucleotide
gcgcccagatgaagagaaggaggggtgatcgcattccgaagggatgcgtgggtcc

SEQ ID NO: 412628 - DNA, 57 bp, Artificial
  Synthetic oligonucleotide
gcgcccagatgtttcggtgaacaggttttacacattagacaccaaactgtgggagaa

SEQ ID NO: 412629 - DNA, 60 bp, Artificial
  Synthetic oligonucleotide
gcgcccaggtatccagacagaacgttggcacacactccacacagaactcggtttcaaatg

SEQ ID NO: 412630 - DNA, 55 bp, Artificial
  Synthetic oligonucleotide
gcgcccatggatctggcttctacactatggtgtcactatacttgtccaccctagg

SEQ ID NO: 412631 - DNA, 53 bp, Artificial
  Synthetic oligonucleotide
gcgcccatggcacgtgagaaatgatctaattgcggcgctgagggaatacaaac

SEQ ID NO: 412632 - DNA, 60 bp, Artificial
  Synthetic oligonucleotide
gcgccccagaagactacagcgcgatcctgtccgctctgatgccgaacgctgcgaactacg

SEQ ID NO: 412633 - DNA, 60 bp, Artificial
  Synthetic oligonucleotide
gcgcccctgatatgcgcgagtgggcagtcaaggagagtggcaatactatctgtatactca

SEQ ID NO: 412634 - DNA, 55 bp, Artificial
  Synthetic oligonucleotide
gcgcccgcgataatagatcacgcccacgacacgccctagcgctcttatcacacgg

SEQ ID NO: 412635 - DNA, 51 bp, Artificial
  Synthetic oligonucleotide
gcgcccgggggctgctagtggacccttacccgtgggtggcccccccgcggc

SEQ ID NO: 412636 - DNA, 58 bp, Artificial
  Synthetic oligonucleotide
gcgcccgtaaaagaaagtggtccccacgcacgtgttgctgtcggccagtcatattcac

SEQ ID NO: 412637 - DNA, 55 bp, Artificial
  Synthetic oligonucleotide
gcgcccgtggtacatccaccccgtgattgaacccgccacttacgagcagtctgtc

SEQ ID NO: 412638 - DNA, 60 bp, Artificial
  Synthetic oligonucleotide
gcgccctggagaacatagggttctgcttggagggtggatgccttgtgcccttgggttgca

SEQ ID NO: 412639 - DNA, 55 bp, Artificial
  Synthetic oligonucleotide
gcgccctgtattctctgtagtctcggtacttcacccgcagtgcgatgcccacgag

SEQ ID NO: 412640 - DNA, 55 bp, Artificial
  Synthetic oligonucleotide
gcgccctgtcgggaccgccacaaattgccgtgaatcgaaaaaagttgtatgaggg

SEQ ID NO: 412641 - DNA, 59 bp, Artificial
  Synthetic oligonucleotide
gcgccctgtcgtgactggaagtactagcgggatgacgtgtccgggaagcagccttgtcc

SEQ ID NO: 412642 - DNA, 55 bp, Artificial
  Synthetic oligonucleotide
gcgccctgtcgtgctgttcatttgtgccttaatcgccctttgggttctgtttggt

SEQ ID NO: 412643 - DNA, 55 bp, Artificial
  Synthetic oligonucleotide
gcgccgagcataaactttgggaatggcgtggttcattctcaggcggtatctgggc

SEQ ID NO: 412644 - DNA, 55 bp, Artificial
  Synthetic oligonucleotide
gcgccgcgattcccatactacccgttcttctctaaaattagatgcttcgctcctc

SEQ ID NO: 412645 - DNA, 55 bp, Artificial
  Synthetic oligonucleotide
gcgccgctgagagggatgcggttgggttcgcgtgcgcgcagtcataaaggctcat

SEQ ID NO: 412646 - DNA, 55 bp, Artificial
  Synthetic oligonucleotide
gcgccgctggcagattttagcaagtttccagtggcagtcaaccctaactcccagt

SEQ ID NO: 412647 - DNA, 50 bp, Artificial
  Synthetic oligonucleotide
gcgccggaccagaaccgagcgagtgtcctcgtcaatcgagtccatgccaa

SEQ ID NO: 412648 - DNA, 58 bp, Artificial
  Synthetic oligonucleotide
gcgccggaggcgggaacaaggtggtggatgagtgctacatccccaattacttgctccc

SEQ ID NO: 412649 - DNA, 55 bp, Artificial
  Synthetic oligonucleotide
gcgccggcagtacaatttgtctacttccccgcttacgtcatctgttgcctcaggt

SEQ ID NO: 412650 - DNA, 55 bp, Artificial
  Synthetic oligonucleotide
gcgccggcctatcaaagagtgctctcccatatcagtttcgaataggttcgcccca

SEQ ID NO: 412651 - DNA, 55 bp, Artificial
  Synthetic oligonucleotide
gcgccggtgtctcgtgctcttaatgtggtcccgctcgtgacgtggtgctctcttg

SEQ ID NO: 412652 - DNA, 54 bp, Artificial
  Synthetic oligonucleotide
gcgccgtaactctgcttaacttgacggggtttggtccaatttcctatgttcgag

SEQ ID NO: 412653 - DNA, 60 bp, Artificial
  Synthetic oligonucleotide
gcgccgtattgaatgcaattctagagggcaagaagttataccctgcactagtttctcacg

SEQ ID NO: 412654 - DNA, 60 bp, Artificial
  Synthetic oligonucleotide
gcgccgtcttgcaagtgtggagtctccagaccctcagaaacagacggagtgttcgtggac

SEQ ID NO: 412655 - DNA, 55 bp, Artificial
  Synthetic oligonucleotide
gcgccgtgtgttgaccatagctactattactctacttcctgatgcagagagattt

SEQ ID NO: 412656 - DNA, 55 bp, Artificial
  Synthetic oligonucleotide
gcgccgttccgcgaaggtcctatcgagaccatgcgtgacagaatgtcgtgggacg

SEQ ID NO: 412657 - DNA, 55 bp, Artificial
  Synthetic oligonucleotide
gcgccgttgggaagttgatcggagtagtaggcgtcggtttgtggtacgggagcaa

SEQ ID NO: 412658 - DNA, 59 bp, Artificial
  Synthetic oligonucleotide
gcgccgtttgatgcaaccattgctccggttttccgggtcacagcaaatggcctatacca

SEQ ID NO: 412659 - DNA, 60 bp, Artificial
  Synthetic oligonucleotide
gcgcctaagcccgactgtccgaccaacggagatggcagtgaaccgtctgctcggcgagtg

SEQ ID NO: 412660 - DNA, 56 bp, Artificial
  Synthetic oligonucleotide
gcgcctaagctctcggaagttccgattcccactgttttgaatgatccgggtcctcg

SEQ ID NO: 412661 - DNA, 55 bp, Artificial
  Synthetic oligonucleotide
gcgcctaatagttagtaactctgcaaggactgggcagagacatggagctctcatg

SEQ ID NO: 412662 - DNA, 59 bp, Artificial
  Synthetic oligonucleotide
gcgcctacacaggccttcctatcgataaattcagagctctcggtcttaacaccgaggat

SEQ ID NO: 412663 - DNA, 59 bp, Artificial
  Synthetic oligonucleotide
gcgcctacagatatgtatgagttacggaatattatgattttgagaggttatagttacgt

SEQ ID NO: 412664 - DNA, 54 bp, Artificial
  Synthetic oligonucleotide
gcgcctaccacccccaaatccaaaagggcttctgtgcccgacgtgcctttggta

SEQ ID NO: 412665 - DNA, 58 bp, Artificial
  Synthetic oligonucleotide
gcgcctactacaggatcaggctgcactcggataccctcattcgacatgagcactaccc

SEQ ID NO: 412666 - DNA, 55 bp, Artificial
  Synthetic oligonucleotide
gcgcctagtatgggcctgttctggtgtggaggttggacgtggacaacccttaggt

SEQ ID NO: 412667 - DNA, 59 bp, Artificial
  Synthetic oligonucleotide
gcgcctatattataggtaacggggcaatagttgaggtagatacaagcgacagagttgct

SEQ ID NO: 412668 - DNA, 59 bp, Artificial
  Synthetic oligonucleotide
gcgcctatcttgctccagctgtgcctgaatcggttccggttaatgtaggagttttactc

SEQ ID NO: 412669 - DNA, 55 bp, Artificial
  Synthetic oligonucleotide
gcgcctcaacgacaatactgagaaggatcaatattcactcccaggtatttctacg

SEQ ID NO: 412670 - DNA, 57 bp, Artificial
  Synthetic oligonucleotide
gcgcctccctacgtcccagtctctggtgcctggttcgacctcactcaatatccccgt

SEQ ID NO: 412671 - DNA, 54 bp, Artificial
  Synthetic oligonucleotide
gcgcctccttccgcagatctgcctcatctgggtccgatacccgagactccaggg

SEQ ID NO: 412672 - DNA, 58 bp, Artificial
  Synthetic oligonucleotide
gcgcctcgagggactttcgagaacgagttagcactattgcacaattcggtggtaatta

SEQ ID NO: 412673 - DNA, 55 bp, Artificial
  Synthetic oligonucleotide
gcgcctcgatactttgaaacgctattagattataatccgctaggagttagcctaa

SEQ ID NO: 412674 - DNA, 55 bp, Artificial
  Synthetic oligonucleotide
gcgcctcgtgtggtcatgtcttctccttcggtagatgtcaagctgtcgtcaccac

SEQ ID NO: 412675 - DNA, 54 bp, Artificial
  Synthetic oligonucleotide
gcgcctctttacctgcgagggcccggtagggaccgagcgtctttgatttaaagc

SEQ ID NO: 412676 - DNA, 55 bp, Artificial
  Synthetic oligonucleotide
gcgcctgaagacgctcctggagagggacccagacgaccgcactatcttctgggtt

SEQ ID NO: 412677 - DNA, 55 bp, Artificial
  Synthetic oligonucleotide
gcgcctgagccctgagtggcttgccagctatcagccttgcctgagtctgagtagc

SEQ ID NO: 412678 - DNA, 56 bp, Artificial
  Synthetic oligonucleotide
gcgcctgaggagcttagataactgtgttaatacttggtccctaagttttatggccc

SEQ ID NO: 412679 - DNA, 60 bp, Artificial
  Synthetic oligonucleotide
gcgcctgcactatcgcaaccagggctggcgctcagttgagacctctggtgtcgctgagga

SEQ ID NO: 412680 - DNA, 56 bp, Artificial
  Synthetic oligonucleotide
gcgcctgcgcagtagaaactgctgacaagggactttctaagggactttccaagggg

SEQ ID NO: 412681 - DNA, 55 bp, Artificial
  Synthetic oligonucleotide
gcgcctggactggagcaagaaagtcccaaacacagagccctacatgttcaagacc

SEQ ID NO: 412682 - DNA, 58 bp, Artificial
  Synthetic oligonucleotide
gcgcctggtatggtccgcccctacgcttgatggattagttgtagccccacctcaggtc

SEQ ID NO: 412683 - DNA, 55 bp, Artificial
  Synthetic oligonucleotide
gcgcctgttttataaaccctcccccccttgtgagaaacttagaagcaatgcacac

SEQ ID NO: 412684 - DNA, 60 bp, Artificial
  Synthetic oligonucleotide
gcgccttacggcctcaccagaattggccgaggttgtggcccaagatttgctagcaccatc

SEQ ID NO: 412685 - DNA, 55 bp, Artificial
  Synthetic oligonucleotide
gcgccttatttattcgagctcgagagataggatggagaaagtggggtactttcac

SEQ ID NO: 412686 - DNA, 60 bp, Artificial
  Synthetic oligonucleotide
gcgccttcagcaactgctatccatatgatgtaccagactatgcatcactcaggtctctaa

SEQ ID NO: 412687 - DNA, 60 bp, Artificial
  Synthetic oligonucleotide
gcgccttcctcttgtctccagaatgggcttctgacattacagaatatggcgttcttgcaa

SEQ ID NO: 412688 - DNA, 60 bp, Artificial
  Synthetic oligonucleotide
gcgccttgtatactctactgacaggctgttcataacagccccgactagcggaattgttat

SEQ ID NO: 412689 - DNA, 55 bp, Artificial
  Synthetic oligonucleotide
gcgccttgtgagtaactatacatttatgttgtgtagtccagtccttgtggcccgg

SEQ ID NO: 412690 - DNA, 57 bp, Artificial
  Synthetic oligonucleotide
gcgcctttcccctgagccagacctggctcgagtggtgatggacgaccttttggcccc

SEQ ID NO: 412691 - DNA, 55 bp, Artificial
  Synthetic oligonucleotide
gcgcctttgaatcaggtgactttgctcgtccaaacttgttcctagtcgagcttcc

SEQ ID NO: 412692 - DNA, 53 bp, Artificial
  Synthetic oligonucleotide
gcgccttttggttctgctgtgtactggagcccgtatccaggtatgtggcttcc

SEQ ID NO: 412693 - DNA, 55 bp, Artificial
  Synthetic oligonucleotide
gcgcgaaaggagggcaatgtagaatctaccggtgcaacgaagcttggttatttac

SEQ ID NO: 412694 - DNA, 60 bp, Artificial
  Synthetic oligonucleotide
gcgcgaacaaacaatgaatcagagatctgttcaagataatgaggttgtaggtatagttcg

SEQ ID NO: 412695 - DNA, 60 bp, Artificial
  Synthetic oligonucleotide
gcgcgaaccgatgttattcaagcgtgatgacattgagttgcacggtgacttgctagctag

SEQ ID NO: 412696 - DNA, 54 bp, Artificial
  Synthetic oligonucleotide
gcgcgaacgaaaatctacccgctaaagaataaggataactggaacgaatcaccg

SEQ ID NO: 412697 - DNA, 60 bp, Artificial
  Synthetic oligonucleotide
gcgcgaagaagcgaacctatcgcaaaaaagcctcaatgtcaaagcggagcatcctcaaca

SEQ ID NO: 412698 - DNA, 55 bp, Artificial
  Synthetic oligonucleotide
gcgcgacaaccacgactactgtcccattgttgggtccctcaatgatgtaagtcgc

SEQ ID NO: 412699 - DNA, 55 bp, Artificial
  Synthetic oligonucleotide
gcgcgacacgatgaacgaaatgtcgagtgacttccggcaattccgtggtgacgca

SEQ ID NO: 412700 - DNA, 54 bp, Artificial
  Synthetic oligonucleotide
gcgcgaccaacgaagggttaaatattagagttcttggcgcgtaaccaaaagatc

SEQ ID NO: 412701 - DNA, 55 bp, Artificial
  Synthetic oligonucleotide
gcgcgaccagcaaacggcaatcgagtgatcctggaccgggtaatcatgcagcagc

SEQ ID NO: 412702 - DNA, 60 bp, Artificial
  Synthetic oligonucleotide
gcgcgacccaaggtttaaacatagagtatatcagcaactgagtgctgtaactctgcttaa

SEQ ID NO: 412703 - DNA, 55 bp, Artificial
  Synthetic oligonucleotide
gcgcgacccgctgtacaaattgctctgaacaaccgtgaaataatggatgccgtag

SEQ ID NO: 412704 - DNA, 58 bp, Artificial
  Synthetic oligonucleotide
gcgcgactggttaatactcttaccactctccgcctacttagtcgttagcgctgtcttg

SEQ ID NO: 412705 - DNA, 55 bp, Artificial
  Synthetic oligonucleotide
gcgcgagcaaggtagcctacaccttgcagacggacgtcaactccatacagcggac

SEQ ID NO: 412706 - DNA, 55 bp, Artificial
  Synthetic oligonucleotide
gcgcgagcacgaacgtagacaccatctactggagctgatcatggcatacaagttc

SEQ ID NO: 412707 - DNA, 55 bp, Artificial
  Synthetic oligonucleotide
gcgcgagcatggtgggcatgtttgacatcaaatacgagcaggtcttggcaaggct

SEQ ID NO: 412708 - DNA, 55 bp, Artificial
  Synthetic oligonucleotide
gcgcgagcctctgctgtactgaatggtgactgacatgaagtgtaatcgtaagcgc

SEQ ID NO: 412709 - DNA, 60 bp, Artificial
  Synthetic oligonucleotide
gcgcgaggatgcatagtcacggtaatttatcaataacgacgtctaataagcagcgtttct

SEQ ID NO: 412710 - DNA, 60 bp, Artificial
  Synthetic oligonucleotide
gcgcgaggattcacagtcacgggcagcttgccatcactccatctttgaaagaccggtttt

SEQ ID NO: 412711 - DNA, 55 bp, Artificial
  Synthetic oligonucleotide
gcgcgaggcaacgaagagagcagcaatgcggagtgacaagtacagccagctagtg

SEQ ID NO: 412712 - DNA, 60 bp, Artificial
  Synthetic oligonucleotide
gcgcgagtatactcagagattcctccgaagtcgcatgcgtgcgttgggtttgaataacga

SEQ ID NO: 412713 - DNA, 55 bp, Artificial
  Synthetic oligonucleotide
gcgcgagtattaccatttcaaccgtgctcattttggaaaaccatccggcgcccgg

SEQ ID NO: 412714 - DNA, 60 bp, Artificial
  Synthetic oligonucleotide
gcgcgagtgctaaacatgtcgcgcgatccctcccaatcagaataaagcctgaaagctatg

SEQ ID NO: 412715 - DNA, 60 bp, Artificial
  Synthetic oligonucleotide
gcgcgagtgttgtactgacacgtggcaagagggatggttaatatcattgtcgtggtgggt

SEQ ID NO: 412716 - DNA, 51 bp, Artificial
  Synthetic oligonucleotide
gcgcgagttacgtcagcgacagtaataccctgctccaggacacgcgcaaga

SEQ ID NO: 412717 - DNA, 60 bp, Artificial
  Synthetic oligonucleotide
gcgcgagttcatcgccacttccaaccaaggcggcgcaggttctaatccgagcagccagac

SEQ ID NO: 412718 - DNA, 58 bp, Artificial
  Synthetic oligonucleotide
gcgcgataacaaagcacccaggtcacccctccatgttcacgtgctgaacgttccttta

SEQ ID NO: 412719 - DNA, 55 bp, Artificial
  Synthetic oligonucleotide
gcgcgataaggggctttatgggtatgaaaactcatgccatttgatgtcgaagtac

SEQ ID NO: 412720 - DNA, 60 bp, Artificial
  Synthetic oligonucleotide
gcgcgatcaatgcaccagctaatacacaacaatttgaacacgttgtacagctccgtagag

SEQ ID NO: 412721 - DNA, 60 bp, Artificial
  Synthetic oligonucleotide
gcgcgatgaagcgataacgggtggatggcgacaggaagacttcaagttacataagatact

SEQ ID NO: 412722 - DNA, 60 bp, Artificial
  Synthetic oligonucleotide
gcgcgatgactgactatggcccattgtactatgtgaaggacgtggctatatttggaccat

SEQ ID NO: 412723 - DNA, 52 bp, Artificial
  Synthetic oligonucleotide
gcgcgatgtactgctacgtcgcgacacgttctgaaaccgattactacgctgg

SEQ ID NO: 412724 - DNA, 59 bp, Artificial
  Synthetic oligonucleotide
gcgcgattaccaggacggtaacttctgatgctgaaggttcccttcgcatttatctagcc

SEQ ID NO: 412725 - DNA, 53 bp, Artificial
  Synthetic oligonucleotide
gcgcgattactttgacgcgatgagccccagtgagagagaacacctcctatttt

SEQ ID NO: 412726 - DNA, 55 bp, Artificial
  Synthetic oligonucleotide
gcgcgattatgaattctataccttatgctaccgcctcattgcaggttacatctcc

SEQ ID NO: 412727 - DNA, 60 bp, Artificial
  Synthetic oligonucleotide
gcgcgattctggattacaagcttctagcgggaatcctcatcggtgttatcatcgcaattc

SEQ ID NO: 412728 - DNA, 60 bp, Artificial
  Synthetic oligonucleotide
gcgcgattgcggaacttggattacattgctcaacctatatttatcaagatttgctcgttg

SEQ ID NO: 412729 - DNA, 60 bp, Artificial
  Synthetic oligonucleotide
gcgcgcaagatggtcggaggccattacgtgcaaatggtcatccttaagatgggggcgctt

SEQ ID NO: 412730 - DNA, 55 bp, Artificial
  Synthetic oligonucleotide
gcgcgcaatagtttgttggaactagcccgtttccaaaagaacagaactgacaacg

SEQ ID NO: 412731 - DNA, 60 bp, Artificial
  Synthetic oligonucleotide
gcgcgcacacgggctcattcgtgcatgcatgctggtgcggaaggttgctgggggtcatta

SEQ ID NO: 412732 - DNA, 55 bp, Artificial
  Synthetic oligonucleotide
gcgcgcactaatattaccgcgccttcttttcctgcggtagggcccgagcgatttg

SEQ ID NO: 412733 - DNA, 57 bp, Artificial
  Synthetic oligonucleotide
gcgcgcacttatgaattatgttgacctggcgtccatgtgggtcggttggatgaattc

SEQ ID NO: 412734 - DNA, 60 bp, Artificial
  Synthetic oligonucleotide
gcgcgcaggcacttacaatgattgcggacttttgagaatgtgactctggtagccgcaata

SEQ ID NO: 412735 - DNA, 55 bp, Artificial
  Synthetic oligonucleotide
gcgcgcataatggcggacctaggcctaaaacccccaggaagcgggtctatggttg

SEQ ID NO: 412736 - DNA, 60 bp, Artificial
  Synthetic oligonucleotide
gcgcgcatgagcatgtcagaatggataacatttagaggagataaagtacagggggatggg

SEQ ID NO: 412737 - DNA, 57 bp, Artificial
  Synthetic oligonucleotide
gcgcgccaatctccacgacgctgactaacacccccgcacgtagggcctttaatctta

SEQ ID NO: 412738 - DNA, 50 bp, Artificial
  Synthetic oligonucleotide
gcgcgccgctaagggtaatgctcacgaaattagaatccgtgtctccgtac

SEQ ID NO: 412739 - DNA, 58 bp, Artificial
  Synthetic oligonucleotide
gcgcgcctagatttaggcatacccagtgaactaccgaagtacgatatcgtcttcgtaa

SEQ ID NO: 412740 - DNA, 55 bp, Artificial
  Synthetic oligonucleotide
gcgcgcctgacatgagagagtgggcggtgaaggaaagtggtaacacgatatgtat

SEQ ID NO: 412741 - DNA, 56 bp, Artificial
  Synthetic oligonucleotide
gcgcgcctgcaccttttgggctgtcaacgcctactcctctggcgggtacgcgcagc

SEQ ID NO: 412742 - DNA, 55 bp, Artificial
  Synthetic oligonucleotide
gcgcgcctgcatcctgtgaccacgcttgcagaggggacgtacgaaacacccaaca

SEQ ID NO: 412743 - DNA, 55 bp, Artificial
  Synthetic oligonucleotide
gcgcgcctgtacataaggacaacggcgtttgctacaatgcccgtcacggcatgct

SEQ ID NO: 412744 - DNA, 59 bp, Artificial
  Synthetic oligonucleotide
gcgcgccttacccttcgaatatcgtcgcgagagtgcgaacggccctacggcacgtgtca

SEQ ID NO: 412745 - DNA, 55 bp, Artificial
  Synthetic oligonucleotide
gcgcgcctttattggatctgcttccacattcttagggaatgggttagctagagcc

SEQ ID NO: 412746 - DNA, 59 bp, Artificial
  Synthetic oligonucleotide
gcgcgcgactgtggctgttaagtaaggcggccagacgttacggcaatcttggaatcgta

SEQ ID NO: 412747 - DNA, 60 bp, Artificial
  Synthetic oligonucleotide
gcgcgcgagcattaccaaggctacgcggagtttcatacgcgcgtgcgcatagctggtgtg

SEQ ID NO: 412748 - DNA, 60 bp, Artificial
  Synthetic oligonucleotide
gcgcgcgagtgcttaacctgtatgacgtgatctcggcaatttgcgttgaggttgacaggc

SEQ ID NO: 412749 - DNA, 60 bp, Artificial
  Synthetic oligonucleotide
gcgcgcgatgatttaccgtatacatctgaggcttacgtacgtgcgtcgcgaattatcaat

SEQ ID NO: 412750 - DNA, 50 bp, Artificial
  Synthetic oligonucleotide
gcgcgcgcaaagacccaggggcattccgggctggtctcggacctgaatgc

SEQ ID NO: 412751 - DNA, 55 bp, Artificial
  Synthetic oligonucleotide
gcgcgcgtatccattgtcacggtaatttatctgtcgtacctgctttgaaggaccg

SEQ ID NO: 412752 - DNA, 55 bp, Artificial
  Synthetic oligonucleotide
gcgcgcgtttctacgcacctttcaggggagaactcaacattagtggcgaattcgt

SEQ ID NO: 412753 - DNA, 55 bp, Artificial
  Synthetic oligonucleotide
gcgcgctatttgtaagattgtcatgtggcatgaagtgcttaagggtgagaacaac

SEQ ID NO: 412754 - DNA, 56 bp, Artificial
  Synthetic oligonucleotide
gcgcgctcatcgcttagttatcgcgcggtcccctatttaaaacttgctccctaagt

SEQ ID NO: 412755 - DNA, 55 bp, Artificial
  Synthetic oligonucleotide
gcgcgctgttatcactcgcgaagccttggtgtgcgcacgcagcatcgttgcacag

SEQ ID NO: 412756 - DNA, 55 bp, Artificial
  Synthetic oligonucleotide
gcgcggaaatatgacgccttcctcgatccatggttgattcagatcgccatcaaca

SEQ ID NO: 412757 - DNA, 53 bp, Artificial
  Synthetic oligonucleotide
gcgcggagaagttttgctggacactttggttaaaccgaccaaaccgatccctc

SEQ ID NO: 412758 - DNA, 60 bp, Artificial
  Synthetic oligonucleotide
gcgcggagactaacgtagcgtggttgaaccatgcgctacgtgatatactttcgctagagg

SEQ ID NO: 412759 - DNA, 50 bp, Artificial
  Synthetic oligonucleotide
gcgcggagagtaaagttcaaacaaaattgacggccgatgaactaaagttg

SEQ ID NO: 412760 - DNA, 58 bp, Artificial
  Synthetic oligonucleotide
gcgcggagctgataatttccacctggttttgccagctgggggtaagttccgctcacta

SEQ ID NO: 412761 - DNA, 59 bp, Artificial
  Synthetic oligonucleotide
gcgcggaggaaagaaagatgacgtggcttatagttatgtggaggaccccacaaggcatg

SEQ ID NO: 412762 - DNA, 60 bp, Artificial
  Synthetic oligonucleotide
gcgcggaggatgcctcgggggcagatcgcgagctacgcacggtgtggtctgacgcgctgt

SEQ ID NO: 412763 - DNA, 54 bp, Artificial
  Synthetic oligonucleotide
gcgcggaggtagggtgccagggtgatttgtgcacgacacgacagtacacgtttc

SEQ ID NO: 412764 - DNA, 55 bp, Artificial
  Synthetic oligonucleotide
gcgcggagtgagtgcgcagtgcgcgaacacaccaatatggcggtcgatcaatcgc

SEQ ID NO: 412765 - DNA, 60 bp, Artificial
  Synthetic oligonucleotide
gcgcggcagtaccaacacggaggtgggcaaaccactacgctacgcagcagccttagctac

SEQ ID NO: 412766 - DNA, 58 bp, Artificial
  Synthetic oligonucleotide
gcgcggccatcaacaaccaaggggcgcttcccgggatggtgtggcaaaacagagacat

SEQ ID NO: 412767 - DNA, 55 bp, Artificial
  Synthetic oligonucleotide
gcgcggcctggccagaatgcaataacgggaggcgctgtggctgatttcgataacc

SEQ ID NO: 412768 - DNA, 55 bp, Artificial
  Synthetic oligonucleotide
gcgcggctatgatgccatgacggcggcttatgcccatgccagaaagacacggagg

SEQ ID NO: 412769 - DNA, 55 bp, Artificial
  Synthetic oligonucleotide
gcgcggctgtagtgacggagaagaaggccgatccctgcttgactttcaaccccga

SEQ ID NO: 412770 - DNA, 58 bp, Artificial
  Synthetic oligonucleotide
gcgcgggaacccaagaggacgcggcgagcctacgagtcttcacggaggctatgactag

SEQ ID NO: 412771 - DNA, 55 bp, Artificial
  Synthetic oligonucleotide
gcgcgggaacgagttcgctacatctattgttcagcatcccgcgtgcagcgcggaa

SEQ ID NO: 412772 - DNA, 52 bp, Artificial
  Synthetic oligonucleotide
gcgcgggcaagaaagtcgtgtttaacgacaagcctaaagttaaggaggtacc

SEQ ID NO: 412773 - DNA, 60 bp, Artificial
  Synthetic oligonucleotide
gcgcgggcagaggagccgagctagccagccagccggcctagctagccagccttgccgtcg

SEQ ID NO: 412774 - DNA, 55 bp, Artificial
  Synthetic oligonucleotide
gcgcgggcctgagcgcatatacaaaatcgtctctcaagagagccattaaggaggg

SEQ ID NO: 412775 - DNA, 53 bp, Artificial
  Synthetic oligonucleotide
gcgcgggtagccctgcctagaaactccgcgtaggtgtcgccgtttaggatcat

SEQ ID NO: 412776 - DNA, 50 bp, Artificial
  Synthetic oligonucleotide
gcgcggtcgcaaacgtgtttctcagctcctccaacctccgcaagtcggcg

SEQ ID NO: 412777 - DNA, 55 bp, Artificial
  Synthetic oligonucleotide
gcgcggtctcaccaccttggcgtggaataatgcgtatactaatgccaacagcgtg

SEQ ID NO: 412778 - DNA, 55 bp, Artificial
  Synthetic oligonucleotide
gcgcggtgaatggtgggatggatatgacggggaagatgtcgtcatcttggacgac

SEQ ID NO: 412779 - DNA, 55 bp, Artificial
  Synthetic oligonucleotide
gcgcggttgaacgtaacggccatggtgcgggtactccttcgtggttgtgttgcgg

SEQ ID NO: 412780 - DNA, 55 bp, Artificial
  Synthetic oligonucleotide
gcgcggttgacaattctaagtgcgctctcatgaagcttgctggctcacactttga

SEQ ID NO: 412781 - DNA, 58 bp, Artificial
  Synthetic oligonucleotide
gcgcggttttggacgtgttcaatcactactctcccgtgatcaaacttgtacgctcgta

SEQ ID NO: 412782 - DNA, 55 bp, Artificial
  Synthetic oligonucleotide
gcgcgtaaccccatttctttcatggtcccgtaataaacagccaacgcacgccgcg

SEQ ID NO: 412783 - DNA, 55 bp, Artificial
  Synthetic oligonucleotide
gcgcgtacaaacatacctcagcgagactatttgtggggtgatgacgcctacgcaa

SEQ ID NO: 412784 - DNA, 55 bp, Artificial
  Synthetic oligonucleotide
gcgcgtacgcatcgtgtcgttatcgaattcaagaccgaagtgcccgctggggcca

SEQ ID NO: 412785 - DNA, 60 bp, Artificial
  Synthetic oligonucleotide
gcgcgtagcactgatgaaaaatacggtgctataagaagtaagatggacgcattggagtat

SEQ ID NO: 412786 - DNA, 57 bp, Artificial
  Synthetic oligonucleotide
gcgcgtatatgactatgggcgtcggataccttggatgcacctctcagaaacggtaac

SEQ ID NO: 412787 - DNA, 54 bp, Artificial
  Synthetic oligonucleotide
gcgcgtcaaagtttaccacatcctggagtttccggacaaagggagggagacact

SEQ ID NO: 412788 - DNA, 55 bp, Artificial
  Synthetic oligonucleotide
gcgcgtcaagactgaaacagaaatggacttaattgatttgtactccttcaatctc

SEQ ID NO: 412789 - DNA, 60 bp, Artificial
  Synthetic oligonucleotide
gcgcgtcaggagtgttcacgccaacatactgaatgacatatcacctcagatcatctctga

SEQ ID NO: 412790 - DNA, 57 bp, Artificial
  Synthetic oligonucleotide
gcgcgtcgtatcatcttcggaggttaatatggaatggttagtcgatttatttaacaa

SEQ ID NO: 412791 - DNA, 50 bp, Artificial
  Synthetic oligonucleotide
gcgcgtcgtttcgataagttgtgggcggctattgactcacacgtgggcga

SEQ ID NO: 412792 - DNA, 60 bp, Artificial
  Synthetic oligonucleotide
gcgcgtgaacaagcagttagcgagtacgtgaaggttcatcgtctgcagttgactcgtaaa

SEQ ID NO: 412793 - DNA, 55 bp, Artificial
  Synthetic oligonucleotide
gcgcgtgaagcaaaatcagttcagaagctacatcgatgagggttgcaacagcatg

SEQ ID NO: 412794 - DNA, 55 bp, Artificial
  Synthetic oligonucleotide
gcgcgtgacaggaaagacttcataaagaacctcaggctcgccttggacagtcggc

SEQ ID NO: 412795 - DNA, 60 bp, Artificial
  Synthetic oligonucleotide
gcgcgtgatcgcattgttacaacttcggccgcgtatgatgtagatttggaatcgcaattc

SEQ ID NO: 412796 - DNA, 55 bp, Artificial
  Synthetic oligonucleotide
gcgcgtgatggagtcaacattggagtggagcgcctcacaacagtgagtggacccg

SEQ ID NO: 412797 - DNA, 55 bp, Artificial
  Synthetic oligonucleotide
gcgcgtgccgatagtcacgctgtagctggccctaagcttcgaagaagctctcccc

SEQ ID NO: 412798 - DNA, 55 bp, Artificial
  Synthetic oligonucleotide
gcgcgtgctggactgtctttcacggtgcgggctcaaagaccttagccgccgcaaa

SEQ ID NO: 412799 - DNA, 58 bp, Artificial
  Synthetic oligonucleotide
gcgcgtgggagtgcgctgcaaaagtagactttctctctcctaaaactcgtcggaactc

SEQ ID NO: 412800 - DNA, 55 bp, Artificial
  Synthetic oligonucleotide
gcgcgtgggatgctagtgtcaatcttaacgtttcattttcgcttcgcggggtggt

SEQ ID NO: 412801 - DNA, 53 bp, Artificial
  Synthetic oligonucleotide
gcgcgtggtggtttcgttaaacttgctgaagagagtttggagatcaaaattcc

SEQ ID NO: 412802 - DNA, 55 bp, Artificial
  Synthetic oligonucleotide
gcgcgtgtaccttctgggctgttaacgcctactcctctggtgggtacgcgcagct

SEQ ID NO: 412803 - DNA, 60 bp, Artificial
  Synthetic oligonucleotide
gcgcgtgtacgacacaggctgcaagttccatgccgcttcgaatacctcgtccaaaaatat

SEQ ID NO: 412804 - DNA, 56 bp, Artificial
  Synthetic oligonucleotide
gcgcgtgtctagcctatatattaacgacttacccgctaatttgttaaaggattctg

SEQ ID NO: 412805 - DNA, 56 bp, Artificial
  Synthetic oligonucleotide
gcgcgttaagacccactgtgagtacatccgccagtttgaatgtaaatatgccagta

SEQ ID NO: 412806 - DNA, 60 bp, Artificial
  Synthetic oligonucleotide
gcgcgttaattgcggcggagtgcaaattgggcgatgtgtatcacaccttaagatcgaagt

SEQ ID NO: 412807 - DNA, 55 bp, Artificial
  Synthetic oligonucleotide
gcgcgttacgtgctaaacattcggactgaagatggaaacatgcttagaaagcccg

SEQ ID NO: 412808 - DNA, 56 bp, Artificial
  Synthetic oligonucleotide
gcgcgttagcgccaccccgcaatgtgcgtgtgaccgggtgttaccagtgcggtact

SEQ ID NO: 412809 - DNA, 55 bp, Artificial
  Synthetic oligonucleotide
gcgcgttatgttctgcgataccgtagggatgcggactatgcaggatattggccgg

SEQ ID NO: 412810 - DNA, 55 bp, Artificial
  Synthetic oligonucleotide
gcgcgttcagttagtgtaagatggttatagctcatgttggcactccttgtatgtg

SEQ ID NO: 412811 - DNA, 55 bp, Artificial
  Synthetic oligonucleotide
gcgcgttctcacgacgagatctgcacctgcggacgatggaggagtcactggttcc

SEQ ID NO: 412812 - DNA, 55 bp, Artificial
  Synthetic oligonucleotide
gcgcgttctcactccacagttactctccagttgagctcaatagggtagcaggggc

SEQ ID NO: 412813 - DNA, 60 bp, Artificial
  Synthetic oligonucleotide
gcgcgttgaaagacttttcatatgggacgtgtcatcagatcggtcgcagatggacaatga

SEQ ID NO: 412814 - DNA, 60 bp, Artificial
  Synthetic oligonucleotide
gcgcgttgagtcatctgtgttgagggtccgaaacccaacattacatgaaacggctgatga

SEQ ID NO: 412815 - DNA, 60 bp, Artificial
  Synthetic oligonucleotide
gcgcgtttagagataaatgtgaatccgtgtaagagtgcctggagttatcaatttctacga

SEQ ID NO: 412816 - DNA, 55 bp, Artificial
  Synthetic oligonucleotide
gcgcgtttcgatatatcatggaactcgatttgttacctccactacgggcgtggct

SEQ ID NO: 412817 - DNA, 55 bp, Artificial
  Synthetic oligonucleotide
gcgcgtttctatgacatccgtcctgctataatggggcaggcgctttcacgacaac

SEQ ID NO: 412818 - DNA, 54 bp, Artificial
  Synthetic oligonucleotide
gcgctaaacctctgagacccgttgatttggctatcaccccttgggatgacccca

SEQ ID NO: 412819 - DNA, 60 bp, Artificial
  Synthetic oligonucleotide
gcgctaaagggcatgctcaaaatcggaaaagatcaatctgagcgtatcacacggttgtat

SEQ ID NO: 412820 - DNA, 56 bp, Artificial
  Synthetic oligonucleotide
gcgctaaataacgatcggtttttccaattaccactaatgttttcgaacatgcgata

SEQ ID NO: 412821 - DNA, 55 bp, Artificial
  Synthetic oligonucleotide
gcgctaaggggatcagccaaacatattgaagaatgctcttgttatgggcacaatc

SEQ ID NO: 412822 - DNA, 56 bp, Artificial
  Synthetic oligonucleotide
gcgctaataattgcgttataatgactccggttcctaccgctgacgccgttttggcc

SEQ ID NO: 412823 - DNA, 60 bp, Artificial
  Synthetic oligonucleotide
gcgctaatcagccaatgccagcagcacgttttacatataaacttcgaccactggacggac

SEQ ID NO: 412824 - DNA, 60 bp, Artificial
  Synthetic oligonucleotide
gcgctaatgcggtctacttttgattctatggcaggctggcataaggttgtgctgtgtgga

SEQ ID NO: 412825 - DNA, 53 bp, Artificial
  Synthetic oligonucleotide
gcgctaatgggttaggaataaacgttaccagtccaatttcggtggccaatggt

SEQ ID NO: 412826 - DNA, 55 bp, Artificial
  Synthetic oligonucleotide
gcgctacaggcaataaccacttttgtatcaattgctggggtggtttatgtaatct

SEQ ID NO: 412827 - DNA, 60 bp, Artificial
  Synthetic oligonucleotide
gcgctacagtggcgaatgaggttaacgcagccgctctctcatctggtgaaacggcaaaac

SEQ ID NO: 412828 - DNA, 55 bp, Artificial
  Synthetic oligonucleotide
gcgctacatcggggcctagtcgtgcgcgtaacgtcacaactgccggggcaaatcg

SEQ ID NO: 412829 - DNA, 60 bp, Artificial
  Synthetic oligonucleotide
gcgctacgagttgatatgacaccacatgaaccactacgtgttgtgactaacaataacata

SEQ ID NO: 412830 - DNA, 52 bp, Artificial
  Synthetic oligonucleotide
gcgctacgcttaacccctccaatgtttcaggcttaggactgccgggcatagg

SEQ ID NO: 412831 - DNA, 57 bp, Artificial
  Synthetic oligonucleotide
gcgctactagcgaaatttagagacagtgttagtaatataacaggaatactcgaaaac

SEQ ID NO: 412832 - DNA, 55 bp, Artificial
  Synthetic oligonucleotide
gcgctacttaagggagtgcgagattttaatccaatctctgcttgcgtatggctcc

SEQ ID NO: 412833 - DNA, 55 bp, Artificial
  Synthetic oligonucleotide
gcgctacttggcaccaggacaaagatcatccttatcgcacgtggacgtaccatgg

SEQ ID NO: 412834 - DNA, 57 bp, Artificial
  Synthetic oligonucleotide
gcgctagaaacggcatatagtacgctcgtttaccagttggggcttgtcaaaagcggc

SEQ ID NO: 412835 - DNA, 50 bp, Artificial
  Synthetic oligonucleotide
gcgctagcacagcatggagcacgcacccctcgctgaaacatcaggagccg

SEQ ID NO: 412836 - DNA, 59 bp, Artificial
  Synthetic oligonucleotide
gcgctagcgagggtggcagacacagttcgtagtgggccgtctaactctgaacaaattcc

SEQ ID NO: 412837 - DNA, 60 bp, Artificial
  Synthetic oligonucleotide
gcgctagcggctgataactacagcgagtgggccagggtgatacacgcggctgaccaacat

SEQ ID NO: 412838 - DNA, 50 bp, Artificial
  Synthetic oligonucleotide
gcgctagtcaagatcatatcagctctagtcatagtggtaagaaatcatga

SEQ ID NO: 412839 - DNA, 58 bp, Artificial
  Synthetic oligonucleotide
gcgctagtgtgttcgtcgggcttagctcgaccctgtttcaccttataatactatataa

SEQ ID NO: 412840 - DNA, 60 bp, Artificial
  Synthetic oligonucleotide
gcgctataacatcactgggtatggataagtatgaaatatcaccaggtggccacactgtcg

SEQ ID NO: 412841 - DNA, 55 bp, Artificial
  Synthetic oligonucleotide
gcgctatacgattctttagttgctaaactgggacatgaacctacacgtgaggagt

SEQ ID NO: 412842 - DNA, 60 bp, Artificial
  Synthetic oligonucleotide
gcgctatactacgccgccagtataatctatcaacatccccgctcacgtctaccatcgcta

SEQ ID NO: 412843 - DNA, 55 bp, Artificial
  Synthetic oligonucleotide
gcgctatatcagctggtgcttatggtggatccagtatttcctggctagggtagaa

SEQ ID NO: 412844 - DNA, 60 bp, Artificial
  Synthetic oligonucleotide
gcgctatatcagctggtgcttatggtggcttcagtactttctgaccagagcagaagcgca

SEQ ID NO: 412845 - DNA, 55 bp, Artificial
  Synthetic oligonucleotide
gcgctatgagagagagacctatgttgtggagcaaagattcacctcttatgctgat

SEQ ID NO: 412846 - DNA, 55 bp, Artificial
  Synthetic oligonucleotide
gcgctatggactttagtgttttgcaggccaacaaatgtgacgtgccccttgacat

SEQ ID NO: 412847 - DNA, 60 bp, Artificial
  Synthetic oligonucleotide
gcgctattgtgacaccgtctctgtcgttggaggatcacggtaaggctggcacttttccga

SEQ ID NO: 412848 - DNA, 55 bp, Artificial
  Synthetic oligonucleotide
gcgctcaactcgtaaaattccgacaacacatcgcggtacctattgattatatacg

SEQ ID NO: 412849 - DNA, 60 bp, Artificial
  Synthetic oligonucleotide
gcgctcaaggcaaaagtcataatccagcaatggacgaagtggctaacactactgagccag

SEQ ID NO: 412850 - DNA, 60 bp, Artificial
  Synthetic oligonucleotide
gcgctcaagggctcattcgtgcatgcatgttagtgcggaaagccgctggaggtcattatg

SEQ ID NO: 412851 - DNA, 50 bp, Artificial
  Synthetic oligonucleotide
gcgctcaagtgcccctgcgttgagtttccgtctggggacctgccacgtag

SEQ ID NO: 412852 - DNA, 55 bp, Artificial
  Synthetic oligonucleotide
gcgctcaatacatcgcacccacggtaccctccggaataggtatgtcactactcct

SEQ ID NO: 412853 - DNA, 60 bp, Artificial
  Synthetic oligonucleotide
gcgctcaatcttgctagcacccgggtaaacataaccttagaacaactgaggactctgaca

SEQ ID NO: 412854 - DNA, 55 bp, Artificial
  Synthetic oligonucleotide
gcgctcaccgccgtgattactgcagcatatctgaccatctgccaccagcgctacc

SEQ ID NO: 412855 - DNA, 55 bp, Artificial
  Synthetic oligonucleotide
gcgctcagacatggcatctgttgcacgtgcagtctacgaagttgatctcatctcg

SEQ ID NO: 412856 - DNA, 60 bp, Artificial
  Synthetic oligonucleotide
gcgctcagcactcaaccccggagtgtagcttgggccgatgagtctggacagcccccactg

SEQ ID NO: 412857 - DNA, 55 bp, Artificial
  Synthetic oligonucleotide
gcgctccactggcaagtcctggggaagaccaggatacccttggcccctatatggg

SEQ ID NO: 412858 - DNA, 55 bp, Artificial
  Synthetic oligonucleotide
gcgctccagatgcttacgttaagccaattaccgaatctcagcagacaaaaccgct

SEQ ID NO: 412859 - DNA, 55 bp, Artificial
  Synthetic oligonucleotide
gcgctccagcacgatacgatgcatacacgttagagcaaacccgttctgactgtgc

SEQ ID NO: 412860 - DNA, 55 bp, Artificial
  Synthetic oligonucleotide
gcgctccccaatctggcctaatgatctcggtttggttgaattcagaatgagaaag

SEQ ID NO: 412861 - DNA, 53 bp, Artificial
  Synthetic oligonucleotide
gcgctcccccccaatccctagtggattgccccccgtcgtactacaaaccgaca

SEQ ID NO: 412862 - DNA, 57 bp, Artificial
  Synthetic oligonucleotide
gcgctcccttacaccgctccccaccgtgtgctggcgacagtgtacaacgggaagacg

SEQ ID NO: 412863 - DNA, 58 bp, Artificial
  Synthetic oligonucleotide
gcgctccgagaactcaaaataagtggtaggtatgttacacgcgtcttcgtactcctgc

SEQ ID NO: 412864 - DNA, 55 bp, Artificial
  Synthetic oligonucleotide
gcgctccgcgagcatgaccgcgggttctcggactacgaggccggcgactacctga

SEQ ID NO: 412865 - DNA, 55 bp, Artificial
  Synthetic oligonucleotide
gcgctccgctttgggtggaatagttacctactcttgttccgggggcgcttctcac

SEQ ID NO: 412866 - DNA, 55 bp, Artificial
  Synthetic oligonucleotide
gcgctccgtcgtcgtcttgagagaggcgacatttccatgtccgagttcgctgctc

SEQ ID NO: 412867 - DNA, 55 bp, Artificial
  Synthetic oligonucleotide
gcgctccgtgtgcaagattgtcatggggcataacgtatttggtggacctgattcg

SEQ ID NO: 412868 - DNA, 52 bp, Artificial
  Synthetic oligonucleotide
gcgctcgcaataagactggtcgttgcttggcttttctattgtttcaggcttt

SEQ ID NO: 412869 - DNA, 57 bp, Artificial
  Synthetic oligonucleotide
gcgctcgccgtattcgtggtttgttaagaattggggtattggatgtccgagagtgaa

SEQ ID NO: 412870 - DNA, 55 bp, Artificial
  Synthetic oligonucleotide
gcgctcggccttcagggttgcgcttttcaatcgactgtcgccgagctacagcgtc

SEQ ID NO: 412871 - DNA, 55 bp, Artificial
  Synthetic oligonucleotide
gcgctcggtctccagggctgcgcatttcagtcgactgttgctgagctacagcgtc

SEQ ID NO: 412872 - DNA, 60 bp, Artificial
  Synthetic oligonucleotide
gcgctcggttcatctattacacgcacgctcagaagataattccttgcgctataattggat

SEQ ID NO: 412873 - DNA, 55 bp, Artificial
  Synthetic oligonucleotide
gcgctcgtcaactggctcgtggagcacggcatcacttccgagaagcagtggatcc

SEQ ID NO: 412874 - DNA, 58 bp, Artificial
  Synthetic oligonucleotide
gcgctcgttctaaatccaaagaacgtagcaactctaagacaagagacactacacctaa

SEQ ID NO: 412875 - DNA, 55 bp, Artificial
  Synthetic oligonucleotide
gcgctctactcaggttattctgctttgtgtgctacggatatgcaccgcgtgcgga

SEQ ID NO: 412876 - DNA, 55 bp, Artificial
  Synthetic oligonucleotide
gcgctctccaggcataccaaaactatgacgtattataccgtcactgtcgatcccg

SEQ ID NO: 412877 - DNA, 60 bp, Artificial
  Synthetic oligonucleotide
gcgctctctcccggatctagaacgctggctcctagcctttgcagatctcgatacggatgt

SEQ ID NO: 412878 - DNA, 52 bp, Artificial
  Synthetic oligonucleotide
gcgctctcttcgcttccctgtgttgaactttgattggtacccgagtacaacg

SEQ ID NO: 412879 - DNA, 60 bp, Artificial
  Synthetic oligonucleotide
gcgctctgagtcaatgcaggactttcagagggagagtcctggatatgttcagaactgctt

SEQ ID NO: 412880 - DNA, 54 bp, Artificial
  Synthetic oligonucleotide
gcgctctgcacgtacgagcgcgttcgtggcagcctacgcagcgagcccgtcagt

SEQ ID NO: 412881 - DNA, 55 bp, Artificial
  Synthetic oligonucleotide
gcgctctgtctggaattgacttaacccatctgagtgtgcctaaggtccagcccaa

SEQ ID NO: 412882 - DNA, 54 bp, Artificial
  Synthetic oligonucleotide
gcgctctgttgccctttgacatagacaagtaatttttcgaaaaaactccttgtt

SEQ ID NO: 412883 - DNA, 59 bp, Artificial
  Synthetic oligonucleotide
gcgctcttagctccctgaatgttcggatggaaatgtgctgacctggttggggaaaccag

SEQ ID NO: 412884 - DNA, 59 bp, Artificial
  Synthetic oligonucleotide
gcgctgaacggaaaatttggatcggcggcaaggaatagaaattggatggctgatactag

SEQ ID NO: 412885 - DNA, 55 bp, Artificial
  Synthetic oligonucleotide
gcgctgaatgcaatatagtcccatccaatcgtcggttaccgcatgctctagtcac

SEQ ID NO: 412886 - DNA, 55 bp, Artificial
  Synthetic oligonucleotide
gcgctgaatggctgagaagagtctctgtgcaaggaatacttgtagttctgacctc

SEQ ID NO: 412887 - DNA, 58 bp, Artificial
  Synthetic oligonucleotide
gcgctgacaatcgttttaggtgctgttggtggtagagggaaattgaggaggaatccta

SEQ ID NO: 412888 - DNA, 60 bp, Artificial
  Synthetic oligonucleotide
gcgctgacgggcagactccagctcagaaatatcctttccacgctcagcgatattctgctt

SEQ ID NO: 412889 - DNA, 59 bp, Artificial
  Synthetic oligonucleotide
gcgctgactatgacagacaacctgaacaaggtgtttaaaaagttgattgatcgagtaac

SEQ ID NO: 412890 - DNA, 58 bp, Artificial
  Synthetic oligonucleotide
gcgctgagacactgccccgtaaaagaatagtgtcgagacctgaaccacaggttccacg

SEQ ID NO: 412891 - DNA, 58 bp, Artificial
  Synthetic oligonucleotide
gcgctgagtcagggaatcttatcccttatgtcttttagccacactttcggtggtagtg

SEQ ID NO: 412892 - DNA, 55 bp, Artificial
  Synthetic oligonucleotide
gcgctgatgtaactttctatgcaacgctaacgcaaggagactttaaagagacgtt

SEQ ID NO: 412893 - DNA, 55 bp, Artificial
  Synthetic oligonucleotide
gcgctgcagttgaagggaattgaagtagtatctcagtaagatcatgcgacagctg

SEQ ID NO: 412894 - DNA, 56 bp, Artificial
  Synthetic oligonucleotide
gcgctgcataatgttgggcaagtaacagtaccggtatggtcacaatttaacgagat

SEQ ID NO: 412895 - DNA, 55 bp, Artificial
  Synthetic oligonucleotide
gcgctgccagagtaaatctgaagtctcgaaaacactgcaactcaagggcaagtgg

SEQ ID NO: 412896 - DNA, 51 bp, Artificial
  Synthetic oligonucleotide
gcgctgctcaagattgttaagaacaacaatctaattcttgaagttgctgac

SEQ ID NO: 412897 - DNA, 60 bp, Artificial
  Synthetic oligonucleotide
gcgctggaatcccgaagtgcagtacacatccaattatgcaaaatctgccaacgttgattt

SEQ ID NO: 412898 - DNA, 57 bp, Artificial
  Synthetic oligonucleotide
gcgctggactcaagacaggagccgctcattcaatgaatagtagatctaatttctggt

SEQ ID NO: 412899 - DNA, 59 bp, Artificial
  Synthetic oligonucleotide
gcgctggatctgctaacgatacaagtagagcgcgagttttcaaataaggaactcaaaac

SEQ ID NO: 412900 - DNA, 55 bp, Artificial
  Synthetic oligonucleotide
gcgctggcacattcccgaccgtcggcccaacgtctcgccgcgttccattgcaggt

SEQ ID NO: 412901 - DNA, 60 bp, Artificial
  Synthetic oligonucleotide
gcgctggcgtctacaggagtgttcaatccaatgatacttgcagctggactaatggcttgc

SEQ ID NO: 412902 - DNA, 55 bp, Artificial
  Synthetic oligonucleotide
gcgctggctgaaaccgggtaaagatgcgctggcatgggttgaccagaatattgtc

SEQ ID NO: 412903 - DNA, 50 bp, Artificial
  Synthetic oligonucleotide
gcgctggcttctacagcgctccagtgtcgggcgccataaacaccgcaggc

SEQ ID NO: 412904 - DNA, 60 bp, Artificial
  Synthetic oligonucleotide
gcgctgggttacattctgctctgcagagtggccaaccttcaacgtcggatggccacgaga

SEQ ID NO: 412905 - DNA, 60 bp, Artificial
  Synthetic oligonucleotide
gcgctgggttcacctggaccacttgccagagttaacaactttattggctaatgagatcca

SEQ ID NO: 412906 - DNA, 55 bp, Artificial
  Synthetic oligonucleotide
gcgctggtcgtgcactctatatcccaccatacgaagttctgttgcacgaatggta

SEQ ID NO: 412907 - DNA, 55 bp, Artificial
  Synthetic oligonucleotide
gcgctggttaatggctaccagctaatagacttacaaccgaatcacccggattgcg

SEQ ID NO: 412908 - DNA, 50 bp, Artificial
  Synthetic oligonucleotide
gcgctgtaacgggctcagccgtgcgcagtctagtctcctatggagcacca

SEQ ID NO: 412909 - DNA, 60 bp, Artificial
  Synthetic oligonucleotide
gcgctgtaccatgccctagtgaagtctaacgtcgcatggatggataactggtcacgtact

SEQ ID NO: 412910 - DNA, 60 bp, Artificial
  Synthetic oligonucleotide
gcgctgtagttaaatattatcggctgtatcaaataaaagattgggctacttgcaatccta

SEQ ID NO: 412911 - DNA, 60 bp, Artificial
  Synthetic oligonucleotide
gcgctgtatcgggaagccttagagtctcctgagcattgttcacctcatcatacggccctc

SEQ ID NO: 412912 - DNA, 55 bp, Artificial
  Synthetic oligonucleotide
gcgctgtcccaacccagggaagtggcccacgccagtgagaaatacgagaacggca

SEQ ID NO: 412913 - DNA, 55 bp, Artificial
  Synthetic oligonucleotide
gcgctgtcctggtgccatgtgtggtgccttacttgtcaggtcggaacccgttcac

SEQ ID NO: 412914 - DNA, 59 bp, Artificial
  Synthetic oligonucleotide
gcgctgtggggtggatgtgcgggctgcggcaatgccgaccccaagtattccggaaccga

SEQ ID NO: 412915 - DNA, 55 bp, Artificial
  Synthetic oligonucleotide
gcgctgtgtacaatatatcagctacgcatctaatatcagatttagtgcagaaaag

SEQ ID NO: 412916 - DNA, 57 bp, Artificial
  Synthetic oligonucleotide
gcgctgtgttaggaagggcatgctggcgtggtccaaaattttgaaatacaggggatt

SEQ ID NO: 412917 - DNA, 60 bp, Artificial
  Synthetic oligonucleotide
gcgctgtgttgctacgcgcatcgaaatcacgaaagccgccgttgaggcgacgtggaagag

SEQ ID NO: 412918 - DNA, 55 bp, Artificial
  Synthetic oligonucleotide
gcgctgttacgcccttacaagttgagagattgtgagatcagattaagcgaggcag

SEQ ID NO: 412919 - DNA, 55 bp, Artificial
  Synthetic oligonucleotide
gcgctgttagcctttggtaggtggactggcacttatatctatgaccacctcgccc

SEQ ID NO: 412920 - DNA, 60 bp, Artificial
  Synthetic oligonucleotide
gcgctgttctcagaactgcgcagggtcttggctgatgacggaacactgtggctcaatctg

SEQ ID NO: 412921 - DNA, 55 bp, Artificial
  Synthetic oligonucleotide
gcgctgttgtcagggaaatatccgccggatttggtgacaaatgtatggtacgctg

SEQ ID NO: 412922 - DNA, 55 bp, Artificial
  Synthetic oligonucleotide
gcgctgttttcggtatgcggagggcggctctcgctgaggcctctaaaccgactag

SEQ ID NO: 412923 - DNA, 55 bp, Artificial
  Synthetic oligonucleotide
gcgcttaactataaaccaacgaggaatgatggtatagtggtaccaaggctgttgg

SEQ ID NO: 412924 - DNA, 54 bp, Artificial
  Synthetic oligonucleotide
gcgcttaagctgaacgaatctgacggaagagcggacaaacgcacatggactatg

SEQ ID NO: 412925 - DNA, 60 bp, Artificial
  Synthetic oligonucleotide
gcgcttaagctgaacgaatctgacggaagagcgttcacacttagatctagttagcgtact

SEQ ID NO: 412926 - DNA, 54 bp, Artificial
  Synthetic oligonucleotide
gcgcttaatccagcccctatcggtaaaacgttagggatcagtgaaaagggtgac

SEQ ID NO: 412927 - DNA, 60 bp, Artificial
  Synthetic oligonucleotide
gcgcttacaaagtacgcgccaagcatgcaaacgactcttcaactcaagacttgatcgaaa

SEQ ID NO: 412928 - DNA, 55 bp, Artificial
  Synthetic oligonucleotide
gcgcttagtgagcggattcttaccactcttctgggaggacctccggaacctgtgc

SEQ ID NO: 412929 - DNA, 55 bp, Artificial
  Synthetic oligonucleotide
gcgcttagtgtagtgaacagcagagagtaaatactgtacattgtacatagagtgc

SEQ ID NO: 412930 - DNA, 55 bp, Artificial
  Synthetic oligonucleotide
gcgcttatgacacaacttacgagtgccctcacctggaagtgaccatggatccgga

SEQ ID NO: 412931 - DNA, 55 bp, Artificial
  Synthetic oligonucleotide
gcgcttatgcagccacttactggattgaggatgatcgacccagtgagaaaagtct

SEQ ID NO: 412932 - DNA, 55 bp, Artificial
  Synthetic oligonucleotide
gcgcttatggaagcaaatgtaaccgccgatgacagaataaaggcattgcaagcac

SEQ ID NO: 412933 - DNA, 55 bp, Artificial
  Synthetic oligonucleotide
gcgcttatggtttgtgttgcccaagaacaagaagtgcagatagcgtagaagaacg

SEQ ID NO: 412934 - DNA, 55 bp, Artificial
  Synthetic oligonucleotide
gcgcttattctacaaaacaagaggacaaaggccagctactccataaacactgtgg

SEQ ID NO: 412935 - DNA, 54 bp, Artificial
  Synthetic oligonucleotide
gcgcttatttggagtccgcgaaatgagttaaccgcattttttgagttccggaaa

SEQ ID NO: 412936 - DNA, 55 bp, Artificial
  Synthetic oligonucleotide
gcgcttcacgcggaccaagtgctttctgcacttgtagaggccgctaatcgcgtag

SEQ ID NO: 412937 - DNA, 55 bp, Artificial
  Synthetic oligonucleotide
gcgcttcagtaccatcaagcagcgtctcgataacagaatccatcttgagaaggca

SEQ ID NO: 412938 - DNA, 55 bp, Artificial
  Synthetic oligonucleotide
gcgcttccagataacgaatgtacagaccgtcacttccatcacttctgctcgcagc

SEQ ID NO: 412939 - DNA, 58 bp, Artificial
  Synthetic oligonucleotide
gcgcttcccgtctagatttttctcaagatcctagcaaatttactgacccagtcaaaga

SEQ ID NO: 412940 - DNA, 55 bp, Artificial
  Synthetic oligonucleotide
gcgcttcgataccgattgccgttaccgtaagtcgaagatgatcccgtgtgttcag

SEQ ID NO: 412941 - DNA, 60 bp, Artificial
  Synthetic oligonucleotide
gcgcttcgcacatttattttcacaacctagcctttgatggcacgtttattcttgactggc

SEQ ID NO: 412942 - DNA, 55 bp, Artificial
  Synthetic oligonucleotide
gcgcttcgcttgccgcggcgccgtgtgcgtgcgtgtggttctggtcgccctggaa

SEQ ID NO: 412943 - DNA, 55 bp, Artificial
  Synthetic oligonucleotide
gcgcttctggaaggtcaacaatcatgtggtgtacaaccaccaggaagctggcaag

SEQ ID NO: 412944 - DNA, 55 bp, Artificial
  Synthetic oligonucleotide
gcgcttctttacgggctgactatttagagaaacttcgacaagctgagttggttcg

SEQ ID NO: 412945 - DNA, 54 bp, Artificial
  Synthetic oligonucleotide
gcgcttctttttggagtgaaaatctcgtaggagcctgtgggcgggaaaaacact

SEQ ID NO: 412946 - DNA, 55 bp, Artificial
  Synthetic oligonucleotide
gcgcttgatgcagtaatcaattttggcagccaatttatagacgctggacgcaatt

SEQ ID NO: 412947 - DNA, 60 bp, Artificial
  Synthetic oligonucleotide
gcgcttgctactgcgcaattgttacaacgcgaaccgtcgtgtaacagtgtccactacggc

SEQ ID NO: 412948 - DNA, 50 bp, Artificial
  Synthetic oligonucleotide
gcgcttggatacaaatgggagccccaactacaaatacacttacccttact

SEQ ID NO: 412949 - DNA, 55 bp, Artificial
  Synthetic oligonucleotide
gcgcttggtgaatgatgttggcgtcgatatcgtttgttctcgggccccgattagc

SEQ ID NO: 412950 - DNA, 60 bp, Artificial
  Synthetic oligonucleotide
gcgcttggtgttcaactataagcgcctcaacgacaacactgagacggatcaatattcact

SEQ ID NO: 412951 - DNA, 55 bp, Artificial
  Synthetic oligonucleotide
gcgcttgtgttgtctaaaatactgggcctgtcgttatttgtgtagcgcatggagc

SEQ ID NO: 412952 - DNA, 55 bp, Artificial
  Synthetic oligonucleotide
gcgcttgttcgttttccgcctactgcgactaaagagattcagtaccttaacgcta

SEQ ID NO: 412953 - DNA, 55 bp, Artificial
  Synthetic oligonucleotide
gcgctttagctgttaaagaacccgccacgttcataatagtccacgatacagtagc

SEQ ID NO: 412954 - DNA, 55 bp, Artificial
  Synthetic oligonucleotide
gcgctttatcgcttgccactcaaaatagaatggtgacgttatgagtcagagaggc

SEQ ID NO: 412955 - DNA, 55 bp, Artificial
  Synthetic oligonucleotide
gcgctttgaaaattgagctaattggaacgcgtcgtaaacgcaaaacacaactagc

SEQ ID NO: 412956 - DNA, 60 bp, Artificial
  Synthetic oligonucleotide
gcgctttgactaccgctatggaaccatgcgactagctgttactcttggactcacacttct

SEQ ID NO: 412957 - DNA, 55 bp, Artificial
  Synthetic oligonucleotide
gcgctttgcgtttgacatggacattcaagtcatgaatgaatactccagggatggg

SEQ ID NO: 412958 - DNA, 55 bp, Artificial
  Synthetic oligonucleotide
gcgctttgctcaggctattttgtttcgtgtgttatggacatgcgccacgcgcgga

SEQ ID NO: 412959 - DNA, 55 bp, Artificial
  Synthetic oligonucleotide
gcgctttggcagtccactccaaagtacgaaggcccaaccggacttatgatcccct

SEQ ID NO: 412960 - DNA, 56 bp, Artificial
  Synthetic oligonucleotide
gcggaaaaaccgcgtggaaaggatcgatcactactaacggtcaggtacgcatcaac

SEQ ID NO: 412961 - DNA, 60 bp, Artificial
  Synthetic oligonucleotide
gcggaaaaggtaatgattcaacatcgaggtccgacgatggctcaagtcaattgcgagata

SEQ ID NO: 412962 - DNA, 60 bp, Artificial
  Synthetic oligonucleotide
gcggaaaagtagtggagatctatgttgcatcttatcggaaaagtccatgatgcctgtaga

SEQ ID NO: 412963 - DNA, 55 bp, Artificial
  Synthetic oligonucleotide
gcggaaaagttcctcaggtgtatggaatgagttgtttatggttagaggaccccca

SEQ ID NO: 412964 - DNA, 55 bp, Artificial
  Synthetic oligonucleotide
gcggaaaatcctgttgatgcacaacacattgctgagcccgtgccatgtttgaaat

SEQ ID NO: 412965 - DNA, 58 bp, Artificial
  Synthetic oligonucleotide
gcggaaacaggtaaggagacgttagcgttcaggtatgatcgtgaaaattctgagatgg

SEQ ID NO: 412966 - DNA, 55 bp, Artificial
  Synthetic oligonucleotide
gcggaaacgcacccaccacccaggatattttcgcatacccctccgcactaaaggc

SEQ ID NO: 412967 - DNA, 59 bp, Artificial
  Synthetic oligonucleotide
gcggaaactacccagtgcaacaagtagctggcaattatgtccacgtgccactaagtccc

SEQ ID NO: 412968 - DNA, 55 bp, Artificial
  Synthetic oligonucleotide
gcggaaactcattgttccctacgtcaaggtggatatgaggattcgcgatacgtgc

SEQ ID NO: 412969 - DNA, 55 bp, Artificial
  Synthetic oligonucleotide
gcggaaaggcatttcccagcagcaatagttgcccaagtcttgcaatactgtgcgg

SEQ ID NO: 412970 - DNA, 55 bp, Artificial
  Synthetic oligonucleotide
gcggaaagggagctgtcacagagatgagtctgtccccatttattgttcatgctcg

SEQ ID NO: 412971 - DNA, 55 bp, Artificial
  Synthetic oligonucleotide
gcggaaagtaggattgtttccgatgtatttacttcgggaagcggggtcaatgata

SEQ ID NO: 412972 - DNA, 55 bp, Artificial
  Synthetic oligonucleotide
gcggaaatctcgttccgtatcgcgtcgaactgattaatcgcatcgggcaggaagc

SEQ ID NO: 412973 - DNA, 60 bp, Artificial
  Synthetic oligonucleotide
gcggaaatgaataaaacgaaggcgatgaatagctggaagacatcttttagtgcttggaca

SEQ ID NO: 412974 - DNA, 55 bp, Artificial
  Synthetic oligonucleotide
gcggaaatgagacagcgtgtgcaagctgacagaaacgtcgttaattatccatcaa

SEQ ID NO: 412975 - DNA, 56 bp, Artificial
  Synthetic oligonucleotide
gcggaacaaatacccaacaaaaaatagctaaggaattccctatatgctacatcaaa

SEQ ID NO: 412976 - DNA, 55 bp, Artificial
  Synthetic oligonucleotide
gcggaacacgattatggcatcaaagacagtagggacatctgaagagaaactgcgc

SEQ ID NO: 412977 - DNA, 52 bp, Artificial
  Synthetic oligonucleotide
gcggaacactaaacgacgcaaacgactacgcccgcgggttgggttattattc

SEQ ID NO: 412978 - DNA, 51 bp, Artificial
  Synthetic oligonucleotide
gcggaacaggagacagcacgggcgttgtttcaggcccaagaattacaggca

SEQ ID NO: 412979 - DNA, 52 bp, Artificial
  Synthetic oligonucleotide
gcggaacccctttgcgcgcagcaagccccaattgcgatcaatctctactgaa

SEQ ID NO: 412980 - DNA, 55 bp, Artificial
  Synthetic oligonucleotide
gcggaaccgctggtcgcatagcaacgtgggttacgatttagcaagatacatgggg

SEQ ID NO: 412981 - DNA, 55 bp, Artificial
  Synthetic oligonucleotide
gcggaacgtggacttccacaagttcactagtgggttgggagtgaggacgcagtgg

SEQ ID NO: 412982 - DNA, 55 bp, Artificial
  Synthetic oligonucleotide
gcggaactaaatcaagtgcggtgcgtaggaggtcattattcgttcgcactgcctg

SEQ ID NO: 412983 - DNA, 55 bp, Artificial
  Synthetic oligonucleotide
gcggaactatgccgttcgccccaatcgcatcgctgtccgattattctcaggcccc

SEQ ID NO: 412984 - DNA, 60 bp, Artificial
  Synthetic oligonucleotide
gcggaactcctcacagcagtaaggatcatcaaaatcctatatcaaagcagtaagtactaa

SEQ ID NO: 412985 - DNA, 58 bp, Artificial
  Synthetic oligonucleotide
gcggaactggtcttacccatcgtgttggtaagcgtttctgcataaaatccatgatgtt

SEQ ID NO: 412986 - DNA, 55 bp, Artificial
  Synthetic oligonucleotide
gcggaacttatcggaagttccgataggttgggaatccgacctcactcggtcatag

SEQ ID NO: 412987 - DNA, 60 bp, Artificial
  Synthetic oligonucleotide
gcggaagaatacactgactcattgatggatccagcaattctaacttccttatcatcaaat

SEQ ID NO: 412988 - DNA, 57 bp, Artificial
  Synthetic oligonucleotide
gcggaagacttgggcccgaagttgttgggcgactatataattaagtcatgtatgacg

SEQ ID NO: 412989 - DNA, 55 bp, Artificial
  Synthetic oligonucleotide
gcggaagagacggtgtgagaatatagttccgagaccacacggagaacagatgacg

SEQ ID NO: 412990 - DNA, 55 bp, Artificial
  Synthetic oligonucleotide
gcggaagattagaaaacatttgtgaatccccagagctctcctgaggttgtggttg

SEQ ID NO: 412991 - DNA, 60 bp, Artificial
  Synthetic oligonucleotide
gcggaagcaatactctggttcgattccagataacgtggttagtggtgtatagtccataga

SEQ ID NO: 412992 - DNA, 55 bp, Artificial
  Synthetic oligonucleotide
gcggaaggaaccgcgtcatctcgcaaacccgatacactattcagttgccgctgaa

SEQ ID NO: 412993 - DNA, 57 bp, Artificial
  Synthetic oligonucleotide
gcggaaggagcggaacctctacgatgggggctaccaagctgtgttccgtgccgcgtc

SEQ ID NO: 412994 - DNA, 51 bp, Artificial
  Synthetic oligonucleotide
gcggaagtgcctacgtcgcctgcggtatcgcctgatgtgacgtctgcggta

SEQ ID NO: 412995 - DNA, 58 bp, Artificial
  Synthetic oligonucleotide
gcggaagtggtctcgactcagagatcgactttggagaaactgtgtgcgcggctccgac

SEQ ID NO: 412996 - DNA, 60 bp, Artificial
  Synthetic oligonucleotide
gcggaagtggtggacccagtctaggtgcgatgcttagtcgcgcacgatgactatgtcgga

SEQ ID NO: 412997 - DNA, 60 bp, Artificial
  Synthetic oligonucleotide
gcggaagtggtggacccataccaacagatggcactaactgttgtgacagggtgtacgaga

SEQ ID NO: 412998 - DNA, 55 bp, Artificial
  Synthetic oligonucleotide
gcggaagtttcagcattagaggagagacaacaggcaggaattgcactgtcccatg

SEQ ID NO: 412999 - DNA, 55 bp, Artificial
  Synthetic oligonucleotide
gcggaagtttcatgcaactgttgttggtggaccctcagggatgaaggagcaggca

SEQ ID NO: 413000 - DNA, 54 bp, Artificial
  Synthetic oligonucleotide
gcggaataaggtgcttatcgggttctttgtggcgactttgggtgcggccccaat

SEQ ID NO: 413001 - DNA, 55 bp, Artificial
  Synthetic oligonucleotide
gcggaatagggcgcccctgaaaagtaaatatggtgtcgccatcgtctaagtcagc

SEQ ID NO: 413002 - DNA, 55 bp, Artificial
  Synthetic oligonucleotide
gcggaatcgcatgggtccttgccttcatatagttgaaaagagggtgaggaattcc

SEQ ID NO: 413003 - DNA, 58 bp, Artificial
  Synthetic oligonucleotide
gcggaatgagcgctaaaccatccatcgcccaagccagacaacgcgcccaatgatatcc

SEQ ID NO: 413004 - DNA, 55 bp, Artificial
  Synthetic oligonucleotide
gcggaatgctgcccgtctacgcaaactatatggatatttccgctcaactcgcctc

SEQ ID NO: 413005 - DNA, 55 bp, Artificial
  Synthetic oligonucleotide
gcggaatgtcatgggagttgtcgataacgaggctgtaaatcaccagagtttagac

SEQ ID NO: 413006 - DNA, 60 bp, Artificial
  Synthetic oligonucleotide
gcggaatgttgtgtatgtaatagtatagtgcagctagctgtactaagcagtcgacagaac

SEQ ID NO: 413007 - DNA, 60 bp, Artificial
  Synthetic oligonucleotide
gcggaattagagcatctcattacactaaattgagtgtctttggtgagggaatccaaggta

SEQ ID NO: 413008 - DNA, 60 bp, Artificial
  Synthetic oligonucleotide
gcggaattgatctcttttttgcctgctgacttctttccttctgttcgagatctccttgac

SEQ ID NO: 413009 - DNA, 55 bp, Artificial
  Synthetic oligonucleotide
gcggaattgatggcatgaagtcacgctttagtggtcttagagagattgctgtagg

SEQ ID NO: 413010 - DNA, 55 bp, Artificial
  Synthetic oligonucleotide
gcggaattggtaatttgccagtcagaacatggaattttgattttggtctactagg

SEQ ID NO: 413011 - DNA, 55 bp, Artificial
  Synthetic oligonucleotide
gcggacaagccacatccagaggaccccttcagcgaacagaagaccctggtaccgg

SEQ ID NO: 413012 - DNA, 57 bp, Artificial
  Synthetic oligonucleotide
gcggacacccattatgcgactgtgcaggacctaaaacgaaagtatttaggtagtcca

SEQ ID NO: 413013 - DNA, 55 bp, Artificial
  Synthetic oligonucleotide
gcggacacccctactttgcgcattcgctacggcgctacggaggacgaacttgcac

SEQ ID NO: 413014 - DNA, 55 bp, Artificial
  Synthetic oligonucleotide
gcggacagagaagtattaatatggaagtttgacagctccctaacacgcagacacc

SEQ ID NO: 413015 - DNA, 55 bp, Artificial
  Synthetic oligonucleotide
gcggacaggaagggcataacatgaaagaatgtacaactggaggcagacaggctaa

SEQ ID NO: 413016 - DNA, 55 bp, Artificial
  Synthetic oligonucleotide
gcggacagtttcaactgtattaacttgcccacttgacgcccacgtgtaagctacc

SEQ ID NO: 413017 - DNA, 55 bp, Artificial
  Synthetic oligonucleotide
gcggacatgttcgatgacggaacacaaacacagggcaattccctagagttgttcc

SEQ ID NO: 413018 - DNA, 52 bp, Artificial
  Synthetic oligonucleotide
gcggacattggcagacagctatctggctacacgcccagcatcggcgacactc

SEQ ID NO: 413019 - DNA, 52 bp, Artificial
  Synthetic oligonucleotide
gcggaccagcattgatcagtgcttgcagggactcagcagtacgtgccagtgc

SEQ ID NO: 413020 - DNA, 58 bp, Artificial
  Synthetic oligonucleotide
gcggaccccccgggcatcataacgcaacattacggagaagctgtgtctttaatagata

SEQ ID NO: 413021 - DNA, 60 bp, Artificial
  Synthetic oligonucleotide
gcggaccgagcatcgaactggcgcgggctccctggtgacatctcctgcgattaatcaagc

SEQ ID NO: 413022 - DNA, 55 bp, Artificial
  Synthetic oligonucleotide
gcggaccgctgaggttccgccagctgtccctacaaggacagcgtctgaggtttca

SEQ ID NO: 413023 - DNA, 53 bp, Artificial
  Synthetic oligonucleotide
gcggaccgtaggaacctcgaaatccaagtaccctttggtgattaggatttaca

SEQ ID NO: 413024 - DNA, 55 bp, Artificial
  Synthetic oligonucleotide
gcggacgagaatagcatctacgctaatcttaaagctggtagatgccaaccagagg

SEQ ID NO: 413025 - DNA, 55 bp, Artificial
  Synthetic oligonucleotide
gcggacgaggtctcctccgtccacatccaccatcgagacggcaacaagcacaacg

SEQ ID NO: 413026 - DNA, 58 bp, Artificial
  Synthetic oligonucleotide
gcggacgcattggccgggaagataatgctacaggatgtgaatactgtgcaattagcca

SEQ ID NO: 413027 - DNA, 55 bp, Artificial
  Synthetic oligonucleotide
gcggacgctgcacggagtgttttccaccgtgagcttgtagcactgagctctggta

SEQ ID NO: 413028 - DNA, 55 bp, Artificial
  Synthetic oligonucleotide
gcggacggtcctgagaactcttatcttcctgcttagaagaggagtctcctggacg

SEQ ID NO: 413029 - DNA, 59 bp, Artificial
  Synthetic oligonucleotide
gcggacgtagcgtggaagcaaaatccagagctattcgagccaacccgcctgtccctcga

SEQ ID NO: 413030 - DNA, 58 bp, Artificial
  Synthetic oligonucleotide
gcggacgtatttatccacgtcttagtgattgcataacgagttttcaggatcctttgcg

SEQ ID NO: 413031 - DNA, 54 bp, Artificial
  Synthetic oligonucleotide
gcggacgtgaacatggacggggtttgtcctaaaattgaaggggtcttctcgctg

SEQ ID NO: 413032 - DNA, 55 bp, Artificial
  Synthetic oligonucleotide
gcggacgtgctgtatgtagagaagcgcaactttccgcggttcacctctgtgctgg

SEQ ID NO: 413033 - DNA, 57 bp, Artificial
  Synthetic oligonucleotide
gcggacgttgaaagtgtttgtgagttgacgagatacttctacgtaccgggcatggcc

SEQ ID NO: 413034 - DNA, 55 bp, Artificial
  Synthetic oligonucleotide
gcggactaagattaattgcagcttgccatctaataccaaaccattttccggctgg

SEQ ID NO: 413035 - DNA, 55 bp, Artificial
  Synthetic oligonucleotide
gcggactaagttcttttggttgtacaccaatcacaatcatgacctctggcttcgc

SEQ ID NO: 413036 - DNA, 59 bp, Artificial
  Synthetic oligonucleotide
gcggactactgcattcgtcaagaggatggaatgttcacagattggtttctacttttaac

SEQ ID NO: 413037 - DNA, 58 bp, Artificial
  Synthetic oligonucleotide
gcggactataatttgcgaatgcgtagagacgcgcttttaggagagttagcacggcttg

SEQ ID NO: 413038 - DNA, 55 bp, Artificial
  Synthetic oligonucleotide
gcggactgggaaaagctcaataatgagatctgatgcacctatcgacacatgcatc

SEQ ID NO: 413039 - DNA, 54 bp, Artificial
  Synthetic oligonucleotide
gcggactgggaaaaggtccatatgtactcggcttcacttgtcggtggtatgacc

SEQ ID NO: 413040 - DNA, 55 bp, Artificial
  Synthetic oligonucleotide
gcggactgggtgcttctagtattggtgatgtggctagtgagtttgtcacgggcga

SEQ ID NO: 413041 - DNA, 55 bp, Artificial
  Synthetic oligonucleotide
gcggactgtaacagagatggtgttgtaatcagcacagaggggagtcatgagtgct

SEQ ID NO: 413042 - DNA, 59 bp, Artificial
  Synthetic oligonucleotide
gcggactgtttggaaaggggagcattgacacatgtgcgaagttcgcctgtacaaccaaa

SEQ ID NO: 413043 - DNA, 55 bp, Artificial
  Synthetic oligonucleotide
gcggactttctttcgggatttgtcgcgagatttatcttgagattcattacgagac

SEQ ID NO: 413044 - DNA, 60 bp, Artificial
  Synthetic oligonucleotide
gcggagaaacattagaatccgcaagcaggattcaacggtggtgctcacaacctaccgaga

SEQ ID NO: 413045 - DNA, 55 bp, Artificial
  Synthetic oligonucleotide
gcggagaaatcagcttatttgatgaggtagcgaaatgatagaacaccaccaaggc

SEQ ID NO: 413046 - DNA, 54 bp, Artificial
  Synthetic oligonucleotide
gcggagaaattgaaatgttcctaattaattgtaaagacactaaaaattggtatg

SEQ ID NO: 413047 - DNA, 60 bp, Artificial
  Synthetic oligonucleotide
gcggagaaattggctataactgatgttgtcgatggagtcaatcataaattagacgtaacg

SEQ ID NO: 413048 - DNA, 56 bp, Artificial
  Synthetic oligonucleotide
gcggagaagattaacaccactaagaaacctgacccagctccgcgggtcatacaacc

SEQ ID NO: 413049 - DNA, 60 bp, Artificial
  Synthetic oligonucleotide
gcggagaatgcagttagaagagttgaggttgcgggagtacatggttatgagtggggtgcg

SEQ ID NO: 413050 - DNA, 55 bp, Artificial
  Synthetic oligonucleotide
gcggagacagcgacgcagcactcctccaagcagtacggaccatcaaactcctata

SEQ ID NO: 413051 - DNA, 60 bp, Artificial
  Synthetic oligonucleotide
gcggagaccacggaatgttacctgcatatctagctctatattgaatgtaaagctgcctgt

SEQ ID NO: 413052 - DNA, 60 bp, Artificial
  Synthetic oligonucleotide
gcggagaccactgtcaggctccgggcatacttcaacacgcctggattacccgtgtgtcag

SEQ ID NO: 413053 - DNA, 55 bp, Artificial
  Synthetic oligonucleotide
gcggagaccctgcgcatatagaaagagaggcacggcccagcctgacagaagctgt

SEQ ID NO: 413054 - DNA, 55 bp, Artificial
  Synthetic oligonucleotide
gcggagacggtgcgagatatataacgtctagtgttcgggctcaacggtgcacgag

SEQ ID NO: 413055 - DNA, 60 bp, Artificial
  Synthetic oligonucleotide
gcggagagcccagggcagcctttaactatggctaccacatggaggactacactcctcaac

SEQ ID NO: 413056 - DNA, 55 bp, Artificial
  Synthetic oligonucleotide
gcggagaggttggagaaaacggtagggctctcagtgatccacggatgcggcggct

SEQ ID NO: 413057 - DNA, 55 bp, Artificial
  Synthetic oligonucleotide
gcggagagtagttactccactagctctacccttgattccaatccagaccatagca

SEQ ID NO: 413058 - DNA, 55 bp, Artificial
  Synthetic oligonucleotide
gcggagagtcctcttctgagggactgtgtccagcggaaggatggcactggctggt

SEQ ID NO: 413059 - DNA, 55 bp, Artificial
  Synthetic oligonucleotide
gcggagagtgaatgctgattggatgacagtgtatggggcgttccgagcgttgggg

SEQ ID NO: 413060 - DNA, 55 bp, Artificial
  Synthetic oligonucleotide
gcggagatagtagtgaatcgtctaatcgccgagtgaagcgcgactcatacgcagg

SEQ ID NO: 413061 - DNA, 55 bp, Artificial
  Synthetic oligonucleotide
gcggagatggcatcttcatatttagagactctgatgattggctaaacaagtactc

SEQ ID NO: 413062 - DNA, 55 bp, Artificial
  Synthetic oligonucleotide
gcggagattaaaggcgtcatcgtttccaacgaagataaatgggtttacgaaatgc

SEQ ID NO: 413063 - DNA, 55 bp, Artificial
  Synthetic oligonucleotide
gcggagattatagctttgcgctacctgccggacagtggccagtgatgaagggagg

SEQ ID NO: 413064 - DNA, 55 bp, Artificial
  Synthetic oligonucleotide
gcggagattgatgatctgattgaccttgcggcctcaggggatcctacaccacctg

SEQ ID NO: 413065 - DNA, 60 bp, Artificial
  Synthetic oligonucleotide
gcggagcaatgaatgagcttcacgacgaaatactcgagctagacgaaaaagtggatgatc

SEQ ID NO: 413066 - DNA, 50 bp, Artificial
  Synthetic oligonucleotide
gcggagcacacgcttgcaaaccagtgagtagtgtgtcgtaatgggcaact

SEQ ID NO: 413067 - DNA, 60 bp, Artificial
  Synthetic oligonucleotide
gcggagcagatacccacatgccagtgggcagtctgtcgtaatgggcaactctgcagcgga

SEQ ID NO: 413068 - DNA, 60 bp, Artificial
  Synthetic oligonucleotide
gcggagcatcgtgtcgatagctaagatgatagaggacaagatggctgaggtgagggctag

SEQ ID NO: 413069 - DNA, 55 bp, Artificial
  Synthetic oligonucleotide
gcggagcattacttaacggcgaagtaaagcatcagacaagaatatgacagctgtc

SEQ ID NO: 413070 - DNA, 60 bp, Artificial
  Synthetic oligonucleotide
gcggagcgacgtcatcaatgacgttatactccacttcgtctgagaacacctttgagttga

SEQ ID NO: 413071 - DNA, 60 bp, Artificial
  Synthetic oligonucleotide
gcggagcgatcgcaaagtcgagttcgcaaccgtattgtcagattaaaattggaagagtga

SEQ ID NO: 413072 - DNA, 58 bp, Artificial
  Synthetic oligonucleotide
gcggagcgcccccctgtgccatcggaggggtgggcaataacaccttgcactgccccac

SEQ ID NO: 413073 - DNA, 55 bp, Artificial
  Synthetic oligonucleotide
gcggagcggctataagtttcatggaagaatttagccaccttgtcatccacacagg

SEQ ID NO: 413074 - DNA, 53 bp, Artificial
  Synthetic oligonucleotide
gcggagcgtaggcggggactacagtatatatagcacagcactgccgcagctct

SEQ ID NO: 413075 - DNA, 60 bp, Artificial
  Synthetic oligonucleotide
gcggagctaccgtagcgcttgtcgataccaggatgtcgatggtagacgaaggaactatct

SEQ ID NO: 413076 - DNA, 55 bp, Artificial
  Synthetic oligonucleotide
gcggagcttccggagacgcgaacatcaggaaccgtcgcgactctgcgcctctacg

SEQ ID NO: 413077 - DNA, 60 bp, Artificial
  Synthetic oligonucleotide
gcggagctttgtgcatatcgtcaaacccgaaggtcttcgatgtatctgctcagtgcttta

SEQ ID NO: 413078 - DNA, 58 bp, Artificial
  Synthetic oligonucleotide
gcggaggaatatccttgcagaggttgttcttgtgagtggtaaaccccattttcatgag

SEQ ID NO: 413079 - DNA, 60 bp, Artificial
  Synthetic oligonucleotide
gcggaggagagagcttggcggcagcatttgaccaattggtgcttgacaatcagcagttgg

SEQ ID NO: 413080 - DNA, 57 bp, Artificial
  Synthetic oligonucleotide
gcggaggatgggcaaaatcatcaaatcactgagccgttttggcaaaaaagttggagg

SEQ ID NO: 413081 - DNA, 55 bp, Artificial
  Synthetic oligonucleotide
gcggaggcacatctcaggggttgtttcgatttgcgtgagccagggtggacaactg

SEQ ID NO: 413082 - DNA, 60 bp, Artificial
  Synthetic oligonucleotide
gcggaggcattgacctagtgcggagctaatgactatcatcacctttagcaagggcaaccg

SEQ ID NO: 413083 - DNA, 60 bp, Artificial
  Synthetic oligonucleotide
gcggaggctgcaagttaatggtcttcgtgcagtgactgacacacatggacctatcgtcat

SEQ ID NO: 413084 - DNA, 54 bp, Artificial
  Synthetic oligonucleotide
gcggagggtgccagattggggtataaatgtaccctcgggccccggagcatagtt

SEQ ID NO: 413085 - DNA, 59 bp, Artificial
  Synthetic oligonucleotide
gcggagtaaatatgataagtcttcaggggtatgtgttgcaattattgaggtcccttggc

SEQ ID NO: 413086 - DNA, 60 bp, Artificial
  Synthetic oligonucleotide
gcggagtaacgtcatcgattacgttataccatgcgtcattggagtagattttcggattga

SEQ ID NO: 413087 - DNA, 55 bp, Artificial
  Synthetic oligonucleotide
gcggagtagaggcactacgcgcgttcgtaatcgcgaattataaggattccgccat

SEQ ID NO: 413088 - DNA, 58 bp, Artificial
  Synthetic oligonucleotide
gcggagtcaaacgtgtccagattcgaaaggagaggaaacatttgtgaagtcccagtgc

SEQ ID NO: 413089 - DNA, 53 bp, Artificial
  Synthetic oligonucleotide
gcggagtcggttcctatggcatctttgcggttctggacaatgccgctccaatc

SEQ ID NO: 413090 - DNA, 55 bp, Artificial
  Synthetic oligonucleotide
gcggagtgacggtcatggggtccgtggagactcacagactcagcttggctgctgt

SEQ ID NO: 413091 - DNA, 55 bp, Artificial
  Synthetic oligonucleotide
gcggagtggacgtgtattataaaccatctgagccgtgcgacacgcttttctgtga

SEQ ID NO: 413092 - DNA, 55 bp, Artificial
  Synthetic oligonucleotide
gcggagtggacgtgttccacagaccagccgaggtgggcgataccatcctttgtga

SEQ ID NO: 413093 - DNA, 52 bp, Artificial
  Synthetic oligonucleotide
gcggagtggtactctgttatttcggtaactttgtacgccagttttatattcc

SEQ ID NO: 413094 - DNA, 60 bp, Artificial
  Synthetic oligonucleotide
gcggagttatttggaccttattctgctgcttatgcgaatatacacctcttggattcccag

SEQ ID NO: 413095 - DNA, 53 bp, Artificial
  Synthetic oligonucleotide
gcggagttcgttcaactactctccgcgcaggtgcaagtaagtcctccccaact

SEQ ID NO: 413096 - DNA, 57 bp, Artificial
  Synthetic oligonucleotide
gcggagttgtagctgtaagtgtaggtcaagagggccagttacaggtgtattcctccg

SEQ ID NO: 413097 - DNA, 55 bp, Artificial
  Synthetic oligonucleotide
gcggagttgtgttcggagctgtacaacgtttggaccaagggcatgtcaccgttca

SEQ ID NO: 413098 - DNA, 55 bp, Artificial
  Synthetic oligonucleotide
gcggatacacctcttgaaactaggctactattcttagtagatttaagtatgtctg

SEQ ID NO: 413099 - DNA, 55 bp, Artificial
  Synthetic oligonucleotide
gcggatacacgagaaccaatttgggcctgaatttgcgatgggccacaatacagcg

SEQ ID NO: 413100 - DNA, 60 bp, Artificial
  Synthetic oligonucleotide
gcggatacagcagcaacggccaagtttttgtcatttgtcgactatcgcaatcgtatccaa

SEQ ID NO: 413101 - DNA, 55 bp, Artificial
  Synthetic oligonucleotide
gcggatactgcttcgtatcatgttgagtccattgaaatcgagccgaatggttgca

SEQ ID NO: 413102 - DNA, 60 bp, Artificial
  Synthetic oligonucleotide
gcggatagagctgaaaaggcccgcatgatctctgacctaaggctggataatgagattctt

SEQ ID NO: 413103 - DNA, 60 bp, Artificial
  Synthetic oligonucleotide
gcggatatagcgacagggtgcgttcacttacattgggtaactcaaccatcaccacacagg

SEQ ID NO: 413104 - DNA, 57 bp, Artificial
  Synthetic oligonucleotide
gcggatatgacttcgaaagggagggatattctcttgttggaatagatcctttccgtc

SEQ ID NO: 413105 - DNA, 55 bp, Artificial
  Synthetic oligonucleotide
gcggatatggctattctgaagtggaagtggggacgcaggagctacaggtagcggg

SEQ ID NO: 413106 - DNA, 60 bp, Artificial
  Synthetic oligonucleotide
gcggatatttgtgtatggaccatgtgcaaaacgataaggtattctgacacattgtttacg

SEQ ID NO: 413107 - DNA, 60 bp, Artificial
  Synthetic oligonucleotide
gcggatcaatcaatgttccagttcaaacgttgacagttgaagctggaaatggtttgcaat

SEQ ID NO: 413108 - DNA, 56 bp, Artificial
  Synthetic oligonucleotide
gcggatcagttattgtggacctaagaacggctttccaagtagttctctagtttcag

SEQ ID NO: 413109 - DNA, 55 bp, Artificial
  Synthetic oligonucleotide
gcggatccaaattccttcgctcttaccttgcggtgattagagtctactcagtagt

SEQ ID NO: 413110 - DNA, 55 bp, Artificial
  Synthetic oligonucleotide
gcggatccactgctgtcactattggagatgtgcaacagcacacagatcggtggga

SEQ ID NO: 413111 - DNA, 60 bp, Artificial
  Synthetic oligonucleotide
gcggatccactggcatcactactggagatgtgccacagcacacaaatcggtgggataagg

SEQ ID NO: 413112 - DNA, 55 bp, Artificial
  Synthetic oligonucleotide
gcggatcctaaaggtagtacatctaaagacgggttggatgattggtgtattgtgg

SEQ ID NO: 413113 - DNA, 58 bp, Artificial
  Synthetic oligonucleotide
gcggatcctttgagtacacaggcgccgttcaaccacaactaattccagataatcacac

SEQ ID NO: 413114 - DNA, 60 bp, Artificial
  Synthetic oligonucleotide
gcggatcgacgtcatcaatgacgttataccatgcatcgttggaatacactttcggactaa

SEQ ID NO: 413115 - DNA, 55 bp, Artificial
  Synthetic oligonucleotide
gcggatctactcaggatcttgaaatcaaacagaagggtgaagttgctactaaggg

SEQ ID NO: 413116 - DNA, 55 bp, Artificial
  Synthetic oligonucleotide
gcggatctgactttaaaagacgcaccttcatacaaggtttgtatggtttcctgga

SEQ ID NO: 413117 - DNA, 58 bp, Artificial
  Synthetic oligonucleotide
gcggatctggagactacccgacctgccaaccccttcatctgacttcatccccgaagtc

SEQ ID NO: 413118 - DNA, 55 bp, Artificial
  Synthetic oligonucleotide
gcggatgacgttgagattccgtctaacagtgctactatgggtgcccgtgagaagc

SEQ ID NO: 413119 - DNA, 60 bp, Artificial
  Synthetic oligonucleotide
gcggatgacttactcaccgagagcagggacgcttcatgtgaaagctaccgcccgaccttg

SEQ ID NO: 413120 - DNA, 58 bp, Artificial
  Synthetic oligonucleotide
gcggatgcacactttctccctgaaccgctcccttactctaagttgaaggagaaatatc

SEQ ID NO: 413121 - DNA, 55 bp, Artificial
  Synthetic oligonucleotide
gcggatgccacccgcatggttcttggggtcgccccaaccacgcttattgactgga

SEQ ID NO: 413122 - DNA, 57 bp, Artificial
  Synthetic oligonucleotide
gcggatggaggagaagatttcggattcgtagacggagaccctggagacgctggcggg

SEQ ID NO: 413123 - DNA, 55 bp, Artificial
  Synthetic oligonucleotide
gcggatggcaaagcacactttactgagacgattaagcctgttcttgaccttacta

SEQ ID NO: 413124 - DNA, 55 bp, Artificial
  Synthetic oligonucleotide
gcggatgggagtgcaaatgcagcgattcaagtgatcctttgatttttgctgcaag

SEQ ID NO: 413125 - DNA, 52 bp, Artificial
  Synthetic oligonucleotide
gcggattaaaacattggaaggtttaatttaccctagggaacttctgtactgc

SEQ ID NO: 413126 - DNA, 60 bp, Artificial
  Synthetic oligonucleotide
gcggattatacccttgatgaagagagtagggcaaggatcaaaacaaggctgttcaccata

SEQ ID NO: 413127 - DNA, 51 bp, Artificial
  Synthetic oligonucleotide
gcggattatttggaaaaggaggcatcgtgacctgtgcaatgttcacatgta

SEQ ID NO: 413128 - DNA, 60 bp, Artificial
  Synthetic oligonucleotide
gcggattcatccaatccgcttaggtatttatatggtctgctagtcacggaagccagtcca

SEQ ID NO: 413129 - DNA, 55 bp, Artificial
  Synthetic oligonucleotide
gcggattcgaggctactgttttatgcttactgcactactcgcggtctagacaatc

SEQ ID NO: 413130 - DNA, 55 bp, Artificial
  Synthetic oligonucleotide
gcggattgagccatttctgaaaacaacaccacgccctctaagattgcctgacggc

SEQ ID NO: 413131 - DNA, 55 bp, Artificial
  Synthetic oligonucleotide
gcggattgctatcgataggcataggcgcaatggccggttttcgagcacaaacagt

SEQ ID NO: 413132 - DNA, 60 bp, Artificial
  Synthetic oligonucleotide
gcggattgtatcgatctgttgaggtatcacatgtcgcattacatggatgtgagagtgtca

SEQ ID NO: 413133 - DNA, 60 bp, Artificial
  Synthetic oligonucleotide
gcggattgtgcggtctgatacattatagattcgtgccagttcgcctttagtcaagccgcg

SEQ ID NO: 413134 - DNA, 55 bp, Artificial
  Synthetic oligonucleotide
gcggatttcgtgacgtcacggccgccattttaagtcagcgctggggaggcatgac

SEQ ID NO: 413135 - DNA, 59 bp, Artificial
  Synthetic oligonucleotide
gcggatttgagagccgtgaactttgaagtcaatagttctcgctccgaggtcgcctctat

SEQ ID NO: 413136 - DNA, 55 bp, Artificial
  Synthetic oligonucleotide
gcggatttggtaccgttcgacgctgtgttggaaccggaggagccggttactctgc

SEQ ID NO: 413137 - DNA, 55 bp, Artificial
  Synthetic oligonucleotide
gcggatttgtctatacaagacccatataaggatcggttcacagttatccgtcagg

SEQ ID NO: 413138 - DNA, 55 bp, Artificial
  Synthetic oligonucleotide
gcggcaaacaatgctaaaccatcacacaggagaatgtccgcagtttgatctaagc

SEQ ID NO: 413139 - DNA, 60 bp, Artificial
  Synthetic oligonucleotide
gcggcaaatttcgaaatgatagtgagtttgctgagttgttgagcgctcattatcgttggc

SEQ ID NO: 413140 - DNA, 57 bp, Artificial
  Synthetic oligonucleotide
gcggcaacaagccacgactactcgtcgttaggatcaatattggttcctgaaaacacc

SEQ ID NO: 413141 - DNA, 55 bp, Artificial
  Synthetic oligonucleotide
gcggcaaccctgacacaaacgttgacaccttggctgccttcccgccgtcttgcca

SEQ ID NO: 413142 - DNA, 55 bp, Artificial
  Synthetic oligonucleotide
gcggcaacctacaaattctccaatacagagatcgcagaggagaccttcacgcaca

SEQ ID NO: 413143 - DNA, 53 bp, Artificial
  Synthetic oligonucleotide
gcggcaactatgtccatctgccgctgagtccccgaaccctaaatgcttgggta

SEQ ID NO: 413144 - DNA, 59 bp, Artificial
  Synthetic oligonucleotide
gcggcaagacactccgatctttcttcaagatgacccctgacaactacaagataacaggt

SEQ ID NO: 413145 - DNA, 58 bp, Artificial
  Synthetic oligonucleotide
gcggcaagataatagtcgtacaacgctattagtatatgtattacagttataaacccaa

SEQ ID NO: 413146 - DNA, 55 bp, Artificial
  Synthetic oligonucleotide
gcggcaagcaatcctcagagtcaagaccaagttctaactcctctgactccggacg

SEQ ID NO: 413147 - DNA, 60 bp, Artificial
  Synthetic oligonucleotide
gcggcaagcggaattattgcgcgtgacaacactggcgcatcggttaacacttcaagctta

SEQ ID NO: 413148 - DNA, 53 bp, Artificial
  Synthetic oligonucleotide
gcggcaagggatggacgagttatagttctcgatcgggtaacgggtaacaaaac

SEQ ID NO: 413149 - DNA, 55 bp, Artificial
  Synthetic oligonucleotide
gcggcaagtgataaccacgcatttgtcgttcggcgtcccggctccactacggtta

SEQ ID NO: 413150 - DNA, 55 bp, Artificial
  Synthetic oligonucleotide
gcggcaattgtgtctgtcgtcgatccagactgcctttaatcaaggggccggaacc

SEQ ID NO: 413151 - DNA, 55 bp, Artificial
  Synthetic oligonucleotide
gcggcacaccaacacacaggatgttaatgtacaacttcccaaccaaatcaggcca

SEQ ID NO: 413152 - DNA, 55 bp, Artificial
  Synthetic oligonucleotide
gcggcacctgcgtgtgagagcggggaagttatcaatctcgctgcgcgcatgtctc

SEQ ID NO: 413153 - DNA, 55 bp, Artificial
  Synthetic oligonucleotide
gcggcacctgctcaataagaatcataccgagatgcccggaacagaacgtgttctc

SEQ ID NO: 413154 - DNA, 52 bp, Artificial
  Synthetic oligonucleotide
gcggcacgatggagactgagcaccagaaccttgaggctaagtggcaggagct

SEQ ID NO: 413155 - DNA, 60 bp, Artificial
  Synthetic oligonucleotide
gcggcacggccaccgctggctatcgcggcacggccaccgctggctatcgcggcacggcca

SEQ ID NO: 413156 - DNA, 55 bp, Artificial
  Synthetic oligonucleotide
gcggcacgtcagtacgtaagtgttaactttgaggaagtggattgagcatcttgat

SEQ ID NO: 413157 - DNA, 55 bp, Artificial
  Synthetic oligonucleotide
gcggcacgtcagtacgtaagtgttaactttgagtgagtggcttgagcattttgga

SEQ ID NO: 413158 - DNA, 55 bp, Artificial
  Synthetic oligonucleotide
gcggcacgtcagtacgtaagtgttaactttgagtgtgtgtaaagagcagcttgtg

SEQ ID NO: 413159 - DNA, 57 bp, Artificial
  Synthetic oligonucleotide
gcggcagaattcaaactagagaggaggtctcgattaaaaccacactcaaagagttgg

SEQ ID NO: 413160 - DNA, 55 bp, Artificial
  Synthetic oligonucleotide
gcggcagatactatgaacacgctccgatagagttgatttacgcatgtagatcggc

SEQ ID NO: 413161 - DNA, 58 bp, Artificial
  Synthetic oligonucleotide
gcggcagatcagtcgtactttaccttggaaactgcagattacttcaagatttacccca

SEQ ID NO: 413162 - DNA, 60 bp, Artificial
  Synthetic oligonucleotide
gcggcagccaggggaacccactgacggacgctggttcatggatgaggcgtggggtgagtg

SEQ ID NO: 413163 - DNA, 54 bp, Artificial
  Synthetic oligonucleotide
gcggcagcgattctaatcggggcctacaacggaatatctcagacactcccaccg

SEQ ID NO: 413164 - DNA, 56 bp, Artificial
  Synthetic oligonucleotide
gcggcaggatccaaccacgacggagtgttcctagaaaggcgcgggtcggtaccaga

SEQ ID NO: 413165 - DNA, 55 bp, Artificial
  Synthetic oligonucleotide
gcggcaggggcatacctaatttctatagtggcctctaaactagagcgaatcgggc

SEQ ID NO: 413166 - DNA, 55 bp, Artificial
  Synthetic oligonucleotide
gcggcaggttcggaagagacatcgtctcgtttctactagtcgtgaacgtgttgag

SEQ ID NO: 413167 - DNA, 60 bp, Artificial
  Synthetic oligonucleotide
gcggcagtcattgtgtttgtggggcaaaatatgacacatctgacaggatgaaaatgcata

SEQ ID NO: 413168 - DNA, 60 bp, Artificial
  Synthetic oligonucleotide
gcggcagtcgacggtgtatgttccggctctgacgtatggggcgtcatacgtgacggtgac

SEQ ID NO: 413169 - DNA, 55 bp, Artificial
  Synthetic oligonucleotide
gcggcagtcgttggaactgtcggaccttcccgtgagaaaatgctcgaggataggc

SEQ ID NO: 413170 - DNA, 55 bp, Artificial
  Synthetic oligonucleotide
gcggcagtgaccaacaactgctatgaattctgttgccaggttatgggtgtgcaag

SEQ ID NO: 413171 - DNA, 60 bp, Artificial
  Synthetic oligonucleotide
gcggcatatacaacgaccctcacagggaccatcgcagtgagatttatcccggtcctgcct

SEQ ID NO: 413172 - DNA, 55 bp, Artificial
  Synthetic oligonucleotide
gcggcatcaactatgctgacgtagttagggctgcgcaaactgagagtggcaagct

SEQ ID NO: 413173 - DNA, 60 bp, Artificial
  Synthetic oligonucleotide
gcggcatcgcgagttatgatgaggcgtgctacagtagcggtgtgcaacgaagttagtagt

SEQ ID NO: 413174 - DNA, 55 bp, Artificial
  Synthetic oligonucleotide
gcggcattcatccatccattcggtaacgcagatcggatgattacggtccttgcgg

SEQ ID NO: 413175 - DNA, 60 bp, Artificial
  Synthetic oligonucleotide
gcggccaaaagccccgtggataagatccactgctgtgagcggtgcaaccccagcaccctg

SEQ ID NO: 413176 - DNA, 60 bp, Artificial
  Synthetic oligonucleotide
gcggccaaccgtgagactgcaaaagatgcaaaaaccagcggagttgttccggatgctcta

SEQ ID NO: 413177 - DNA, 55 bp, Artificial
  Synthetic oligonucleotide
gcggccaagataacgccaaggagttttctagagagggacccactgtttcagaagg

SEQ ID NO: 413178 - DNA, 58 bp, Artificial
  Synthetic oligonucleotide
gcggccaaggcttactttaatataatgcacagtgatgaaatggattttgccgggggga

SEQ ID NO: 413179 - DNA, 53 bp, Artificial
  Synthetic oligonucleotide
gcggccaatatcatagtctcttatgccgagtggccagagtactgccctgatac

SEQ ID NO: 413180 - DNA, 55 bp, Artificial
  Synthetic oligonucleotide
gcggccaatggagttccactgcgacatgaaacgctactgcccttcttcgctgacg

SEQ ID NO: 413181 - DNA, 56 bp, Artificial
  Synthetic oligonucleotide
gcggccactgttatgtacgggggttccgttaatgaaggccggtctatgattgacaa

SEQ ID NO: 413182 - DNA, 55 bp, Artificial
  Synthetic oligonucleotide
gcggccagacgtcttgcctgaaggtcacgggaactttcattttcctgcttcgcca

SEQ ID NO: 413183 - DNA, 60 bp, Artificial
  Synthetic oligonucleotide
gcggccagcccagcttatgctgggacgcctttttaaagacatggtgtgaagacctgcatg

SEQ ID NO: 413184 - DNA, 55 bp, Artificial
  Synthetic oligonucleotide
gcggccatccgtataatattaccggatggccgcgccttttccttttatgtggtcc

SEQ ID NO: 413185 - DNA, 56 bp, Artificial
  Synthetic oligonucleotide
gcggccatcctataatattaccggatggccgcgattttttggtgtcctctatcccg

SEQ ID NO: 413186 - DNA, 55 bp, Artificial
  Synthetic oligonucleotide
gcggccccattacgtactccacttatggcaagttccttgccgacggcgggtgctc

SEQ ID NO: 413187 - DNA, 53 bp, Artificial
  Synthetic oligonucleotide
gcggcccccattgataacattggaggagtccatcctcgcgggggacccttcta

SEQ ID NO: 413188 - DNA, 54 bp, Artificial
  Synthetic oligonucleotide
gcggccccttgtctcaataaaagtagggggccagataaaagaggctgttttaga

SEQ ID NO: 413189 - DNA, 55 bp, Artificial
  Synthetic oligonucleotide
gcggcccgcagggctatgccagcattgatggctgcttaatgcgttgcatggcgtc

SEQ ID NO: 413190 - DNA, 53 bp, Artificial
  Synthetic oligonucleotide
gcggccctaggcgttgccacagctgctcagataacagccggcattgcacttca

SEQ ID NO: 413191 - DNA, 56 bp, Artificial
  Synthetic oligonucleotide
gcggccgaccaattcattggggacctcaccaagaccaactcagccgggggacgcta

SEQ ID NO: 413192 - DNA, 55 bp, Artificial
  Synthetic oligonucleotide
gcggccgctaattatccaagacttgaggggatcatagtccagataaacacgggtt

SEQ ID NO: 413193 - DNA, 53 bp, Artificial
  Synthetic oligonucleotide
gcggccgctttaattgccggctgtggactgaagcttaaggtggactttagacc

SEQ ID NO: 413194 - DNA, 55 bp, Artificial
  Synthetic oligonucleotide
gcggccggaatccgttgaacaagccttccggatcacccttagccgtcgacagcag

SEQ ID NO: 413195 - DNA, 55 bp, Artificial
  Synthetic oligonucleotide
gcggccgtaacaggtcaccgtgaattgaacgctttcagtccgcgttcctacgtat

SEQ ID NO: 413196 - DNA, 55 bp, Artificial
  Synthetic oligonucleotide
gcggccgtaagggcgtagatagtgatcaagattgctttatgatgcgatatgctca

SEQ ID NO: 413197 - DNA, 55 bp, Artificial
  Synthetic oligonucleotide
gcggccgtagtcaccttgaaaagtgtcgtaaacgctttgaagcaagaaatcgaga

SEQ ID NO: 413198 - DNA, 55 bp, Artificial
  Synthetic oligonucleotide
gcggccgttattaggactgctgagacgcttgaggctgtcttgtcgtttcctaagg

SEQ ID NO: 413199 - DNA, 52 bp, Artificial
  Synthetic oligonucleotide
gcggcctaatggtaggtcgcactgagggcaggatgcaattagcgggcggttt

SEQ ID NO: 413200 - DNA, 58 bp, Artificial
  Synthetic oligonucleotide
gcggcctatttacctctccggctgatttaactacgcctcgcactgtggcatcaaaaag

SEQ ID NO: 413201 - DNA, 55 bp, Artificial
  Synthetic oligonucleotide
gcggcctgacctggacgagggcgttctttaagcccagcgcaggtgacccggtgtg

SEQ ID NO: 413202 - DNA, 55 bp, Artificial
  Synthetic oligonucleotide
gcggcctgagtgactaagccccgttggggactttccgaagaggcatgacgggact

SEQ ID NO: 413203 - DNA, 57 bp, Artificial
  Synthetic oligonucleotide
gcggccttaattgcgggctgtgggctcaaattgaaggttgattaccgccccattgga

SEQ ID NO: 413204 - DNA, 58 bp, Artificial
  Synthetic oligonucleotide
gcggcctttatgtggctgaggttgtccatttcaaaggcgggtacaggattggagacag

SEQ ID NO: 413205 - DNA, 60 bp, Artificial
  Synthetic oligonucleotide
gcggcgaagagactatcggagaggccttcgcttggctagacaggacggtagaagccataa

SEQ ID NO: 413206 - DNA, 60 bp, Artificial
  Synthetic oligonucleotide
gcggcgaagtacgagaaccatacggagaacgctctgttattgtatatggcatgtactcat

SEQ ID NO: 413207 - DNA, 60 bp, Artificial
  Synthetic oligonucleotide
gcggcgaataaggcaatgttgcaagaaggtactctgaactggtcggtagttcaatctcaa

SEQ ID NO: 413208 - DNA, 60 bp, Artificial
  Synthetic oligonucleotide
gcggcgaattcatatctaatgtctccagatacatctatcattttactcggtgctgagcga

SEQ ID NO: 413209 - DNA, 57 bp, Artificial
  Synthetic oligonucleotide
gcggcgaccgatacgcagcgtggtaggatttggaggacaaacccgtatccgtgtcta

SEQ ID NO: 413210 - DNA, 55 bp, Artificial
  Synthetic oligonucleotide
gcggcgaggaacattgtcagaagggcaacagtctctgcggaccccttggcctcac

SEQ ID NO: 413211 - DNA, 55 bp, Artificial
  Synthetic oligonucleotide
gcggcgaggaacgagactgagccggtcaataaactcgtgtgcgcaattacgcttt

SEQ ID NO: 413212 - DNA, 55 bp, Artificial
  Synthetic oligonucleotide
gcggcgccattaaataacgtgtacttgtcctattcttgtcggtgtggtcttggga

SEQ ID NO: 413213 - DNA, 55 bp, Artificial
  Synthetic oligonucleotide
gcggcgccggggaggctccaaacccctggtgaggccatcaagtatgtcctagata

SEQ ID NO: 413214 - DNA, 51 bp, Artificial
  Synthetic oligonucleotide
gcggcgcgaaagaaattgacatagcggaccaagagttcgctacgtgggcta

SEQ ID NO: 413215 - DNA, 55 bp, Artificial
  Synthetic oligonucleotide
gcggcgcgcaggcttctacactctcgacggcaatttccacgttgttacaaaccag

SEQ ID NO: 413216 - DNA, 60 bp, Artificial
  Synthetic oligonucleotide
gcggcgctattctgcgccgacagtataatctgtcaacatcgcccctcacgtcgtctgttg

SEQ ID NO: 413217 - DNA, 55 bp, Artificial
  Synthetic oligonucleotide
gcggcggaatatcgttgcgtcagagtttaacaacgcagaagtaatcccgcccacg

SEQ ID NO: 413218 - DNA, 55 bp, Artificial
  Synthetic oligonucleotide
gcggcggagcggtttgctgagagtgagatcggatcagccgcaatcgatgggctag

SEQ ID NO: 413219 - DNA, 55 bp, Artificial
  Synthetic oligonucleotide
gcggcggggttgccagtggaggcaggaccaataccagctcaacacaaaccaccct

SEQ ID NO: 413220 - DNA, 55 bp, Artificial
  Synthetic oligonucleotide
gcggcgggttcgtacccgatcgacgtcatggcaatcccgattggtcgcaagagca

SEQ ID NO: 413221 - DNA, 55 bp, Artificial
  Synthetic oligonucleotide
gcggcggtacaaactacgtaccagtcacgatcaccgtcgcacctatggatgccga

SEQ ID NO: 413222 - DNA, 57 bp, Artificial
  Synthetic oligonucleotide
gcggcggtatgtacccctgggagggtagaaaccactacgctacgcagcagccttagc

SEQ ID NO: 413223 - DNA, 50 bp, Artificial
  Synthetic oligonucleotide
gcggcggtctagtgagaccacgggactctaacctgagagcctcagagcga

SEQ ID NO: 413224 - DNA, 57 bp, Artificial
  Synthetic oligonucleotide
gcggcggtgtgtacccctgggagggtagaaaccactacgctacgcagcagcccagcc

SEQ ID NO: 413225 - DNA, 51 bp, Artificial
  Synthetic oligonucleotide
gcggcggttgtgatagggcgaccgctgaagcgagctgcgtgtgcgtgccgt

SEQ ID NO: 413226 - DNA, 55 bp, Artificial
  Synthetic oligonucleotide
gcggcgtaccgagaaacctgctcccgtcgtggtaccgccgcctatccacttctcg

SEQ ID NO: 413227 - DNA, 60 bp, Artificial
  Synthetic oligonucleotide
gcggcgtatgttgcagattgtgataggcgggggattacacccagtgccaagacgaatgct

SEQ ID NO: 413228 - DNA, 60 bp, Artificial
  Synthetic oligonucleotide
gcggcgtcaataacgctgacggtacaggccagacaattgttgtctggtatagtgcaacag

SEQ ID NO: 413229 - DNA, 58 bp, Artificial
  Synthetic oligonucleotide
gcggcgtcggacacaaataatggcagagtatggtggtcaaacccttatccatgtttac

SEQ ID NO: 413230 - DNA, 55 bp, Artificial
  Synthetic oligonucleotide
gcggcgtcggcggatgatgctaggtgagtcggttgcgtgtgttgattgggctgac

SEQ ID NO: 413231 - DNA, 60 bp, Artificial
  Synthetic oligonucleotide
gcggcgtggccttcaaggacacatccactccttgcttgcagggtatgactgtggaaacca

SEQ ID NO: 413232 - DNA, 53 bp, Artificial
  Synthetic oligonucleotide
gcggcgttccgtcttccgtcccctactgcttggaaccccagttaggcgtgtag

SEQ ID NO: 413233 - DNA, 60 bp, Artificial
  Synthetic oligonucleotide
gcggcgttctattcgacactctttatcctcgcctatctgccatgacatcacgcgcataca

SEQ ID NO: 413234 - DNA, 55 bp, Artificial
  Synthetic oligonucleotide
gcggcgtttctggagggtcaataactatgtggtgtacaaccaccaagaggcggcg

SEQ ID NO: 413235 - DNA, 55 bp, Artificial
  Synthetic oligonucleotide
gcggcgtttgatgtattgctggtttctttcccgttcatccagtagtgccagcacg

SEQ ID NO: 413236 - DNA, 60 bp, Artificial
  Synthetic oligonucleotide
gcggctaaagcaattgagaacgacctctattttgtcgcatcacaccaactcccggctgag

SEQ ID NO: 413237 - DNA, 55 bp, Artificial
  Synthetic oligonucleotide
gcggctaatcctaaccccggagctggtgcacacaaaccagtgtgtggccagtcgt

SEQ ID NO: 413238 - DNA, 55 bp, Artificial
  Synthetic oligonucleotide
gcggctaatctcaaccccggagccactgggtggtgaaccaaccacttggtggtcg

SEQ ID NO: 413239 - DNA, 55 bp, Artificial
  Synthetic oligonucleotide
gcggctaatcttaccccacagctgttgcacgcaaaccagcgtgtatgcagtcgta

SEQ ID NO: 413240 - DNA, 55 bp, Artificial
  Synthetic oligonucleotide
gcggctaattgtttggcggacattggggcctattcatctgtgtttccggtgggag

SEQ ID NO: 413241 - DNA, 55 bp, Artificial
  Synthetic oligonucleotide
gcggctacaagccgcgcgttggctggagcgtgcccagtcagttaaaatcccctca

SEQ ID NO: 413242 - DNA, 57 bp, Artificial
  Synthetic oligonucleotide
gcggctacaataatgcagaaggcataccacgctaaagtggtaaaagttgcccggccc

SEQ ID NO: 413243 - DNA, 60 bp, Artificial
  Synthetic oligonucleotide
gcggctaccagtaagagtgagtacaggaggattgctaggagaatgccgaagcacctagca

SEQ ID NO: 413244 - DNA, 60 bp, Artificial
  Synthetic oligonucleotide
gcggctagccaaagactcgagcccggtcgtaacatgtggtgcagaatagggcacgacagg

SEQ ID NO: 413245 - DNA, 58 bp, Artificial
  Synthetic oligonucleotide
gcggctaggcgcagactctttaagggactgcgtcgtgagcgtcgtctcagggacaccc

SEQ ID NO: 413246 - DNA, 55 bp, Artificial
  Synthetic oligonucleotide
gcggctagtagggtccgagcgttagcgacaaactgatccggggtctctccaacct

SEQ ID NO: 413247 - DNA, 57 bp, Artificial
  Synthetic oligonucleotide
gcggctagttacaaccaagggtatcaagggttcagctatccatcttgtactaaacac

SEQ ID NO: 413248 - DNA, 50 bp, Artificial
  Synthetic oligonucleotide
gcggctatatgcggcaagtacctctttaactgggcagtgaggaccaaact

SEQ ID NO: 413249 - DNA, 59 bp, Artificial
  Synthetic oligonucleotide
gcggctatgtccagctaacgtgggactcgaactacgagcgcgccgataaggagcttggt

SEQ ID NO: 413250 - DNA, 59 bp, Artificial
  Synthetic oligonucleotide
gcggctcaacgatggagttgttggacagtaacaaagccaacacaactagtcactaagga

SEQ ID NO: 413251 - DNA, 60 bp, Artificial
  Synthetic oligonucleotide
gcggctcagaaacggagagaatattgatgagtgatggcgaatcattatgctttttaggtg

SEQ ID NO: 413252 - DNA, 55 bp, Artificial
  Synthetic oligonucleotide
gcggctccccgatccgaaagtcccgatcccgatttccaaagtttgcgagcactcc

SEQ ID NO: 413253 - DNA, 55 bp, Artificial
  Synthetic oligonucleotide
gcggctcgactagtggcaaatcgagggagactcgcggcggcagtcctctcaacaa

SEQ ID NO: 413254 - DNA, 53 bp, Artificial
  Synthetic oligonucleotide
gcggctcggggccttggttaacacccaggtgcatggtagactatccatacagg

SEQ ID NO: 413255 - DNA, 50 bp, Artificial
  Synthetic oligonucleotide
gcggctcttcttatgttagtagcacattatgccatcataggaccgggact

SEQ ID NO: 413256 - DNA, 60 bp, Artificial
  Synthetic oligonucleotide
gcggctcttggagcagtgttcgctgaacagaatcaatggagcacagcacgtgaggctgtg

SEQ ID NO: 413257 - DNA, 55 bp, Artificial
  Synthetic oligonucleotide
gcggctgaacgatttgcagatagcgagattggctcagcggctattgatgggttag

SEQ ID NO: 413258 - DNA, 55 bp, Artificial
  Synthetic oligonucleotide
gcggctgacaaagggaaagtggctgacaaaggaaaggtcagtcaaaattacccta

SEQ ID NO: 413259 - DNA, 60 bp, Artificial
  Synthetic oligonucleotide
gcggctgacacacaagccgcatgcctgagtgccacccgagacttactcatgactttagcg

SEQ ID NO: 413260 - DNA, 55 bp, Artificial
  Synthetic oligonucleotide
gcggctgagagattcgcagaaagtgaaatcggttcagcggcgatcgatggattag

SEQ ID NO: 413261 - DNA, 60 bp, Artificial
  Synthetic oligonucleotide
gcggctgaggaatcaaagctgccaattagccccctgagcaactcactgttacgccatcac

SEQ ID NO: 413262 - DNA, 55 bp, Artificial
  Synthetic oligonucleotide
gcggctgaggcatacattgagatgagaaattccaaagagccgtatatgcctagat

SEQ ID NO: 413263 - DNA, 55 bp, Artificial
  Synthetic oligonucleotide
gcggctgatgacagtcaaatcgtcggatgaaagagaataccaggtgtaattaaca

SEQ ID NO: 413264 - DNA, 54 bp, Artificial
  Synthetic oligonucleotide
gcggctgcaaacacagccgctaaaattcagaactatgtcacagcatgtaggcag

SEQ ID NO: 413265 - DNA, 60 bp, Artificial
  Synthetic oligonucleotide
gcggctgcagatgcttgctgacacctgccccgtcacgctcaactgtgacagaattgagaa

SEQ ID NO: 413266 - DNA, 60 bp, Artificial
  Synthetic oligonucleotide
gcggctgctgtggggctgtgacgccgcaacaactctaattgcagtggcggcgtttaagcc

SEQ ID NO: 413267 - DNA, 55 bp, Artificial
  Synthetic oligonucleotide
gcggctggaggtggatacagagttaagtccacggttacaagaaatatctttaaat

SEQ ID NO: 413268 - DNA, 55 bp, Artificial
  Synthetic oligonucleotide
gcggctggtggactgtcgacaacattgttcatctctgcggagacggggtgcgtgg

SEQ ID NO: 413269 - DNA, 55 bp, Artificial
  Synthetic oligonucleotide
gcggctgtgtatagaactatggaggattgtactgacaccgaagataagccataca

SEQ ID NO: 413270 - DNA, 55 bp, Artificial
  Synthetic oligonucleotide
gcggcttacgccttaaaaacaacgtatgaattagtagctcattccgaaagagaaa

SEQ ID NO: 413271 - DNA, 58 bp, Artificial
  Synthetic oligonucleotide
gcggcttacggagaagaggacctactgtccagacccattcatctgatgaagctaatca

SEQ ID NO: 413272 - DNA, 58 bp, Artificial
  Synthetic oligonucleotide
gcggcttatgccttaaaaacaacgcatgaactagtagctcattccgaaagggaaagca

SEQ ID NO: 413273 - DNA, 54 bp, Artificial
  Synthetic oligonucleotide
gcggcttttcttcgaatcagctcggctcatctcgacaagaggcggcggtcctca

SEQ ID NO: 413274 - DNA, 55 bp, Artificial
  Synthetic oligonucleotide
gcggcttttgctaatagaccgacgattgcacaggcttcttgtgtaaggttttctc

SEQ ID NO: 413275 - DNA, 58 bp, Artificial
  Synthetic oligonucleotide
gcgggaaaagtagcatataccctgcgcactgatccttgttcgttaccacgcacgatag

SEQ ID NO: 413276 - DNA, 58 bp, Artificial
  Synthetic oligonucleotide
gcgggaacacaaataacgaatctgactttaacaagctcgtcagcaatattaatatatg

SEQ ID NO: 413277 - DNA, 55 bp, Artificial
  Synthetic oligonucleotide
gcgggaacagtatggtgagacctggcacatagacagagagcacccgtacaggacc

SEQ ID NO: 413278 - DNA, 54 bp, Artificial
  Synthetic oligonucleotide
gcgggaaccaatcaaattcaaacaccaacaaccaataaaatacacccacgtcac

SEQ ID NO: 413279 - DNA, 50 bp, Artificial
  Synthetic oligonucleotide
gcgggaaccagggggacggttaagggttagccgccttggcaaaagttcaa

SEQ ID NO: 413280 - DNA, 59 bp, Artificial
  Synthetic oligonucleotide
gcgggaacgctcacaattgaaatttcgaacggttcccattcagtgatgcggtagacatc

SEQ ID NO: 413281 - DNA, 60 bp, Artificial
  Synthetic oligonucleotide
gcgggaactactagtacccttcaggaacagatagcatggatgacaaataatccagctatc

SEQ ID NO: 413282 - DNA, 55 bp, Artificial
  Synthetic oligonucleotide
gcgggaagagcaacctccggttctctccttactcgacgatccaggcgagggaacg

SEQ ID NO: 413283 - DNA, 55 bp, Artificial
  Synthetic oligonucleotide
gcgggaagcggttgttatgcttatcgtgcgctttggcggtttctaacgaatcctc

SEQ ID NO: 413284 - DNA, 57 bp, Artificial
  Synthetic oligonucleotide
gcgggaatgaccgcggatgtgcttgaagccgcgtctgaggaagtaccgttagttggt

SEQ ID NO: 413285 - DNA, 55 bp, Artificial
  Synthetic oligonucleotide
gcgggacaagtcacaataagcattttgtagttgccacgaacattattgagaatgg

SEQ ID NO: 413286 - DNA, 55 bp, Artificial
  Synthetic oligonucleotide
gcgggacatgggactctttggccaaaatatgtactaccactacctaggtaggtcc

SEQ ID NO: 413287 - DNA, 55 bp, Artificial
  Synthetic oligonucleotide
gcgggaccaacgtgggtctggacaggttgtgacctacgctttgaacacactcacg

SEQ ID NO: 413288 - DNA, 56 bp, Artificial
  Synthetic oligonucleotide
gcgggaccatgtctttcccgcgcgatagcgacgggtggtcccgcgtgtggtttgtg

SEQ ID NO: 413289 - DNA, 55 bp, Artificial
  Synthetic oligonucleotide
gcgggacctgagttggcggtaatctataaaccgtctgaagtcactaaacactttg

SEQ ID NO: 413290 - DNA, 60 bp, Artificial
  Synthetic oligonucleotide
gcgggactattcattttcaggtgcttatggaagggaatccactgatcaagagaggagatt

SEQ ID NO: 413291 - DNA, 60 bp, Artificial
  Synthetic oligonucleotide
gcgggactgcatatattttcggatacccacacctctatgtcttctggcacttgtgtaaaa

SEQ ID NO: 413292 - DNA, 55 bp, Artificial
  Synthetic oligonucleotide
gcgggactgcggtcgataatttgttgttgacgagtaagcgtccgtcaacttccat

SEQ ID NO: 413293 - DNA, 59 bp, Artificial
  Synthetic oligonucleotide
gcgggacttacacttttggcagtgtatttcattgcctgtcgactaaatcttgtgtcgac

SEQ ID NO: 413294 - DNA, 51 bp, Artificial
  Synthetic oligonucleotide
gcgggactttccaagggactttccaagggactttccaagggggagggctca

SEQ ID NO: 413295 - DNA, 57 bp, Artificial
  Synthetic oligonucleotide
gcgggactttccagcttgctgacacggcagggactttccagcgtgggagggataagg

SEQ ID NO: 413296 - DNA, 54 bp, Artificial
  Synthetic oligonucleotide
gcgggagaacgttcaccgtgagattcgtaggttgcgccttaccccacgtaacaa

SEQ ID NO: 413297 - DNA, 60 bp, Artificial
  Synthetic oligonucleotide
gcgggagagccgaaatcctgggaatgcagaaattgaagacctcatcttcttggcccgatc

SEQ ID NO: 413298 - DNA, 55 bp, Artificial
  Synthetic oligonucleotide
gcgggagaggagggcccttattggggcctcatgggagaaatagggaggcctatta

SEQ ID NO: 413299 - DNA, 56 bp, Artificial
  Synthetic oligonucleotide
gcgggagagttagtagtacctcccaaaccaatccaaaatgcatttgactctatttc

SEQ ID NO: 413300 - DNA, 54 bp, Artificial
  Synthetic oligonucleotide
gcgggagatctccgtacccgcggaaatcctgcggaagtctcggagatttacccc

SEQ ID NO: 413301 - DNA, 59 bp, Artificial
  Synthetic oligonucleotide
gcgggagatgttcgatcactgggcggcaggaggtgttcttccccctatcgactgggata

SEQ ID NO: 413302 - DNA, 60 bp, Artificial
  Synthetic oligonucleotide
gcgggagcacgttatagagagatgctgtcgggcataccaagcagccagaactaatggccc

SEQ ID NO: 413303 - DNA, 60 bp, Artificial
  Synthetic oligonucleotide
gcgggagccatacaatgagtggacactagagcttttagaggagcttaagagggaagctgt

SEQ ID NO: 413304 - DNA, 57 bp, Artificial
  Synthetic oligonucleotide
gcgggagccgaaggtgagtgaaaccaccgaagtctaggggcaattcgggctagatca

SEQ ID NO: 413305 - DNA, 55 bp, Artificial
  Synthetic oligonucleotide
gcgggagcctgatcgagcatgttgaggtgaaggatcatgcaagagaagtgaccgc

SEQ ID NO: 413306 - DNA, 50 bp, Artificial
  Synthetic oligonucleotide
gcgggagcgtcggtattaagcgggggaaaattagataggtgggaaaaaat

SEQ ID NO: 413307 - DNA, 58 bp, Artificial
  Synthetic oligonucleotide
gcgggagctgagttggcagttctgctataaactgtctgaagtcactaaacgttttacg

SEQ ID NO: 413308 - DNA, 52 bp, Artificial
  Synthetic oligonucleotide
gcgggaggaagtactttacctgaaactcaacgtatgggtggaaaaattatcg

SEQ ID NO: 413309 - DNA, 57 bp, Artificial
  Synthetic oligonucleotide
gcgggaggctcgaagttctaatttgaggagcgtggagctcgaagttccgagagggaa

SEQ ID NO: 413310 - DNA, 55 bp, Artificial
  Synthetic oligonucleotide
gcgggaggctcgcatgaacttttaccctccgtttgctgttccggagtgcactgct

SEQ ID NO: 413311 - DNA, 57 bp, Artificial
  Synthetic oligonucleotide
gcgggagtagggccgtagcgatggggggagatgctatgagttgggggagaccgaagc

SEQ ID NO: 413312 - DNA, 55 bp, Artificial
  Synthetic oligonucleotide
gcgggagtgaagaaaaccatcactgacttctggtacctgagctgtgggctgctct

SEQ ID NO: 413313 - DNA, 58 bp, Artificial
  Synthetic oligonucleotide
gcgggagttttgttcagcatccagaactaaccggactgaattgtatgagaccttgctt

SEQ ID NO: 413314 - DNA, 60 bp, Artificial
  Synthetic oligonucleotide
gcgggataagttcagtcgaccatgtaaccgccggaaaagatctactggtctgtgacagca

SEQ ID NO: 413315 - DNA, 55 bp, Artificial
  Synthetic oligonucleotide
gcgggatacaatacttggcgggcctatcaacgctgcccggcaaccccgctattgc

SEQ ID NO: 413316 - DNA, 50 bp, Artificial
  Synthetic oligonucleotide
gcgggatagtcagcttagtccttgcctgctatataatgtacaaacagaag

SEQ ID NO: 413317 - DNA, 55 bp, Artificial
  Synthetic oligonucleotide
gcgggatatccgtacagtgctctaggtatcaagaagagagacatcctagatccag

SEQ ID NO: 413318 - DNA, 55 bp, Artificial
  Synthetic oligonucleotide
gcgggatgctccatggcgtttaatggcggggacctcaaaggttagccgcggtgtc

SEQ ID NO: 413319 - DNA, 55 bp, Artificial
  Synthetic oligonucleotide
gcgggatgcttgggtaaacaggcccatgtacaggaagcccaggatatatcgtacg

SEQ ID NO: 413320 - DNA, 55 bp, Artificial
  Synthetic oligonucleotide
gcgggatggaagtttagcgcgctatgcctttgacttttatgaagtcacatcacga

SEQ ID NO: 413321 - DNA, 56 bp, Artificial
  Synthetic oligonucleotide
gcgggatggagccttagagaaaccgcatgtttggggaaagcctacgcccaaatgtg

SEQ ID NO: 413322 - DNA, 55 bp, Artificial
  Synthetic oligonucleotide
gcgggatggcaggatgggagctccaaactctatatcaaccggtttgcgccttcga

SEQ ID NO: 413323 - DNA, 53 bp, Artificial
  Synthetic oligonucleotide
gcgggatgggtaaggttccttttgagttagaccctaagcacctcaaggttgta

SEQ ID NO: 413324 - DNA, 55 bp, Artificial
  Synthetic oligonucleotide
gcgggatgtttacctaggagaaaacatcgggtactcgtacagacattaggagaac

SEQ ID NO: 413325 - DNA, 53 bp, Artificial
  Synthetic oligonucleotide
gcgggattccaaagaaaaccactgccaacgaactcacggtttggcggttcctg

SEQ ID NO: 413326 - DNA, 55 bp, Artificial
  Synthetic oligonucleotide
gcgggatttggccagtacttgttgtatgtatagtgtataaaaggtgtgtaaatac

SEQ ID NO: 413327 - DNA, 55 bp, Artificial
  Synthetic oligonucleotide
gcgggcaatagttcctgatcaaacattcgatgaattaagacagatgcttgacaac

SEQ ID NO: 413328 - DNA, 59 bp, Artificial
  Synthetic oligonucleotide
gcgggcaattgcaacgcccgggatgcagatcagagggttcgtatactttgtcgaaacac

SEQ ID NO: 413329 - DNA, 55 bp, Artificial
  Synthetic oligonucleotide
gcgggcacgacgaaaacttttaacttcgacggacgatcccatattgtccagcact

SEQ ID NO: 413330 - DNA, 55 bp, Artificial
  Synthetic oligonucleotide
gcgggcataggccacaagctcaagggaacagagacctatatatcccgagatatgc

SEQ ID NO: 413331 - DNA, 52 bp, Artificial
  Synthetic oligonucleotide
gcgggcatgttgtcgggtcaggcaatgatgttttcataccggctgcgggtct

SEQ ID NO: 413332 - DNA, 55 bp, Artificial
  Synthetic oligonucleotide
gcgggcattgttttatcttgcgtcacatcccacaccttgacaggagcatgattgt

SEQ ID NO: 413333 - DNA, 60 bp, Artificial
  Synthetic oligonucleotide
gcgggccatcgtagctgtgatacccagacctgttttcacgcagatgcaggtcagtgatca

SEQ ID NO: 413334 - DNA, 56 bp, Artificial
  Synthetic oligonucleotide
gcgggccatggatggccccccgtcgggagacttccaccgcaggagcgtatggggtg

SEQ ID NO: 413335 - DNA, 52 bp, Artificial
  Synthetic oligonucleotide
gcgggcccccggttcctccgtaagtgcgatcgagcgtgagacacaacgcgca

SEQ ID NO: 413336 - DNA, 59 bp, Artificial
  Synthetic oligonucleotide
gcgggccccgcctgtggacgcgcgattgcgccgtggccgaactctcatgggaggttgcc

SEQ ID NO: 413337 - DNA, 60 bp, Artificial
  Synthetic oligonucleotide
gcgggcgacagcttttggcccccagagtatattatgctgaactgtcctctatattcacaa

SEQ ID NO: 413338 - DNA, 60 bp, Artificial
  Synthetic oligonucleotide
gcgggcgcattgggagaaggcacgcggcagtgatgaggacaatgagaagtattgctctaa

SEQ ID NO: 413339 - DNA, 56 bp, Artificial
  Synthetic oligonucleotide
gcgggcgccgatccatactttgtggtgcccaagtatacagttcttgactttccccg

SEQ ID NO: 413340 - DNA, 55 bp, Artificial
  Synthetic oligonucleotide
gcgggcgcgtggggagacttatgggagactcttaggagaggtggaagatggatac

SEQ ID NO: 413341 - DNA, 55 bp, Artificial
  Synthetic oligonucleotide
gcgggcggagtcggctatggaagcatggccggtgtggctcttgtgttctacacct

SEQ ID NO: 413342 - DNA, 55 bp, Artificial
  Synthetic oligonucleotide
gcgggcggtaatccagcggaaccgggcccccctcgatggaagaaagatggctgac

SEQ ID NO: 413343 - DNA, 52 bp, Artificial
  Synthetic oligonucleotide
gcgggcggtcactatataaaaccgatcactaccctaacctacaaaggttccc

SEQ ID NO: 413344 - DNA, 58 bp, Artificial
  Synthetic oligonucleotide
gcgggctaatcaatgggtggcccaggcgaagcgtagcatgtacacccaactacccgac

SEQ ID NO: 413345 - DNA, 59 bp, Artificial
  Synthetic oligonucleotide
gcgggctaattgacacttacgttaatattggagcgagatggtctcctgacgttaatgga

SEQ ID NO: 413346 - DNA, 59 bp, Artificial
  Synthetic oligonucleotide
gcgggctacggggcaggagtgtccggtgccctcgttgcttttaagatcatgagtggcga

SEQ ID NO: 413347 - DNA, 55 bp, Artificial
  Synthetic oligonucleotide
gcgggctatttagtgattgtgcatgcagacggtagggtagaagagattaaacgtg

SEQ ID NO: 413348 - DNA, 55 bp, Artificial
  Synthetic oligonucleotide
gcgggctgtgcttggtatgaactcacacccgccgataccacagttaggctacgag

SEQ ID NO: 413349 - DNA, 60 bp, Artificial
  Synthetic oligonucleotide
gcggggaagcaatcgaccgtggataagattcaacagtgatcttgattaccaaattggcta

SEQ ID NO: 413350 - DNA, 55 bp, Artificial
  Synthetic oligonucleotide
gcggggaatcaatcacgattttcccaccaggggcatgggtcgacagcacacaagg

SEQ ID NO: 413351 - DNA, 55 bp, Artificial
  Synthetic oligonucleotide
gcggggacaacaatccgtggacactactacacggggactcgtcactgcagctgag

SEQ ID NO: 413352 - DNA, 55 bp, Artificial
  Synthetic oligonucleotide
gcggggacctcaaaggtttcccgctctgctaactattctccacgtggaggtccta

SEQ ID NO: 413353 - DNA, 55 bp, Artificial
  Synthetic oligonucleotide
gcggggactatgacgtatcacctccgcagatgcaagcgggagaccggtatgtccg

SEQ ID NO: 413354 - DNA, 55 bp, Artificial
  Synthetic oligonucleotide
gcggggagtccaatttgcgtagaggttgtgagtacttttggtatactgccatgat

SEQ ID NO: 413355 - DNA, 50 bp, Artificial
  Synthetic oligonucleotide
gcggggatcgtatagcccctggatcgtacaccccaaagagcggacgctca

SEQ ID NO: 413356 - DNA, 55 bp, Artificial
  Synthetic oligonucleotide
gcggggatcttatataaaagagagtccacacgtagcgcctccttttacgggtcac

SEQ ID NO: 413357 - DNA, 60 bp, Artificial
  Synthetic oligonucleotide
gcggggatgattgtgtagtgaaaccaatcgatgacaggttcgctaatgccctgcttgctc

SEQ ID NO: 413358 - DNA, 60 bp, Artificial
  Synthetic oligonucleotide
gcggggccaacgaaggtgctcgcactgcgctgtctgtggtgacgtggacaaaagacatgg

SEQ ID NO: 413359 - DNA, 60 bp, Artificial
  Synthetic oligonucleotide
gcggggcccgtctatcatagagccccactggaactatgtagagaggcaagcatgtgtgaa

SEQ ID NO: 413360 - DNA, 59 bp, Artificial
  Synthetic oligonucleotide
gcggggcctattgcaccagtccaaatgagagaaccaaggggaagtgacatagcaggaac

SEQ ID NO: 413361 - DNA, 54 bp, Artificial
  Synthetic oligonucleotide
gcggggcgacaaagttttcacttacagtttacatcacctgtatttcactttaag

SEQ ID NO: 413362 - DNA, 55 bp, Artificial
  Synthetic oligonucleotide
gcggggcgagtctccctcacattccgctccactgtcaagcagagcgttacctctg

SEQ ID NO: 413363 - DNA, 55 bp, Artificial
  Synthetic oligonucleotide
gcggggcgtaatcgcggagagaaagtgaaggattcgcaagcgctcgtgtggtatg

SEQ ID NO: 413364 - DNA, 59 bp, Artificial
  Synthetic oligonucleotide
gcggggcgtataattgcgtgggatggacaggccgcattacaaattcacaaccctacaca

SEQ ID NO: 413365 - DNA, 60 bp, Artificial
  Synthetic oligonucleotide
gcggggcgtattatagcgtgggatggacaggccgctctacatgtgcacaatccaacacaa

SEQ ID NO: 413366 - DNA, 56 bp, Artificial
  Synthetic oligonucleotide
gcggggctcgtgaaatacactggaccgggagggaacaatgggtagaagtgaacatg

SEQ ID NO: 413367 - DNA, 60 bp, Artificial
  Synthetic oligonucleotide
gcggggctgcccagtgatactccaagaggggaagatgcccaatttactggttcatgcact

SEQ ID NO: 413368 - DNA, 55 bp, Artificial
  Synthetic oligonucleotide
gcggggcttagagcggttgcgtcagctgatcgtggagaccgctcgtgattggaag

SEQ ID NO: 413369 - DNA, 55 bp, Artificial
  Synthetic oligonucleotide
gcggggcttgcatagcctctcgctattggtgggttcccgcccacgtgacttcaag

SEQ ID NO: 413370 - DNA, 60 bp, Artificial
  Synthetic oligonucleotide
gcgggggagacatctatcacagcgtgtcttatgcccgaccccgctatttgctcctgtgcc

SEQ ID NO: 413371 - DNA, 54 bp, Artificial
  Synthetic oligonucleotide
gcgggggagttgccggccacaccatgtctggatttgctagtctcctcacaccag

SEQ ID NO: 413372 - DNA, 59 bp, Artificial
  Synthetic oligonucleotide
gcgggggcaacctgggcgtcttagcgggtcaatcctctcagctgaatgccgtggtagac

SEQ ID NO: 413373 - DNA, 52 bp, Artificial
  Synthetic oligonucleotide
gcgggggtatcagcgtggctacacttgtgaacctctccaaagctctggactt

SEQ ID NO: 413374 - DNA, 57 bp, Artificial
  Synthetic oligonucleotide
gcgggggtcttatggactgtttaccacggagccggcaacaagactctagccggctca

SEQ ID NO: 413375 - DNA, 55 bp, Artificial
  Synthetic oligonucleotide
gcggggtaaacccatactatgggaactgctgggttcctcggatgtcgatcccctc

SEQ ID NO: 413376 - DNA, 60 bp, Artificial
  Synthetic oligonucleotide
gcggggtaaccacgtctcccctacgcactatgtgcctgaaagcgacgctgcagtgcgtgt

SEQ ID NO: 413377 - DNA, 57 bp, Artificial
  Synthetic oligonucleotide
gcggggtaacgatggagacaggaaacccaggtggggcaccaagctatccattcaata

SEQ ID NO: 413378 - DNA, 55 bp, Artificial
  Synthetic oligonucleotide
gcggggtacatctggaagggtgcagcactagacagtgttgaccagctatcccacg

SEQ ID NO: 413379 - DNA, 54 bp, Artificial
  Synthetic oligonucleotide
gcggggtagtttacggcaagtattgccagatggccgtgcttaaaatgggggccc

SEQ ID NO: 413380 - DNA, 56 bp, Artificial
  Synthetic oligonucleotide
gcggggtcaatcaatgctcccacggtttcagacagcagggcgcttgctaggaggtt

SEQ ID NO: 413381 - DNA, 55 bp, Artificial
  Synthetic oligonucleotide
gcggggtcagacatgagtatccccgctgtgagcggcacggatccgtgaattcgtc

SEQ ID NO: 413382 - DNA, 54 bp, Artificial
  Synthetic oligonucleotide
gcggggtcgagacaaaggacatggtcgggttcgtcacgttgaaagggtgaggcg

SEQ ID NO: 413383 - DNA, 60 bp, Artificial
  Synthetic oligonucleotide
gcggggtcgctcctccacgacggatcaacaacattattttctgcccagtctgtcataaca

SEQ ID NO: 413384 - DNA, 55 bp, Artificial
  Synthetic oligonucleotide
gcggggtgcagctgctcgaagattaccgtaaaagtgggatgatggatgaggccgt

SEQ ID NO: 413385 - DNA, 60 bp, Artificial
  Synthetic oligonucleotide
gcggggtggatgtgttctacagaccttctgagtgctgcgataccctcctttgtgacatcg

SEQ ID NO: 413386 - DNA, 54 bp, Artificial
  Synthetic oligonucleotide
gcggggtggctccttggaaatccggaatgtgaccggttcttaagtgtacctgaa

SEQ ID NO: 413387 - DNA, 55 bp, Artificial
  Synthetic oligonucleotide
gcggggtggttcgattccacatttcgctattagttaactgataagttcagttagc

SEQ ID NO: 413388 - DNA, 52 bp, Artificial
  Synthetic oligonucleotide
gcgggtaatcacgtgcctttacggggtcgttgggtgatgccactcgatttgt

SEQ ID NO: 413389 - DNA, 60 bp, Artificial
  Synthetic oligonucleotide
gcgggtacatagaggcgtacgtgcaaaactccccaatgctagacctgctcatactcacgg

SEQ ID NO: 413390 - DNA, 55 bp, Artificial
  Synthetic oligonucleotide
gcgggtacccaggatccatggacccaggccgggatgtgactatccgattcgatcg

SEQ ID NO: 413391 - DNA, 57 bp, Artificial
  Synthetic oligonucleotide
gcgggtagaacaagcacaactaccgccactatatgatataattttccagcaaattag

SEQ ID NO: 413392 - DNA, 59 bp, Artificial
  Synthetic oligonucleotide
gcgggtagacgtcatctataatgtggaaccacgcatcgttggaatccactttagggcta

SEQ ID NO: 413393 - DNA, 57 bp, Artificial
  Synthetic oligonucleotide
gcgggtagagaaacctgaagtggataacgcgtttagtaaccatttgcatgatttgac

SEQ ID NO: 413394 - DNA, 55 bp, Artificial
  Synthetic oligonucleotide
gcgggtagatttcttggtttactgcaccgcgcccgatgttgaacaaacacgtcgc

SEQ ID NO: 413395 - DNA, 55 bp, Artificial
  Synthetic oligonucleotide
gcgggtaggcaacgagtgttctacgctgggagaaatccctacggcacttcggtgt

SEQ ID NO: 413396 - DNA, 57 bp, Artificial
  Synthetic oligonucleotide
gcgggtagtgcttccaagaaatgtcgcactagaacgactagtagataacccccgagc

SEQ ID NO: 413397 - DNA, 55 bp, Artificial
  Synthetic oligonucleotide
gcgggtatagctgatggatttaggaagaggtacttaagagactacacacagcaaa

SEQ ID NO: 413398 - DNA, 55 bp, Artificial
  Synthetic oligonucleotide
gcgggtatcactaagttcttcacgacctatgtggacaaccctgagtacctcttcg

SEQ ID NO: 413399 - DNA, 55 bp, Artificial
  Synthetic oligonucleotide
gcgggtatggcaatactgaagtggaaacgcagccgttgtcacaggtagagaggga

SEQ ID NO: 413400 - DNA, 60 bp, Artificial
  Synthetic oligonucleotide
gcgggtcaacatcatctataatgttgaaccacgcatcgtttgaatacactttagggctca

SEQ ID NO: 413401 - DNA, 60 bp, Artificial
  Synthetic oligonucleotide
gcgggtcaacatcatctatgacgttataccatgcgtcatttgaatagacccttgggctaa

SEQ ID NO: 413402 - DNA, 55 bp, Artificial
  Synthetic oligonucleotide
gcgggtcaatgctgaagcgtgattggaagactaatgtacacgtcattgtggggcc

SEQ ID NO: 413403 - DNA, 60 bp, Artificial
  Synthetic oligonucleotide
gcgggtcaccatattcttcggagcaagggctacagcatgggacgttgctcatcaaaacct

SEQ ID NO: 413404 - DNA, 60 bp, Artificial
  Synthetic oligonucleotide
gcgggtccataactggtaggttattttctgtcgttaatctgcgcactgtcactccagatc

SEQ ID NO: 413405 - DNA, 55 bp, Artificial
  Synthetic oligonucleotide
gcgggtcctttccatcccaccaacagcagggattctgaaaagatggggacagttg

SEQ ID NO: 413406 - DNA, 60 bp, Artificial
  Synthetic oligonucleotide
gcgggtcgacgtcatcaatgacgttgtaccacgcatcatttgagtacactcgtgggctca

SEQ ID NO: 413407 - DNA, 60 bp, Artificial
  Synthetic oligonucleotide
gcgggtcgacgtcatcaatgacgttgtaccatgcgtcgtttgaatatacctttggagaca

SEQ ID NO: 413408 - DNA, 60 bp, Artificial
  Synthetic oligonucleotide
gcgggtcgcaatgaccgtagtatggagaagctaattccactagtgcatctcaatgatagg

SEQ ID NO: 413409 - DNA, 55 bp, Artificial
  Synthetic oligonucleotide
gcgggtcgggacagttttcgttttctgtccggagccgtgctgcccggatgatgtc

SEQ ID NO: 413410 - DNA, 54 bp, Artificial
  Synthetic oligonucleotide
gcgggtcggtatctacgaataacggttcaactactacgcagcctggtgggacgg

SEQ ID NO: 413411 - DNA, 55 bp, Artificial
  Synthetic oligonucleotide
gcgggtctaatcgtgcatctgttggtaagaggaatgatggtaaacgtcgtgtgag

SEQ ID NO: 413412 - DNA, 54 bp, Artificial
  Synthetic oligonucleotide
gcgggtctacggcgtagctaacccctgcaccagcctcccttacgttgaaccgac

SEQ ID NO: 413413 - DNA, 50 bp, Artificial
  Synthetic oligonucleotide
gcgggtctgtggaggtccctgttgtatgggtgccgggagtagtgtgggat

SEQ ID NO: 413414 - DNA, 54 bp, Artificial
  Synthetic oligonucleotide
gcgggtgaagccgctatccgtattgttcctagcctcaggaactttcgctcgcgc

SEQ ID NO: 413415 - DNA, 55 bp, Artificial
  Synthetic oligonucleotide
gcgggtgccctgagggacatgcccatgccgtaatgtatgacctggtcctgtgttg

SEQ ID NO: 413416 - DNA, 55 bp, Artificial
  Synthetic oligonucleotide
gcgggtggatgacggtgagttatctctgatctcggtgccggatgggccggagcat

SEQ ID NO: 413417 - DNA, 60 bp, Artificial
  Synthetic oligonucleotide
gcgggtggtggaaaccaccaggcttgaacaggatgtgcgtatggagactgtccatgtgca

SEQ ID NO: 413418 - DNA, 55 bp, Artificial
  Synthetic oligonucleotide
gcgggtgtatagctacgtgcctgagggtcggactaagcctaaaatctacgtgttg

SEQ ID NO: 413419 - DNA, 55 bp, Artificial
  Synthetic oligonucleotide
gcgggtgtccagatatatcagtgagaatgttaagagacacacccatgatgaagca

SEQ ID NO: 413420 - DNA, 55 bp, Artificial
  Synthetic oligonucleotide
gcgggtgtctcatccgtagtgaatgaggtgcagggattacgtaactcccacggtc

SEQ ID NO: 413421 - DNA, 60 bp, Artificial
  Synthetic oligonucleotide
gcgggtgtgggagctgcaggttgagctgcggggcgaggagctggcactcagccctgggga

SEQ ID NO: 413422 - DNA, 55 bp, Artificial
  Synthetic oligonucleotide
gcgggtgttgtgggagaaaggaaatggtcctccaatgtaataaaggatggcgcct

SEQ ID NO: 413423 - DNA, 59 bp, Artificial
  Synthetic oligonucleotide
gcgggttatggagcgggggtagcaggcgcactcgtggcttttaaggtcatgagtggcga

SEQ ID NO: 413424 - DNA, 55 bp, Artificial
  Synthetic oligonucleotide
gcgggttcaactacgtctatgatgtagattactccaactttgatgcttcccattc

SEQ ID NO: 413425 - DNA, 55 bp, Artificial
  Synthetic oligonucleotide
gcgggttctaacgcagtagaagaccaatccatagccgacatctacgataacccgt

SEQ ID NO: 413426 - DNA, 54 bp, Artificial
  Synthetic oligonucleotide
gcgggttgtgtgtattaattacgcatttccttattttggctttaatatattttc

SEQ ID NO: 413427 - DNA, 55 bp, Artificial
  Synthetic oligonucleotide
gcgggtttagtagcgcgattagtagctatgcgctaaataagagcgggaggcgggg

SEQ ID NO: 413428 - DNA, 55 bp, Artificial
  Synthetic oligonucleotide
gcgggtttgcagcctacacacctcataccgcagcccgtgttactcgtggccgtag

SEQ ID NO: 413429 - DNA, 59 bp, Artificial
  Synthetic oligonucleotide
gcggtaaaagcatgctttgcatgtcattgatagagtttttagaagggcgagttctaagt

SEQ ID NO: 413430 - DNA, 56 bp, Artificial
  Synthetic oligonucleotide
gcggtaaacgaatggaaacgtaatcactcactatgtcaccacaacaccacaaattt

SEQ ID NO: 413431 - DNA, 56 bp, Artificial
  Synthetic oligonucleotide
gcggtaaagtggttagagcagtaaatggagtgtattacaccattaaaattgggaga

SEQ ID NO: 413432 - DNA, 50 bp, Artificial
  Synthetic oligonucleotide
gcggtaaatgctaagaaattgcatcaagtggcgtctagttctgctagacc

SEQ ID NO: 413433 - DNA, 51 bp, Artificial
  Synthetic oligonucleotide
gcggtaacaaccaattgggaacggtgggttgaactttacgcctgcggtaag

SEQ ID NO: 413434 - DNA, 54 bp, Artificial
  Synthetic oligonucleotide
gcggtaacaccgcggtttctggcgaccatcaagtaaatttaccgacaagacaaa

SEQ ID NO: 413435 - DNA, 55 bp, Artificial
  Synthetic oligonucleotide
gcggtaagatgtgcggcgtcaagtggtcccgatgtacacactgagaagggattac

SEQ ID NO: 413436 - DNA, 53 bp, Artificial
  Synthetic oligonucleotide
gcggtaagggacccaaaggtactgacaactacgagaatgctgacgttcacgac

SEQ ID NO: 413437 - DNA, 58 bp, Artificial
  Synthetic oligonucleotide
gcggtaaggtaatatgttttgctcctgtatttagcccgtgtgaagtatccactcctga

SEQ ID NO: 413438 - DNA, 55 bp, Artificial
  Synthetic oligonucleotide
gcggtacaaaccagtgccaccatgaacaagcacttctgtttccccggtgatgttg

SEQ ID NO: 413439 - DNA, 58 bp, Artificial
  Synthetic oligonucleotide
gcggtacaccttggtgtcctgctaatgccaattgtttccatgaatttcatgaaaatta

SEQ ID NO: 413440 - DNA, 55 bp, Artificial
  Synthetic oligonucleotide
gcggtacactgccatcgattgggtagcgaatgtttcgctggtagtagactggtcg

SEQ ID NO: 413441 - DNA, 55 bp, Artificial
  Synthetic oligonucleotide
gcggtacacttttacgatggaagtgaacgggcgcatcggtagcgatgtccctggc

SEQ ID NO: 413442 - DNA, 55 bp, Artificial
  Synthetic oligonucleotide
gcggtaccagtggtatccacactcttcccaccagctgcacccctagcccatgcaa

SEQ ID NO: 413443 - DNA, 57 bp, Artificial
  Synthetic oligonucleotide
gcggtaccgctgcctacccacttcttggctcaggtatataccaggtccctgttggtc

SEQ ID NO: 413444 - DNA, 55 bp, Artificial
  Synthetic oligonucleotide
gcggtacctggcgcctacagaggggcgaaacagcattcgttactcggagctggca

SEQ ID NO: 413445 - DNA, 52 bp, Artificial
  Synthetic oligonucleotide
gcggtacgcaaacgtagacagaccgggcaggttggccacgttaatgtgtcga

SEQ ID NO: 413446 - DNA, 57 bp, Artificial
  Synthetic oligonucleotide
gcggtacggctacacaggttagtcagcttaataattcgtacgctattaaaaatctga

SEQ ID NO: 413447 - DNA, 55 bp, Artificial
  Synthetic oligonucleotide
gcggtactaacattggtactaacctgcctttccaagtaggtttctctactggtgc

SEQ ID NO: 413448 - DNA, 55 bp, Artificial
  Synthetic oligonucleotide
gcggtactgggagtggcttaccccgtgctgctcaatataagcagctgctttgcgc

SEQ ID NO: 413449 - DNA, 55 bp, Artificial
  Synthetic oligonucleotide
gcggtacttgtgatattacaccgtcattcatagcatatccatatggtgggtaacc

SEQ ID NO: 413450 - DNA, 55 bp, Artificial
  Synthetic oligonucleotide
gcggtactttcgtgccgatgaacagtaccccttcctggtccaccctgtgatgcca

SEQ ID NO: 413451 - DNA, 55 bp, Artificial
  Synthetic oligonucleotide
gcggtactttggtgtgttcataagagaatccaagtagaggacacacagcaagctc

SEQ ID NO: 413452 - DNA, 59 bp, Artificial
  Synthetic oligonucleotide
gcggtagacaaacctacacggcctgatgtctcagtaaatagattttacacgctagacac

SEQ ID NO: 413453 - DNA, 60 bp, Artificial
  Synthetic oligonucleotide
gcggtagagatacagaagatggatgaattgtttacgttgattagatgcaatttcacatat

SEQ ID NO: 413454 - DNA, 55 bp, Artificial
  Synthetic oligonucleotide
gcggtagcttggatgatactgagagccataacattcacaactacatcaaacgtgg

SEQ ID NO: 413455 - DNA, 55 bp, Artificial
  Synthetic oligonucleotide
gcggtagtaggggcgggcatatcttcgcctaaactgaaatatagcgcatgcgcag

SEQ ID NO: 413456 - DNA, 55 bp, Artificial
  Synthetic oligonucleotide
gcggtagtagttctattgctgtcggtaatgacggatctcttaatgtccctggtgg

SEQ ID NO: 413457 - DNA, 55 bp, Artificial
  Synthetic oligonucleotide
gcggtagtatgggcgggcataccgtcgtctaacctgaaatatagcgcatgcgtag

SEQ ID NO: 413458 - DNA, 59 bp, Artificial
  Synthetic oligonucleotide
gcggtagtcgttgagagacatggttatattggttacggtggtaccactgctagcgtgtg

SEQ ID NO: 413459 - DNA, 55 bp, Artificial
  Synthetic oligonucleotide
gcggtataccgaggatatcggaacctcgatgacaattgacggatggatgcgagtg

SEQ ID NO: 413460 - DNA, 55 bp, Artificial
  Synthetic oligonucleotide
gcggtatactacaacttgactcagatagctaagcaaataataccgcccgataacg

SEQ ID NO: 413461 - DNA, 57 bp, Artificial
  Synthetic oligonucleotide
gcggtataggccgagaattcaacaaggcctcggaatgggtcaaccggcccatgtaca

SEQ ID NO: 413462 - DNA, 55 bp, Artificial
  Synthetic oligonucleotide
gcggtatatcaagtatcggtctgaggtcattgggcggacggaagctctccgtgca

SEQ ID NO: 413463 - DNA, 57 bp, Artificial
  Synthetic oligonucleotide
gcggtatcgtacccgcttcgcaggtgtgtggcccagtgtactgctttaccccaagcc

SEQ ID NO: 413464 - DNA, 55 bp, Artificial
  Synthetic oligonucleotide
gcggtatctgtggacgcccgatccctccaggttgcgcagtataaactgcggttgg

SEQ ID NO: 413465 - DNA, 50 bp, Artificial
  Synthetic oligonucleotide
gcggtatgatccgcgattaaatgagggagtcaacttggatgaggtgatct

SEQ ID NO: 413466 - DNA, 50 bp, Artificial
  Synthetic oligonucleotide
gcggtattaatagtgagtgcgtgtgattctaaaaaacgagctatttggta

SEQ ID NO: 413467 - DNA, 55 bp, Artificial
  Synthetic oligonucleotide
gcggtattgaaaccaggtcagacattgcgagtaaaatctaatgggaatctaatcg

SEQ ID NO: 413468 - DNA, 55 bp, Artificial
  Synthetic oligonucleotide
gcggtcaaccagccactcaaggctgtgtattatgacgaaacaccaatccctgcac

SEQ ID NO: 413469 - DNA, 55 bp, Artificial
  Synthetic oligonucleotide
gcggtcaagaagctagaggaccgctatgcccaaagctctggttccttatttggtg

SEQ ID NO: 413470 - DNA, 55 bp, Artificial
  Synthetic oligonucleotide
gcggtcaatgccgcttcatagatctgagtcaaacctatcagatcctcgtctcagg

SEQ ID NO: 413471 - DNA, 55 bp, Artificial
  Synthetic oligonucleotide
gcggtcaccgccaattacaaggcccctgaacaccgagacatttgggtcgaagctg

SEQ ID NO: 413472 - DNA, 60 bp, Artificial
  Synthetic oligonucleotide
gcggtcagattaatcaagtttctctaccaaagcagtatgtactacatgtaatgctccctt

SEQ ID NO: 413473 - DNA, 55 bp, Artificial
  Synthetic oligonucleotide
gcggtcaggtaccccggagcaaccactgcttcggtacgcagtcatgtggacctgt

SEQ ID NO: 413474 - DNA, 53 bp, Artificial
  Synthetic oligonucleotide
gcggtcagtccaggacaactacattgccatgttagtcttgggggtcacggtgc

SEQ ID NO: 413475 - DNA, 55 bp, Artificial
  Synthetic oligonucleotide
gcggtcatacggataatcgagcacgtgcctgccattgacaacggacacgccgcgt

SEQ ID NO: 413476 - DNA, 60 bp, Artificial
  Synthetic oligonucleotide
gcggtcattcacgagcactagaacatgcacacccagaactgcgaactcgaaaagaagtcc

SEQ ID NO: 413477 - DNA, 59 bp, Artificial
  Synthetic oligonucleotide
gcggtccacgtggtccaattaaattgcacctcgcgagtctacatatccacaattttgaa

SEQ ID NO: 413478 - DNA, 55 bp, Artificial
  Synthetic oligonucleotide
gcggtccagcccactccaaggagatacctgcattgacagctgtggagacaggggc

SEQ ID NO: 413479 - DNA, 56 bp, Artificial
  Synthetic oligonucleotide
gcggtcccacgctccatctattctttccaggatgagctcccagagtataatgatgg

SEQ ID NO: 413480 - DNA, 60 bp, Artificial
  Synthetic oligonucleotide
gcggtccccatgatactatacgatgacgtaatcagactaatccctgtagaggtcggagcg

SEQ ID NO: 413481 - DNA, 51 bp, Artificial
  Synthetic oligonucleotide
gcggtccgataacatctgccaacccaggtcgttgtgtgatcccgggcggtc

SEQ ID NO: 413482 - DNA, 55 bp, Artificial
  Synthetic oligonucleotide
gcggtccgctcgtgggttcggatgttttacagggtagtgatagttcccgctgtag

SEQ ID NO: 413483 - DNA, 60 bp, Artificial
  Synthetic oligonucleotide
gcggtccggatatgattcaggtgtcactcaatgctggagcgagaggggatgtacaacaga

SEQ ID NO: 413484 - DNA, 55 bp, Artificial
  Synthetic oligonucleotide
gcggtcctaggtattactaaactcaaagagatgttcacagatacctctgtactat

SEQ ID NO: 413485 - DNA, 55 bp, Artificial
  Synthetic oligonucleotide
gcggtcctgtttactgcttcacccctagccctgtggtcgtaggtactaccgatcg

SEQ ID NO: 413486 - DNA, 55 bp, Artificial
  Synthetic oligonucleotide
gcggtcgaatcaatggcccatgatacagcgtgcgggccaaacttgcctggccgga

SEQ ID NO: 413487 - DNA, 52 bp, Artificial
  Synthetic oligonucleotide
gcggtcgatttgtataacgttgtaacgtttaccggtcctactaccgtctcca

SEQ ID NO: 413488 - DNA, 50 bp, Artificial
  Synthetic oligonucleotide
gcggtcgcacccaaaacaaatatacgtggatcacgtcgtatgaggtatat

SEQ ID NO: 413489 - DNA, 55 bp, Artificial
  Synthetic oligonucleotide
gcggtcgccatttatgctagttaggaagtactggaggaacacttgtgacagctgc

SEQ ID NO: 413490 - DNA, 59 bp, Artificial
  Synthetic oligonucleotide
gcggtcggaactggatggcgatgggaaatcgactttagtgacctgcgtaagctgcgatt

SEQ ID NO: 413491 - DNA, 60 bp, Artificial
  Synthetic oligonucleotide
gcggtctagtgacagcatggtgtatttgcctccaccttctgtggcgaaggttgtcaatac

SEQ ID NO: 413492 - DNA, 55 bp, Artificial
  Synthetic oligonucleotide
gcggtctcaaaatggcttgtccaatactgcaaagagagacatgtcgtagacagcc

SEQ ID NO: 413493 - DNA, 56 bp, Artificial
  Synthetic oligonucleotide
gcggtctggctacccgtaacggcgtatcggcttgggtcttcgatgattaggctccg

SEQ ID NO: 413494 - DNA, 53 bp, Artificial
  Synthetic oligonucleotide
gcggtctggtgacacgctatccggcatcgccagtcggctaggcacatcctgga

SEQ ID NO: 413495 - DNA, 55 bp, Artificial
  Synthetic oligonucleotide
gcggtcttcccaccgatctgtcggtgttagatctattcgattggtctcgattccg

SEQ ID NO: 413496 - DNA, 55 bp, Artificial
  Synthetic oligonucleotide
gcggtcttgccagatgccctgatggagaaatcaggtacacggttgaggggtgtcg

SEQ ID NO: 413497 - DNA, 54 bp, Artificial
  Synthetic oligonucleotide
gcggtctttccagtactcttggagaggaaacccgtcttcgtctccacggtaaga

SEQ ID NO: 413498 - DNA, 55 bp, Artificial
  Synthetic oligonucleotide
gcggtgaaagcaccctctacacccggacctggtcggtctcgggcttttctagctg

SEQ ID NO: 413499 - DNA, 52 bp, Artificial
  Synthetic oligonucleotide
gcggtgaaccgcttgtctccgggtgcctgcgaataccttcggcctgtcaggg

SEQ ID NO: 413500 - DNA, 58 bp, Artificial
  Synthetic oligonucleotide
gcggtgaatacaacattaatccgcaagatgagcactctttcttctttgccttagcaca

SEQ ID NO: 413501 - DNA, 57 bp, Artificial
  Synthetic oligonucleotide
gcggtgacattcttatactataaaactaagtacactgacgaatggctgagtttaccc

SEQ ID NO: 413502 - DNA, 55 bp, Artificial
  Synthetic oligonucleotide
gcggtgaccccacaccggacagcgacatgatgatgtaagcatgcgtcagggacca

SEQ ID NO: 413503 - DNA, 53 bp, Artificial
  Synthetic oligonucleotide
gcggtgaccgctgatcatgaggtaacctccactaagatagagaggaggcacgc

SEQ ID NO: 413504 - DNA, 60 bp, Artificial
  Synthetic oligonucleotide
gcggtgacctcgtataacaaaattctcacggaagaggatctacagatgcgccggcttgct

SEQ ID NO: 413505 - DNA, 55 bp, Artificial
  Synthetic oligonucleotide
gcggtgactacagttttgcattaccggtgggtgcgtacccaataatgagtggtgg

SEQ ID NO: 413506 - DNA, 55 bp, Artificial
  Synthetic oligonucleotide
gcggtgacttcgtgcctgagctcccttaaacaacgtcggctcgcacgctacgtgc

SEQ ID NO: 413507 - DNA, 60 bp, Artificial
  Synthetic oligonucleotide
gcggtgaggaccaaactaaaactcactccattggtctccgcgagcaagcttgacttgtca

SEQ ID NO: 413508 - DNA, 52 bp, Artificial
  Synthetic oligonucleotide
gcggtgataagctcctgcattaatggtgtagctgcagtttgtcattactgac

SEQ ID NO: 413509 - DNA, 55 bp, Artificial
  Synthetic oligonucleotide
gcggtgatggtgcgactagatttagacattgttgtccagctaaaagaatactggt

SEQ ID NO: 413510 - DNA, 55 bp, Artificial
  Synthetic oligonucleotide
gcggtgattaacacattggttgggcggtacggtaaagccactaagctgcctgagg

SEQ ID NO: 413511 - DNA, 60 bp, Artificial
  Synthetic oligonucleotide
gcggtgattacgtatgagggggattctagcgctggctataaccatgatgtgtctatcctg

SEQ ID NO: 413512 - DNA, 60 bp, Artificial
  Synthetic oligonucleotide
gcggtgatttactgtgctagtgcaagtagctccgtgtatctggatccacatggtacaatt

SEQ ID NO: 413513 - DNA, 55 bp, Artificial
  Synthetic oligonucleotide
gcggtgcaagatatgatacatctgataggatgaaactgcacagagcttcaggact

SEQ ID NO: 413514 - DNA, 55 bp, Artificial
  Synthetic oligonucleotide
gcggtgcaatctcactttccattcctctctcgtgctgtccgatgtttatctcctc

SEQ ID NO: 413515 - DNA, 55 bp, Artificial
  Synthetic oligonucleotide
gcggtgcagaagagtctgcatacaaacaatgtcgatcctaaccggctctctctta

SEQ ID NO: 413516 - DNA, 60 bp, Artificial
  Synthetic oligonucleotide
gcggtgcaggatgatatgcagaaagcgactcgctcatgtactaaacaatggttaagacat

SEQ ID NO: 413517 - DNA, 55 bp, Artificial
  Synthetic oligonucleotide
gcggtgcatcaaagcttgaattttcgcaggacccaagtaagttcacagacccagt

SEQ ID NO: 413518 - DNA, 55 bp, Artificial
  Synthetic oligonucleotide
gcggtgccatatcctgttattagtagagtgtaccggtatttgaggaccttgcaaa

SEQ ID NO: 413519 - DNA, 53 bp, Artificial
  Synthetic oligonucleotide
gcggtgcccctcctactttggaggaagcactcgtctttcctggttttcgttta

SEQ ID NO: 413520 - DNA, 60 bp, Artificial
  Synthetic oligonucleotide
gcggtgcgaaactccgtacttacacacgggctgtggagagtctgcatatcacacctgtct

SEQ ID NO: 413521 - DNA, 55 bp, Artificial
  Synthetic oligonucleotide
gcggtgcgacgtcatcaatgacgttatactccacgtcatttgagtatacccggtg

SEQ ID NO: 413522 - DNA, 55 bp, Artificial
  Synthetic oligonucleotide
gcggtgcgacttgctctcgtcggacgggaggcggcggtataggataagagatcac

SEQ ID NO: 413523 - DNA, 55 bp, Artificial
  Synthetic oligonucleotide
gcggtgcgcacggtggaacttatggcggaaagttcgttgcttatgattacgcagc

SEQ ID NO: 413524 - DNA, 55 bp, Artificial
  Synthetic oligonucleotide
gcggtgctttgccgatttggaccactgctgaggcaaacggaaaaggcattaaggg

SEQ ID NO: 413525 - DNA, 57 bp, Artificial
  Synthetic oligonucleotide
gcggtgctttgctgttgtcgttgagagacatggttatattgggtataccggcaccac

SEQ ID NO: 413526 - DNA, 55 bp, Artificial
  Synthetic oligonucleotide
gcggtggaaacaatgcgcttgctcttttctggagtgtcaacaattcccatgaacg

SEQ ID NO: 413527 - DNA, 55 bp, Artificial
  Synthetic oligonucleotide
gcggtggaaaggacctttacatctctccaggaagctgcaggagcgcttactttcg

SEQ ID NO: 413528 - DNA, 55 bp, Artificial
  Synthetic oligonucleotide
gcggtggaagagtactacaataacctccaccttgcgctcgagtttgaaccggagg

SEQ ID NO: 413529 - DNA, 55 bp, Artificial
  Synthetic oligonucleotide
gcggtggacttcatccccgtagaaagcctagagacaaccatgagatccccagtgt

SEQ ID NO: 413530 - DNA, 54 bp, Artificial
  Synthetic oligonucleotide
gcggtggactttatccctgtggaaaacctagagacaactatgaggtccccggtg

SEQ ID NO: 413531 - DNA, 60 bp, Artificial
  Synthetic oligonucleotide
gcggtgggagagaacccgtacgcatgtgtgagtcacgtgcacattgacaacgaagacctg

SEQ ID NO: 413532 - DNA, 54 bp, Artificial
  Synthetic oligonucleotide
gcggtggggttattcccttaacttcatggggtatgtgattggaagttggggatc

SEQ ID NO: 413533 - DNA, 57 bp, Artificial
  Synthetic oligonucleotide
gcggtggtagctatagtttcgcattacctgtaggaaattttccagttatgtcaggag

SEQ ID NO: 413534 - DNA, 55 bp, Artificial
  Synthetic oligonucleotide
gcggtggtaggctccggtgttgatggtgtaggagcagttggccatgacggaccag

SEQ ID NO: 413535 - DNA, 52 bp, Artificial
  Synthetic oligonucleotide
gcggtgtagaacaccccaggggtaccccctttgaacgcgggacctgcgatag

SEQ ID NO: 413536 - DNA, 55 bp, Artificial
  Synthetic oligonucleotide
gcggtgtccacatcatctaaccccgcacccatctcagagattgacatcagggcat

SEQ ID NO: 413537 - DNA, 55 bp, Artificial
  Synthetic oligonucleotide
gcggtgtccagcggatatcaccttcttcttgaatcagaggtacgaggggcaagtg

SEQ ID NO: 413538 - DNA, 57 bp, Artificial
  Synthetic oligonucleotide
gcggtgtcccgcagaggctttggcacgtggatcgactttcgaaattggacggaaggc

SEQ ID NO: 413539 - DNA, 55 bp, Artificial
  Synthetic oligonucleotide
gcggtgtcggatcttttagtatcgtactcgccaaagtgtcaagttcgttcaacga

SEQ ID NO: 413540 - DNA, 59 bp, Artificial
  Synthetic oligonucleotide
gcggtgtctggtcacggccaggtcaacacaccagttaagatacccagatggtatatccc

SEQ ID NO: 413541 - DNA, 57 bp, Artificial
  Synthetic oligonucleotide
gcggtgtctgtgtttaccactcgtgacgacgttcagaacttctgtacggttctcttc

SEQ ID NO: 413542 - DNA, 55 bp, Artificial
  Synthetic oligonucleotide
gcggtgtctttctgcacgagcaagaattcaatgggagattcttcgagtgctctat

SEQ ID NO: 413543 - DNA, 55 bp, Artificial
  Synthetic oligonucleotide
gcggtgtgtacccctgggagggtaggtaccagccttagctacgccggagcttagc

SEQ ID NO: 413544 - DNA, 55 bp, Artificial
  Synthetic oligonucleotide
gcggtgtgtacccgtggagtggctaaggcggtagactttatccccgtggagagcc

SEQ ID NO: 413545 - DNA, 50 bp, Artificial
  Synthetic oligonucleotide
gcggtgttcaagaattttaaggtttcactccaactgaggttcctggaaaa

SEQ ID NO: 413546 - DNA, 55 bp, Artificial
  Synthetic oligonucleotide
gcggtgttcacgggatctccgttgtcgatcctttctgactttcctccgaagtccg

SEQ ID NO: 413547 - DNA, 60 bp, Artificial
  Synthetic oligonucleotide
gcggtgttccttcgcacgtcatttactttcctatgcatagagttccttcgagtgatgatc

SEQ ID NO: 413548 - DNA, 55 bp, Artificial
  Synthetic oligonucleotide
gcggtgttgataactcgaaccactaccttgaatatacgacgcttcttacccattg

SEQ ID NO: 413549 - DNA, 55 bp, Artificial
  Synthetic oligonucleotide
gcggtgttgcagcattatattggtttagaagtagtatatccaatgccagtatagt

SEQ ID NO: 413550 - DNA, 55 bp, Artificial
  Synthetic oligonucleotide
gcggtgtttatgattcgcccgggctcagtaagtacgttaatggggtatacgactc

SEQ ID NO: 413551 - DNA, 55 bp, Artificial
  Synthetic oligonucleotide
gcggtgttttgcggttgttatcgaaagacatggttatgttgggtataccggcacc

SEQ ID NO: 413552 - DNA, 53 bp, Artificial
  Synthetic oligonucleotide
gcggttaaaaaatagggatgcggttaaaaaatagaattcaccgctgtgaattc

SEQ ID NO: 413553 - DNA, 54 bp, Artificial
  Synthetic oligonucleotide
gcggttaaatatctccttcttgtagaggctacgtattctccggatacggtgggt

SEQ ID NO: 413554 - DNA, 58 bp, Artificial
  Synthetic oligonucleotide
gcggttaacgagaaccgccctgtctctttcctctccaagatctggtcgtggcgagctc

SEQ ID NO: 413555 - DNA, 55 bp, Artificial
  Synthetic oligonucleotide
gcggttacagtgatagagtgatgcagcttactctaggaaactccaccattacgac

SEQ ID NO: 413556 - DNA, 55 bp, Artificial
  Synthetic oligonucleotide
gcggttacatgcggcgtcaaacaaactatagagtaatgtgtaaccgttactatgc

SEQ ID NO: 413557 - DNA, 54 bp, Artificial
  Synthetic oligonucleotide
gcggttacgcaaatcctttctaggttgacagttgctcttcagtccgctagaggt

SEQ ID NO: 413558 - DNA, 55 bp, Artificial
  Synthetic oligonucleotide
gcggttacgcaattgtatggtgaaggatcactcatttatccaggattacggattg

SEQ ID NO: 413559 - DNA, 55 bp, Artificial
  Synthetic oligonucleotide
gcggttactcgagattcgataagcggggctgctgctttacgaactgctacgaggt

SEQ ID NO: 413560 - DNA, 56 bp, Artificial
  Synthetic oligonucleotide
gcggttactggaaccgtcagagtttggggtgatcttcaggttgacggcaccacgac

SEQ ID NO: 413561 - DNA, 55 bp, Artificial
  Synthetic oligonucleotide
gcggttagaggagacccctcccaaaacataacgcagcagcggggcccaacaccag

SEQ ID NO: 413562 - DNA, 56 bp, Artificial
  Synthetic oligonucleotide
gcggttagcctgtcgtaacgcgcaagtctgtggcggaaccgactactttgggagtc

SEQ ID NO: 413563 - DNA, 58 bp, Artificial
  Synthetic oligonucleotide
gcggttatagtgaccgagtggcccaactcaccctaggaaatagcaccataacaacgca

SEQ ID NO: 413564 - DNA, 52 bp, Artificial
  Synthetic oligonucleotide
gcggttcaaatagttatcgttttaacgactacgtgagcgggccggggagatt

SEQ ID NO: 413565 - DNA, 60 bp, Artificial
  Synthetic oligonucleotide
gcggttcaggaccttggttgacacctaggtgcatggttgactatccatacaggctttggc

SEQ ID NO: 413566 - DNA, 51 bp, Artificial
  Synthetic oligonucleotide
gcggttcagggagtttaaaccaaggcgcgaaaaggaaatgggcgtggttta

SEQ ID NO: 413567 - DNA, 55 bp, Artificial
  Synthetic oligonucleotide
gcggttcataatcagtcggaaacatatcaagggcagaaactgccctgacacgctg

SEQ ID NO: 413568 - DNA, 55 bp, Artificial
  Synthetic oligonucleotide
gcggttcatctgatgatagaccgtattgctggcactaccctcctagaccatgcgc

SEQ ID NO: 413569 - DNA, 60 bp, Artificial
  Synthetic oligonucleotide
gcggttcatgagtctatcaagcgctatgcctcaagcgagtggtggatttgatcgtatgat

SEQ ID NO: 413570 - DNA, 60 bp, Artificial
  Synthetic oligonucleotide
gcggttccgccctgtgtcgtcaccggcctcagcagagtataaaacgcctggtgatcagag

SEQ ID NO: 413571 - DNA, 56 bp, Artificial
  Synthetic oligonucleotide
gcggttccgtacaatagtatgtggtctgttccctactcaaatacaagtacgtaata

SEQ ID NO: 413572 - DNA, 58 bp, Artificial
  Synthetic oligonucleotide
gcggttcggggccatggttgacacccaggtgcatagttgactacccatacaggctttg

SEQ ID NO: 413573 - DNA, 57 bp, Artificial
  Synthetic oligonucleotide
gcggttctaatgtccaaagctattacgtttaactccgcaggtgcacttgttgcttcg

SEQ ID NO: 413574 - DNA, 55 bp, Artificial
  Synthetic oligonucleotide
gcggttctagcaacatcgtcgaacttgaactctcagattttaaggcagggacacc

SEQ ID NO: 413575 - DNA, 60 bp, Artificial
  Synthetic oligonucleotide
gcggttgatagccaatctaaccatgataacatctccagacatgttttaagaatcacagtt

SEQ ID NO: 413576 - DNA, 60 bp, Artificial
  Synthetic oligonucleotide
gcggttgctctaccctgagtatggctctttggaagctgatcagacgtggctacggctcct

SEQ ID NO: 413577 - DNA, 60 bp, Artificial
  Synthetic oligonucleotide
gcggttgcttcgagttctaccacaaatgtgatgatgagtgcatggagagtgtgaagaacg

SEQ ID NO: 413578 - DNA, 55 bp, Artificial
  Synthetic oligonucleotide
gcggttggacgacctatggccacgtctgcggaggcgtgtctttcgtctcctgatc

SEQ ID NO: 413579 - DNA, 55 bp, Artificial
  Synthetic oligonucleotide
gcggttggcataatcccatagccatacaaggctgtttacttcttttgcagaaagc

SEQ ID NO: 413580 - DNA, 56 bp, Artificial
  Synthetic oligonucleotide
gcggttggtccctggaaccgctacaatcactaagatgcgggtggaaactgtgcccg

SEQ ID NO: 413581 - DNA, 56 bp, Artificial
  Synthetic oligonucleotide
gcggttgtaccgttgaaagactccacccaagactccggtgctgcgtattatggggc

SEQ ID NO: 413582 - DNA, 57 bp, Artificial
  Synthetic oligonucleotide
gcggttgtggcgatcctgttaggcatctcgctagtatttctgctgctgtgggctacc

SEQ ID NO: 413583 - DNA, 53 bp, Artificial
  Synthetic oligonucleotide
gcggtttaaaccgaatatccgtcgaatgtttcgcggttgataattttaatctc

SEQ ID NO: 413584 - DNA, 55 bp, Artificial
  Synthetic oligonucleotide
gcggtttatgttcctcatcacaaagttggatgggcttggtggacttgcagcaggg

SEQ ID NO: 413585 - DNA, 54 bp, Artificial
  Synthetic oligonucleotide
gcggtttccgttctgccgaccacaaactgaaaacacttgcgtatacttccaggt

SEQ ID NO: 413586 - DNA, 59 bp, Artificial
  Synthetic oligonucleotide
gcggtttcgaaaaatacacgcatgtatccttcgacaagtgggcaatcatataatagtta

SEQ ID NO: 413587 - DNA, 60 bp, Artificial
  Synthetic oligonucleotide
gcggtttgacagcagcctagcacgcagacacatggcccgggagctacatccggagtatta

SEQ ID NO: 413588 - DNA, 55 bp, Artificial
  Synthetic oligonucleotide
gcggtttgacagccgcctggcatttaaacacatggcccacgagctgtatccggag

SEQ ID NO: 413589 - DNA, 55 bp, Artificial
  Synthetic oligonucleotide
gcggtttgcctccaccacatcgatcatcttgaggaccagccgtgacttgctctcg

SEQ ID NO: 413590 - DNA, 55 bp, Artificial
  Synthetic oligonucleotide
gcggttttaacagggccaattggtctagtagcagcggctcttatcggaactggtg

SEQ ID NO: 413591 - DNA, 54 bp, Artificial
  Synthetic oligonucleotide
gcggttttaacattatacggtagtcgttgccaaacgtgcccggcaacaacttca

SEQ ID NO: 413592 - DNA, 49 bp, Artificial
  Synthetic oligonucleotide
gcggtttttggtcccgttttccgttatcttacttccgagtttttatcta

SEQ ID NO: 413593 - DNA, 55 bp, Artificial
  Synthetic oligonucleotide
gcgtaaacagatactacgcggttaacagacctcttgcgtataactctcgtaatca

SEQ ID NO: 413594 - DNA, 55 bp, Artificial
  Synthetic oligonucleotide
gcgtaaaccggatattgagatggacgtccgaatagccgtttcggcttgcggttac

SEQ ID NO: 413595 - DNA, 50 bp, Artificial
  Synthetic oligonucleotide
gcgtaaagatccacgggctaatggcttgatgggcgctgagttcctcaaag

SEQ ID NO: 413596 - DNA, 55 bp, Artificial
  Synthetic oligonucleotide
gcgtaaagtccgtttacgtattgggtaagatctggatggatgagaatattaaggt

SEQ ID NO: 413597 - DNA, 60 bp, Artificial
  Synthetic oligonucleotide
gcgtaaatacagtcagtgatacatgagagtacgggccataacttcgaaacggagcatcga

SEQ ID NO: 413598 - DNA, 54 bp, Artificial
  Synthetic oligonucleotide
gcgtaaatactggggattctaattcccacggaatcgctattagaacaagagggt

SEQ ID NO: 413599 - DNA, 55 bp, Artificial
  Synthetic oligonucleotide
gcgtaaatggaaggtggactaccagtcctctggcgtccctgttggcaagagacag

SEQ ID NO: 413600 - DNA, 55 bp, Artificial
  Synthetic oligonucleotide
gcgtaaatgtcagaggccaagtattacctgacaatcctccccgagactcgcgagc

SEQ ID NO: 413601 - DNA, 55 bp, Artificial
  Synthetic oligonucleotide
gcgtaaattaagtattgtgacaggtatgaagtaattaacgccgcaaagcaagcaa

SEQ ID NO: 413602 - DNA, 58 bp, Artificial
  Synthetic oligonucleotide
gcgtaaattctatgctacggttacagggggacaatacgcatctaaggagcagacgttg

SEQ ID NO: 413603 - DNA, 55 bp, Artificial
  Synthetic oligonucleotide
gcgtaacagcaggtcatgaagcatggcctcctacagtaataaatgccacccaggg

SEQ ID NO: 413604 - DNA, 57 bp, Artificial
  Synthetic oligonucleotide
gcgtaaccatcgccccggggatgagttgtacctgactgaacctgcgatagcctggtt

SEQ ID NO: 413605 - DNA, 55 bp, Artificial
  Synthetic oligonucleotide
gcgtaaccgtcataacattggctatgttgatatacctaattccaaatggtgcggt

SEQ ID NO: 413606 - DNA, 54 bp, Artificial
  Synthetic oligonucleotide
gcgtaacgatgaacctagaagtgccctactaccggctgggtagccacgagcgcg

SEQ ID NO: 413607 - DNA, 51 bp, Artificial
  Synthetic oligonucleotide
gcgtaacgttagaggctggattggtatggacgtagagggggctcatgtttg

SEQ ID NO: 413608 - DNA, 56 bp, Artificial
  Synthetic oligonucleotide
gcgtaactaagtatacgtactatgaatataagctaaggtaggataggaaaaggcta

SEQ ID NO: 413609 - DNA, 56 bp, Artificial
  Synthetic oligonucleotide
gcgtaactagtattaggttaagttgtttataatgtgtcagcgcgatgtttttagct

SEQ ID NO: 413610 - DNA, 59 bp, Artificial
  Synthetic oligonucleotide
gcgtaactgcttattccaacaagcaagtatggcttatactgacaaacagattgcgagca

SEQ ID NO: 413611 - DNA, 55 bp, Artificial
  Synthetic oligonucleotide
gcgtaactggcttcaaggcaacttaaattatacaagcagttacttacacagctgt

SEQ ID NO: 413612 - DNA, 55 bp, Artificial
  Synthetic oligonucleotide
gcgtaactttaacatgggattcgaaatgtaatctgccaagcgtacatggttattc

SEQ ID NO: 413613 - DNA, 59 bp, Artificial
  Synthetic oligonucleotide
gcgtaagctcgatgaagcggattcgagcggaaggtggaagggggctgtgtataagcggc

SEQ ID NO: 413614 - DNA, 54 bp, Artificial
  Synthetic oligonucleotide
gcgtaagcttgtaaatgcctaacgactaaatttctaggtagctaaccaaatggg

SEQ ID NO: 413615 - DNA, 58 bp, Artificial
  Synthetic oligonucleotide
gcgtaaggaaatctgtgaaacacaggagggatcggagtatgtcctccacaacaatcgt

SEQ ID NO: 413616 - DNA, 55 bp, Artificial
  Synthetic oligonucleotide
gcgtaaggcataattaccagcctgtctttacgcaagccctaaggtttgacataag

SEQ ID NO: 413617 - DNA, 55 bp, Artificial
  Synthetic oligonucleotide
gcgtaaggcttgatccgtataaccatacggcaaccttaccgctaaggtcaagcat

SEQ ID NO: 413618 - DNA, 57 bp, Artificial
  Synthetic oligonucleotide
gcgtaaggtcgttcctcaagcgaatcgttgaactctatcacgatgtaaaggaggtac

SEQ ID NO: 413619 - DNA, 55 bp, Artificial
  Synthetic oligonucleotide
gcgtaaggttaagaacttcactcttagcatcacacagtcacccacacttgattca

SEQ ID NO: 413620 - DNA, 51 bp, Artificial
  Synthetic oligonucleotide
gcgtaagtctgggacggaaccgactactttgggtgtccgtgtttcctgttt

SEQ ID NO: 413621 - DNA, 54 bp, Artificial
  Synthetic oligonucleotide
gcgtaagtttcaggccacagttaccggtggccaatatgcgtgtaaagagcaagc

SEQ ID NO: 413622 - DNA, 55 bp, Artificial
  Synthetic oligonucleotide
gcgtaataccaccctggggactgcttgtacccactggtgtgacggttaattcttc

SEQ ID NO: 413623 - DNA, 55 bp, Artificial
  Synthetic oligonucleotide
gcgtaatactcaagatcacgtgcgatccctatgcctgttggcgtggcacaacggc

SEQ ID NO: 413624 - DNA, 55 bp, Artificial
  Synthetic oligonucleotide
gcgtaatcatcgaaattggtgtcggttgcagccaaattttgttcaccctgtcgcg

SEQ ID NO: 413625 - DNA, 58 bp, Artificial
  Synthetic oligonucleotide
gcgtaatgaggttaatgcatttaaggccgccctaagctcacttgctaagcacggggaa

SEQ ID NO: 413626 - DNA, 59 bp, Artificial
  Synthetic oligonucleotide
gcgtaatgatagttacacttgcccaatgttgaacgtatttaattatacaggatataggc

SEQ ID NO: 413627 - DNA, 55 bp, Artificial
  Synthetic oligonucleotide
gcgtaatgtagcgggatgattgttcataacgactcgattttaaacgtaatagggt

SEQ ID NO: 413628 - DNA, 55 bp, Artificial
  Synthetic oligonucleotide
gcgtaatgtgcatgtttgtgaaaataggtacatgttcgcgataatagctgtccgc

SEQ ID NO: 413629 - DNA, 55 bp, Artificial
  Synthetic oligonucleotide
gcgtaatgttgtcacgcacttcaaatgggacttcgacctcaaccggagtgtcggc

SEQ ID NO: 413630 - DNA, 55 bp, Artificial
  Synthetic oligonucleotide
gcgtaattgataactgctttaaaacctgcccacacagatcgtgcatagtcaacag

SEQ ID NO: 413631 - DNA, 55 bp, Artificial
  Synthetic oligonucleotide
gcgtacaaagacacgacactctttcgtgcgtaagaatctgagtatcgatatgacc

SEQ ID NO: 413632 - DNA, 60 bp, Artificial
  Synthetic oligonucleotide
gcgtacaacccactttctctgtacagagaaatctccctttcgagagagcgacaatcatgg

SEQ ID NO: 413633 - DNA, 55 bp, Artificial
  Synthetic oligonucleotide
gcgtacacactgagcactgatctgtatgctattccacgaacgctcataatcattg

SEQ ID NO: 413634 - DNA, 60 bp, Artificial
  Synthetic oligonucleotide
gcgtacacatccccgatgcacgctcgacgtatgattaggtcgaaaacagtacatcctata

SEQ ID NO: 413635 - DNA, 59 bp, Artificial
  Synthetic oligonucleotide
gcgtacaccttcgatcggagtacgagcggacgccttcagacgatagcctttaacagcca

SEQ ID NO: 413636 - DNA, 58 bp, Artificial
  Synthetic oligonucleotide
gcgtacacgtggcaatgaattcccattttgattaaccgttcgcacataaggtcgccat

SEQ ID NO: 413637 - DNA, 60 bp, Artificial
  Synthetic oligonucleotide
gcgtacactgtctgttcaagtacatcccacaaaacataatttactgatctaattacattg

SEQ ID NO: 413638 - DNA, 58 bp, Artificial
  Synthetic oligonucleotide
gcgtacagattacgagcgcctgttgaatcaagcaaaactaccgtgctttaaggattta

SEQ ID NO: 413639 - DNA, 55 bp, Artificial
  Synthetic oligonucleotide
gcgtacagcacagaccaacaaccacacagcacttcagactccgtgggctgtgaca

SEQ ID NO: 413640 - DNA, 55 bp, Artificial
  Synthetic oligonucleotide
gcgtacaggcgtcccgatttcacttagcgctcgtcctctagctgtcgctcttctg

SEQ ID NO: 413641 - DNA, 57 bp, Artificial
  Synthetic oligonucleotide
gcgtacataccgcgtgtgtttccctctaccattgatgttcagcatcgcatcatgtcg

SEQ ID NO: 413642 - DNA, 55 bp, Artificial
  Synthetic oligonucleotide
gcgtacatgaacaccccggggcttcccgtgtgccaggaccatctcgagttttggg

SEQ ID NO: 413643 - DNA, 55 bp, Artificial
  Synthetic oligonucleotide
gcgtacattccatcataactggcgagtcttatggggaatccgttaaacaggcggt

SEQ ID NO: 413644 - DNA, 57 bp, Artificial
  Synthetic oligonucleotide
gcgtacattcgattccggtggtggccgagtgagattcgaaagctatccggtaattag

SEQ ID NO: 413645 - DNA, 55 bp, Artificial
  Synthetic oligonucleotide
gcgtacattgagatgagaaattccgaagggttctacatgcccaggtatggacccc

SEQ ID NO: 413646 - DNA, 58 bp, Artificial
  Synthetic oligonucleotide
gcgtaccaaatataagagggagccagtatcgttgaccctggcccttctgctaggagga

SEQ ID NO: 413647 - DNA, 55 bp, Artificial
  Synthetic oligonucleotide
gcgtaccaacggaagtacgatgcgttactcccactggtcagggaggcgcgagctc

SEQ ID NO: 413648 - DNA, 54 bp, Artificial
  Synthetic oligonucleotide
gcgtaccaatttaaagatgcgtaaggacttacccttgcctgacagggtcggtag

SEQ ID NO: 413649 - DNA, 60 bp, Artificial
  Synthetic oligonucleotide
gcgtaccagtagaagctgcatgaagtacctcgcatgtccaaccgaggaatcttatgtccg

SEQ ID NO: 413650 - DNA, 55 bp, Artificial
  Synthetic oligonucleotide
gcgtaccatatttcaaccagaggtcaaacaaaactgatgctctaggtactggtgg

SEQ ID NO: 413651 - DNA, 55 bp, Artificial
  Synthetic oligonucleotide
gcgtacccaacaataaagaggacctacaacaacaccaatatagaagaccttctaa

SEQ ID NO: 413652 - DNA, 55 bp, Artificial
  Synthetic oligonucleotide
gcgtacccctgtctcttttccctaacaacgccattgatcccacaatcgcagtgcc

SEQ ID NO: 413653 - DNA, 50 bp, Artificial
  Synthetic oligonucleotide
gcgtaccgagatgtgtgtgatatccgagcatacggtcacctatccatcta

SEQ ID NO: 413654 - DNA, 60 bp, Artificial
  Synthetic oligonucleotide
gcgtaccgcagtgacaatcgcgaacacacgtgttactcgggactagatgtcactgaatgc

SEQ ID NO: 413655 - DNA, 57 bp, Artificial
  Synthetic oligonucleotide
gcgtacctagcccacttctgccgcaagttccaaccgctatacgccacggaagctaaa

SEQ ID NO: 413656 - DNA, 55 bp, Artificial
  Synthetic oligonucleotide
gcgtacgcactatgtacattcgcatatgtgcacaatgagtcatctgatccaattg

SEQ ID NO: 413657 - DNA, 56 bp, Artificial
  Synthetic oligonucleotide
gcgtacgctctctttggggaccctgtccagcttgactctaaggttgttcgccccgc

SEQ ID NO: 413658 - DNA, 55 bp, Artificial
  Synthetic oligonucleotide
gcgtacggatgacttagcaatagcagcaaatttcccgagagcatccaggaatcca

SEQ ID NO: 413659 - DNA, 54 bp, Artificial
  Synthetic oligonucleotide
gcgtacggtaaggtgtactccgtgactgtatcctggggcactgtgtcgtacact

SEQ ID NO: 413660 - DNA, 53 bp, Artificial
  Synthetic oligonucleotide
gcgtacggttcaatccctgcctcccctgtaaaactccctagactttaaatctc

SEQ ID NO: 413661 - DNA, 55 bp, Artificial
  Synthetic oligonucleotide
gcgtacgtacccgtgggaaggtacattaaattattatcttcttatcaatagccac

SEQ ID NO: 413662 - DNA, 51 bp, Artificial
  Synthetic oligonucleotide
gcgtacgtcacggaccgtgccgcagcaaccgccctcatagaacgtcggctt

SEQ ID NO: 413663 - DNA, 56 bp, Artificial
  Synthetic oligonucleotide
gcgtactcatgtgcgcagtgatcacacaacaacgtgtcaccttccctcagcacatc

SEQ ID NO: 413664 - DNA, 59 bp, Artificial
  Synthetic oligonucleotide
gcgtactctacgcgatccgattctatgtaccctccaacaccaagacccatgttatcatt

SEQ ID NO: 413665 - DNA, 60 bp, Artificial
  Synthetic oligonucleotide
gcgtactgcgcctcattgttggttggtgtcacactaccatatgataacttgccccgccca

SEQ ID NO: 413666 - DNA, 60 bp, Artificial
  Synthetic oligonucleotide
gcgtactggattcgtgttccataagccaaatatacttccatactcagcatcattcacttt

SEQ ID NO: 413667 - DNA, 55 bp, Artificial
  Synthetic oligonucleotide
gcgtactggcatgcaaacggtccgcgcagcagaccaaacatgactcgtttaaatc

SEQ ID NO: 413668 - DNA, 55 bp, Artificial
  Synthetic oligonucleotide
gcgtactgggggtacgacgtgggtacgagacaccgctattacaagtcagaaccag

SEQ ID NO: 413669 - DNA, 55 bp, Artificial
  Synthetic oligonucleotide
gcgtacttaatccccacgtcgcatttgcggaataggggagctggctgcatcaact

SEQ ID NO: 413670 - DNA, 55 bp, Artificial
  Synthetic oligonucleotide
gcgtacttcgcttcctcctgctcggtaagatcccaccgggtcgagctaggccatc

SEQ ID NO: 413671 - DNA, 55 bp, Artificial
  Synthetic oligonucleotide
gcgtacttgatatggctagttcctactttgacattagaggggtactagaccgcgg

SEQ ID NO: 413672 - DNA, 60 bp, Artificial
  Synthetic oligonucleotide
gcgtacttgttgaaccgaacgtatcaaatgcgcagagagaatacgttttagatggacaga

SEQ ID NO: 413673 - DNA, 55 bp, Artificial
  Synthetic oligonucleotide
gcgtagacaccagcaaaggactacagtacgccactacgggatccgccatctccgt

SEQ ID NO: 413674 - DNA, 55 bp, Artificial
  Synthetic oligonucleotide
gcgtagagatccaagcgtaccggtgaatcttgtggccatagtacaattgcatggg

SEQ ID NO: 413675 - DNA, 53 bp, Artificial
  Synthetic oligonucleotide
gcgtagagggattcgatgaatgcggcactaggccgatgcacgagctggcacaa

SEQ ID NO: 413676 - DNA, 60 bp, Artificial
  Synthetic oligonucleotide
gcgtagataacaccactgcagtggctggtgtcgtaacggtaacatcgcctggcgcaacac

SEQ ID NO: 413677 - DNA, 60 bp, Artificial
  Synthetic oligonucleotide
gcgtagatatgacaatagctgcgttaggtatacaaattggaaatatatctcaaacctata

SEQ ID NO: 413678 - DNA, 58 bp, Artificial
  Synthetic oligonucleotide
gcgtagccaggcttcgtaggagtccaatcagagttaataaacgttcgtatgattataa

SEQ ID NO: 413679 - DNA, 55 bp, Artificial
  Synthetic oligonucleotide
gcgtagccatacgtataggtattctctcctaatttaggggtttgaagactgggtc

SEQ ID NO: 413680 - DNA, 60 bp, Artificial
  Synthetic oligonucleotide
gcgtagccattttagctggactgtgcggacgaacgccacttgcgcaccccgcgtgactgg

SEQ ID NO: 413681 - DNA, 55 bp, Artificial
  Synthetic oligonucleotide
gcgtagcgaggtaggcagttatctatatgccttactccgcgatcgcgagacacgt

SEQ ID NO: 413682 - DNA, 55 bp, Artificial
  Synthetic oligonucleotide
gcgtagcgtctgggaagcttagttatcagttccagacgtggggaccaagtagtgt

SEQ ID NO: 413683 - DNA, 60 bp, Artificial
  Synthetic oligonucleotide
gcgtagctagcggggtagctgtgagagtggaagagctgccaacccggccgctactggctg

SEQ ID NO: 413684 - DNA, 54 bp, Artificial
  Synthetic oligonucleotide
gcgtagggcgaaaaggctgggccgttgtgtgaggtgttttagagttaatccagg

SEQ ID NO: 413685 - DNA, 52 bp, Artificial
  Synthetic oligonucleotide
gcgtaggtagttgttttcgggcccatttttgggtttcagatcgattaaacga

SEQ ID NO: 413686 - DNA, 57 bp, Artificial
  Synthetic oligonucleotide
gcgtaggtcgcgtaatttgggtaaggtcatcgataccctcacgtgcggcttcgccga

SEQ ID NO: 413687 - DNA, 54 bp, Artificial
  Synthetic oligonucleotide
gcgtagtacaaggcttagcagaatcagcactcactgatgtagataccgggacag

SEQ ID NO: 413688 - DNA, 57 bp, Artificial
  Synthetic oligonucleotide
gcgtagtacccctgcatttctccatagcttaatatcgtccacgtttctttataagga

SEQ ID NO: 413689 - DNA, 60 bp, Artificial
  Synthetic oligonucleotide
gcgtagtagtcaacaagcctgtgggcaggtatcgctcagccccgaaacgtctgtccatga

SEQ ID NO: 413690 - DNA, 50 bp, Artificial
  Synthetic oligonucleotide
gcgtagtataaggcagaaaggacacgctggtcttagagaaccctatcaat

SEQ ID NO: 413691 - DNA, 54 bp, Artificial
  Synthetic oligonucleotide
gcgtagtcgtgggacggttgaagttatcacctaagactgctaacgaactaaagg

SEQ ID NO: 413692 - DNA, 60 bp, Artificial
  Synthetic oligonucleotide
gcgtagtctacctgatgggtggctttactgtcacgctgatggttcacaattcgacagttc

SEQ ID NO: 413693 - DNA, 56 bp, Artificial
  Synthetic oligonucleotide
gcgtagtctccggttcgtagcttctgttccttcacatcgacggggtaatcctcgaa

SEQ ID NO: 413694 - DNA, 55 bp, Artificial
  Synthetic oligonucleotide
gcgtagtgtttgcgacggtaggcggtgcggtctgaattggtgctttcgagaccgg

SEQ ID NO: 413695 - DNA, 57 bp, Artificial
  Synthetic oligonucleotide
gcgtagttagggttctgctattcagacgtacgcacattaagtgtagtaggccgtcat

SEQ ID NO: 413696 - DNA, 50 bp, Artificial
  Synthetic oligonucleotide
gcgtagttgcgatcggcccaatcaatgaccggtgtgccaggcaacgcgtt

SEQ ID NO: 413697 - DNA, 56 bp, Artificial
  Synthetic oligonucleotide
gcgtagttgggcgtctactaatcgacgtctatcctcacgatattttacctctaaaa

SEQ ID NO: 413698 - DNA, 60 bp, Artificial
  Synthetic oligonucleotide
gcgtataaatcgtcaatcgcacggcaagcactaaatgatttggatgtagctgacattgat

SEQ ID NO: 413699 - DNA, 59 bp, Artificial
  Synthetic oligonucleotide
gcgtataatttatcagcagaatatccaccactaaatgattcagctcttaatctagaagc

SEQ ID NO: 413700 - DNA, 55 bp, Artificial
  Synthetic oligonucleotide
gcgtataccagccagggaacttgccggccctagggagggttggtggctcgttgat

SEQ ID NO: 413701 - DNA, 55 bp, Artificial
  Synthetic oligonucleotide
gcgtatacgtcagtgaagctgttctaaagtgttgtttgagatgccctggtgctgc

SEQ ID NO: 413702 - DNA, 57 bp, Artificial
  Synthetic oligonucleotide
gcgtatagacgacactacgacatgcacccacattgaaaacttgactctatgctacgg

SEQ ID NO: 413703 - DNA, 59 bp, Artificial
  Synthetic oligonucleotide
gcgtataggatgtgctttgccgataatcctatgattagggaaagttttgatactcacgt

SEQ ID NO: 413704 - DNA, 55 bp, Artificial
  Synthetic oligonucleotide
gcgtatagtatacgatgatgaattgcagatgcacatattacggggaccactacac

SEQ ID NO: 413705 - DNA, 55 bp, Artificial
  Synthetic oligonucleotide
gcgtatatacatcgtatcctattacaaggtctatatcctctacccttgcctcttg

SEQ ID NO: 413706 - DNA, 55 bp, Artificial
  Synthetic oligonucleotide
gcgtatatagagtaccgaaactctacagagcgatacatgccaagatacggtcttc

SEQ ID NO: 413707 - DNA, 60 bp, Artificial
  Synthetic oligonucleotide
gcgtatatatagaagtattgcatttgacccaaggaacctgctgggagcagatgtacacac

SEQ ID NO: 413708 - DNA, 60 bp, Artificial
  Synthetic oligonucleotide
gcgtatatccgggacgtggtgccaatatcagaatgaccaagacgtttcgatataatgtat

SEQ ID NO: 413709 - DNA, 55 bp, Artificial
  Synthetic oligonucleotide
gcgtatcacagagatgcaagctttataccaagagtaagctcgacatattagctcg

SEQ ID NO: 413710 - DNA, 55 bp, Artificial
  Synthetic oligonucleotide
gcgtatcccaagggagtggagaacaagagtctcaagtctaaagtcgggatcgagc

SEQ ID NO: 413711 - DNA, 60 bp, Artificial
  Synthetic oligonucleotide
gcgtatcgaagtggaccgcctcatgtgcggctgccgaagctaaagtaacctcggctataa

SEQ ID NO: 413712 - DNA, 55 bp, Artificial
  Synthetic oligonucleotide
gcgtatcgcaggagaggtgctgagctgatttcttccctttgaggaagagatgtca

SEQ ID NO: 413713 - DNA, 55 bp, Artificial
  Synthetic oligonucleotide
gcgtatcttaaggaagataccgttagccgaattatcggccatactgtggaagagc

SEQ ID NO: 413714 - DNA, 56 bp, Artificial
  Synthetic oligonucleotide
gcgtatgagccaagttttattgaagtaatttttgaacccactcataaaaacgatga

SEQ ID NO: 413715 - DNA, 60 bp, Artificial
  Synthetic oligonucleotide
gcgtatgagtcgttagcactctggcagcctcctctagcacttcgaccgtcgacctggaat

SEQ ID NO: 413716 - DNA, 55 bp, Artificial
  Synthetic oligonucleotide
gcgtatgcactgttttatagatctgatgtagtaccacttgggaactctaataaga

SEQ ID NO: 413717 - DNA, 55 bp, Artificial
  Synthetic oligonucleotide
gcgtatgctaaggtcctagatctgcgagtcgagaaacgtgaagccccaatcccgt

SEQ ID NO: 413718 - DNA, 60 bp, Artificial
  Synthetic oligonucleotide
gcgtatgcttataatcacaccgagcaatcaccgcagtatcgagctttcttggcgatgggg

SEQ ID NO: 413719 - DNA, 60 bp, Artificial
  Synthetic oligonucleotide
gcgtatggaccatggatgttcttcagcctatcgtagtgtgtgcgatagcattgcgttagg

SEQ ID NO: 413720 - DNA, 54 bp, Artificial
  Synthetic oligonucleotide
gcgtatggcatgacgtgccaagtgcaacaattctgacaccgatccgtgggcccc

SEQ ID NO: 413721 - DNA, 58 bp, Artificial
  Synthetic oligonucleotide
gcgtatgggacgcaaatgcacacacgaaggttaattagatcgaagacggtacacccta

SEQ ID NO: 413722 - DNA, 55 bp, Artificial
  Synthetic oligonucleotide
gcgtatggtcatttcaagggtccgggcactctgtcccgtggtgtcgctacctctg

SEQ ID NO: 413723 - DNA, 55 bp, Artificial
  Synthetic oligonucleotide
gcgtatggtgtggtaacagtgtgtccacagtgtagttcaccactgcgactggtgg

SEQ ID NO: 413724 - DNA, 55 bp, Artificial
  Synthetic oligonucleotide
gcgtatggttattcaagctgtccacaatgtgtcgtcaacagacagctaacgaagc

SEQ ID NO: 413725 - DNA, 50 bp, Artificial
  Synthetic oligonucleotide
gcgtatgtcttgggtggcatgctgacagcccgtgaggtggtggcagtgta

SEQ ID NO: 413726 - DNA, 60 bp, Artificial
  Synthetic oligonucleotide
gcgtattaattataacgcgaataattcaagggcatataatggatcctccagtaataatca

SEQ ID NO: 413727 - DNA, 57 bp, Artificial
  Synthetic oligonucleotide
gcgtattaattggaagaagtggtggcaagtattctatactgtagttgattacgtaaa

SEQ ID NO: 413728 - DNA, 56 bp, Artificial
  Synthetic oligonucleotide
gcgtattatccggtatttgaaaggtgaatactcggatcatgaacataatgtgaaac

SEQ ID NO: 413729 - DNA, 60 bp, Artificial
  Synthetic oligonucleotide
gcgtattcaaatacgccagatactttgatcacagtgaacccaacatttacgatgacgaag

SEQ ID NO: 413730 - DNA, 55 bp, Artificial
  Synthetic oligonucleotide
gcgtattcgcggagtcggactacggtcagaggcaggggtaacaccttggaaggtg

SEQ ID NO: 413731 - DNA, 55 bp, Artificial
  Synthetic oligonucleotide
gcgtattcggaaggccacagatttatcatcaactttgccgccaagagcagactcg

SEQ ID NO: 413732 - DNA, 60 bp, Artificial
  Synthetic oligonucleotide
gcgtattgatttccattggacgatggtacaaccaggtgataacatcactttttcgcataa

SEQ ID NO: 413733 - DNA, 55 bp, Artificial
  Synthetic oligonucleotide
gcgtattggcgccagactttaacttatttggtgtagtacctatacaaggtccgat

SEQ ID NO: 413734 - DNA, 55 bp, Artificial
  Synthetic oligonucleotide
gcgtattggtctgcgaactttcgtagtaaacctaacaactacaagcagtacgcgc

SEQ ID NO: 413735 - DNA, 58 bp, Artificial
  Synthetic oligonucleotide
gcgtattgtacggctcgcctcgttagtacgagaggagggaacgcgctgcgacctccga

SEQ ID NO: 413736 - DNA, 55 bp, Artificial
  Synthetic oligonucleotide
gcgtattgttgctctcaatgttgtggtgtactttattacgggactctgcccgcgg

SEQ ID NO: 413737 - DNA, 55 bp, Artificial
  Synthetic oligonucleotide
gcgtattgttgtcgggtcaactgcgttgcatcataatggtattcgactgcgtaag

SEQ ID NO: 413738 - DNA, 56 bp, Artificial
  Synthetic oligonucleotide
gcgtatttcttaaattagtgcgcgcttcactgcgaaagttgtgtcctaaccttaat

SEQ ID NO: 413739 - DNA, 59 bp, Artificial
  Synthetic oligonucleotide
gcgtattttaggcgacgacgttcgattaacttatcacggctctgaagatctatgtatta

SEQ ID NO: 413740 - DNA, 56 bp, Artificial
  Synthetic oligonucleotide
gcgtcaaattgagacaaatcgtcgcgatatccgaagagttggcgcgactgcggttg

SEQ ID NO: 413741 - DNA, 60 bp, Artificial
  Synthetic oligonucleotide
gcgtcaacaagcttcccactgtccagatggcaaagcagcttcttccgctggtgccatctg

SEQ ID NO: 413742 - DNA, 60 bp, Artificial
  Synthetic oligonucleotide
gcgtcaacaatcgtctggcaatactcagtagggattgtctggtccactagccctgcaaag

SEQ ID NO: 413743 - DNA, 57 bp, Artificial
  Synthetic oligonucleotide
gcgtcaacacagatatcaaacgttagtagaagtttacgattacgtgaatttaccaca

SEQ ID NO: 413744 - DNA, 55 bp, Artificial
  Synthetic oligonucleotide
gcgtcaacacttttctccctgagtttccagtcacgaacagattagaacgattgcg

SEQ ID NO: 413745 - DNA, 60 bp, Artificial
  Synthetic oligonucleotide
gcgtcaacattttcgcacttggatacatgactttatgcgaaatgtaggctttggcatgtg

SEQ ID NO: 413746 - DNA, 58 bp, Artificial
  Synthetic oligonucleotide
gcgtcaaccgcttagcctaagagatgctcggctgaagacattcgttaaggcggaaaaa

SEQ ID NO: 413747 - DNA, 55 bp, Artificial
  Synthetic oligonucleotide
gcgtcaacctcccctttggcgctcgatatgaccgaagaggaggacatgttggtga

SEQ ID NO: 413748 - DNA, 60 bp, Artificial
  Synthetic oligonucleotide
gcgtcaacgcattatatgcctaggcgcataaaatggaatagccttgaataaaaccatgcg

SEQ ID NO: 413749 - DNA, 55 bp, Artificial
  Synthetic oligonucleotide
gcgtcaactaatgcgggatctattaacgcacccacagtgtcagacagcagggcgc

SEQ ID NO: 413750 - DNA, 60 bp, Artificial
  Synthetic oligonucleotide
gcgtcaactgacgtgaacgtatcagggcatctactttcgttggccatcgctgctcacttc

SEQ ID NO: 413751 - DNA, 59 bp, Artificial
  Synthetic oligonucleotide
gcgtcaaggatgagagattgccagttcggaaggtaattaaggagccaaagagtcgcttg

SEQ ID NO: 413752 - DNA, 55 bp, Artificial
  Synthetic oligonucleotide
gcgtcaaggatgagcgcttaccaatcagaaaagtgttgcatgagcccaagagtcg

SEQ ID NO: 413753 - DNA, 60 bp, Artificial
  Synthetic oligonucleotide
gcgtcaagtttcactcggctgccgttgacaacacctcttcatcattgggggccattgttg

SEQ ID NO: 413754 - DNA, 60 bp, Artificial
  Synthetic oligonucleotide
gcgtcaataccccggcagcccagcaaccacgcacatttgaacaagagtacaaatgtacaa

SEQ ID NO: 413755 - DNA, 60 bp, Artificial
  Synthetic oligonucleotide
gcgtcaatagtgtattcacgtgaaataactggtgtaacgtcaatagaatgggcaatatac

SEQ ID NO: 413756 - DNA, 55 bp, Artificial
  Synthetic oligonucleotide
gcgtcaatctctttaattacgtcacacatgtaatccaacactcggcgatcgatag

SEQ ID NO: 413757 - DNA, 56 bp, Artificial
  Synthetic oligonucleotide
gcgtcaatgttgaccgcagggtagttcagcactttaagccgtcttctgggtgtgta

SEQ ID NO: 413758 - DNA, 55 bp, Artificial
  Synthetic oligonucleotide
gcgtcacaggatcgcagaatccttccaccgagatcacactcaagtatccagggat

SEQ ID NO: 413759 - DNA, 55 bp, Artificial
  Synthetic oligonucleotide
gcgtcaccacagtatggtctactccacaacatctcgcagcgcaagtctgcggcag

SEQ ID NO: 413760 - DNA, 53 bp, Artificial
  Synthetic oligonucleotide
gcgtcacgatatctcacatgtcggtaaggttatgtgcatctccgatgtgacac

SEQ ID NO: 413761 - DNA, 55 bp, Artificial
  Synthetic oligonucleotide
gcgtcacgtgtcggtgagacgtttgttggcctctccccagacggggtcgtccctg

SEQ ID NO: 413762 - DNA, 55 bp, Artificial
  Synthetic oligonucleotide
gcgtcactaccgcagcagctttcactgcaagtgggtgacggttcagccctcgcag

SEQ ID NO: 413763 - DNA, 55 bp, Artificial
  Synthetic oligonucleotide
gcgtcactcatcggagactttgaattgcagggcccagaggatttagctgtggaat

SEQ ID NO: 413764 - DNA, 55 bp, Artificial
  Synthetic oligonucleotide
gcgtcactcgaaatgaggctacaaaagctcttagttcaattcaagtctttagctc

SEQ ID NO: 413765 - DNA, 55 bp, Artificial
  Synthetic oligonucleotide
gcgtcacttcgacgacaagccgttctggagagatccggacgaggagacccttccg

SEQ ID NO: 413766 - DNA, 53 bp, Artificial
  Synthetic oligonucleotide
gcgtcactttaaactgtactaatgtcacctgtactgataacagcacctgtaag

SEQ ID NO: 413767 - DNA, 56 bp, Artificial
  Synthetic oligonucleotide
gcgtcactttaccacagtgttatacgactgcgtaccattgatgcgctgtaggccgc

SEQ ID NO: 413768 - DNA, 57 bp, Artificial
  Synthetic oligonucleotide
gcgtcacttttatcggcagttagaacgtagggcgttaaggactcgaatcactgatgg

SEQ ID NO: 413769 - DNA, 55 bp, Artificial
  Synthetic oligonucleotide
gcgtcacttttccttcatttagtgggcatacctacccatagacacatcaggggcg

SEQ ID NO: 413770 - DNA, 56 bp, Artificial
  Synthetic oligonucleotide
gcgtcagaaattccgatttcccactacctacttaactgtggattcagtggaagtta

SEQ ID NO: 413771 - DNA, 59 bp, Artificial
  Synthetic oligonucleotide
gcgtcagatagagttaatctcttcgggaacgtcaatggatgacatcgctcgcgggttat

SEQ ID NO: 413772 - DNA, 56 bp, Artificial
  Synthetic oligonucleotide
gcgtcagcacactggtatcccggtacctttgtgcgcctgttttatattccccaccc

SEQ ID NO: 413773 - DNA, 60 bp, Artificial
  Synthetic oligonucleotide
gcgtcagcgggttggcttccgatagatcagctagcccgaagagtgacccgtggtcaccta

SEQ ID NO: 413774 - DNA, 60 bp, Artificial
  Synthetic oligonucleotide
gcgtcagcttcctaatgtgtaaggcagtcaccaagcctatggaatgctatcaagttgtaa

SEQ ID NO: 413775 - DNA, 60 bp, Artificial
  Synthetic oligonucleotide
gcgtcaggagtaagagataggaggagatgctaggagttagaggagaccgaagcgaggagg

SEQ ID NO: 413776 - DNA, 57 bp, Artificial
  Synthetic oligonucleotide
gcgtcaggccgaacaggacaacgcttaagcgggagcagggagggccggccacacagg

SEQ ID NO: 413777 - DNA, 60 bp, Artificial
  Synthetic oligonucleotide
gcgtcaggcgaataatggggaagacgcaactgctggtctcactcatttgatgatctggca

SEQ ID NO: 413778 - DNA, 55 bp, Artificial
  Synthetic oligonucleotide
gcgtcagtattaagcggcggaaaattagatgcatgggaaaaaattcggttaaggc

SEQ ID NO: 413779 - DNA, 55 bp, Artificial
  Synthetic oligonucleotide
gcgtcagtcaaggcctttgcaggagaccccgtcgcagccggcaacaatatggccc

SEQ ID NO: 413780 - DNA, 55 bp, Artificial
  Synthetic oligonucleotide
gcgtcataagattcggttccttatataacgcgcacgcgggcaagaagacaggcga

SEQ ID NO: 413781 - DNA, 55 bp, Artificial
  Synthetic oligonucleotide
gcgtcatacaggagtgttctgatcgtattccacatgtacctgagttcatctgagt

SEQ ID NO: 413782 - DNA, 53 bp, Artificial
  Synthetic oligonucleotide
gcgtcatacggcagtgatatatgatgatttcgcgcaaataccgcagggtgaca

SEQ ID NO: 413783 - DNA, 55 bp, Artificial
  Synthetic oligonucleotide
gcgtcatatcaatatctaagtggtgtgactatcaggacaatgacaatcaagtgtc

SEQ ID NO: 413784 - DNA, 52 bp, Artificial
  Synthetic oligonucleotide
gcgtcatatgccatctcgtgaatgaggcggatggacgaacaagtgattgttt

SEQ ID NO: 413785 - DNA, 60 bp, Artificial
  Synthetic oligonucleotide
gcgtcatcctggggcgggagttattatcaacgatgctggctttgtgactgtgataaatcc

SEQ ID NO: 413786 - DNA, 55 bp, Artificial
  Synthetic oligonucleotide
gcgtcatcttctacgaagtgcgcgggcggcactattacgccatcccaagctggcg

SEQ ID NO: 413787 - DNA, 60 bp, Artificial
  Synthetic oligonucleotide
gcgtcatgatatctctcacgtcgggaaggtgatgtgtatttctgatgtcactcgtggtaa

SEQ ID NO: 413788 - DNA, 55 bp, Artificial
  Synthetic oligonucleotide
gcgtcatggcaggtattcaatttgttagtcaatttgacatcgttatcgacgaacg

SEQ ID NO: 413789 - DNA, 55 bp, Artificial
  Synthetic oligonucleotide
gcgtcattatgcttaagtatacaaacaataacaggatatgggagggcatgggtag

SEQ ID NO: 413790 - DNA, 58 bp, Artificial
  Synthetic oligonucleotide
gcgtcattattgcgtaccgtgatatgcagttggagagggatgaaatgtatggttatgt

SEQ ID NO: 413791 - DNA, 55 bp, Artificial
  Synthetic oligonucleotide
gcgtcattcgaattgaggtggatggtccgtcctaatcaaggaggatggttgacgt

SEQ ID NO: 413792 - DNA, 60 bp, Artificial
  Synthetic oligonucleotide
gcgtcattctactgataccagaacgatacaactcattgccatttattatgtactgtttaa

SEQ ID NO: 413793 - DNA, 54 bp, Artificial
  Synthetic oligonucleotide
gcgtcattgacgtgaccccgacgcacacctacggcgacccggtttaagaacgga

SEQ ID NO: 413794 - DNA, 55 bp, Artificial
  Synthetic oligonucleotide
gcgtcattttgagcggggtattgagatatggattaagagggatcatgaaatcgga

SEQ ID NO: 413795 - DNA, 55 bp, Artificial
  Synthetic oligonucleotide
gcgtccaaaccaaagccgctgctacggcagtcgttaatgcgactgtaccaaagac

SEQ ID NO: 413796 - DNA, 53 bp, Artificial
  Synthetic oligonucleotide
gcgtccaagcgcaagcagcatttgtatttcctatacccgctggagagtatagt

SEQ ID NO: 413797 - DNA, 58 bp, Artificial
  Synthetic oligonucleotide
gcgtccaaggcagcagccttcgctcagggtgggtcttcggaccccgtccctatgcctg

SEQ ID NO: 413798 - DNA, 51 bp, Artificial
  Synthetic oligonucleotide
gcgtccaattccttcctgaggttgtagttgaatcttatctgcatctctacc

SEQ ID NO: 413799 - DNA, 55 bp, Artificial
  Synthetic oligonucleotide
gcgtccaccaaatatgacaccagctgttaacgcattatttccgcaagcgcaacca

SEQ ID NO: 413800 - DNA, 57 bp, Artificial
  Synthetic oligonucleotide
gcgtccaccaaatatgacgccagccgtaaatgcattatttccgcaagcccaaccttt

SEQ ID NO: 413801 - DNA, 55 bp, Artificial
  Synthetic oligonucleotide
gcgtccacggtacaggcgaagctcttatccatagaggaagcctgcgacctcacac

SEQ ID NO: 413802 - DNA, 55 bp, Artificial
  Synthetic oligonucleotide
gcgtccacttatggcaaacgaacacatgcatccgtgttgacctgccatctacgtc

SEQ ID NO: 413803 - DNA, 55 bp, Artificial
  Synthetic oligonucleotide
gcgtccagacgtacttgtctgaggattcctatccgagtagtggtgggtccgtcac

SEQ ID NO: 413804 - DNA, 60 bp, Artificial
  Synthetic oligonucleotide
gcgtccagcagatatagtcatttccacgcccgcctccaaggtgcgtcgccgtctgaattt

SEQ ID NO: 413805 - DNA, 55 bp, Artificial
  Synthetic oligonucleotide
gcgtccagcttaaacgattcagttgcaatgagacaaacgtttggcaacctgtaca

SEQ ID NO: 413806 - DNA, 60 bp, Artificial
  Synthetic oligonucleotide
gcgtccagcttcccctgcaagatttcgagaacatccgcactgcatacgaactgtccaaga

SEQ ID NO: 413807 - DNA, 51 bp, Artificial
  Synthetic oligonucleotide
gcgtccaggctgggacacgcggccgattgcgtttcgatctgagacgaccct

SEQ ID NO: 413808 - DNA, 55 bp, Artificial
  Synthetic oligonucleotide
gcgtccatagctgctcggatctgtgtgatagcttggctagttggcgtacccgctg

SEQ ID NO: 413809 - DNA, 55 bp, Artificial
  Synthetic oligonucleotide
gcgtccatcacgtactctacatatgggaagttcctggccgacggaggatgcgggg

SEQ ID NO: 413810 - DNA, 55 bp, Artificial
  Synthetic oligonucleotide
gcgtcccaaatcctgtccattgcgatcctcccgtaatactgcttaaaggtccgac

SEQ ID NO: 413811 - DNA, 55 bp, Artificial
  Synthetic oligonucleotide
gcgtcccagctggcctgtccattcaggttggtgatgcatctgcactaacagcccc

SEQ ID NO: 413812 - DNA, 55 bp, Artificial
  Synthetic oligonucleotide
gcgtcccagttggtcgttagtattaaacatgtttggacaagaagtagtaccatct

SEQ ID NO: 413813 - DNA, 57 bp, Artificial
  Synthetic oligonucleotide
gcgtcccgccgatatagccatttccactcccgcctcgaaggtacgtcgccgtctgaa

SEQ ID NO: 413814 - DNA, 57 bp, Artificial
  Synthetic oligonucleotide
gcgtcccgccgatatagtgatttcaacacccgcctccaaagtacgccgccggctgaa

SEQ ID NO: 413815 - DNA, 54 bp, Artificial
  Synthetic oligonucleotide
gcgtcccgtgaaaatgggaattttctactcgaaacaccgtgacatttgacagac

SEQ ID NO: 413816 - DNA, 55 bp, Artificial
  Synthetic oligonucleotide
gcgtcccttctcacttattttaaccctactttgtgcatagtaacagcgctgtagt

SEQ ID NO: 413817 - DNA, 55 bp, Artificial
  Synthetic oligonucleotide
gcgtccgatcaacgagactaccagctatatcggtcagacctccgcggtcgaccac

SEQ ID NO: 413818 - DNA, 55 bp, Artificial
  Synthetic oligonucleotide
gcgtccgcaccccaataattatttgcatacacagatcagtaggagaggcgccaag

SEQ ID NO: 413819 - DNA, 60 bp, Artificial
  Synthetic oligonucleotide
gcgtccggagttcaggccaacaataagttactttatgacctgtccgagatgcgcgctgag

SEQ ID NO: 413820 - DNA, 55 bp, Artificial
  Synthetic oligonucleotide
gcgtccggtgtgcagggtaacctcagccgaaacttgcccttttccgtgtgcattc

SEQ ID NO: 413821 - DNA, 59 bp, Artificial
  Synthetic oligonucleotide
gcgtccgtagcttcaatggcgctactacccatgtaagcgattacgcgcttctgtgtttt

SEQ ID NO: 413822 - DNA, 55 bp, Artificial
  Synthetic oligonucleotide
gcgtccgtgttaaacagtgcatcggaagagcgtcgcaattgcatattattgagta

SEQ ID NO: 413823 - DNA, 55 bp, Artificial
  Synthetic oligonucleotide
gcgtccgttcaatgtctctaagtcagttccacatacgaacgtatggacctatccg

SEQ ID NO: 413824 - DNA, 55 bp, Artificial
  Synthetic oligonucleotide
gcgtccgtttacaggacgaccttggggcttgaggttctaaataccatgtctctgg

SEQ ID NO: 413825 - DNA, 57 bp, Artificial
  Synthetic oligonucleotide
gcgtcctccagctcccactattaccaccgttagcgaaaacgtgcccgctctaactga

SEQ ID NO: 413826 - DNA, 55 bp, Artificial
  Synthetic oligonucleotide
gcgtcctctactggtaaagcgctcagcgttctcgctgattgctcatcctgggatc

SEQ ID NO: 413827 - DNA, 55 bp, Artificial
  Synthetic oligonucleotide
gcgtcctcttgaagttgaggagtttaccatttcctcgggtgattctgtggcggag

SEQ ID NO: 413828 - DNA, 60 bp, Artificial
  Synthetic oligonucleotide
gcgtcctgcaaattcgacttatgtttgccgaggattgggacatagggcgtgaaatgctca

SEQ ID NO: 413829 - DNA, 56 bp, Artificial
  Synthetic oligonucleotide
gcgtcctgtaaaggacgcttcgatgagttttaggggtgcctactagaacatcgtgg

SEQ ID NO: 413830 - DNA, 57 bp, Artificial
  Synthetic oligonucleotide
gcgtccttgaggactgatgttaccaacctgaagtctagtttatcaacgttggccgcc

SEQ ID NO: 413831 - DNA, 55 bp, Artificial
  Synthetic oligonucleotide
gcgtccttgctactggcatgcaaaaggacctacagaggatgttctattacgtcgg

SEQ ID NO: 413832 - DNA, 55 bp, Artificial
  Synthetic oligonucleotide
gcgtccttggctgcttggacattaggatggtaattggcactcctcctggggtgag

SEQ ID NO: 413833 - DNA, 55 bp, Artificial
  Synthetic oligonucleotide
gcgtcgaaacaggtgtatgtgaggaggtcgatagaggatgttcacagtggggcga

SEQ ID NO: 413834 - DNA, 55 bp, Artificial
  Synthetic oligonucleotide
gcgtcgaacaagattatatgaggctgctcacactgatgtccgtgagtcactctcg

SEQ ID NO: 413835 - DNA, 55 bp, Artificial
  Synthetic oligonucleotide
gcgtcgaactcaacggaaagatgtattataaagtagttacgcttcatgagagtgg

SEQ ID NO: 413836 - DNA, 58 bp, Artificial
  Synthetic oligonucleotide
gcgtcgacaggctgaaaacgaattgccctaacgacatcatcatcgtttctttcctccg

SEQ ID NO: 413837 - DNA, 55 bp, Artificial
  Synthetic oligonucleotide
gcgtcgacatcgtctgttctcgtgccccgattagctcgtcagtttggtcacgtac

SEQ ID NO: 413838 - DNA, 55 bp, Artificial
  Synthetic oligonucleotide
gcgtcgacatcgtgtgcagcaaattttcgcatcacctcgttagcattacgagggg

SEQ ID NO: 413839 - DNA, 59 bp, Artificial
  Synthetic oligonucleotide
gcgtcgacgtctgaacttcgacagcccctataccagccgtgctgttgtccccactgtcc

SEQ ID NO: 413840 - DNA, 59 bp, Artificial
  Synthetic oligonucleotide
gcgtcgacttagctattgacctaattattcgatgtaaacgatatgaaaccactaagaga

SEQ ID NO: 413841 - DNA, 54 bp, Artificial
  Synthetic oligonucleotide
gcgtcgaggacagctcactaattcgcgttgggctccggtgtcgtgtaaaacggg

SEQ ID NO: 413842 - DNA, 55 bp, Artificial
  Synthetic oligonucleotide
gcgtcgaggagtggtgctaccaccgtgttcgaaagctggggaacgtactctgcct

SEQ ID NO: 413843 - DNA, 60 bp, Artificial
  Synthetic oligonucleotide
gcgtcgagtcctttggcatgctacccaggatcaagaggaatctatgcgcctggtttgcat

SEQ ID NO: 413844 - DNA, 58 bp, Artificial
  Synthetic oligonucleotide
gcgtcgatcggtatccaggcctctcgggtgtttacgccgctcggtgcctcgtcacttc

SEQ ID NO: 413845 - DNA, 51 bp, Artificial
  Synthetic oligonucleotide
gcgtcgattccccgtccaggcttacacggtgggagtaggcgctcttccaac

SEQ ID NO: 413846 - DNA, 58 bp, Artificial
  Synthetic oligonucleotide
gcgtcgcaatgtttccattacgttttcattatgttcaagtctatctataacttctagg

SEQ ID NO: 413847 - DNA, 55 bp, Artificial
  Synthetic oligonucleotide
gcgtcgcacctgcacagcgtactgggtacggcaaatgccccgttgagcatctacg

SEQ ID NO: 413848 - DNA, 55 bp, Artificial
  Synthetic oligonucleotide
gcgtcgcggagcgattagaaaacgtaaagcgattagctcaatcgcatcagatcag

SEQ ID NO: 413849 - DNA, 59 bp, Artificial
  Synthetic oligonucleotide
gcgtcgctcagcggctatcagagtatatcacgaccgaacgcgttcgcttcgatgcgatg

SEQ ID NO: 413850 - DNA, 50 bp, Artificial
  Synthetic oligonucleotide
gcgtcgctccgtctggaattggtgagagtaacacgcggcctctgtacgga

SEQ ID NO: 413851 - DNA, 55 bp, Artificial
  Synthetic oligonucleotide
gcgtcgctttaagaactgtatcgaatgttcttaggcgtttgtggatagaataacg

SEQ ID NO: 413852 - DNA, 55 bp, Artificial
  Synthetic oligonucleotide
gcgtcggagttatagtatacggagtgccttttaactacgaataccgtatacattc

SEQ ID NO: 413853 - DNA, 55 bp, Artificial
  Synthetic oligonucleotide
gcgtcggctaacggggatctgagcacagcgttcgacggtctcggacaatcgctga

SEQ ID NO: 413854 - DNA, 51 bp, Artificial
  Synthetic oligonucleotide
gcgtcgggcactctggacatcgctcgcatccccgtgggcaacagtgggtca

SEQ ID NO: 413855 - DNA, 59 bp, Artificial
  Synthetic oligonucleotide
gcgtcggggggagctctactgcagggagcccacataccctaccgagcactcagagggtc

SEQ ID NO: 413856 - DNA, 55 bp, Artificial
  Synthetic oligonucleotide
gcgtcgggtactacctgaatggcgatgacagcatttctgtcgatggctacaaagg

SEQ ID NO: 413857 - DNA, 58 bp, Artificial
  Synthetic oligonucleotide
gcgtcggtaaagtggcataggaccaaagatactaccgtaaagtatctgctagctctat

SEQ ID NO: 413858 - DNA, 58 bp, Artificial
  Synthetic oligonucleotide
gcgtcggttcaggaggagcgtactctcgggaccagtaagtattcaaacgtcacagcta

SEQ ID NO: 413859 - DNA, 58 bp, Artificial
  Synthetic oligonucleotide
gcgtcgtagaattgagtcgagtcatggacaaatctgaatcaaccagtgctggtcgtaa

SEQ ID NO: 413860 - DNA, 50 bp, Artificial
  Synthetic oligonucleotide
gcgtcgtagggagcaggaccttccactcattcgggacgaataatttcaag

SEQ ID NO: 413861 - DNA, 60 bp, Artificial
  Synthetic oligonucleotide
gcgtcgtcaaggctgacgcgattgtctctgatttctacgataaccgacccagttgcgtta

SEQ ID NO: 413862 - DNA, 59 bp, Artificial
  Synthetic oligonucleotide
gcgtcgtcgacgaatggccctacgtttggcaaggcgatgctgtgctttgatagaggggg

SEQ ID NO: 413863 - DNA, 55 bp, Artificial
  Synthetic oligonucleotide
gcgtcgtgccgctgtctttggtcgtgccgacgtggctgagatgcccatactgact

SEQ ID NO: 413864 - DNA, 59 bp, Artificial
  Synthetic oligonucleotide
gcgtcgtgtcgattgttattgtccgggataaatcacctaagatttattcgactgcacaa

SEQ ID NO: 413865 - DNA, 51 bp, Artificial
  Synthetic oligonucleotide
gcgtcgtgtctaaatttaattgcaacacaccattgtcgcataaataaggtc

SEQ ID NO: 413866 - DNA, 60 bp, Artificial
  Synthetic oligonucleotide
gcgtcgttggcatagtgtctactggtggcaatgggctcgttggctttgcagacgtcaggg

SEQ ID NO: 413867 - DNA, 55 bp, Artificial
  Synthetic oligonucleotide
gcgtcgtttccccgatgtgttggttgaagcgagaccaacgcatttttggaaagcg

SEQ ID NO: 413868 - DNA, 54 bp, Artificial
  Synthetic oligonucleotide
gcgtcgtttgcagattgcttacctcctcgacttgatcgaccatcaatttggaat

SEQ ID NO: 413869 - DNA, 55 bp, Artificial
  Synthetic oligonucleotide
gcgtctacaaacggtctttggctttgagacacaaaggctgtagtagctaacctag

SEQ ID NO: 413870 - DNA, 53 bp, Artificial
  Synthetic oligonucleotide
gcgtctacagactgtatacccgttgtgtaacctttctgagctaggatctggcg

SEQ ID NO: 413871 - DNA, 55 bp, Artificial
  Synthetic oligonucleotide
gcgtctaccaaggcgtacaccatcttgttagattcgaagcgtagcatatagttgc

SEQ ID NO: 413872 - DNA, 60 bp, Artificial
  Synthetic oligonucleotide
gcgtctacctggggttgtgacacagaccaatcgagatatcccatctggtgtgttacttcc

SEQ ID NO: 413873 - DNA, 55 bp, Artificial
  Synthetic oligonucleotide
gcgtctacgcagtggccgtttgtgcccttggttcctgctgacacaacccattatg

SEQ ID NO: 413874 - DNA, 55 bp, Artificial
  Synthetic oligonucleotide
gcgtctacggcgcttgtgctttcgcagcgttcgtatgttttgtcatccgtgctgc

SEQ ID NO: 413875 - DNA, 56 bp, Artificial
  Synthetic oligonucleotide
gcgtctactggaacagaccaaacagttgttaaggtctgggtaaaagatcaggacgc

SEQ ID NO: 413876 - DNA, 58 bp, Artificial
  Synthetic oligonucleotide
gcgtctagagagggcttttctgatcgagacaaaaacatgtgaatggccgaacactcac

SEQ ID NO: 413877 - DNA, 60 bp, Artificial
  Synthetic oligonucleotide
gcgtctagccaatacatacgacgcgtcgacaagagcgtgcatcgacggcactagattcat

SEQ ID NO: 413878 - DNA, 55 bp, Artificial
  Synthetic oligonucleotide
gcgtctatgactgttgtggattccaagccgatcctagagcttgcaccagttgatc

SEQ ID NO: 413879 - DNA, 60 bp, Artificial
  Synthetic oligonucleotide
gcgtctcaacaatacatagtatgggtgccatcgaaactgctacgcttcggcttaaagtca

SEQ ID NO: 413880 - DNA, 55 bp, Artificial
  Synthetic oligonucleotide
gcgtctcagtcgccgtttgagccctgcggtctagccatggctgagctagcatgct

SEQ ID NO: 413881 - DNA, 55 bp, Artificial
  Synthetic oligonucleotide
gcgtctccattaccgcaatcaaggctggcgttctgttgagaccacgggtgtggct

SEQ ID NO: 413882 - DNA, 55 bp, Artificial
  Synthetic oligonucleotide
gcgtctcctgattgctctcttcttggcctcccgatgctggactttgattggtacc

SEQ ID NO: 413883 - DNA, 55 bp, Artificial
  Synthetic oligonucleotide
gcgtctcctttggagcgcctggctcactctcttcggagagcgaagatgaagttaa

SEQ ID NO: 413884 - DNA, 58 bp, Artificial
  Synthetic oligonucleotide
gcgtctcgataacggaatccatattgagaagtcaatggggagtgacacccaaaaccaa

SEQ ID NO: 413885 - DNA, 54 bp, Artificial
  Synthetic oligonucleotide
gcgtctcgcagtggatagatagcaaccagcgtcactccaggaaacgattcgaga

SEQ ID NO: 413886 - DNA, 55 bp, Artificial
  Synthetic oligonucleotide
gcgtctctagaaaatactactgacctttccgcctccagctatgaagctaaaggtg

SEQ ID NO: 413887 - DNA, 55 bp, Artificial
  Synthetic oligonucleotide
gcgtctctccccgggcacaggtctgactgccacttatatagtagcccacaatggc

SEQ ID NO: 413888 - DNA, 55 bp, Artificial
  Synthetic oligonucleotide
gcgtctctgatggctacatagtgggactacacagtctgtcgccctcgaatggtga

SEQ ID NO: 413889 - DNA, 60 bp, Artificial
  Synthetic oligonucleotide
gcgtctctgctgcgggtgccatactttgtgagggctcatgccctgctacgagtgtgtacc

SEQ ID NO: 413890 - DNA, 53 bp, Artificial
  Synthetic oligonucleotide
gcgtctgcagagatcgacccagagtcactcgcccgattcccaccccgtgtctt

SEQ ID NO: 413891 - DNA, 59 bp, Artificial
  Synthetic oligonucleotide
gcgtctgctaagcgttttcctggcgctaggttcgcacttacgccggtgtatgcaaacgc

SEQ ID NO: 413892 - DNA, 51 bp, Artificial
  Synthetic oligonucleotide
gcgtctgctgagggtacggtagtgctcgccatgcaggacagggccgcagtg

SEQ ID NO: 413893 - DNA, 55 bp, Artificial
  Synthetic oligonucleotide
gcgtctggaatggcgaccgcgagaggtgtgatgcaagtttataagctagggcagc

SEQ ID NO: 413894 - DNA, 55 bp, Artificial
  Synthetic oligonucleotide
gcgtctgggaattacatgcgaggcgtcacgggcaacgggttcactgtgggatggg

SEQ ID NO: 413895 - DNA, 60 bp, Artificial
  Synthetic oligonucleotide
gcgtctgttgggagaatggtcggtgggattggacgattctacatacagatgtgcactgaa

SEQ ID NO: 413896 - DNA, 60 bp, Artificial
  Synthetic oligonucleotide
gcgtcttaagaatttcgtgcatgatgtaagcgcaccacttacactcttatcgaccactgt

SEQ ID NO: 413897 - DNA, 50 bp, Artificial
  Synthetic oligonucleotide
gcgtcttaatacatctaagttcattgtttgtccttgggtagtcaatatag

SEQ ID NO: 413898 - DNA, 55 bp, Artificial
  Synthetic oligonucleotide
gcgtcttacccacataaaattgatgctggcctcctagcccaagcaggaaaagact

SEQ ID NO: 413899 - DNA, 60 bp, Artificial
  Synthetic oligonucleotide
gcgtcttacgagatccttagagcagaaggtaaatgatggctcggcatcagacacgtcttc

SEQ ID NO: 413900 - DNA, 57 bp, Artificial
  Synthetic oligonucleotide
gcgtcttcaacgtggctctttccgtattaaaagccttattcccgcagagcgacgcca

SEQ ID NO: 413901 - DNA, 51 bp, Artificial
  Synthetic oligonucleotide
gcgtcttggcttgccgagaatagaggaggtcctgttcctagtgagaaggtg

SEQ ID NO: 413902 - DNA, 60 bp, Artificial
  Synthetic oligonucleotide
gcgtcttgggaagatttgttgtatgaaaatgttcacactgctgagttagatatttatgtt

SEQ ID NO: 413903 - DNA, 60 bp, Artificial
  Synthetic oligonucleotide
gcgtcttggtaacccatcttggatgtcgcaatttgctggtcggtcccgtgagattattca

SEQ ID NO: 413904 - DNA, 53 bp, Artificial
  Synthetic oligonucleotide
gcgtctttacggggttaactcatatagacgcccactttttatcccagacaaaa

SEQ ID NO: 413905 - DNA, 55 bp, Artificial
  Synthetic oligonucleotide
gcgtctttcagaattttcattgagtccatgccggaacgtttgtcaacagtggtct

SEQ ID NO: 413906 - DNA, 55 bp, Artificial
  Synthetic oligonucleotide
gcgtctttgcaagcttaccaatgccagttgcgttagcaatcttattgaccacgcc

SEQ ID NO: 413907 - DNA, 56 bp, Artificial
  Synthetic oligonucleotide
gcgtctttgtgtgagagcagggatcgggtttagactccggcacgggagttgttacc

SEQ ID NO: 413908 - DNA, 55 bp, Artificial
  Synthetic oligonucleotide
gcgtgaaaagatggcatagggacaagtatcaccactgcacgaccacctggtgggc

SEQ ID NO: 413909 - DNA, 57 bp, Artificial
  Synthetic oligonucleotide
gcgtgaaacgctccttgtacgctagaggtgaaacgactccggagagattcgtgggct

SEQ ID NO: 413910 - DNA, 57 bp, Artificial
  Synthetic oligonucleotide
gcgtgaacaagcggcgagaacaactgcctttatggcaggtgaggtgaatgcgggtga

SEQ ID NO: 413911 - DNA, 54 bp, Artificial
  Synthetic oligonucleotide
gcgtgaatcatttagagacgatcaacggacaatcaacgctatattagtaaaaga

SEQ ID NO: 413912 - DNA, 55 bp, Artificial
  Synthetic oligonucleotide
gcgtgaatccatgccccgtgcagcctatatggaagtagatggagcacccgcagcg

SEQ ID NO: 413913 - DNA, 55 bp, Artificial
  Synthetic oligonucleotide
gcgtgaatccgtgatcatggcaatttattgacatgtaatacgagcatccgcacgt

SEQ ID NO: 413914 - DNA, 60 bp, Artificial
  Synthetic oligonucleotide
gcgtgaatccgtgatcatggcagttgatcgatgtgtaatacgaacaaccacacggtagat

SEQ ID NO: 413915 - DNA, 55 bp, Artificial
  Synthetic oligonucleotide
gcgtgaatgagtatggaagaacagttaaaccaggatcttatagatcttcgtgtat

SEQ ID NO: 413916 - DNA, 55 bp, Artificial
  Synthetic oligonucleotide
gcgtgacagcaacttgagtccctcaatcagaaccattctgggttccctttgtccc

SEQ ID NO: 413917 - DNA, 57 bp, Artificial
  Synthetic oligonucleotide
gcgtgacatatggtaggataatgagtgattttgctgcacatgcttttggtattctcg

SEQ ID NO: 413918 - DNA, 55 bp, Artificial
  Synthetic oligonucleotide
gcgtgacatcggttttactattatgaccgcctcaaaacatgctgttatggagtgg

SEQ ID NO: 413919 - DNA, 52 bp, Artificial
  Synthetic oligonucleotide
gcgtgaccataaaatattctaacgataatagatacggaacgggactatggac

SEQ ID NO: 413920 - DNA, 55 bp, Artificial
  Synthetic oligonucleotide
gcgtgacgccaatggctacgcgggtacagtataatggtgtgatggttgacgctga

SEQ ID NO: 413921 - DNA, 55 bp, Artificial
  Synthetic oligonucleotide
gcgtgacgtgattgcgttggggtccggcctacgactcgacgacggacgtctgtcg

SEQ ID NO: 413922 - DNA, 55 bp, Artificial
  Synthetic oligonucleotide
gcgtgactacatgactggcctgatgaactccaccaaggagcttgttccgaacgac

SEQ ID NO: 413923 - DNA, 58 bp, Artificial
  Synthetic oligonucleotide
gcgtgactaggtgatttgaacactaaagtaacaaacaatgaggtaatatcaggtgtta

SEQ ID NO: 413924 - DNA, 57 bp, Artificial
  Synthetic oligonucleotide
gcgtgactgtaaaatggtgggacggttgggctttcgattctaccgcagagttgagcc

SEQ ID NO: 413925 - DNA, 55 bp, Artificial
  Synthetic oligonucleotide
gcgtgagaagctccttcaggcggtctgtgaacgtgaacgaaggctccagaattgg

SEQ ID NO: 413926 - DNA, 55 bp, Artificial
  Synthetic oligonucleotide
gcgtgagcatttgaagcacaaccggactcatataagttgatcagctcaccaaccg

SEQ ID NO: 413927 - DNA, 55 bp, Artificial
  Synthetic oligonucleotide
gcgtgagctttgtctaccggattaacgtcatgcattggaagctccttttcaccgc

SEQ ID NO: 413928 - DNA, 55 bp, Artificial
  Synthetic oligonucleotide
gcgtgaggcaagagcgaatatgtttaaggaagtagaggctggtgttagctggagc

SEQ ID NO: 413929 - DNA, 60 bp, Artificial
  Synthetic oligonucleotide
gcgtgagggccttgcagcatataccctgaccccgcgccctatcattcatgcagtggcccc

SEQ ID NO: 413930 - DNA, 55 bp, Artificial
  Synthetic oligonucleotide
gcgtgaggtgcttcttgtttggatactttcgttacaacggtaagttcgatgggct

SEQ ID NO: 413931 - DNA, 60 bp, Artificial
  Synthetic oligonucleotide
gcgtgaggttgctatgtctttgcctcctgttgaagacgagttacaagtgttatcttccac

SEQ ID NO: 413932 - DNA, 55 bp, Artificial
  Synthetic oligonucleotide
gcgtgagtgtcaagcgactactggcttcgatgtacagtacacgctgcctgaccag

SEQ ID NO: 413933 - DNA, 55 bp, Artificial
  Synthetic oligonucleotide
gcgtgataccttgcatcttcgtaacgcaggttttcaggatcgcgtgctacatttc

SEQ ID NO: 413934 - DNA, 60 bp, Artificial
  Synthetic oligonucleotide
gcgtgatacgtaatagcgagtctttatctgctgtcacgcgctctcttcaagccccgactg

SEQ ID NO: 413935 - DNA, 54 bp, Artificial
  Synthetic oligonucleotide
gcgtgatagatgtcgggagtctcagcgctgcaccaccctcacctccggtgttgg

SEQ ID NO: 413936 - DNA, 60 bp, Artificial
  Synthetic oligonucleotide
gcgtgatcagtacatggcgaattatcgggatatcttggcagtgaacgagcgcgtgtatga

SEQ ID NO: 413937 - DNA, 53 bp, Artificial
  Synthetic oligonucleotide
gcgtgatgataaactaaaaaactgtgtagttgatgctttgaggaatatatatg

SEQ ID NO: 413938 - DNA, 60 bp, Artificial
  Synthetic oligonucleotide
gcgtgatgatgtgaagcatactggtattgttcgttgtgtttctgatgtgaccaaggaaac

SEQ ID NO: 413939 - DNA, 53 bp, Artificial
  Synthetic oligonucleotide
gcgtgatgcatccctgatgttcgaggaagatgtcgaccagtggctgaaagata

SEQ ID NO: 413940 - DNA, 55 bp, Artificial
  Synthetic oligonucleotide
gcgtgatttaagcgctagagaggcatggatacgacagactctgcatcctacgcac

SEQ ID NO: 413941 - DNA, 56 bp, Artificial
  Synthetic oligonucleotide
gcgtgcaacctactttctcggtacagaggaatctccctttcgagagagctaccatc

SEQ ID NO: 413942 - DNA, 55 bp, Artificial
  Synthetic oligonucleotide
gcgtgcaacggtatgtcagctcccgagcccttaaatactgaagtacgctcaccta

SEQ ID NO: 413943 - DNA, 55 bp, Artificial
  Synthetic oligonucleotide
gcgtgcaagccgcaatggaggtacgtgtgccaaactttcactctttcgttgaagg

SEQ ID NO: 413944 - DNA, 59 bp, Artificial
  Synthetic oligonucleotide
gcgtgcaatgtaatagtacacgaaattattcttgtttggaaggctatggtgttatatac

SEQ ID NO: 413945 - DNA, 55 bp, Artificial
  Synthetic oligonucleotide
gcgtgcaccaaatagcaattacagcaaatgtcgttccacatttcagaaaatgtag

SEQ ID NO: 413946 - DNA, 55 bp, Artificial
  Synthetic oligonucleotide
gcgtgcaccgctgcgaagggtctcgagtggatcggccagaggctcagtcaatttg

SEQ ID NO: 413947 - DNA, 59 bp, Artificial
  Synthetic oligonucleotide
gcgtgcacgaagatatagtgtttccgagtggagttgaaaattacgagagtcacctagct

SEQ ID NO: 413948 - DNA, 50 bp, Artificial
  Synthetic oligonucleotide
gcgtgcacgtgttcgatcgtcagccgatggaggcattagtgtacgcggcc

SEQ ID NO: 413949 - DNA, 60 bp, Artificial
  Synthetic oligonucleotide
gcgtgcacgttgcaccaaatgatatcattaaaccagccgctgtagtggctggcacgagca

SEQ ID NO: 413950 - DNA, 59 bp, Artificial
  Synthetic oligonucleotide
gcgtgcactagcggtattttcttagtgagaacccctactgaaacagtactgcaagaata

SEQ ID NO: 413951 - DNA, 60 bp, Artificial
  Synthetic oligonucleotide
gcgtgcagaacatttccgaacatgagggtgtgctcaaatggctgcttgagacaatgcacc

SEQ ID NO: 413952 - DNA, 60 bp, Artificial
  Synthetic oligonucleotide
gcgtgcagataatgtgcagtgcgtattatcacaacaatcgtacgacccagacctagaggg

SEQ ID NO: 413953 - DNA, 60 bp, Artificial
  Synthetic oligonucleotide
gcgtgcatataacctgtcacccaagacgattggtgaagtgcgtgctatacgccttacagg

SEQ ID NO: 413954 - DNA, 55 bp, Artificial
  Synthetic oligonucleotide
gcgtgcatgatgactgaccatcacctacaaccaacgggtgataggcaggccgaca

SEQ ID NO: 413955 - DNA, 55 bp, Artificial
  Synthetic oligonucleotide
gcgtgccaaactcaactgtgagcggcaaggtataaacacctttgcttatggaggc

SEQ ID NO: 413956 - DNA, 55 bp, Artificial
  Synthetic oligonucleotide
gcgtgccacagatggcaattggggcaagtcgatcacctggggttcattcgtagcg

SEQ ID NO: 413957 - DNA, 57 bp, Artificial
  Synthetic oligonucleotide
gcgtgccacctacttggagactttatcagtaagcacaaccaaagggtttgcctcagc

SEQ ID NO: 413958 - DNA, 56 bp, Artificial
  Synthetic oligonucleotide
gcgtgccaggaattccgttcctgtcatgccaacgcgggtacaggggagtatggcga

SEQ ID NO: 413959 - DNA, 55 bp, Artificial
  Synthetic oligonucleotide
gcgtgccaggctcgtatcccatttcggacaacggtctcaacgagcccacttggcg

SEQ ID NO: 413960 - DNA, 55 bp, Artificial
  Synthetic oligonucleotide
gcgtgccagttggccgtgctctactcctaccggagtattctactctccgcaggcg

SEQ ID NO: 413961 - DNA, 60 bp, Artificial
  Synthetic oligonucleotide
gcgtgcccaaactactcacacttaaagaactcgccgctgcagcaatacgcaagcaaccgt

SEQ ID NO: 413962 - DNA, 55 bp, Artificial
  Synthetic oligonucleotide
gcgtgcccaagaagaattgcatagtgttttatggacctgcagatacaggcaagtc

SEQ ID NO: 413963 - DNA, 54 bp, Artificial
  Synthetic oligonucleotide
gcgtgcccaaggagaatagcagattgccgttacgggctaagtcttcgggaaagg

SEQ ID NO: 413964 - DNA, 55 bp, Artificial
  Synthetic oligonucleotide
gcgtgccgaagccggggtgcctgttgtctcattcggggatgacacgcgcgaagag

SEQ ID NO: 413965 - DNA, 55 bp, Artificial
  Synthetic oligonucleotide
gcgtgccgagtggcgtaccgaatgacttgccgagtggcgctgcgtttggtgattg

SEQ ID NO: 413966 - DNA, 53 bp, Artificial
  Synthetic oligonucleotide
gcgtgccgcccttcagagcgacgtggcgctcttgaattatgttaatcccaata

SEQ ID NO: 413967 - DNA, 59 bp, Artificial
  Synthetic oligonucleotide
gcgtgcgaccgctgcacacaggagttcatccttcccgaaggagaggcccctaagggatg

SEQ ID NO: 413968 - DNA, 60 bp, Artificial
  Synthetic oligonucleotide
gcgtgcgacggtgagctacaccaggagcttgtggagccgttgctgatggtggacgttctc

SEQ ID NO: 413969 - DNA, 59 bp, Artificial
  Synthetic oligonucleotide
gcgtgcgagaggacctccaacctccgtctcaaagaggatccttcatacgaactctctcc

SEQ ID NO: 413970 - DNA, 59 bp, Artificial
  Synthetic oligonucleotide
gcgtgcgccctgaccgataaggtgacgttgtgtgcgtagaagtagggtagggctgcggc

SEQ ID NO: 413971 - DNA, 60 bp, Artificial
  Synthetic oligonucleotide
gcgtgcgcctattagtgcgtcagtatggagccgtactgtcgagcctagagattataacat

SEQ ID NO: 413972 - DNA, 57 bp, Artificial
  Synthetic oligonucleotide
gcgtgcgtacgaacactacagtttggctaaattgcacgaaagcgagtggtgagaaat

SEQ ID NO: 413973 - DNA, 56 bp, Artificial
  Synthetic oligonucleotide
gcgtgcgtagagcgcttaaaatacgtagtagacgaaaggtggctcttctaccacgg

SEQ ID NO: 413974 - DNA, 60 bp, Artificial
  Synthetic oligonucleotide
gcgtgcgttcaagatatcggatgtctacgcacctctcatttcatccacgacgtcaccaat

SEQ ID NO: 413975 - DNA, 60 bp, Artificial
  Synthetic oligonucleotide
gcgtgctaacaaccgctcaaataacagcagatgcccaacttgcattgatgagttggacgc

SEQ ID NO: 413976 - DNA, 56 bp, Artificial
  Synthetic oligonucleotide
gcgtgctacgtgtttaaaccgacgtatgatttaatagtgattggtgaaaagcaaaa

SEQ ID NO: 413977 - DNA, 56 bp, Artificial
  Synthetic oligonucleotide
gcgtgctagactaaattatggttgtctaattcgcgtgatctttaaactacttgatg

SEQ ID NO: 413978 - DNA, 55 bp, Artificial
  Synthetic oligonucleotide
gcgtgctagcgtgcaatcaacaactgctaatggcagatccaccaaaggtgaggag

SEQ ID NO: 413979 - DNA, 59 bp, Artificial
  Synthetic oligonucleotide
gcgtgctagtctcaaaggagaaggtgctgtgcaggaagacacacgtgatctgttcgtcg

SEQ ID NO: 413980 - DNA, 60 bp, Artificial
  Synthetic oligonucleotide
gcgtgctattattgctggtatatcctgtgaattcgattgacaatacactcgttgccccaa

SEQ ID NO: 413981 - DNA, 55 bp, Artificial
  Synthetic oligonucleotide
gcgtgctcggaaaatggacactgaatctaacaatggcactgtatctgacatactc

SEQ ID NO: 413982 - DNA, 55 bp, Artificial
  Synthetic oligonucleotide
gcgtgctcttcgttttcacatagattcgaagacacttcgagaaacatgggtcaag

SEQ ID NO: 413983 - DNA, 55 bp, Artificial
  Synthetic oligonucleotide
gcgtgctgatttagttgttcgcgttcaagtcaacgctcaaccatttcatgcaggt

SEQ ID NO: 413984 - DNA, 57 bp, Artificial
  Synthetic oligonucleotide
gcgtgctgtctacaaccatgagtctgtctcccaaacagagcgccaacgttgtcggaa

SEQ ID NO: 413985 - DNA, 55 bp, Artificial
  Synthetic oligonucleotide
gcgtgctttatgagtgcccaaacacacctgagagaaagccgtatttatcttgcga

SEQ ID NO: 413986 - DNA, 53 bp, Artificial
  Synthetic oligonucleotide
gcgtgcttttaccgaacaaagcgtctcccggggaggttatccttgcgtttata

SEQ ID NO: 413987 - DNA, 55 bp, Artificial
  Synthetic oligonucleotide
gcgtggaacttatttaccaagaaacgtccgactcattattcccaatttgatggat

SEQ ID NO: 413988 - DNA, 59 bp, Artificial
  Synthetic oligonucleotide
gcgtggacaaagtacacaatgggatcaagcggctattttatactcaaactacattgtta

SEQ ID NO: 413989 - DNA, 55 bp, Artificial
  Synthetic oligonucleotide
gcgtggacaaatagcatttatgaggcaggagtatgccacaactacaccccggttc

SEQ ID NO: 413990 - DNA, 60 bp, Artificial
  Synthetic oligonucleotide
gcgtggacagtgaaactgcaagctggtcatggccagacggagctgatctgccattcacca

SEQ ID NO: 413991 - DNA, 55 bp, Artificial
  Synthetic oligonucleotide
gcgtggaccgatacatttccagaggcgagcaattttgggagcgttaaagttcggt

SEQ ID NO: 413992 - DNA, 60 bp, Artificial
  Synthetic oligonucleotide
gcgtggactcagactccatgcgacgtccaagcctggctcgcctgcctcagtgagtccagc

SEQ ID NO: 413993 - DNA, 54 bp, Artificial
  Synthetic oligonucleotide
gcgtggactgtccttccacaggggtttaaaaacagccccaccctcttcgagcaa

SEQ ID NO: 413994 - DNA, 58 bp, Artificial
  Synthetic oligonucleotide
gcgtggacttggttgttccttacgtagcaccatatgatttcacgcccgtgcggactcc

SEQ ID NO: 413995 - DNA, 57 bp, Artificial
  Synthetic oligonucleotide
gcgtggagacaaagctacattgcaagattatatactagatttaaaacccgaaacaac

SEQ ID NO: 413996 - DNA, 60 bp, Artificial
  Synthetic oligonucleotide
gcgtggagacaacgccacgaatgactgccacgattgcattgttagcccacaacaagtacc

SEQ ID NO: 413997 - DNA, 55 bp, Artificial
  Synthetic oligonucleotide
gcgtggaggtgctattgtagaatctcgtgacggagaagatagcatggattacgtc

SEQ ID NO: 413998 - DNA, 60 bp, Artificial
  Synthetic oligonucleotide
gcgtggataaattcaagcatcgaaatgattgcatgtgttgttgatcatcacacttatatg

SEQ ID NO: 413999 - DNA, 54 bp, Artificial
  Synthetic oligonucleotide
gcgtggatggagcaatttaaggttatcttaggtgttctatccgcgaaatcatct

SEQ ID NO: 414000 - DNA, 55 bp, Artificial
  Synthetic oligonucleotide
gcgtggatgttgtacgcccctccgatccccaaagacgacaagtacaattattccg

SEQ ID NO: 414001 - DNA, 58 bp, Artificial
  Synthetic oligonucleotide
gcgtggatttcaggccagactggctggacccagcttgaggactacttagtctctaacc

SEQ ID NO: 414002 - DNA, 60 bp, Artificial
  Synthetic oligonucleotide
gcgtggcactgggcgaatgcgtttgaacacaagcactcagtgctgtttcaaggacagaat

SEQ ID NO: 414003 - DNA, 60 bp, Artificial
  Synthetic oligonucleotide
gcgtggccaaactgctctatcacatgggtaccactgtcatatgatctgcgctggactaag

SEQ ID NO: 414004 - DNA, 55 bp, Artificial
  Synthetic oligonucleotide
gcgtggccattttagctggattgtgcggacgaacaccgctcacacatgcttcgcg

SEQ ID NO: 414005 - DNA, 58 bp, Artificial
  Synthetic oligonucleotide
gcgtggccggcccagttggatttcaccatagctggtactgacgtagacattacggtta

SEQ ID NO: 414006 - DNA, 50 bp, Artificial
  Synthetic oligonucleotide
gcgtggccgttgcttgccaggcataccgcgccttcctacgaattgtgacg

SEQ ID NO: 414007 - DNA, 60 bp, Artificial
  Synthetic oligonucleotide
gcgtggcgacagcacctatgcagggggtggtatgcagatggaggacgttaccgttcctcc

SEQ ID NO: 414008 - DNA, 55 bp, Artificial
  Synthetic oligonucleotide
gcgtggctgcctgcacacccgaaagggtgtgaagccttttcaaagacagggtgcg

SEQ ID NO: 414009 - DNA, 60 bp, Artificial
  Synthetic oligonucleotide
gcgtggctgcctgctcaccctatagggtgagaagcctacttattgacaaggtgcgaagag

SEQ ID NO: 414010 - DNA, 55 bp, Artificial
  Synthetic oligonucleotide
gcgtggctgtacaccgagccatgaacattggcagtgatctttggtagttaaggag

SEQ ID NO: 414011 - DNA, 60 bp, Artificial
  Synthetic oligonucleotide
gcgtggcttactgttgtgtctgctgtaactagtgcaattagtatcctcctattagtcact

SEQ ID NO: 414012 - DNA, 54 bp, Artificial
  Synthetic oligonucleotide
gcgtgggacacgaccccgcaaccataccaactcgctgtgacctggcagggctca

SEQ ID NO: 414013 - DNA, 60 bp, Artificial
  Synthetic oligonucleotide
gcgtgggagataaagtatatcattgctgacacagattttgtcagaagagtggctgaagtt

SEQ ID NO: 414014 - DNA, 52 bp, Artificial
  Synthetic oligonucleotide
gcgtgggagggggaattccccccacggtctacttaagacgccgaccgcagaa

SEQ ID NO: 414015 - DNA, 55 bp, Artificial
  Synthetic oligonucleotide
gcgtgggcagtcaacgaagcgcacaagcgtatgtcttcggatatggcacgtacgc

SEQ ID NO: 414016 - DNA, 55 bp, Artificial
  Synthetic oligonucleotide
gcgtggggaacgcatacagcacattctatgatgggtggtcgcacttctctcaaac

SEQ ID NO: 414017 - DNA, 55 bp, Artificial
  Synthetic oligonucleotide
gcgtggggatatcctgagctgctccaagagattagaaagttctatctatggttac

SEQ ID NO: 414018 - DNA, 55 bp, Artificial
  Synthetic oligonucleotide
gcgtggggctgacatctatggtggtgagaggaatttcgctaccggacagattctc

SEQ ID NO: 414019 - DNA, 55 bp, Artificial
  Synthetic oligonucleotide
gcgtggtaatcagaaaaggtagagatattttcgtataaggtggggagatcagtcg

SEQ ID NO: 414020 - DNA, 55 bp, Artificial
  Synthetic oligonucleotide
gcgtggtaatcgtcgggagggtcgttatatctggccaacctgctgtcatccccga

SEQ ID NO: 414021 - DNA, 55 bp, Artificial
  Synthetic oligonucleotide
gcgtggtaatgcgctgaaaaaggtaaccttctctctccactaactcaccggaacg

SEQ ID NO: 414022 - DNA, 55 bp, Artificial
  Synthetic oligonucleotide
gcgtggtatgtccggctttactgatgacgcatttaacgctgtaggccacttaacc

SEQ ID NO: 414023 - DNA, 55 bp, Artificial
  Synthetic oligonucleotide
gcgtggtcgagttgcatgggactatgattgctgatcctgctatgttagtcgctac

SEQ ID NO: 414024 - DNA, 51 bp, Artificial
  Synthetic oligonucleotide
gcgtggtctcaacgaattcgttgcggcaataggtatgtaccatggttatga

SEQ ID NO: 414025 - DNA, 55 bp, Artificial
  Synthetic oligonucleotide
gcgtggtctgcagcaattggttctaatacagtccataatccttctgctcctcgta

SEQ ID NO: 414026 - DNA, 55 bp, Artificial
  Synthetic oligonucleotide
gcgtggtgcaggagaaacctagcttcaaaaggctggaacatcagctcaagctcac

SEQ ID NO: 414027 - DNA, 55 bp, Artificial
  Synthetic oligonucleotide
gcgtggtgcgaagagtgttcgtaatacggctgattcgattaggtcttttgttggt

SEQ ID NO: 414028 - DNA, 57 bp, Artificial
  Synthetic oligonucleotide
gcgtggtgctcttgtatcccggtacacttgcacgccagtttgcctctccttaccccg

SEQ ID NO: 414029 - DNA, 55 bp, Artificial
  Synthetic oligonucleotide
gcgtggtggcagctccatctagaaaacgtgagtggtcacatggaggacgaggaac

SEQ ID NO: 414030 - DNA, 55 bp, Artificial
  Synthetic oligonucleotide
gcgtggtgtggttggtgtacgacgcacagccttcggggaatgccccgacagtgaa

SEQ ID NO: 414031 - DNA, 55 bp, Artificial
  Synthetic oligonucleotide
gcgtggtgttgttaggtttagtagaattggtcaacgagggtccatgtatacacgc

SEQ ID NO: 414032 - DNA, 55 bp, Artificial
  Synthetic oligonucleotide
gcgtggttaccatgcaaacaactcgacagagcaggttgacacaataatggaaaag

SEQ ID NO: 414033 - DNA, 51 bp, Artificial
  Synthetic oligonucleotide
gcgtggttaccgttcgataagctgaaaccaaaccccttgggtcccataacg

SEQ ID NO: 414034 - DNA, 52 bp, Artificial
  Synthetic oligonucleotide
gcgtggttcaggagagaaccaacgcaaatcccaggagaccattacgtacaag

SEQ ID NO: 414035 - DNA, 59 bp, Artificial
  Synthetic oligonucleotide
gcgtggttgccatgtacaaagatgtgtttggtatgtgggtcaaacctgagaaagtcaag

SEQ ID NO: 414036 - DNA, 55 bp, Artificial
  Synthetic oligonucleotide
gcgtggtttaaccaccttggtgtgctttatattatagtttatgcgtagcagggag

SEQ ID NO: 414037 - DNA, 56 bp, Artificial
  Synthetic oligonucleotide
gcgtggtttcggtgaaaatcgcaccacagccaatcggcgtgtgtgtaacagagccg

SEQ ID NO: 414038 - DNA, 50 bp, Artificial
  Synthetic oligonucleotide
gcgtggtttggacggtcgcaagattcacgtccgctcgcctcactctgcgt

SEQ ID NO: 414039 - DNA, 60 bp, Artificial
  Synthetic oligonucleotide
gcgtggttttcagaggcatgagcagaacgttagatttgatagactccacagcaaaattaa

SEQ ID NO: 414040 - DNA, 55 bp, Artificial
  Synthetic oligonucleotide
gcgtgtaactggagagacctcaacttggggaccggcccgtcagccgtatggcttc

SEQ ID NO: 414041 - DNA, 55 bp, Artificial
  Synthetic oligonucleotide
gcgtgtaaggagtggtcaaccttacgacacatttaaaataatgcgtccgtggtgc

SEQ ID NO: 414042 - DNA, 55 bp, Artificial
  Synthetic oligonucleotide
gcgtgtaatctaatgtaaacagtgaaattcgtggttatttaactccgtgagccat

SEQ ID NO: 414043 - DNA, 60 bp, Artificial
  Synthetic oligonucleotide
gcgtgtaatgggtgagtgagctgatgtggtcgccaagacatgtgccggtgtcttggtggt

SEQ ID NO: 414044 - DNA, 51 bp, Artificial
  Synthetic oligonucleotide
gcgtgtaatttagaatacgttagagaaaaggctatagtaggcgtacaagca

SEQ ID NO: 414045 - DNA, 55 bp, Artificial
  Synthetic oligonucleotide
gcgtgtaggacgacttgccggagtacccacggtttcaaatgtcgacgaacataaa

SEQ ID NO: 414046 - DNA, 55 bp, Artificial
  Synthetic oligonucleotide
gcgtgtaggcctcatcccacgcaatggcgtcgatcactgggatgcgtacaagggg

SEQ ID NO: 414047 - DNA, 55 bp, Artificial
  Synthetic oligonucleotide
gcgtgtcaggacgcaatcctagaactgtatgaacgtgacagtgtacacctaagtg

SEQ ID NO: 414048 - DNA, 53 bp, Artificial
  Synthetic oligonucleotide
gcgtgtcccgctttcttcggggggctagttgaccccggaatccacttcgcgcc

SEQ ID NO: 414049 - DNA, 60 bp, Artificial
  Synthetic oligonucleotide
gcgtgtctacccaaaatccattgtccatggtcattgaacttgatcatcctggctgacctg

SEQ ID NO: 414050 - DNA, 55 bp, Artificial
  Synthetic oligonucleotide
gcgtgtcttatattggtgaattcgtccatcgctactccaattctccgttctgctc

SEQ ID NO: 414051 - DNA, 55 bp, Artificial
  Synthetic oligonucleotide
gcgtgtgaagcgagcctctgatgtagacttgtacaaaacctgctatactggtgat

SEQ ID NO: 414052 - DNA, 60 bp, Artificial
  Synthetic oligonucleotide
gcgtgtgaatccagacgatgtacgcgcaatcaatatacgtaatgcttaagtcacgtttga

SEQ ID NO: 414053 - DNA, 52 bp, Artificial
  Synthetic oligonucleotide
gcgtgtgagtcgagccctggagtcgcgggttttcgtgttgatgacccgccaa

SEQ ID NO: 414054 - DNA, 55 bp, Artificial
  Synthetic oligonucleotide
gcgtgtggagcgtcttgaaaaccggatgaccgaaatggaaacccgctacgccagc

SEQ ID NO: 414055 - DNA, 57 bp, Artificial
  Synthetic oligonucleotide
gcgtgtgggatacggtcgagcttagcgtacaggttaataacgctatggtactaggta

SEQ ID NO: 414056 - DNA, 60 bp, Artificial
  Synthetic oligonucleotide
gcgtgtgtagagacaattggacaggaaccaacaggcctgtgctgatcatctcgcctgatc

SEQ ID NO: 414057 - DNA, 58 bp, Artificial
  Synthetic oligonucleotide
gcgtgtgtcataaccaagagcattatggatggggctggagtgaagtgctctctgatca

SEQ ID NO: 414058 - DNA, 55 bp, Artificial
  Synthetic oligonucleotide
gcgtgtgtcatgaatctcgacaattactgagccagaagcgttaattggcacctgt

SEQ ID NO: 414059 - DNA, 60 bp, Artificial
  Synthetic oligonucleotide
gcgtgtgtcgtgagtttgaaatataggggattgggcactgtccaggtatacgcgccattc

SEQ ID NO: 414060 - DNA, 60 bp, Artificial
  Synthetic oligonucleotide
gcgtgtgtgatctatcgcgagggtctggagacgccatgggataagttcgtgcgttgcatg

SEQ ID NO: 414061 - DNA, 59 bp, Artificial
  Synthetic oligonucleotide
gcgtgtgttggactgtctaccatggtgccggcgcaaagaccctagccggctcaaagggc

SEQ ID NO: 414062 - DNA, 50 bp, Artificial
  Synthetic oligonucleotide
gcgtgttaataaacgttataccaacagtacctaagggttacgcgggtacc

SEQ ID NO: 414063 - DNA, 55 bp, Artificial
  Synthetic oligonucleotide
gcgtgttcgtattgcgagtaatcctaacggtaatcttgctgaaccagagaactta

SEQ ID NO: 414064 - DNA, 60 bp, Artificial
  Synthetic oligonucleotide
gcgtgttcttgaacacccgcccccaggatctctacctatcgtgctggctgctatcgttgg

SEQ ID NO: 414065 - DNA, 60 bp, Artificial
  Synthetic oligonucleotide
gcgtgttggcaacggtgtacaatggggtgagcaagtacgctgtgggcgattcaggcagac

SEQ ID NO: 414066 - DNA, 55 bp, Artificial
  Synthetic oligonucleotide
gcgtgttgtaggtatgcttgttgctggaaaggataagaccagctgggctgacatt

SEQ ID NO: 414067 - DNA, 55 bp, Artificial
  Synthetic oligonucleotide
gcgtgtttcaattgcgtgtcgactacggctcacactacaactttgatagactccc

SEQ ID NO: 414068 - DNA, 55 bp, Artificial
  Synthetic oligonucleotide
gcgtgtttggcactatggctgaggaagttcgcgttcagggcctggatgatctcaa

SEQ ID NO: 414069 - DNA, 60 bp, Artificial
  Synthetic oligonucleotide
gcgttaaacagggtgcagcaagtgttggtaaagccgggatcgatgctggtagcaagcgat

SEQ ID NO: 414070 - DNA, 55 bp, Artificial
  Synthetic oligonucleotide
gcgttaaaggttatttattagtggtgggccactatatacttgcaggcgaagtcgt

SEQ ID NO: 414071 - DNA, 57 bp, Artificial
  Synthetic oligonucleotide
gcgttaaagtattccaccataatgaatatcatatgtatgtgcacagtaacggtatcc

SEQ ID NO: 414072 - DNA, 56 bp, Artificial
  Synthetic oligonucleotide
gcgttaaccggaacagcgtccttgggagcagaaggctttaatcagccttcaggaaa

SEQ ID NO: 414073 - DNA, 59 bp, Artificial
  Synthetic oligonucleotide
gcgttaagagccttggcgtaagcgtcattggctgattgttgtcctccccgggcagatcg

SEQ ID NO: 414074 - DNA, 55 bp, Artificial
  Synthetic oligonucleotide
gcgttaagatattaggcgagaaaatcgatatttccctcttcttacgaaatgcctg

SEQ ID NO: 414075 - DNA, 56 bp, Artificial
  Synthetic oligonucleotide
gcgttaagccggtcaggttaggtacccctctatgtgattttagcacgtatctcaaa

SEQ ID NO: 414076 - DNA, 54 bp, Artificial
  Synthetic oligonucleotide
gcgttaagtattggtgcttccagggctaaaccgtggttcaccttaatcgaacca

SEQ ID NO: 414077 - DNA, 55 bp, Artificial
  Synthetic oligonucleotide
gcgttaagtgttggacggaagacaatgacggtaacgtactcgaaacaggtgcacc

SEQ ID NO: 414078 - DNA, 54 bp, Artificial
  Synthetic oligonucleotide
gcgttaagtttggaacaacgacagtcggcggtctttgaacacttgaataaacag

SEQ ID NO: 414079 - DNA, 53 bp, Artificial
  Synthetic oligonucleotide
gcgttaatacttaagttactacgtaactttaatatttcgctccgttactcata

SEQ ID NO: 414080 - DNA, 60 bp, Artificial
  Synthetic oligonucleotide
gcgttaatcagtccgtaaagaaatccgctaaccaatcacgagctcagttcattggctctc

SEQ ID NO: 414081 - DNA, 60 bp, Artificial
  Synthetic oligonucleotide
gcgttaatgcactgggtagaagttatgtacttcctcttgatggcactcctacgggtgtga

SEQ ID NO: 414082 - DNA, 60 bp, Artificial
  Synthetic oligonucleotide
gcgttaatgttgtattctgctagcagtcatgctagtaatcctgtgtatcagaccctgcgt

SEQ ID NO: 414083 - DNA, 60 bp, Artificial
  Synthetic oligonucleotide
gcgttaattgacacgcatctatctggtgaaaattcaacgttaattgcaaactcgatgcat

SEQ ID NO: 414084 - DNA, 55 bp, Artificial
  Synthetic oligonucleotide
gcgttaattgcctttgcgtaagcgtcgttggctgtctgttgtcctcctctagcag

SEQ ID NO: 414085 - DNA, 55 bp, Artificial
  Synthetic oligonucleotide
gcgttacaaggactgctgacagcgagctttctacaagggactttccgctggggac

SEQ ID NO: 414086 - DNA, 60 bp, Artificial
  Synthetic oligonucleotide
gcgttacagaaagagatcggagaaagaacacatgcggagacagtcatggtaaaagaatac

SEQ ID NO: 414087 - DNA, 60 bp, Artificial
  Synthetic oligonucleotide
gcgttacatcaagacaaaggtacattagatattactttgacagcttacgatattggatgt

SEQ ID NO: 414088 - DNA, 52 bp, Artificial
  Synthetic oligonucleotide
gcgttacatccgcctcagctgcactgctgagactggcaccgcttccagcgct

SEQ ID NO: 414089 - DNA, 55 bp, Artificial
  Synthetic oligonucleotide
gcgttaccacttgaacgagctaagttcatggtatttggcggtgatgattctcttg

SEQ ID NO: 414090 - DNA, 55 bp, Artificial
  Synthetic oligonucleotide
gcgttaccgttcgattatcagacgagtgagaaaggtgggctaacctatgccacga

SEQ ID NO: 414091 - DNA, 60 bp, Artificial
  Synthetic oligonucleotide
gcgttacctcagcaggtgaaagcgcattagtgcgacacaatcgctacatgacagagagtt

SEQ ID NO: 414092 - DNA, 60 bp, Artificial
  Synthetic oligonucleotide
gcgttacctgcccaaatcgctagtgtgtcgtggtatggaatggttgatgcgaaataaggc

SEQ ID NO: 414093 - DNA, 60 bp, Artificial
  Synthetic oligonucleotide
gcgttactcggaagatgtgggttcctcacttaccacagcagatgaaatgcgtgtgagaaa

SEQ ID NO: 414094 - DNA, 55 bp, Artificial
  Synthetic oligonucleotide
gcgttactttaaattgtagtaatgctaatttgaccaataacaataacacaaccga

SEQ ID NO: 414095 - DNA, 55 bp, Artificial
  Synthetic oligonucleotide
gcgttactttggattgtcataacatcaactctagccttaatgacacgcaagagga

SEQ ID NO: 414096 - DNA, 55 bp, Artificial
  Synthetic oligonucleotide
gcgttagcaagagacatgaatcatttatacatccgtgttgctgtgtcacttatga

SEQ ID NO: 414097 - DNA, 51 bp, Artificial
  Synthetic oligonucleotide
gcgttagcagatgcccacaacgtgaagttgtggatgccccgttagggaagc

SEQ ID NO: 414098 - DNA, 53 bp, Artificial
  Synthetic oligonucleotide
gcgttagccccgaatgcagtcatcccgacgtccttggccttattgtgctgcgt

SEQ ID NO: 414099 - DNA, 55 bp, Artificial
  Synthetic oligonucleotide
gcgttagccttaggcatgatggtcctcaaaatggtaagaaacatggaaaagtatc

SEQ ID NO: 414100 - DNA, 60 bp, Artificial
  Synthetic oligonucleotide
gcgttaggaccaggggctacattagaggaaatgatgacagcatgtcagggagtgggagga

SEQ ID NO: 414101 - DNA, 55 bp, Artificial
  Synthetic oligonucleotide
gcgttagggaaagccgacgaaaccttgatgataggtagctccgtcggcgactatc

SEQ ID NO: 414102 - DNA, 56 bp, Artificial
  Synthetic oligonucleotide
gcgttagtaaatgccacacagacaggggttcaatcactacaactaaaccctttcaa

SEQ ID NO: 414103 - DNA, 57 bp, Artificial
  Synthetic oligonucleotide
gcgttagttgcggcaatacaaggggtggatttggatttagctgacgtagcagaaagt

SEQ ID NO: 414104 - DNA, 55 bp, Artificial
  Synthetic oligonucleotide
gcgttagttgtatcgctgctgctcgtgggcactgcgccggttgctgcccagagta

SEQ ID NO: 414105 - DNA, 55 bp, Artificial
  Synthetic oligonucleotide
gcgttatagcaatggctgaaagcacagcacttgccaatgaagggacagccgttga

SEQ ID NO: 414106 - DNA, 57 bp, Artificial
  Synthetic oligonucleotide
gcgttatagcacccaaacatgactcgaaatatgacccgactttactttcggcctcca

SEQ ID NO: 414107 - DNA, 55 bp, Artificial
  Synthetic oligonucleotide
gcgttatcaaatagtcatcactcgattgactatcaatctagcaaaaccatagagc

SEQ ID NO: 414108 - DNA, 53 bp, Artificial
  Synthetic oligonucleotide
gcgttatcaatgtatgccttgtaagcgttacatgtgcctgaggccccgaaaga

SEQ ID NO: 414109 - DNA, 59 bp, Artificial
  Synthetic oligonucleotide
gcgttatccgtgccgcaggaattgcgaacttgcgtaaacacgcctatcccgctatcact

SEQ ID NO: 414110 - DNA, 60 bp, Artificial
  Synthetic oligonucleotide
gcgttatggcgttgaacaattgtgaattgttcggtggtgggcacgtgtgtcctgagtgtc

SEQ ID NO: 414111 - DNA, 55 bp, Artificial
  Synthetic oligonucleotide
gcgttatggtatatgactattctgaacttgagcacgacccgctaaaaggccgcgc

SEQ ID NO: 414112 - DNA, 52 bp, Artificial
  Synthetic oligonucleotide
gcgttatgtatcaagggaaggacgcactggcaaatttctctggcgttcaagg

SEQ ID NO: 414113 - DNA, 60 bp, Artificial
  Synthetic oligonucleotide
gcgttattcacgctggtattatgacgtacaagattatcggcgtacctgggatgtgtccac

SEQ ID NO: 414114 - DNA, 57 bp, Artificial
  Synthetic oligonucleotide
gcgttattgttgtatatggcatgtacacatgcatctaatcctgtgtatgcgacattg

SEQ ID NO: 414115 - DNA, 55 bp, Artificial
  Synthetic oligonucleotide
gcgttatttcaactcagtgagtgggaagttgattttagtagagatggaatcaatc

SEQ ID NO: 414116 - DNA, 56 bp, Artificial
  Synthetic oligonucleotide
gcgttcaactatcgttattacagcatttgattattgtcggatttgttcttaattag

SEQ ID NO: 414117 - DNA, 60 bp, Artificial
  Synthetic oligonucleotide
gcgttcaagcaatgacacctcctcgtggcatcaacacctcaatcatccaagttattgatc

SEQ ID NO: 414118 - DNA, 60 bp, Artificial
  Synthetic oligonucleotide
gcgttcaaggcttctgccacagcgtcgttagctgtttggcaaccgcctctagcacttctt

SEQ ID NO: 414119 - DNA, 55 bp, Artificial
  Synthetic oligonucleotide
gcgttcaagtagttccgatgggaataccatatcgagattctgacgcttgcgacta

SEQ ID NO: 414120 - DNA, 55 bp, Artificial
  Synthetic oligonucleotide
gcgttcaagttctcgtacatgttagcatatacctttctattctgacttctgctat

SEQ ID NO: 414121 - DNA, 60 bp, Artificial
  Synthetic oligonucleotide
gcgttcacagacgttcacaaactcataggtgagcaaacacagtcaccattcacacacctc

SEQ ID NO: 414122 - DNA, 60 bp, Artificial
  Synthetic oligonucleotide
gcgttcaccatacccagtacaaacaatgagctaccaggaataaggtatcagtacaatgtg

SEQ ID NO: 414123 - DNA, 55 bp, Artificial
  Synthetic oligonucleotide
gcgttcaccctacgttcagcatcatgtttggctatatgcaactcatcaaccccac

SEQ ID NO: 414124 - DNA, 60 bp, Artificial
  Synthetic oligonucleotide
gcgttcactcaatcatgactggggagtcatacggcgaatcagtgaaacaagccgtgctac

SEQ ID NO: 414125 - DNA, 50 bp, Artificial
  Synthetic oligonucleotide
gcgttcactggagccacaccccgttcccaacccgtgtcacaggcgccccc

SEQ ID NO: 414126 - DNA, 53 bp, Artificial
  Synthetic oligonucleotide
gcgttcagacctcaagtactcccgacgtattattctccaagttttcggggtaa

SEQ ID NO: 414127 - DNA, 55 bp, Artificial
  Synthetic oligonucleotide
gcgttcagatacgtttatgggcccgagcaacacctatgacgtatcccttaccgac

SEQ ID NO: 414128 - DNA, 60 bp, Artificial
  Synthetic oligonucleotide
gcgttcaggaaagacggccaggtagatgaattggcgagtctcattgtcagcgtggcccga

SEQ ID NO: 414129 - DNA, 55 bp, Artificial
  Synthetic oligonucleotide
gcgttcaggccatgatgacgcgtgtgctacagagcaaccgaccccttagccagcg

SEQ ID NO: 414130 - DNA, 52 bp, Artificial
  Synthetic oligonucleotide
gcgttccaaaatctttaggaataggtaccccgtaatgccaagggtaaataca

SEQ ID NO: 414131 - DNA, 55 bp, Artificial
  Synthetic oligonucleotide
gcgttccacaataggcgttccgatccatgaccactgaccaaacccacgcctagtg

SEQ ID NO: 414132 - DNA, 55 bp, Artificial
  Synthetic oligonucleotide
gcgttccactctgatctgctatcctgttccaataaccgattattacatttcggtt

SEQ ID NO: 414133 - DNA, 60 bp, Artificial
  Synthetic oligonucleotide
gcgttccaggaggtgtggtctgggcgggacatgggagtggccaaccctcagatgctgcat

SEQ ID NO: 414134 - DNA, 52 bp, Artificial
  Synthetic oligonucleotide
gcgttcccacgaaagcgaatataagtaggtgaggttccgaatggctgagttt

SEQ ID NO: 414135 - DNA, 57 bp, Artificial
  Synthetic oligonucleotide
gcgttcccccttcgcctgggaggcaatggacagcttcaatactggccattttcctcc

SEQ ID NO: 414136 - DNA, 55 bp, Artificial
  Synthetic oligonucleotide
gcgttccgagctgtccgaactcaaacgaacggactcggatgcatatgagaagctg

SEQ ID NO: 414137 - DNA, 60 bp, Artificial
  Synthetic oligonucleotide
gcgttccgtcacatggcccgagagctgcatccggagtattatgaagatcgctgacatcga

SEQ ID NO: 414138 - DNA, 60 bp, Artificial
  Synthetic oligonucleotide
gcgttccgtttcatctgggaaccaaacaagtgtgcatagcatggtccagctcaagctgcc

SEQ ID NO: 414139 - DNA, 60 bp, Artificial
  Synthetic oligonucleotide
gcgttcctagacataattctgaatgggacggagttgggagatgatgaagacgagacagca

SEQ ID NO: 414140 - DNA, 55 bp, Artificial
  Synthetic oligonucleotide
gcgttcctatacacagtgggacgctgcggaacatttcatacaccggaaaggttcc

SEQ ID NO: 414141 - DNA, 51 bp, Artificial
  Synthetic oligonucleotide
gcgttcgaccgcttattggaacccgtttgcctcgacctgcgactctggagg

SEQ ID NO: 414142 - DNA, 51 bp, Artificial
  Synthetic oligonucleotide
gcgttcgatggcgaactcttgggacaatctgccttggtctgtcgcaccttt

SEQ ID NO: 414143 - DNA, 58 bp, Artificial
  Synthetic oligonucleotide
gcgttcgcaacatagagtagggtcgaatgctgttgtgggtccagccccccctcagccg

SEQ ID NO: 414144 - DNA, 55 bp, Artificial
  Synthetic oligonucleotide
gcgttcgcagtggtccgtagatacttgcggcgactacagctatgacgatcagtac

SEQ ID NO: 414145 - DNA, 55 bp, Artificial
  Synthetic oligonucleotide
gcgttcgcccgatcatgtacgggtttccaggttttggtcaccccagcaccagcag

SEQ ID NO: 414146 - DNA, 57 bp, Artificial
  Synthetic oligonucleotide
gcgttcgtgcgtttgcttgattgacccgatacccttgcgctgacaactctgacgtaa

SEQ ID NO: 414147 - DNA, 57 bp, Artificial
  Synthetic oligonucleotide
gcgttctaacttgggtcgattaactgtccaaaaatcgacgcatgagctgttaaagcc

SEQ ID NO: 414148 - DNA, 51 bp, Artificial
  Synthetic oligonucleotide
gcgttctagcgcgtctgaagggcgccgcgtgatgggtacatttcagatcga

SEQ ID NO: 414149 - DNA, 55 bp, Artificial
  Synthetic oligonucleotide
gcgttctatgcgtgtcggtgtctcgagaaacgctgcgggtactgggtctcagacc

SEQ ID NO: 414150 - DNA, 52 bp, Artificial
  Synthetic oligonucleotide
gcgttctgattagcataattacacttagtttagcagcacctaaaccagaagt

SEQ ID NO: 414151 - DNA, 55 bp, Artificial
  Synthetic oligonucleotide
gcgttctgcacctactaagcagtcccctacctctgctaaacgaaagcgcaggaag

SEQ ID NO: 414152 - DNA, 60 bp, Artificial
  Synthetic oligonucleotide
gcgttctgccatcgtggccgcaacttcatgattcctggagagaagcccaacttccgctac

SEQ ID NO: 414153 - DNA, 55 bp, Artificial
  Synthetic oligonucleotide
gcgttctgtggtggacatttgtgtcgctaaccctgtaatacagcttccatggaat

SEQ ID NO: 414154 - DNA, 58 bp, Artificial
  Synthetic oligonucleotide
gcgttcttcttgctgggctacttttaaggatacggaacgagagtcatgtaatggtgta

SEQ ID NO: 414155 - DNA, 55 bp, Artificial
  Synthetic oligonucleotide
gcgttcttgaaacgcgggcctgatcctacgagatgatactggtgactatcctacg

SEQ ID NO: 414156 - DNA, 55 bp, Artificial
  Synthetic oligonucleotide
gcgttcttgtcaatgtaaactctttattgcctgtattcggtgacatcacgccagc

SEQ ID NO: 414157 - DNA, 60 bp, Artificial
  Synthetic oligonucleotide
gcgttgaactattgctacctggctaatgcaggtataaactcactagtgccaacgagtctc

SEQ ID NO: 414158 - DNA, 60 bp, Artificial
  Synthetic oligonucleotide
gcgttgacattgaatacgatgaccaaagatgctgaaagaggcaaactaaagagaagagca

SEQ ID NO: 414159 - DNA, 60 bp, Artificial
  Synthetic oligonucleotide
gcgttgacgctagtcttgccaattgtggtgatgactgtgtactctatttggagaaggagg

SEQ ID NO: 414160 - DNA, 55 bp, Artificial
  Synthetic oligonucleotide
gcgttgagaaccttggcataagtgtcgtttgcagattggcaacctcctctagctg

SEQ ID NO: 414161 - DNA, 59 bp, Artificial
  Synthetic oligonucleotide
gcgttgaggtggataggcgcgaacaactgcgctcaaaccttggcggcatttttgcccaa

SEQ ID NO: 414162 - DNA, 60 bp, Artificial
  Synthetic oligonucleotide
gcgttgatcggtacttgctgtctgtattctatgacgcagtgatcgatcttcatgcagcta

SEQ ID NO: 414163 - DNA, 56 bp, Artificial
  Synthetic oligonucleotide
gcgttgatggccaactcaggacacgagttcctcgagctcgaattgaaatgttagcg

SEQ ID NO: 414164 - DNA, 55 bp, Artificial
  Synthetic oligonucleotide
gcgttgatgttgtatatggcgtgtacgcacgcctctaaccctgtgtatgctacat

SEQ ID NO: 414165 - DNA, 55 bp, Artificial
  Synthetic oligonucleotide
gcgttgcacagattacagagtaatccacgaactctaccggcttttggcccgttta

SEQ ID NO: 414166 - DNA, 55 bp, Artificial
  Synthetic oligonucleotide
gcgttgcacattggttgtccgtcggagaatatgacaaattaggtgttaggatcaa

SEQ ID NO: 414167 - DNA, 58 bp, Artificial
  Synthetic oligonucleotide
gcgttgcactccacacttacgcccgtgcactgacgggaaccgatggactgtcgttcag

SEQ ID NO: 414168 - DNA, 53 bp, Artificial
  Synthetic oligonucleotide
gcgttgcactccacacttacgcctgtgcacgtgcgggaaccgacagactttcg

SEQ ID NO: 414169 - DNA, 59 bp, Artificial
  Synthetic oligonucleotide
gcgttgcactccacacttacgtcagtgcacacgcgggaaccgatggactttcgttcacc

SEQ ID NO: 414170 - DNA, 58 bp, Artificial
  Synthetic oligonucleotide
gcgttgcactccacacttacgttatgtgtacgcgggaaccgatggactgttgttcacc

SEQ ID NO: 414171 - DNA, 51 bp, Artificial
  Synthetic oligonucleotide
gcgttgcatatcaatcattcgattgagaggattatcgtgggcactaaggca

SEQ ID NO: 414172 - DNA, 51 bp, Artificial
  Synthetic oligonucleotide
gcgttgccaatcgcgcacgggcaaaggacatttcttgacgcgcacgtaata

SEQ ID NO: 414173 - DNA, 55 bp, Artificial
  Synthetic oligonucleotide
gcgttgcctccgagtcggaggtacttgtcacggcacctctcgcacgccatgactc

SEQ ID NO: 414174 - DNA, 59 bp, Artificial
  Synthetic oligonucleotide
gcgttgcgaacacttttgcccgtaatcacacacttgattgtcgcaattagcaaactcgg

SEQ ID NO: 414175 - DNA, 59 bp, Artificial
  Synthetic oligonucleotide
gcgttgcgccgttcacctaggtgctagacgcggcgtgtttatgccttatcaatgtaact

SEQ ID NO: 414176 - DNA, 59 bp, Artificial
  Synthetic oligonucleotide
gcgttgcgctcaacactctgccccgagtgtagcttaggctgatgagtctgggcactccc

SEQ ID NO: 414177 - DNA, 55 bp, Artificial
  Synthetic oligonucleotide
gcgttgctattacaccagaagtgtatcacaccgatatggcaacatatggttacca

SEQ ID NO: 414178 - DNA, 51 bp, Artificial
  Synthetic oligonucleotide
gcgttgctcacaaggcaacgcccttttattatgtcgtcacgttcttaaacg

SEQ ID NO: 414179 - DNA, 56 bp, Artificial
  Synthetic oligonucleotide
gcgttgctgaagcagcaatcgctgtgaaggaatcagggattatcactcagttgaac

SEQ ID NO: 414180 - DNA, 60 bp, Artificial
  Synthetic oligonucleotide
gcgttgctgacaaatgggacatgaacatacaacaagttgaggggtattatcataacttga

SEQ ID NO: 414181 - DNA, 52 bp, Artificial
  Synthetic oligonucleotide
gcgttggaccaatgcttcagagtactaggaagtattttgctcagacgctatt

SEQ ID NO: 414182 - DNA, 54 bp, Artificial
  Synthetic oligonucleotide
gcgttggctgtaagtgttttatcgaaaaatcggacaattcaagagaaccacaaa

SEQ ID NO: 414183 - DNA, 55 bp, Artificial
  Synthetic oligonucleotide
gcgttggctgttcgcacaaattgtcgaggattggtgctccgagccccgcttccga

SEQ ID NO: 414184 - DNA, 51 bp, Artificial
  Synthetic oligonucleotide
gcgttgggcagagtgccgtgttgcgagaccaacgacacaaacgaatcggca

SEQ ID NO: 414185 - DNA, 50 bp, Artificial
  Synthetic oligonucleotide
gcgttgggggttcgaaaagtactccaaatggtatctagatacaggtgtca

SEQ ID NO: 414186 - DNA, 57 bp, Artificial
  Synthetic oligonucleotide
gcgttgggtcacacctgcaaggagtactacccatgtaagaccagagggcgcgagctc

SEQ ID NO: 414187 - DNA, 55 bp, Artificial
  Synthetic oligonucleotide
gcgttgggtggcgtgccttctgccatcgaacgaggttcgtggaatgcgaacggag

SEQ ID NO: 414188 - DNA, 55 bp, Artificial
  Synthetic oligonucleotide
gcgttgggttgcgaaaggccttgtggtactgcctgatagggcgcttgcgagtgcc

SEQ ID NO: 414189 - DNA, 57 bp, Artificial
  Synthetic oligonucleotide
gcgttggtaaaggcgttttctatgcgtctgatttggccaactatccgttcgagatta

SEQ ID NO: 414190 - DNA, 55 bp, Artificial
  Synthetic oligonucleotide
gcgttggtggcaatggaaaacaagcagacctgacttagacaatcttatgaagaac

SEQ ID NO: 414191 - DNA, 55 bp, Artificial
  Synthetic oligonucleotide
gcgttggtggcgtcgacatgagggctggacgtataatagcgtgggatggtcaggc

SEQ ID NO: 414192 - DNA, 54 bp, Artificial
  Synthetic oligonucleotide
gcgttggttatcgaaaggtacggttacattggacataacggaactaccgcgagc

SEQ ID NO: 414193 - DNA, 55 bp, Artificial
  Synthetic oligonucleotide
gcgttggttgttcgcttggttgtcagcttgtaaagaatgattaaccctttaacgc

SEQ ID NO: 414194 - DNA, 59 bp, Artificial
  Synthetic oligonucleotide
gcgttgtaacaagtcaatagtctacgacattgtattcatgcgaactctacttaatatgg

SEQ ID NO: 414195 - DNA, 60 bp, Artificial
  Synthetic oligonucleotide
gcgttgtactccacatctgcgtttgtgcacgcgggaaccgatggactgtcgttcacccac

SEQ ID NO: 414196 - DNA, 60 bp, Artificial
  Synthetic oligonucleotide
gcgttgtactgctgagctattgcgcgggcttggttatcaagtttcctcatctcgcaaaga

SEQ ID NO: 414197 - DNA, 55 bp, Artificial
  Synthetic oligonucleotide
gcgttgtagttcaaactcataaaggcgaaatgacgttagattattatcgtaaaat

SEQ ID NO: 414198 - DNA, 60 bp, Artificial
  Synthetic oligonucleotide
gcgttgtatctaccatacttgagtatcgtgcaagggatgtaccggataaagcgttggctg

SEQ ID NO: 414199 - DNA, 60 bp, Artificial
  Synthetic oligonucleotide
gcgttgtcactacaggaaagatattcatatcgcgtgcgtacattggatatctgcacgcca

SEQ ID NO: 414200 - DNA, 55 bp, Artificial
  Synthetic oligonucleotide
gcgttgtcatagctgcataggaatgcataggttcgctgtctcccagcctccccgc

SEQ ID NO: 414201 - DNA, 60 bp, Artificial
  Synthetic oligonucleotide
gcgttgtcgcggcaagtcgagcgaatgtcgtctcagtcactatggcttgtgtgtctgatg

SEQ ID NO: 414202 - DNA, 60 bp, Artificial
  Synthetic oligonucleotide
gcgttgtggtgcgtgatgggaacgggggtcatatgcggcagatcgtgcctgcgcgcaata

SEQ ID NO: 414203 - DNA, 56 bp, Artificial
  Synthetic oligonucleotide
gcgttgtggttttataccacgactccgtcaggcttggcttgggaactagggtgcga

SEQ ID NO: 414204 - DNA, 57 bp, Artificial
  Synthetic oligonucleotide
gcgttgtggttttataccacgactctgtcaggctaggcctaggaaccagagtacgaa

SEQ ID NO: 414205 - DNA, 55 bp, Artificial
  Synthetic oligonucleotide
gcgttgttacacttggcctctggacgcgtggggttaattgcattctgtacagagg

SEQ ID NO: 414206 - DNA, 55 bp, Artificial
  Synthetic oligonucleotide
gcgttgttactggaggtcaaactagaggaaatcttctctcgccactaccggaaag

SEQ ID NO: 414207 - DNA, 57 bp, Artificial
  Synthetic oligonucleotide
gcgtttaaaataattcctctcgtaggcctatcacataggcggtggcagttaccataa

SEQ ID NO: 414208 - DNA, 55 bp, Artificial
  Synthetic oligonucleotide
gcgtttaacagcgcctatggcagtggtacaacggtgtcccacccagccacgtcgg

SEQ ID NO: 414209 - DNA, 57 bp, Artificial
  Synthetic oligonucleotide
gcgtttaactggccgaacaccggtcaggaacgtatggagcccactgcgtacccatca

SEQ ID NO: 414210 - DNA, 55 bp, Artificial
  Synthetic oligonucleotide
gcgtttaagcgtcctactaattccaaacgagatgatgggaaacgtaggcctgtta

SEQ ID NO: 414211 - DNA, 53 bp, Artificial
  Synthetic oligonucleotide
gcgtttaagtaaaactaccaatttattatattccgggaaaatgcccgatgctg

SEQ ID NO: 414212 - DNA, 54 bp, Artificial
  Synthetic oligonucleotide
gcgtttacgtacactgactacaaagtaggtaaggacaagcgggcacttaaggac

SEQ ID NO: 414213 - DNA, 55 bp, Artificial
  Synthetic oligonucleotide
gcgtttaggatgatgctattcatcatgtccaccgcggttgcggcgaatgtggtca

SEQ ID NO: 414214 - DNA, 58 bp, Artificial
  Synthetic oligonucleotide
gcgtttaggtccatggaaatatcatgataaggggttagttggagaatcatcgatttta

SEQ ID NO: 414215 - DNA, 54 bp, Artificial
  Synthetic oligonucleotide
gcgtttagtgcatggattcttagcactcgtctgggacgacttgaggagcctggt

SEQ ID NO: 414216 - DNA, 57 bp, Artificial
  Synthetic oligonucleotide
gcgtttatcttgaaacgactcgaatttgccatattgcaagtcgtttttgtatcggtg

SEQ ID NO: 414217 - DNA, 55 bp, Artificial
  Synthetic oligonucleotide
gcgtttatggacatcattaccttgcacaggcctgcattaacgtctcggcggggtg

SEQ ID NO: 414218 - DNA, 54 bp, Artificial
  Synthetic oligonucleotide
gcgtttatggagggggccattgtgtccacatctcaggccccaaggcctatcaac

SEQ ID NO: 414219 - DNA, 60 bp, Artificial
  Synthetic oligonucleotide
gcgtttcaaaggcactgtgaagattgaacgtgttcaggcagatgttagcatggacggtgc

SEQ ID NO: 414220 - DNA, 58 bp, Artificial
  Synthetic oligonucleotide
gcgtttcaatgcagttgcttgaggcgtcacaaaccgctcaatcgggaactcgactgat

SEQ ID NO: 414221 - DNA, 60 bp, Artificial
  Synthetic oligonucleotide
gcgtttcacactggaactgtgattatatcagcggagtataatcgatcatctactaatacg

SEQ ID NO: 414222 - DNA, 57 bp, Artificial
  Synthetic oligonucleotide
gcgtttcagcacccattctaccaaactttcaccccaccccgtgcatccatatacctg

SEQ ID NO: 414223 - DNA, 56 bp, Artificial
  Synthetic oligonucleotide
gcgtttccattttgaatctgggacaaaagagatacaccaagaccacttattggtgg

SEQ ID NO: 414224 - DNA, 58 bp, Artificial
  Synthetic oligonucleotide
gcgtttcccactcttggcaacattctaaaggtcctaattatgctcagccacaaatttc

SEQ ID NO: 414225 - DNA, 57 bp, Artificial
  Synthetic oligonucleotide
gcgtttccttgtaaatagaccctcacatctatttactaacatgttactaacatgtcc

SEQ ID NO: 414226 - DNA, 57 bp, Artificial
  Synthetic oligonucleotide
gcgtttcgcgagtagtatttccaccatattttgatcaatggacctacgttcctatgt

SEQ ID NO: 414227 - DNA, 60 bp, Artificial
  Synthetic oligonucleotide
gcgtttcgggcttgagccaatcagttattcatctcaggatctttccttaatgtgactact

SEQ ID NO: 414228 - DNA, 55 bp, Artificial
  Synthetic oligonucleotide
gcgtttctaaagaacatctaacaccgatttataacctactaagtgttatgtcact

SEQ ID NO: 414229 - DNA, 54 bp, Artificial
  Synthetic oligonucleotide
gcgtttctaattgggtttgatcaagattatgatttagttggaaagctaagtcat

SEQ ID NO: 414230 - DNA, 60 bp, Artificial
  Synthetic oligonucleotide
gcgtttctacaattgactattggctcggtccgctgttgccaaattgtgcgcatgctgtta

SEQ ID NO: 414231 - DNA, 52 bp, Artificial
  Synthetic oligonucleotide
gcgtttctactgggagttatgataatcagacgcattataggtttttaagtga

SEQ ID NO: 414232 - DNA, 50 bp, Artificial
  Synthetic oligonucleotide
gcgtttctctggcgaggctagcacatttctctttaacacgatggcaaaca

SEQ ID NO: 414233 - DNA, 58 bp, Artificial
  Synthetic oligonucleotide
gcgtttctggaaggtcaacaatcatgtggtctataaccatcaggaagcagggaaatat

SEQ ID NO: 414234 - DNA, 55 bp, Artificial
  Synthetic oligonucleotide
gcgtttctgtgttaagtccgtgtacattctcggtaagatctggatggatgagaac

SEQ ID NO: 414235 - DNA, 59 bp, Artificial
  Synthetic oligonucleotide
gcgtttctttcatcggaaaagacggtgcaccttactcatcagtaacaattcaatcagcc

SEQ ID NO: 414236 - DNA, 58 bp, Artificial
  Synthetic oligonucleotide
gcgtttgatcttaaaagatggatttatctacattcaattggaaaagtcgctgtagaag

SEQ ID NO: 414237 - DNA, 55 bp, Artificial
  Synthetic oligonucleotide
gcgtttgattacactaattatgatggtagcatacacccaatttggtttgaggctc

SEQ ID NO: 414238 - DNA, 55 bp, Artificial
  Synthetic oligonucleotide
gcgtttgcaccccggcgcgaacgctctaccctcctccctcgaggcaggcgcaacg

SEQ ID NO: 414239 - DNA, 55 bp, Artificial
  Synthetic oligonucleotide
gcgtttgcagtcttttacaaggggttcgcacattttgtgcttggtgtgtagaccg

SEQ ID NO: 414240 - DNA, 55 bp, Artificial
  Synthetic oligonucleotide
gcgtttgcatcaatgggacttgtgcagtagtaatgacagatgggagtgcttcagg

SEQ ID NO: 414241 - DNA, 52 bp, Artificial
  Synthetic oligonucleotide
gcgtttgctccggggcaagacccggtaaaggtgcgactgaccacatatccta

SEQ ID NO: 414242 - DNA, 50 bp, Artificial
  Synthetic oligonucleotide
gcgtttggaacgatgtgtggatatacaataacccgtggatcagagtgaag

SEQ ID NO: 414243 - DNA, 55 bp, Artificial
  Synthetic oligonucleotide
gcgtttggaatgcaacgaatgcactatagaaatggggatccacagacaccgttcc

SEQ ID NO: 414244 - DNA, 58 bp, Artificial
  Synthetic oligonucleotide
gcgtttggaatgcaacgaatgcattatagaaacggagacccgcagacaccatttcaga

SEQ ID NO: 414245 - DNA, 60 bp, Artificial
  Synthetic oligonucleotide
gcgtttggatctagttcccatgcgcgatgtttcatgcgcttggatgacgtctttaagacg

SEQ ID NO: 414246 - DNA, 51 bp, Artificial
  Synthetic oligonucleotide
gcgtttggtaacgattaccgcatcgtattgcgaccgcgccgtttcaattgc

SEQ ID NO: 414247 - DNA, 55 bp, Artificial
  Synthetic oligonucleotide
gcgtttggttttaaggacataatccgagccatccggaagattgcggtaccagtgg

SEQ ID NO: 414248 - DNA, 57 bp, Artificial
  Synthetic oligonucleotide
gcgtttgtagcatagtctgcctggttatcaacttctttcaactagtagactgggttt

SEQ ID NO: 414249 - DNA, 55 bp, Artificial
  Synthetic oligonucleotide
gcgttttaattgttggtccacatttaaggacgtcgatccttcgtcatgtaacggc

SEQ ID NO: 414250 - DNA, 57 bp, Artificial
  Synthetic oligonucleotide
gcgttttatacatgaaatcgtcaataaggattaaagatatacttccttgttaatatg

SEQ ID NO: 414251 - DNA, 60 bp, Artificial
  Synthetic oligonucleotide
gcgttttatcaaagaatagagccatcgaagagaaccataaagagattatacatcttaaga

SEQ ID NO: 414252 - DNA, 60 bp, Artificial
  Synthetic oligonucleotide
gcgttttcactccacagttactctccaggtgaaatcaatagggtggctgcatgcctcaga

SEQ ID NO: 414253 - DNA, 58 bp, Artificial
  Synthetic oligonucleotide
gcgttttcctctttgtcgaggaaatctttatagcttgcaccctcacctggattgcaaa

SEQ ID NO: 414254 - DNA, 53 bp, Artificial
  Synthetic oligonucleotide
gcgttttctaattcagagtccgcatcggtatgagacattcctattgaactttt

SEQ ID NO: 414255 - DNA, 55 bp, Artificial
  Synthetic oligonucleotide
gcgttttctttgtgttttgcgtcttagtgtattcatggacaaatctggatctccc

SEQ ID NO: 414256 - DNA, 55 bp, Artificial
  Synthetic oligonucleotide
gcgttttgacctgttgcctgcttatgtctgctttaatccgcatatgggcggtcaa

SEQ ID NO: 414257 - DNA, 54 bp, Artificial
  Synthetic oligonucleotide
gcgttttgacgcagagttcacctttgttgcgtgcacgcctaccgggggggttgt

SEQ ID NO: 414258 - DNA, 60 bp, Artificial
  Synthetic oligonucleotide
gcgttttgctagaatatgcccaaacgtagacactggagaacctacacaactgatgccgtg

SEQ ID NO: 414259 - DNA, 55 bp, Artificial
  Synthetic oligonucleotide
gcgtttttcaacacgttagttagaggtaagatttacgcatcgcgttcggtggaca

SEQ ID NO: 414260 - DNA, 57 bp, Artificial
  Synthetic oligonucleotide
gcgtttttttgttcctgagcatggcactatgtttactcttgcgcttgttcgttttcc

SEQ ID NO: 414261 - DNA, 58 bp, Artificial
  Synthetic oligonucleotide
gctaaaaattttttgactagcggaggctaaaaggagagagatgggtgcgagagcgtca

SEQ ID NO: 414262 - DNA, 60 bp, Artificial
  Synthetic oligonucleotide
gctaaaacataccaagaatatagtgcagagctctcaaagaaaataagtagtcaagagatt

SEQ ID NO: 414263 - DNA, 54 bp, Artificial
  Synthetic oligonucleotide
gctaaaaccataatagtacagttgaaccaaactgtaaaaattaactgtacaaga

SEQ ID NO: 414264 - DNA, 55 bp, Artificial
  Synthetic oligonucleotide
gctaaaagaacggtcgtcggtaattgcgtaaccgaacatatcaagatattcgtag

SEQ ID NO: 414265 - DNA, 55 bp, Artificial
  Synthetic oligonucleotide
gctaaaaggacgtgacctaaaactcagacatcgtatgttggtgtaatgcctccag

SEQ ID NO: 414266 - DNA, 60 bp, Artificial
  Synthetic oligonucleotide
gctaaaaggagaagccatgcatggacaagtagattgcagtccagggatatggcaattaga

SEQ ID NO: 414267 - DNA, 60 bp, Artificial
  Synthetic oligonucleotide
gctaaaaggggaagccatacatggacaagtagattgtagtccaggaatatggcagttaga

SEQ ID NO: 414268 - DNA, 60 bp, Artificial
  Synthetic oligonucleotide
gctaaaagtcccgaatgcagaaacagataatcagtccggtccagttgcacatcaagtgat

SEQ ID NO: 414269 - DNA, 53 bp, Artificial
  Synthetic oligonucleotide
gctaaaatttgtccatgacgctcatcgagtatttgagcacgtttaggtacatc

SEQ ID NO: 414270 - DNA, 55 bp, Artificial
  Synthetic oligonucleotide
gctaaacagactatggctgccggcccacacagtcttagttatgccctaacgcctg

SEQ ID NO: 414271 - DNA, 52 bp, Artificial
  Synthetic oligonucleotide
gctaaacagcaagttttccctaccggaaccacggtttccgaagtgaaggcca

SEQ ID NO: 414272 - DNA, 55 bp, Artificial
  Synthetic oligonucleotide
gctaaacatataaaggcatggtgtccacgcccaccaagagccgtaccttatcagc

SEQ ID NO: 414273 - DNA, 56 bp, Artificial
  Synthetic oligonucleotide
gctaaacatcggaacccttgatcactttttcgcaaatgtctaatacggatttacag

SEQ ID NO: 414274 - DNA, 60 bp, Artificial
  Synthetic oligonucleotide
gctaaacatgtgaagaagctgttagaactgaaagtcattagaccttcaaagtctaagcac

SEQ ID NO: 414275 - DNA, 53 bp, Artificial
  Synthetic oligonucleotide
gctaaaccacagcccttgtggtggaactactcagtacaaccagtgcacgcctt

SEQ ID NO: 414276 - DNA, 55 bp, Artificial
  Synthetic oligonucleotide
gctaaaccagagctaataatagacttctagacagccatgcaatccagagctgtca

SEQ ID NO: 414277 - DNA, 51 bp, Artificial
  Synthetic oligonucleotide
gctaaacccactcaatagtgccagcgcccaaaggatttcctatacactttc

SEQ ID NO: 414278 - DNA, 54 bp, Artificial
  Synthetic oligonucleotide
gctaaaccgtcgccaccttggtttccgcaggggcttccgaggcgaatatagttc

SEQ ID NO: 414279 - DNA, 59 bp, Artificial
  Synthetic oligonucleotide
gctaaacctggactcaagttagcttctattgcagtagaagtgttcagacttattaagaa

SEQ ID NO: 414280 - DNA, 55 bp, Artificial
  Synthetic oligonucleotide
gctaaacgaggggccgagtgctggtgcaaggaatacgttcttgaccctaaggggc

SEQ ID NO: 414281 - DNA, 59 bp, Artificial
  Synthetic oligonucleotide
gctaaacggaacgggggaatacaatggatggacgtgtcagaaggaactgtgatgaatga

SEQ ID NO: 414282 - DNA, 60 bp, Artificial
  Synthetic oligonucleotide
gctaaactagcaaacgtcgtgagaaagatgatgactaactcacaagatacagagctctcc

SEQ ID NO: 414283 - DNA, 51 bp, Artificial
  Synthetic oligonucleotide
gctaaactcaaagcgaagttttccgccctccggaacccacaccctcccgac

SEQ ID NO: 414284 - DNA, 53 bp, Artificial
  Synthetic oligonucleotide
gctaaactcaggactctgagaagattgctcaaagatggagaaccacacgttag

SEQ ID NO: 414285 - DNA, 60 bp, Artificial
  Synthetic oligonucleotide
gctaaactccaaaaggacagatttatggctggtgattactctgatttggtctatcaatca

SEQ ID NO: 414286 - DNA, 57 bp, Artificial
  Synthetic oligonucleotide
gctaaactcgcaccagcacacccgctagcagaccaggttaagatcataacgcactcc

SEQ ID NO: 414287 - DNA, 55 bp, Artificial
  Synthetic oligonucleotide
gctaaactcgccaaacatagaggcgtgcgggtacagtgatagagtgatgcagctc

SEQ ID NO: 414288 - DNA, 57 bp, Artificial
  Synthetic oligonucleotide
gctaaagaacaattgtgggtcacagtttattatggggtacctgtatggaaagaagca

SEQ ID NO: 414289 - DNA, 55 bp, Artificial
  Synthetic oligonucleotide
gctaaagacatcagtgctgatatccttgaggcaaggcatgactattttggtcggg

SEQ ID NO: 414290 - DNA, 60 bp, Artificial
  Synthetic oligonucleotide
gctaaagacctccttacattccacgacctgatatctaacagagccaagttgattctgcct

SEQ ID NO: 414291 - DNA, 60 bp, Artificial
  Synthetic oligonucleotide
gctaaagagtctgaacatatctgggacatttgctgttcgcacatctgacatgatgaccga

SEQ ID NO: 414292 - DNA, 50 bp, Artificial
  Synthetic oligonucleotide
gctaaagagttcacagaggcatctgtttcgacatcgcacggggtccaaac

SEQ ID NO: 414293 - DNA, 53 bp, Artificial
  Synthetic oligonucleotide
gctaaagataagtcgcgcaacgcagcttcatcggatagattagcgaagtacaa

SEQ ID NO: 414294 - DNA, 55 bp, Artificial
  Synthetic oligonucleotide
gctaaagcacagatagctgaggcacacaacatatgggcttctcaagcttgtgtgc

SEQ ID NO: 414295 - DNA, 55 bp, Artificial
  Synthetic oligonucleotide
gctaaagcacctttgaagacaagacgtgtcttggagttctacttacaggacaagg

SEQ ID NO: 414296 - DNA, 60 bp, Artificial
  Synthetic oligonucleotide
gctaaagcagagtctacagtccttgaaggtgaaccagtctggcacagacgacaatggtac

SEQ ID NO: 414297 - DNA, 55 bp, Artificial
  Synthetic oligonucleotide
gctaaagcagttacagctcccgacactgccgaggaaagtgaaactagaagatggg

SEQ ID NO: 414298 - DNA, 54 bp, Artificial
  Synthetic oligonucleotide
gctaaagcatataaggaagaggtgcataatgtttgggctacacatgcttgtgta

SEQ ID NO: 414299 - DNA, 59 bp, Artificial
  Synthetic oligonucleotide
gctaaagccgccaggaataggttttcgtgtttcatgaactcagtcttccagctctcgga

SEQ ID NO: 414300 - DNA, 60 bp, Artificial
  Synthetic oligonucleotide
gctaaagcctacaaagcagaggcacataatatctgggctacacatgcctgcgtacctaca

SEQ ID NO: 414301 - DNA, 55 bp, Artificial
  Synthetic oligonucleotide
gctaaagctgaacactgtacgcacctgtgtttaccaactgacagtggataaccgc

SEQ ID NO: 414302 - DNA, 55 bp, Artificial
  Synthetic oligonucleotide
gctaaaggaactccgagacgccattggacactggggcaggtgaaccgcctgaggg

SEQ ID NO: 414303 - DNA, 57 bp, Artificial
  Synthetic oligonucleotide
gctaaaggcacggatctacaaaacgacgaatactgcacaaagggcggcgatacttac

SEQ ID NO: 414304 - DNA, 55 bp, Artificial
  Synthetic oligonucleotide
gctaaaggtgccaaatgcattgacagacgataggtcaaaacccactcaaggtcag

SEQ ID NO: 414305 - DNA, 56 bp, Artificial
  Synthetic oligonucleotide
gctaaaggtggacctcacaccgcacgtaccattcaaggtatgtgacttccacgcaa

SEQ ID NO: 414306 - DNA, 55 bp, Artificial
  Synthetic oligonucleotide
gctaaagtaaaggttaccaatagaaatatgggcatccatgagtgaacccattaac

SEQ ID NO: 414307 - DNA, 60 bp, Artificial
  Synthetic oligonucleotide
gctaaagtcacacctgtcgtcgtcactatggcttcctcactcagagctgcgatctccaag

SEQ ID NO: 414308 - DNA, 60 bp, Artificial
  Synthetic oligonucleotide
gctaaagtcataatagtgcagctaaaagaatctgtagaaattaattgtacaagacccagc

SEQ ID NO: 414309 - DNA, 58 bp, Artificial
  Synthetic oligonucleotide
gctaaagtcatagcacctccagtttattatggaacccccagtggctctttggtgtcca

SEQ ID NO: 414310 - DNA, 55 bp, Artificial
  Synthetic oligonucleotide
gctaaagttgctgtagaaaaccctgttgttgaacatgtcaggcttagaaatgcag

SEQ ID NO: 414311 - DNA, 60 bp, Artificial
  Synthetic oligonucleotide
gctaaatatgagaatcatactgaaaatgccttgttattgtatatggcctgtactcatgcc

SEQ ID NO: 414312 - DNA, 58 bp, Artificial
  Synthetic oligonucleotide
gctaaatccaattggaagagtgatttctctaatctaaacttagccccagctgttcaaa

SEQ ID NO: 414313 - DNA, 55 bp, Artificial
  Synthetic oligonucleotide
gctaaatcgtgcggtcaggaccggttttacgtaccacagaggccggattcacgga

SEQ ID NO: 414314 - DNA, 56 bp, Artificial
  Synthetic oligonucleotide
gctaaatctcaccccgtgttagttgcaggtccaggcgacccgtcaccctacgtgac

SEQ ID NO: 414315 - DNA, 60 bp, Artificial
  Synthetic oligonucleotide
gctaaatctcagagaaaatgatccagttatgtcaattggtgattctgatggcagaagggg

SEQ ID NO: 414316 - DNA, 55 bp, Artificial
  Synthetic oligonucleotide
gctaaatctgtggtttcacctcagaatttcgtttccacttacgattctctcctga

SEQ ID NO: 414317 - DNA, 54 bp, Artificial
  Synthetic oligonucleotide
gctaaatgggctgggccgaattttttcttgggccgcaatgaaaaagcgcaaacc

SEQ ID NO: 414318 - DNA, 55 bp, Artificial
  Synthetic oligonucleotide
gctaaattaactcgtgttggtttatctttcatgtttgtcgtcttaggtgtatggg

SEQ ID NO: 414319 - DNA, 60 bp, Artificial
  Synthetic oligonucleotide
gctaaattacgaatcaaacatggcgaaattgcacaacgacggaatgatgacccaatggtg

SEQ ID NO: 414320 - DNA, 60 bp, Artificial
  Synthetic oligonucleotide
gctaaattagctgctatgtataatttggctcgtgacgaatgtatgtcatattcgcaccgt

SEQ ID NO: 414321 - DNA, 55 bp, Artificial
  Synthetic oligonucleotide
gctaaattatattgttccatggcatatctgcgctgtccctcgttcatccgctccc

SEQ ID NO: 414322 - DNA, 60 bp, Artificial
  Synthetic oligonucleotide
gctaaattggcaaatgtagtaagaaagatgatgactaactcacaagatactgaactctcc

SEQ ID NO: 414323 - DNA, 55 bp, Artificial
  Synthetic oligonucleotide
gctaaattggcgaatgttgtgaggaaaatgatgactaattcacgagacaccgaac

SEQ ID NO: 414324 - DNA, 58 bp, Artificial
  Synthetic oligonucleotide
gctaacaaagggcgaaagccaaaaatggatgcgcacgagaaggggggtatgtacatgc

SEQ ID NO: 414325 - DNA, 55 bp, Artificial
  Synthetic oligonucleotide
gctaacaaccagagggagacaaactactaaagacaataaagggatgaggattcga

SEQ ID NO: 414326 - DNA, 53 bp, Artificial
  Synthetic oligonucleotide
gctaacaactctgggtaacacacacacccttaaaggaatctcgttagccgaca

SEQ ID NO: 414327 - DNA, 60 bp, Artificial
  Synthetic oligonucleotide
gctaacactacagtacaaagctgacagggagggacattgtccagttcactcccactccac

SEQ ID NO: 414328 - DNA, 55 bp, Artificial
  Synthetic oligonucleotide
gctaacacttatgcccaaagaactctccaagtcaccgcatcgtctggaatcactc

SEQ ID NO: 414329 - DNA, 57 bp, Artificial
  Synthetic oligonucleotide
gctaacagataatggagaagaccttgtagactttatagacagacacccgggggatgg

SEQ ID NO: 414330 - DNA, 55 bp, Artificial
  Synthetic oligonucleotide
gctaacaggagcctcgcatgggcaaggttgtaggatcgtacgcctcagtcgtgcg

SEQ ID NO: 414331 - DNA, 60 bp, Artificial
  Synthetic oligonucleotide
gctaacatcaaatcttaccttcaccgtttactcagatctacttgcattcgtatcggctga

SEQ ID NO: 414332 - DNA, 60 bp, Artificial
  Synthetic oligonucleotide
gctaacatctataggggatgttacagctgatcactttaagctagtagaaatggtccaatg

SEQ ID NO: 414333 - DNA, 55 bp, Artificial
  Synthetic oligonucleotide
gctaacatgcgaaaccttgacggtaagcccataagtgaaggtagcaacttggtca

SEQ ID NO: 414334 - DNA, 56 bp, Artificial
  Synthetic oligonucleotide
gctaaccattacggcgtataagagagaagggtgtgatagactaagggtgcacgagg

SEQ ID NO: 414335 - DNA, 60 bp, Artificial
  Synthetic oligonucleotide
gctaacccacagatggttagagaggcctacgcagcaggactcattaagacgatctacccg

SEQ ID NO: 414336 - DNA, 55 bp, Artificial
  Synthetic oligonucleotide
gctaacccagagtgcaaggccatcttaaaagccatgggcccaggagccaccttag

SEQ ID NO: 414337 - DNA, 55 bp, Artificial
  Synthetic oligonucleotide
gctaacccagattgcaagaccatcttaagggcattaggaccaggggcttcattag

SEQ ID NO: 414338 - DNA, 55 bp, Artificial
  Synthetic oligonucleotide
gctaacccttttctagctgatgcgcgtcgacccattgcagtacgctcttgaattg

SEQ ID NO: 414339 - DNA, 55 bp, Artificial
  Synthetic oligonucleotide
gctaaccgagagtatgacccaagtcgtaagtattggtggacgtaatctagccgac

SEQ ID NO: 414340 - DNA, 60 bp, Artificial
  Synthetic oligonucleotide
gctaaccgcaccgacgcaatgcttggtacacacatcatatgggacttgggtttgcagtca

SEQ ID NO: 414341 - DNA, 55 bp, Artificial
  Synthetic oligonucleotide
gctaaccgttcggtcgctggttcgagtccagcaagaaccataaataaatgtgcca

SEQ ID NO: 414342 - DNA, 60 bp, Artificial
  Synthetic oligonucleotide
gctaacctgaatggactgtgatatagtacagtccgcaaccatgttcccttaccaaccatc

SEQ ID NO: 414343 - DNA, 54 bp, Artificial
  Synthetic oligonucleotide
gctaacgaactgaaagcagtcctcggcatgtgtgagcaaccagttcaacgaaca

SEQ ID NO: 414344 - DNA, 60 bp, Artificial
  Synthetic oligonucleotide
gctaacgataacatattcatcgtccatgatgtgggaaatcaacggtccggaatcagtgct

SEQ ID NO: 414345 - DNA, 55 bp, Artificial
  Synthetic oligonucleotide
gctaacgattcaatcagaaacacaatttcttacaggtataaattcgcaagcagct

SEQ ID NO: 414346 - DNA, 60 bp, Artificial
  Synthetic oligonucleotide
gctaacgcagcactgggagcctggtctgatgagcaaaacaaatgggcaagtgcgaaggaa

SEQ ID NO: 414347 - DNA, 55 bp, Artificial
  Synthetic oligonucleotide
gctaacgtcggcaaaattggctgttatgcgtttagagtgaacctatagagatttg

SEQ ID NO: 414348 - DNA, 54 bp, Artificial
  Synthetic oligonucleotide
gctaacgtgctaattgggcaaggagacgtagtgttggtaatgaaacggaaacgg

SEQ ID NO: 414349 - DNA, 55 bp, Artificial
  Synthetic oligonucleotide
gctaactaatggggacctttggtatgtcacttctggtataccttcaggatttccc

SEQ ID NO: 414350 - DNA, 58 bp, Artificial
  Synthetic oligonucleotide
gctaactacgctttcagcgtaccgcggtgcgggtcgcgtgaagcgggcgtcacaacgc

SEQ ID NO: 414351 - DNA, 54 bp, Artificial
  Synthetic oligonucleotide
gctaactcctgaaaagttagatttaggtgaaataaccttgaattacaaagaaga

SEQ ID NO: 414352 - DNA, 60 bp, Artificial
  Synthetic oligonucleotide
gctaactctgtagatctatctgatgtaaatcgtgatctggtattaactagtaataggaat

SEQ ID NO: 414353 - DNA, 57 bp, Artificial
  Synthetic oligonucleotide
gctaactgactacagttgagaaggggtggaccgtaaaccactggttggctgactaca

SEQ ID NO: 414354 - DNA, 50 bp, Artificial
  Synthetic oligonucleotide
gctaactgctctacatttctcacagtcaattcagctgcctctattgatcc

SEQ ID NO: 414355 - DNA, 56 bp, Artificial
  Synthetic oligonucleotide
gctaacttaatgcggtagtcttcgaaattcagtgtatgtgggttcggtgtcgtttc

SEQ ID NO: 414356 - DNA, 57 bp, Artificial
  Synthetic oligonucleotide
gctaacttgctatccgtagaggaagcttgtaacctgacgcccccacattcggccaaa

SEQ ID NO: 414357 - DNA, 55 bp, Artificial
  Synthetic oligonucleotide
gctaagaaaggcagacaggcacttactgccttgggaaaacacgtgtggtcaggca

SEQ ID NO: 414358 - DNA, 55 bp, Artificial
  Synthetic oligonucleotide
gctaagaacaacagcatcttctttagttggacactgtatgttgcctagtaactct

SEQ ID NO: 414359 - DNA, 55 bp, Artificial
  Synthetic oligonucleotide
gctaagaagcccattcatgtgggtgtggttattaataaaacattgcgcatgcttc

SEQ ID NO: 414360 - DNA, 60 bp, Artificial
  Synthetic oligonucleotide
gctaagaatgataggttgatgcgtatatcgctcggcatcccagatcttgcgaacgccttg

SEQ ID NO: 414361 - DNA, 55 bp, Artificial
  Synthetic oligonucleotide
gctaagaccattgcagcaccacaagggctcccagtgtatataacacctggatctg

SEQ ID NO: 414362 - DNA, 55 bp, Artificial
  Synthetic oligonucleotide
gctaagaccttgatcataacaagtaaccgcgaacctcgtgattggtacaagggcg

SEQ ID NO: 414363 - DNA, 60 bp, Artificial
  Synthetic oligonucleotide
gctaagacgtgaggcacttgaagagttcgtgacccgtaatcctaactatgtcatgttcga

SEQ ID NO: 414364 - DNA, 60 bp, Artificial
  Synthetic oligonucleotide
gctaagagcatggaatatgatgctgttgccactacacactcctggatccccaagaggaac

SEQ ID NO: 414365 - DNA, 59 bp, Artificial
  Synthetic oligonucleotide
gctaagaggaaactagatgataatgactagcaaaattaataagcataagttcttactta

SEQ ID NO: 414366 - DNA, 60 bp, Artificial
  Synthetic oligonucleotide
gctaagaggagatgccgtatgcccacattcaggcggagcgctatatacgtttaggaaagt

SEQ ID NO: 414367 - DNA, 55 bp, Artificial
  Synthetic oligonucleotide
gctaagagggacgcacttcaggtggctaccttttcctggaccagttcaggttcgg

SEQ ID NO: 414368 - DNA, 58 bp, Artificial
  Synthetic oligonucleotide
gctaagagtcagcacgctaagagaccaggcagctgccctcaaaccagcatcatccaca

SEQ ID NO: 414369 - DNA, 55 bp, Artificial
  Synthetic oligonucleotide
gctaagagtggtacactcagggtcgcccaagtggcggccctcataaataccattt

SEQ ID NO: 414370 - DNA, 60 bp, Artificial
  Synthetic oligonucleotide
gctaagatccgatccaagagtattacgtgaatttatcaatcaagacaatccaataattcg

SEQ ID NO: 414371 - DNA, 56 bp, Artificial
  Synthetic oligonucleotide
gctaagatcggaactaccgattttacatggacaaaccttcaaattgatacgtgtgg

SEQ ID NO: 414372 - DNA, 56 bp, Artificial
  Synthetic oligonucleotide
gctaagcaattgtacgagtatgtatcgtgttctcctgttaaagggggaggaccacg

SEQ ID NO: 414373 - DNA, 59 bp, Artificial
  Synthetic oligonucleotide
gctaagcactttgggctcagaatatctcgataggctcggacctggggcacaaaggtcgg

SEQ ID NO: 414374 - DNA, 51 bp, Artificial
  Synthetic oligonucleotide
gctaagcagaaaacagcacacaccaatgaaattagaatgctggcagggtta

SEQ ID NO: 414375 - DNA, 55 bp, Artificial
  Synthetic oligonucleotide
gctaagcatcgaagcagaacttcagttgcttactttgagagatattgtaagagtt

SEQ ID NO: 414376 - DNA, 55 bp, Artificial
  Synthetic oligonucleotide
gctaagcgaaagattctgcgtgatgaacagatgctcagagcacatttcgtttcct

SEQ ID NO: 414377 - DNA, 55 bp, Artificial
  Synthetic oligonucleotide
gctaagcgcctgggccttttattgacacctagacagcaaaagatggaggtcgagg

SEQ ID NO: 414378 - DNA, 51 bp, Artificial
  Synthetic oligonucleotide
gctaagcgttgcaggaggcatgaggctaaacaatgacacactgatactaga

SEQ ID NO: 414379 - DNA, 60 bp, Artificial
  Synthetic oligonucleotide
gctaagctaattgtcacaacatattggggactaatgccaggagaaagagattggcatctg

SEQ ID NO: 414380 - DNA, 60 bp, Artificial
  Synthetic oligonucleotide
gctaagctcatatggtggttacaatacttcatcaccagagccgaggcgcagttacaagtg

SEQ ID NO: 414381 - DNA, 50 bp, Artificial
  Synthetic oligonucleotide
gctaaggaacaggccttggtcaagaagtttgtccgagttaacaattatgt

SEQ ID NO: 414382 - DNA, 57 bp, Artificial
  Synthetic oligonucleotide
gctaaggaggcacaagacgtcattatggaggttgttttcccaaatgaagtgggagcc

SEQ ID NO: 414383 - DNA, 60 bp, Artificial
  Synthetic oligonucleotide
gctaaggatgctctgcgctttggcactaccgggatgtggaaagtttgctataaacatcat

SEQ ID NO: 414384 - DNA, 50 bp, Artificial
  Synthetic oligonucleotide
gctaaggcagggttggttacgttgactcccccgtagggttggtttaaata

SEQ ID NO: 414385 - DNA, 54 bp, Artificial
  Synthetic oligonucleotide
gctaaggggcctgtaatgacctacgtatatggcgcgacactgcgcggtgtagcg

SEQ ID NO: 414386 - DNA, 55 bp, Artificial
  Synthetic oligonucleotide
gctaaggtcactggtgggcaatatgcaagcaacgagcaagccttggttaggcgtt

SEQ ID NO: 414387 - DNA, 55 bp, Artificial
  Synthetic oligonucleotide
gctaaggtcagacagctcatcaaaactgaccagctccaaggctttgatgccagcg

SEQ ID NO: 414388 - DNA, 55 bp, Artificial
  Synthetic oligonucleotide
gctaaggtctcgcacctgctcacgtataagcgtggttttcttgacaagataggcg

SEQ ID NO: 414389 - DNA, 59 bp, Artificial
  Synthetic oligonucleotide
gctaaggtgaaacgcagagttcacacttgtagatctactaaaactgactacaggcgtag

SEQ ID NO: 414390 - DNA, 55 bp, Artificial
  Synthetic oligonucleotide
gctaaggtgagatatgaggcgactactagtagagcatcaatacatttcaatgcaa

SEQ ID NO: 414391 - DNA, 57 bp, Artificial
  Synthetic oligonucleotide
gctaaggttgagctgacccccttgtctttgtattggagaccagtgtacaccccacag

SEQ ID NO: 414392 - DNA, 58 bp, Artificial
  Synthetic oligonucleotide
gctaaggtttccaaaggttctgaagcaggtctccattcagaaattgttcaaggttgca

SEQ ID NO: 414393 - DNA, 60 bp, Artificial
  Synthetic oligonucleotide
gctaagtacagtgttggtgagggaacactgctgttcacacacaaacactttgtcgttcaa

SEQ ID NO: 414394 - DNA, 60 bp, Artificial
  Synthetic oligonucleotide
gctaagtccatatgcccacctacgctgctccgggtggatgcttatacatgctatggatgc

SEQ ID NO: 414395 - DNA, 55 bp, Artificial
  Synthetic oligonucleotide
gctaagtcggataaagcagagaatggatcagtttgaaactagccttgcgggtgtc

SEQ ID NO: 414396 - DNA, 51 bp, Artificial
  Synthetic oligonucleotide
gctaagtggatgaaatgggcaatcgatgataagatggatatacaacctctc

SEQ ID NO: 414397 - DNA, 55 bp, Artificial
  Synthetic oligonucleotide
gctaagtggtgtttgtttgcaatgataagggagagttaagggagagtactgtctt

SEQ ID NO: 414398 - DNA, 60 bp, Artificial
  Synthetic oligonucleotide
gctaagttgatataaagcgacaagtatgatggtgactcgtcaggttaattcaaaatgcct

SEQ ID NO: 414399 - DNA, 58 bp, Artificial
  Synthetic oligonucleotide
gctaagtttctaagttgtgtggtggcaagtgtggctaccattaccagtccaccttagc

SEQ ID NO: 414400 - DNA, 55 bp, Artificial
  Synthetic oligonucleotide
gctaagtttgaaaggatcgtccgtttgtatggtggtcaaggtagcagacattcga

SEQ ID NO: 414401 - DNA, 55 bp, Artificial
  Synthetic oligonucleotide
gctaataagaagtgccataggccagatgtcaaggcctatgttcttgtatgtgagg

SEQ ID NO: 414402 - DNA, 59 bp, Artificial
  Synthetic oligonucleotide
gctaataatctttagttcaatactaatgacaaagagattagattagctatagcttgagg

SEQ ID NO: 414403 - DNA, 56 bp, Artificial
  Synthetic oligonucleotide
gctaataatgccggggatgatgtctttacagtctcttgtcgagttctcacgagacc

SEQ ID NO: 414404 - DNA, 60 bp, Artificial
  Synthetic oligonucleotide
gctaatactatagaagtcttcagatcgaatggtttaacagctaatgaatcaggaagacta

SEQ ID NO: 414405 - DNA, 60 bp, Artificial
  Synthetic oligonucleotide
gctaatactatcgaggtcttcagatcgaacggtctgacagctaatgaatcaggaaggcta

SEQ ID NO: 414406 - DNA, 59 bp, Artificial
  Synthetic oligonucleotide
gctaatactcccttgtatactagggaatgctgggtaaatcattaccaactgccctctgc

SEQ ID NO: 414407 - DNA, 55 bp, Artificial
  Synthetic oligonucleotide
gctaatagggaaactaaagcaggaaaagcagggtatgttactgacaggggaaggc

SEQ ID NO: 414408 - DNA, 55 bp, Artificial
  Synthetic oligonucleotide
gctaatagggattctaagataggaaaagcagggtatgttactgacagaggaaggc

SEQ ID NO: 414409 - DNA, 55 bp, Artificial
  Synthetic oligonucleotide
gctaatagtggacaacgtcgttatattgctacaggagaggtagacaaggcaggta

SEQ ID NO: 414410 - DNA, 53 bp, Artificial
  Synthetic oligonucleotide
gctaatatacaacgacctacctcatccaaaatacccctccccttattactacc

SEQ ID NO: 414411 - DNA, 60 bp, Artificial
  Synthetic oligonucleotide
gctaatatcagacatccattggaggtcaagcctcgcttggtcctccgttacgccattatg

SEQ ID NO: 414412 - DNA, 53 bp, Artificial
  Synthetic oligonucleotide
gctaatatccgcgatgcatttcatgcatccgttgtatctaatatcaacgagat

SEQ ID NO: 414413 - DNA, 59 bp, Artificial
  Synthetic oligonucleotide
gctaatatctgcgttgaagctaactaccaaaccatggcgaccacttaagtctagggatc

SEQ ID NO: 414414 - DNA, 60 bp, Artificial
  Synthetic oligonucleotide
gctaatatgtggtttggacatttggataaatcatgcgaaagatggagactgtggttctcc

SEQ ID NO: 414415 - DNA, 55 bp, Artificial
  Synthetic oligonucleotide
gctaatattgcatttctccgcgatttcacgattagacacacgcgggagtgaaatt

SEQ ID NO: 414416 - DNA, 59 bp, Artificial
  Synthetic oligonucleotide
gctaatcatagaaactggggatgtgaggaccgtaatccgccctgaattagtgacaacat

SEQ ID NO: 414417 - DNA, 60 bp, Artificial
  Synthetic oligonucleotide
gctaatcattcaaatgctcctggctggtgtgggttttactggcattcaactaggcttgct

SEQ ID NO: 414418 - DNA, 55 bp, Artificial
  Synthetic oligonucleotide
gctaatcattttagcctccagatcagaatcagacgcagcacttgacgcagctggc

SEQ ID NO: 414419 - DNA, 56 bp, Artificial
  Synthetic oligonucleotide
gctaatccaatatttgcaacaacagaccctaaatacttcaaacctgaactaaagga

SEQ ID NO: 414420 - DNA, 55 bp, Artificial
  Synthetic oligonucleotide
gctaatccggctaagtatggaaccagtctgattatcagtgaggaagctacattac

SEQ ID NO: 414421 - DNA, 60 bp, Artificial
  Synthetic oligonucleotide
gctaatcctaaccccgcagctattgcacacaatccagtgtgttgatagtcgtaatgggca

SEQ ID NO: 414422 - DNA, 57 bp, Artificial
  Synthetic oligonucleotide
gctaatcctaactgcggagcacgtgcctccaatccagggggtggcgtgtcgtaacgg

SEQ ID NO: 414423 - DNA, 55 bp, Artificial
  Synthetic oligonucleotide
gctaatcctctttggcagggaccagctcacctcatttggaaaggagaaggagcgg

SEQ ID NO: 414424 - DNA, 53 bp, Artificial
  Synthetic oligonucleotide
gctaatctgttcaaacctgaatttgaggcttggaagtatggcccagttgacga

SEQ ID NO: 414425 - DNA, 55 bp, Artificial
  Synthetic oligonucleotide
gctaatgacgtagacttgcagtcttcgggccttgtgcggaagaatgctgtcctgc

SEQ ID NO: 414426 - DNA, 60 bp, Artificial
  Synthetic oligonucleotide
gctaatgcaaaagtgccccacagtgctagctcagacacattaagcctgattgcctattct

SEQ ID NO: 414427 - DNA, 51 bp, Artificial
  Synthetic oligonucleotide
gctaatgcactaactaacgtcattagatcatattacagtataaacgcacca

SEQ ID NO: 414428 - DNA, 55 bp, Artificial
  Synthetic oligonucleotide
gctaatgcagatgctcaattagacgcagtgttaaaggctgcaagtgatacatacg

SEQ ID NO: 414429 - DNA, 60 bp, Artificial
  Synthetic oligonucleotide
gctaatgcatatgtttcagttggatcatcaaaatactaccgaagattcacaccggaaata

SEQ ID NO: 414430 - DNA, 55 bp, Artificial
  Synthetic oligonucleotide
gctaatgctaaggacttcaccaagagagtgagagatgagtcggtgcacaagctcg

SEQ ID NO: 414431 - DNA, 58 bp, Artificial
  Synthetic oligonucleotide
gctaatgctaatgcagaatgcaaaaaggcaatgagtcatcttaagccagaaagtaccc

SEQ ID NO: 414432 - DNA, 59 bp, Artificial
  Synthetic oligonucleotide
gctaatgctatgaagtttagaggcttccccagatatttttctgtgacactgagaaaaag

SEQ ID NO: 414433 - DNA, 60 bp, Artificial
  Synthetic oligonucleotide
gctaatggatgaagattataaggggaggctatgcaatccattaaatcctttcgttagtca

SEQ ID NO: 414434 - DNA, 50 bp, Artificial
  Synthetic oligonucleotide
gctaatggcgattattcattcgaccagaacggggtaattagtaatgacgg

SEQ ID NO: 414435 - DNA, 55 bp, Artificial
  Synthetic oligonucleotide
gctaatgggatgccagacgtcgatacttgcctgactcatgttgacaggccatctt

SEQ ID NO: 414436 - DNA, 55 bp, Artificial
  Synthetic oligonucleotide
gctaattacgtctcctgtgtcttataacgaacttgtcgtttggacacaaggtaag

SEQ ID NO: 414437 - DNA, 59 bp, Artificial
  Synthetic oligonucleotide
gctaattagaggaaggcctgaagaggcgaaatatgtatggtggacaagtaacagtctaa

SEQ ID NO: 414438 - DNA, 55 bp, Artificial
  Synthetic oligonucleotide
gctaattagtggagctatccttattagctaccggttccaagccaggggcgcttgt

SEQ ID NO: 414439 - DNA, 55 bp, Artificial
  Synthetic oligonucleotide
gctaattatctcgattatctttctgctaatctggccgctacgataggaaatctcg

SEQ ID NO: 414440 - DNA, 60 bp, Artificial
  Synthetic oligonucleotide
gctaattcaaagtcacagatcaatagacaagtcatagttgacagtgacaactggtctggg

SEQ ID NO: 414441 - DNA, 60 bp, Artificial
  Synthetic oligonucleotide
gctaattccactggatcattaggtgtcccttcaatgtcaatccaggtagttgccttgctg

SEQ ID NO: 414442 - DNA, 60 bp, Artificial
  Synthetic oligonucleotide
gctaattgactatgcagcctctggaggccccacatcacctgataacattgattctcctaa

SEQ ID NO: 414443 - DNA, 55 bp, Artificial
  Synthetic oligonucleotide
gctaattgcatagttggctaacatttctgcacggtgtggccaacaacatgtctcg

SEQ ID NO: 414444 - DNA, 56 bp, Artificial
  Synthetic oligonucleotide
gctaattggctaaccctgtcacgtatctggacgtgacaaaacgtgacaggggtaaa

SEQ ID NO: 414445 - DNA, 55 bp, Artificial
  Synthetic oligonucleotide
gctaattgggcaaggagatgtggtattggtaatgaaacggaaacgggactctagc

SEQ ID NO: 414446 - DNA, 56 bp, Artificial
  Synthetic oligonucleotide
gctaattgggcaaggggacgtagtgttggtgatgaaacgaaaacgggactctagca

SEQ ID NO: 414447 - DNA, 58 bp, Artificial
  Synthetic oligonucleotide
gctaatttggatgactgaacaaggcattattactaaagaagttcagagggttcaccac

SEQ ID NO: 414448 - DNA, 56 bp, Artificial
  Synthetic oligonucleotide
gctacaaaaggagcttgagcaggctaagcatcaaaacacagtcctgacagcccagg

SEQ ID NO: 414449 - DNA, 60 bp, Artificial
  Synthetic oligonucleotide
gctacaaaagtgctggacatgaatcggatggtggacgccgacctcctcttggacgtcagt

SEQ ID NO: 414450 - DNA, 57 bp, Artificial
  Synthetic oligonucleotide
gctacaaaagttatatgaattggtagtaaggtagctcttatatattagaagttccta

SEQ ID NO: 414451 - DNA, 55 bp, Artificial
  Synthetic oligonucleotide
gctacaaacaacagctcaggggacagcttcgagaaccctgtgaaagaatgtgagt

SEQ ID NO: 414452 - DNA, 55 bp, Artificial
  Synthetic oligonucleotide
gctacaaaggagtatgggaactcatccgatctatatgggatcgatggattacgct

SEQ ID NO: 414453 - DNA, 52 bp, Artificial
  Synthetic oligonucleotide
gctacaacccagtaactggcctgtcgtaacgcgcaagtctgtggcggaaccg

SEQ ID NO: 414454 - DNA, 60 bp, Artificial
  Synthetic oligonucleotide
gctacaacctgagcgactggcaccaaggcactcacgtctgtcacaccaagcacatggact

SEQ ID NO: 414455 - DNA, 60 bp, Artificial
  Synthetic oligonucleotide
gctacaactactgcaggctagtgagcaggagtctaaccgtacggtcaagcacactccctg

SEQ ID NO: 414456 - DNA, 52 bp, Artificial
  Synthetic oligonucleotide
gctacaagaacggagcgtgattagtgtcgaagacaacgacaatacttgtgac

SEQ ID NO: 414457 - DNA, 58 bp, Artificial
  Synthetic oligonucleotide
gctacaaggtgttggtactcaacccctccgtcgctgcaacattgggctttggcgctta

SEQ ID NO: 414458 - DNA, 55 bp, Artificial
  Synthetic oligonucleotide
gctacaagttccttgaagtcgttcgcacccacaagattagagagtgtggtcatac

SEQ ID NO: 414459 - DNA, 55 bp, Artificial
  Synthetic oligonucleotide
gctacaatggaatactgccccctagtgtctcctgctgtatgggacccctatgatg

SEQ ID NO: 414460 - DNA, 58 bp, Artificial
  Synthetic oligonucleotide
gctacaatgtggagttgggccggtacttaaagaagtatgaacaccatgcttacaaagc

SEQ ID NO: 414461 - DNA, 55 bp, Artificial
  Synthetic oligonucleotide
gctacaattccaccttacaatctggtcttaagaagatggcacaaccatctggttg

SEQ ID NO: 414462 - DNA, 58 bp, Artificial
  Synthetic oligonucleotide
gctacaattgaagctagattatccataacaactcccgaagcaaacctcagagaatttt

SEQ ID NO: 414463 - DNA, 54 bp, Artificial
  Synthetic oligonucleotide
gctacacaattagggaagtactttagggataccacaagaataaaatttgataac

SEQ ID NO: 414464 - DNA, 55 bp, Artificial
  Synthetic oligonucleotide
gctacacagcatggcgggacatatatgtgcagaactttgcagatgacacgtgggt

SEQ ID NO: 414465 - DNA, 54 bp, Artificial
  Synthetic oligonucleotide
gctacacatcgtctgtgtatggtgcaacactggaagcgcgtcctaaacgaagtt

SEQ ID NO: 414466 - DNA, 52 bp, Artificial
  Synthetic oligonucleotide
gctacacatgcctgtgtacccacagaccccaacccgcaagaaatagttatgg

SEQ ID NO: 414467 - DNA, 55 bp, Artificial
  Synthetic oligonucleotide
gctacacatgtcttggatccatttggttcgactgcccaactggcttgggcacgtc

SEQ ID NO: 414468 - DNA, 59 bp, Artificial
  Synthetic oligonucleotide
gctacaccccaggaccaggggtcagatttccactgacctttggatggtgcttcaagcta

SEQ ID NO: 414469 - DNA, 57 bp, Artificial
  Synthetic oligonucleotide
gctacacccggagtactacaaagactgctgacatcgagttttctacaagggactttc

SEQ ID NO: 414470 - DNA, 55 bp, Artificial
  Synthetic oligonucleotide
gctacaccgtgggaatcgcgtgagagacatcacgaagcactttcgtgacacagca

SEQ ID NO: 414471 - DNA, 53 bp, Artificial
  Synthetic oligonucleotide
gctacacctacaggcgggagctacaaaatcctgctaatgagcatgagagaatc

SEQ ID NO: 414472 - DNA, 60 bp, Artificial
  Synthetic oligonucleotide
gctacacctccaaggggtggaggcttctcgcccccatcactgcttacgctcagcagacac

SEQ ID NO: 414473 - DNA, 60 bp, Artificial
  Synthetic oligonucleotide
gctacacctgcaatatgcgccccacaaggatgacaggatcatctttcgagaagatgttcc

SEQ ID NO: 414474 - DNA, 58 bp, Artificial
  Synthetic oligonucleotide
gctacaccttctgcacaattacctattaaaccttctacattatcctttgctagtaaca

SEQ ID NO: 414475 - DNA, 56 bp, Artificial
  Synthetic oligonucleotide
gctacacggcgtggaacttgtaggaccagaggatgaaactgctctcgtcgtaaggg

SEQ ID NO: 414476 - DNA, 60 bp, Artificial
  Synthetic oligonucleotide
gctacacgttccacgacaatgtcatccatgatactgactcagtttggaccgttcattgaa

SEQ ID NO: 414477 - DNA, 50 bp, Artificial
  Synthetic oligonucleotide
gctacacgtttctacgctatcgtgttcctgttgagtggcgcacggttcga

SEQ ID NO: 414478 - DNA, 55 bp, Artificial
  Synthetic oligonucleotide
gctacactcgattacctcgttagaagaattatagacgaaaatagaagcgttcttc

SEQ ID NO: 414479 - DNA, 59 bp, Artificial
  Synthetic oligonucleotide
gctacactggaccgcctcaaaactcttgacgggtggctgtcacatttagtgtgccaccc

SEQ ID NO: 414480 - DNA, 59 bp, Artificial
  Synthetic oligonucleotide
gctacacttggttttcatcatcgtataatttgccaactccttttcctcaagctagtgtc

SEQ ID NO: 414481 - DNA, 55 bp, Artificial
  Synthetic oligonucleotide
gctacagaagggagacctcacaggccccagggaaacctggtggcttacagacaca

SEQ ID NO: 414482 - DNA, 55 bp, Artificial
  Synthetic oligonucleotide
gctacagaatttgctattagaagctttcaacaattgctgattgacgagctgcagc

SEQ ID NO: 414483 - DNA, 60 bp, Artificial
  Synthetic oligonucleotide
gctacagacagcgttatatttgattgggccctatgggctgcgacgacagatgccgaatca

SEQ ID NO: 414484 - DNA, 60 bp, Artificial
  Synthetic oligonucleotide
gctacagagagtaccacatgtgatgttgtaccaataaacagagccaaagtgatccgatct

SEQ ID NO: 414485 - DNA, 60 bp, Artificial
  Synthetic oligonucleotide
gctacagagatatcgatgtggcacctttgtccgtcgaaacctggcatgggcatgagcact

SEQ ID NO: 414486 - DNA, 55 bp, Artificial
  Synthetic oligonucleotide
gctacagccgacacttcccggactcaccccgggtgaaaagcaacaccttgggcca

SEQ ID NO: 414487 - DNA, 60 bp, Artificial
  Synthetic oligonucleotide
gctacagcgggggagacatttatcacagcgtgtctcatgcccggccccgctggatctggt

SEQ ID NO: 414488 - DNA, 55 bp, Artificial
  Synthetic oligonucleotide
gctacagctaatctacagagtcctaagctcagtgtcaaacgttgagataagggaa

SEQ ID NO: 414489 - DNA, 58 bp, Artificial
  Synthetic oligonucleotide
gctacagggctctggttgagcacgtccgtggtgtccttcgggattcgctacgtgaggg

SEQ ID NO: 414490 - DNA, 60 bp, Artificial
  Synthetic oligonucleotide
gctacaggtccgaacaggtcgctacaggaataacatgcatgtttttccgcagctaaacgc

SEQ ID NO: 414491 - DNA, 60 bp, Artificial
  Synthetic oligonucleotide
gctacaggtttggcgatggttgaacgtatctgcatgaactacatggagtctaactcgttc

SEQ ID NO: 414492 - DNA, 60 bp, Artificial
  Synthetic oligonucleotide
gctacagtagcaggctccctgtcactggcaatcatgatagctgggatctccttatggatg

SEQ ID NO: 414493 - DNA, 55 bp, Artificial
  Synthetic oligonucleotide
gctacagtaggtactatgatttcttggatagaagattgtagtgagttggaagggc

SEQ ID NO: 414494 - DNA, 58 bp, Artificial
  Synthetic oligonucleotide
gctacagtcgtctgttacccttgtaataccatggatcagcaacactcactacagagcg

SEQ ID NO: 414495 - DNA, 55 bp, Artificial
  Synthetic oligonucleotide
gctacagtctttgagctgctgaatcttgaaccgcgagttgcacgacgcctagcgg

SEQ ID NO: 414496 - DNA, 60 bp, Artificial
  Synthetic oligonucleotide
gctacagtgggacatcgaccaagcgataatcgatctggagaacgccagaagggatctagc

SEQ ID NO: 414497 - DNA, 55 bp, Artificial
  Synthetic oligonucleotide
gctacagttccttggttacatgtcaactctacaccttgggtcactgcattttcgc

SEQ ID NO: 414498 - DNA, 55 bp, Artificial
  Synthetic oligonucleotide
gctacatacagcaaagatctcgggatctatgtaccggtgcttgacaaggaacgcc

SEQ ID NO: 414499 - DNA, 59 bp, Artificial
  Synthetic oligonucleotide
gctacatactcccgatggcttaatgctcatcctattgtgtactctactactcacaaggt

SEQ ID NO: 414500 - DNA, 60 bp, Artificial
  Synthetic oligonucleotide
gctacatatgcagacacaatatgtatcggctaccatgccaacaactcaaccgacactgtt

SEQ ID NO: 414501 - DNA, 55 bp, Artificial
  Synthetic oligonucleotide
gctacatatgggccgacagaggagtgatccagaagatagaaagggcaggagcagg

SEQ ID NO: 414502 - DNA, 50 bp, Artificial
  Synthetic oligonucleotide
gctacatgagggtggttcatattctcccggttcggagggacgatttatgg

SEQ ID NO: 414503 - DNA, 57 bp, Artificial
  Synthetic oligonucleotide
gctacatgcccccctaccccacactagccagtgcccctgggggcaactacttgcctc

SEQ ID NO: 414504 - DNA, 55 bp, Artificial
  Synthetic oligonucleotide
gctacatgctataagtttgagcagttttataaggtcagaaacagctggaaaggat

SEQ ID NO: 414505 - DNA, 60 bp, Artificial
  Synthetic oligonucleotide
gctacatggacttggcagccacatcaggaaggatgtgggtatcagcagaactctctgatg

SEQ ID NO: 414506 - DNA, 58 bp, Artificial
  Synthetic oligonucleotide
gctacattaatcggtcagacaagattacgaataataaaattatgtgggaatgacccag

SEQ ID NO: 414507 - DNA, 55 bp, Artificial
  Synthetic oligonucleotide
gctacattgctgtgtcttactcagggtccggccctctcaccttccccactgacgg

SEQ ID NO: 414508 - DNA, 60 bp, Artificial
  Synthetic oligonucleotide
gctacattggccaatgttgtaaatgaacgagctgtgcaggatgacatgcagaaggcgact

SEQ ID NO: 414509 - DNA, 54 bp, Artificial
  Synthetic oligonucleotide
gctacattttgtatgaccccattgtgttaccccgaccgttttcggttgcgcgcc

SEQ ID NO: 414510 - DNA, 60 bp, Artificial
  Synthetic oligonucleotide
gctaccaacatgtgtgcggcaggaggaggaagtgaagtgccctgtgttatgtatctcttc

SEQ ID NO: 414511 - DNA, 55 bp, Artificial
  Synthetic oligonucleotide
gctaccacatcagccttgctggacactgtccgaggaaataactccttggtcaacg

SEQ ID NO: 414512 - DNA, 55 bp, Artificial
  Synthetic oligonucleotide
gctaccaccaattgtgaccgcctggccccaccaaccatagcggagcctaaagccc

SEQ ID NO: 414513 - DNA, 60 bp, Artificial
  Synthetic oligonucleotide
gctaccactcaactgttccagtttgatggcgtaggtcgcatgctcactccctcgcgtcta

SEQ ID NO: 414514 - DNA, 60 bp, Artificial
  Synthetic oligonucleotide
gctaccagaaagacgggctggacaggctacgtgttacagaattgaagctccgtgttgcag

SEQ ID NO: 414515 - DNA, 58 bp, Artificial
  Synthetic oligonucleotide
gctaccagaggaggagtggaaggctagactaaaagcaagagggatacctacagattag

SEQ ID NO: 414516 - DNA, 55 bp, Artificial
  Synthetic oligonucleotide
gctaccagggacggcaaactccccacaacgcagctccgacgtcacatcgatctgc

SEQ ID NO: 414517 - DNA, 55 bp, Artificial
  Synthetic oligonucleotide
gctaccagtacctcagacagaccaatagctacttcaacgtagtgtgcatctcggg

SEQ ID NO: 414518 - DNA, 51 bp, Artificial
  Synthetic oligonucleotide
gctaccatatattgcagagacagctcttagaaagctctacactgacaagag

SEQ ID NO: 414519 - DNA, 60 bp, Artificial
  Synthetic oligonucleotide
gctaccatcgagaatcacagcaacagatcatgtagggattggttaatcgatgttgggctg

SEQ ID NO: 414520 - DNA, 60 bp, Artificial
  Synthetic oligonucleotide
gctaccattgtctagtttgctttcagacaaaaggcttaggcatttcctatggcaggaaga

SEQ ID NO: 414521 - DNA, 58 bp, Artificial
  Synthetic oligonucleotide
gctaccatttcacttgagcaaaaagggtcatgtcctcttacttgaaccaactcgacca

SEQ ID NO: 414522 - DNA, 55 bp, Artificial
  Synthetic oligonucleotide
gctacccacactaatgatgtgagacagttaacagaggcagtgcaaaagatagcat

SEQ ID NO: 414523 - DNA, 55 bp, Artificial
  Synthetic oligonucleotide
gctacccagaccttcctggcaacctgtatcaacggggcatgctggactgtctacc

SEQ ID NO: 414524 - DNA, 60 bp, Artificial
  Synthetic oligonucleotide
gctacccagttttggggtttccgggataaatgaatctgcagacatgagcatcggagtgac

SEQ ID NO: 414525 - DNA, 55 bp, Artificial
  Synthetic oligonucleotide
gctacccatttgatccactcgatacgatctacatcataagccagtttatagctca

SEQ ID NO: 414526 - DNA, 55 bp, Artificial
  Synthetic oligonucleotide
gctaccccaacgggggggctagaagaaagttatctagaggagtcatacagtactg

SEQ ID NO: 414527 - DNA, 54 bp, Artificial
  Synthetic oligonucleotide
gctaccccgaaagccacctacccagcctacatgtagggtaagcttcaaaataaa

SEQ ID NO: 414528 - DNA, 55 bp, Artificial
  Synthetic oligonucleotide
gctaccccgaagtgttttgtcatgagtggggttgatattgagtccatcccaaatg

SEQ ID NO: 414529 - DNA, 55 bp, Artificial
  Synthetic oligonucleotide
gctacccgaccctacaaactaccagacctatgcaacacactggacacatcactgc

SEQ ID NO: 414530 - DNA, 55 bp, Artificial
  Synthetic oligonucleotide
gctacccgatgcactcaacaatacaggaatgtttggacagaacgcccagttccac

SEQ ID NO: 414531 - DNA, 55 bp, Artificial
  Synthetic oligonucleotide
gctaccctcaactatacaaacgttaaccctattcctcacatcagggggagtgtta

SEQ ID NO: 414532 - DNA, 55 bp, Artificial
  Synthetic oligonucleotide
gctacccttattattcagccaacctagctgactgctcttggagtgaatcaactca

SEQ ID NO: 414533 - DNA, 58 bp, Artificial
  Synthetic oligonucleotide
gctaccgacggacctggtatctaatgctggagggcaactgttttatggccgccctcag

SEQ ID NO: 414534 - DNA, 56 bp, Artificial
  Synthetic oligonucleotide
gctaccgatgctagtaatggccattggggagcagttatgacagcagtcactccagt

SEQ ID NO: 414535 - DNA, 60 bp, Artificial
  Synthetic oligonucleotide
gctaccgcacctgacttggttactttgttcgagaacactcacgtgagttatgcctgctgg

SEQ ID NO: 414536 - DNA, 55 bp, Artificial
  Synthetic oligonucleotide
gctaccgcagggttggaaagggtctccaacaatcttccaaggaacagtagcaaga

SEQ ID NO: 414537 - DNA, 60 bp, Artificial
  Synthetic oligonucleotide
gctaccgccacttgagagacttactattaattgctgcgaggattgtgggcaagggactga

SEQ ID NO: 414538 - DNA, 60 bp, Artificial
  Synthetic oligonucleotide
gctaccgcgatgcctaatgccaactacagtgtattggcagaacacgataatggatatggt

SEQ ID NO: 414539 - DNA, 60 bp, Artificial
  Synthetic oligonucleotide
gctaccgctgaggaatcaaacctcagagcacatatgccgatctcagtccgcatagctatt

SEQ ID NO: 414540 - DNA, 57 bp, Artificial
  Synthetic oligonucleotide
gctaccggaaattcaagagaactattatggagagtggaaagttacgatctcgacatt

SEQ ID NO: 414541 - DNA, 60 bp, Artificial
  Synthetic oligonucleotide
gctaccggcgccgttacagactgagacgctatgccagacgcaggttccgacgcaaaaaga

SEQ ID NO: 414542 - DNA, 56 bp, Artificial
  Synthetic oligonucleotide
gctaccggctcaagttgggattaacccctactcgcgagaatggacccgaatggcta

SEQ ID NO: 414543 - DNA, 60 bp, Artificial
  Synthetic oligonucleotide
gctaccggttaatccacaggtagtgtgggatgtgccgcgcagctctatcgccaacttaat

SEQ ID NO: 414544 - DNA, 55 bp, Artificial
  Synthetic oligonucleotide
gctaccgtcagcgatctctccaccaaagctgcgtgcccgactatgggagaagctc

SEQ ID NO: 414545 - DNA, 60 bp, Artificial
  Synthetic oligonucleotide
gctaccgttgaactccagaggctccgaactcaaatggaggcaatcgcttacgactatcta

SEQ ID NO: 414546 - DNA, 55 bp, Artificial
  Synthetic oligonucleotide
gctacctaacatgcactaattatcggaatgaagcacaaaacgcccgcacttggcc

SEQ ID NO: 414547 - DNA, 53 bp, Artificial
  Synthetic oligonucleotide
gctacctaatcccctacccaaacctgccaagtctccccccgcctctagttcga

SEQ ID NO: 414548 - DNA, 55 bp, Artificial
  Synthetic oligonucleotide
gctacctaatcttcccccaagcaatggaacatgcaacatcaccagtctagatgca

SEQ ID NO: 414549 - DNA, 56 bp, Artificial
  Synthetic oligonucleotide
gctacctacaaccaaaatgcacttgcaggctagcagtgaagcgtttttgcactcgc

SEQ ID NO: 414550 - DNA, 55 bp, Artificial
  Synthetic oligonucleotide
gctacctccgtacccaggcgatatccaagggcatgcgccggttggaggttgagca

SEQ ID NO: 414551 - DNA, 55 bp, Artificial
  Synthetic oligonucleotide
gctacctctcgtgggccttaagggtgaccggttccatcgctatgagtcctgcggc

SEQ ID NO: 414552 - DNA, 55 bp, Artificial
  Synthetic oligonucleotide
gctacctggaacatttcgagcaaggctcgggctcagcatacacggtcagctcggc

SEQ ID NO: 414553 - DNA, 55 bp, Artificial
  Synthetic oligonucleotide
gctacctgtgtaagtcacaggggattgtattatgtaaaagaagggtacaacacgt

SEQ ID NO: 414554 - DNA, 55 bp, Artificial
  Synthetic oligonucleotide
gctaccttggtcataaagtggttggcgtttggtggagaatcactcccagctcatg

SEQ ID NO: 414555 - DNA, 55 bp, Artificial
  Synthetic oligonucleotide
gctaccttttaccgaacgttgctcttaaccaaaatgcgtctgggcacgagtccga

SEQ ID NO: 414556 - DNA, 55 bp, Artificial
  Synthetic oligonucleotide
gctacgaaaagcggttcgtgacgaggcgcaactcattctcgaaaggggtggtacg

SEQ ID NO: 414557 - DNA, 55 bp, Artificial
  Synthetic oligonucleotide
gctacgaaattcctagccatgaacgcctgaatgaggagtggcgcgagatgttcat

SEQ ID NO: 414558 - DNA, 58 bp, Artificial
  Synthetic oligonucleotide
gctacgaagcatctcggtcatttcatctcccccgtgatgtagtagtcggacggttggg

SEQ ID NO: 414559 - DNA, 55 bp, Artificial
  Synthetic oligonucleotide
gctacgactgagcctggcgcttatctgagccgccgcagatggaaactgtagtacg

SEQ ID NO: 414560 - DNA, 60 bp, Artificial
  Synthetic oligonucleotide
gctacgagccagccaagtactacatccaggatttcaacgcatttgtctcaggcgtcacct

SEQ ID NO: 414561 - DNA, 55 bp, Artificial
  Synthetic oligonucleotide
gctacgagcgacccccactgggttcggattgggggttgatagggtatcaatgggc

SEQ ID NO: 414562 - DNA, 55 bp, Artificial
  Synthetic oligonucleotide
gctacgagcgtacatgaacaccccggggctccccgtttgtcaggaccatcttgag

SEQ ID NO: 414563 - DNA, 55 bp, Artificial
  Synthetic oligonucleotide
gctacgaggtgcagacatgtcagaccaagtcgtcaaacagctcgaatccaaccac

SEQ ID NO: 414564 - DNA, 58 bp, Artificial
  Synthetic oligonucleotide
gctacgataaccaatataattctaactagatcaaagaagcttccaaagaaggaagcta

SEQ ID NO: 414565 - DNA, 55 bp, Artificial
  Synthetic oligonucleotide
gctacgatcaaatcctgctatctgtcagctggatcaagaaatgcaactgagcctt

SEQ ID NO: 414566 - DNA, 55 bp, Artificial
  Synthetic oligonucleotide
gctacgcacgtaacggcagggtcggagtcttcagtgtaactaaattcaatttcgc

SEQ ID NO: 414567 - DNA, 59 bp, Artificial
  Synthetic oligonucleotide
gctacgcagacaaatgaatatgtatgggagtagatggttggtgactctttgttcggtaa

SEQ ID NO: 414568 - DNA, 60 bp, Artificial
  Synthetic oligonucleotide
gctacgcagcgcggtcacctctcaccaagagatgatcccaagacacgtttagcgtggatc

SEQ ID NO: 414569 - DNA, 60 bp, Artificial
  Synthetic oligonucleotide
gctacgcattactctgctgaacatgatgcagaacggtcctctcgtctatgtggagacgtg

SEQ ID NO: 414570 - DNA, 55 bp, Artificial
  Synthetic oligonucleotide
gctacgccaagctgtttgaactctgtaagtaaggatgcgtctacgcattcgctac

SEQ ID NO: 414571 - DNA, 55 bp, Artificial
  Synthetic oligonucleotide
gctacgccctgactacgtggtatgaacataaagcaacggtatattatcagcactc

SEQ ID NO: 414572 - DNA, 60 bp, Artificial
  Synthetic oligonucleotide
gctacgcgactgacccggcatacgccgcaaaagtagcgtcgatcgcaagcaccgccgtgg

SEQ ID NO: 414573 - DNA, 58 bp, Artificial
  Synthetic oligonucleotide
gctacgcgcctttctcgaaaactgccagtacctacaaaggaactataatgattctaca

SEQ ID NO: 414574 - DNA, 56 bp, Artificial
  Synthetic oligonucleotide
gctacgcgcggaattaccagaaagcttgcgcgggaaaggccaaaccataaatccag

SEQ ID NO: 414575 - DNA, 55 bp, Artificial
  Synthetic oligonucleotide
gctacgcgtctactcactaaggcttacctaatcgttagtcttatcgtcgtgttag

SEQ ID NO: 414576 - DNA, 60 bp, Artificial
  Synthetic oligonucleotide
gctacgcgttgatgagttgaacgaggagttgcgtcaggtgcgtaacagggctctcgccgc

SEQ ID NO: 414577 - DNA, 51 bp, Artificial
  Synthetic oligonucleotide
gctacgctcactacccactgcttgttccaactcgtgcctcgctgcgctcgt

SEQ ID NO: 414578 - DNA, 56 bp, Artificial
  Synthetic oligonucleotide
gctacgctgccagcgtcctggggttaggggaggtctatagtggagcactggcgtta

SEQ ID NO: 414579 - DNA, 57 bp, Artificial
  Synthetic oligonucleotide
gctacggaaaggcgaatatcttattacctacatacagtctaagttcttagagattaa

SEQ ID NO: 414580 - DNA, 55 bp, Artificial
  Synthetic oligonucleotide
gctacggaagactgcttatcgcacagccatatgaaatcatataggtactcacaca

SEQ ID NO: 414581 - DNA, 55 bp, Artificial
  Synthetic oligonucleotide
gctacggacgcgatctgcttctactcccagacgtactcgtacaagaacttcgaac

SEQ ID NO: 414582 - DNA, 56 bp, Artificial
  Synthetic oligonucleotide
gctacggcgggagtcgttgttgtatcgactgcgttataagccgggagtacgttgga

SEQ ID NO: 414583 - DNA, 57 bp, Artificial
  Synthetic oligonucleotide
gctacggctccggatttggtgcccctgttcgagaacacacacgttagttacgcctgc

SEQ ID NO: 414584 - DNA, 53 bp, Artificial
  Synthetic oligonucleotide
gctacggctctgtgcactcggtgtttttttagtgcgggggccccgcgtagtta

SEQ ID NO: 414585 - DNA, 55 bp, Artificial
  Synthetic oligonucleotide
gctacggctggaacctggtctccttgaagagtggagtggatgtgttctacaaacc

SEQ ID NO: 414586 - DNA, 55 bp, Artificial
  Synthetic oligonucleotide
gctacgggaggtgcatacatgatcccagtaaccacagttcctgggcaaggattcc

SEQ ID NO: 414587 - DNA, 54 bp, Artificial
  Synthetic oligonucleotide
gctacggtagctaccgaatcagtagttcttaactatgacaaggacggtcgactt

SEQ ID NO: 414588 - DNA, 58 bp, Artificial
  Synthetic oligonucleotide
gctacggtcttgaatataccgacaagtacagtatattcgacgtaaccagacgtgtatc

SEQ ID NO: 414589 - DNA, 55 bp, Artificial
  Synthetic oligonucleotide
gctacgtatgctggttgccgcaggtaaagattcggaggcggcgtattttcgcagt

SEQ ID NO: 414590 - DNA, 54 bp, Artificial
  Synthetic oligonucleotide
gctacgtcactaaccacgtgcacttcacaggccaaccagagcctatgtcgtgca

SEQ ID NO: 414591 - DNA, 59 bp, Artificial
  Synthetic oligonucleotide
gctacgtcactaacctacgtgtccgtctcccataggccagacaccgtctacgtcataca

SEQ ID NO: 414592 - DNA, 55 bp, Artificial
  Synthetic oligonucleotide
gctacgtcggactctgtctcgttaatgtccactccaactgagctccttgtggccc

SEQ ID NO: 414593 - DNA, 60 bp, Artificial
  Synthetic oligonucleotide
gctacgtgaaactgtagcagaatctgactgtgtaacatggacaaatcttagtctgacata

SEQ ID NO: 414594 - DNA, 53 bp, Artificial
  Synthetic oligonucleotide
gctacgtgacccaatcggcggtaagctaacgaacctattctgggacggtaact

SEQ ID NO: 414595 - DNA, 55 bp, Artificial
  Synthetic oligonucleotide
gctacgtgtatgagaggccataaatgtcaggattaagttatgataagtgtgttac

SEQ ID NO: 414596 - DNA, 60 bp, Artificial
  Synthetic oligonucleotide
gctacgtgtggtacaacagctgcttatgggtgcgttaacagtaacgtgcccactctgcgc

SEQ ID NO: 414597 - DNA, 57 bp, Artificial
  Synthetic oligonucleotide
gctacgttattatcaatattatcatactcctacgacaaatataacgccgttgaacgg

SEQ ID NO: 414598 - DNA, 56 bp, Artificial
  Synthetic oligonucleotide
gctacgttgaacccactgacgtcatcgacacctttcgtggtatgttcgcttgtacg

SEQ ID NO: 414599 - DNA, 51 bp, Artificial
  Synthetic oligonucleotide
gctactaaacaagtgcttgaacaggttgaacacctaaagagatctaagcgc

SEQ ID NO: 414600 - DNA, 55 bp, Artificial
  Synthetic oligonucleotide
gctactaaaggagagaataacagtttattacaccccatctgccagcatggaatgg

SEQ ID NO: 414601 - DNA, 55 bp, Artificial
  Synthetic oligonucleotide
gctactaaatgtcctaccaatgttcctcccaaagaaagggaagacccgtatgcac

SEQ ID NO: 414602 - DNA, 55 bp, Artificial
  Synthetic oligonucleotide
gctactaacaacctctaaaactgtggatgtgcacggccaaacttggacactcacg

SEQ ID NO: 414603 - DNA, 56 bp, Artificial
  Synthetic oligonucleotide
gctactaacacactaacaaataatggctagggcaaaacgtgtaaaacgtgcctctg

SEQ ID NO: 414604 - DNA, 54 bp, Artificial
  Synthetic oligonucleotide
gctactaacgctgcatggcatatccgagctagcgcagtacgaactgttaagcgt

SEQ ID NO: 414605 - DNA, 59 bp, Artificial
  Synthetic oligonucleotide
gctactaactgctctaagaatcaaaactaggcgagtaatggggaggataaatcagagaa

SEQ ID NO: 414606 - DNA, 57 bp, Artificial
  Synthetic oligonucleotide
gctactaagaaaaggagtgctgttaaacgcaatgattttaagcgtggttacagacaa

SEQ ID NO: 414607 - DNA, 55 bp, Artificial
  Synthetic oligonucleotide
gctactaagcgcaatgacgacgcgtctactgctgcgcacaacgacattcctcagc

SEQ ID NO: 414608 - DNA, 59 bp, Artificial
  Synthetic oligonucleotide
gctactaatgtgtttttgccgttacgatcttactccatgttgtcctctgttattggagc

SEQ ID NO: 414609 - DNA, 55 bp, Artificial
  Synthetic oligonucleotide
gctactacacacgcgtatcgtacaaatagcgaattacctaagctgttagacaacg

SEQ ID NO: 414610 - DNA, 55 bp, Artificial
  Synthetic oligonucleotide
gctactacacactcctggatccctaagagaaaccgctccattctcaacacaagcc

SEQ ID NO: 414611 - DNA, 60 bp, Artificial
  Synthetic oligonucleotide
gctactacagggatggaggcgttaattcgtactgcaatacaaattcataggtggataaga

SEQ ID NO: 414612 - DNA, 57 bp, Artificial
  Synthetic oligonucleotide
gctactacataggatacctgaaggttacgatttttcattcgtgacttcacctaatcg

SEQ ID NO: 414613 - DNA, 56 bp, Artificial
  Synthetic oligonucleotide
gctactacatggttctttaacccagttattctaagaccaaataatgtagaagtaga

SEQ ID NO: 414614 - DNA, 55 bp, Artificial
  Synthetic oligonucleotide
gctactaccagtaaaggtgaattcacgatgttgggagtccatgacaacgtggcga

SEQ ID NO: 414615 - DNA, 60 bp, Artificial
  Synthetic oligonucleotide
gctactaccagtcatgattatgctattgacacttcatttattgttcccgaaacaactatt

SEQ ID NO: 414616 - DNA, 55 bp, Artificial
  Synthetic oligonucleotide
gctactacgaggcacagacgttcattggtgtactatactgcgatcgaagataggc

SEQ ID NO: 414617 - DNA, 55 bp, Artificial
  Synthetic oligonucleotide
gctactacgcattcttggatccccaagaggaaccgctccatcctcaatacgagcc

SEQ ID NO: 414618 - DNA, 55 bp, Artificial
  Synthetic oligonucleotide
gctactacgtgatgagaggtgtggtctacgtgaacagaatgcaaccgcacactcc

SEQ ID NO: 414619 - DNA, 55 bp, Artificial
  Synthetic oligonucleotide
gctactactaatctcccagattttaaccctgttactatctctgatccgcgagctt

SEQ ID NO: 414620 - DNA, 55 bp, Artificial
  Synthetic oligonucleotide
gctactagcatatacaccaccgggagcattaggacccacaaacaggaaagatgca

SEQ ID NO: 414621 - DNA, 55 bp, Artificial
  Synthetic oligonucleotide
gctactaggcacagagcgccgaagtatgtagcttgtggtgaggaagaacacagga

SEQ ID NO: 414622 - DNA, 55 bp, Artificial
  Synthetic oligonucleotide
gctactataactcggtaagtggaaggttaattttggcagagatggaatcaatcac

SEQ ID NO: 414623 - DNA, 60 bp, Artificial
  Synthetic oligonucleotide
gctactatctaaagagctctgcatctttgtatacacgtcaagtgctaatacaacaacgac

SEQ ID NO: 414624 - DNA, 59 bp, Artificial
  Synthetic oligonucleotide
gctactatctacagggaaattggttctccttttgtggataatgggagcgatgctcgttc

SEQ ID NO: 414625 - DNA, 50 bp, Artificial
  Synthetic oligonucleotide
gctactatgtcctatatcgctttgacagaagtcaacaaattagatagtgt

SEQ ID NO: 414626 - DNA, 60 bp, Artificial
  Synthetic oligonucleotide
gctactcaaccggtgcacttgccagttgcatgggtctcatatacaacaggatgggaacgg

SEQ ID NO: 414627 - DNA, 60 bp, Artificial
  Synthetic oligonucleotide
gctactccaaattccttggtggaacacatcagagaagtctgaagtgagaatgtgcgagga

SEQ ID NO: 414628 - DNA, 60 bp, Artificial
  Synthetic oligonucleotide
gctactccatagaaccactggatctacctccaatcattcaaagactccatggcctcagcg

SEQ ID NO: 414629 - DNA, 55 bp, Artificial
  Synthetic oligonucleotide
gctactcccggctttgaatatttgctcatggcagacggagaatggtaccctacgg

SEQ ID NO: 414630 - DNA, 60 bp, Artificial
  Synthetic oligonucleotide
gctactcctatacttccatcgtagggacttgcgtctcatggcaaatgcgatttgctcagc

SEQ ID NO: 414631 - DNA, 57 bp, Artificial
  Synthetic oligonucleotide
gctactccttctgtggccacgtaggttcctggatatgcgtgtccgtcgtcgcctgat

SEQ ID NO: 414632 - DNA, 55 bp, Artificial
  Synthetic oligonucleotide
gctactcgtgcaacatgaagacaactctcacgccgggtatgccagctgcgtacgg

SEQ ID NO: 414633 - DNA, 53 bp, Artificial
  Synthetic oligonucleotide
gctactctccccgaggcctctttcgaccctgaagggatcatcggggggaccgg

SEQ ID NO: 414634 - DNA, 59 bp, Artificial
  Synthetic oligonucleotide
gctactctccctagtggacaccgtgccactacattcattaatactgtcctaaattggtg

SEQ ID NO: 414635 - DNA, 55 bp, Artificial
  Synthetic oligonucleotide
gctactcttgatgatccttatgtagaagactctgttgcttaatgagaacgaatcc

SEQ ID NO: 414636 - DNA, 55 bp, Artificial
  Synthetic oligonucleotide
gctactcttgcttgtttgacattgccacggtgattacatgtttgacagcaaccgc

SEQ ID NO: 414637 - DNA, 60 bp, Artificial
  Synthetic oligonucleotide
gctactgaagctcaccaacctgtcattgacactactgtaacaacagcctacccagtgctt

SEQ ID NO: 414638 - DNA, 60 bp, Artificial
  Synthetic oligonucleotide
gctactgaatacaatgatgggtccctattcgtaactaattctgatctacctgtcactgtc

SEQ ID NO: 414639 - DNA, 60 bp, Artificial
  Synthetic oligonucleotide
gctactgacactaccgttgatactaccgtcgctccaaccatcgctagtgcagacgccgcc

SEQ ID NO: 414640 - DNA, 55 bp, Artificial
  Synthetic oligonucleotide
gctactgacagaaggtgatagcgcatccaaccctatcctgaacgctcgtgatacc

SEQ ID NO: 414641 - DNA, 51 bp, Artificial
  Synthetic oligonucleotide
gctactgacgcattgttgctcgaatcgtgcttggaacaatttgcggcgaac

SEQ ID NO: 414642 - DNA, 54 bp, Artificial
  Synthetic oligonucleotide
gctactgagaactgggaaagaaccagggctcatttattgggcatttggaatgat

SEQ ID NO: 414643 - DNA, 55 bp, Artificial
  Synthetic oligonucleotide
gctactgagatcagggcatctgttggaaggatggttggtggcattgggaggttct

SEQ ID NO: 414644 - DNA, 55 bp, Artificial
  Synthetic oligonucleotide
gctactgcaaatcatacggtgaagaatggttcaacactgcaaaacaagagctgcg

SEQ ID NO: 414645 - DNA, 55 bp, Artificial
  Synthetic oligonucleotide
gctactgcagcgacacgtatccaagtacctctggctttcaacaaggctttagttg

SEQ ID NO: 414646 - DNA, 55 bp, Artificial
  Synthetic oligonucleotide
gctactgcgcacctttagagcgctgccctacacgatactgtggaagtacgatggc

SEQ ID NO: 414647 - DNA, 60 bp, Artificial
  Synthetic oligonucleotide
gctactgcgcttcgctaggatctgcccaaacgtagacactggtgaacctacacagttgat

SEQ ID NO: 414648 - DNA, 59 bp, Artificial
  Synthetic oligonucleotide
gctactgctgtgaaccaggagtgttgggacagtgttttcgatagaagtgtattagggta

SEQ ID NO: 414649 - DNA, 59 bp, Artificial
  Synthetic oligonucleotide
gctactggagtgtttggaactgcctacctcgtgccccgtcatctcttcgcggagaagta

SEQ ID NO: 414650 - DNA, 54 bp, Artificial
  Synthetic oligonucleotide
gctactgtaactaaccccaatacggtaattgcgcatgctagcccggggatgatt

SEQ ID NO: 414651 - DNA, 58 bp, Artificial
  Synthetic oligonucleotide
gctactgttgaggagccacctaatagagactttttggatatagctaaactaagtcgtc

SEQ ID NO: 414652 - DNA, 55 bp, Artificial
  Synthetic oligonucleotide
gctacttacagtctctgttatggacttgtctcagatgtactcccctgtcttcgag

SEQ ID NO: 414653 - DNA, 55 bp, Artificial
  Synthetic oligonucleotide
gctacttactggggaggtgaagaccatcccactagtaacagtctgaacgcattgt

SEQ ID NO: 414654 - DNA, 60 bp, Artificial
  Synthetic oligonucleotide
gctacttatgttcataagaaaaatgatggtacaacagttgatttaactgtggaccaggca

SEQ ID NO: 414655 - DNA, 54 bp, Artificial
  Synthetic oligonucleotide
gctacttcaggcaggatgccggtatgcctagttggatcgagtatcctcagtgat

SEQ ID NO: 414656 - DNA, 55 bp, Artificial
  Synthetic oligonucleotide
gctacttcgagctaactgatttcaccagttttgaacaacttgcagatggagactc

SEQ ID NO: 414657 - DNA, 55 bp, Artificial
  Synthetic oligonucleotide
gctacttcttgagcctacctgagatgtatgattactttgaccaagaatccagacc

SEQ ID NO: 414658 - DNA, 55 bp, Artificial
  Synthetic oligonucleotide
gctacttgaaacactcaaagcagatcccgacctgtggtgtgattgatgtgcgcgc

SEQ ID NO: 414659 - DNA, 56 bp, Artificial
  Synthetic oligonucleotide
gctacttttacagggcgtctgccactggggatgctataactaacctattggttagg

SEQ ID NO: 414660 - DNA, 55 bp, Artificial
  Synthetic oligonucleotide
gctagaaaactaaacgagcactttaataagacaataatctttcaaccaccctcag

SEQ ID NO: 414661 - DNA, 55 bp, Artificial
  Synthetic oligonucleotide
gctagaaactttgatactatcagattgtcgttccaacttatgcgtccaccaaata

SEQ ID NO: 414662 - DNA, 55 bp, Artificial
  Synthetic oligonucleotide
gctagaaagggtaccagagtgggcggatagttgggtacagattgatagctgcgac

SEQ ID NO: 414663 - DNA, 60 bp, Artificial
  Synthetic oligonucleotide
gctagaaatttagagggattccaacagataaatttagaggagctgatgagatcaggtgac

SEQ ID NO: 414664 - DNA, 59 bp, Artificial
  Synthetic oligonucleotide
gctagaaattttgatactattcgcttatcatttcaattagtacgtccaccgaatatgac

SEQ ID NO: 414665 - DNA, 52 bp, Artificial
  Synthetic oligonucleotide
gctagaacaaaatcacaaccatggagaagcgcatatgaatctgcgatatcag

SEQ ID NO: 414666 - DNA, 57 bp, Artificial
  Synthetic oligonucleotide
gctagaacataacagaaaagcctatctacaagagttagaaagtgaagtcatcccggg

SEQ ID NO: 414667 - DNA, 51 bp, Artificial
  Synthetic oligonucleotide
gctagaagaacatggatgactttaacttgttaatccaatgtaccactcata

SEQ ID NO: 414668 - DNA, 56 bp, Artificial
  Synthetic oligonucleotide
gctagaagaagttagcgcaaatacttgcacttattgttttgcaactaaagagtgac

SEQ ID NO: 414669 - DNA, 60 bp, Artificial
  Synthetic oligonucleotide
gctagaagatgtgaccagagacatagacgttgctgtcactagtggggggcctactgccca

SEQ ID NO: 414670 - DNA, 55 bp, Artificial
  Synthetic oligonucleotide
gctagaagattttcagcttgcactgctgtttccaattgctggggtgttctgtcac

SEQ ID NO: 414671 - DNA, 58 bp, Artificial
  Synthetic oligonucleotide
gctagaaggctggggaaatgcattctactctattttaggatacgaagcaacaaaacta

SEQ ID NO: 414672 - DNA, 59 bp, Artificial
  Synthetic oligonucleotide
gctagaatcgatccagcccgtatagccctagagtttcggacgcgttcgaacactagcgc

SEQ ID NO: 414673 - DNA, 60 bp, Artificial
  Synthetic oligonucleotide
gctagaatctgttgtcgttagtgaccagctggagggacccgctggttacaagcagcttac

SEQ ID NO: 414674 - DNA, 60 bp, Artificial
  Synthetic oligonucleotide
gctagaatgcacttggagacaacaccacagagtatgtcaagtcaagacaattcccatgaa

SEQ ID NO: 414675 - DNA, 50 bp, Artificial
  Synthetic oligonucleotide
gctagaatgggtacccatgcaactatgaggatccagggtcgaactgtcgg

SEQ ID NO: 414676 - DNA, 53 bp, Artificial
  Synthetic oligonucleotide
gctagaatggttaagaagagttactatgttatttaacaccttaactaatttcg

SEQ ID NO: 414677 - DNA, 55 bp, Artificial
  Synthetic oligonucleotide
gctagaatgtctctgttttgtgacgaacgttcggataccactaaacgtcatacct

SEQ ID NO: 414678 - DNA, 60 bp, Artificial
  Synthetic oligonucleotide
gctagaattagttttgcaatatactatgagcctaccatcatgctgcccaagcaagtagca

SEQ ID NO: 414679 - DNA, 55 bp, Artificial
  Synthetic oligonucleotide
gctagaattcccgaagttagcaagaaagacattccttggggagacaggagtgaac

SEQ ID NO: 414680 - DNA, 60 bp, Artificial
  Synthetic oligonucleotide
gctagacaacaaacattcaaatggcacaatacatgatagaatccctcatcggaccctttt

SEQ ID NO: 414681 - DNA, 59 bp, Artificial
  Synthetic oligonucleotide
gctagacacgcgacccaaggctgtcttggatgacgctggggaacaaggatgttcctccg

SEQ ID NO: 414682 - DNA, 55 bp, Artificial
  Synthetic oligonucleotide
gctagacagccattgtctagaggagtttgaggctatcagtcaagaggaactggat

SEQ ID NO: 414683 - DNA, 60 bp, Artificial
  Synthetic oligonucleotide
gctagacaggtttaacaacatagagtcaacacatgtaactttcttcacatatttaagagc

SEQ ID NO: 414684 - DNA, 60 bp, Artificial
  Synthetic oligonucleotide
gctagacccgcaggctcgcaaagctataacatccctgactgaacggctctatgtcggtgg

SEQ ID NO: 414685 - DNA, 60 bp, Artificial
  Synthetic oligonucleotide
gctagaccgttagccactacgccagacagtgcgataactgaggtcgtctatgacccacag

SEQ ID NO: 414686 - DNA, 57 bp, Artificial
  Synthetic oligonucleotide
gctagacgatgagtatttagacatcctaaaaatgacttcagcgggtgttaaattgga

SEQ ID NO: 414687 - DNA, 55 bp, Artificial
  Synthetic oligonucleotide
gctagactactaccttggcttttacagccccatattcctctcagatggaaggtct

SEQ ID NO: 414688 - DNA, 60 bp, Artificial
  Synthetic oligonucleotide
gctagactcttccgctaacattgttactttaagctcgaactataggatgagaactggaca

SEQ ID NO: 414689 - DNA, 55 bp, Artificial
  Synthetic oligonucleotide
gctagacttaaatactattcaggtactggcagtgagcaagattacttgcaagcct

SEQ ID NO: 414690 - DNA, 57 bp, Artificial
  Synthetic oligonucleotide
gctagagaaggaagggaagttagggagagcaccgccacattggacatgtaatacccc

SEQ ID NO: 414691 - DNA, 55 bp, Artificial
  Synthetic oligonucleotide
gctagagaagggaaagaatttatcgtccctgtaggaaagcttaattgtataggac

SEQ ID NO: 414692 - DNA, 58 bp, Artificial
  Synthetic oligonucleotide
gctagagaatcctgacagtaaacaacacctggccattccaaacatatacagcatccac

SEQ ID NO: 414693 - DNA, 60 bp, Artificial
  Synthetic oligonucleotide
gctagagactaacacatcctttaagggttcactctttacatgctctagcatatccactcc

SEQ ID NO: 414694 - DNA, 55 bp, Artificial
  Synthetic oligonucleotide
gctagagatactaatttacacatgcaggagggtgtacttgaacaaaacccggtag

SEQ ID NO: 414695 - DNA, 55 bp, Artificial
  Synthetic oligonucleotide
gctagagcatgtctaccgatatgttaaccctttgtgtaactctttcactgtggag

SEQ ID NO: 414696 - DNA, 57 bp, Artificial
  Synthetic oligonucleotide
gctagagctatagcagataagtatcactctagtgtgtactccttgcctccagatcca

SEQ ID NO: 414697 - DNA, 55 bp, Artificial
  Synthetic oligonucleotide
gctagagctcaaggtgatcaggcctttgacgagtaaacaccggacaactgctata

SEQ ID NO: 414698 - DNA, 60 bp, Artificial
  Synthetic oligonucleotide
gctagagctgctgccaagatcggagcagaaatgttcgcccccgttgacgtgcaagaccta

SEQ ID NO: 414699 - DNA, 55 bp, Artificial
  Synthetic oligonucleotide
gctagaggaggtggcacctttaaattcaggagaggtcgaaaggggttcgattcca

SEQ ID NO: 414700 - DNA, 55 bp, Artificial
  Synthetic oligonucleotide
gctagagggaccccttggtagtaaccttggatacctgtcaagcgctattttcaga

SEQ ID NO: 414701 - DNA, 56 bp, Artificial
  Synthetic oligonucleotide
gctagaggtaatctactcaggcaaagcaccaagaggatggactactaagaagagtc

SEQ ID NO: 414702 - DNA, 50 bp, Artificial
  Synthetic oligonucleotide
gctagagtatagtagagaccaagccaattcgataatgcttcgtgttttcg

SEQ ID NO: 414703 - DNA, 55 bp, Artificial
  Synthetic oligonucleotide
gctagagttattgctaagtatgcagaggagtataagactgggccaactgtgagta

SEQ ID NO: 414704 - DNA, 60 bp, Artificial
  Synthetic oligonucleotide
gctagagttgaatgcataggatggtcaagcacatcatgccatgatggcaaatctagaatg

SEQ ID NO: 414705 - DNA, 53 bp, Artificial
  Synthetic oligonucleotide
gctagatattacagcggatccaaccactgcgccacaaactgagcgtatgatgc

SEQ ID NO: 414706 - DNA, 53 bp, Artificial
  Synthetic oligonucleotide
gctagatcaattaagaactgagtattcaacgaatgtagataatgaaatgtacc

SEQ ID NO: 414707 - DNA, 55 bp, Artificial
  Synthetic oligonucleotide
gctagatcagtattgcaggaatcacctaatcctctcctatcaggtctcttttcag

SEQ ID NO: 414708 - DNA, 55 bp, Artificial
  Synthetic oligonucleotide
gctagatccattaccacggaaaccgcaaccttgttctttgaaacgattggatccc

SEQ ID NO: 414709 - DNA, 53 bp, Artificial
  Synthetic oligonucleotide
gctagatctgagagaacaagcataagggttgatattcgaggtaccttatttgt

SEQ ID NO: 414710 - DNA, 55 bp, Artificial
  Synthetic oligonucleotide
gctagatcttgcgcaactttctctggacgacaccagttctcttcgtggaactgcg

SEQ ID NO: 414711 - DNA, 55 bp, Artificial
  Synthetic oligonucleotide
gctagatgctgtaaggcaaattcttaatttcgcatttgtgcctagagctcattgg

SEQ ID NO: 414712 - DNA, 55 bp, Artificial
  Synthetic oligonucleotide
gctagatggatctagcaaacagtttcgctatttctgagttaccttaatctgaggg

SEQ ID NO: 414713 - DNA, 53 bp, Artificial
  Synthetic oligonucleotide
gctagatggggccgactcctgctacgaaataccacgcgagctcgaaatgctag

SEQ ID NO: 414714 - DNA, 56 bp, Artificial
  Synthetic oligonucleotide
gctagatgtgagaggagcaccaagattgatcctagccctcatggcttttttccgtt

SEQ ID NO: 414715 - DNA, 55 bp, Artificial
  Synthetic oligonucleotide
gctagattaactaaaccgaattacattctgtcaaatcatgagacatgcgcactga

SEQ ID NO: 414716 - DNA, 55 bp, Artificial
  Synthetic oligonucleotide
gctagattattcaggagttttaatcctctggatgtatgtaatcgaccagaagcag

SEQ ID NO: 414717 - DNA, 55 bp, Artificial
  Synthetic oligonucleotide
gctagattgccggatctggcttattatcgaggagactgcctaaatgtcgtttatg

SEQ ID NO: 414718 - DNA, 60 bp, Artificial
  Synthetic oligonucleotide
gctagatttaatcctacttttcgaatgtttgtcactcatgacaatgagcggtcgatttac

SEQ ID NO: 414719 - DNA, 55 bp, Artificial
  Synthetic oligonucleotide
gctagatttactgcagcgcttatagaatgtggaagttctgagctaggcctgcgtg

SEQ ID NO: 414720 - DNA, 55 bp, Artificial
  Synthetic oligonucleotide
gctagatttgattcagagattaccttagttccttctatagctgctcaaggagatg

SEQ ID NO: 414721 - DNA, 58 bp, Artificial
  Synthetic oligonucleotide
gctagatttggacaaaattcattattggccatctcctcgtaacgcacttttggaggaa

SEQ ID NO: 414722 - DNA, 55 bp, Artificial
  Synthetic oligonucleotide
gctagcaaagcatggaggcttcagcagtgagactctttcaactctagtaccgagc

SEQ ID NO: 414723 - DNA, 55 bp, Artificial
  Synthetic oligonucleotide
gctagcaaagttaaacctcagcatgtccacgctcggggtgtggactagacacact

SEQ ID NO: 414724 - DNA, 57 bp, Artificial
  Synthetic oligonucleotide
gctagcaacacaaggatttacccgagtgttggtaatgttaggtatagtgatattaag

SEQ ID NO: 414725 - DNA, 59 bp, Artificial
  Synthetic oligonucleotide
gctagcaacgagcaggcattggtcaagcgtttttggaaggtgaataactatgtagttta

SEQ ID NO: 414726 - DNA, 55 bp, Artificial
  Synthetic oligonucleotide
gctagcaagctggattcagagtgaattcaataaggcgtgtgaactgactgactcg

SEQ ID NO: 414727 - DNA, 57 bp, Artificial
  Synthetic oligonucleotide
gctagcaccaacataaaagacaatctggaggtagcgaagctaacacaagggcataaa

SEQ ID NO: 414728 - DNA, 56 bp, Artificial
  Synthetic oligonucleotide
gctagcacgggccggtaagagtgggaccaagtgccagtcacaccccttatggaaaa

SEQ ID NO: 414729 - DNA, 60 bp, Artificial
  Synthetic oligonucleotide
gctagcagagatacacctcggtggtctcttaagcatcctcccacggactaggctgacaat

SEQ ID NO: 414730 - DNA, 60 bp, Artificial
  Synthetic oligonucleotide
gctagcagctgcttaaccgcaaaaccacatcctatgtaaagcttgccgatgacgtgtatc

SEQ ID NO: 414731 - DNA, 55 bp, Artificial
  Synthetic oligonucleotide
gctagcagtcatgctagcaatcctgtgtatcagaccctgcgttgcagggcttatt

SEQ ID NO: 414732 - DNA, 51 bp, Artificial
  Synthetic oligonucleotide
gctagcagtggatgctacctcgaataccgaagaatggcgcccagcccccgg

SEQ ID NO: 414733 - DNA, 58 bp, Artificial
  Synthetic oligonucleotide
gctagcatcgtcttcggccacgtatttactcaaatcttccgattcgtttagcacacct

SEQ ID NO: 414734 - DNA, 55 bp, Artificial
  Synthetic oligonucleotide
gctagcatgcactagtaggtatgccatgtgcaacagagtcttatacagagttgaa

SEQ ID NO: 414735 - DNA, 55 bp, Artificial
  Synthetic oligonucleotide
gctagcatgcactcacaagcaagctaactcctgaagtttgtattttccttgagag

SEQ ID NO: 414736 - DNA, 55 bp, Artificial
  Synthetic oligonucleotide
gctagcattcactttgaaatccgccgcccgtaacgacttaagaagttcgacgacc

SEQ ID NO: 414737 - DNA, 55 bp, Artificial
  Synthetic oligonucleotide
gctagccactttagtgtacccacctgaactcttattcaagcaaaccaagagcctc

SEQ ID NO: 414738 - DNA, 60 bp, Artificial
  Synthetic oligonucleotide
gctagccagagaaacaccacagggagctctgtaggggcgacccgtgcccatgaggtgcac

SEQ ID NO: 414739 - DNA, 60 bp, Artificial
  Synthetic oligonucleotide
gctagccattgacatcttagcagattgttgtgagcaaacggaactcactaaaagtgttgt

SEQ ID NO: 414740 - DNA, 60 bp, Artificial
  Synthetic oligonucleotide
gctagcccatttagcgaagttatcagcctgttaagcttggatagaccgatgcatgagcaa

SEQ ID NO: 414741 - DNA, 55 bp, Artificial
  Synthetic oligonucleotide
gctagccgagctcatgagcggccttggcattcaagagttccacttggaagagatc

SEQ ID NO: 414742 - DNA, 55 bp, Artificial
  Synthetic oligonucleotide
gctagccgcccctactagagtgtacacaagtgtcataatgtagccccgacaaacc

SEQ ID NO: 414743 - DNA, 55 bp, Artificial
  Synthetic oligonucleotide
gctagcgaaacgtgaccctatgccttacgcccccgtattccacctaggtgcctac

SEQ ID NO: 414744 - DNA, 55 bp, Artificial
  Synthetic oligonucleotide
gctagcgaagtcaaacacaaccacggggtccacatgaaagccggatacggggtct

SEQ ID NO: 414745 - DNA, 55 bp, Artificial
  Synthetic oligonucleotide
gctagcgacaacgtgtatattattcatgggtttccaggtgaggttattggacccc

SEQ ID NO: 414746 - DNA, 60 bp, Artificial
  Synthetic oligonucleotide
gctagcgatgtagcagatgatgctgtttcgaattgaatagttgaccctctataaataacc

SEQ ID NO: 414747 - DNA, 55 bp, Artificial
  Synthetic oligonucleotide
gctagcgatgtcgaaacgtcgattagtcagtgcgtcgagtccaacgatgagtgtg

SEQ ID NO: 414748 - DNA, 60 bp, Artificial
  Synthetic oligonucleotide
gctagcgattccatctctgaccgtcttgtctgggatctacttccgccgcacgtttattca

SEQ ID NO: 414749 - DNA, 60 bp, Artificial
  Synthetic oligonucleotide
gctagcgattttctgggttacgcatgggctagtgttgctggtatctgggctccaattact

SEQ ID NO: 414750 - DNA, 60 bp, Artificial
  Synthetic oligonucleotide
gctagcgcgtgcattcaaaatatcggacgtctacgcgccccttatttcatctactacatc

SEQ ID NO: 414751 - DNA, 55 bp, Artificial
  Synthetic oligonucleotide
gctagcggagcctggatgaccacagaggacatgttggacgtctggaacagggtgt

SEQ ID NO: 414752 - DNA, 57 bp, Artificial
  Synthetic oligonucleotide
gctagcggaggtagcacccactgttgcaaagcatgcatggtccgttggttgcactat

SEQ ID NO: 414753 - DNA, 52 bp, Artificial
  Synthetic oligonucleotide
gctagcgggaacctcatatgagcttgctgagaactcgatgtacgtattctcc

SEQ ID NO: 414754 - DNA, 59 bp, Artificial
  Synthetic oligonucleotide
gctagcggggcctcatcctcgtagcactcgtccggaaagttgtgcgggagcctgacaaa

SEQ ID NO: 414755 - DNA, 60 bp, Artificial
  Synthetic oligonucleotide
gctagcggggtgctcaccactagcatggggaacactatcacatgctacgtaaaagcccta

SEQ ID NO: 414756 - DNA, 55 bp, Artificial
  Synthetic oligonucleotide
gctagcggtagtgataggagtaggactagcggtagttactaaccagctaactagg

SEQ ID NO: 414757 - DNA, 60 bp, Artificial
  Synthetic oligonucleotide
gctagcgtgacattggttgacttggattcgtccaggttctatataacgatgacccaagct

SEQ ID NO: 414758 - DNA, 55 bp, Artificial
  Synthetic oligonucleotide
gctagctattagtgttgtcttcataacatgcagagtgtactacggtcccgtggac

SEQ ID NO: 414759 - DNA, 59 bp, Artificial
  Synthetic oligonucleotide
gctagctcaagaatggacccgcgctatcggagaaggcgggctgtctctgaccagcggca

SEQ ID NO: 414760 - DNA, 55 bp, Artificial
  Synthetic oligonucleotide
gctagctcaagaggctaagcgaatcagcgagcaggcaaccgctgatataaccaaa

SEQ ID NO: 414761 - DNA, 51 bp, Artificial
  Synthetic oligonucleotide
gctagctcctggcgtccgtttccgggaggctcgagtgcattttcgcgagga

SEQ ID NO: 414762 - DNA, 60 bp, Artificial
  Synthetic oligonucleotide
gctagctctttacctgctttggctttgggtgctcaaagattgtatcttacttctgaaggc

SEQ ID NO: 414763 - DNA, 55 bp, Artificial
  Synthetic oligonucleotide
gctagctgaaaacaaagatgtcttagtaacaagagaaccctacatcagctgcgac

SEQ ID NO: 414764 - DNA, 58 bp, Artificial
  Synthetic oligonucleotide
gctagctgagattccattagaaaattaaaggccgcgcagcggaaccgaagactgaagt

SEQ ID NO: 414765 - DNA, 60 bp, Artificial
  Synthetic oligonucleotide
gctagctgtcgtcccattgacaggttcgctcaagggtggggtcccatcacccatgctgag

SEQ ID NO: 414766 - DNA, 55 bp, Artificial
  Synthetic oligonucleotide
gctagcttaccaagtcgcagcagcaggaatttcttaccatgatcggaggtggtgc

SEQ ID NO: 414767 - DNA, 55 bp, Artificial
  Synthetic oligonucleotide
gctagcttccctggttactttgtgagcacaacagatgtgaagaacgggtacgcgc

SEQ ID NO: 414768 - DNA, 55 bp, Artificial
  Synthetic oligonucleotide
gctagcttctgtagtgaacctcttaagttgcgattactaatagtcgctatgtgct

SEQ ID NO: 414769 - DNA, 60 bp, Artificial
  Synthetic oligonucleotide
gctagcttgctcagtcctagacccctagcatgcttgaaaggctcttcgggcggtcccatc

SEQ ID NO: 414770 - DNA, 60 bp, Artificial
  Synthetic oligonucleotide
gctagcttgctccataggctcagacccaagatctcgggatcaaggctacacttgctgtag

SEQ ID NO: 414771 - DNA, 54 bp, Artificial
  Synthetic oligonucleotide
gctagctttactaaccctttaggtatattattagaacacttacaaccagattgg

SEQ ID NO: 414772 - DNA, 55 bp, Artificial
  Synthetic oligonucleotide
gctaggaatgcgcagaacagatgtcgtagattgggaatcagccaccctgatcccg

SEQ ID NO: 414773 - DNA, 53 bp, Artificial
  Synthetic oligonucleotide
gctaggacagttacctttaaactatgggaggtacaaccccactagagataaag

SEQ ID NO: 414774 - DNA, 60 bp, Artificial
  Synthetic oligonucleotide
gctaggactacttcctacagttgctggtacagtgaaggtgtgtcttactgaaaagcaaga

SEQ ID NO: 414775 - DNA, 55 bp, Artificial
  Synthetic oligonucleotide
gctaggagaacaataacccaagcacttggtttgacgaacgtatcggacagaacac

SEQ ID NO: 414776 - DNA, 55 bp, Artificial
  Synthetic oligonucleotide
gctaggagacggaacatcagagacaactagtgtgaacgtcagagccctggtgaag

SEQ ID NO: 414777 - DNA, 59 bp, Artificial
  Synthetic oligonucleotide
gctaggagagaacaatgttatgccagacattattttgtaagagggggaaatgtaggtga

SEQ ID NO: 414778 - DNA, 55 bp, Artificial
  Synthetic oligonucleotide
gctaggagccgaaccgatggcccccacacgcgacggaaggcccggaagactacca

SEQ ID NO: 414779 - DNA, 55 bp, Artificial
  Synthetic oligonucleotide
gctaggagtctggggcggccagaacgagaggcaaagtaaagaaagcaacggggct

SEQ ID NO: 414780 - DNA, 55 bp, Artificial
  Synthetic oligonucleotide
gctaggataatgattaaacctagatgtatactctccgattctacctttgtttgcc

SEQ ID NO: 414781 - DNA, 59 bp, Artificial
  Synthetic oligonucleotide
gctaggattcattgaccaatcatttaatatagagccttttttcacttggaaattagcta

SEQ ID NO: 414782 - DNA, 55 bp, Artificial
  Synthetic oligonucleotide
gctaggcacgaatggtcaaggctgtacaagacggcagcttggcgtcgtctaaggg

SEQ ID NO: 414783 - DNA, 59 bp, Artificial
  Synthetic oligonucleotide
gctaggcagagttagaacattggatagattgacgtcaaatggaaggggaacgtattcta

SEQ ID NO: 414784 - DNA, 53 bp, Artificial
  Synthetic oligonucleotide
gctaggcagggatactcacctttgtcgttccagacccttatcccccaccagag

SEQ ID NO: 414785 - DNA, 56 bp, Artificial
  Synthetic oligonucleotide
gctaggccccgcccaacccagaggatgtcgtaccaaatcgacgttgtgcgtcctct

SEQ ID NO: 414786 - DNA, 58 bp, Artificial
  Synthetic oligonucleotide
gctaggcgagactcgctttgcgagcgtccataaggacggccccttcgggggctctctc

SEQ ID NO: 414787 - DNA, 59 bp, Artificial
  Synthetic oligonucleotide
gctaggcgattccactttgatatgaacatcgaagtcatctcaatgtatagccaaaatgg

SEQ ID NO: 414788 - DNA, 55 bp, Artificial
  Synthetic oligonucleotide
gctaggcgcgcctgtttaaacatggatccggccgcccttaattaacgtgggagtc

SEQ ID NO: 414789 - DNA, 60 bp, Artificial
  Synthetic oligonucleotide
gctaggcgctccttagctgctaactctagtgatgggtccacttccctccgtcaagatcct

SEQ ID NO: 414790 - DNA, 59 bp, Artificial
  Synthetic oligonucleotide
gctaggctccacgttaatggtgccaacatgactggaacggacaaaacgactcaaattgc

SEQ ID NO: 414791 - DNA, 58 bp, Artificial
  Synthetic oligonucleotide
gctaggcttcttctcagaactatccttacctggtggactgaaggacttcttccttgga

SEQ ID NO: 414792 - DNA, 56 bp, Artificial
  Synthetic oligonucleotide
gctaggcttcttctcagagttttccttacctggaggcacgaaggacttcttccttg

SEQ ID NO: 414793 - DNA, 57 bp, Artificial
  Synthetic oligonucleotide
gctaggcttcttctcagctggttccttacctggagggacgaagcacttcttccttgg

SEQ ID NO: 414794 - DNA, 60 bp, Artificial
  Synthetic oligonucleotide
gctagggaaaggatacatgttcgaaagtaagagcatgaagcttcgagcgcagataccagc

SEQ ID NO: 414795 - DNA, 54 bp, Artificial
  Synthetic oligonucleotide
gctagggaataccacaatttgttaaagtcctacgctttgtaccgcaatggttgg

SEQ ID NO: 414796 - DNA, 59 bp, Artificial
  Synthetic oligonucleotide
gctagggactaaacacagcaatgggaccattaaagacagaacaccatataggtctctaa

SEQ ID NO: 414797 - DNA, 55 bp, Artificial
  Synthetic oligonucleotide
gctagggatgactataggtgaggggaaagttaacgcaataattcatgttagtact

SEQ ID NO: 414798 - DNA, 55 bp, Artificial
  Synthetic oligonucleotide
gctagggatgtagagttcgctttacgtggtttgcagacaaaagatgaagcgtgga

SEQ ID NO: 414799 - DNA, 60 bp, Artificial
  Synthetic oligonucleotide
gctagggcgtatggcgtccacttccgatggtacaagccatcatcgtacgctgtccagcag

SEQ ID NO: 414800 - DNA, 55 bp, Artificial
  Synthetic oligonucleotide
gctagggctgtcagcctggatctattcatctcaaccctgaagcccttgagtgtgg

SEQ ID NO: 414801 - DNA, 57 bp, Artificial
  Synthetic oligonucleotide
gctaggggctcgaagtgcatcagggttcgggacttatgtgtacggaccggacaaaga

SEQ ID NO: 414802 - DNA, 57 bp, Artificial
  Synthetic oligonucleotide
gctagggtctcacccctagcatgtcatcggcagctcttgcgttgcactccacactta

SEQ ID NO: 414803 - DNA, 60 bp, Artificial
  Synthetic oligonucleotide
gctagggtctctgacggtgccagttcttctctagtgttgagtaatgcgcgtagtactaag

SEQ ID NO: 414804 - DNA, 56 bp, Artificial
  Synthetic oligonucleotide
gctagggtttcactgcaggcgggtgatagcttaaggtccattcaagacgtatcaac

SEQ ID NO: 414805 - DNA, 60 bp, Artificial
  Synthetic oligonucleotide
gctaggtcattgggttgacgcacgctggaatactaggacagtgttccattgctatggggc

SEQ ID NO: 414806 - DNA, 58 bp, Artificial
  Synthetic oligonucleotide
gctaggtccctaccgcggaaaggtgactgccggagaggtaatgtgaatggagcggtga

SEQ ID NO: 414807 - DNA, 55 bp, Artificial
  Synthetic oligonucleotide
gctaggtgcagacacgaaggtcatgatagagattcaagattaagagaactagttg

SEQ ID NO: 414808 - DNA, 60 bp, Artificial
  Synthetic oligonucleotide
gctaggtgttgacctaggaggtggtgctgaaatattgcaagccactagtgtcgttacact

SEQ ID NO: 414809 - DNA, 58 bp, Artificial
  Synthetic oligonucleotide
gctaggttgcccacgactggacctaagctagggccgacattgggaagccagagctagg

SEQ ID NO: 414810 - DNA, 55 bp, Artificial
  Synthetic oligonucleotide
gctaggttgcgctgccaactggatccttcgcgggacgtcctttgtttacgtcccg

SEQ ID NO: 414811 - DNA, 52 bp, Artificial
  Synthetic oligonucleotide
gctaggttgggcaaagggtacatgtttgagagtaagaacatgaagcttagga

SEQ ID NO: 414812 - DNA, 53 bp, Artificial
  Synthetic oligonucleotide
gctaggttttatcccaactctaccaaatatttgcccctagataaaggtattaa

SEQ ID NO: 414813 - DNA, 55 bp, Artificial
  Synthetic oligonucleotide
gctagtaaaagtgatgtgcccattgatatatgtagcagtgtatgtaagtatccag

SEQ ID NO: 414814 - DNA, 58 bp, Artificial
  Synthetic oligonucleotide
gctagtaaattccaccaaggtactctgatagtagcagccatacctgaacaccaactag

SEQ ID NO: 414815 - DNA, 55 bp, Artificial
  Synthetic oligonucleotide
gctagtaacatcttgtttgtaatctggcgttcgatcaggtggatttcccctccac

SEQ ID NO: 414816 - DNA, 51 bp, Artificial
  Synthetic oligonucleotide
gctagtaagttcgatgtaaaaagaaaatgcgagtgcaagaactgtggttgg

SEQ ID NO: 414817 - DNA, 55 bp, Artificial
  Synthetic oligonucleotide
gctagtaccagtcgacccacgggaagtggaagaggccaatgaaggagagaataac

SEQ ID NO: 414818 - DNA, 58 bp, Artificial
  Synthetic oligonucleotide
gctagtacgaaaatgtatctatgcgacgtagttatgcgtaaaggaaagcaaaattgaa

SEQ ID NO: 414819 - DNA, 55 bp, Artificial
  Synthetic oligonucleotide
gctagtacgagaccggagaccttatggaactcccatggatttcggacaggtgttc

SEQ ID NO: 414820 - DNA, 60 bp, Artificial
  Synthetic oligonucleotide
gctagtacgccgcgcgacctcataggcatgtcgactgtgatctctaagacggaggacagg

SEQ ID NO: 414821 - DNA, 60 bp, Artificial
  Synthetic oligonucleotide
gctagtactgtgaagactgaatacggcgagttcactatgctcggcgtctatgacaggtgg

SEQ ID NO: 414822 - DNA, 56 bp, Artificial
  Synthetic oligonucleotide
gctagtaggaaggaagtaatcattaggaaatgctttgacaacgattatcaagcttg

SEQ ID NO: 414823 - DNA, 55 bp, Artificial
  Synthetic oligonucleotide
gctagtaggatttgcgggatcgtagtcgggtttcagtgtatgcgattctacgagc

SEQ ID NO: 414824 - DNA, 55 bp, Artificial
  Synthetic oligonucleotide
gctagtataggtcataaacttaaaggtacggagacatatatatcccgtgatatgc

SEQ ID NO: 414825 - DNA, 60 bp, Artificial
  Synthetic oligonucleotide
gctagtatgatcaacgctgtcaacactcgtgttaacgctatcggagctgctgttcatttg

SEQ ID NO: 414826 - DNA, 60 bp, Artificial
  Synthetic oligonucleotide
gctagtattgagggcggcagatattatgaacacgctccgatagagttgatttacgcatgc

SEQ ID NO: 414827 - DNA, 60 bp, Artificial
  Synthetic oligonucleotide
gctagtcatctcaggtttgccagccgagccctgtattgtctcttgccgtcctcagttcgc

SEQ ID NO: 414828 - DNA, 57 bp, Artificial
  Synthetic oligonucleotide
gctagtccaaccagtgatgccggtagggtaaacatcagtgaaattatgaaaaactgt

SEQ ID NO: 414829 - DNA, 53 bp, Artificial
  Synthetic oligonucleotide
gctagtccaccacaaacggtaggtggtaaagaccagtcaaatccgttgacggt

SEQ ID NO: 414830 - DNA, 53 bp, Artificial
  Synthetic oligonucleotide
gctagtcgaaactgaaggtttattccttacaacgagtttcattagagcgaatc

SEQ ID NO: 414831 - DNA, 60 bp, Artificial
  Synthetic oligonucleotide
gctagtcgtggaagctaaggatgaagcgcgtgtaaggcaagggcttattgaatactatag

SEQ ID NO: 414832 - DNA, 60 bp, Artificial
  Synthetic oligonucleotide
gctagtcttagtccatttatgattagagaggcaggtagaattatgagtgaattatctgga

SEQ ID NO: 414833 - DNA, 55 bp, Artificial
  Synthetic oligonucleotide
gctagtgacaggacagacttagaacatgacaaagtggttctgcagctaaaggaac

SEQ ID NO: 414834 - DNA, 60 bp, Artificial
  Synthetic oligonucleotide
gctagtgactccatctctgaccgtctcgtctgggatttacttccaccgcacgtctattca

SEQ ID NO: 414835 - DNA, 55 bp, Artificial
  Synthetic oligonucleotide
gctagtgaggtaatgtgtatatgccgggacaactggcatggttcgaatcgaccat

SEQ ID NO: 414836 - DNA, 55 bp, Artificial
  Synthetic oligonucleotide
gctagtgatactacatggggagcagtccttatggcagtacctaatgcatacgaag

SEQ ID NO: 414837 - DNA, 59 bp, Artificial
  Synthetic oligonucleotide
gctagtgatgatgccaaactagtcgattttggacgaatagtcttgtcaacatacgggtt

SEQ ID NO: 414838 - DNA, 60 bp, Artificial
  Synthetic oligonucleotide
gctagtgattctgtctctgaccgccttgtctgggatttacttccgccacacgtttattca

SEQ ID NO: 414839 - DNA, 60 bp, Artificial
  Synthetic oligonucleotide
gctagtgcgagcaaggtagcttacactctacagacggacgtcaactccatacagcgaaca

SEQ ID NO: 414840 - DNA, 55 bp, Artificial
  Synthetic oligonucleotide
gctagtgcgtataacggcaatgacacagagggattactaaaagagattgaggacg

SEQ ID NO: 414841 - DNA, 60 bp, Artificial
  Synthetic oligonucleotide
gctagtgctcttcccggtatgttctttgcatacagagatgttcaccagcacattaagctg

SEQ ID NO: 414842 - DNA, 60 bp, Artificial
  Synthetic oligonucleotide
gctagtgctggtgaccgtgtggatgtcaaatccacatgaaccatgatggaatcgtcgttc

SEQ ID NO: 414843 - DNA, 55 bp, Artificial
  Synthetic oligonucleotide
gctagtggacgccatcttggttgtgacgtaagtggggggcaagccccccacgccc

SEQ ID NO: 414844 - DNA, 54 bp, Artificial
  Synthetic oligonucleotide
gctagtggctggttggtatggatttcagcaccaaaacgcagaggggacaggcat

SEQ ID NO: 414845 - DNA, 55 bp, Artificial
  Synthetic oligonucleotide
gctagtggtatccacgacggtgtcatgtgtcatatcgacccgttcacttctagcg

SEQ ID NO: 414846 - DNA, 55 bp, Artificial
  Synthetic oligonucleotide
gctagtgtaaccatggtggatttgagtgaagatcgattctacatcaccatgactc

SEQ ID NO: 414847 - DNA, 60 bp, Artificial
  Synthetic oligonucleotide
gctagtgtcgtccgcattgttttacatacgaattgggcaagtatgattgataactcacgt

SEQ ID NO: 414848 - DNA, 55 bp, Artificial
  Synthetic oligonucleotide
gctagtgtctcctttggagcacctagccctctctcttcggagagtgaagacgaag

SEQ ID NO: 414849 - DNA, 56 bp, Artificial
  Synthetic oligonucleotide
gctagttagttgattatgaatggacgtgttagttaaatttgctagtgattacgggt

SEQ ID NO: 414850 - DNA, 55 bp, Artificial
  Synthetic oligonucleotide
gctagttatgcctcgtacgtccgtgttcctgtcaactccacggtgtacttggacc

SEQ ID NO: 414851 - DNA, 55 bp, Artificial
  Synthetic oligonucleotide
gctagttcctcggctagccagctgtccgccccgtctcttaaggccacatgcaccg

SEQ ID NO: 414852 - DNA, 58 bp, Artificial
  Synthetic oligonucleotide
gctagttcggggtatcctatgccgaggatgcaacatggttgtctcccggtttgaagac

SEQ ID NO: 414853 - DNA, 51 bp, Artificial
  Synthetic oligonucleotide
gctagttctagcaatgcagtcaccatcagttcttctggccctattcaatag

SEQ ID NO: 414854 - DNA, 56 bp, Artificial
  Synthetic oligonucleotide
gctagttctgggtcgttcctagttctagacgaatacaccctactcactgaattacc

SEQ ID NO: 414855 - DNA, 58 bp, Artificial
  Synthetic oligonucleotide
gctagttgcaaagttcgcatcaagcctaccattcgtaggacagttcatgagctatcta

SEQ ID NO: 414856 - DNA, 56 bp, Artificial
  Synthetic oligonucleotide
gctagttggagtaataaatctctggaggagatctgggataatatgacctggatgcg

SEQ ID NO: 414857 - DNA, 55 bp, Artificial
  Synthetic oligonucleotide
gctagttggcctccacaatgtcattgccgtggacacaacagttatgttgtcgacg

SEQ ID NO: 414858 - DNA, 55 bp, Artificial
  Synthetic oligonucleotide
gctagttgtaaatggacagaagttgatgattacgttctggcaaatgagtgtattg

SEQ ID NO: 414859 - DNA, 54 bp, Artificial
  Synthetic oligonucleotide
gctagttgtcggcctcttaccgccttcgaccaagggtgggggcccatcacttac

SEQ ID NO: 414860 - DNA, 50 bp, Artificial
  Synthetic oligonucleotide
gctagtttaaattgtcctacaatcgtttctggactaatattcacttgtcg

SEQ ID NO: 414861 - DNA, 55 bp, Artificial
  Synthetic oligonucleotide
gctagtttaagagcttcgctgatacatgcaatagacagacttgctgactttacag

SEQ ID NO: 414862 - DNA, 60 bp, Artificial
  Synthetic oligonucleotide
gctagtttcaagcaggcgttgagcaacctagcccgacatggagaatacgcaccgttcgca

SEQ ID NO: 414863 - DNA, 55 bp, Artificial
  Synthetic oligonucleotide
gctagtttgaatgtaaatatgccagttccgaatttgaaatcatttgtcgcctgcg

SEQ ID NO: 414864 - DNA, 55 bp, Artificial
  Synthetic oligonucleotide
gctagtttgccgctagccttgtccaggtcgcgcgacgaaacgccaaacgcaccgt

SEQ ID NO: 414865 - DNA, 60 bp, Artificial
  Synthetic oligonucleotide
gctataaaatgggtgccaagtggtcaaagggatggcctgctatcagggaaagaatgagaa

SEQ ID NO: 414866 - DNA, 52 bp, Artificial
  Synthetic oligonucleotide
gctataaaatgggtggcaagtggtcaaaacgtagcatgggtgggtggactaa

SEQ ID NO: 414867 - DNA, 55 bp, Artificial
  Synthetic oligonucleotide
gctataaacacatagtttatgtaggagacccacaacagttacccgcaccacgtac

SEQ ID NO: 414868 - DNA, 60 bp, Artificial
  Synthetic oligonucleotide
gctataaactcaatagcagacctggcagatgaggctagaaactccccactggcgacagtg

SEQ ID NO: 414869 - DNA, 58 bp, Artificial
  Synthetic oligonucleotide
gctataaattcaagtatgcctttccacaatgttcaccccctcaccattggggaatgcc

SEQ ID NO: 414870 - DNA, 59 bp, Artificial
  Synthetic oligonucleotide
gctataacgggagttgatgtttgtaaactcctacgcactattatggtgaaggctagtca

SEQ ID NO: 414871 - DNA, 60 bp, Artificial
  Synthetic oligonucleotide
gctataagaaatgccttattaggacgcatagttagacataggtgtgagtaccaagcagga

SEQ ID NO: 414872 - DNA, 54 bp, Artificial
  Synthetic oligonucleotide
gctataaggtaaggagacggaggataaaaaaagctccggtcatacaatggttcc

SEQ ID NO: 414873 - DNA, 55 bp, Artificial
  Synthetic oligonucleotide
gctataaggtttagatactgtgcaccacctggttacgccctactaagatgcgatg

SEQ ID NO: 414874 - DNA, 57 bp, Artificial
  Synthetic oligonucleotide
gctataagtaacgtgcgcactaagtttcaaattcaaaaatgtgggatccactattaa

SEQ ID NO: 414875 - DNA, 59 bp, Artificial
  Synthetic oligonucleotide
gctataagttggtcccaaagattgaaatcaagagaatcaccaagaaagttccgattgca

SEQ ID NO: 414876 - DNA, 60 bp, Artificial
  Synthetic oligonucleotide
gctataatccatcgcttagtctgatgtatgcggtgcttagtgacttcacaggcgtggtac

SEQ ID NO: 414877 - DNA, 60 bp, Artificial
  Synthetic oligonucleotide
gctataatgaacaaagttaagacactgaatggaaatcagtatatttcaggaggagattct

SEQ ID NO: 414878 - DNA, 58 bp, Artificial
  Synthetic oligonucleotide
gctataatgatgcagagaggcaattttaggggcccaaagaaaatcatcaagtgtttca

SEQ ID NO: 414879 - DNA, 55 bp, Artificial
  Synthetic oligonucleotide
gctataatggatgaagcacactggaccgaccctcatagcatagcagcacgtggtc

SEQ ID NO: 414880 - DNA, 55 bp, Artificial
  Synthetic oligonucleotide
gctatacaatagaacggagtttgaaccatttcaatctttggtgcctaaagctgcc

SEQ ID NO: 414881 - DNA, 55 bp, Artificial
  Synthetic oligonucleotide
gctatacacaaagtgaacgagagaaggagagtcagggcagatgtacacttgacag

SEQ ID NO: 414882 - DNA, 60 bp, Artificial
  Synthetic oligonucleotide
gctatacacctttggactcaggtccaaatgcccacacagataattatgttggcctaagga

SEQ ID NO: 414883 - DNA, 55 bp, Artificial
  Synthetic oligonucleotide
gctatacagcgctttcctaaattgttgcttttgtgtcacaagcttcgggtaacta

SEQ ID NO: 414884 - DNA, 55 bp, Artificial
  Synthetic oligonucleotide
gctatacatcgagggaacattcatgcaatccgaagtcgttaacggcaacggtaga

SEQ ID NO: 414885 - DNA, 57 bp, Artificial
  Synthetic oligonucleotide
gctatacatttggggggtacaccacccgagcacaaaccaagagcaaaccagcctgta

SEQ ID NO: 414886 - DNA, 60 bp, Artificial
  Synthetic oligonucleotide
gctataccattcaattttctcaagaatgatatgtctgaccaggggattatcactgaggta

SEQ ID NO: 414887 - DNA, 60 bp, Artificial
  Synthetic oligonucleotide
gctataccccatagtagacctggcagatgaggctagaaataccccactggcaacagtgtt

SEQ ID NO: 414888 - DNA, 55 bp, Artificial
  Synthetic oligonucleotide
gctataccgttccatggtttcctagagctttccagttgactgtttgactacatcg

SEQ ID NO: 414889 - DNA, 60 bp, Artificial
  Synthetic oligonucleotide
gctatacctcttgtgatgaaacagattggttcgctggtaatgagtggtgtgagggtggtt

SEQ ID NO: 414890 - DNA, 57 bp, Artificial
  Synthetic oligonucleotide
gctatacgcagccgcaaggacccccagagactactaatactacgaaccccgaagata

SEQ ID NO: 414891 - DNA, 60 bp, Artificial
  Synthetic oligonucleotide
gctatacgctaagcactgatccaaccgcacttcccagaacagtggcaattatagaccacc

SEQ ID NO: 414892 - DNA, 60 bp, Artificial
  Synthetic oligonucleotide
gctatactagtgagttatgtgtgggtatcgctatgtcggaccacgtgtgatgtgtattcg

SEQ ID NO: 414893 - DNA, 55 bp, Artificial
  Synthetic oligonucleotide
gctatacttcgaaggggtggagtcttctcgcaccgatcacggcatatgcccagca

SEQ ID NO: 414894 - DNA, 55 bp, Artificial
  Synthetic oligonucleotide
gctatagaaaatctaggatagcatatggctaccaaagctgccacactcttctctc

SEQ ID NO: 414895 - DNA, 60 bp, Artificial
  Synthetic oligonucleotide
gctatagaagttatatttgatagctttgcatctccctctagtgatatagttgggggagtg

SEQ ID NO: 414896 - DNA, 55 bp, Artificial
  Synthetic oligonucleotide
gctatagaccagggcgctggcggctgttcaattaaaggtgtaaacatcgcatatg

SEQ ID NO: 414897 - DNA, 60 bp, Artificial
  Synthetic oligonucleotide
gctatagaggcgcaacagaatatgttgcaactcacggtctggggcattaagcagctccag

SEQ ID NO: 414898 - DNA, 55 bp, Artificial
  Synthetic oligonucleotide
gctatagcaaagcgctttcgtagcacattccttaatgttgacggtgaagactgtc

SEQ ID NO: 414899 - DNA, 60 bp, Artificial
  Synthetic oligonucleotide
gctatagcagtgcatttatcgttacaaagtttatatgcaagcgagtataaagatgaacca

SEQ ID NO: 414900 - DNA, 60 bp, Artificial
  Synthetic oligonucleotide
gctatagcatgcctacactgtacaaaatccagcgtatgtgtctcgaacggtgtaatctct

SEQ ID NO: 414901 - DNA, 60 bp, Artificial
  Synthetic oligonucleotide
gctatagcgcaggggccaccacgtacgtgccaatcaccgtgacagtggcgccgatgtgcg

SEQ ID NO: 414902 - DNA, 60 bp, Artificial
  Synthetic oligonucleotide
gctatagcgcgatttctagagagagaaacaatcggagtaccccaattgctctataagtcc

SEQ ID NO: 414903 - DNA, 57 bp, Artificial
  Synthetic oligonucleotide
gctatagctggtctgttcgaactaggagcattgggtggcctagcagtagatgctgcc

SEQ ID NO: 414904 - DNA, 55 bp, Artificial
  Synthetic oligonucleotide
gctataggcttggatgcgtctagatttgaccagcatgtttcactggaagcgcttg

SEQ ID NO: 414905 - DNA, 57 bp, Artificial
  Synthetic oligonucleotide
gctatagggagtccgtccgcgtcccgtaacaatagcttcagatcgcaggtggttaac

SEQ ID NO: 414906 - DNA, 60 bp, Artificial
  Synthetic oligonucleotide
gctataggtgatatacatgattctttttgtggctgtgactgtccttttgcacacctacta

SEQ ID NO: 414907 - DNA, 55 bp, Artificial
  Synthetic oligonucleotide
gctataggttgacaagttgtaacacctcagttattacacaggcctgtccaaaagt

SEQ ID NO: 414908 - DNA, 60 bp, Artificial
  Synthetic oligonucleotide
gctatagtgtcattccacccaacatacgattgtcctatggaacaactaggcggaattagc

SEQ ID NO: 414909 - DNA, 57 bp, Artificial
  Synthetic oligonucleotide
gctatagtgtttgtgtgtgttgagtattacccattgttatttattactggcaacacc

SEQ ID NO: 414910 - DNA, 60 bp, Artificial
  Synthetic oligonucleotide
gctatataacataaggctgcaacatctggaattatcaaagctgaagcaggagcaccccag

SEQ ID NO: 414911 - DNA, 51 bp, Artificial
  Synthetic oligonucleotide
gctatatacagatgtatctcaatgggattcatcccaacacaatacacaacc

SEQ ID NO: 414912 - DNA, 50 bp, Artificial
  Synthetic oligonucleotide
gctatatacttgcctgtagagtttacgtacgaactcctgcatcgcgggat

SEQ ID NO: 414913 - DNA, 60 bp, Artificial
  Synthetic oligonucleotide
gctatatagctgctaccttcccctggattgcacagcacgattgatggtatcccgccttta

SEQ ID NO: 414914 - DNA, 60 bp, Artificial
  Synthetic oligonucleotide
gctatatcacctggtgcttatggtggcttcagtatttcctgactagagcagaagcgcaac

SEQ ID NO: 414915 - DNA, 60 bp, Artificial
  Synthetic oligonucleotide
gctatatcagctggtgcttatggtggcttcagtatttcctgaccagagtggaagcactac

SEQ ID NO: 414916 - DNA, 55 bp, Artificial
  Synthetic oligonucleotide
gctatatcagtttgtcatggattcatttggagaagacgtgtcacaccaggcgcag

SEQ ID NO: 414917 - DNA, 60 bp, Artificial
  Synthetic oligonucleotide
gctatatccgataggacaagtgtaatttctgccgtaaagtatccaccacatgattttgct

SEQ ID NO: 414918 - DNA, 57 bp, Artificial
  Synthetic oligonucleotide
gctatatgagcgttcctcaagtgctgtgtgccgttaccagaacggtttctacggatg

SEQ ID NO: 414919 - DNA, 60 bp, Artificial
  Synthetic oligonucleotide
gctatatgccagaagtgatagacgaggtatagtaaccagtcatcacacattgggtgaaaa

SEQ ID NO: 414920 - DNA, 59 bp, Artificial
  Synthetic oligonucleotide
gctatattagtaatcctttatggcataggaaatatagaccaacccttaggatgaatgaa

SEQ ID NO: 414921 - DNA, 60 bp, Artificial
  Synthetic oligonucleotide
gctatattccccatatgggccgtctacttagcccattatatgccaaagtcagcccaactg

SEQ ID NO: 414922 - DNA, 55 bp, Artificial
  Synthetic oligonucleotide
gctatattggcattcatgctagaccacattaagaggtttaatgaagctaggagga

SEQ ID NO: 414923 - DNA, 60 bp, Artificial
  Synthetic oligonucleotide
gctatcaagtcctcaggaagtggagtgccacagtcactggtggtcagtatgcgagcaagg

SEQ ID NO: 414924 - DNA, 60 bp, Artificial
  Synthetic oligonucleotide
gctatcaatgtcgtcggcatcaaatggagaatctagacagcttaaatttggcagaaagac

SEQ ID NO: 414925 - DNA, 60 bp, Artificial
  Synthetic oligonucleotide
gctatcacaagcgatggtggcattgacccggaaaggtctaatcttgcggtcattcgactg

SEQ ID NO: 414926 - DNA, 55 bp, Artificial
  Synthetic oligonucleotide
gctatcaccaccctccaccgtgaccccaactacacccctccttgcacaacccgcc

SEQ ID NO: 414927 - DNA, 60 bp, Artificial
  Synthetic oligonucleotide
gctatcaccctctatgactatacttactggtcttaatggccgcgcagcggcagtgacaac

SEQ ID NO: 414928 - DNA, 60 bp, Artificial
  Synthetic oligonucleotide
gctatcaccgttgcgctgttgtcagggaaatatccgccggatttggtgacaaatgtatgg

SEQ ID NO: 414929 - DNA, 55 bp, Artificial
  Synthetic oligonucleotide
gctatcactgatccgcgctgaccttcgttttcagattaacggacttagcaccgag

SEQ ID NO: 414930 - DNA, 55 bp, Artificial
  Synthetic oligonucleotide
gctatcagcagagatgcgaaacttacccacgaaaggatgtcacgtacttcgactt

SEQ ID NO: 414931 - DNA, 60 bp, Artificial
  Synthetic oligonucleotide
gctatcagcagccgggattaatgttggaccaatatcaccagattacacacagcatatggc

SEQ ID NO: 414932 - DNA, 55 bp, Artificial
  Synthetic oligonucleotide
gctatcagtcaccagcgtctccgcagtggcgagtggccactacctgcacagagtg

SEQ ID NO: 414933 - DNA, 50 bp, Artificial
  Synthetic oligonucleotide
gctatcatctgccgctcacagctctccatacatacgatacgttcactcgc

SEQ ID NO: 414934 - DNA, 55 bp, Artificial
  Synthetic oligonucleotide
gctatccacagtagttggagtaggcttatgccatggtgccacgtaataacgagga

SEQ ID NO: 414935 - DNA, 60 bp, Artificial
  Synthetic oligonucleotide
gctatccaccatctatccagagcattccccaatgtgactgggtttgtcactcaaatgacg

SEQ ID NO: 414936 - DNA, 55 bp, Artificial
  Synthetic oligonucleotide
gctatccatactgtccaaagaagtaccttgtttctactaatacgagacgatatgg

SEQ ID NO: 414937 - DNA, 55 bp, Artificial
  Synthetic oligonucleotide
gctatcccagtagatggtggtatggggatgtacgatcttgccctcacggcgaagc

SEQ ID NO: 414938 - DNA, 55 bp, Artificial
  Synthetic oligonucleotide
gctatcccctaaacgagtggtaggtccagatgggctaatcattagtgaggtaaag

SEQ ID NO: 414939 - DNA, 60 bp, Artificial
  Synthetic oligonucleotide
gctatcccgctactatcaacaggtatatatgcagctggtaaggatcgcttggaagtttcg

SEQ ID NO: 414940 - DNA, 60 bp, Artificial
  Synthetic oligonucleotide
gctatccctcagacaacaacatctataactcacgcatgaaattacaagtcatgcatgaca

SEQ ID NO: 414941 - DNA, 53 bp, Artificial
  Synthetic oligonucleotide
gctatccgagattaagggggtgattgtccaccggctagagggggtctcgtaca

SEQ ID NO: 414942 - DNA, 60 bp, Artificial
  Synthetic oligonucleotide
gctatccgtggcccaggcctgctaagcgatcatagagaactggtgcggcttgccaaccgg

SEQ ID NO: 414943 - DNA, 60 bp, Artificial
  Synthetic oligonucleotide
gctatccttatatattatgtatggttaagcgatgtatcttctcaactagacatgtacagc

SEQ ID NO: 414944 - DNA, 57 bp, Artificial
  Synthetic oligonucleotide
gctatcgaagtcaacggtgtgtggtacaaccgagccgataatgcccccgtagcaaac

SEQ ID NO: 414945 - DNA, 60 bp, Artificial
  Synthetic oligonucleotide
gctatcgcgaggaatgcaggaaattccaagaggccaataggcagcccgaaagagcagtat

SEQ ID NO: 414946 - DNA, 55 bp, Artificial
  Synthetic oligonucleotide
gctatcgcgcgacccattccatatcacgttctccaaccgaactgtttggcgatcc

SEQ ID NO: 414947 - DNA, 60 bp, Artificial
  Synthetic oligonucleotide
gctatcgctcaatgttcgcgtgcctagaccttctgtgcctaagaaaggcctactcctcag

SEQ ID NO: 414948 - DNA, 55 bp, Artificial
  Synthetic oligonucleotide
gctatcggaatttccacaagttttcttccaagcactctgaagatgtttgacatgc

SEQ ID NO: 414949 - DNA, 55 bp, Artificial
  Synthetic oligonucleotide
gctatcgtcttcacttcgaatgcatcattcacacctcacattccacaatccccta

SEQ ID NO: 414950 - DNA, 60 bp, Artificial
  Synthetic oligonucleotide
gctatcgtttactcagagcactccaaaaagagcaagagacaagcagctcggaagaggagc

SEQ ID NO: 414951 - DNA, 55 bp, Artificial
  Synthetic oligonucleotide
gctatctacccgtggaaggcaaacaatcaaagaaaataaggggacacgaatcaga

SEQ ID NO: 414952 - DNA, 60 bp, Artificial
  Synthetic oligonucleotide
gctatctccagccgccttgaatatgctcaagagaggtcacggacttaaaatgagcgggcg

SEQ ID NO: 414953 - DNA, 60 bp, Artificial
  Synthetic oligonucleotide
gctatctcctatacaattgtactttgttccgagtaaatacaatcctgctgacggcccatc

SEQ ID NO: 414954 - DNA, 55 bp, Artificial
  Synthetic oligonucleotide
gctatctcgaggaaagacgttatgtcacgcaactatttggggagtgcccagcggg

SEQ ID NO: 414955 - DNA, 60 bp, Artificial
  Synthetic oligonucleotide
gctatctcttcgtaagacatattgatatttagtttgaaaacctcagggagctatgtgtcc

SEQ ID NO: 414956 - DNA, 60 bp, Artificial
  Synthetic oligonucleotide
gctatctgacgatggaccctgttctacttgtgatgagtgtcacgactcagataggtatga

SEQ ID NO: 414957 - DNA, 59 bp, Artificial
  Synthetic oligonucleotide
gctatctgatggcctgactgatagaaggacgcgttgtcaatacttgattaatccgtcaa

SEQ ID NO: 414958 - DNA, 60 bp, Artificial
  Synthetic oligonucleotide
gctatctgttaggaacatacctgcagaagtatttacaggtcaagccatagagaaagagat

SEQ ID NO: 414959 - DNA, 60 bp, Artificial
  Synthetic oligonucleotide
gctatctgttatggtgcagagagtgtaacattaacaagagggcaaaatacagtcaaggta

SEQ ID NO: 414960 - DNA, 55 bp, Artificial
  Synthetic oligonucleotide
gctatcttagctaggttttcatttaaagtttggactagactctttatttccatat

SEQ ID NO: 414961 - DNA, 60 bp, Artificial
  Synthetic oligonucleotide
gctatcttgtcaaaacttaaacctgtcgcgtccgatttctctgacttcagattagcgtgc

SEQ ID NO: 414962 - DNA, 55 bp, Artificial
  Synthetic oligonucleotide
gctatgaacagaagtcctgccaccatccctttggacctacttagagccagagact

SEQ ID NO: 414963 - DNA, 60 bp, Artificial
  Synthetic oligonucleotide
gctatgacatttgtactaataaggctcaagattgtcatgtttcttatgacagagccatag

SEQ ID NO: 414964 - DNA, 58 bp, Artificial
  Synthetic oligonucleotide
gctatgacccaggtcgccagtgcaatccacaacaacacctcagccaatggcggtgtcg

SEQ ID NO: 414965 - DNA, 55 bp, Artificial
  Synthetic oligonucleotide
gctatgacgaattttagaatcattaagtcctacactcctgcgtacatagcggaac

SEQ ID NO: 414966 - DNA, 56 bp, Artificial
  Synthetic oligonucleotide
gctatgagaattctttatgatgttagtatgacttcattcacatcaagtgatgatca

SEQ ID NO: 414967 - DNA, 55 bp, Artificial
  Synthetic oligonucleotide
gctatgagtcagtgcggaacacttgctcgctaaacgctcagcttagtccgtagtg

SEQ ID NO: 414968 - DNA, 55 bp, Artificial
  Synthetic oligonucleotide
gctatgataaacttcatgcgagacaaagaccccaacagaaatcaacctagtgaca

SEQ ID NO: 414969 - DNA, 55 bp, Artificial
  Synthetic oligonucleotide
gctatgatacaaacgagaaaggtggattatcatatgcgacgattaagtatgctac

SEQ ID NO: 414970 - DNA, 55 bp, Artificial
  Synthetic oligonucleotide
gctatgatacaacaatctcagtgcacaattcactatcagttaatagggatgggtg

SEQ ID NO: 414971 - DNA, 60 bp, Artificial
  Synthetic oligonucleotide
gctatgatcaaaagaaatttcaacagtccagagttatctggaattgtagacatagaaaac

SEQ ID NO: 414972 - DNA, 60 bp, Artificial
  Synthetic oligonucleotide
gctatgatgtaacgcctgcgtacgtcctcagcatcccaacggccctcgggccggcagctg

SEQ ID NO: 414973 - DNA, 54 bp, Artificial
  Synthetic oligonucleotide
gctatgcaagatgcgcaatccacaacttgcatcaatggcaccgagtcgaattca

SEQ ID NO: 414974 - DNA, 60 bp, Artificial
  Synthetic oligonucleotide
gctatgcactggtcaatgcccaaaaaagatacctgctgacccaaattggcttacattttc

SEQ ID NO: 414975 - DNA, 60 bp, Artificial
  Synthetic oligonucleotide
gctatgcacttgtaagaggctgcttgagaggacggtgctacgagtgcactaaggatggtg

SEQ ID NO: 414976 - DNA, 54 bp, Artificial
  Synthetic oligonucleotide
gctatgcagactatatgttgacacattgtaacacctcagtcattagacagacct

SEQ ID NO: 414977 - DNA, 55 bp, Artificial
  Synthetic oligonucleotide
gctatgcaggaatggaccaaccaaacacacaagacaaacacccactggcaccccg

SEQ ID NO: 414978 - DNA, 59 bp, Artificial
  Synthetic oligonucleotide
gctatgcatttgacttctatgaaataacatctcgtacaccgtcaagagcacgtgaagca

SEQ ID NO: 414979 - DNA, 55 bp, Artificial
  Synthetic oligonucleotide
gctatgcgtacgattcttcggactggatttggactcaggtttgttctccgcaccc

SEQ ID NO: 414980 - DNA, 55 bp, Artificial
  Synthetic oligonucleotide
gctatgctaaggccactccagtacgctaagcgtgagcgtttgcttggtcagagga

SEQ ID NO: 414981 - DNA, 60 bp, Artificial
  Synthetic oligonucleotide
gctatgcttatgccttggtcattgagtggtaacaatgatgcagtgctaaggttttataag

SEQ ID NO: 414982 - DNA, 60 bp, Artificial
  Synthetic oligonucleotide
gctatgcttgcattaacacatcatgtgattgtgcaggtagccgctttaaacagcggattc

SEQ ID NO: 414983 - DNA, 55 bp, Artificial
  Synthetic oligonucleotide
gctatggaagactatcaagtgcttgtgtaggcaaggttgcatatacattgcgcac

SEQ ID NO: 414984 - DNA, 55 bp, Artificial
  Synthetic oligonucleotide
gctatggacccgcaccagaggacaatataaagacaaactcagaggaatactaact

SEQ ID NO: 414985 - DNA, 60 bp, Artificial
  Synthetic oligonucleotide
gctatggacgggcgtgggtggtcaatgcgagcgatgatcccgagaggatgctacagccga

SEQ ID NO: 414986 - DNA, 55 bp, Artificial
  Synthetic oligonucleotide
gctatggataacagagaagggaacttcctaccctaaactcagcaaatcatacacg

SEQ ID NO: 414987 - DNA, 56 bp, Artificial
  Synthetic oligonucleotide
gctatggattataaacaaactcagttatgtattgtaggctgtactcctcctattgg

SEQ ID NO: 414988 - DNA, 60 bp, Artificial
  Synthetic oligonucleotide
gctatggatttgtagccaattttagtatggagctgcccagtttcggagtgtctgggatta

SEQ ID NO: 414989 - DNA, 60 bp, Artificial
  Synthetic oligonucleotide
gctatggcacggtccgtgtgtctggcaacatgatttggtcgtctggcattcgcgaggtca

SEQ ID NO: 414990 - DNA, 55 bp, Artificial
  Synthetic oligonucleotide
gctatggcctgcggtaaagattgtgcatgtattctgtgtcgtctactggatgaag

SEQ ID NO: 414991 - DNA, 54 bp, Artificial
  Synthetic oligonucleotide
gctatggccttagaagattcaggaccaaaagtaaacattgtgacagattcacaa

SEQ ID NO: 414992 - DNA, 60 bp, Artificial
  Synthetic oligonucleotide
gctatggcgaaagacttcaacgacttggtagagtaggacgcgtcaagcagggcacagccc

SEQ ID NO: 414993 - DNA, 60 bp, Artificial
  Synthetic oligonucleotide
gctatggctaaagctggtaaaggacttcttgaaggtacgttgcaagctggcacttctgcc

SEQ ID NO: 414994 - DNA, 60 bp, Artificial
  Synthetic oligonucleotide
gctatggctgacgaaaacggaggactcatacccaaagctgagcaattcctatgtgaacaa

SEQ ID NO: 414995 - DNA, 60 bp, Artificial
  Synthetic oligonucleotide
gctatggctgacggggaagaatggcttgtacccaaatctgagcaagtcctatgtgaacaa

SEQ ID NO: 414996 - DNA, 55 bp, Artificial
  Synthetic oligonucleotide
gctatggctggagaaggcgctactaccgctacaggccgcgttactatcggcgacg

SEQ ID NO: 414997 - DNA, 55 bp, Artificial
  Synthetic oligonucleotide
gctatgggatgctatcgttgtgactctggccccggggattactcaggtccactgc

SEQ ID NO: 414998 - DNA, 60 bp, Artificial
  Synthetic oligonucleotide
gctatggggcattcaccatccacctaccagtactgaccaacaaagtctctaccagaatgc

SEQ ID NO: 414999 - DNA, 55 bp, Artificial
  Synthetic oligonucleotide
gctatggggctgtgaagacgttccgtgccatgctacgcgctgtacccgagagtcg

SEQ ID NO: 415000 - DNA, 59 bp, Artificial
  Synthetic oligonucleotide
gctatgggtaattgtctaatagcttgcgctatcacgcatgactttttccgtcgtcgggg

SEQ ID NO: 415001 - DNA, 55 bp, Artificial
  Synthetic oligonucleotide
gctatgggtttccagtatgacgaccgctttgctgctttcgactgctttgattatg

SEQ ID NO: 415002 - DNA, 50 bp, Artificial
  Synthetic oligonucleotide
gctatggtaataataattagaaactcatctgatccacagacaatcatagc

SEQ ID NO: 415003 - DNA, 60 bp, Artificial
  Synthetic oligonucleotide
gctatggtgaagagcactgtcccgacgagaccgaataagtattggcctggcgttgtagcc

SEQ ID NO: 415004 - DNA, 55 bp, Artificial
  Synthetic oligonucleotide
gctatggttcattgttacaattcttggagtctatgctagtacatccgggcaagcc

SEQ ID NO: 415005 - DNA, 53 bp, Artificial
  Synthetic oligonucleotide
gctatggttcgacagtgctttgtgtattgtggacccactggtactggtaagtc

SEQ ID NO: 415006 - DNA, 60 bp, Artificial
  Synthetic oligonucleotide
gctatgtcaactgctgagatttcactgtcaggttcaccgagtaactctaaactccttgca

SEQ ID NO: 415007 - DNA, 60 bp, Artificial
  Synthetic oligonucleotide
gctatgtcacaattgatagatcttgcgttactaccgttagatatgttctcaatgttttca

SEQ ID NO: 415008 - DNA, 55 bp, Artificial
  Synthetic oligonucleotide
gctatgtcacagctaattgatttagcaacattgccactggacatgttttcaatgt

SEQ ID NO: 415009 - DNA, 60 bp, Artificial
  Synthetic oligonucleotide
gctatgtcaggaaaaatcaactaagacttggcatgagaatatcggcgctgcaatcgttaa

SEQ ID NO: 415010 - DNA, 60 bp, Artificial
  Synthetic oligonucleotide
gctatgtccttgggagtcagcatctgtgtgagtggttcctatggtgcttctacaagccca

SEQ ID NO: 415011 - DNA, 60 bp, Artificial
  Synthetic oligonucleotide
gctatgtcgctggagtgtgcgtctcagtgttccatctctcgagacacctgaagatacatt

SEQ ID NO: 415012 - DNA, 51 bp, Artificial
  Synthetic oligonucleotide
gctatgtctacacaagctgatgttgtttcaagtgcatatgcaaagatgtct

SEQ ID NO: 415013 - DNA, 60 bp, Artificial
  Synthetic oligonucleotide
gctatgtggatattcgattcaccatcattgttcgtctcttgcaggatagaatggaatgat

SEQ ID NO: 415014 - DNA, 55 bp, Artificial
  Synthetic oligonucleotide
gctatgtgtgcaaacaaggcttcaccgatcgtgggtggggtaacggatgcggact

SEQ ID NO: 415015 - DNA, 55 bp, Artificial
  Synthetic oligonucleotide
gctatgttaacacctgcttcgctgaactcaatggctagtctctcgaagtcagcca

SEQ ID NO: 415016 - DNA, 55 bp, Artificial
  Synthetic oligonucleotide
gctatgttaggcacccacataatttgggattttgggctacaatcctcagccaccc

SEQ ID NO: 415017 - DNA, 56 bp, Artificial
  Synthetic oligonucleotide
gctatgttcacttgtataagccttaaccctttaacttctaaggtgtcattaacaca

SEQ ID NO: 415018 - DNA, 58 bp, Artificial
  Synthetic oligonucleotide
gctatgttgtttggggaataaggtacgatgttgacccagtaggataggatgacttgga

SEQ ID NO: 415019 - DNA, 59 bp, Artificial
  Synthetic oligonucleotide
gctattaaatatttgcaggctgttgaggaaacttacgagcccaatacattgggccacga

SEQ ID NO: 415020 - DNA, 55 bp, Artificial
  Synthetic oligonucleotide
gctattaactgtcctaaattcaagaccgctgggctgcagtcaaaatccagccatg

SEQ ID NO: 415021 - DNA, 55 bp, Artificial
  Synthetic oligonucleotide
gctattaacttgcttgatacaatatcaatacttacagctgcggggacagatacgg

SEQ ID NO: 415022 - DNA, 55 bp, Artificial
  Synthetic oligonucleotide
gctattaatctgcttgataccatagcaatagcagtagctgaaggaacggatagga

SEQ ID NO: 415023 - DNA, 55 bp, Artificial
  Synthetic oligonucleotide
gctattaccacaatccttgctgcagtcacactctgtttcgcttctagtcaaaaca

SEQ ID NO: 415024 - DNA, 55 bp, Artificial
  Synthetic oligonucleotide
gctattatagatgctagtatggtttctctagtgtctgaaattacggctgacgttg

SEQ ID NO: 415025 - DNA, 51 bp, Artificial
  Synthetic oligonucleotide
gctattatgtgaactttccgtgctgcagtttgccaaatgacggcaatacag

SEQ ID NO: 415026 - DNA, 55 bp, Artificial
  Synthetic oligonucleotide
gctattcacaatgcttgctcctgctcgcaacgagtttctaaattcgctgtcagtc

SEQ ID NO: 415027 - DNA, 55 bp, Artificial
  Synthetic oligonucleotide
gctattcatccggactcattgtctactgatttgcagcttatgagggagggtgtct

SEQ ID NO: 415028 - DNA, 60 bp, Artificial
  Synthetic oligonucleotide
gctattcatggacaggtaaattcagaactagggacatggcaaatggactgtacacattta

SEQ ID NO: 415029 - DNA, 60 bp, Artificial
  Synthetic oligonucleotide
gctattcctgtgatacagtccggtgccactagcaaacgcgttcacacgcagcgtgaagct

SEQ ID NO: 415030 - DNA, 60 bp, Artificial
  Synthetic oligonucleotide
gctattcgcactcatgtcggatctagtgcagctcataagaagggagatcttactgttaac

SEQ ID NO: 415031 - DNA, 60 bp, Artificial
  Synthetic oligonucleotide
gctattcgccgagtgcatctgcgcgaacgagtatgctcagctctcttccaagacccaagc

SEQ ID NO: 415032 - DNA, 55 bp, Artificial
  Synthetic oligonucleotide
gctattcgcgcctatggatgcatctctcattacagagatacggaaaatagtactc

SEQ ID NO: 415033 - DNA, 60 bp, Artificial
  Synthetic oligonucleotide
gctattcgtactgatgtcggatctgcgtcagctcataaggagagagattctagctcttgt

SEQ ID NO: 415034 - DNA, 55 bp, Artificial
  Synthetic oligonucleotide
gctattctagcgcctacgatgtcgcacagggcgctttaaactcgtttacggtagg

SEQ ID NO: 415035 - DNA, 60 bp, Artificial
  Synthetic oligonucleotide
gctattctagtcctaacaatgaataactatgccaaggagtttgaaaggtggcaatcaatc

SEQ ID NO: 415036 - DNA, 60 bp, Artificial
  Synthetic oligonucleotide
gctattctcattggtattgcttagtgtcctttgtcctgtaagaaagcataaaaaatcata

SEQ ID NO: 415037 - DNA, 60 bp, Artificial
  Synthetic oligonucleotide
gctattctccacatacctataagaatcagacaggggcttgaaagggctttgctataacat

SEQ ID NO: 415038 - DNA, 55 bp, Artificial
  Synthetic oligonucleotide
gctattctccatgggcagcagattgtgcgcacatttccccgagtcgttgccgcac

SEQ ID NO: 415039 - DNA, 53 bp, Artificial
  Synthetic oligonucleotide
gctattcttcgtactattacgtggattgtgaatcattcagtgtctggcgtgag

SEQ ID NO: 415040 - DNA, 56 bp, Artificial
  Synthetic oligonucleotide
gctattcttgtacgtgctttgttagcaaaagaaattaggtgtggacatttaaaagc

SEQ ID NO: 415041 - DNA, 55 bp, Artificial
  Synthetic oligonucleotide
gctattgaactatgtgtaccaggtttccatggctgggctacagcagcacttctag

SEQ ID NO: 415042 - DNA, 58 bp, Artificial
  Synthetic oligonucleotide
gctattgaattgtcagttttaggagaacatagtggtgaatccactattgttaatcctt

SEQ ID NO: 415043 - DNA, 55 bp, Artificial
  Synthetic oligonucleotide
gctattgacatagaagagccaagtggacaaacagcagattggtataccattggag

SEQ ID NO: 415044 - DNA, 55 bp, Artificial
  Synthetic oligonucleotide
gctattgacgtcagcccaggactctagaatttagggagtcttgccaccgctaagc

SEQ ID NO: 415045 - DNA, 60 bp, Artificial
  Synthetic oligonucleotide
gctattgacttcgcatatgagttcgcttacagctacatccataagaaggtcatgcacaat

SEQ ID NO: 415046 - DNA, 60 bp, Artificial
  Synthetic oligonucleotide
gctattgcaaaccaggcagctatattgatgggacttgacaagggatggccaatatcgaag

SEQ ID NO: 415047 - DNA, 54 bp, Artificial
  Synthetic oligonucleotide
gctattgccacacatggaagtaagctatgtgttgccccggtgactccgtagact

SEQ ID NO: 415048 - DNA, 60 bp, Artificial
  Synthetic oligonucleotide
gctattgcgtcgttgcaaacgctaccagtatgcacaagtgaacgtctgtcacgttcgtaa

SEQ ID NO: 415049 - DNA, 60 bp, Artificial
  Synthetic oligonucleotide
gctattgcttcattcactctgtcctaaaccttaactgcgtgccgccactatatctttgag

SEQ ID NO: 415050 - DNA, 55 bp, Artificial
  Synthetic oligonucleotide
gctattggatatcactctgaaagcttacgacgataggaagtcaacgaaggacgcg

SEQ ID NO: 415051 - DNA, 60 bp, Artificial
  Synthetic oligonucleotide
gctattggcatttgcaaatagaggtaggatgcttaagtacttatgcagtaagcatagaag

SEQ ID NO: 415052 - DNA, 53 bp, Artificial
  Synthetic oligonucleotide
gctattggggaaagctttattaagtctttgaacgccccaagtaaagagggtga

SEQ ID NO: 415053 - DNA, 59 bp, Artificial
  Synthetic oligonucleotide
gctattggtcggttcccgcccacgtgacttcaagacagaggtcgacgtcatctatggac

SEQ ID NO: 415054 - DNA, 55 bp, Artificial
  Synthetic oligonucleotide
gctattgtccgatccgcttatcgggcagtcatcaacagtccaagaagagtgcggc

SEQ ID NO: 415055 - DNA, 58 bp, Artificial
  Synthetic oligonucleotide
gctattgtcgcctgaagaagtcagcgagacacaggggacagagaagctgacaataact

SEQ ID NO: 415056 - DNA, 52 bp, Artificial
  Synthetic oligonucleotide
gctattgtggagctttgctatgggtgtggctactactattgacaggtctatg

SEQ ID NO: 415057 - DNA, 55 bp, Artificial
  Synthetic oligonucleotide
gctattgttgtttgtaccgacgggccagtcgtattgcgttactgggcttacgagt

SEQ ID NO: 415058 - DNA, 53 bp, Artificial
  Synthetic oligonucleotide
gctatttacgattccattctgatttaaggtaatcatatagcagacggatcccg

SEQ ID NO: 415059 - DNA, 55 bp, Artificial
  Synthetic oligonucleotide
gctatttagaactggtgacttgaagcagtcagacttagacaaatatgacgctatg

SEQ ID NO: 415060 - DNA, 60 bp, Artificial
  Synthetic oligonucleotide
gctatttatctagctctgcaggattcaggatcagaagtgaacatagtaacagactcacaa

SEQ ID NO: 415061 - DNA, 53 bp, Artificial
  Synthetic oligonucleotide
gctatttccggtgacttttggcgcggcactttggatttatcgccacatgactc

SEQ ID NO: 415062 - DNA, 55 bp, Artificial
  Synthetic oligonucleotide
gctatttcgtgaataagtgtacagactattcccacctcgaatgcaactgctgggc

SEQ ID NO: 415063 - DNA, 55 bp, Artificial
  Synthetic oligonucleotide
gctatttctacctacaccactagcctgggtgccggtcccacctctatttccgcgg

SEQ ID NO: 415064 - DNA, 50 bp, Artificial
  Synthetic oligonucleotide
gctatttctagtacatatggaacacaaatgcatactcgaaggttgattag

SEQ ID NO: 415065 - DNA, 55 bp, Artificial
  Synthetic oligonucleotide
gctatttctttattgggaaagcaagatcagacaactgctagggagctttcaaatc

SEQ ID NO: 415066 - DNA, 59 bp, Artificial
  Synthetic oligonucleotide
gctatttgatagtcctcaaatggcacttttagcgtcggcgcgttgagaccaacggtcag

SEQ ID NO: 415067 - DNA, 55 bp, Artificial
  Synthetic oligonucleotide
gctatttgattattccaggtggaatgtgactcgttctggaacaagtaaagcatgc

SEQ ID NO: 415068 - DNA, 59 bp, Artificial
  Synthetic oligonucleotide
gctatttgggatagcctgtagtatgtgtgccaagataacagatagagaacgtatgctgg

SEQ ID NO: 415069 - DNA, 56 bp, Artificial
  Synthetic oligonucleotide
gctattttagtggcaaaatggatactgctgcttatagagaggctgcttgttctcaa

SEQ ID NO: 415070 - DNA, 59 bp, Artificial
  Synthetic oligonucleotide
gctattttatcgcccagtgcatgactaatttgttagtaggtaaatggtatgcggtccac

SEQ ID NO: 415071 - DNA, 60 bp, Artificial
  Synthetic oligonucleotide
gctattttcccactgcagaggatctaggctaaaggccataagtgcatgcctcaaaacctc

SEQ ID NO: 415072 - DNA, 58 bp, Artificial
  Synthetic oligonucleotide
gctatttttgcctcttcccaaacgttgtcgcaatggaggtgtgcttgcccaacggtca

SEQ ID NO: 415073 - DNA, 55 bp, Artificial
  Synthetic oligonucleotide
gctcaaaaggattgcattgtccgtttcgcagagaagagggttgaaaacactaagc

SEQ ID NO: 415074 - DNA, 56 bp, Artificial
  Synthetic oligonucleotide
gctcaaaatggtatgtatactccatctaattatacaccattacctagttataagtc

SEQ ID NO: 415075 - DNA, 60 bp, Artificial
  Synthetic oligonucleotide
gctcaaaattatgaggctcactggagaaggccccacttttgatgccaacacagagtgcaa

SEQ ID NO: 415076 - DNA, 55 bp, Artificial
  Synthetic oligonucleotide
gctcaaacagaagatcctaccagaattgaaagagagggcagaatttgtaaagaac

SEQ ID NO: 415077 - DNA, 60 bp, Artificial
  Synthetic oligonucleotide
gctcaaacaggaagctgtcagacactttcctagaacatgactccatgacttagggcaaca

SEQ ID NO: 415078 - DNA, 60 bp, Artificial
  Synthetic oligonucleotide
gctcaaactggagggctcaataatctaaagccagactgtgattgagcaaaacctggagtg

SEQ ID NO: 415079 - DNA, 55 bp, Artificial
  Synthetic oligonucleotide
gctcaaacttgatatcgaagagattggttgatggggtggtacctcaactgacttc

SEQ ID NO: 415080 - DNA, 59 bp, Artificial
  Synthetic oligonucleotide
gctcaaactttacgactcccaattccaaggatattctcagcacctaatcgtccagtatg

SEQ ID NO: 415081 - DNA, 60 bp, Artificial
  Synthetic oligonucleotide
gctcaaagaatccctaatcaactgtccttatgcgcttaatgactatgaagcagacactct

SEQ ID NO: 415082 - DNA, 55 bp, Artificial
  Synthetic oligonucleotide
gctcaaaggtgaaagctacggcagaataattcaaaatgaggatatacccatcggg

SEQ ID NO: 415083 - DNA, 57 bp, Artificial
  Synthetic oligonucleotide
gctcaaagtagaggggagattcttcgcactgatgtcttggaaccttcgactttactt

SEQ ID NO: 415084 - DNA, 60 bp, Artificial
  Synthetic oligonucleotide
gctcaaagtgtgcctttgcatcggcctatcacgagtttacacagtatcatcaggagaccg

SEQ ID NO: 415085 - DNA, 55 bp, Artificial
  Synthetic oligonucleotide
gctcaaataactagcgagcgagtgctccatccaactaacttaccgggaaacgtca

SEQ ID NO: 415086 - DNA, 60 bp, Artificial
  Synthetic oligonucleotide
gctcaaatagacactgtgttcagcagctactactggccttggaaggcaggagtgacacca

SEQ ID NO: 415087 - DNA, 60 bp, Artificial
  Synthetic oligonucleotide
gctcaaatcggccatgggtatctttcaatcaaaacttggagtatcaaataggatatatat

SEQ ID NO: 415088 - DNA, 50 bp, Artificial
  Synthetic oligonucleotide
gctcaaatcttacggctaagaaaggtgcgattgtgatgtttatgcgaaaa

SEQ ID NO: 415089 - DNA, 55 bp, Artificial
  Synthetic oligonucleotide
gctcaaatggcagttcagcaatacctgcgagttgggtacgtcgaagaacgccggt

SEQ ID NO: 415090 - DNA, 59 bp, Artificial
  Synthetic oligonucleotide
gctcaaattagaagaaagtgtgaactattcacataccttaggtttgactctgagattac

SEQ ID NO: 415091 - DNA, 60 bp, Artificial
  Synthetic oligonucleotide
gctcaaattagaagcgtgccagttggccgtgctctgctcctaccggagtattctactctt

SEQ ID NO: 415092 - DNA, 60 bp, Artificial
  Synthetic oligonucleotide
gctcaaattcattctataggagcatgagatggctgacccacaatagtaattcctaccctt

SEQ ID NO: 415093 - DNA, 55 bp, Artificial
  Synthetic oligonucleotide
gctcaacacaaagtaaacgacgcttccatcttttccgggtggaaggcttgccaaa

SEQ ID NO: 415094 - DNA, 60 bp, Artificial
  Synthetic oligonucleotide
gctcaacacccattcctaccactgtgatggccaaaaatgaagtgttctgtgtagacagtt

SEQ ID NO: 415095 - DNA, 55 bp, Artificial
  Synthetic oligonucleotide
gctcaacacgactgccttgagattttggccgagacgcacgggaccagaccagacc

SEQ ID NO: 415096 - DNA, 55 bp, Artificial
  Synthetic oligonucleotide
gctcaacactatagggacattcgagaatagaacgtttgagtatgccgttggggcg

SEQ ID NO: 415097 - DNA, 55 bp, Artificial
  Synthetic oligonucleotide
gctcaacactcacaatctctcatcaagcccatgagagacttcctcttgatgtcag

SEQ ID NO: 415098 - DNA, 55 bp, Artificial
  Synthetic oligonucleotide
gctcaacagggtcattgctggttccttcaatgtcaatccatgttgtgtgggaagg

SEQ ID NO: 415099 - DNA, 55 bp, Artificial
  Synthetic oligonucleotide
gctcaacagtgttcaatgaagccagacgatcattcaagatagcgttttcttgttg

SEQ ID NO: 415100 - DNA, 55 bp, Artificial
  Synthetic oligonucleotide
gctcaacatgtagaggaatgttcctgttatccccaacactcaaatgtgaggtgcg

SEQ ID NO: 415101 - DNA, 55 bp, Artificial
  Synthetic oligonucleotide
gctcaaccagctccgatgattggtagtattgttgctgatacggtaaatccttccg

SEQ ID NO: 415102 - DNA, 55 bp, Artificial
  Synthetic oligonucleotide
gctcaacccagctgctatgagtgttgagcggtttagcgtcctagactatccggag

SEQ ID NO: 415103 - DNA, 55 bp, Artificial
  Synthetic oligonucleotide
gctcaacccttacctcgcccacctctcagccatgtacaccggctgggttgggaac

SEQ ID NO: 415104 - DNA, 57 bp, Artificial
  Synthetic oligonucleotide
gctcaaccgagtgggcccaatgaccttaaaggcgggactaagggatcatctcaagtg

SEQ ID NO: 415105 - DNA, 55 bp, Artificial
  Synthetic oligonucleotide
gctcaacctcaatgactggcttctttggaatacttggtcttctcaccttctttgc

SEQ ID NO: 415106 - DNA, 55 bp, Artificial
  Synthetic oligonucleotide
gctcaacctgatgttaacatggaaggacctgcaggatatgcacctgcaacatcac

SEQ ID NO: 415107 - DNA, 60 bp, Artificial
  Synthetic oligonucleotide
gctcaacctttaaatgctgtcatggagaagagtgctcacaaattgggctccatgctgccg

SEQ ID NO: 415108 - DNA, 55 bp, Artificial
  Synthetic oligonucleotide
gctcaacctttgcgtgtaccttgggcgcaccatacggacgcaatctcgccagccc

SEQ ID NO: 415109 - DNA, 60 bp, Artificial
  Synthetic oligonucleotide
gctcaacgacctggcccacatggtcttccctgtcctgctatccccctcaatcacaatact

SEQ ID NO: 415110 - DNA, 50 bp, Artificial
  Synthetic oligonucleotide
gctcaacgttcgggggtattctagtcaatcagtttgcatactcactctac

SEQ ID NO: 415111 - DNA, 50 bp, Artificial
  Synthetic oligonucleotide
gctcaactcacatctaagactcaggccgtgatcatggccaaccatgagcg

SEQ ID NO: 415112 - DNA, 59 bp, Artificial
  Synthetic oligonucleotide
gctcaactcttccgaggaggtctggggccgctggagcagcagtgaaaggggttggaaca

SEQ ID NO: 415113 - DNA, 60 bp, Artificial
  Synthetic oligonucleotide
gctcaactgagcttaagcaccagatcgagctccttcgagcagatctaagggagatcaagg

SEQ ID NO: 415114 - DNA, 55 bp, Artificial
  Synthetic oligonucleotide
gctcaactggatcccctttcttaatgtcatgtctttccagggtctcaatattcga

SEQ ID NO: 415115 - DNA, 55 bp, Artificial
  Synthetic oligonucleotide
gctcaactggctccgacggaggtttgcatgacaacgcacgaagttgagtacctgc

SEQ ID NO: 415116 - DNA, 55 bp, Artificial
  Synthetic oligonucleotide
gctcaacttaggggaatggctgagacagtgggattagccaatgcttgttatgctg

SEQ ID NO: 415117 - DNA, 60 bp, Artificial
  Synthetic oligonucleotide
gctcaacttgagtacctagatctagctgactctaaggtctcaaacaaagatttggctcat

SEQ ID NO: 415118 - DNA, 55 bp, Artificial
  Synthetic oligonucleotide
gctcaagaaccacacgaacagttgcatgttctggctagtcagggaccgtagaccg

SEQ ID NO: 415119 - DNA, 60 bp, Artificial
  Synthetic oligonucleotide
gctcaagaagattcaggttctatgacttatatagactgtaattctcatccgttaatggac

SEQ ID NO: 415120 - DNA, 60 bp, Artificial
  Synthetic oligonucleotide
gctcaagaatctcttctcttccatcgcgcttcttcctcgattcggatcggctcatctcga

SEQ ID NO: 415121 - DNA, 55 bp, Artificial
  Synthetic oligonucleotide
gctcaagacatattggaaaagacacacaacgggaagctctgcagtctaaatggag

SEQ ID NO: 415122 - DNA, 58 bp, Artificial
  Synthetic oligonucleotide
gctcaagccatcaactgggcaatgcacttgtccgccagaccacattcggcactaacga

SEQ ID NO: 415123 - DNA, 60 bp, Artificial
  Synthetic oligonucleotide
gctcaagccggtcttgaagtgcaacctcctacaaactctgactctcgacagcgtgccaaa

SEQ ID NO: 415124 - DNA, 60 bp, Artificial
  Synthetic oligonucleotide
gctcaagcgcaaatgtgaagttaaagaccgattttagtggtggccgtatacatcatgaac

SEQ ID NO: 415125 - DNA, 60 bp, Artificial
  Synthetic oligonucleotide
gctcaaggacattgctgaatgtgaagacacatatcttgagaaggcgtatgcctcacaaga

SEQ ID NO: 415126 - DNA, 55 bp, Artificial
  Synthetic oligonucleotide
gctcaaggcaaccaacgagctgacttggcaactaaaatcgtggctagtaacataa

SEQ ID NO: 415127 - DNA, 55 bp, Artificial
  Synthetic oligonucleotide
gctcaaggctcgttgtgcactggaatggacggtctcaatcaatcgcagcgaagag

SEQ ID NO: 415128 - DNA, 58 bp, Artificial
  Synthetic oligonucleotide
gctcaaggtctgaactattcccatgtgtgggataatcttggtattgagtcctttgtag

SEQ ID NO: 415129 - DNA, 55 bp, Artificial
  Synthetic oligonucleotide
gctcaagtcgaagaatcaaggacgaggagcaaattaggattttctcttgaccacg

SEQ ID NO: 415130 - DNA, 58 bp, Artificial
  Synthetic oligonucleotide
gctcaagtggcccctatagtagctgggccaatgggggcaacgtatacagcttttaatc

SEQ ID NO: 415131 - DNA, 58 bp, Artificial
  Synthetic oligonucleotide
gctcaagttagccaccggacttaggaatgtacctgccatatcaaacagagggttgttc

SEQ ID NO: 415132 - DNA, 55 bp, Artificial
  Synthetic oligonucleotide
gctcaagtttattgaggtcgatgtaatcaaggctttctgtcataactctaatctc

SEQ ID NO: 415133 - DNA, 57 bp, Artificial
  Synthetic oligonucleotide
gctcaataaaagaacacaagatttttgggaagttcaattgggaatcccacatccagc

SEQ ID NO: 415134 - DNA, 53 bp, Artificial
  Synthetic oligonucleotide
gctcaataaaagaacccaggacttttgggaaattcaattaggaataccacacc

SEQ ID NO: 415135 - DNA, 55 bp, Artificial
  Synthetic oligonucleotide
gctcaatgtctgccggcgtccaactttaccttctgatgaatgcattgttgcagca

SEQ ID NO: 415136 - DNA, 57 bp, Artificial
  Synthetic oligonucleotide
gctcaattattgggcctctgttcactaaggccttataaggcccttaatgaattgggc

SEQ ID NO: 415137 - DNA, 60 bp, Artificial
  Synthetic oligonucleotide
gctcaattcactccattcccaagggacgggcccatagcagtgtcaagaccattgggcagt

SEQ ID NO: 415138 - DNA, 50 bp, Artificial
  Synthetic oligonucleotide
gctcaattggacatttagacccaattctagacatcgatgcacatcttatg

SEQ ID NO: 415139 - DNA, 55 bp, Artificial
  Synthetic oligonucleotide
gctcaatttgggagttgcgatattccaaagcatgtagccgagtccatcactaagg

SEQ ID NO: 415140 - DNA, 57 bp, Artificial
  Synthetic oligonucleotide
gctcacaaaaagggccataaccctcgctttaaacaataccctgagtcattcactctg

SEQ ID NO: 415141 - DNA, 55 bp, Artificial
  Synthetic oligonucleotide
gctcacaaagcatccgaccttaggttctggtaatgacgaggcgacccgtcgtacc

SEQ ID NO: 415142 - DNA, 58 bp, Artificial
  Synthetic oligonucleotide
gctcacaacgagagctagaagggcaactcgggtttctcgtaagggatcccagcctgct

SEQ ID NO: 415143 - DNA, 58 bp, Artificial
  Synthetic oligonucleotide
gctcacaaggtgagaattgacgaagttattagtcgagaggccagaaaggtcggcaaaa

SEQ ID NO: 415144 - DNA, 55 bp, Artificial
  Synthetic oligonucleotide
gctcacacagccatcctctagtaagtttgtgagacgtctggagacgtgtgggaac

SEQ ID NO: 415145 - DNA, 55 bp, Artificial
  Synthetic oligonucleotide
gctcacacatttctaaccccaagaagcttaaagtacgccctgtcaacaacgcccc

SEQ ID NO: 415146 - DNA, 60 bp, Artificial
  Synthetic oligonucleotide
gctcacacccgccgagaccacagttaggctacgagcttacatgaacactccagggcttcc

SEQ ID NO: 415147 - DNA, 60 bp, Artificial
  Synthetic oligonucleotide
gctcacactacaacaaccccaaaagccttgttgatgacaacagttgctatatccctattg

SEQ ID NO: 415148 - DNA, 60 bp, Artificial
  Synthetic oligonucleotide
gctcacactgatgtccgtgagtcactctcgaggtttattcccgccatcggccctgtgcaa

SEQ ID NO: 415149 - DNA, 55 bp, Artificial
  Synthetic oligonucleotide
gctcacagacccttcagcgtggtgataatacagtaacaatccaagggagaggtgg

SEQ ID NO: 415150 - DNA, 55 bp, Artificial
  Synthetic oligonucleotide
gctcacagcacacattgcaaattgtcggacctgatggagattactaccttcccta

SEQ ID NO: 415151 - DNA, 55 bp, Artificial
  Synthetic oligonucleotide
gctcacagcatcagagccgtccggcttctgtcgcatcttcacgttgacaggggac

SEQ ID NO: 415152 - DNA, 60 bp, Artificial
  Synthetic oligonucleotide
gctcacagcgtaatcctctattagaccagcgacatttggcgtgcccgttataatgaacga

SEQ ID NO: 415153 - DNA, 55 bp, Artificial
  Synthetic oligonucleotide
gctcacagtgagctcatggtcctatattgtggaaacatcaaactccgataatggg

SEQ ID NO: 415154 - DNA, 59 bp, Artificial
  Synthetic oligonucleotide
gctcacagtgttagcttttcggagctcaccagaacatttcaaagtgacaagactatgag

SEQ ID NO: 415155 - DNA, 55 bp, Artificial
  Synthetic oligonucleotide
gctcacatcgtcgtaggcgttctattggccaaaatgtaacaagttgtccttatgt

SEQ ID NO: 415156 - DNA, 55 bp, Artificial
  Synthetic oligonucleotide
gctcacattcagctttggtgggacaaagacgcagatgttttctatctggcgcgtg

SEQ ID NO: 415157 - DNA, 60 bp, Artificial
  Synthetic oligonucleotide
gctcaccaaaacgcgacatccacaagcttgttgcccaactctgttttccagagaatggcc

SEQ ID NO: 415158 - DNA, 57 bp, Artificial
  Synthetic oligonucleotide
gctcaccacaaacggacgtcgcctaggcgacaaccgcaacttctgctttgcggttag

SEQ ID NO: 415159 - DNA, 58 bp, Artificial
  Synthetic oligonucleotide
gctcaccacagtcacgcagccaactaaggctaattatagggtgcatagtgtggccgca

SEQ ID NO: 415160 - DNA, 55 bp, Artificial
  Synthetic oligonucleotide
gctcaccacattttgagcaagtacaaacaccggccagttcacttaattcaaattc

SEQ ID NO: 415161 - DNA, 60 bp, Artificial
  Synthetic oligonucleotide
gctcaccattcagatgacgcactgtttatatatggttatcttgagccaatcgatgatgga

SEQ ID NO: 415162 - DNA, 55 bp, Artificial
  Synthetic oligonucleotide
gctcaccatttctgcacacattaacaagagtactgtatcagaaaagatggggagg

SEQ ID NO: 415163 - DNA, 59 bp, Artificial
  Synthetic oligonucleotide
gctcaccatttggggtgtcaaaaacctcaatgcccgcgtcacagctcttgagaagtacc

SEQ ID NO: 415164 - DNA, 58 bp, Artificial
  Synthetic oligonucleotide
gctcaccccagtggtacgcggtaataccacagcagctatcaacaccatccctgaacgg

SEQ ID NO: 415165 - DNA, 58 bp, Artificial
  Synthetic oligonucleotide
gctcaccccccttggtgactctatccgtaggatacaagagtctgtgactacatctgga

SEQ ID NO: 415166 - DNA, 55 bp, Artificial
  Synthetic oligonucleotide
gctcaccgcttactcaccgctttggacatgcgaaccctggaccggccgcaattac

SEQ ID NO: 415167 - DNA, 55 bp, Artificial
  Synthetic oligonucleotide
gctcacctactaatatgtggtagtggacgctttactttattaaaagtggttggtc

SEQ ID NO: 415168 - DNA, 55 bp, Artificial
  Synthetic oligonucleotide
gctcacctagtggcgagagtggcctcagatgacggtacttactacaagtccaggt

SEQ ID NO: 415169 - DNA, 56 bp, Artificial
  Synthetic oligonucleotide
gctcacctcttacctcccaaacgaaatacaactcccatttccactgatgcccaaaa

SEQ ID NO: 415170 - DNA, 55 bp, Artificial
  Synthetic oligonucleotide
gctcacgaagggcaggtaccaagcttacagtttctagccctaagggtcatacagg

SEQ ID NO: 415171 - DNA, 55 bp, Artificial
  Synthetic oligonucleotide
gctcacgccaccggctctgtgtgtgccggtcagcatccggcattcccggccggga

SEQ ID NO: 415172 - DNA, 60 bp, Artificial
  Synthetic oligonucleotide
gctcacgctctgctgaggatatgcactatggtaaggcatctcgcggggggtaggtacgtc

SEQ ID NO: 415173 - DNA, 55 bp, Artificial
  Synthetic oligonucleotide
gctcacggatgaggagtacgatgagttcaagaaacgccgcgaatccaagggcggc

SEQ ID NO: 415174 - DNA, 58 bp, Artificial
  Synthetic oligonucleotide
gctcacggctgcatgcaatttcactcgtggggatcgttgcaacttggaggacagagac

SEQ ID NO: 415175 - DNA, 55 bp, Artificial
  Synthetic oligonucleotide
gctcacgtcactattggtcatggctgaagcaatgctgccccaacggtcccgaaca

SEQ ID NO: 415176 - DNA, 55 bp, Artificial
  Synthetic oligonucleotide
gctcacgtcgtactttgaaagccggcgcgcgtactgtagaaaatcaatggaccgg

SEQ ID NO: 415177 - DNA, 53 bp, Artificial
  Synthetic oligonucleotide
gctcactaggattgctgtggcccgtattctccttaggtgcaccatgtggcacc

SEQ ID NO: 415178 - DNA, 60 bp, Artificial
  Synthetic oligonucleotide
gctcactagtattgcaattccaaaggtgctgcactctgaccaaggggcagcattcacctc

SEQ ID NO: 415179 - DNA, 55 bp, Artificial
  Synthetic oligonucleotide
gctcactataaactacgcacattaatcaacatgaccagaatcacttatcgggact

SEQ ID NO: 415180 - DNA, 59 bp, Artificial
  Synthetic oligonucleotide
gctcactcaacgaattacgacgactgggccttttgcaatattgaccggatcaacgccaa

SEQ ID NO: 415181 - DNA, 55 bp, Artificial
  Synthetic oligonucleotide
gctcactcaagcacctatcttgatgatgaactcggattcgttactgagcagatgc

SEQ ID NO: 415182 - DNA, 58 bp, Artificial
  Synthetic oligonucleotide
gctcactcaccaaaacttcagacactctatgcaaccctagtcctccctccggaagccc

SEQ ID NO: 415183 - DNA, 55 bp, Artificial
  Synthetic oligonucleotide
gctcactccccgctgcatggtagactacccctaccggctgtggcactatccttgc

SEQ ID NO: 415184 - DNA, 59 bp, Artificial
  Synthetic oligonucleotide
gctcactccgtagctaagtacggcgccttggctaggcaaaagatctccacaggtaatta

SEQ ID NO: 415185 - DNA, 55 bp, Artificial
  Synthetic oligonucleotide
gctcactgaataaattgattagtctttgctcaagaacccagagagcagtgttgtg

SEQ ID NO: 415186 - DNA, 60 bp, Artificial
  Synthetic oligonucleotide
gctcactgaatggaatcagcccaattcatcttggtgactgcagctttgagggatggatcg

SEQ ID NO: 415187 - DNA, 60 bp, Artificial
  Synthetic oligonucleotide
gctcactgacaccctgtacctgcggctcctcggacctttacctggtcacgaggcatgccg

SEQ ID NO: 415188 - DNA, 60 bp, Artificial
  Synthetic oligonucleotide
gctcactgatccctcccacataacagcggaggcggccaggagaaggttagcgagagggtc

SEQ ID NO: 415189 - DNA, 59 bp, Artificial
  Synthetic oligonucleotide
gctcactgctgtggaaacgggacacacatcacaagtggaacccagtgacacagtgcaga

SEQ ID NO: 415190 - DNA, 55 bp, Artificial
  Synthetic oligonucleotide
gctcacttaacaccaccgatcattctgaacctaattccacatggaatcgtggggt

SEQ ID NO: 415191 - DNA, 60 bp, Artificial
  Synthetic oligonucleotide
gctcacttagcacagacagcctaccgcttcgccggccaactgccacaatcacccgattca

SEQ ID NO: 415192 - DNA, 59 bp, Artificial
  Synthetic oligonucleotide
gctcactttgaacccgggcctcgagactttttgaatatcacgagagactttgcagacac

SEQ ID NO: 415193 - DNA, 55 bp, Artificial
  Synthetic oligonucleotide
gctcagaatgtgtgcttggttttattggccagaagtgattgggattgtttaggtg

SEQ ID NO: 415194 - DNA, 55 bp, Artificial
  Synthetic oligonucleotide
gctcagacaaagtgtaccgattgcggtcgaaactctcacgctaggtaagtgttgt

SEQ ID NO: 415195 - DNA, 55 bp, Artificial
  Synthetic oligonucleotide
gctcagacgacttcgttacaggtagctgtggaagagacgtgcaacacgcaagaca

SEQ ID NO: 415196 - DNA, 55 bp, Artificial
  Synthetic oligonucleotide
gctcagactaacgctaacaacgcttggcctgacgcttgggatgcgatcactacgt

SEQ ID NO: 415197 - DNA, 55 bp, Artificial
  Synthetic oligonucleotide
gctcagactccgtggtagagaagatcgtaaggtccctagttagactcgtctcggc

SEQ ID NO: 415198 - DNA, 59 bp, Artificial
  Synthetic oligonucleotide
gctcagactgagatgataggcactggcccatactcaaatggagtcagtagagctaggtt

SEQ ID NO: 415199 - DNA, 60 bp, Artificial
  Synthetic oligonucleotide
gctcagagtaaccgctagcatcacggacgacagtcaatcgctctgcccaattgaattgat

SEQ ID NO: 415200 - DNA, 55 bp, Artificial
  Synthetic oligonucleotide
gctcagagtaccttcggctattgtcacccttgcccacagctgggaatctccaaca

SEQ ID NO: 415201 - DNA, 55 bp, Artificial
  Synthetic oligonucleotide
gctcagatccgcaaacagttatagctacacttacactaataggttgttcaggatc

SEQ ID NO: 415202 - DNA, 55 bp, Artificial
  Synthetic oligonucleotide
gctcagatgatacctcttgtttcaagctcaccgatgcccttaacaatggcggcag

SEQ ID NO: 415203 - DNA, 55 bp, Artificial
  Synthetic oligonucleotide
gctcagcaaggtgctaagtatggtctgactatcacaccaccagacaagtctacac

SEQ ID NO: 415204 - DNA, 60 bp, Artificial
  Synthetic oligonucleotide
gctcagcacctagcctaagctaagtccatatgcccatctttgctgctccggatggatgtt

SEQ ID NO: 415205 - DNA, 55 bp, Artificial
  Synthetic oligonucleotide
gctcagcactatcgacggcccaaacctgcgcctgagacggcctcatctgactcca

SEQ ID NO: 415206 - DNA, 60 bp, Artificial
  Synthetic oligonucleotide
gctcagcacttaacctaagtcaagttcatatgcccacctttgctgctccgggtggatgct

SEQ ID NO: 415207 - DNA, 55 bp, Artificial
  Synthetic oligonucleotide
gctcagcatatagaggaatgttcctgttatcctcgatacccaaacgtcagatgcg

SEQ ID NO: 415208 - DNA, 55 bp, Artificial
  Synthetic oligonucleotide
gctcagcatgagggagacaatgattaaggcagggtccaatctagacaaactcctc

SEQ ID NO: 415209 - DNA, 55 bp, Artificial
  Synthetic oligonucleotide
gctcagcctatagatataagcgaaatacccaaagctaatactgagctagttccag

SEQ ID NO: 415210 - DNA, 60 bp, Artificial
  Synthetic oligonucleotide
gctcagcggctattgatgggttagttcaggggagtgtacattcgttgatgacgggagagt

SEQ ID NO: 415211 - DNA, 55 bp, Artificial
  Synthetic oligonucleotide
gctcagcgggaggcgtgcttaccctaagcaatactagtccgattataggaatagg

SEQ ID NO: 415212 - DNA, 55 bp, Artificial
  Synthetic oligonucleotide
gctcagcgttacttagacatgatgttccgagtactccagcttggtccaagtctcg

SEQ ID NO: 415213 - DNA, 60 bp, Artificial
  Synthetic oligonucleotide
gctcagctagaggctaacgggccggagcagtatgtgctgtcctttgacccggccaaacaa

SEQ ID NO: 415214 - DNA, 55 bp, Artificial
  Synthetic oligonucleotide
gctcagctagccccttaatggactcgttatatactgctcgttcacctaagccact

SEQ ID NO: 415215 - DNA, 50 bp, Artificial
  Synthetic oligonucleotide
gctcagcttggatcgattacacctctactgaccctactcagtttgggact

SEQ ID NO: 415216 - DNA, 55 bp, Artificial
  Synthetic oligonucleotide
gctcaggaactctgaactctgtcatatatgttggaaaccactaccgacatccatc

SEQ ID NO: 415217 - DNA, 53 bp, Artificial
  Synthetic oligonucleotide
gctcaggaatgtgatcctatgatgttaataaaagctgcagctgttcgtcaatt

SEQ ID NO: 415218 - DNA, 55 bp, Artificial
  Synthetic oligonucleotide
gctcaggaattcaattggatggttagaacggttaggtcataggaaaagaattact

SEQ ID NO: 415219 - DNA, 60 bp, Artificial
  Synthetic oligonucleotide
gctcaggaggacagcagcacttcttgcaggacaacttgattgacttaggttgcccaaatg

SEQ ID NO: 415220 - DNA, 55 bp, Artificial
  Synthetic oligonucleotide
gctcaggataaaccaagtgtggatctgtggctcgatgatgtgattcaagaatctc

SEQ ID NO: 415221 - DNA, 53 bp, Artificial
  Synthetic oligonucleotide
gctcaggcctccggtgatgtctcctatagtacccctaaactttatagaatccg

SEQ ID NO: 415222 - DNA, 57 bp, Artificial
  Synthetic oligonucleotide
gctcaggcgaaacgcatgtatgcagcaggaggcaatagaaaatttgacctcaaagca

SEQ ID NO: 415223 - DNA, 58 bp, Artificial
  Synthetic oligonucleotide
gctcaggctaggccctgacgtgtccccctaaagacaaatcataagctcagacctccgg

SEQ ID NO: 415224 - DNA, 55 bp, Artificial
  Synthetic oligonucleotide
gctcaggctgttctgtttcgtgtgttatggatatgcgccacgtgcagatgggacg

SEQ ID NO: 415225 - DNA, 53 bp, Artificial
  Synthetic oligonucleotide
gctcagggggaacgaaaggctatgcgtgctttttgccaccccttgttaaaaaa

SEQ ID NO: 415226 - DNA, 60 bp, Artificial
  Synthetic oligonucleotide
gctcaggtgttgatatgcttagtgggttaagacgtatattttcaatgattagtgataata

SEQ ID NO: 415227 - DNA, 55 bp, Artificial
  Synthetic oligonucleotide
gctcaggttcgtattgctgttggtggaactcattacttaaaaggtatggctcttt

SEQ ID NO: 415228 - DNA, 60 bp, Artificial
  Synthetic oligonucleotide
gctcaggtttttgtatggtctgctaatgacggacgaatgtccgatctccgatctgcttgc

SEQ ID NO: 415229 - DNA, 60 bp, Artificial
  Synthetic oligonucleotide
gctcagtaatgatgcggagttttcgtgagtgcattgcgcagatcaaaactgagctgggct

SEQ ID NO: 415230 - DNA, 57 bp, Artificial
  Synthetic oligonucleotide
gctcagtaattgtccaccaggagggatcagtatgactgtgacaggagacaatactaa

SEQ ID NO: 415231 - DNA, 60 bp, Artificial
  Synthetic oligonucleotide
gctcagtacaaaaacgtgtgggatgtggattattcggcctttgatgctaaccactgcagt

SEQ ID NO: 415232 - DNA, 55 bp, Artificial
  Synthetic oligonucleotide
gctcagtacagctctgtctggaaagaaggtgtacaaggttcttggtaacctagga

SEQ ID NO: 415233 - DNA, 59 bp, Artificial
  Synthetic oligonucleotide
gctcagtacggtactacctcagctagtgaatttggaaaaactgtattgactggcggtgc

SEQ ID NO: 415234 - DNA, 55 bp, Artificial
  Synthetic oligonucleotide
gctcagtcatacttatctagcttcactgatgaagtcgctagacgtgttaacggta

SEQ ID NO: 415235 - DNA, 60 bp, Artificial
  Synthetic oligonucleotide
gctcagtccctgaatgctcagttggaggcggatgtcaaatcggctcagtcgtgtagcttg

SEQ ID NO: 415236 - DNA, 59 bp, Artificial
  Synthetic oligonucleotide
gctcagtcgaatctccctggaagctagtcttcctgggtatgaatgtacctttctcccaa

SEQ ID NO: 415237 - DNA, 56 bp, Artificial
  Synthetic oligonucleotide
gctcagtgaggggattaaccacccccagtaaaggctggtcttggcggacttgaata

SEQ ID NO: 415238 - DNA, 55 bp, Artificial
  Synthetic oligonucleotide
gctcagtgagtagaagattcggcagtgccacgtgcgggctgttacgggagttggg

SEQ ID NO: 415239 - DNA, 55 bp, Artificial
  Synthetic oligonucleotide
gctcagtggcagcttcagtgcactcctaacgattttcctctcgcttcgttctgtg

SEQ ID NO: 415240 - DNA, 55 bp, Artificial
  Synthetic oligonucleotide
gctcagttaccagtatgcttagcgttcttgtgttgcgcaaggaccgctagggcag

SEQ ID NO: 415241 - DNA, 52 bp, Artificial
  Synthetic oligonucleotide
gctcagttacgcaatacctcatacctgaatggcttggtgaaagtttgacggt

SEQ ID NO: 415242 - DNA, 52 bp, Artificial
  Synthetic oligonucleotide
gctcagtttacacaatttattcttgactgtaagcagttgaattcaagcaggg

SEQ ID NO: 415243 - DNA, 60 bp, Artificial
  Synthetic oligonucleotide
gctcagtttgacatgtccttggcagcaaagcacatgtcgaacacctttcttgcaggtctc

SEQ ID NO: 415244 - DNA, 55 bp, Artificial
  Synthetic oligonucleotide
gctcagtttgataggattgggaagataatggataagatgcgtgagccgatgctgt

SEQ ID NO: 415245 - DNA, 58 bp, Artificial
  Synthetic oligonucleotide
gctcataatctacgaatcaccacttatcgattaagtctcacagggaaagtcctttggg

SEQ ID NO: 415246 - DNA, 55 bp, Artificial
  Synthetic oligonucleotide
gctcatacacagagaggtgcgatacaagatatcgttataaactttgacctaacac

SEQ ID NO: 415247 - DNA, 60 bp, Artificial
  Synthetic oligonucleotide
gctcatacctaacagtttcaacttaactgttacagatgagtacatacaaacgcgtatgga

SEQ ID NO: 415248 - DNA, 60 bp, Artificial
  Synthetic oligonucleotide
gctcatagacttccttaaggatgtaatggagtcaatgaacaaagaagaaatggagatcac

SEQ ID NO: 415249 - DNA, 55 bp, Artificial
  Synthetic oligonucleotide
gctcatagcttatacacctcctggcggtcccttacccaaagatcgggctacagca

SEQ ID NO: 415250 - DNA, 59 bp, Artificial
  Synthetic oligonucleotide
gctcataggccccgctcactgacgagactacctaaattcgccactctttcggagtggta

SEQ ID NO: 415251 - DNA, 60 bp, Artificial
  Synthetic oligonucleotide
gctcatcaaatattgcccaaggtcttatataagaggactcttggactctctgcaatgtca

SEQ ID NO: 415252 - DNA, 55 bp, Artificial
  Synthetic oligonucleotide
gctcatcacctatgtatggctgaaaacgaggcccaacgacccggtatttacggac

SEQ ID NO: 415253 - DNA, 51 bp, Artificial
  Synthetic oligonucleotide
gctcatcactgatttgtttgacgatggggtcgcaacacagagcaagcaaga

SEQ ID NO: 415254 - DNA, 55 bp, Artificial
  Synthetic oligonucleotide
gctcatcagcctcccagctggagcagtgacttacgattgcgtgcgaggggactgc

SEQ ID NO: 415255 - DNA, 55 bp, Artificial
  Synthetic oligonucleotide
gctcatccaaaaggatgccttggtacactacagaaatgtaattcccgagtcaact

SEQ ID NO: 415256 - DNA, 60 bp, Artificial
  Synthetic oligonucleotide
gctcatccatgcgccttgcgtcgacagtccgtggtcgcagcacggtgtaagggaaaatcg

SEQ ID NO: 415257 - DNA, 56 bp, Artificial
  Synthetic oligonucleotide
gctcatccatggcgaatttgtttagcgactttgtttcagagtcgacaaatggtcag

SEQ ID NO: 415258 - DNA, 55 bp, Artificial
  Synthetic oligonucleotide
gctcatcctcaggggtcgatacacagtccagcactacttccaaggtgcctccctc

SEQ ID NO: 415259 - DNA, 55 bp, Artificial
  Synthetic oligonucleotide
gctcatcgagctagttgttgggataagtgcgaagctagataacgctgccgcacag

SEQ ID NO: 415260 - DNA, 55 bp, Artificial
  Synthetic oligonucleotide
gctcatcggcctagcgtacctcaagcagaacgggtatctaagctttgacgtgggg

SEQ ID NO: 415261 - DNA, 60 bp, Artificial
  Synthetic oligonucleotide
gctcatcgtatttcttaagtgagatagagctggcagttccagggttgctctcactgagca

SEQ ID NO: 415262 - DNA, 55 bp, Artificial
  Synthetic oligonucleotide
gctcatcgttaggtcgaaactgtgatagtgtcaattgtcggctcctgattcgtcc

SEQ ID NO: 415263 - DNA, 60 bp, Artificial
  Synthetic oligonucleotide
gctcatctagctttggtatcacaacacttttattactggacaagtctaatgctgtgcttg

SEQ ID NO: 415264 - DNA, 59 bp, Artificial
  Synthetic oligonucleotide
gctcatgagaagaggagatctaccagtttggttatcctacaaagttgcctcagaaggtt

SEQ ID NO: 415265 - DNA, 55 bp, Artificial
  Synthetic oligonucleotide
gctcatgaggaatcacttaagagacttgatgggagtgccatactgcaactattca

SEQ ID NO: 415266 - DNA, 52 bp, Artificial
  Synthetic oligonucleotide
gctcatgcaactaaacaatcagtagtggcactggcttcgcaagaaggggcgt

SEQ ID NO: 415267 - DNA, 58 bp, Artificial
  Synthetic oligonucleotide
gctcatgccacaaatgcctgggattcccttcgtatcctgccaacgcgggtataagggg

SEQ ID NO: 415268 - DNA, 60 bp, Artificial
  Synthetic oligonucleotide
gctcatgctatggggtgcaagcaggtattacttgcacgtgcagggataattggcagggtt

SEQ ID NO: 415269 - DNA, 55 bp, Artificial
  Synthetic oligonucleotide
gctcatggaaagatacactatcgcaattgttcttgacaaaaggatggccaactgg

SEQ ID NO: 415270 - DNA, 51 bp, Artificial
  Synthetic oligonucleotide
gctcatggcactcggccagcgtgttttcgaggtcagggtgggcaccggttc

SEQ ID NO: 415271 - DNA, 55 bp, Artificial
  Synthetic oligonucleotide
gctcatggggcaacccatgagacgcttcaatactgacatggtgcgaagagtctat

SEQ ID NO: 415272 - DNA, 50 bp, Artificial
  Synthetic oligonucleotide
gctcatggtcatattagcagtcaactactcactcaggaagagcggaattc

SEQ ID NO: 415273 - DNA, 60 bp, Artificial
  Synthetic oligonucleotide
gctcatggtcttacattgtggaaacatcgaattcagacaatgggacatgttacccaggag

SEQ ID NO: 415274 - DNA, 60 bp, Artificial
  Synthetic oligonucleotide
gctcatggtgctccaggctagcataatccgagtgccgtacttcgtacgcgctcaagggct

SEQ ID NO: 415275 - DNA, 60 bp, Artificial
  Synthetic oligonucleotide
gctcatgtagttgtatattatgcctgcttagaaagcaacatagagagctcaaagacaaat

SEQ ID NO: 415276 - DNA, 60 bp, Artificial
  Synthetic oligonucleotide
gctcatgtcgaaatacgacgacttgtattcaacaccaggatttggagccactcagcttac

SEQ ID NO: 415277 - DNA, 59 bp, Artificial
  Synthetic oligonucleotide
gctcatgtggtgcaaacatcacaggccacgtaaagaatgggtcaatgaagatcgtaggc

SEQ ID NO: 415278 - DNA, 55 bp, Artificial
  Synthetic oligonucleotide
gctcattacaccaacaatgagagggagaacattcttttcatgtggggcatacacc

SEQ ID NO: 415279 - DNA, 55 bp, Artificial
  Synthetic oligonucleotide
gctcattatgtataagacgtatgcggaattggtggacgaatcggcatttggcgtg

SEQ ID NO: 415280 - DNA, 57 bp, Artificial
  Synthetic oligonucleotide
gctcattatttgtcttgccacgaggcgtgccctttaccgacctagacttgaccgttg

SEQ ID NO: 415281 - DNA, 60 bp, Artificial
  Synthetic oligonucleotide
gctcattcaaatagactatgagagggaagtttgtgttcagctaggtaactataatgagtg

SEQ ID NO: 415282 - DNA, 60 bp, Artificial
  Synthetic oligonucleotide
gctcattcacctgatgcttgtgttccagttacctcaaaggtcgtgactaagcagcagact

SEQ ID NO: 415283 - DNA, 51 bp, Artificial
  Synthetic oligonucleotide
gctcattccccttgcggtgcgcatgtccaccacaaccagcacgaaagtgca

SEQ ID NO: 415284 - DNA, 60 bp, Artificial
  Synthetic oligonucleotide
gctcattcctgtcaaggctattgagtgtataagctttgaagatatatcgctcattcctgt

SEQ ID NO: 415285 - DNA, 53 bp, Artificial
  Synthetic oligonucleotide
gctcattcgggggctaaccttcccactctcggtttgtacgctacccacgcaga

SEQ ID NO: 415286 - DNA, 59 bp, Artificial
  Synthetic oligonucleotide
gctcattctcaaaacctagatgggataactttctaagacgtccagtcgctcaacgacta

SEQ ID NO: 415287 - DNA, 55 bp, Artificial
  Synthetic oligonucleotide
gctcattctcaccgacctcaggaattgtacatggccagcaagtcacactatcgac

SEQ ID NO: 415288 - DNA, 60 bp, Artificial
  Synthetic oligonucleotide
gctcattctgcttgacgacatacagctcctctcttttccttttaatcatgtgggagataa

SEQ ID NO: 415289 - DNA, 55 bp, Artificial
  Synthetic oligonucleotide
gctcattcttctctatgttgacaccttggtcagactattctcaaatgttgaaaag

SEQ ID NO: 415290 - DNA, 52 bp, Artificial
  Synthetic oligonucleotide
gctcattgcattggtctcggctgaaggcatccgacgactgtccgattcactg

SEQ ID NO: 415291 - DNA, 56 bp, Artificial
  Synthetic oligonucleotide
gctcattgcgtgtggttggggttttatcgggcgcatagggtgaggagttgcccaac

SEQ ID NO: 415292 - DNA, 55 bp, Artificial
  Synthetic oligonucleotide
gctcattgctccaagaccagataacattctgggacttaataagaaaggagggagc

SEQ ID NO: 415293 - DNA, 55 bp, Artificial
  Synthetic oligonucleotide
gctcattgggaaccttggatagtcgtttgtccgtagatcgtttgaatcgttgcac

SEQ ID NO: 415294 - DNA, 59 bp, Artificial
  Synthetic oligonucleotide
gctcattggggaaggacattgtgaaccaggtgattgtggaggcaagttactgtgcaagc

SEQ ID NO: 415295 - DNA, 60 bp, Artificial
  Synthetic oligonucleotide
gctcattggggcagagttaaaccagacaaagactggttggcactacctgcagtggcgata

SEQ ID NO: 415296 - DNA, 55 bp, Artificial
  Synthetic oligonucleotide
gctcattgggtgaagcatttgtatgggcctggacaactctaggctttagtggtgc

SEQ ID NO: 415297 - DNA, 54 bp, Artificial
  Synthetic oligonucleotide
gctcattggtgcggaacccaggcctcccgttagtggaaccaggtatgctaaggt

SEQ ID NO: 415298 - DNA, 51 bp, Artificial
  Synthetic oligonucleotide
gctcatttaacggcctatgatgtctaaacgtcgccgtgtaaccagagcgag

SEQ ID NO: 415299 - DNA, 52 bp, Artificial
  Synthetic oligonucleotide
gctcatttagttagtaaaattttttcggcgcccgaacgttaaactggcacag

SEQ ID NO: 415300 - DNA, 55 bp, Artificial
  Synthetic oligonucleotide
gctcattttgagttttactcggttttcgacgagcggcatcttagcgtcaggaaag

SEQ ID NO: 415301 - DNA, 60 bp, Artificial
  Synthetic oligonucleotide
gctccaaaacagccaagtcttcagtctcatcagaccaaacgaaaatccagcgcataaaag

SEQ ID NO: 415302 - DNA, 51 bp, Artificial
  Synthetic oligonucleotide
gctccaaaactactacccttaaagcccgctaaacttacgttctggccggag

SEQ ID NO: 415303 - DNA, 54 bp, Artificial
  Synthetic oligonucleotide
gctccaaatgttaataacccaacaatcctaccagatccaactaaccaaactacg

SEQ ID NO: 415304 - DNA, 55 bp, Artificial
  Synthetic oligonucleotide
gctccaaccaggcaccgccactgtcatactggacgactatggcaaactgccacct

SEQ ID NO: 415305 - DNA, 55 bp, Artificial
  Synthetic oligonucleotide
gctccaacttataccctgaggacacttggctaggtaacttcggccagaacccagg

SEQ ID NO: 415306 - DNA, 60 bp, Artificial
  Synthetic oligonucleotide
gctccaagaagcaaggattgtattggaagctaacgtaatggagatactagggatagcaat

SEQ ID NO: 415307 - DNA, 55 bp, Artificial
  Synthetic oligonucleotide
gctccaagaagtgattggatgagtgtatttcgtagaagtctaataaaacaacgac

SEQ ID NO: 415308 - DNA, 55 bp, Artificial
  Synthetic oligonucleotide
gctccaagagttcaaattttgcttgacaaccacacacagcattgctcggacagag

SEQ ID NO: 415309 - DNA, 60 bp, Artificial
  Synthetic oligonucleotide
gctccaagattgcaaaatagcccctttgatggtagcatacatgctagaaagagagttagt

SEQ ID NO: 415310 - DNA, 60 bp, Artificial
  Synthetic oligonucleotide
gctccaagcttgcttgactagagtgccgtacttcgtgcgcgctcaagggctcattcgtgc

SEQ ID NO: 415311 - DNA, 60 bp, Artificial
  Synthetic oligonucleotide
gctccaagttgtcgttattgcaacatgtgggatccattattgaacgagttcccggactca

SEQ ID NO: 415312 - DNA, 55 bp, Artificial
  Synthetic oligonucleotide
gctccaatagattcgaagattgtgacgtttccgcaccttgggcgatggcgataca

SEQ ID NO: 415313 - DNA, 55 bp, Artificial
  Synthetic oligonucleotide
gctccaatcttaccaggcttccaccctacccctgaaatacacataccaggtgaag

SEQ ID NO: 415314 - DNA, 59 bp, Artificial
  Synthetic oligonucleotide
gctccaatgttcaacgcgaaattacgtatttctgagactgtaattgcaaaaacgcactc

SEQ ID NO: 415315 - DNA, 59 bp, Artificial
  Synthetic oligonucleotide
gctccaattaatttggttggtaggtgcagagaacatgttaatataccaagtgaccagta

SEQ ID NO: 415316 - DNA, 60 bp, Artificial
  Synthetic oligonucleotide
gctccaattgaacacattgcaagcatgagaaggaattacttcacagcagaggtgtctcat

SEQ ID NO: 415317 - DNA, 60 bp, Artificial
  Synthetic oligonucleotide
gctccaattgccttgactatgacatccccagacaactcaactctatatgttgacaacctt

SEQ ID NO: 415318 - DNA, 56 bp, Artificial
  Synthetic oligonucleotide
gctccacacttcaaattaaacatgttactggaatcccctataatccccaaggccaa

SEQ ID NO: 415319 - DNA, 59 bp, Artificial
  Synthetic oligonucleotide
gctccacagatcaaggtgtacgccaacattgccccaaccaacgtgtacgtagcgggcga

SEQ ID NO: 415320 - DNA, 60 bp, Artificial
  Synthetic oligonucleotide
gctccacaggatcagcactacataacttaagttcatataatgaatgggtatcaggtgtag

SEQ ID NO: 415321 - DNA, 55 bp, Artificial
  Synthetic oligonucleotide
gctccacatggtcgtgttaaggttgggcattgttacattgaattgactcatgttc

SEQ ID NO: 415322 - DNA, 55 bp, Artificial
  Synthetic oligonucleotide
gctccacctaaggcagtttcttctggaaatgtaagcgccagaggtattcctgcct

SEQ ID NO: 415323 - DNA, 56 bp, Artificial
  Synthetic oligonucleotide
gctccacctggtgaacagttcacacatcttatacctctaatgcgcaaaggacaacc

SEQ ID NO: 415324 - DNA, 55 bp, Artificial
  Synthetic oligonucleotide
gctccacgtgcttcaggtacacgtggtagttgcgaagggtggtggggcgtaggtc

SEQ ID NO: 415325 - DNA, 60 bp, Artificial
  Synthetic oligonucleotide
gctccactcagccaagctgaggcgaaacaagaattggacaagtcagctgtgccagcacct

SEQ ID NO: 415326 - DNA, 59 bp, Artificial
  Synthetic oligonucleotide
gctccactggtggcaccaccacaagggcctattcccatgacagcaaggtttattagagg

SEQ ID NO: 415327 - DNA, 60 bp, Artificial
  Synthetic oligonucleotide
gctccagaaaccgctcgatcttgaattctatccaatcgctccaaagagacctagactgtt

SEQ ID NO: 415328 - DNA, 56 bp, Artificial
  Synthetic oligonucleotide
gctccagaaatgtctcctctcactctacgaagaaagtatctcccaagaaatcccac

SEQ ID NO: 415329 - DNA, 60 bp, Artificial
  Synthetic oligonucleotide
gctccagaaccaacaagtagagaacattttgcatggcaatcaggcactaatgcatctatc

SEQ ID NO: 415330 - DNA, 55 bp, Artificial
  Synthetic oligonucleotide
gctccagatcgttgtccacctacagcattatatgtggccgggatgccggaactgg

SEQ ID NO: 415331 - DNA, 52 bp, Artificial
  Synthetic oligonucleotide
gctccagcatttgacctagccgagtttgtcgccacctgcacggagcttccga

SEQ ID NO: 415332 - DNA, 57 bp, Artificial
  Synthetic oligonucleotide
gctccagccctcaccaggtctacaatattacctgggaagtgaccaatggggatcggg

SEQ ID NO: 415333 - DNA, 55 bp, Artificial
  Synthetic oligonucleotide
gctccagccctggtgggaagtgactctcaacgcgctattgaaccctcatgccgtc

SEQ ID NO: 415334 - DNA, 57 bp, Artificial
  Synthetic oligonucleotide
gctccagccgaaactcatcgcgggaaggatgctacccacgtggccgtcgtaccagat

SEQ ID NO: 415335 - DNA, 58 bp, Artificial
  Synthetic oligonucleotide
gctccagccggaacgacgagccatcggccatccaaacccgcacagccaaaggggatta

SEQ ID NO: 415336 - DNA, 60 bp, Artificial
  Synthetic oligonucleotide
gctccaggctagtataactaaaatgccgtacttcgtacgcgcacaagggctcattcgtgc

SEQ ID NO: 415337 - DNA, 60 bp, Artificial
  Synthetic oligonucleotide
gctccagttggcagtacaagctagcaacccgcggactgttgacgagccattccacgggtg

SEQ ID NO: 415338 - DNA, 55 bp, Artificial
  Synthetic oligonucleotide
gctccataatctcgtcatagcacaaatagcagatcgttcttggactcggctcgcg

SEQ ID NO: 415339 - DNA, 60 bp, Artificial
  Synthetic oligonucleotide
gctccatacaccctgttgaaggtgacattgagatgcaggacctgtccgtgccgcctgact

SEQ ID NO: 415340 - DNA, 55 bp, Artificial
  Synthetic oligonucleotide
gctccatactcaacgcctagccagcgggagtaagttctagtttgttcacctgggg

SEQ ID NO: 415341 - DNA, 57 bp, Artificial
  Synthetic oligonucleotide
gctccatactcgctacgtagagtaactgtatgaatgatatagtgagaggatgtgacc

SEQ ID NO: 415342 - DNA, 60 bp, Artificial
  Synthetic oligonucleotide
gctccatcctcaacacgagccaaaggggaattcttgaagatgaacagatgtatcaaaagt

SEQ ID NO: 415343 - DNA, 55 bp, Artificial
  Synthetic oligonucleotide
gctccatccttgcgaaatcacattgaggatgaaatgaatcgagtaagacactcgt

SEQ ID NO: 415344 - DNA, 55 bp, Artificial
  Synthetic oligonucleotide
gctccatggtatggacacattcttccaggagagagccacggaagaatcctgaaga

SEQ ID NO: 415345 - DNA, 60 bp, Artificial
  Synthetic oligonucleotide
gctccatgtgcggcttgatacattatagaccaggactcaagatcgatttaaccaaaacta

SEQ ID NO: 415346 - DNA, 55 bp, Artificial
  Synthetic oligonucleotide
gctccattataagagtatataaccagtgttttgtaaaagcttcgaggagtctctc

SEQ ID NO: 415347 - DNA, 60 bp, Artificial
  Synthetic oligonucleotide
gctccattcgaatgacacacccagagctgacaccaatcgatgctttccggctcatcggtc

SEQ ID NO: 415348 - DNA, 60 bp, Artificial
  Synthetic oligonucleotide
gctccattgtgatgtgtggagtagaccatgagattgccgactggtcgtggcacgatggag

SEQ ID NO: 415349 - DNA, 52 bp, Artificial
  Synthetic oligonucleotide
gctcccaaggtaaaaagaccaagaaacggacccgtgccagtccccagacttc

SEQ ID NO: 415350 - DNA, 55 bp, Artificial
  Synthetic oligonucleotide
gctcccaataatattgtcatcctccgccgtttgttgatttgtatgcgagcgtaaa

SEQ ID NO: 415351 - DNA, 55 bp, Artificial
  Synthetic oligonucleotide
gctcccaatactaataggatctgttatttggctgtcaacacagtttaccgttatg

SEQ ID NO: 415352 - DNA, 55 bp, Artificial
  Synthetic oligonucleotide
gctcccaatccgttaccagactccagccattaaggcagagcacacagggcgcgaa

SEQ ID NO: 415353 - DNA, 59 bp, Artificial
  Synthetic oligonucleotide
gctcccacagagtgtagtggtctcaagtgaggcttaacgtatgcgtgaaccaaagaagt

SEQ ID NO: 415354 - DNA, 55 bp, Artificial
  Synthetic oligonucleotide
gctcccacagggatggaaagggtcaccagcaatatttcagagtagcatgataaga

SEQ ID NO: 415355 - DNA, 52 bp, Artificial
  Synthetic oligonucleotide
gctcccacggtttcagacagcagggcgcttgctaggaggttccactttgaca

SEQ ID NO: 415356 - DNA, 60 bp, Artificial
  Synthetic oligonucleotide
gctcccacgtattttggttgaccatgcgtgccaaaccatgcacgtgatagactcttttgg

SEQ ID NO: 415357 - DNA, 60 bp, Artificial
  Synthetic oligonucleotide
gctcccactatgggataagactgaatgtgctttacacaagagaggaatgcacctggatat

SEQ ID NO: 415358 - DNA, 55 bp, Artificial
  Synthetic oligonucleotide
gctcccactctgcggagttcgtgccttctaccctcccaacagctacatccctgcc

SEQ ID NO: 415359 - DNA, 55 bp, Artificial
  Synthetic oligonucleotide
gctcccactgttggtgcccaagatgtatgtctaagcaccataagctactaattgg

SEQ ID NO: 415360 - DNA, 58 bp, Artificial
  Synthetic oligonucleotide
gctcccagagtactccacattgtaccgccgatggctcgattcattttagtaaccctac

SEQ ID NO: 415361 - DNA, 55 bp, Artificial
  Synthetic oligonucleotide
gctcccagtttgaaccagtgttttcccagaatcctccctccggttgctgtggcgg

SEQ ID NO: 415362 - DNA, 53 bp, Artificial
  Synthetic oligonucleotide
gctcccagtttgaactcgtgtttccaggaccctccctccgacctttgtggcgg

SEQ ID NO: 415363 - DNA, 54 bp, Artificial
  Synthetic oligonucleotide
gctcccatgcagaataaggcaaattataaacatgtggcaggaggtaggacgagc

SEQ ID NO: 415364 - DNA, 60 bp, Artificial
  Synthetic oligonucleotide
gctccccagctttggagtgtctggaattaatgagtccgctgatatgagtattggagtcac

SEQ ID NO: 415365 - DNA, 54 bp, Artificial
  Synthetic oligonucleotide
gctccccatgttggcatgggactggatacacgcacccaaacctggatgtcggct

SEQ ID NO: 415366 - DNA, 60 bp, Artificial
  Synthetic oligonucleotide
gctcccccagtccgtacagtacacgtggcgcaatctggtccatgcattaaagcttagtca

SEQ ID NO: 415367 - DNA, 54 bp, Artificial
  Synthetic oligonucleotide
gctcccccccccgcgtctacggcttttgtcgtaagcggtctagcaggagccacg

SEQ ID NO: 415368 - DNA, 53 bp, Artificial
  Synthetic oligonucleotide
gctcccccttccgggactggaaccgactacctgaaaggaacaagacccatgtc

SEQ ID NO: 415369 - DNA, 60 bp, Artificial
  Synthetic oligonucleotide
gctccccgatactaatcacgactgttgaggggcaaaattcgatctccatcgaaatcttga

SEQ ID NO: 415370 - DNA, 55 bp, Artificial
  Synthetic oligonucleotide
gctccccgatccgagggccccggcggccaagtctggagagcactccgggccgaag

SEQ ID NO: 415371 - DNA, 55 bp, Artificial
  Synthetic oligonucleotide
gctccccgtgtgccaggaccatcttgagttttgggagggcgtctttacgggcctc

SEQ ID NO: 415372 - DNA, 54 bp, Artificial
  Synthetic oligonucleotide
gctccccgttcaggatctcgataaccacagcgggaacattcacccgcgacctcc

SEQ ID NO: 415373 - DNA, 55 bp, Artificial
  Synthetic oligonucleotide
gctcccctacaactgggaaagtgcaatgtggcgggatggctccttggcaatccag

SEQ ID NO: 415374 - DNA, 53 bp, Artificial
  Synthetic oligonucleotide
gctcccctcggagaggccccaggtgggttcacatccccaacccgcgggccggc

SEQ ID NO: 415375 - DNA, 55 bp, Artificial
  Synthetic oligonucleotide
gctcccctctcccgcgtacttctagggaccaccacagatctccctcgcctaggaa

SEQ ID NO: 415376 - DNA, 59 bp, Artificial
  Synthetic oligonucleotide
gctccccttgaaaaactgtccatcatgagctcacttgtgtacattcgtagtgatggatc

SEQ ID NO: 415377 - DNA, 55 bp, Artificial
  Synthetic oligonucleotide
gctcccgcagaggagatgttgctccgccaaagagagcatcttggatatccacgaa

SEQ ID NO: 415378 - DNA, 55 bp, Artificial
  Synthetic oligonucleotide
gctcccgcagagggataagctgtctccctgcgacgtagtagtagaacacgtggga

SEQ ID NO: 415379 - DNA, 54 bp, Artificial
  Synthetic oligonucleotide
gctcccggcctagctggggccccacagacccccggcgtaggtcgcgcaatttgg

SEQ ID NO: 415380 - DNA, 55 bp, Artificial
  Synthetic oligonucleotide
gctcccgttacctaaagcggtgagcccagccatagccacattgcgctcgattcgc

SEQ ID NO: 415381 - DNA, 57 bp, Artificial
  Synthetic oligonucleotide
gctccctaagtttatgccgtcagaactatgtgggatcccttattgaacgattttcca

SEQ ID NO: 415382 - DNA, 55 bp, Artificial
  Synthetic oligonucleotide
gctccctaagtttggccggcataactatgtgggatccgttattgaacgacttccc

SEQ ID NO: 415383 - DNA, 55 bp, Artificial
  Synthetic oligonucleotide
gctccctcacaagtttatttagtgcgtggtcccctttaaatcacttgggcgccaa

SEQ ID NO: 415384 - DNA, 55 bp, Artificial
  Synthetic oligonucleotide
gctccctcctgaatggtacgaccttttaacggatctccgatccgatcaaggcgtt

SEQ ID NO: 415385 - DNA, 55 bp, Artificial
  Synthetic oligonucleotide
gctccctgaatgtttggatggaaatgtgttgacctgcatggggatgtgaggtcga

SEQ ID NO: 415386 - DNA, 55 bp, Artificial
  Synthetic oligonucleotide
gctccctgagtactccacactgtaccgccgttggctcgattcattttagtaaccc

SEQ ID NO: 415387 - DNA, 55 bp, Artificial
  Synthetic oligonucleotide
gctccctggacatttccatggaaaacctgtgtgctatgaggatgggtaaggtcga

SEQ ID NO: 415388 - DNA, 58 bp, Artificial
  Synthetic oligonucleotide
gctccctggatgttggggtgaaagtgattcgaccttgtgggtgatacaaggtcgaaga

SEQ ID NO: 415389 - DNA, 59 bp, Artificial
  Synthetic oligonucleotide
gctccctggatgttggggtgaaagtgattcgatctgttcggtgataccagatcgaagaa

SEQ ID NO: 415390 - DNA, 60 bp, Artificial
  Synthetic oligonucleotide
gctccctgtatgttcggatggaaatgtgctgaccgtgatggggagcccaggtcgaagaat

SEQ ID NO: 415391 - DNA, 55 bp, Artificial
  Synthetic oligonucleotide
gctccctgtatgtttggatggtaatgtgctgatcttgttggggataccaggtcga

SEQ ID NO: 415392 - DNA, 55 bp, Artificial
  Synthetic oligonucleotide
gctccctgtgagattaactttgtatcatatgtcaacccaaatagaggatcgttag

SEQ ID NO: 415393 - DNA, 56 bp, Artificial
  Synthetic oligonucleotide
gctccctgttgtaattatttaccctcatgacaatactggggatttttacttacatc

SEQ ID NO: 415394 - DNA, 55 bp, Artificial
  Synthetic oligonucleotide
gctcccttcgctaccttcaagaccttaagggttgacgtaggtgtgcggaaagtga

SEQ ID NO: 415395 - DNA, 59 bp, Artificial
  Synthetic oligonucleotide
gctcccttgattggtctaaagtcactctggatggtcgcccccttactaccattcagcag

SEQ ID NO: 415396 - DNA, 55 bp, Artificial
  Synthetic oligonucleotide
gctcccttggattctgggtctatcaaccactgctaaatccattttccaccacagc

SEQ ID NO: 415397 - DNA, 55 bp, Artificial
  Synthetic oligonucleotide
gctcccttgtcttatagtggttgtaaatgggccggaccgggccggctagcaagaa

SEQ ID NO: 415398 - DNA, 60 bp, Artificial
  Synthetic oligonucleotide
gctccctttacttgctggtgagcctgcccccaggataatggtaactcatccctcattatg

SEQ ID NO: 415399 - DNA, 53 bp, Artificial
  Synthetic oligonucleotide
gctccgaagagccttagcttaacgccggaatgcagggagccacgtataatatt

SEQ ID NO: 415400 - DNA, 56 bp, Artificial
  Synthetic oligonucleotide
gctccgaatacgtacaccaaaataagatcaccatgtcctcggtaactccccacgaa

SEQ ID NO: 415401 - DNA, 59 bp, Artificial
  Synthetic oligonucleotide
gctccgacagttgaccgggattgcgggagtcttatagtcgcacaggtggaaggacgata

SEQ ID NO: 415402 - DNA, 60 bp, Artificial
  Synthetic oligonucleotide
gctccgacgagcaagcgtcgacacctccaaggctacctgcaattgaagggtcagagaacc

SEQ ID NO: 415403 - DNA, 59 bp, Artificial
  Synthetic oligonucleotide
gctccgactcccacactcgaagcgcttcgatctgcactcggaagtcaccttccggggcg

SEQ ID NO: 415404 - DNA, 55 bp, Artificial
  Synthetic oligonucleotide
gctccgatcttcgacacccgttataaaataatggaaaccgagatagccacagcga

SEQ ID NO: 415405 - DNA, 55 bp, Artificial
  Synthetic oligonucleotide
gctccgatttaatccgcattctgcgagttcgtcagtatgacagggcgaatgcgcg

SEQ ID NO: 415406 - DNA, 47 bp, Artificial
  Synthetic oligonucleotide
gctccgccccttgcacccccgggagggggggaaaccccccctcaacc

SEQ ID NO: 415407 - DNA, 55 bp, Artificial
  Synthetic oligonucleotide
gctccgcgatgatagacgcttagattatgtactcttttgttctagggtctcggca

SEQ ID NO: 415408 - DNA, 51 bp, Artificial
  Synthetic oligonucleotide
gctccgcgtgtggtccttgtatcgcgtccgtatccgggtggtctgccaaaa

SEQ ID NO: 415409 - DNA, 59 bp, Artificial
  Synthetic oligonucleotide
gctccgctatcggagtatagcgaactttgtgggatagatcacttacacccgcgtcacgt

SEQ ID NO: 415410 - DNA, 56 bp, Artificial
  Synthetic oligonucleotide
gctccgctcctagtcgtttagcacgctacggaataagctttacagtaaaggattat

SEQ ID NO: 415411 - DNA, 54 bp, Artificial
  Synthetic oligonucleotide
gctccgctgcctcaggaattacctcgggttctagctcatcggcgcctcccagta

SEQ ID NO: 415412 - DNA, 55 bp, Artificial
  Synthetic oligonucleotide
gctccgctgcggtgagggactagttgtttggagggaggtctcagagtggtacgac

SEQ ID NO: 415413 - DNA, 52 bp, Artificial
  Synthetic oligonucleotide
gctccggatacagattttactgatataattacattaggcaggcctagattag

SEQ ID NO: 415414 - DNA, 55 bp, Artificial
  Synthetic oligonucleotide
gctccggccatgaatgcgcctggcggtaagtgggctactgaggattggaaatctg

SEQ ID NO: 415415 - DNA, 59 bp, Artificial
  Synthetic oligonucleotide
gctccggcggacagacgatctgctcatttgggaacggtgactgatataccggaggtggt

SEQ ID NO: 415416 - DNA, 57 bp, Artificial
  Synthetic oligonucleotide
gctccggggagtgggaccggcggatggagaaggcccatcacgcctactactcctcca

SEQ ID NO: 415417 - DNA, 55 bp, Artificial
  Synthetic oligonucleotide
gctccggggctgaaactcactccggggctgtggacttccgcctacctacgcaaat

SEQ ID NO: 415418 - DNA, 58 bp, Artificial
  Synthetic oligonucleotide
gctccgggtgtatcgttacctgcgatctcttaaaaaaccggacaagcaatctgctatg

SEQ ID NO: 415419 - DNA, 55 bp, Artificial
  Synthetic oligonucleotide
gctccggtactgaattgtgcggaaacggtaatagggcagaaatatacgacgctgg

SEQ ID NO: 415420 - DNA, 59 bp, Artificial
  Synthetic oligonucleotide
gctccggtcatacaatggttccctcctagccggagaacctgcctcatagagggattctg

SEQ ID NO: 415421 - DNA, 60 bp, Artificial
  Synthetic oligonucleotide
gctccggtggtagggcaggctatgtgccattgtccactcgtcctcccaccagtagtatta

SEQ ID NO: 415422 - DNA, 58 bp, Artificial
  Synthetic oligonucleotide
gctccggtttgggggatccatcgaccgtggtctaatcacccgctcgaacatcattcca

SEQ ID NO: 415423 - DNA, 58 bp, Artificial
  Synthetic oligonucleotide
gctccgtaacgcggacgaagcccttagcattaaccgctacttggatactcgcggtgca

SEQ ID NO: 415424 - DNA, 55 bp, Artificial
  Synthetic oligonucleotide
gctccgtacgaagagacgatcctgattgaccctgaggacacggttcccgcgttca

SEQ ID NO: 415425 - DNA, 54 bp, Artificial
  Synthetic oligonucleotide
gctccgtagagtattaacaacggctacgataactcttttaccagatgctgaaag

SEQ ID NO: 415426 - DNA, 55 bp, Artificial
  Synthetic oligonucleotide
gctccgtccattttatcacgcatatgcagccaaagagcatcgattacgcaattaa

SEQ ID NO: 415427 - DNA, 56 bp, Artificial
  Synthetic oligonucleotide
gctccgtcgagcggggcaatccgccattgacctactcaagttatgggaaccccttg

SEQ ID NO: 415428 - DNA, 50 bp, Artificial
  Synthetic oligonucleotide
gctccgtgatgacgacaccacacgactagcgcagtatgacgaaatgagaa

SEQ ID NO: 415429 - DNA, 54 bp, Artificial
  Synthetic oligonucleotide
gctccgttactaatgatttagcaacggttgatctctcagcggcaagcgattcta

SEQ ID NO: 415430 - DNA, 55 bp, Artificial
  Synthetic oligonucleotide
gctccgttagcaattgacgtgccgtccgcctctactcaactagctacgggcgaac

SEQ ID NO: 415431 - DNA, 60 bp, Artificial
  Synthetic oligonucleotide
gctccgttgggcaattgaccatgcctgcactgactctttgatttccactcggaacatccg

SEQ ID NO: 415432 - DNA, 54 bp, Artificial
  Synthetic oligonucleotide
gctcctaaacgtacaggtgttattttgacacgtagttttaagtataacattaga

SEQ ID NO: 415433 - DNA, 54 bp, Artificial
  Synthetic oligonucleotide
gctcctaacggggcttgtagagtttgtagcccacggccattagttcgtggtaaa

SEQ ID NO: 415434 - DNA, 60 bp, Artificial
  Synthetic oligonucleotide
gctcctaaggactgcaataggccaagtatcaaggccaatgttcctgtatgtcagaaccaa

SEQ ID NO: 415435 - DNA, 60 bp, Artificial
  Synthetic oligonucleotide
gctcctacaaaagactcctgctctttccagaccgcacttggaatgtgacttacactggaa

SEQ ID NO: 415436 - DNA, 59 bp, Artificial
  Synthetic oligonucleotide
gctcctacaagacgcccagatattgttggtctatctctccgcccttcagtgtcccagtt

SEQ ID NO: 415437 - DNA, 55 bp, Artificial
  Synthetic oligonucleotide
gctcctactaatgacataagacaactagctgaagtggtgccaaaagtttcccctg

SEQ ID NO: 415438 - DNA, 55 bp, Artificial
  Synthetic oligonucleotide
gctcctacttgatagaatgggtcgtaaggttgtacccagttaatttcgaataggc

SEQ ID NO: 415439 - DNA, 55 bp, Artificial
  Synthetic oligonucleotide
gctcctaggccccgctgatgatatgaagagtggaggttggcgcctccttgctccg

SEQ ID NO: 415440 - DNA, 54 bp, Artificial
  Synthetic oligonucleotide
gctcctagtattacagcaacgacactaaccaacattgattcactgacgatttca

SEQ ID NO: 415441 - DNA, 60 bp, Artificial
  Synthetic oligonucleotide
gctcctatttatgaatccatctgctggaattgaagggtttgagccatactgtatgaaaaa

SEQ ID NO: 415442 - DNA, 60 bp, Artificial
  Synthetic oligonucleotide
gctcctcaccaacactgcttcttccctcggctttgacttgaagatagtgaatcgcgcgcc

SEQ ID NO: 415443 - DNA, 55 bp, Artificial
  Synthetic oligonucleotide
gctcctcacggggtccaacgccaagaacatggacctcggtaccattcctggagac

SEQ ID NO: 415444 - DNA, 57 bp, Artificial
  Synthetic oligonucleotide
gctcctcactggctccaacgccaaggcccaagatctcgggaccatcccgggcgattg

SEQ ID NO: 415445 - DNA, 55 bp, Artificial
  Synthetic oligonucleotide
gctcctcagacagggacagaggaacttagattactatacaacacagtagcaactc

SEQ ID NO: 415446 - DNA, 54 bp, Artificial
  Synthetic oligonucleotide
gctcctcattatccacggtttcaatggggccgtaggttatttgcggccgcaagg

SEQ ID NO: 415447 - DNA, 52 bp, Artificial
  Synthetic oligonucleotide
gctcctccaaagccttccgaagacccttttggtggttttacattctggggtg

SEQ ID NO: 415448 - DNA, 55 bp, Artificial
  Synthetic oligonucleotide
gctcctcccattgcagggagcataacatgtaactcaaatatcacaggaatactat

SEQ ID NO: 415449 - DNA, 52 bp, Artificial
  Synthetic oligonucleotide
gctcctccgggagtctccccacttccctgaaatatccctcgcccctaaaccc

SEQ ID NO: 415450 - DNA, 54 bp, Artificial
  Synthetic oligonucleotide
gctcctcgggttatacaacctaggagccctcgctacaacgtggagttgggccgg

SEQ ID NO: 415451 - DNA, 56 bp, Artificial
  Synthetic oligonucleotide
gctcctcggtatgcttttgagttagtgtccttagggaatgggaaattgttcaggag

SEQ ID NO: 415452 - DNA, 55 bp, Artificial
  Synthetic oligonucleotide
gctcctctcagagacgaatcgggtattcaacaccctcataccaactactacgtcg

SEQ ID NO: 415453 - DNA, 52 bp, Artificial
  Synthetic oligonucleotide
gctcctctccaattccattgaactttagtgagaagatgattcagaaaggtgc

SEQ ID NO: 415454 - DNA, 60 bp, Artificial
  Synthetic oligonucleotide
gctcctctttgaaggcctctgccgagcctaccacagatctccatttcacactgaggcctt

SEQ ID NO: 415455 - DNA, 60 bp, Artificial
  Synthetic oligonucleotide
gctcctgacagcgcagaacctgcctgtgagctacaactattgcagactagtgagcaggag

SEQ ID NO: 415456 - DNA, 55 bp, Artificial
  Synthetic oligonucleotide
gctcctgacagggcaagttttcttagaggagaatcactaggaatccagagtgatg

SEQ ID NO: 415457 - DNA, 60 bp, Artificial
  Synthetic oligonucleotide
gctcctgagaacttcaataggccaggtgtcaaggcccatgtttctatacgtgagaaccaa

SEQ ID NO: 415458 - DNA, 60 bp, Artificial
  Synthetic oligonucleotide
gctcctgaggactgcaataggccaagtgtcaaggccaatgttcctgtatgtgagaaccaa

SEQ ID NO: 415459 - DNA, 57 bp, Artificial
  Synthetic oligonucleotide
gctcctgatctagactccggctcctggtccacatgttccgaggaggggggttctgaa

SEQ ID NO: 415460 - DNA, 55 bp, Artificial
  Synthetic oligonucleotide
gctcctgatcttcacgcctcaggtgacacgggcaggaagcgtgacgaaaatgatc

SEQ ID NO: 415461 - DNA, 60 bp, Artificial
  Synthetic oligonucleotide
gctcctgatgtgccgcgtggatgtgagggaccatgcaaagtacagtcattcgaaaagaga

SEQ ID NO: 415462 - DNA, 55 bp, Artificial
  Synthetic oligonucleotide
gctcctgattaccactatgaggagtgttcctgttaccctgatgctggggaagtaa

SEQ ID NO: 415463 - DNA, 60 bp, Artificial
  Synthetic oligonucleotide
gctcctgcaactttgatctccatacaagcacatcaacacaacaggctttcaccaaatgga

SEQ ID NO: 415464 - DNA, 51 bp, Artificial
  Synthetic oligonucleotide
gctcctgctttcacagctgcagataggctaaagttgtagcctgagatgttc

SEQ ID NO: 415465 - DNA, 55 bp, Artificial
  Synthetic oligonucleotide
gctcctggatctggacccatactagtgaatatcctagggtcatgggtaaaacccc

SEQ ID NO: 415466 - DNA, 56 bp, Artificial
  Synthetic oligonucleotide
gctcctggcttgaaacactagtgtgtttggtagcagttgattgggaatggtgatgg

SEQ ID NO: 415467 - DNA, 60 bp, Artificial
  Synthetic oligonucleotide
gctcctgggaaacccagaatgtgaattactattcacagcaagctcatggtcttacattgt

SEQ ID NO: 415468 - DNA, 55 bp, Artificial
  Synthetic oligonucleotide
gctcctgggcatcatgccgcccaaaggtctagtcagcgatctatacttgacgacc

SEQ ID NO: 415469 - DNA, 60 bp, Artificial
  Synthetic oligonucleotide
gctcctgggcatcatgcctctcaaaggtcgggtcagcgctctgtactcgatgacctttac

SEQ ID NO: 415470 - DNA, 60 bp, Artificial
  Synthetic oligonucleotide
gctcctggggctatggccactcctgctgctcgtattggcgttgccccaacgggcgttcgc

SEQ ID NO: 415471 - DNA, 57 bp, Artificial
  Synthetic oligonucleotide
gctcctggggctattgctgggtttgctgctttaattcaaactgttactggtgttagt

SEQ ID NO: 415472 - DNA, 60 bp, Artificial
  Synthetic oligonucleotide
gctcctggggggtctatctcgtgtcaaggatccccgtctgcgtgcggataggtatttgca

SEQ ID NO: 415473 - DNA, 55 bp, Artificial
  Synthetic oligonucleotide
gctcctggtcctgtgtgcagttcaacttctgttaatgagaacatcatgggccttg

SEQ ID NO: 415474 - DNA, 57 bp, Artificial
  Synthetic oligonucleotide
gctcctgtccgaggtttggacattacagaagagggtctccaaattggaactgatgac

SEQ ID NO: 415475 - DNA, 60 bp, Artificial
  Synthetic oligonucleotide
gctcctgtttttgtctgagtttgatccaggatctattcagagatatctcaaattactggt

SEQ ID NO: 415476 - DNA, 55 bp, Artificial
  Synthetic oligonucleotide
gctccttacgccgcgtgcatcactatctactttgctccacctgggtcctctcccc

SEQ ID NO: 415477 - DNA, 57 bp, Artificial
  Synthetic oligonucleotide
gctccttaggggaaccaaagcactaacagaagtaataccactaacagaagaagcaga

SEQ ID NO: 415478 - DNA, 54 bp, Artificial
  Synthetic oligonucleotide
gctccttcaaagcttatttaataagtggtcccctatttaagacttggtcaccaa

SEQ ID NO: 415479 - DNA, 55 bp, Artificial
  Synthetic oligonucleotide
gctccttccaacatacagaattcatttgtggcagtgggacaaaagtataaactgg

SEQ ID NO: 415480 - DNA, 56 bp, Artificial
  Synthetic oligonucleotide
gctccttcctgttggtgcgtgtccaacacttcccatctttttgagtagcctttaat

SEQ ID NO: 415481 - DNA, 54 bp, Artificial
  Synthetic oligonucleotide
gctccttcttttctcgcttaccctacagctaaggctgtccctctccccaacccc

SEQ ID NO: 415482 - DNA, 60 bp, Artificial
  Synthetic oligonucleotide
gctccttgatcctactgtccctgaggcgcacaagttttggtgtgctttgggtgatagatg

SEQ ID NO: 415483 - DNA, 57 bp, Artificial
  Synthetic oligonucleotide
gctccttgattttgcattagagcttgagtttaggaacttgacacccgggaacactaa

SEQ ID NO: 415484 - DNA, 60 bp, Artificial
  Synthetic oligonucleotide
gctccttggagcagtgagaggtcttgacaaaatctgtctaggacatcatgcagtagccaa

SEQ ID NO: 415485 - DNA, 60 bp, Artificial
  Synthetic oligonucleotide
gctccttggcacggagacacatagccagagagaaacatccggagttttacaaagactgct

SEQ ID NO: 415486 - DNA, 60 bp, Artificial
  Synthetic oligonucleotide
gctccttgggatgttaatgatgagtagtgctgcagaacaattgtgggttacagtctatta

SEQ ID NO: 415487 - DNA, 55 bp, Artificial
  Synthetic oligonucleotide
gctccttggttgtataactttagtgtatgatggtcttgccattgtgacagtttct

SEQ ID NO: 415488 - DNA, 60 bp, Artificial
  Synthetic oligonucleotide
gctccttgtcgcttttgagacgatggtcaaacccatgcgtatcgaacaactatggtgccc

SEQ ID NO: 415489 - DNA, 53 bp, Artificial
  Synthetic oligonucleotide
gctccttgttccaaaggtttcaggaaatcagtttagagtgtttagattaaaat

SEQ ID NO: 415490 - DNA, 59 bp, Artificial
  Synthetic oligonucleotide
gctcctttgatttgtctagtttcaaatcttggagcagtcatgaaagtgggtgttgttct

SEQ ID NO: 415491 - DNA, 55 bp, Artificial
  Synthetic oligonucleotide
gctcgaacatggatggaaatgacaaggtgacttctgtagcatcatttgtgagcgc

SEQ ID NO: 415492 - DNA, 60 bp, Artificial
  Synthetic oligonucleotide
gctcgaaccgaccatgggtgtctttcaatcagaatctggagtatcaaataggatatatat

SEQ ID NO: 415493 - DNA, 57 bp, Artificial
  Synthetic oligonucleotide
gctcgaaccgccttgcagggacgctctgtcagacgagagcccttaacattggcatgt

SEQ ID NO: 415494 - DNA, 59 bp, Artificial
  Synthetic oligonucleotide
gctcgaagaaccatgttttcccaatcccatcgtttacgatgcttcgatgccgttgctta

SEQ ID NO: 415495 - DNA, 60 bp, Artificial
  Synthetic oligonucleotide
gctcgaagagtaccaagaccctgcagagacgaccgtgcaaagtctagtgcccattaacac

SEQ ID NO: 415496 - DNA, 60 bp, Artificial
  Synthetic oligonucleotide
gctcgaagagttcgtgcaaggcagcggatccgcgtacgtcattgcctcaccgctgacgat

SEQ ID NO: 415497 - DNA, 60 bp, Artificial
  Synthetic oligonucleotide
gctcgaagccgcctgcaattggactcgaggagagcgttgtgatctggaggacagggatag

SEQ ID NO: 415498 - DNA, 55 bp, Artificial
  Synthetic oligonucleotide
gctcgaaggcacctgaaggcgttgaataggctgttcccttctacgagccttacgg

SEQ ID NO: 415499 - DNA, 55 bp, Artificial
  Synthetic oligonucleotide
gctcgaagtatccagatcaattcttactccaggtcagacggcacagaagactcgg

SEQ ID NO: 415500 - DNA, 55 bp, Artificial
  Synthetic oligonucleotide
gctcgaagttctcaaggttagatgaagagggatttgaatgtctcactgaaggtgc

SEQ ID NO: 415501 - DNA, 55 bp, Artificial
  Synthetic oligonucleotide
gctcgaagttttagtcggttccttgagcagcttcccgacattttaggtgcgtacc

SEQ ID NO: 415502 - DNA, 55 bp, Artificial
  Synthetic oligonucleotide
gctcgaatcaggtattatgtcaaatgtgtgcaagaagcagtctactccatcctac

SEQ ID NO: 415503 - DNA, 58 bp, Artificial
  Synthetic oligonucleotide
gctcgaattatcagttcctaagatcaatcttaagatcgaactttggtttgaactcaag

SEQ ID NO: 415504 - DNA, 50 bp, Artificial
  Synthetic oligonucleotide
gctcgaatttggtggactagttacggtcattcatcaaggattggactcca

SEQ ID NO: 415505 - DNA, 55 bp, Artificial
  Synthetic oligonucleotide
gctcgacaaggttattgactgcctgatttaagtctctgaggcgtttcaggtcact

SEQ ID NO: 415506 - DNA, 55 bp, Artificial
  Synthetic oligonucleotide
gctcgacccctgtgacccagcatcgtcggagaaaatgcacgcaatgcttcagtcg

SEQ ID NO: 415507 - DNA, 55 bp, Artificial
  Synthetic oligonucleotide
gctcgacctttcggggcaatcaaaaggggtgggatttgtcggcacaggaatggtg

SEQ ID NO: 415508 - DNA, 59 bp, Artificial
  Synthetic oligonucleotide
gctcgacgtattctccataagattaatcgtcaagagcaatctaaaggatggacgtttaa

SEQ ID NO: 415509 - DNA, 56 bp, Artificial
  Synthetic oligonucleotide
gctcgactaagtccacatttcacgccgtccctacccatatttgggaccgtcttatg

SEQ ID NO: 415510 - DNA, 60 bp, Artificial
  Synthetic oligonucleotide
gctcgacttatcagagattccaaatagattgcccatgttcgttacaggccgacgatgggg

SEQ ID NO: 415511 - DNA, 55 bp, Artificial
  Synthetic oligonucleotide
gctcgagaatctcgattcttttgacttagaggcgtttaagactttgtgccagcag

SEQ ID NO: 415512 - DNA, 60 bp, Artificial
  Synthetic oligonucleotide
gctcgagacctgtatagaagtgggacctggttctatacacgtggtgggtctgctgataac

SEQ ID NO: 415513 - DNA, 60 bp, Artificial
  Synthetic oligonucleotide
gctcgagcatcagggctactccatgagaggttagatgagtacgagctgcagggcccaacc

SEQ ID NO: 415514 - DNA, 59 bp, Artificial
  Synthetic oligonucleotide
gctcgagccgaggccatgatacacgagtgggtgcctgacctacgggtcaggggtggtag

SEQ ID NO: 415515 - DNA, 55 bp, Artificial
  Synthetic oligonucleotide
gctcgagccttcgggcgagtccgcccttggacggcttatccaactcggagaatac

SEQ ID NO: 415516 - DNA, 55 bp, Artificial
  Synthetic oligonucleotide
gctcgagcgcagctcgtggcggatcagcggaggttatgtgatgttgacttcacga

SEQ ID NO: 415517 - DNA, 58 bp, Artificial
  Synthetic oligonucleotide
gctcgagcgttcccacgactatggctagaatgttacgtgatcggggagcacatgattg

SEQ ID NO: 415518 - DNA, 60 bp, Artificial
  Synthetic oligonucleotide
gctcgagctcgagttaggcctccacaacgcacaccactccttcacgatcaagcacacaag

SEQ ID NO: 415519 - DNA, 60 bp, Artificial
  Synthetic oligonucleotide
gctcgagcttccaatatattggatgacgacaaactctacatgtgcattgctccatcgtga

SEQ ID NO: 415520 - DNA, 55 bp, Artificial
  Synthetic oligonucleotide
gctcgagcttctgatgatttgttggagttagcaagacaccacaagaatcgagttg

SEQ ID NO: 415521 - DNA, 55 bp, Artificial
  Synthetic oligonucleotide
gctcgaggacgccgtctatggcactgaaggtctggaagcactggatctctctact

SEQ ID NO: 415522 - DNA, 55 bp, Artificial
  Synthetic oligonucleotide
gctcgagggtacgtcgtcgtctcaacttcgacagccctatggctcgccgtgcttc

SEQ ID NO: 415523 - DNA, 55 bp, Artificial
  Synthetic oligonucleotide
gctcgaggtggtaaccataccgtacggtggtcagccatactcttaacgaaggagc

SEQ ID NO: 415524 - DNA, 58 bp, Artificial
  Synthetic oligonucleotide
gctcgagtatgacggtctgtgccgatgttatgagggtgtcacagtctgatacaagtga

SEQ ID NO: 415525 - DNA, 55 bp, Artificial
  Synthetic oligonucleotide
gctcgagtgttatctcatgtctcatttcaaaaccgggcatagagatacttgcaaa

SEQ ID NO: 415526 - DNA, 60 bp, Artificial
  Synthetic oligonucleotide
gctcgagttaggcctccacaacgcacaccactccttcacgatcaagcacacaagctccgc

SEQ ID NO: 415527 - DNA, 57 bp, Artificial
  Synthetic oligonucleotide
gctcgagttccgcaatttgacacctggtaacacgaacacacgtgtttcccgctactc

SEQ ID NO: 415528 - DNA, 52 bp, Artificial
  Synthetic oligonucleotide
gctcgataagcgcactccctgtcaaataaaggccgtacacggggagttgaaa

SEQ ID NO: 415529 - DNA, 58 bp, Artificial
  Synthetic oligonucleotide
gctcgatatcacctttgagtccttagcgaaccaaagatccaccacagtcttaggacgt

SEQ ID NO: 415530 - DNA, 60 bp, Artificial
  Synthetic oligonucleotide
gctcgatcgaccaactttggacaaaactacacgcgtatcatcccagcatggcgcatccag

SEQ ID NO: 415531 - DNA, 60 bp, Artificial
  Synthetic oligonucleotide
gctcgatctctggaagcactatgagagctgtcacgatccgaccaatatgcaatacaccgt

SEQ ID NO: 415532 - DNA, 55 bp, Artificial
  Synthetic oligonucleotide
gctcgattagaagtgtgaatgcatcaaagataagttacactctgagcacagaccc

SEQ ID NO: 415533 - DNA, 55 bp, Artificial
  Synthetic oligonucleotide
gctcgattcatgcatccaaccgttctctgataggagtcttcgaatattagagaac

SEQ ID NO: 415534 - DNA, 55 bp, Artificial
  Synthetic oligonucleotide
gctcgcaaatgggagtgtttaaggtgaacagcacagtaacactccaaatgaggcc

SEQ ID NO: 415535 - DNA, 55 bp, Artificial
  Synthetic oligonucleotide
gctcgcaactcgcacgtgtacaaagtgccaatactttcacggtggatggtttacg

SEQ ID NO: 415536 - DNA, 60 bp, Artificial
  Synthetic oligonucleotide
gctcgcaccctcagtttgactttttgctggagtagacgaatgcctcaccaacatttgtca

SEQ ID NO: 415537 - DNA, 55 bp, Artificial
  Synthetic oligonucleotide
gctcgcactctttatgttcgtgcaaagggacctgaaaaggttactgagacaagac

SEQ ID NO: 415538 - DNA, 52 bp, Artificial
  Synthetic oligonucleotide
gctcgcagactggagcgatgcgtttactgtggttcgttaccgtggcttgccc

SEQ ID NO: 415539 - DNA, 55 bp, Artificial
  Synthetic oligonucleotide
gctcgcagccccgctataccctctcactcgaccaggaactctgttccagtgggga

SEQ ID NO: 415540 - DNA, 52 bp, Artificial
  Synthetic oligonucleotide
gctcgcatctccgcagtggcagtggagtacaaagtccgctcccggcaagtca

SEQ ID NO: 415541 - DNA, 55 bp, Artificial
  Synthetic oligonucleotide
gctcgcatgcacgcgttcatgagcgactggcggttcgcgtaaagcagatcggggt

SEQ ID NO: 415542 - DNA, 60 bp, Artificial
  Synthetic oligonucleotide
gctcgcccctccagctcgggaggctgcgtcatggacatcataactagaagagaccaacgt

SEQ ID NO: 415543 - DNA, 55 bp, Artificial
  Synthetic oligonucleotide
gctcgcctcaattacccgcaccgcgcagcacttttggagtgcgctggcgatgcta

SEQ ID NO: 415544 - DNA, 60 bp, Artificial
  Synthetic oligonucleotide
gctcgcctcccggcgagcattatgttcgtggcctggaaaacataatgctcgccaggaggc

SEQ ID NO: 415545 - DNA, 55 bp, Artificial
  Synthetic oligonucleotide
gctcgcctgcttcggcgtacggccggattgcgttcattgccattagtcggtcctc

SEQ ID NO: 415546 - DNA, 55 bp, Artificial
  Synthetic oligonucleotide
gctcgcctggtggccttacttggtcgaaggaacggtgtgggtcttggactctccc

SEQ ID NO: 415547 - DNA, 55 bp, Artificial
  Synthetic oligonucleotide
gctcgcgaagatctgacattacctgaaatatggttaaagttggggtggttaccca

SEQ ID NO: 415548 - DNA, 54 bp, Artificial
  Synthetic oligonucleotide
gctcgcgatcttctggggcaccgggagtagggggcaaccacaaccctcccccta

SEQ ID NO: 415549 - DNA, 60 bp, Artificial
  Synthetic oligonucleotide
gctcgcgcagtttcggcgaaagtgatgcggcctgtgttgttcgggaacgattatatgatc

SEQ ID NO: 415550 - DNA, 59 bp, Artificial
  Synthetic oligonucleotide
gctcgcgcttttgtgaagctcagggccaaggctatagtgaaggagagttcatgaataca

SEQ ID NO: 415551 - DNA, 55 bp, Artificial
  Synthetic oligonucleotide
gctcgcggtcacggtattatggatatcgctgagcgtgtcgccaacgcgggctcgt

SEQ ID NO: 415552 - DNA, 55 bp, Artificial
  Synthetic oligonucleotide
gctcgctaatcttggcgagcttctacgcgttatggtggctggtgaggaatttcac

SEQ ID NO: 415553 - DNA, 55 bp, Artificial
  Synthetic oligonucleotide
gctcgctatactcggtccgctcatggtgctccaagctggcataacaagagtgccg

SEQ ID NO: 415554 - DNA, 60 bp, Artificial
  Synthetic oligonucleotide
gctcgctatgatacttcagatagaatgaaactgcatagagcttctggattgtgccctggt

SEQ ID NO: 415555 - DNA, 60 bp, Artificial
  Synthetic oligonucleotide
gctcgctcaagacgcataaagcgtgcctctgtaactgacatctacaggggttgcaagcag

SEQ ID NO: 415556 - DNA, 60 bp, Artificial
  Synthetic oligonucleotide
gctcgctgatgcaagtgaaacaatgttagctaacgtaacatctgttagacaggaatacgc

SEQ ID NO: 415557 - DNA, 58 bp, Artificial
  Synthetic oligonucleotide
gctcgctgggtcttgaaccagatcccagttgtggtatcggagtcggcgcccgaaccac

SEQ ID NO: 415558 - DNA, 60 bp, Artificial
  Synthetic oligonucleotide
gctcgcttacaaacaactgatatgtggtatcgcacagcattgtgacgactcgggtgtttt

SEQ ID NO: 415559 - DNA, 54 bp, Artificial
  Synthetic oligonucleotide
gctcggaccctttatgttcgtgcgaaagggcccgaaaaggtaacagagacaaga

SEQ ID NO: 415560 - DNA, 60 bp, Artificial
  Synthetic oligonucleotide
gctcggacgtgtactgctgaggtgggaactgacgaaggcacaacgcagcgctctgctcag

SEQ ID NO: 415561 - DNA, 55 bp, Artificial
  Synthetic oligonucleotide
gctcggactactagctctgaaccccatggggtcgaagttggttgcaaagacaacc

SEQ ID NO: 415562 - DNA, 55 bp, Artificial
  Synthetic oligonucleotide
gctcggagttgtcacccttgcttctcaccacaacgcagtggcagatcctcccttg

SEQ ID NO: 415563 - DNA, 59 bp, Artificial
  Synthetic oligonucleotide
gctcggataaaaactcgcatgaacgtacttagacggttatgtgggataccgcattgcaa

SEQ ID NO: 415564 - DNA, 58 bp, Artificial
  Synthetic oligonucleotide
gctcggatatgaaaccaggggtctaccgtgtgatgacctccggagtactcgggagcta

SEQ ID NO: 415565 - DNA, 60 bp, Artificial
  Synthetic oligonucleotide
gctcggatggaagctaatccggacttgattttaacgagtaatagaagctcgtctgatgag

SEQ ID NO: 415566 - DNA, 55 bp, Artificial
  Synthetic oligonucleotide
gctcggattttaaccaaaccctcgcggcgtttctgttgacacattaccgctccag

SEQ ID NO: 415567 - DNA, 60 bp, Artificial
  Synthetic oligonucleotide
gctcggcagaagagcacaacgtgacttgttaaccggaatagaggagaaccacttcattga

SEQ ID NO: 415568 - DNA, 60 bp, Artificial
  Synthetic oligonucleotide
gctcggcagcagatgcggtcaatgaccaggagttctgggacatggttgacagtgaaagag

SEQ ID NO: 415569 - DNA, 57 bp, Artificial
  Synthetic oligonucleotide
gctcggcagcgtatcccaaaggggtcgagaacaagagtctcaagtccaaagttggga

SEQ ID NO: 415570 - DNA, 55 bp, Artificial
  Synthetic oligonucleotide
gctcggcatcccagatcttgcgaacgccttgtccgcatatgtgtacgatggcagg

SEQ ID NO: 415571 - DNA, 55 bp, Artificial
  Synthetic oligonucleotide
gctcggcgcaaacggtaccgtgaggtggaccaaaaacctaatgcacaacgctgta

SEQ ID NO: 415572 - DNA, 57 bp, Artificial
  Synthetic oligonucleotide
gctcggcgccactagtgtcaacccccaggacgagccaaccttcatctctccccgtgg

SEQ ID NO: 415573 - DNA, 55 bp, Artificial
  Synthetic oligonucleotide
gctcggctctttcatgtgtacaagtagagtgattcgggaaggtggctcgcctaga

SEQ ID NO: 415574 - DNA, 55 bp, Artificial
  Synthetic oligonucleotide
gctcggctgctagacgcgggagtgatttattctggatctgaaacagtgtccaaac

SEQ ID NO: 415575 - DNA, 55 bp, Artificial
  Synthetic oligonucleotide
gctcggctgttccagttgattgggtcccgacggggcgcacaacgtggtccatcca

SEQ ID NO: 415576 - DNA, 57 bp, Artificial
  Synthetic oligonucleotide
gctcgggggaactcacgtcagggtggacgtgaaacacaaagattctagggagctgcc

SEQ ID NO: 415577 - DNA, 60 bp, Artificial
  Synthetic oligonucleotide
gctcggggtgtggactagacacactagcaagagattactacaagattgtgtcaacgttgg

SEQ ID NO: 415578 - DNA, 60 bp, Artificial
  Synthetic oligonucleotide
gctcgggtgtttaccatgtcaccaacgactgcccgaactcgagcatagtctatgaagccg

SEQ ID NO: 415579 - DNA, 60 bp, Artificial
  Synthetic oligonucleotide
gctcgggttgtctcctcgcgcgacgctcgcttttgcccaacgggatgagatgtgatcttg

SEQ ID NO: 415580 - DNA, 55 bp, Artificial
  Synthetic oligonucleotide
gctcggtagctgggctgatacagtgagcgcaatcgatgaggggatactcgggtga

SEQ ID NO: 415581 - DNA, 56 bp, Artificial
  Synthetic oligonucleotide
gctcggtataattatgccgtatcttatggagcttggactgataggatgctagagtt

SEQ ID NO: 415582 - DNA, 60 bp, Artificial
  Synthetic oligonucleotide
gctcggtcgctgagcggccaatcgcaatcacgtatctcgaacaggctagaacatgggaga

SEQ ID NO: 415583 - DNA, 52 bp, Artificial
  Synthetic oligonucleotide
gctcggtctcccgactggaacgtggataaatcatggatcgctgcagcgaact

SEQ ID NO: 415584 - DNA, 59 bp, Artificial
  Synthetic oligonucleotide
gctcgtaaaatggcgaatgtgcgaggcccgtgaaccatcggttgatttgcgactaccat

SEQ ID NO: 415585 - DNA, 55 bp, Artificial
  Synthetic oligonucleotide
gctcgtaattcactctacttccaaggcaagaatgaagttcggttccgaccaacca

SEQ ID NO: 415586 - DNA, 60 bp, Artificial
  Synthetic oligonucleotide
gctcgtacaatgttcggcccattcgttgttttccagcaggccaataatattgagaacatc

SEQ ID NO: 415587 - DNA, 55 bp, Artificial
  Synthetic oligonucleotide
gctcgtacgccgtacagaagtacagtgcccgttaaccatcttggttacaggccag

SEQ ID NO: 415588 - DNA, 55 bp, Artificial
  Synthetic oligonucleotide
gctcgtaggcgcagggctgcgccagacacgttatacagacagtgtgcaacaggtg

SEQ ID NO: 415589 - DNA, 58 bp, Artificial
  Synthetic oligonucleotide
gctcgtatagaaggtcctacaaccgcaggcctgcccgcaggtcctatggaagaaggta

SEQ ID NO: 415590 - DNA, 60 bp, Artificial
  Synthetic oligonucleotide
gctcgtcaccctcacgatgctcaaccaagccaaagaatgctgattgttctattctgacat

SEQ ID NO: 415591 - DNA, 56 bp, Artificial
  Synthetic oligonucleotide
gctcgtcacctgttcagctctaactaacgcaagattgtatataatacctgtgtacg

SEQ ID NO: 415592 - DNA, 51 bp, Artificial
  Synthetic oligonucleotide
gctcgtcatgccggaagcattgtaccagctcccggacaacccgattcccgt

SEQ ID NO: 415593 - DNA, 55 bp, Artificial
  Synthetic oligonucleotide
gctcgtcccagaagctcgaactgatgtcgtccagacttggaagttcaggtaggct

SEQ ID NO: 415594 - DNA, 50 bp, Artificial
  Synthetic oligonucleotide
gctcgtcctacttgagaatgaaaggactctggacttccatgactccaatg

SEQ ID NO: 415595 - DNA, 59 bp, Artificial
  Synthetic oligonucleotide
gctcgtcgaatctacgtattcaccggatacactcgggtacgatcttgtaagagatttga

SEQ ID NO: 415596 - DNA, 51 bp, Artificial
  Synthetic oligonucleotide
gctcgtctatgacgcggtcattaaccgcaccgattgtggccggcctagctt

SEQ ID NO: 415597 - DNA, 55 bp, Artificial
  Synthetic oligonucleotide
gctcgtgacaggaaagtgggaagagaagtatatgccgacgattatacaatggaac

SEQ ID NO: 415598 - DNA, 60 bp, Artificial
  Synthetic oligonucleotide
gctcgtgacaggtccatagctcttacgtttctcgcaattggaggggtcctgctctttctc

SEQ ID NO: 415599 - DNA, 59 bp, Artificial
  Synthetic oligonucleotide
gctcgtgactatgccgaagcgaacaggcgatatactaatttcaacgcccgtctcgaagg

SEQ ID NO: 415600 - DNA, 55 bp, Artificial
  Synthetic oligonucleotide
gctcgtgaggaccggtataagcgaactggcttaatggggcaggatgaatcgagct

SEQ ID NO: 415601 - DNA, 57 bp, Artificial
  Synthetic oligonucleotide
gctcgtgccacaactgcctggaatcccctttgtgtcctgccaacgcgggtatagggg

SEQ ID NO: 415602 - DNA, 55 bp, Artificial
  Synthetic oligonucleotide
gctcgtgctgcagacattgtgtgactctccgtgggcgacagagacatggacactc

SEQ ID NO: 415603 - DNA, 55 bp, Artificial
  Synthetic oligonucleotide
gctcgtggaaacagagaaacatcccgcttattgtaacactgatttaggtgcccca

SEQ ID NO: 415604 - DNA, 51 bp, Artificial
  Synthetic oligonucleotide
gctcgtggagggtgatgaaggttgcattcttgaaagcccaagctttaaggg

SEQ ID NO: 415605 - DNA, 55 bp, Artificial
  Synthetic oligonucleotide
gctcgtggccttatggaagctatctgtcgtaagtatggctattgggtagcgaagg

SEQ ID NO: 415606 - DNA, 51 bp, Artificial
  Synthetic oligonucleotide
gctcgtgggcctaacgtactagaatatactactggaataacagatgcagga

SEQ ID NO: 415607 - DNA, 60 bp, Artificial
  Synthetic oligonucleotide
gctcgtggttactctgttcgtatctggactgcacgttatccctcagtggagcaggagcaa

SEQ ID NO: 415608 - DNA, 55 bp, Artificial
  Synthetic oligonucleotide
gctcgtgtagagtgctctacagatcgaccgcaacgaggaaggagccccgaatgat

SEQ ID NO: 415609 - DNA, 55 bp, Artificial
  Synthetic oligonucleotide
gctcgtgtcagccttaacatgaccactgggcccactctcaattcatggtctggtc

SEQ ID NO: 415610 - DNA, 60 bp, Artificial
  Synthetic oligonucleotide
gctcgtgtggtgcacaaatcaccggacatgtcaagaatggttccatgaggatcgtggggc

SEQ ID NO: 415611 - DNA, 55 bp, Artificial
  Synthetic oligonucleotide
gctcgtgtgtaatgagatcgctggtccggatctcaatacccgaacgttcccagtt

SEQ ID NO: 415612 - DNA, 59 bp, Artificial
  Synthetic oligonucleotide
gctcgtgtgtggcgacgacttagtcgttatctgtgaaagtgcgggagttcaggaggacg

SEQ ID NO: 415613 - DNA, 60 bp, Artificial
  Synthetic oligonucleotide
gctcgttaagcgcttttggaaggtgaacaaccatgtggtgtacaatcatcaggaagctgg

SEQ ID NO: 415614 - DNA, 53 bp, Artificial
  Synthetic oligonucleotide
gctcgttagttaacgagcgatacaacttgaaactctgataagtttttgtagaa

SEQ ID NO: 415615 - DNA, 60 bp, Artificial
  Synthetic oligonucleotide
gctcgttatgccctacacaatgggcacttggcttcgaggcgttgcggccaattggtcgaa

SEQ ID NO: 415616 - DNA, 55 bp, Artificial
  Synthetic oligonucleotide
gctcgttcacgtgagtggcttaacgagctacctagtgcgacactcaaccagctgc

SEQ ID NO: 415617 - DNA, 55 bp, Artificial
  Synthetic oligonucleotide
gctcgttcacgttgtctcgtattcttcgcagcatcagcaagcttccttcgatcgc

SEQ ID NO: 415618 - DNA, 55 bp, Artificial
  Synthetic oligonucleotide
gctcgttcattttctagtttgtgggaagatagttatggatatggcgctccagaag

SEQ ID NO: 415619 - DNA, 55 bp, Artificial
  Synthetic oligonucleotide
gctcgttctgctcgagaatgaaaggacgttggatttccatgactccaatgtaagg

SEQ ID NO: 415620 - DNA, 55 bp, Artificial
  Synthetic oligonucleotide
gctcgttgcaattgccagacaggagtgtactattgtaactcaatgagaaaacact

SEQ ID NO: 415621 - DNA, 50 bp, Artificial
  Synthetic oligonucleotide
gctcgttgctacaatagtgcgactcatgcgtactattgtttagcacacgc

SEQ ID NO: 415622 - DNA, 60 bp, Artificial
  Synthetic oligonucleotide
gctcgttgctgcatgcaactggacgcgaggggagcgctgcaacttggaggatagggatag

SEQ ID NO: 415623 - DNA, 55 bp, Artificial
  Synthetic oligonucleotide
gctcgtttaattgggccatggacattgttatgttggattgggtcctctgagcccc

SEQ ID NO: 415624 - DNA, 55 bp, Artificial
  Synthetic oligonucleotide
gctcgtttcaaatcgaccccttaaagatatccgcgccgattacaactatgcaaag

SEQ ID NO: 415625 - DNA, 56 bp, Artificial
  Synthetic oligonucleotide
gctcgtttctccgaaacgtgcggggcaagcaacgttcctcgctcgcgaggagggta

SEQ ID NO: 415626 - DNA, 55 bp, Artificial
  Synthetic oligonucleotide
gctcgttttgatgcttatgacatcgctatactttcgtacctaaaccgcctatggg

SEQ ID NO: 415627 - DNA, 59 bp, Artificial
  Synthetic oligonucleotide
gctcgttttgctcgagaacgaaaggactctagatttccatgactctaatgtgaaaaatc

SEQ ID NO: 415628 - DNA, 60 bp, Artificial
  Synthetic oligonucleotide
gctctaaaaatctaaagcttactgcttttgcaggcattccatcttactcatcaacaagta

SEQ ID NO: 415629 - DNA, 55 bp, Artificial
  Synthetic oligonucleotide
gctctaaaatacctcagagacatgactatctgcaggaaccgcatacattgaagcc

SEQ ID NO: 415630 - DNA, 55 bp, Artificial
  Synthetic oligonucleotide
gctctaaactatctgaagtcactaaacgcttgtgcggtgaacgggttgtccatcc

SEQ ID NO: 415631 - DNA, 60 bp, Artificial
  Synthetic oligonucleotide
gctctaacaatagttgttagaaatagttcagatcccctgaccattgtagcaacacttgca

SEQ ID NO: 415632 - DNA, 60 bp, Artificial
  Synthetic oligonucleotide
gctctaacaccactatacacaaatgattcattatttgctaatgcgcagcaagcggtaatc

SEQ ID NO: 415633 - DNA, 58 bp, Artificial
  Synthetic oligonucleotide
gctctaacttacacgaatgtattatccttcgtcgaatcaattcggtcgagggtaatca

SEQ ID NO: 415634 - DNA, 55 bp, Artificial
  Synthetic oligonucleotide
gctctaagatgggcatcaggtgaaagttttattgaactcagtaaccagaagttta

SEQ ID NO: 415635 - DNA, 60 bp, Artificial
  Synthetic oligonucleotide
gctctaaggaaaagcactcaattactcttgcactattaacatttaaaactatgaaatgca

SEQ ID NO: 415636 - DNA, 55 bp, Artificial
  Synthetic oligonucleotide
gctctaagtacacctatcgaaggaagctcacaaacccacttgaggagactcaagc

SEQ ID NO: 415637 - DNA, 60 bp, Artificial
  Synthetic oligonucleotide
gctctaataggcccgttatagatataaatatggcagattatagcattgactccagttatg

SEQ ID NO: 415638 - DNA, 60 bp, Artificial
  Synthetic oligonucleotide
gctctaatcgtgccgatgtttctgccggtgcgggattagctgatcctgatgcttttaggc

SEQ ID NO: 415639 - DNA, 58 bp, Artificial
  Synthetic oligonucleotide
gctctaatgcaatttcccggtgatcggagtcgaatttcccgacacgcgcggcggtgtg

SEQ ID NO: 415640 - DNA, 52 bp, Artificial
  Synthetic oligonucleotide
gctctaattacattgtttattccgacaagccctatttgatcaggatacatat

SEQ ID NO: 415641 - DNA, 60 bp, Artificial
  Synthetic oligonucleotide
gctctacaaatgcacgctatggaacaacagtcacaaatgacatgggtacattatgcttta

SEQ ID NO: 415642 - DNA, 55 bp, Artificial
  Synthetic oligonucleotide
gctctacaccccacttcgcgccaattctggtgcggacccattcgttgtgacggga

SEQ ID NO: 415643 - DNA, 60 bp, Artificial
  Synthetic oligonucleotide
gctctacagcaagaaggcgcgagtgtgatacatcagcgcagattagcgcgttcgcgaggt

SEQ ID NO: 415644 - DNA, 59 bp, Artificial
  Synthetic oligonucleotide
gctctacagggtgaccttggttacaagcttaaccctgatttgtatactatacattatca

SEQ ID NO: 415645 - DNA, 58 bp, Artificial
  Synthetic oligonucleotide
gctctacagtcttcgtaattatgtccgcaatctcttccctcgtaatactccccgcctg

SEQ ID NO: 415646 - DNA, 55 bp, Artificial
  Synthetic oligonucleotide
gctctaccagggcgaaaacaattgagatcgttatccgcaaagtgcctacgcgaag

SEQ ID NO: 415647 - DNA, 55 bp, Artificial
  Synthetic oligonucleotide
gctctacccaaaactgttgaccttattcacctgtccgggtttgccggttgtggca

SEQ ID NO: 415648 - DNA, 55 bp, Artificial
  Synthetic oligonucleotide
gctctaccttgcgatctgctacgatcaccgtttcgtgctttgcggggtgtatagc

SEQ ID NO: 415649 - DNA, 55 bp, Artificial
  Synthetic oligonucleotide
gctctacgaggccaatgtatgctttgacatggtccacaggtgcttcacgagccag

SEQ ID NO: 415650 - DNA, 60 bp, Artificial
  Synthetic oligonucleotide
gctctacgccctgcgtagacactatgagggagtcgagctggacacttacaccatgatctc

SEQ ID NO: 415651 - DNA, 60 bp, Artificial
  Synthetic oligonucleotide
gctctacgccttgcgtagacactacgagggagttgagctggactcttacaccatgatctc

SEQ ID NO: 415652 - DNA, 55 bp, Artificial
  Synthetic oligonucleotide
gctctacggaacaatggcgaggtatatgagacgagtgcgcgaggtcttccaaccc

SEQ ID NO: 415653 - DNA, 58 bp, Artificial
  Synthetic oligonucleotide
gctctacggagcgctgaaagtgctaggtcctgaaggtacagttgggctaaggcaggac

SEQ ID NO: 415654 - DNA, 53 bp, Artificial
  Synthetic oligonucleotide
gctctacggctttcgattggggttggggagtaaagctggaggtttgattaacg

SEQ ID NO: 415655 - DNA, 55 bp, Artificial
  Synthetic oligonucleotide
gctctactaggtgtgcaggtctcaaagcgtacaccaagacatccctccgacgtgc

SEQ ID NO: 415656 - DNA, 55 bp, Artificial
  Synthetic oligonucleotide
gctctactccaatcacagtcatgacaagtggatatgcattacattatcttgcaaa

SEQ ID NO: 415657 - DNA, 59 bp, Artificial
  Synthetic oligonucleotide
gctctactctacctagcaggtgtcgcttggtaccagtgtcttttagaggactttcctca

SEQ ID NO: 415658 - DNA, 60 bp, Artificial
  Synthetic oligonucleotide
gctctactggcattgtgaagaaggggcttgagtggttcgagaagaattcaggaaccatca

SEQ ID NO: 415659 - DNA, 57 bp, Artificial
  Synthetic oligonucleotide
gctctagaagttgtgttacgggagattgggtattcagaggaggccgtgtccctaata

SEQ ID NO: 415660 - DNA, 60 bp, Artificial
  Synthetic oligonucleotide
gctctagagcgggtaatagcgactttcaaccaccagtgtccagttacgctactatctcat

SEQ ID NO: 415661 - DNA, 60 bp, Artificial
  Synthetic oligonucleotide
gctctagagtcttacctgtacatctcccctgaactgaaatcacgagtgagacttggccgt

SEQ ID NO: 415662 - DNA, 59 bp, Artificial
  Synthetic oligonucleotide
gctctagctaaattgcatgatgaccagcaaattataattaccaggttagagtcactgct

SEQ ID NO: 415663 - DNA, 60 bp, Artificial
  Synthetic oligonucleotide
gctctagctgcagtgaaggatatgaagacttctatcattcgctatagcgaatatctgaag

SEQ ID NO: 415664 - DNA, 55 bp, Artificial
  Synthetic oligonucleotide
gctctaggcgcagcgcaagaagctaaaggacgcactttgaatgaggcatatcgcg

SEQ ID NO: 415665 - DNA, 60 bp, Artificial
  Synthetic oligonucleotide
gctctataaatcagcccgtttgctggagtgccacagcccccatccatatctccgatggtg

SEQ ID NO: 415666 - DNA, 60 bp, Artificial
  Synthetic oligonucleotide
gctctatactcaacacaagccagagaggaattcttgaagatgagcagatgtatcagaagt

SEQ ID NO: 415667 - DNA, 55 bp, Artificial
  Synthetic oligonucleotide
gctctatagtctcaagtaaggacgagtttaggttgctctttgaggaaccgctcgc

SEQ ID NO: 415668 - DNA, 53 bp, Artificial
  Synthetic oligonucleotide
gctctatgaaatgagagtgattagtaaagtcttgccgttcacatgtttatttg

SEQ ID NO: 415669 - DNA, 60 bp, Artificial
  Synthetic oligonucleotide
gctctatgcagccctccatctcccccccgaagtgctattaccccctggcacatatcacac

SEQ ID NO: 415670 - DNA, 57 bp, Artificial
  Synthetic oligonucleotide
gctctatgctggacctagacacttctgactgggagccactaacccactctaacagac

SEQ ID NO: 415671 - DNA, 54 bp, Artificial
  Synthetic oligonucleotide
gctctatggaaatggggtgttgatcggacaaggcgaatatgttagtggtatcat

SEQ ID NO: 415672 - DNA, 55 bp, Artificial
  Synthetic oligonucleotide
gctctattgaacagcgagactcttaacgagaatagagctaaactggatcgcctca

SEQ ID NO: 415673 - DNA, 59 bp, Artificial
  Synthetic oligonucleotide
gctctatttctcttagattcaacagttaccaaccagctccagatccaacccctgttgct

SEQ ID NO: 415674 - DNA, 60 bp, Artificial
  Synthetic oligonucleotide
gctctcaacaagggctgcaagcaagtgcaccacacctggataaagtcaatgggattgttg

SEQ ID NO: 415675 - DNA, 55 bp, Artificial
  Synthetic oligonucleotide
gctctcaactctataccaaccggtgcgccttcgaaatccgccgccccccctctta

SEQ ID NO: 415676 - DNA, 52 bp, Artificial
  Synthetic oligonucleotide
gctctcaaggtcgcgcaatcctgggactagcccagttttaaaagttcctggc

SEQ ID NO: 415677 - DNA, 55 bp, Artificial
  Synthetic oligonucleotide
gctctcacttcaaatccccccgtccaattcccccaccgcttcacttcttcctatc

SEQ ID NO: 415678 - DNA, 57 bp, Artificial
  Synthetic oligonucleotide
gctctcacttctcctttaaataccaaacctaggcctcaagtccttcctgatagcgga

SEQ ID NO: 415679 - DNA, 55 bp, Artificial
  Synthetic oligonucleotide
gctctcagagagaacggatctcaggtcggagagatggcactttctaggcctcttc

SEQ ID NO: 415680 - DNA, 55 bp, Artificial
  Synthetic oligonucleotide
gctctcagccaaggtaccacactacggggtcggcacgcaaatgggactatacatg

SEQ ID NO: 415681 - DNA, 57 bp, Artificial
  Synthetic oligonucleotide
gctctcagtctatcaagaattggagtgctcaatcaaggcgtgaaaatcccgtctatg

SEQ ID NO: 415682 - DNA, 60 bp, Artificial
  Synthetic oligonucleotide
gctctcagttgccaggagaaacttctgcagctgacaatgtgtacataatgcatggcttta

SEQ ID NO: 415683 - DNA, 60 bp, Artificial
  Synthetic oligonucleotide
gctctcatagtctgtgcatgacttagtgattccccagtgcgtgaatccatgctggtactt

SEQ ID NO: 415684 - DNA, 59 bp, Artificial
  Synthetic oligonucleotide
gctctcatcgatgttagtgttgatcagagcttccggaagggtggtttcttcaaaggtcc

SEQ ID NO: 415685 - DNA, 58 bp, Artificial
  Synthetic oligonucleotide
gctctcatggctaacgcttcacgttcagcctcacctccccccacgaacaccgaagttc

SEQ ID NO: 415686 - DNA, 60 bp, Artificial
  Synthetic oligonucleotide
gctctccaatggccgacggcagacaagttgccaggctccactatggtctgcttggccaag

SEQ ID NO: 415687 - DNA, 56 bp, Artificial
  Synthetic oligonucleotide
gctctccagtgtaggcgagtcacctgcccgctcctaccccccccggaccattggtc

SEQ ID NO: 415688 - DNA, 55 bp, Artificial
  Synthetic oligonucleotide
gctctcccacaaccaatcattcttgaaatgcgtttcattgaggtacgagccattg

SEQ ID NO: 415689 - DNA, 60 bp, Artificial
  Synthetic oligonucleotide
gctctcccctgtgcgtgaatccatggttggcgcagtcgatgtgttggtagagtgagcagc

SEQ ID NO: 415690 - DNA, 55 bp, Artificial
  Synthetic oligonucleotide
gctctccgaagaaagctgtcatagcgagagatttcatccgtttatccatttccat

SEQ ID NO: 415691 - DNA, 53 bp, Artificial
  Synthetic oligonucleotide
gctctccgatgggccctatgactcttggtcccagtgcgagatctgccccggtc

SEQ ID NO: 415692 - DNA, 60 bp, Artificial
  Synthetic oligonucleotide
gctctccgcatgttgtggtttgctctgacctgaatgtgaaacaccctgctgtttgtgtac

SEQ ID NO: 415693 - DNA, 56 bp, Artificial
  Synthetic oligonucleotide
gctctccgcggcccaaactgctaagtttgcggccctagctcgtgtccgtggttctg

SEQ ID NO: 415694 - DNA, 60 bp, Artificial
  Synthetic oligonucleotide
gctctccgtttctaatggcgcgacacataggtataggcacgacttgaaacacgtcgtaca

SEQ ID NO: 415695 - DNA, 55 bp, Artificial
  Synthetic oligonucleotide
gctctcctagcaagaggagtaatcaggaaaagcaacagtccacatcggactaacg

SEQ ID NO: 415696 - DNA, 60 bp, Artificial
  Synthetic oligonucleotide
gctctcctcaacagcgtagctcacagccacgacttgctgtgccactgcgaccacccacta

SEQ ID NO: 415697 - DNA, 55 bp, Artificial
  Synthetic oligonucleotide
gctctcctcaggttgtggttgaaccgtatctgtacgctgtataccctgctgttgg

SEQ ID NO: 415698 - DNA, 55 bp, Artificial
  Synthetic oligonucleotide
gctctcctgaggttgtggttgaatctgatctggatgtggaatatcctcgttgttg

SEQ ID NO: 415699 - DNA, 60 bp, Artificial
  Synthetic oligonucleotide
gctctccttcattacaattgcctgcctgacaagcacaacatgtcatcttctgtcgcccct

SEQ ID NO: 415700 - DNA, 54 bp, Artificial
  Synthetic oligonucleotide
gctctccttttgggaggcaggtactactaaagccggctacccttataattataa

SEQ ID NO: 415701 - DNA, 60 bp, Artificial
  Synthetic oligonucleotide
gctctcgaatactgtcaagtaggtgactggtagatgaaagcaaaggttgagtacatcaaa

SEQ ID NO: 415702 - DNA, 57 bp, Artificial
  Synthetic oligonucleotide
gctctcgagtcagtcaacaccaacctagaggtgtataaaagtctaggtttcaaagtc

SEQ ID NO: 415703 - DNA, 55 bp, Artificial
  Synthetic oligonucleotide
gctctcgagtgtctttccaattgatgagtggggttatcactcctactcggcatgg

SEQ ID NO: 415704 - DNA, 58 bp, Artificial
  Synthetic oligonucleotide
gctctcgcaacgacgaaccactacctcgcgtgggctccgaacgcaccgcgatacggga

SEQ ID NO: 415705 - DNA, 55 bp, Artificial
  Synthetic oligonucleotide
gctctcgcagcaagtgcctggtgtacaaaagagtggcagctacaacacctcctcg

SEQ ID NO: 415706 - DNA, 60 bp, Artificial
  Synthetic oligonucleotide
gctctcggctggcttttgtggacgtactataatgggctcatgtgcgctagaggatgaaca

SEQ ID NO: 415707 - DNA, 56 bp, Artificial
  Synthetic oligonucleotide
gctctcggtgagaaatttgcgagtaaaggagtccagatcctatacgaagccgggaa

SEQ ID NO: 415708 - DNA, 54 bp, Artificial
  Synthetic oligonucleotide
gctctcgtcatcgactgtacctaaaatcgattcgtccgttggcccagccgcact

SEQ ID NO: 415709 - DNA, 54 bp, Artificial
  Synthetic oligonucleotide
gctctcgtcgtgcccctcaatcctcttcttccgggttttgatggagcccaatgg

SEQ ID NO: 415710 - DNA, 56 bp, Artificial
  Synthetic oligonucleotide
gctctcgtctagcgcttctagagagagaagcaatcggtgtctctctaaaagtccta

SEQ ID NO: 415711 - DNA, 52 bp, Artificial
  Synthetic oligonucleotide
gctctcgtctgtgtcgactgatctttgcatttagtctgttcaggaagtttgg

SEQ ID NO: 415712 - DNA, 55 bp, Artificial
  Synthetic oligonucleotide
gctctcgtggacgtacatcagtctcaggtagaatggtgcagtctgacccgcagac

SEQ ID NO: 415713 - DNA, 59 bp, Artificial
  Synthetic oligonucleotide
gctctcgttccggtcttaacggcgccatcaaccattgtaagtttgacgcagtaagcaca

SEQ ID NO: 415714 - DNA, 51 bp, Artificial
  Synthetic oligonucleotide
gctctctaaaatgtggcttgctgctactaagaaggcctcatagaccagtac

SEQ ID NO: 415715 - DNA, 59 bp, Artificial
  Synthetic oligonucleotide
gctctctatacgggtgcatctccgaatcccttgaaggcccacttgtacccacaggcttc

SEQ ID NO: 415716 - DNA, 56 bp, Artificial
  Synthetic oligonucleotide
gctctctattatgggaggcgcgttgacctttctatgtgccgcactttgggtatgta

SEQ ID NO: 415717 - DNA, 55 bp, Artificial
  Synthetic oligonucleotide
gctctctcaagatggaaggatccaggactagggttctttcttctagataacccat

SEQ ID NO: 415718 - DNA, 60 bp, Artificial
  Synthetic oligonucleotide
gctctctcggacatcgaacattacaaggtatacctcaagccaatcaacaaatggtgggat

SEQ ID NO: 415719 - DNA, 55 bp, Artificial
  Synthetic oligonucleotide
gctctctcgggagttaacaacaagctgtttgggcttggtggaaacatctcggcca

SEQ ID NO: 415720 - DNA, 55 bp, Artificial
  Synthetic oligonucleotide
gctctctgcatcgacagatctacactcataaaggaaggttcactgaccaaccgac

SEQ ID NO: 415721 - DNA, 60 bp, Artificial
  Synthetic oligonucleotide
gctctctgcgaacttttgaataaacgcatctagccaaaagcagtcacaaggtaagctgag

SEQ ID NO: 415722 - DNA, 60 bp, Artificial
  Synthetic oligonucleotide
gctctctgcgtattccgctacaactggttgaatagcgacaggaccaatgttgttgtgggt

SEQ ID NO: 415723 - DNA, 55 bp, Artificial
  Synthetic oligonucleotide
gctctctggaagcaacttgtctccgcagaacacagaaaattctgctcttgtggag

SEQ ID NO: 415724 - DNA, 55 bp, Artificial
  Synthetic oligonucleotide
gctctctgtgccatcggtagtgtgtgagtgaataagttgctctgtcatgctgcca

SEQ ID NO: 415725 - DNA, 55 bp, Artificial
  Synthetic oligonucleotide
gctctcttagcagttcaattataggtctaccaatatcgaaccacttgacgactgt

SEQ ID NO: 415726 - DNA, 58 bp, Artificial
  Synthetic oligonucleotide
gctctcttgagccccagaccaatatccactcttaaggggtcttctggcggtccgttgc

SEQ ID NO: 415727 - DNA, 60 bp, Artificial
  Synthetic oligonucleotide
gctctcttgcaaattggatactgttactggccaatactatcctgagtgggctccaattaa

SEQ ID NO: 415728 - DNA, 55 bp, Artificial
  Synthetic oligonucleotide
gctctcttgcagatcaaatagtggttgccgttggttcaggtgggcaaaccattgg

SEQ ID NO: 415729 - DNA, 54 bp, Artificial
  Synthetic oligonucleotide
gctctgaattaacccacactatatatcgtgcgcgtgttcctttatatcttagcg

SEQ ID NO: 415730 - DNA, 55 bp, Artificial
  Synthetic oligonucleotide
gctctgacccttcttggtctctaaacatgatcaaactgtttattaagggccaaac

SEQ ID NO: 415731 - DNA, 55 bp, Artificial
  Synthetic oligonucleotide
gctctgacttgtactctaaagcagtctcacgctatctaagaccgtttcttagtga

SEQ ID NO: 415732 - DNA, 55 bp, Artificial
  Synthetic oligonucleotide
gctctgagatgatgcttgacactttctcatttaggatcacatctacgttcaatgc

SEQ ID NO: 415733 - DNA, 55 bp, Artificial
  Synthetic oligonucleotide
gctctgagcggaagttcgagtgccacatcaggggattacgaaaacatcgtgtcat

SEQ ID NO: 415734 - DNA, 55 bp, Artificial
  Synthetic oligonucleotide
gctctgagctcacctacttggccaaggatgatgtctttggtccaggagtgggcgc

SEQ ID NO: 415735 - DNA, 60 bp, Artificial
  Synthetic oligonucleotide
gctctgagtgggtttgttccgctcagcaggttgcagtctccacctcggctaacccagccc

SEQ ID NO: 415736 - DNA, 54 bp, Artificial
  Synthetic oligonucleotide
gctctgatagtaccactttaatgccactaatagcattgctcattgaatatggac

SEQ ID NO: 415737 - DNA, 60 bp, Artificial
  Synthetic oligonucleotide
gctctgatgactctcgccgggatatcgcctcagcatgctggaaaatgattgatgcgtcct

SEQ ID NO: 415738 - DNA, 52 bp, Artificial
  Synthetic oligonucleotide
gctctgatgtccatcaagcttcagttctgggccccaatgaccagatctggag

SEQ ID NO: 415739 - DNA, 55 bp, Artificial
  Synthetic oligonucleotide
gctctgcacttctcacagtcaattcagctgcctccgttaatctattttgccatcc

SEQ ID NO: 415740 - DNA, 55 bp, Artificial
  Synthetic oligonucleotide
gctctgcagcctaaacgggatagctcccctacaactgggaaagtgcaatgtggcg

SEQ ID NO: 415741 - DNA, 55 bp, Artificial
  Synthetic oligonucleotide
gctctgcagttccatagaactttaatggcagaccttaccaaccctaaaattggac

SEQ ID NO: 415742 - DNA, 54 bp, Artificial
  Synthetic oligonucleotide
gctctgcatccaacatccttccctctgaattgccagtcataactgcaatgctca

SEQ ID NO: 415743 - DNA, 60 bp, Artificial
  Synthetic oligonucleotide
gctctgcatgcccatataatgggaggtcctccttttttcgaaatgtggtgtggcttatta

SEQ ID NO: 415744 - DNA, 55 bp, Artificial
  Synthetic oligonucleotide
gctctgcatgtgaccacatgggcgagccacacgctaggcgtaaatgttcctgcgc

SEQ ID NO: 415745 - DNA, 55 bp, Artificial
  Synthetic oligonucleotide
gctctgccggttcgtagtcaatccgatcctggtggggtgacatgacgacgctcag

SEQ ID NO: 415746 - DNA, 52 bp, Artificial
  Synthetic oligonucleotide
gctctgcgcctggactgtattatcttggagtctatgacgaaactagcggggc

SEQ ID NO: 415747 - DNA, 60 bp, Artificial
  Synthetic oligonucleotide
gctctgctctccggcaggacacaaagtcatgccgtggagaccgccggtccataacgtgcc

SEQ ID NO: 415748 - DNA, 55 bp, Artificial
  Synthetic oligonucleotide
gctctgctctgatgcccatataatggtcgctatcacaaggttcaacaaaggctac

SEQ ID NO: 415749 - DNA, 55 bp, Artificial
  Synthetic oligonucleotide
gctctgctctttatctctactcccgcatctgcattgtccctacccacatcgttcc

SEQ ID NO: 415750 - DNA, 60 bp, Artificial
  Synthetic oligonucleotide
gctctgctgaggatgtgcactatagcgaagcacctcgcagggggtaagtacgtccaaatg

SEQ ID NO: 415751 - DNA, 60 bp, Artificial
  Synthetic oligonucleotide
gctctgctgtcgaagatctctgaattgcaacgcctcaaccgggaattgtccctgaagtta

SEQ ID NO: 415752 - DNA, 55 bp, Artificial
  Synthetic oligonucleotide
gctctggaccctgagttacttggcgaggtggctaatgatgttctcgagctatggc

SEQ ID NO: 415753 - DNA, 55 bp, Artificial
  Synthetic oligonucleotide
gctctggatctggtattgtcatatcggatacaccagtccacgattgtaatacgac

SEQ ID NO: 415754 - DNA, 55 bp, Artificial
  Synthetic oligonucleotide
gctctggcacctcaattttcaactcaatgattaacaacctgatcattaggacgct

SEQ ID NO: 415755 - DNA, 60 bp, Artificial
  Synthetic oligonucleotide
gctctgggagtagaaaattctgatggcctcgaggctgcatatatattaacaagtatacca

SEQ ID NO: 415756 - DNA, 55 bp, Artificial
  Synthetic oligonucleotide
gctctggggattcacgatagagtttgtgtagtacctacccattcacaacccagtg

SEQ ID NO: 415757 - DNA, 55 bp, Artificial
  Synthetic oligonucleotide
gctctggtacgtcaggctgatgggtcattccagatgcaagtcctaccgtggacac

SEQ ID NO: 415758 - DNA, 50 bp, Artificial
  Synthetic oligonucleotide
gctctggtatccacggtaggaatagagatagctaaaaggtacattgcagg

SEQ ID NO: 415759 - DNA, 57 bp, Artificial
  Synthetic oligonucleotide
gctctggttctattcactttgactcggagtactttaccacaggtaggtgataacatt

SEQ ID NO: 415760 - DNA, 55 bp, Artificial
  Synthetic oligonucleotide
gctctgtaaagcccatggtttacaccttccagggcatggcgagtgatctctctag

SEQ ID NO: 415761 - DNA, 55 bp, Artificial
  Synthetic oligonucleotide
gctctgtaattgggaaagtgtctcctctttggttaaggagcactggggatatgtc

SEQ ID NO: 415762 - DNA, 55 bp, Artificial
  Synthetic oligonucleotide
gctctgtacaattcccggttgccacagagccagccacctcttcactaatacacgg

SEQ ID NO: 415763 - DNA, 60 bp, Artificial
  Synthetic oligonucleotide
gctctgtactcgatgacctttacgccaatacgcaggttgtttcaatcacctctgctgctc

SEQ ID NO: 415764 - DNA, 60 bp, Artificial
  Synthetic oligonucleotide
gctctgtatcgggaggccttagagtctccggaacattgttcaccgcaccatacagcactc

SEQ ID NO: 415765 - DNA, 55 bp, Artificial
  Synthetic oligonucleotide
gctctgtatgataaatttggtcctgtgccaattgtgaaatcgggcaagtactatc

SEQ ID NO: 415766 - DNA, 54 bp, Artificial
  Synthetic oligonucleotide
gctctgtccggaaagaaggtgtacaaggttcttggtaacctaggaaatgaactg

SEQ ID NO: 415767 - DNA, 58 bp, Artificial
  Synthetic oligonucleotide
gctctgtgacttgatacgtaacgaggaggtggagtggcggttcactacccggagtcgc

SEQ ID NO: 415768 - DNA, 55 bp, Artificial
  Synthetic oligonucleotide
gctctgtgagagattgatcaaagagagaaatctgatcatcactagaggtataagc

SEQ ID NO: 415769 - DNA, 55 bp, Artificial
  Synthetic oligonucleotide
gctctgtggtctatatggtgcagcttcctattttcggtgtgatagatacaccgtg

SEQ ID NO: 415770 - DNA, 60 bp, Artificial
  Synthetic oligonucleotide
gctctgttatcgtttaagagagcaagggtgtctgaagaaggatatttatcctgtagcaaa

SEQ ID NO: 415771 - DNA, 60 bp, Artificial
  Synthetic oligonucleotide
gctctgttctgttggtgttatgacacagaacaatttgatagaatgctgttctcgggtgat

SEQ ID NO: 415772 - DNA, 55 bp, Artificial
  Synthetic oligonucleotide
gctctgttgagtaatcacttacgcaaggttaccgtacagcttagacaacgacaag

SEQ ID NO: 415773 - DNA, 51 bp, Artificial
  Synthetic oligonucleotide
gctctgtttagacgtataaacagatggcttgtgtgggatgccacccagttc

SEQ ID NO: 415774 - DNA, 54 bp, Artificial
  Synthetic oligonucleotide
gctctgtttctgcgttcattacgcagtacggagagcactcagttcctgccctcg

SEQ ID NO: 415775 - DNA, 60 bp, Artificial
  Synthetic oligonucleotide
gctcttaacggatatctagacaaacataaggacgaagttgacaaatcaagtgctgacagc

SEQ ID NO: 415776 - DNA, 54 bp, Artificial
  Synthetic oligonucleotide
gctcttaactttaaacaaaggggtagaatagggagaatatccccatatgagtta

SEQ ID NO: 415777 - DNA, 54 bp, Artificial
  Synthetic oligonucleotide
gctcttaagagctgctgtcgagacggtcaccaactgccttgaacaggtgatgga

SEQ ID NO: 415778 - DNA, 55 bp, Artificial
  Synthetic oligonucleotide
gctcttaaggagcttgctaaagtggtccacgatgccaaacttgaaagtttgatgg

SEQ ID NO: 415779 - DNA, 54 bp, Artificial
  Synthetic oligonucleotide
gctcttaagtttacagagctagatagtgaaacaagtctgcaaggcacaggtttg

SEQ ID NO: 415780 - DNA, 55 bp, Artificial
  Synthetic oligonucleotide
gctcttaatcaaaatgcgtctgggcacgagtccgagattttaaaggaaagccctc

SEQ ID NO: 415781 - DNA, 55 bp, Artificial
  Synthetic oligonucleotide
gctcttaatgtgacgcgtttaaagactcgtaatgagtttttgccgaaccgtcgga

SEQ ID NO: 415782 - DNA, 50 bp, Artificial
  Synthetic oligonucleotide
gctcttaattcaccaaatatagaagcgtgtggttacagcgaccgtgtatt

SEQ ID NO: 415783 - DNA, 52 bp, Artificial
  Synthetic oligonucleotide
gctcttacaagcctcagtgttggtggtgagcttatcttcagccaagtaacga

SEQ ID NO: 415784 - DNA, 60 bp, Artificial
  Synthetic oligonucleotide
gctcttacatacacccctctctcgaaagcaatatatattccacataggctatgtggaact

SEQ ID NO: 415785 - DNA, 60 bp, Artificial
  Synthetic oligonucleotide
gctcttacggactgcaattggccaagtgtcgaggcccatgtttctgtatatgagaaccaa

SEQ ID NO: 415786 - DNA, 60 bp, Artificial
  Synthetic oligonucleotide
gctcttagctccctgtatgtttggatggaaatgtgctgacctacttggggagacgaggtc

SEQ ID NO: 415787 - DNA, 60 bp, Artificial
  Synthetic oligonucleotide
gctcttagggttgacatggagccacataacccgctacgtgttggccatcgcacgaacaac

SEQ ID NO: 415788 - DNA, 59 bp, Artificial
  Synthetic oligonucleotide
gctcttatattcatcctacacccttgtgataaaacatgaagtcatacccgttcaaagat

SEQ ID NO: 415789 - DNA, 60 bp, Artificial
  Synthetic oligonucleotide
gctcttatcatgggcccgagtactagcagggcctcagcttgggttaatcgcccaatgtac

SEQ ID NO: 415790 - DNA, 56 bp, Artificial
  Synthetic oligonucleotide
gctcttatgaacatgtttccgtacccgactcctagtttccaagcgatgtaccccgc

SEQ ID NO: 415791 - DNA, 58 bp, Artificial
  Synthetic oligonucleotide
gctcttatgccgacatatgcagtgcataaatcagatatgcagttgcctctatatgcca

SEQ ID NO: 415792 - DNA, 55 bp, Artificial
  Synthetic oligonucleotide
gctcttatgttgtatatggcatgcactcatgcctctaaccccgtgtatgctactc

SEQ ID NO: 415793 - DNA, 60 bp, Artificial
  Synthetic oligonucleotide
gctcttcaagaatgccaatgtaagtgggataacagcgcccccctctgatgcttgctcgca

SEQ ID NO: 415794 - DNA, 55 bp, Artificial
  Synthetic oligonucleotide
gctcttcagacaggaacagaggaacttaggtcattatacaacacactagcagtcc

SEQ ID NO: 415795 - DNA, 55 bp, Artificial
  Synthetic oligonucleotide
gctcttcagacgcgcgcctgtttgggccgagttcggctcgatttatccgataatc

SEQ ID NO: 415796 - DNA, 60 bp, Artificial
  Synthetic oligonucleotide
gctcttcgcctatccatacgccctgcatcgatagttcgtggtcgcagcagggtctcacgg

SEQ ID NO: 415797 - DNA, 55 bp, Artificial
  Synthetic oligonucleotide
gctcttcgtcaactgatccccgagaagcctcaccgtcacgacgagactcacttgg

SEQ ID NO: 415798 - DNA, 60 bp, Artificial
  Synthetic oligonucleotide
gctcttctaggagatgactctgtgactgctatgcacacattaaagcatctctgtgagaat

SEQ ID NO: 415799 - DNA, 55 bp, Artificial
  Synthetic oligonucleotide
gctcttctcggagcagggacgagcagaccaatggggatggaggccccaacacggt

SEQ ID NO: 415800 - DNA, 55 bp, Artificial
  Synthetic oligonucleotide
gctcttgaaaggcagtcctgtgctagggcttttgccctagaaacctcgctaggcc

SEQ ID NO: 415801 - DNA, 57 bp, Artificial
  Synthetic oligonucleotide
gctcttgaacagagtcgggattctttggtcgcatcggtcagcgacgcacagcttgca

SEQ ID NO: 415802 - DNA, 60 bp, Artificial
  Synthetic oligonucleotide
gctcttgaccttgtcaccacactataaagtgttcctcgccaggctcatatggtggttaca

SEQ ID NO: 415803 - DNA, 60 bp, Artificial
  Synthetic oligonucleotide
gctcttgacgaatgaccgtgagttaatgtaaatggcgtatgtcacaccgctcaaaagtac

SEQ ID NO: 415804 - DNA, 55 bp, Artificial
  Synthetic oligonucleotide
gctcttgatagtagagttacgatttgtgctaagttgcgacccgctttcatgaagg

SEQ ID NO: 415805 - DNA, 55 bp, Artificial
  Synthetic oligonucleotide
gctcttgatcacaatccctttgtgtttgtcacaaagatgttcaaacctcttccaa

SEQ ID NO: 415806 - DNA, 55 bp, Artificial
  Synthetic oligonucleotide
gctcttgcacaaacttgaccagtgggttggtcaatgactgatagcccagcctatc

SEQ ID NO: 415807 - DNA, 59 bp, Artificial
  Synthetic oligonucleotide
gctcttgcggcaaccgagcctattaacagtccatcacttggatttgttaacccagagga

SEQ ID NO: 415808 - DNA, 55 bp, Artificial
  Synthetic oligonucleotide
gctcttgctgctagtgaaatcactgctactggttctataacagtaggtgcagctg

SEQ ID NO: 415809 - DNA, 60 bp, Artificial
  Synthetic oligonucleotide
gctcttgctttactgttatgactgatggaccaagtaatgggcaggcttcatacaaaatct

SEQ ID NO: 415810 - DNA, 55 bp, Artificial
  Synthetic oligonucleotide
gctcttggatgagacccacagatgtaaaggagcgagttctgttagagtggaccct

SEQ ID NO: 415811 - DNA, 55 bp, Artificial
  Synthetic oligonucleotide
gctcttggtgataccgagcaagttcccttcatatctaggttgccggagtttcgcg

SEQ ID NO: 415812 - DNA, 55 bp, Artificial
  Synthetic oligonucleotide
gctcttggtgggcccctgggcgctgcaacgattagcgctccctatcaatacatgg

SEQ ID NO: 415813 - DNA, 60 bp, Artificial
  Synthetic oligonucleotide
gctcttgtacacactgaacaagcaatttaggtcaggaccctcactggaaaatatgagttc

SEQ ID NO: 415814 - DNA, 53 bp, Artificial
  Synthetic oligonucleotide
gctcttgtatttcggtacgtttgcacgccagtttgctaccccttcccttttac

SEQ ID NO: 415815 - DNA, 55 bp, Artificial
  Synthetic oligonucleotide
gctcttgtctgagaatcgaacacacttactacctagtgttttgcagagcccaatg

SEQ ID NO: 415816 - DNA, 51 bp, Artificial
  Synthetic oligonucleotide
gctcttgtgccctcgtggagacatcttcattatggacgattacacaaaatt

SEQ ID NO: 415817 - DNA, 55 bp, Artificial
  Synthetic oligonucleotide
gctcttgtgctaccgcgcctattttacgtaatctttcgcgagatcagtgcgattc

SEQ ID NO: 415818 - DNA, 60 bp, Artificial
  Synthetic oligonucleotide
gctcttgtggatattggcatggactctcctgtgggaaccaagctactctgtcagaaaatt

SEQ ID NO: 415819 - DNA, 55 bp, Artificial
  Synthetic oligonucleotide
gctctttacccgacctacgccctgaagttcgacacgatgtggcctcagaatcagg

SEQ ID NO: 415820 - DNA, 54 bp, Artificial
  Synthetic oligonucleotide
gctctttaggattctttagtacctggggagctgcttcgagagctgctctggaat

SEQ ID NO: 415821 - DNA, 55 bp, Artificial
  Synthetic oligonucleotide
gctctttcaatataaccacagaattaagagataagaggaggcaagtagatgcact

SEQ ID NO: 415822 - DNA, 55 bp, Artificial
  Synthetic oligonucleotide
gctctttcctcctggatacattgatttgattagtcttgggctaaagcagaatgtc

SEQ ID NO: 415823 - DNA, 54 bp, Artificial
  Synthetic oligonucleotide
gctctttcctgtgaactacctttactaatcgttctttacttttgtactggtctc

SEQ ID NO: 415824 - DNA, 53 bp, Artificial
  Synthetic oligonucleotide
gctctttgcgggctttcaaggtgcatacacaggaatgcccaaccagaagccta

SEQ ID NO: 415825 - DNA, 60 bp, Artificial
  Synthetic oligonucleotide
gctctttggcaaatgtacgcctgttctgacgcggtatagtacgcagtttattcaacgtga

SEQ ID NO: 415826 - DNA, 55 bp, Artificial
  Synthetic oligonucleotide
gctctttgtcaggcaccaacaactcatccgacatgttctccagggccatataccg

SEQ ID NO: 415827 - DNA, 57 bp, Artificial
  Synthetic oligonucleotide
gctctttgtctttggtctagattcatgccgagaaccatatgatttgcagctgattgg

SEQ ID NO: 415828 - DNA, 55 bp, Artificial
  Synthetic oligonucleotide
gctcttttactgtatatggcatgtactcatgcttctaatccagtgtacgctactc

SEQ ID NO: 415829 - DNA, 55 bp, Artificial
  Synthetic oligonucleotide
gctcttttctggcattcttgatacaggggccgatgccaccgttatatcttacact

SEQ ID NO: 415830 - DNA, 59 bp, Artificial
  Synthetic oligonucleotide
gctcttttgctgggtggatccttgggaacccaatgtgtgatgatttgattgggaaaaca

SEQ ID NO: 415831 - DNA, 60 bp, Artificial
  Synthetic oligonucleotide
gctgaaaaatttgactagcggaggctagaaggagagagatgggtgcgagagcgtcggtat

SEQ ID NO: 415832 - DNA, 55 bp, Artificial
  Synthetic oligonucleotide
gctgaaaacgttgtcgctacgcaagattcacccaaggtgcccgaaacgatctcgc

SEQ ID NO: 415833 - DNA, 60 bp, Artificial
  Synthetic oligonucleotide
gctgaaaagactggacttgtgcggtgtcagagctatcatgacaatgtaaagaaaagcacg

SEQ ID NO: 415834 - DNA, 55 bp, Artificial
  Synthetic oligonucleotide
gctgaaaatctccaattttacgaacacatggtgaagtctgacgtgaaaccttccg

SEQ ID NO: 415835 - DNA, 55 bp, Artificial
  Synthetic oligonucleotide
gctgaaaatgtgtttggacaattacggagccatcctttcctactagcccctacgt

SEQ ID NO: 415836 - DNA, 50 bp, Artificial
  Synthetic oligonucleotide
gctgaaactccgagagatgtacactcaactatgtgaccacaggctaatgt

SEQ ID NO: 415837 - DNA, 55 bp, Artificial
  Synthetic oligonucleotide
gctgaaagaagtgattgactatgtccaatacggtacttatccgggccagtaggtg

SEQ ID NO: 415838 - DNA, 57 bp, Artificial
  Synthetic oligonucleotide
gctgaaagacgttgaaggacgccgcaggtaagttgacggactccgccacgaaggcac

SEQ ID NO: 415839 - DNA, 57 bp, Artificial
  Synthetic oligonucleotide
gctgaaaggactgaagctgaatcaacaatggttaaagagtacaggcagaaaattgat

SEQ ID NO: 415840 - DNA, 60 bp, Artificial
  Synthetic oligonucleotide
gctgaaagtcccgaatgcggagacagacaatcagtccggtccagttgcacaccaggtgat

SEQ ID NO: 415841 - DNA, 60 bp, Artificial
  Synthetic oligonucleotide
gctgaaagtgaggaaatccactatcaacctttatgtaaactcaagtgggagagatgttca

SEQ ID NO: 415842 - DNA, 60 bp, Artificial
  Synthetic oligonucleotide
gctgaaatacgtaatacacaccacattaatgtgctggatatgagttatctgacacctaaa

SEQ ID NO: 415843 - DNA, 54 bp, Artificial
  Synthetic oligonucleotide
gctgaaattcaaacggttactggtctttcacctagtaccagttaccttctaaca

SEQ ID NO: 415844 - DNA, 55 bp, Artificial
  Synthetic oligonucleotide
gctgaaattcagtcctatccgacgtcgtatatgcaatattgttagttctggactc

SEQ ID NO: 415845 - DNA, 59 bp, Artificial
  Synthetic oligonucleotide
gctgaacaacaaacactcaaacggcacaatacatgatagaatcccacatcgaacccttt

SEQ ID NO: 415846 - DNA, 60 bp, Artificial
  Synthetic oligonucleotide
gctgaacaagaggagctacttaataagagcactgacattgaacacaatgacaaaggatgc

SEQ ID NO: 415847 - DNA, 55 bp, Artificial
  Synthetic oligonucleotide
gctgaacaattagcaatcggtgcctgcttagccacacatatgaagcttcgagctc

SEQ ID NO: 415848 - DNA, 50 bp, Artificial
  Synthetic oligonucleotide
gctgaacagaacagtggtaattatgacaggaagagaagctagtttcctgc

SEQ ID NO: 415849 - DNA, 60 bp, Artificial
  Synthetic oligonucleotide
gctgaacatgaccaccattggactggacttgccaaacgagtaggacccatcgacgggaga

SEQ ID NO: 415850 - DNA, 55 bp, Artificial
  Synthetic oligonucleotide
gctgaaccaacgtcaggctaagtcgctacgtatcactccttcccttctatccgcc

SEQ ID NO: 415851 - DNA, 54 bp, Artificial
  Synthetic oligonucleotide
gctgaaccctttaagtcctatttcgctaaaggcttcctttcaatagattcaggt

SEQ ID NO: 415852 - DNA, 55 bp, Artificial
  Synthetic oligonucleotide
gctgaacgaccaatacgttgacggctaacagggcgggcaaacaacctagtgtcat

SEQ ID NO: 415853 - DNA, 55 bp, Artificial
  Synthetic oligonucleotide
gctgaacgagctcgccagcttgcacaacacttatatggtggtggatcattaactg

SEQ ID NO: 415854 - DNA, 55 bp, Artificial
  Synthetic oligonucleotide
gctgaacgggttaggcatgatggtgtcctgtccttgtgtgatggatgtagtggtt

SEQ ID NO: 415855 - DNA, 60 bp, Artificial
  Synthetic oligonucleotide
gctgaacgtgactatgccaaacaatgacaattttgacaagctatacatttggggggtcca

SEQ ID NO: 415856 - DNA, 54 bp, Artificial
  Synthetic oligonucleotide
gctgaacgttgacgtggcaacgttgcgccgcccaatgcgagaggcaaccggcga

SEQ ID NO: 415857 - DNA, 55 bp, Artificial
  Synthetic oligonucleotide
gctgaactatctgattgtgaagagtaattcgcctattgcgaattggagttcttcg

SEQ ID NO: 415858 - DNA, 55 bp, Artificial
  Synthetic oligonucleotide
gctgaactcgcttgcctcctcggcgtctattccgaacgccaaggcaaactcactg

SEQ ID NO: 415859 - DNA, 55 bp, Artificial
  Synthetic oligonucleotide
gctgaactgactagactctctcgtcttacggatcagccgcacaacaatcgcgatg

SEQ ID NO: 415860 - DNA, 57 bp, Artificial
  Synthetic oligonucleotide
gctgaactgaggtggcaatataatagatttgctataataacacatggtaaaggtcac

SEQ ID NO: 415861 - DNA, 50 bp, Artificial
  Synthetic oligonucleotide
gctgaactgcgtccagttgagaaagtgagggaaatgaaaacacgagtttt

SEQ ID NO: 415862 - DNA, 55 bp, Artificial
  Synthetic oligonucleotide
gctgaacttccacgcattttagttgatcacgcatgccaaactatgcacgttatag

SEQ ID NO: 415863 - DNA, 55 bp, Artificial
  Synthetic oligonucleotide
gctgaacttggaccacttgttagtttatgttccaaaccaagatgacatctctaac

SEQ ID NO: 415864 - DNA, 59 bp, Artificial
  Synthetic oligonucleotide
gctgaagaaatcacgccagggcggtttaggacaattgcttgtggccttttcccagcaca

SEQ ID NO: 415865 - DNA, 55 bp, Artificial
  Synthetic oligonucleotide
gctgaagaacagggcataactgactatattcatatgttaggtgaagcatttggga

SEQ ID NO: 415866 - DNA, 55 bp, Artificial
  Synthetic oligonucleotide
gctgaagagatcagatatgtacaacagctcttcggaagggtcccaacaggtgaat

SEQ ID NO: 415867 - DNA, 56 bp, Artificial
  Synthetic oligonucleotide
gctgaagagttaacaccaggccggtttcgaacaatagtatgtggtctatttcctac

SEQ ID NO: 415868 - DNA, 56 bp, Artificial
  Synthetic oligonucleotide
gctgaagatctaaagagttgcagcaagtgtatggtggtatttcgggctggtgccaa

SEQ ID NO: 415869 - DNA, 60 bp, Artificial
  Synthetic oligonucleotide
gctgaagcaataatcgtggccatggtattttcacaagaggattgcatgattaaggcagtc

SEQ ID NO: 415870 - DNA, 60 bp, Artificial
  Synthetic oligonucleotide
gctgaagcaatgagccacgcacaacatgcaactataatgatgcagagaggcaatttcaag

SEQ ID NO: 415871 - DNA, 55 bp, Artificial
  Synthetic oligonucleotide
gctgaagcagagctccatgggaaattcagctctcgtgaagaaatacctatgatgc

SEQ ID NO: 415872 - DNA, 57 bp, Artificial
  Synthetic oligonucleotide
gctgaagcagggtggaaggaagcaaagagtgtggtcctgaatttgcacatcaggtcc

SEQ ID NO: 415873 - DNA, 55 bp, Artificial
  Synthetic oligonucleotide
gctgaagccattcgatttataggaagagcaatggcagacagagggctattgagag

SEQ ID NO: 415874 - DNA, 55 bp, Artificial
  Synthetic oligonucleotide
gctgaagcggttccctgtgctgctgggcggaaatacagtgtgctaaattcaaaat

SEQ ID NO: 415875 - DNA, 55 bp, Artificial
  Synthetic oligonucleotide
gctgaagctagtaccatatggaatccagcgtgtcaacaacaagcgcgtttagaga

SEQ ID NO: 415876 - DNA, 60 bp, Artificial
  Synthetic oligonucleotide
gctgaaggctcacaagattgtagtgccttacggattaatgtacgcgaatcataatagatc

SEQ ID NO: 415877 - DNA, 60 bp, Artificial
  Synthetic oligonucleotide
gctgaagggaatgataaagctctgagattttcaaaaaacgctgaggagtgctccttggca

SEQ ID NO: 415878 - DNA, 53 bp, Artificial
  Synthetic oligonucleotide
gctgaaggggaacgcgcccgttatccggctaactacttcgagaaacctagtac

SEQ ID NO: 415879 - DNA, 55 bp, Artificial
  Synthetic oligonucleotide
gctgaaggggagagcatacgtgcactcctgcaatccgtgcctggacctgaaggac

SEQ ID NO: 415880 - DNA, 55 bp, Artificial
  Synthetic oligonucleotide
gctgaagggttcaaaattgcgggtggcatgaacatcgacaatttaccaaaatacg

SEQ ID NO: 415881 - DNA, 60 bp, Artificial
  Synthetic oligonucleotide
gctgaagtcaggatacaaagattggatcctatggatttcctttgccatatcatgcttttt

SEQ ID NO: 415882 - DNA, 60 bp, Artificial
  Synthetic oligonucleotide
gctgaagtgcacacggcaagaggcgagagcggcgactggtgagtacgccaaaatttgact

SEQ ID NO: 415883 - DNA, 60 bp, Artificial
  Synthetic oligonucleotide
gctgaagttcaagacagttcgcccggtagtcctgccacgcgcgctggcgccaccccgcaa

SEQ ID NO: 415884 - DNA, 60 bp, Artificial
  Synthetic oligonucleotide
gctgaagttctgtctcatggcaaccttaagctaagtgacgcgacaaagctaggtcggctg

SEQ ID NO: 415885 - DNA, 56 bp, Artificial
  Synthetic oligonucleotide
gctgaagtttaagacagttcgcccggttgcgctgccacgcgcgttagcgccacccc

SEQ ID NO: 415886 - DNA, 57 bp, Artificial
  Synthetic oligonucleotide
gctgaatagtacttcagaggtggttttaccggattattatggtaagtggatagttgc

SEQ ID NO: 415887 - DNA, 55 bp, Artificial
  Synthetic oligonucleotide
gctgaatatacccgtgggcaccagccttcttgcatttgcatatagtatctagtca

SEQ ID NO: 415888 - DNA, 60 bp, Artificial
  Synthetic oligonucleotide
gctgaatatatacgggatctaatagtgttctacggtgtaagagattatgtcgaagcgacc

SEQ ID NO: 415889 - DNA, 51 bp, Artificial
  Synthetic oligonucleotide
gctgaatatcccccaacaacatgtattttgcaattgcttccaaattatgac

SEQ ID NO: 415890 - DNA, 55 bp, Artificial
  Synthetic oligonucleotide
gctgaatcaacctgtaacgcatttaccagatgaggacgtaggattgaatcggcga

SEQ ID NO: 415891 - DNA, 57 bp, Artificial
  Synthetic oligonucleotide
gctgaatcaatgagaaagttcgttttggttaacaagctccaccccgaaccagatcta

SEQ ID NO: 415892 - DNA, 58 bp, Artificial
  Synthetic oligonucleotide
gctgaatcatcgacaggacctaagctactctcccggttggtcgagggaaccaagagcc

SEQ ID NO: 415893 - DNA, 55 bp, Artificial
  Synthetic oligonucleotide
gctgaatcctatacggcctccaactacaagcattataataggcattgtgagatat

SEQ ID NO: 415894 - DNA, 55 bp, Artificial
  Synthetic oligonucleotide
gctgaatctcaagctcgacagattaaggctccattggagaagtttgtgttggcac

SEQ ID NO: 415895 - DNA, 55 bp, Artificial
  Synthetic oligonucleotide
gctgaatgaactatcagacagagagatctcatctttgatctttactggacaaaac

SEQ ID NO: 415896 - DNA, 55 bp, Artificial
  Synthetic oligonucleotide
gctgaatgccgcatgcaactggacgcggggcgagcgttgcgatttggaagacagg

SEQ ID NO: 415897 - DNA, 60 bp, Artificial
  Synthetic oligonucleotide
gctgaatggacagatagagttatagaagggttgcaaagagctggtagagctattctcaac

SEQ ID NO: 415898 - DNA, 60 bp, Artificial
  Synthetic oligonucleotide
gctgaatgggaaatcagctctaaagttaccgaactgctgggtgaacatgctgccgatttc

SEQ ID NO: 415899 - DNA, 60 bp, Artificial
  Synthetic oligonucleotide
gctgaatgggactcacactactcatggaaacaaaactgtgatcaggcctctgggtctgtt

SEQ ID NO: 415900 - DNA, 55 bp, Artificial
  Synthetic oligonucleotide
gctgaatggttcctcgatgacaagatgaacaggaggtcttgctcagtaactgctg

SEQ ID NO: 415901 - DNA, 55 bp, Artificial
  Synthetic oligonucleotide
gctgaatgtagtgcttctgagacagaaattgattcacctgttcagtattattcca

SEQ ID NO: 415902 - DNA, 55 bp, Artificial
  Synthetic oligonucleotide
gctgaatgtgagtcccgtttgagaggacacgcccgcaccatgctcggacggtctc

SEQ ID NO: 415903 - DNA, 55 bp, Artificial
  Synthetic oligonucleotide
gctgaattattggtggcattagaaaatcaacatactatagatgtgacagactccg

SEQ ID NO: 415904 - DNA, 55 bp, Artificial
  Synthetic oligonucleotide
gctgaattcaaacagtcaggcgcggtatttgaaagagtgtgcattaatgacccgc

SEQ ID NO: 415905 - DNA, 55 bp, Artificial
  Synthetic oligonucleotide
gctgaattgcttgttctgttggaaaatcagaagacattagatgagcatgacgcta

SEQ ID NO: 415906 - DNA, 55 bp, Artificial
  Synthetic oligonucleotide
gctgacaaacttagtagtgtttgtgaggattaataacaattaacacagtgcgagc

SEQ ID NO: 415907 - DNA, 55 bp, Artificial
  Synthetic oligonucleotide
gctgacaacaagagggagacagacaaccaaggataacaaggggacaagaatccgg

SEQ ID NO: 415908 - DNA, 55 bp, Artificial
  Synthetic oligonucleotide
gctgacaacaaggaggacgagaatgatgtattacaaaacgggtgacgtatgtcaa

SEQ ID NO: 415909 - DNA, 58 bp, Artificial
  Synthetic oligonucleotide
gctgacaacgtacgagatgagccagcagattacaggtaggcagaattcatcggttagt

SEQ ID NO: 415910 - DNA, 59 bp, Artificial
  Synthetic oligonucleotide
gctgacaagaggataacagaaatggttccggagagaaatgagcaaggacaaaccctatg

SEQ ID NO: 415911 - DNA, 56 bp, Artificial
  Synthetic oligonucleotide
gctgacaagcactgagcccgcgaaacctagcaccgacgaggcatgacgttggggat

SEQ ID NO: 415912 - DNA, 55 bp, Artificial
  Synthetic oligonucleotide
gctgacaaggacttctacagactgctgacggggacttttcgccagggactttccg

SEQ ID NO: 415913 - DNA, 50 bp, Artificial
  Synthetic oligonucleotide
gctgacaagtcaccttgctttaatgaggttacctgggaaaatgccacgtt

SEQ ID NO: 415914 - DNA, 60 bp, Artificial
  Synthetic oligonucleotide
gctgacaatagcaacgaaaggacaactctaatcattaagatggtcacaaaaactgttgat

SEQ ID NO: 415915 - DNA, 55 bp, Artificial
  Synthetic oligonucleotide
gctgacaatcaagtagagactaaatcgtgtagtaacacacaggacagagtatgtg

SEQ ID NO: 415916 - DNA, 57 bp, Artificial
  Synthetic oligonucleotide
gctgacacaaaattgaatgtacaataaaatgtatgcaggtgacctatttgtatggcc

SEQ ID NO: 415917 - DNA, 55 bp, Artificial
  Synthetic oligonucleotide
gctgacacacggttcgtttacatgaaggagtttcaagctcgacgtgtggacactg

SEQ ID NO: 415918 - DNA, 56 bp, Artificial
  Synthetic oligonucleotide
gctgacacaggaaaaaccagtcaggtcagccaaaattaccccatagtacggaatct

SEQ ID NO: 415919 - DNA, 51 bp, Artificial
  Synthetic oligonucleotide
gctgacaccgagtttctacaagggactttccgctgggggaaccttttccaa

SEQ ID NO: 415920 - DNA, 55 bp, Artificial
  Synthetic oligonucleotide
gctgacacggagggtatcgtgtgctgctcaatgtcttattcctggacgggcgcgc

SEQ ID NO: 415921 - DNA, 55 bp, Artificial
  Synthetic oligonucleotide
gctgacactgttacaattgacaacacagtgtaccaattgagcaaagttgaaggag

SEQ ID NO: 415922 - DNA, 55 bp, Artificial
  Synthetic oligonucleotide
gctgacagacccgtggacaacaagcgacgacgattttcagagtgaccctgacccc

SEQ ID NO: 415923 - DNA, 54 bp, Artificial
  Synthetic oligonucleotide
gctgacagcatgaaaagctgctgacactgcagggactttccgtggaggaaagtc

SEQ ID NO: 415924 - DNA, 55 bp, Artificial
  Synthetic oligonucleotide
gctgacatgatccaacatgggaacaatctgcttgtatacgtagctagctacaatg

SEQ ID NO: 415925 - DNA, 55 bp, Artificial
  Synthetic oligonucleotide
gctgacatgttagcgttcggattaagtattgcgaaccagtcaggtgtaagtttaa

SEQ ID NO: 415926 - DNA, 55 bp, Artificial
  Synthetic oligonucleotide
gctgacattatgctcggctagtccagtgtttcagcggtgtttccaagatggggct

SEQ ID NO: 415927 - DNA, 55 bp, Artificial
  Synthetic oligonucleotide
gctgacattgtgcgggaaacctggaattaggctgttcgacggaacttgggtctct

SEQ ID NO: 415928 - DNA, 55 bp, Artificial
  Synthetic oligonucleotide
gctgaccagagcagctcccagtttcccttccttgatgttcccttcgaactgtcgt

SEQ ID NO: 415929 - DNA, 55 bp, Artificial
  Synthetic oligonucleotide
gctgaccataaacacagtgagttttctcaaagacgacttgaactcgactatccaa

SEQ ID NO: 415930 - DNA, 55 bp, Artificial
  Synthetic oligonucleotide
gctgacccaatctttgccagaattggcaatgcgttcgaagaacatcagaacactc

SEQ ID NO: 415931 - DNA, 52 bp, Artificial
  Synthetic oligonucleotide
gctgacccagtgtacgggaaagtgttcaatcctccccggacaaacctccccg

SEQ ID NO: 415932 - DNA, 59 bp, Artificial
  Synthetic oligonucleotide
gctgaccccttactggggaagcgtaaaggaagatgccatctcttatggtggaccatgga

SEQ ID NO: 415933 - DNA, 53 bp, Artificial
  Synthetic oligonucleotide
gctgacccgttatcagttgagcttgaccttatcgcgtgatgttcgcctgtgac

SEQ ID NO: 415934 - DNA, 52 bp, Artificial
  Synthetic oligonucleotide
gctgaccctatcgtggttgacgcggttaagtgcgactcaagtactggaggct

SEQ ID NO: 415935 - DNA, 57 bp, Artificial
  Synthetic oligonucleotide
gctgaccctgaaacctgccccgcgcaaccgacaacggataaggtaataatcaggaca

SEQ ID NO: 415936 - DNA, 59 bp, Artificial
  Synthetic oligonucleotide
gctgacctcgcggtcaccccttatgattacggcgctaaaattatcctgtctagcgcgta

SEQ ID NO: 415937 - DNA, 57 bp, Artificial
  Synthetic oligonucleotide
gctgaccttaaggcaaacgtatttggtggcgacaacaccaagtatgacgtgggattc

SEQ ID NO: 415938 - DNA, 55 bp, Artificial
  Synthetic oligonucleotide
gctgaccttactgatcgtctcgcagatttgcgtctcggtaatgccgagtatccgg

SEQ ID NO: 415939 - DNA, 55 bp, Artificial
  Synthetic oligonucleotide
gctgacctttctaaaatgcatgacttgaccgcttcagcactatatggaaattatg

SEQ ID NO: 415940 - DNA, 60 bp, Artificial
  Synthetic oligonucleotide
gctgacgaagctgctcaatgtttaacctcagtgacatggggttcacgaactaatcaactt

SEQ ID NO: 415941 - DNA, 55 bp, Artificial
  Synthetic oligonucleotide
gctgacgacaacctagattacgcggtacaacgaaatttgttatacgagttagtgc

SEQ ID NO: 415942 - DNA, 55 bp, Artificial
  Synthetic oligonucleotide
gctgacgacaacttggagtctgagataaagcactatagagttggtggaattgtag

SEQ ID NO: 415943 - DNA, 57 bp, Artificial
  Synthetic oligonucleotide
gctgacgagctttccctggcaaccatcgccaggtacgtggaaaatctaggggagaaa

SEQ ID NO: 415944 - DNA, 59 bp, Artificial
  Synthetic oligonucleotide
gctgacgatatcagtgtgtatctcgaacacctcttctatgatccacgtgtcgagtcccc

SEQ ID NO: 415945 - DNA, 55 bp, Artificial
  Synthetic oligonucleotide
gctgacgcaccggatgacttcaccataaatgattcgtcaccgcttacgccatcag

SEQ ID NO: 415946 - DNA, 58 bp, Artificial
  Synthetic oligonucleotide
gctgacgccacgcgcttggttctgggggcatcccccacgaccctggttgactggaatg

SEQ ID NO: 415947 - DNA, 55 bp, Artificial
  Synthetic oligonucleotide
gctgacgccattagtttcggtaaccccatgtggctcgctctcaggtttataacgt

SEQ ID NO: 415948 - DNA, 60 bp, Artificial
  Synthetic oligonucleotide
gctgacgccgcatcttgcaagtactccaaccgcggaacaggtgtgatgtggctggtgtac

SEQ ID NO: 415949 - DNA, 55 bp, Artificial
  Synthetic oligonucleotide
gctgacgcctacacccgtgggaataatttcaaagcagagtccgcacctgttggtc

SEQ ID NO: 415950 - DNA, 60 bp, Artificial
  Synthetic oligonucleotide
gctgacggctcaatatccggcgcgggaactgttaggcatggatggcgtggacatggagca

SEQ ID NO: 415951 - DNA, 55 bp, Artificial
  Synthetic oligonucleotide
gctgacggcttgtcaaggagtaggggggccgggacagaaggctagattaatggca

SEQ ID NO: 415952 - DNA, 60 bp, Artificial
  Synthetic oligonucleotide
gctgacgttccagagctaggtgattccgttaatctgtccaggttgagtaagcctgtggct

SEQ ID NO: 415953 - DNA, 60 bp, Artificial
  Synthetic oligonucleotide
gctgactacatgaacgtacctacagaggctagtccgttcctggaacaggagtggctagac

SEQ ID NO: 415954 - DNA, 55 bp, Artificial
  Synthetic oligonucleotide
gctgactacccgctggtgtccccgaaggagccgaacgacgtgcgtcagagtcata

SEQ ID NO: 415955 - DNA, 55 bp, Artificial
  Synthetic oligonucleotide
gctgactacttcgtctaataaagttgaacaaacatagcccattgtcatgtcatcc

SEQ ID NO: 415956 - DNA, 60 bp, Artificial
  Synthetic oligonucleotide
gctgactatgcaattgcggaatttagtgcaagcatggcagtacgtcccgaactacgtgaa

SEQ ID NO: 415957 - DNA, 55 bp, Artificial
  Synthetic oligonucleotide
gctgactcaagccaaagtacaggatcaagttataaattatctcataatctccctg

SEQ ID NO: 415958 - DNA, 60 bp, Artificial
  Synthetic oligonucleotide
gctgactcacaggtagacagcgatgctgggcatgatctagaggattttgtcgataatgca

SEQ ID NO: 415959 - DNA, 52 bp, Artificial
  Synthetic oligonucleotide
gctgactccgtctactcgtgccgaagtggaggaggccatgcacgagttggat

SEQ ID NO: 415960 - DNA, 60 bp, Artificial
  Synthetic oligonucleotide
gctgactctccagggtctaatgtgcaggaccccagtctgtttagatgtctgtatgggtgt

SEQ ID NO: 415961 - DNA, 60 bp, Artificial
  Synthetic oligonucleotide
gctgactgaacggaatatgaaacatatctcttcttgatgtaagtggcgtatcagattttc

SEQ ID NO: 415962 - DNA, 58 bp, Artificial
  Synthetic oligonucleotide
gctgacttaggcgacaaggaactatctcccatagataagcaatgtgtcacattacata

SEQ ID NO: 415963 - DNA, 55 bp, Artificial
  Synthetic oligonucleotide
gctgacttcctgaacgttggctgcttcctgaacgtacaacatcctttcggctttc

SEQ ID NO: 415964 - DNA, 55 bp, Artificial
  Synthetic oligonucleotide
gctgacttggccaacaaaactgacagcttcatctttgacaatttaccggatatac

SEQ ID NO: 415965 - DNA, 55 bp, Artificial
  Synthetic oligonucleotide
gctgagaaatacaactacgtcacacaagttcctatataagcggcgacagcgatcg

SEQ ID NO: 415966 - DNA, 59 bp, Artificial
  Synthetic oligonucleotide
gctgagaagcgggccagtagagtcatgaaaagtaagagagtcgtagggttacctgctgt

SEQ ID NO: 415967 - DNA, 55 bp, Artificial
  Synthetic oligonucleotide
gctgagaagtacgtcgaccccactcactctgatgcattatccgctttctgcgggc

SEQ ID NO: 415968 - DNA, 60 bp, Artificial
  Synthetic oligonucleotide
gctgagaatattactgaagggaataatatcacactcccatgcagaataagacaaattgta

SEQ ID NO: 415969 - DNA, 55 bp, Artificial
  Synthetic oligonucleotide
gctgagaatgcagggagagcaacagagccacctagtggaagcaggttatacccag

SEQ ID NO: 415970 - DNA, 56 bp, Artificial
  Synthetic oligonucleotide
gctgagacaaaaacagactcgggggaaaatctcccgagtaatcaataccgatggat

SEQ ID NO: 415971 - DNA, 55 bp, Artificial
  Synthetic oligonucleotide
gctgagacagatccgagttctagaatcactgagaggcaagaaatagttgacaaca

SEQ ID NO: 415972 - DNA, 53 bp, Artificial
  Synthetic oligonucleotide
gctgagaccacaacaaggctgagagcctacttcaacacaccaggccttcctgt

SEQ ID NO: 415973 - DNA, 55 bp, Artificial
  Synthetic oligonucleotide
gctgagaccacggttcgactgcgcgcttacctcaacaccccaggacttcccgtct

SEQ ID NO: 415974 - DNA, 56 bp, Artificial
  Synthetic oligonucleotide
gctgagactacggtgagactccgggcatatttcaacacgcccggtttacccgtgtg

SEQ ID NO: 415975 - DNA, 60 bp, Artificial
  Synthetic oligonucleotide
gctgagactctctgtgtggggcataagacagctccgagctcgcctgcttgccattgaaac

SEQ ID NO: 415976 - DNA, 60 bp, Artificial
  Synthetic oligonucleotide
gctgagagagcgaaggttgtgaccttcaacgtgccggaatgtgatgaaggtgcggttatg

SEQ ID NO: 415977 - DNA, 54 bp, Artificial
  Synthetic oligonucleotide
gctgagaggaagcagaggtttggaagggttggtaggatgaagaaaggaacaatt

SEQ ID NO: 415978 - DNA, 55 bp, Artificial
  Synthetic oligonucleotide
gctgagagtgagatcggttcggccgcgattgatgggctggttcaaggaagcgttc

SEQ ID NO: 415979 - DNA, 57 bp, Artificial
  Synthetic oligonucleotide
gctgagagttatttttcgacttaagagatgcgtctgacttatcccttttaaatggcc

SEQ ID NO: 415980 - DNA, 58 bp, Artificial
  Synthetic oligonucleotide
gctgagatagttgtgacggcccaatgatctagcccaagccgtttttcctgtacgggaa

SEQ ID NO: 415981 - DNA, 60 bp, Artificial
  Synthetic oligonucleotide
gctgagatatcaggaagcagtccaatcctatcagtcactatatcagaggatggtagcatg

SEQ ID NO: 415982 - DNA, 60 bp, Artificial
  Synthetic oligonucleotide
gctgagatcaaaataagagttgcaccttcatcttaccgttcgattattctatatcgtccg

SEQ ID NO: 415983 - DNA, 55 bp, Artificial
  Synthetic oligonucleotide
gctgagatcaccggacatgtcaaaaacgggacgatgaggatcgttggtcctaaga

SEQ ID NO: 415984 - DNA, 55 bp, Artificial
  Synthetic oligonucleotide
gctgagcaaacggaaagattaagagacctgcggcgaaaagagaagagtgagacgc

SEQ ID NO: 415985 - DNA, 55 bp, Artificial
  Synthetic oligonucleotide
gctgagcaagctacacaggaagtaaaaggttggatgacagatacattactggtcc

SEQ ID NO: 415986 - DNA, 55 bp, Artificial
  Synthetic oligonucleotide
gctgagcaaggcatttccagggttgacagcaattttactaaatcagattgtaagc

SEQ ID NO: 415987 - DNA, 60 bp, Artificial
  Synthetic oligonucleotide
gctgagcactagttcgagtgccgacgctagggacaatgaggagatcacttcgctgtacca

SEQ ID NO: 415988 - DNA, 60 bp, Artificial
  Synthetic oligonucleotide
gctgagcagcccttgtcatatcctattgaggctaggcatcttacagatctaaatctgatg

SEQ ID NO: 415989 - DNA, 55 bp, Artificial
  Synthetic oligonucleotide
gctgagcaggctacacaggagttaaagaattggatgacagacaccttgttggtcc

SEQ ID NO: 415990 - DNA, 55 bp, Artificial
  Synthetic oligonucleotide
gctgagcatcatgaacttaatcaattgcaagcgttcacagccgttcagtttgatg

SEQ ID NO: 415991 - DNA, 60 bp, Artificial
  Synthetic oligonucleotide
gctgagcatgactcatagttaaagcgctagcagctgcttaaccgcaaaaccacatcctat

SEQ ID NO: 415992 - DNA, 55 bp, Artificial
  Synthetic oligonucleotide
gctgagccaagacaagctgagccagcagcagagggagtaggagcagcgtctcagg

SEQ ID NO: 415993 - DNA, 55 bp, Artificial
  Synthetic oligonucleotide
gctgagccaagttcgcaaatgtcagccgctgctgatatggccactggcaaaagcg

SEQ ID NO: 415994 - DNA, 55 bp, Artificial
  Synthetic oligonucleotide
gctgagccacgaggacgtatgccagaaccaggtctcttggaggccgcagttgaga

SEQ ID NO: 415995 - DNA, 60 bp, Artificial
  Synthetic oligonucleotide
gctgagccagatgtacgctggttgggctggtggcatgcagtttcgcttcatagttgccgg

SEQ ID NO: 415996 - DNA, 55 bp, Artificial
  Synthetic oligonucleotide
gctgagccgatgtgttatgacgctcgcatatgctgagagagcgaaggttgtgacc

SEQ ID NO: 415997 - DNA, 55 bp, Artificial
  Synthetic oligonucleotide
gctgagccgtccgggagggaaattgatttcgtggagtgcttcgcgcggctggtga

SEQ ID NO: 415998 - DNA, 55 bp, Artificial
  Synthetic oligonucleotide
gctgagcctagcgacacctactggaagcctagtagaaataaatggtgggatggat

SEQ ID NO: 415999 - DNA, 55 bp, Artificial
  Synthetic oligonucleotide
gctgagcctgtgagaattaattgtaccagacctaacaacaatacaagaacaagta

SEQ ID NO: 416000 - DNA, 55 bp, Artificial
  Synthetic oligonucleotide
gctgagcgagctactgctatgttagagtacgccgcttatgagaaacagctgcacg

SEQ ID NO: 416001 - DNA, 55 bp, Artificial
  Synthetic oligonucleotide
gctgagcgtgtatacgcagttgcactccacagtatatacgatattcctgtcgatg

SEQ ID NO: 416002 - DNA, 55 bp, Artificial
  Synthetic oligonucleotide
gctgagctcgagaagcatcttgaaccatacttgcagaagaggatggatgcgacaa

SEQ ID NO: 416003 - DNA, 60 bp, Artificial
  Synthetic oligonucleotide
gctgagctgttaggttgcccatatagactccagcagcaagaggcctctcacctctgatga

SEQ ID NO: 416004 - DNA, 55 bp, Artificial
  Synthetic oligonucleotide
gctgagcttgtaagagctgtaagcaacatgcccacgtcttcaggacagatcaatc

SEQ ID NO: 416005 - DNA, 55 bp, Artificial
  Synthetic oligonucleotide
gctgaggaaacccctgggatgactgttaaatcttaccaccagcagtgggtccttg

SEQ ID NO: 416006 - DNA, 58 bp, Artificial
  Synthetic oligonucleotide
gctgaggaactatcagaagcaacacgaaacttgcttgaaattgtccggtaccttaaga

SEQ ID NO: 416007 - DNA, 58 bp, Artificial
  Synthetic oligonucleotide
gctgaggaattccaatggaacacagtcaaacaaaatgggaaatccggggcatgcaaaa

SEQ ID NO: 416008 - DNA, 52 bp, Artificial
  Synthetic oligonucleotide
gctgaggaccaacccacacaaccggatgtagcaacgtgtcggttttacaccc

SEQ ID NO: 416009 - DNA, 55 bp, Artificial
  Synthetic oligonucleotide
gctgaggaccataccttgagggagagcgccgattacagaagaggttagtcccggc

SEQ ID NO: 416010 - DNA, 55 bp, Artificial
  Synthetic oligonucleotide
gctgaggacgcccagaaatactccaaaaccggtacatggtttgtgaggtctaatg

SEQ ID NO: 416011 - DNA, 55 bp, Artificial
  Synthetic oligonucleotide
gctgaggagaataatccctagggaccttaccttactgaggaaggatggctcgaga

SEQ ID NO: 416012 - DNA, 55 bp, Artificial
  Synthetic oligonucleotide
gctgaggcaatgagccaagcaaacagtccaaacataatgatgcagaaaagcaatt

SEQ ID NO: 416013 - DNA, 60 bp, Artificial
  Synthetic oligonucleotide
gctgaggctagggatccggccatagtattgctcagaggcccagctaacaaattaaagtgc

SEQ ID NO: 416014 - DNA, 55 bp, Artificial
  Synthetic oligonucleotide
gctgaggctatcagctactgtcgagctgaggtcgatagaattgggaagaagtgtg

SEQ ID NO: 416015 - DNA, 60 bp, Artificial
  Synthetic oligonucleotide
gctgagggctatagaggcgcaacagcatatgttgcaactcacggtctggggcattaagca

SEQ ID NO: 416016 - DNA, 51 bp, Artificial
  Synthetic oligonucleotide
gctgagggtgtctatcggtggattgcagcatacagctatgagccagctaac

SEQ ID NO: 416017 - DNA, 60 bp, Artificial
  Synthetic oligonucleotide
gctgaggtagcataggaattacccgccacacccgccacatcgccattgggacacttctct

SEQ ID NO: 416018 - DNA, 56 bp, Artificial
  Synthetic oligonucleotide
gctgaggtagtctttataggaagactgggggcccggattgcaaagaaagatagtgg

SEQ ID NO: 416019 - DNA, 60 bp, Artificial
  Synthetic oligonucleotide
gctgaggtgcacacagcaagaggcgagaggcggcgactggtgagtacgccaattttgact

SEQ ID NO: 416020 - DNA, 57 bp, Artificial
  Synthetic oligonucleotide
gctgaggtttttgtacggtctgctggtgacagaaactagcccaacttccgatctact

SEQ ID NO: 416021 - DNA, 55 bp, Artificial
  Synthetic oligonucleotide
gctgagtaaatttaaaactgtgtatggagttagcttttcagagttggtgcggagc

SEQ ID NO: 416022 - DNA, 60 bp, Artificial
  Synthetic oligonucleotide
gctgagtacacttaggaaggtctgcaggctttatgcgccagtcgcttggaattacatgca

SEQ ID NO: 416023 - DNA, 60 bp, Artificial
  Synthetic oligonucleotide
gctgagtatctgttgctgttttagccagaatactaactgtgctccgcaactcagtaaccg

SEQ ID NO: 416024 - DNA, 60 bp, Artificial
  Synthetic oligonucleotide
gctgagtatgacgatagggaaatctcagtatcagctgagtgccataggccacccaggcac

SEQ ID NO: 416025 - DNA, 52 bp, Artificial
  Synthetic oligonucleotide
gctgagtcactcaatggaatgcacatggctgtgcaagtgacacaaggaacat

SEQ ID NO: 416026 - DNA, 55 bp, Artificial
  Synthetic oligonucleotide
gctgagtcagcccgtcaacccgacgggcatttggggcggcactaccgaacgagca

SEQ ID NO: 416027 - DNA, 55 bp, Artificial
  Synthetic oligonucleotide
gctgagtccccccactataaccattccagaagcaattacacgtagattcttccta

SEQ ID NO: 416028 - DNA, 55 bp, Artificial
  Synthetic oligonucleotide
gctgagtgccccagtcagttagtcacaaagcatgtggttaaaggaaagtgtcccc

SEQ ID NO: 416029 - DNA, 55 bp, Artificial
  Synthetic oligonucleotide
gctgagtggacagatagagttctagaagttttgcaaagagtgggtagagctattc

SEQ ID NO: 416030 - DNA, 56 bp, Artificial
  Synthetic oligonucleotide
gctgagtggcttaatttaggcaactacatgctatgttatagcaaaacattagacac

SEQ ID NO: 416031 - DNA, 60 bp, Artificial
  Synthetic oligonucleotide
gctgagttatccttgagatttcatctgattaccaagatcttcacgagatatcgaggcgaa

SEQ ID NO: 416032 - DNA, 54 bp, Artificial
  Synthetic oligonucleotide
gctgagttctctgatgacactccgcgtgcactgcgtggtgcgtctctgggtgga

SEQ ID NO: 416033 - DNA, 55 bp, Artificial
  Synthetic oligonucleotide
gctgagtttgctctccatccaatgagttcacgaaatgttgatggcaccctgttgc

SEQ ID NO: 416034 - DNA, 60 bp, Artificial
  Synthetic oligonucleotide
gctgataacattatcgctagcgtgattaagtctaactgggtagtcgacatcctcgatatc

SEQ ID NO: 416035 - DNA, 55 bp, Artificial
  Synthetic oligonucleotide
gctgatacaaaatgcaaatccagactgtaaagtgattctcaaaggcctagggatg

SEQ ID NO: 416036 - DNA, 55 bp, Artificial
  Synthetic oligonucleotide
gctgatacaccctgagattgccccataggttcttctgccttagaggtgggatgga

SEQ ID NO: 416037 - DNA, 60 bp, Artificial
  Synthetic oligonucleotide
gctgatacagtagaacctataaatgcggttgcgtttgacaacatgcgcatcatgaacgaa

SEQ ID NO: 416038 - DNA, 58 bp, Artificial
  Synthetic oligonucleotide
gctgataccgaatggaaaaatactttgtcacaactatttctgaccaaaggatggccaa

SEQ ID NO: 416039 - DNA, 55 bp, Artificial
  Synthetic oligonucleotide
gctgatagaaacgtcgttaattacccatcaatattacatccaatagaccacgctt

SEQ ID NO: 416040 - DNA, 60 bp, Artificial
  Synthetic oligonucleotide
gctgatagaattattcagtataaatggaatgctgcgccattcctaaaggattatgaattg

SEQ ID NO: 416041 - DNA, 60 bp, Artificial
  Synthetic oligonucleotide
gctgatagattttagagaactaaataaggtgactcaagatttcacagaaattcagctagg

SEQ ID NO: 416042 - DNA, 60 bp, Artificial
  Synthetic oligonucleotide
gctgatagctatcataagccttgggccgtctataaagtagcccacctccttattgggcta

SEQ ID NO: 416043 - DNA, 60 bp, Artificial
  Synthetic oligonucleotide
gctgataggatatgtgttgggtacttaagcaccaactcatcagaaaaggttgacacactg

SEQ ID NO: 416044 - DNA, 55 bp, Artificial
  Synthetic oligonucleotide
gctgataggcagtccagaatcagggtatatgacagatttcgtctcagccaatgtc

SEQ ID NO: 416045 - DNA, 55 bp, Artificial
  Synthetic oligonucleotide
gctgatagggtaaggtatggttcagatttcgtcataaaatcaatttacatgggtg

SEQ ID NO: 416046 - DNA, 55 bp, Artificial
  Synthetic oligonucleotide
gctgatagtaagtgggagagacgaacagtcaatcgctgaagcgatcattgtagca

SEQ ID NO: 416047 - DNA, 60 bp, Artificial
  Synthetic oligonucleotide
gctgatagtgaatttctgatacgtggggcagtgggttcaggtaaatcaacaggccttcca

SEQ ID NO: 416048 - DNA, 60 bp, Artificial
  Synthetic oligonucleotide
gctgatagtgagtggaagagacgaacagtcagtagccgaagcaataattgtagccatggt

SEQ ID NO: 416049 - DNA, 52 bp, Artificial
  Synthetic oligonucleotide
gctgatataaatcagctgacggatagacttcagatattggctggtaggaaaa

SEQ ID NO: 416050 - DNA, 57 bp, Artificial
  Synthetic oligonucleotide
gctgatatagaaggtggaaagtattatgaacatgctccgatagaattgatttatgcc

SEQ ID NO: 416051 - DNA, 60 bp, Artificial
  Synthetic oligonucleotide
gctgatatgacggcacaaagaagcaacgtaaacactgctggtaatcatcttcgtgataat

SEQ ID NO: 416052 - DNA, 60 bp, Artificial
  Synthetic oligonucleotide
gctgatcaagtaatggacgctggttctcgttacaatggggtgttcgtgatgacattgctt

SEQ ID NO: 416053 - DNA, 55 bp, Artificial
  Synthetic oligonucleotide
gctgatcaatgttacccaacacccagctagaatagcagaaacacctggacccaag

SEQ ID NO: 416054 - DNA, 60 bp, Artificial
  Synthetic oligonucleotide
gctgatcaatttgtccaaggcgtattcggaaggccacagatttatcatcaactttgccgc

SEQ ID NO: 416055 - DNA, 57 bp, Artificial
  Synthetic oligonucleotide
gctgatcacatgagagtggacctggctatatgcactagcatggtgttcgctaaggat

SEQ ID NO: 416056 - DNA, 60 bp, Artificial
  Synthetic oligonucleotide
gctgatcaggcacgagaacaggatggtactggccagtaccacggctaaggccatggagca

SEQ ID NO: 416057 - DNA, 60 bp, Artificial
  Synthetic oligonucleotide
gctgatccaaaacagcataacattggaaagaatggtcctttctgcctttgatgaaaggag

SEQ ID NO: 416058 - DNA, 60 bp, Artificial
  Synthetic oligonucleotide
gctgatccagaacagcataacagtagagagaatggttctctctgcatttgatgaaaggag

SEQ ID NO: 416059 - DNA, 55 bp, Artificial
  Synthetic oligonucleotide
gctgatccgcgcaccttcaagcaaaacagtggactcagtgaacccctcgtggctc

SEQ ID NO: 416060 - DNA, 60 bp, Artificial
  Synthetic oligonucleotide
gctgatcgctagggtatttaatgcgcctcagaccgtcaagaggccactcttgagtgccgg

SEQ ID NO: 416061 - DNA, 53 bp, Artificial
  Synthetic oligonucleotide
gctgatcgtcgagacgcctcgtgattggaagaccgaggtgattgttctgattg

SEQ ID NO: 416062 - DNA, 58 bp, Artificial
  Synthetic oligonucleotide
gctgatcgttggtccatcgtggtccacgtcaaactacgtcggcgttacttgttgtctc

SEQ ID NO: 416063 - DNA, 51 bp, Artificial
  Synthetic oligonucleotide
gctgatctatctctgttcttgttgtcagagtgttaggtacagactgcctta

SEQ ID NO: 416064 - DNA, 55 bp, Artificial
  Synthetic oligonucleotide
gctgatcttgaagtgactctcagtgccacatccaacagtaacgttgccacagtag

SEQ ID NO: 416065 - DNA, 60 bp, Artificial
  Synthetic oligonucleotide
gctgatcttgacactgactctcgttgtgtaagatacaataaaaagagcgtgaattatgga

SEQ ID NO: 416066 - DNA, 59 bp, Artificial
  Synthetic oligonucleotide
gctgatgagcttggtgccgcgttactgcggaaggatgtgcatactctctatgctgcttt

SEQ ID NO: 416067 - DNA, 58 bp, Artificial
  Synthetic oligonucleotide
gctgatgagggaacacgaactgccctttcggtcgtcacctggaatagcaaagggaaga

SEQ ID NO: 416068 - DNA, 55 bp, Artificial
  Synthetic oligonucleotide
gctgatgagttaacaccaggtaggtttagaacaattgtctgtggacttttcccgg

SEQ ID NO: 416069 - DNA, 60 bp, Artificial
  Synthetic oligonucleotide
gctgatgattggatcgatccaaacctgtttggtattcgcggacagcacaatcagatcaaa

SEQ ID NO: 416070 - DNA, 55 bp, Artificial
  Synthetic oligonucleotide
gctgatgcatacgtttcagttggatcgtcaaaatacaaccgaagattcgctccgg

SEQ ID NO: 416071 - DNA, 57 bp, Artificial
  Synthetic oligonucleotide
gctgatgccatcctacacgctccggggtgcgtcccttgcgttcgcgagggtaacgtc

SEQ ID NO: 416072 - DNA, 51 bp, Artificial
  Synthetic oligonucleotide
gctgatgctaaccaccctatgatcgtgagcctaataacagttagtgggcta

SEQ ID NO: 416073 - DNA, 60 bp, Artificial
  Synthetic oligonucleotide
gctgatgctatatactatacactagaagtcgcacctgacgctaagtatgtaactggcgct

SEQ ID NO: 416074 - DNA, 55 bp, Artificial
  Synthetic oligonucleotide
gctgatggatgccctaaaattaagcattgaggacccaagtcatgaaggagagggg

SEQ ID NO: 416075 - DNA, 60 bp, Artificial
  Synthetic oligonucleotide
gctgatggattcgcattccgaagacaattcgcaggcgtgccctctggcatgctactaacc

SEQ ID NO: 416076 - DNA, 59 bp, Artificial
  Synthetic oligonucleotide
gctgatggctaatgcaatcaactcagctgtccccattgactgggtcccaacgggacgta

SEQ ID NO: 416077 - DNA, 57 bp, Artificial
  Synthetic oligonucleotide
gctgatggtactaccacatggtattttaacccagttgttcaaagaccaagtaatgtg

SEQ ID NO: 416078 - DNA, 60 bp, Artificial
  Synthetic oligonucleotide
gctgatggtatgtttagctaaattaatgattaagcctagatgcatactaaccgattctac

SEQ ID NO: 416079 - DNA, 60 bp, Artificial
  Synthetic oligonucleotide
gctgatggtatgtttagctaagataatgattaaacccagatgtatattatccgattctac

SEQ ID NO: 416080 - DNA, 55 bp, Artificial
  Synthetic oligonucleotide
gctgatggttatggaggcgttggattcgcacttaaacagtcacaggataacgcac

SEQ ID NO: 416081 - DNA, 56 bp, Artificial
  Synthetic oligonucleotide
gctgatgtacactcctgtggagttaacgctagtagagaaaagcaccgaaccgttag

SEQ ID NO: 416082 - DNA, 55 bp, Artificial
  Synthetic oligonucleotide
gctgatgtacttcaggcgataggaagtcgttcgagtgaaataggtcacgctttgg

SEQ ID NO: 416083 - DNA, 60 bp, Artificial
  Synthetic oligonucleotide
gctgatgtgatcatggtgagcctctgggtgactctgtctgtccaagatgtataacattat

SEQ ID NO: 416084 - DNA, 60 bp, Artificial
  Synthetic oligonucleotide
gctgatgtttccacaaggattattaaaagatgatcgacgtgccattaatgccgagtttcc

SEQ ID NO: 416085 - DNA, 60 bp, Artificial
  Synthetic oligonucleotide
gctgattactatcagctcgtaaaccatgatatccacccacaattaactactcgtgtacta

SEQ ID NO: 416086 - DNA, 55 bp, Artificial
  Synthetic oligonucleotide
gctgattactctcggtgggattcaacacaacagagagccgtgttggcagctgctc

SEQ ID NO: 416087 - DNA, 55 bp, Artificial
  Synthetic oligonucleotide
gctgattaggaacacgctgatttcaaatatagaagtcaagtactgcttaatcacc

SEQ ID NO: 416088 - DNA, 55 bp, Artificial
  Synthetic oligonucleotide
gctgattatgactccagcagacaagggtgagtgctttaatgaagtgacctgggcc

SEQ ID NO: 416089 - DNA, 60 bp, Artificial
  Synthetic oligonucleotide
gctgattcagagatctctgaaagtttctcttcatcgtcccccgctgtggaggcgacgacc

SEQ ID NO: 416090 - DNA, 55 bp, Artificial
  Synthetic oligonucleotide
gctgattcagtcctccagggcccatgcgattgtggctctgacccgccacacggag

SEQ ID NO: 416091 - DNA, 55 bp, Artificial
  Synthetic oligonucleotide
gctgattcagttgatagtaagtggaagagacgaacagtcgattgctgaagcgatc

SEQ ID NO: 416092 - DNA, 53 bp, Artificial
  Synthetic oligonucleotide
gctgattgggccgctccaaatgtggtaaatccttttcctgtctcagatgtggt

SEQ ID NO: 416093 - DNA, 55 bp, Artificial
  Synthetic oligonucleotide
gctgcaaacactttaaaatgctttaggcgcagggcaacgcaggctcatcctcaca

SEQ ID NO: 416094 - DNA, 60 bp, Artificial
  Synthetic oligonucleotide
gctgcaaaggtcatcggttggctccatgccctgaagtgcaaagtcaaggctatgctgaaa

SEQ ID NO: 416095 - DNA, 59 bp, Artificial
  Synthetic oligonucleotide
gctgcaaagttgggaccttacgcttgggacttagcccgccattgtgcggatgttcagtc

SEQ ID NO: 416096 - DNA, 60 bp, Artificial
  Synthetic oligonucleotide
gctgcaagcgaagttgctaaacgtgttcagagcctacgaagatcgtgtcgattgcatctc

SEQ ID NO: 416097 - DNA, 57 bp, Artificial
  Synthetic oligonucleotide
gctgcaagcggggggcacgtgaacaagggttctgtgtctccttagatgcggggggga

SEQ ID NO: 416098 - DNA, 55 bp, Artificial
  Synthetic oligonucleotide
gctgcaaggacgcggaccattaaaactgttcatggcccttgtggcgttccttcgt

SEQ ID NO: 416099 - DNA, 53 bp, Artificial
  Synthetic oligonucleotide
gctgcaagtcgcgaagcaggtaggcaaggcgtcgctgttaggcgtcgtgaagt

SEQ ID NO: 416100 - DNA, 60 bp, Artificial
  Synthetic oligonucleotide
gctgcaatacttatcgagcatactaaaccattttgaaggaattcagatcatccgcaaaag

SEQ ID NO: 416101 - DNA, 60 bp, Artificial
  Synthetic oligonucleotide
gctgcaatatgcacacatttggaagtctgtttcatgtattcagatttccacttcatcgat

SEQ ID NO: 416102 - DNA, 53 bp, Artificial
  Synthetic oligonucleotide
gctgcaatattgttaacgtgagtttagtaaaaccgactttttacgtttactca

SEQ ID NO: 416103 - DNA, 55 bp, Artificial
  Synthetic oligonucleotide
gctgcaatgagattatgcattgaagtttggagatggtgcaaagctaacgaacagg

SEQ ID NO: 416104 - DNA, 55 bp, Artificial
  Synthetic oligonucleotide
gctgcacaacatcattgggccacggctatcgccgttttgggaagaccaaaggcca

SEQ ID NO: 416105 - DNA, 55 bp, Artificial
  Synthetic oligonucleotide
gctgcacaatggcaaaccacacataatcgcactcatgaagtcctacggattgaat

SEQ ID NO: 416106 - DNA, 55 bp, Artificial
  Synthetic oligonucleotide
gctgcacacacagatgttcgtgggtccctgaatcattttatccccgagctcggcc

SEQ ID NO: 416107 - DNA, 52 bp, Artificial
  Synthetic oligonucleotide
gctgcacacgttaaagacgacaagttgaaattttacggttactacgggtggg

SEQ ID NO: 416108 - DNA, 55 bp, Artificial
  Synthetic oligonucleotide
gctgcacagagcttggagaagcagttcttcttcactcctctcgaattgcaatagg

SEQ ID NO: 416109 - DNA, 60 bp, Artificial
  Synthetic oligonucleotide
gctgcaccatagccgctctcggtacttcggatcgcgacgttgtcgtggagctcttcgagt

SEQ ID NO: 416110 - DNA, 51 bp, Artificial
  Synthetic oligonucleotide
gctgcaccatatagtgacttcactacactgattgttaatagacaattcaaa

SEQ ID NO: 416111 - DNA, 55 bp, Artificial
  Synthetic oligonucleotide
gctgcaccccgtgtcgcccacaaaaaaggctaacaaggccaagaagtcaagttcc

SEQ ID NO: 416112 - DNA, 60 bp, Artificial
  Synthetic oligonucleotide
gctgcaccgacccctagaggcatgtactaactcatgctattgtaagcagtgcagcttcca

SEQ ID NO: 416113 - DNA, 55 bp, Artificial
  Synthetic oligonucleotide
gctgcaccgcggcccaaaagagttttgtatcaaggtgctgtgcccatacatgccc

SEQ ID NO: 416114 - DNA, 60 bp, Artificial
  Synthetic oligonucleotide
gctgcaccgtctgtacgagtatccaacgtctgtgcacgttgtgcctcagtctgctcagta

SEQ ID NO: 416115 - DNA, 55 bp, Artificial
  Synthetic oligonucleotide
gctgcactaggtatcaagaacattggaaacaaagaatacttatgggatggactgc

SEQ ID NO: 416116 - DNA, 55 bp, Artificial
  Synthetic oligonucleotide
gctgcactcaaagtacgttattacgatcgatcaaatcttcgcaacgctgagatca

SEQ ID NO: 416117 - DNA, 60 bp, Artificial
  Synthetic oligonucleotide
gctgcactgcaactggacatgtccgaattagcagatttgatacttaatgaatggttatgt

SEQ ID NO: 416118 - DNA, 55 bp, Artificial
  Synthetic oligonucleotide
gctgcactgggtcagcaacgggacttggcgcttaggcgcatgaatttagatcaac

SEQ ID NO: 416119 - DNA, 60 bp, Artificial
  Synthetic oligonucleotide
gctgcactttgattggaacctgagtagagtggttcttcgagggtgatgaatctcgcattt

SEQ ID NO: 416120 - DNA, 55 bp, Artificial
  Synthetic oligonucleotide
gctgcagaatgggatagattgcacccagtccatgcggggcctattgcaccaaacc

SEQ ID NO: 416121 - DNA, 60 bp, Artificial
  Synthetic oligonucleotide
gctgcagaatgttcgctctgagccaaggtacaacactcagagggcgacatgcgaatggga

SEQ ID NO: 416122 - DNA, 55 bp, Artificial
  Synthetic oligonucleotide
gctgcagacctagagaatgcagttagtccaattaacttaaattgcgaggaggaga

SEQ ID NO: 416123 - DNA, 60 bp, Artificial
  Synthetic oligonucleotide
gctgcagactggttcgctgtggtcaggtcgtctatcgttatttgtggtttcggtctgaga

SEQ ID NO: 416124 - DNA, 60 bp, Artificial
  Synthetic oligonucleotide
gctgcagactggttcgctgtggtgaggtcggttaatgttatttgtggcttaggtctgagg

SEQ ID NO: 416125 - DNA, 60 bp, Artificial
  Synthetic oligonucleotide
gctgcagactggttcgctgtggtgaggtcgtttattgttatctgtggtttcggcctgagg

SEQ ID NO: 416126 - DNA, 59 bp, Artificial
  Synthetic oligonucleotide
gctgcagagttacattaagatgaaatgcacgttgggctgtcggttggggggttttgcta

SEQ ID NO: 416127 - DNA, 59 bp, Artificial
  Synthetic oligonucleotide
gctgcagatatagtcatttccactcccgcctccaaagtacgccggaggttgaacttcga

SEQ ID NO: 416128 - DNA, 60 bp, Artificial
  Synthetic oligonucleotide
gctgcagatgcacatattaagagggcctctacactttcagcgacgtgcgatattaggtgc

SEQ ID NO: 416129 - DNA, 55 bp, Artificial
  Synthetic oligonucleotide
gctgcagcattcagtgaccaagtatggttagttgattttagtaaactagcaactg

SEQ ID NO: 416130 - DNA, 55 bp, Artificial
  Synthetic oligonucleotide
gctgcagcgtcgttagccgtctgctgacctcctctagcagatcgtccgtcgatct

SEQ ID NO: 416131 - DNA, 59 bp, Artificial
  Synthetic oligonucleotide
gctgcaggcatcccgacctccgggttcggctgcaatcctcacccccacgcggtccacaa

SEQ ID NO: 416132 - DNA, 60 bp, Artificial
  Synthetic oligonucleotide
gctgcaggcgaatttgagttcagcggacgaaacgagaaatgggatcagtcatcttattta

SEQ ID NO: 416133 - DNA, 58 bp, Artificial
  Synthetic oligonucleotide
gctgcagggagagttgcagtatccgctaaagacgattttgattgcggtttctttttgg

SEQ ID NO: 416134 - DNA, 60 bp, Artificial
  Synthetic oligonucleotide
gctgcaggttcccgagagctcataagaaccaggtaccaagtctacagtacttagcactga

SEQ ID NO: 416135 - DNA, 60 bp, Artificial
  Synthetic oligonucleotide
gctgcaggtttacttattgaactgcttatgcaggactatccagagaatagcaggtgagcc

SEQ ID NO: 416136 - DNA, 55 bp, Artificial
  Synthetic oligonucleotide
gctgcagtaggagcttcaatgggatctgccaagataaacatgtctcagaaagttg

SEQ ID NO: 416137 - DNA, 60 bp, Artificial
  Synthetic oligonucleotide
gctgcagtcaagagatgtaaagaagtagctgtaggtccggggagtaagagcaaaagatat

SEQ ID NO: 416138 - DNA, 55 bp, Artificial
  Synthetic oligonucleotide
gctgcagtgatgggttcccctgtgcgtgaatccatgcacgttgcaggctaacgct

SEQ ID NO: 416139 - DNA, 60 bp, Artificial
  Synthetic oligonucleotide
gctgcagtgatgggttcccctgtgcgtgaatccgtggtcatggcagttgattgagaggta

SEQ ID NO: 416140 - DNA, 60 bp, Artificial
  Synthetic oligonucleotide
gctgcagtgatgtgttcccctgtgcgtgaatccatagttgtgacagtcaatggagatgta

SEQ ID NO: 416141 - DNA, 55 bp, Artificial
  Synthetic oligonucleotide
gctgcagtttgtatttgaactttgtaaggtcaagctgacccctgagaacctgaca

SEQ ID NO: 416142 - DNA, 60 bp, Artificial
  Synthetic oligonucleotide
gctgcatacaagtcaaggaagacagtgatttgttatgatttggcctgtaatcaaacacat

SEQ ID NO: 416143 - DNA, 55 bp, Artificial
  Synthetic oligonucleotide
gctgcatacagaataggcttgggttctactgccaactaaggcttatctgatggat

SEQ ID NO: 416144 - DNA, 55 bp, Artificial
  Synthetic oligonucleotide
gctgcatataagcagctgcttcacgcttgtactgggtctctgtgacagaccagat

SEQ ID NO: 416145 - DNA, 60 bp, Artificial
  Synthetic oligonucleotide
gctgcatataagcagctgcttttcgcctgtactgggtctctctaggtagaccagatctga

SEQ ID NO: 416146 - DNA, 57 bp, Artificial
  Synthetic oligonucleotide
gctgcatatagtccctgcgactacgaaggtaacctcgtacggttgtttcaactacaa

SEQ ID NO: 416147 - DNA, 55 bp, Artificial
  Synthetic oligonucleotide
gctgcatatccagtaattaagggaacatataataatactggctcccaaccgatcc

SEQ ID NO: 416148 - DNA, 60 bp, Artificial
  Synthetic oligonucleotide
gctgcatcaataggtgtttttatgtggaattgataagaggaaggccgcaagagactaggg

SEQ ID NO: 416149 - DNA, 60 bp, Artificial
  Synthetic oligonucleotide
gctgcatccagcgtgcagccatgggagagacgacccacatggagagatccttgtctggag

SEQ ID NO: 416150 - DNA, 53 bp, Artificial
  Synthetic oligonucleotide
gctgcatccggacttctacaagaactgctgacaagggactttacacggggact

SEQ ID NO: 416151 - DNA, 60 bp, Artificial
  Synthetic oligonucleotide
gctgcatctaaacatgaactgtccctcgctaatgctcaactcgtatgttctgacattgat

SEQ ID NO: 416152 - DNA, 55 bp, Artificial
  Synthetic oligonucleotide
gctgcatcttctgtaggtctgggtaattatccggcctcaaagtgtgaagtggtcg

SEQ ID NO: 416153 - DNA, 57 bp, Artificial
  Synthetic oligonucleotide
gctgcatgatttgtggcagacggccgattcaagcccatcatctagtgtttagaagct

SEQ ID NO: 416154 - DNA, 57 bp, Artificial
  Synthetic oligonucleotide
gctgcatggtacctttgggaagtgaaaaaacaacgagcaggagtattgtgggatgtc

SEQ ID NO: 416155 - DNA, 60 bp, Artificial
  Synthetic oligonucleotide
gctgcattcacaggaaatgcagaaggcagaacatctgatatgaggactgagatcatacga

SEQ ID NO: 416156 - DNA, 60 bp, Artificial
  Synthetic oligonucleotide
gctgcattgcaagcagtattgtaatggtaggactcatacttgcattcatcatgtggacat

SEQ ID NO: 416157 - DNA, 59 bp, Artificial
  Synthetic oligonucleotide
gctgcatttcctaagaaagtcaaatttgccgtactcaggggacaacatacatcaatttc

SEQ ID NO: 416158 - DNA, 52 bp, Artificial
  Synthetic oligonucleotide
gctgccaacaacaccatccgacagcgtggaaacccggacaactatgatgcac

SEQ ID NO: 416159 - DNA, 60 bp, Artificial
  Synthetic oligonucleotide
gctgccacactgagccatcgcccgttacactggagggactccaaagtccgagctttcatc

SEQ ID NO: 416160 - DNA, 55 bp, Artificial
  Synthetic oligonucleotide
gctgccacagaatttggagttcgttgctttcagcaattgctagttaaggagttgg

SEQ ID NO: 416161 - DNA, 55 bp, Artificial
  Synthetic oligonucleotide
gctgccagaccccaacaagttcgcactgtcagaaccccacatttatgatccggac

SEQ ID NO: 416162 - DNA, 55 bp, Artificial
  Synthetic oligonucleotide
gctgccagacgctctgagttgctacgtaaattgaccgaaacgttcggctcatggt

SEQ ID NO: 416163 - DNA, 60 bp, Artificial
  Synthetic oligonucleotide
gctgccagaggtcaatacagtgggtttgtgagaacactattccaacaaatgcgtgacgta

SEQ ID NO: 416164 - DNA, 55 bp, Artificial
  Synthetic oligonucleotide
gctgccaggaacattgttaggagagctactgtatcggcagatccactggcgtcac

SEQ ID NO: 416165 - DNA, 55 bp, Artificial
  Synthetic oligonucleotide
gctgccaggggcaaatatagtggatttgtgagaacgctatttcagcagatgcgtg

SEQ ID NO: 416166 - DNA, 59 bp, Artificial
  Synthetic oligonucleotide
gctgccatcaaaaagagacttcgttttgacaacgttgcaaacaattatgcaaaattcaa

SEQ ID NO: 416167 - DNA, 55 bp, Artificial
  Synthetic oligonucleotide
gctgccatcagaagattctggatgggtctcaggacatcattgggttggacacagt

SEQ ID NO: 416168 - DNA, 60 bp, Artificial
  Synthetic oligonucleotide
gctgccatgaactccatcaaagttacagttagagccaatggacaagatttcaccccagtt

SEQ ID NO: 416169 - DNA, 60 bp, Artificial
  Synthetic oligonucleotide
gctgccatgtcgacttatgcaatcggtgtctctcaactctctctctgtatcggtgtattg

SEQ ID NO: 416170 - DNA, 59 bp, Artificial
  Synthetic oligonucleotide
gctgcccccaacgtctctggtgctgctcaggctataatagcccccacccctgctcgtaa

SEQ ID NO: 416171 - DNA, 59 bp, Artificial
  Synthetic oligonucleotide
gctgccccttggtgtgtggcaaggcaattcagttaatggacaagtcttctagggttaga

SEQ ID NO: 416172 - DNA, 59 bp, Artificial
  Synthetic oligonucleotide
gctgcccgcattcacgcaatgttctcagccccccgtctttacgaacgccgcacgacctc

SEQ ID NO: 416173 - DNA, 55 bp, Artificial
  Synthetic oligonucleotide
gctgcccgccttgtgaatgctcatgttaagaccctcactgcttgacaggaggctc

SEQ ID NO: 416174 - DNA, 51 bp, Artificial
  Synthetic oligonucleotide
gctgcccggattccagcactcgaccagtcctgtgacccgaatgggtttcac

SEQ ID NO: 416175 - DNA, 60 bp, Artificial
  Synthetic oligonucleotide
gctgcccgtccgcgcagacaacgtcgcaatcccgtgtaggcagtcacctgcccgctccca

SEQ ID NO: 416176 - DNA, 59 bp, Artificial
  Synthetic oligonucleotide
gctgccctaatcacaggaccgcaacagctggagaaaggacttagtaacctacatcgaat

SEQ ID NO: 416177 - DNA, 55 bp, Artificial
  Synthetic oligonucleotide
gctgccctacgtaacccgtggacaatactcccttcttcaaccggttcaggctcat

SEQ ID NO: 416178 - DNA, 60 bp, Artificial
  Synthetic oligonucleotide
gctgccctgctagcaatgactaacccacacttagctactggccagatccactggggcaac

SEQ ID NO: 416179 - DNA, 55 bp, Artificial
  Synthetic oligonucleotide
gctgccctgctcacggtgacggatgtcattccggtccacttcactacccagccca

SEQ ID NO: 416180 - DNA, 55 bp, Artificial
  Synthetic oligonucleotide
gctgccctgtcggtgaagctccgtccccgtacaattcaaggtttgaatcggttgc

SEQ ID NO: 416181 - DNA, 60 bp, Artificial
  Synthetic oligonucleotide
gctgccgaacgtgcacattacctccagtgacgttccgcacagggacagactgttggtatg

SEQ ID NO: 416182 - DNA, 59 bp, Artificial
  Synthetic oligonucleotide
gctgccgacctcttgctagttttgcccagggctggggccctatcagtcacaccaacgga

SEQ ID NO: 416183 - DNA, 55 bp, Artificial
  Synthetic oligonucleotide
gctgccgagatatcttacgtcaagatggtccaggatgacattcacccatactcgt

SEQ ID NO: 416184 - DNA, 55 bp, Artificial
  Synthetic oligonucleotide
gctgccgcccttgcttgattgcgataatcatacaccaatccccgtgcgtcccgtt

SEQ ID NO: 416185 - DNA, 55 bp, Artificial
  Synthetic oligonucleotide
gctgccgctttggctgaggccggcaaagtttatggattgcagatgactcctcctg

SEQ ID NO: 416186 - DNA, 55 bp, Artificial
  Synthetic oligonucleotide
gctgccggaacgctaggttccattgagtatcttaggtataggttaggtagatcag

SEQ ID NO: 416187 - DNA, 55 bp, Artificial
  Synthetic oligonucleotide
gctgccggcgattatatttaggtgaccttggagtgtggaacgtttcactaaaggc

SEQ ID NO: 416188 - DNA, 55 bp, Artificial
  Synthetic oligonucleotide
gctgccgttctactcatattcattattgtcgtcttgtacaattatgtgtcgctat

SEQ ID NO: 416189 - DNA, 55 bp, Artificial
  Synthetic oligonucleotide
gctgcctagcagtgagaaccgtggtagaatgccctggaaactcatgcttgcattc

SEQ ID NO: 416190 - DNA, 60 bp, Artificial
  Synthetic oligonucleotide
gctgcctagcgaggccactgtctacttgcctcctgtcccagtatctaaagttgtaagcac

SEQ ID NO: 416191 - DNA, 55 bp, Artificial
  Synthetic oligonucleotide
gctgcctcagctttcacgccgatcgaacctgagtcacgagtagctgattggagtg

SEQ ID NO: 416192 - DNA, 55 bp, Artificial
  Synthetic oligonucleotide
gctgcctccaacatggctcatgcaagggcctactgctatgaggcgaccataagtg

SEQ ID NO: 416193 - DNA, 60 bp, Artificial
  Synthetic oligonucleotide
gctgcctcggctagtgccttagctctttcttcccgttggcgacattcggccgcatatttc

SEQ ID NO: 416194 - DNA, 53 bp, Artificial
  Synthetic oligonucleotide
gctgcctctgcggaaccggcgttcaacgccttggcatatgaatcgttagctgt

SEQ ID NO: 416195 - DNA, 60 bp, Artificial
  Synthetic oligonucleotide
gctgcctcttccggcagacgtacctctgaaaacggagatgcctgctaagattggagatac

SEQ ID NO: 416196 - DNA, 55 bp, Artificial
  Synthetic oligonucleotide
gctgcctgcgactcaaccccaggaggactgggtgaacaaagccgcgaagtgatcc

SEQ ID NO: 416197 - DNA, 55 bp, Artificial
  Synthetic oligonucleotide
gctgcctgtggccaaggaagggccatatgaaggaccagtgaagaagcctgtcgct

SEQ ID NO: 416198 - DNA, 58 bp, Artificial
  Synthetic oligonucleotide
gctgccttgacgggtcgggatcctgatttacatccaggaaacgtcatggtgttgggga

SEQ ID NO: 416199 - DNA, 52 bp, Artificial
  Synthetic oligonucleotide
gctgcctttgaagttcgaaaacattatcaatgttcctgctcttgcctgtttt

SEQ ID NO: 416200 - DNA, 60 bp, Artificial
  Synthetic oligonucleotide
gctgcgacctttgcacatgttgatggttctaggggtgataacttatgttctgctacgtct

SEQ ID NO: 416201 - DNA, 57 bp, Artificial
  Synthetic oligonucleotide
gctgcgacgtggggctggttcttcttctcaaaccgtttctagtggtgctaatattgg

SEQ ID NO: 416202 - DNA, 55 bp, Artificial
  Synthetic oligonucleotide
gctgcgagagaatcacttttaatgtggttcgatttcaaagcgagagatctatggg

SEQ ID NO: 416203 - DNA, 55 bp, Artificial
  Synthetic oligonucleotide
gctgcgagatagcgaaatcaacctgaataccttggcaatcccagttagcagttca

SEQ ID NO: 416204 - DNA, 58 bp, Artificial
  Synthetic oligonucleotide
gctgcgagatggaggagtataggctttggtcaaagaatccggattacttcttttccga

SEQ ID NO: 416205 - DNA, 58 bp, Artificial
  Synthetic oligonucleotide
gctgcgaggattgtgggcaagggactgacgagggggtgggaagccctcaaatatctgg

SEQ ID NO: 416206 - DNA, 55 bp, Artificial
  Synthetic oligonucleotide
gctgcgagggcgggccaccaaggtaccaattcgccccatcgatgattaggggaac

SEQ ID NO: 416207 - DNA, 60 bp, Artificial
  Synthetic oligonucleotide
gctgcgataagtgtcagctaaaaggggaagccatgcatggacaggtagactgtagtccag

SEQ ID NO: 416208 - DNA, 55 bp, Artificial
  Synthetic oligonucleotide
gctgcgataatgacaattgctggtcctttgctctcgcacaaggagcattgctagg

SEQ ID NO: 416209 - DNA, 60 bp, Artificial
  Synthetic oligonucleotide
gctgcgatattaataagatactcgcacgcttcagcggcgagcaggtagcagcgcacttaa

SEQ ID NO: 416210 - DNA, 60 bp, Artificial
  Synthetic oligonucleotide
gctgcgatgggacggaatgaacccgccatacccgccacatgtgccacttgggcacttcca

SEQ ID NO: 416211 - DNA, 60 bp, Artificial
  Synthetic oligonucleotide
gctgcgatttacgttcgcactgcacaaaggtttgcgatactaaggcgtgcgctaatccac

SEQ ID NO: 416212 - DNA, 60 bp, Artificial
  Synthetic oligonucleotide
gctgcgattttcgtttgattcttcagtcactgttcttggtcatgagacgtgtagtattgg

SEQ ID NO: 416213 - DNA, 60 bp, Artificial
  Synthetic oligonucleotide
gctgcgcaaactccacactgcaatgccacgtctgactcaggcgtctctggttgggtgcct

SEQ ID NO: 416214 - DNA, 55 bp, Artificial
  Synthetic oligonucleotide
gctgcgcaagccagaataatgttgaccggttaccttgaccttcggtcatatcacg

SEQ ID NO: 416215 - DNA, 55 bp, Artificial
  Synthetic oligonucleotide
gctgcgcaagtgcaaggcactactttaagggcaactatgatgggcaatgccgtcg

SEQ ID NO: 416216 - DNA, 60 bp, Artificial
  Synthetic oligonucleotide
gctgcgcactttggcgggcatgcgcagtgtgatgactcatgttgaggcgtagaagcgcca

SEQ ID NO: 416217 - DNA, 55 bp, Artificial
  Synthetic oligonucleotide
gctgcgcagtacgatgcagccactgagattagaaacaacaccaatttcagaggca

SEQ ID NO: 416218 - DNA, 51 bp, Artificial
  Synthetic oligonucleotide
gctgcgccaaatccagcttttgctgacattgcttatttaagtaggccgcac

SEQ ID NO: 416219 - DNA, 60 bp, Artificial
  Synthetic oligonucleotide
gctgcgcccagattacaaggagctttgaatgaatggcacacaattgagaatgtgctaacg

SEQ ID NO: 416220 - DNA, 60 bp, Artificial
  Synthetic oligonucleotide
gctgcgcccatgggttcgcgaccatgcgccctcggcctattttgttgctgctcctcatgt

SEQ ID NO: 416221 - DNA, 55 bp, Artificial
  Synthetic oligonucleotide
gctgcgccgaagacgcgcgatgaggcaatggcgtgcattcatgctgtgtgggatg

SEQ ID NO: 416222 - DNA, 55 bp, Artificial
  Synthetic oligonucleotide
gctgcgcctaaggatcagatcaaaccactaatacctatggtacgaacggcggcag

SEQ ID NO: 416223 - DNA, 60 bp, Artificial
  Synthetic oligonucleotide
gctgcgcgcgctgcctacggcagtcacacgtcatacgtacgctccttggtcagttggttc

SEQ ID NO: 416224 - DNA, 55 bp, Artificial
  Synthetic oligonucleotide
gctgcgcgcttaacacacggctcaagtggcctcatctttaaaccaaaatttgctg

SEQ ID NO: 416225 - DNA, 60 bp, Artificial
  Synthetic oligonucleotide
gctgcgcgtgcttatcttgacatctacagtcgcccactaattggatatgaggcttcagcg

SEQ ID NO: 416226 - DNA, 59 bp, Artificial
  Synthetic oligonucleotide
gctgcgctggataggttcagtaggctgaaagacgaggtttctaccgcgttatctaagtc

SEQ ID NO: 416227 - DNA, 55 bp, Artificial
  Synthetic oligonucleotide
gctgcggacccccccttgatggcgcttcctattttcaagacgctccccgtaaata

SEQ ID NO: 416228 - DNA, 55 bp, Artificial
  Synthetic oligonucleotide
gctgcggagatcgcccaattttcatcctttctcagtctccggccaacagctctga

SEQ ID NO: 416229 - DNA, 55 bp, Artificial
  Synthetic oligonucleotide
gctgcggagatgctcaaacatttcttgttttgtgcattgcaaggtccttacactc

SEQ ID NO: 416230 - DNA, 50 bp, Artificial
  Synthetic oligonucleotide
gctgcggcaatatacgaactcgacaacgagtgaatctaaatgcctcaaaa

SEQ ID NO: 416231 - DNA, 60 bp, Artificial
  Synthetic oligonucleotide
gctgcggctatcttgtcaaagcttaaacctgtggcctctgatttttccgacttcagattg

SEQ ID NO: 416232 - DNA, 56 bp, Artificial
  Synthetic oligonucleotide
gctgcggtattatacacgtaaagatctgggtacaacgataccaattccggaacatt

SEQ ID NO: 416233 - DNA, 55 bp, Artificial
  Synthetic oligonucleotide
gctgcggtgtcagcagcggataacggccgatcagtttgaggtagtcaccgaaaga

SEQ ID NO: 416234 - DNA, 57 bp, Artificial
  Synthetic oligonucleotide
gctgcggttacgtatggtgcgggtactgatgttcgggctaactcagatgggcgttcc

SEQ ID NO: 416235 - DNA, 60 bp, Artificial
  Synthetic oligonucleotide
gctgcgtaagaacgtgtgcgccttcgctccagcttccatgtcccgcgctgaccctcgcgt

SEQ ID NO: 416236 - DNA, 55 bp, Artificial
  Synthetic oligonucleotide
gctgcgtacaatcttttgtactccaacagcagctccccgtcgaagctgatgtccc

SEQ ID NO: 416237 - DNA, 55 bp, Artificial
  Synthetic oligonucleotide
gctgcgtactgctgaacgtcattccaaccgtaccgcggggttattctggcacagt

SEQ ID NO: 416238 - DNA, 54 bp, Artificial
  Synthetic oligonucleotide
gctgcgtagtcgaattccttttaccgaagcggattccggtccaccgtatataac

SEQ ID NO: 416239 - DNA, 55 bp, Artificial
  Synthetic oligonucleotide
gctgcgtataatggccgaccacaaggggcatttcatgttactatgcgtagtagtt

SEQ ID NO: 416240 - DNA, 60 bp, Artificial
  Synthetic oligonucleotide
gctgcgtatgagagcggagtaaggattgcttcgttagtgcaaggggacaatcagactata

SEQ ID NO: 416241 - DNA, 60 bp, Artificial
  Synthetic oligonucleotide
gctgcgtattcttcgcgaatggagatgatctattactggcaatgaggccagacacagctc

SEQ ID NO: 416242 - DNA, 55 bp, Artificial
  Synthetic oligonucleotide
gctgcgtgccgcagcgtatgatgtcttcaccaactacgaggaaggtgacctcgcc

SEQ ID NO: 416243 - DNA, 55 bp, Artificial
  Synthetic oligonucleotide
gctgcgtgggttgggaaatgcttcaataattgtactagtgctggtaaatgtgctc

SEQ ID NO: 416244 - DNA, 55 bp, Artificial
  Synthetic oligonucleotide
gctgcgttcaaaggcgtcagtgatgcaattacagcgaaccaccagtatggacccg

SEQ ID NO: 416245 - DNA, 60 bp, Artificial
  Synthetic oligonucleotide
gctgcgtttcaagggaactgtgaagattgaacgtgttgccactgacgtcagcatggatgg

SEQ ID NO: 416246 - DNA, 60 bp, Artificial
  Synthetic oligonucleotide
gctgcgtttgatactgcaaatccttactgtgggaattttgtcattaaggctgctaacaag

SEQ ID NO: 416247 - DNA, 60 bp, Artificial
  Synthetic oligonucleotide
gctgcgtttgtcaccacacgcatcgtcaagcgcatgaacatacaagacctatggtccaag

SEQ ID NO: 416248 - DNA, 59 bp, Artificial
  Synthetic oligonucleotide
gctgctaaatggcagtctagcagaagaagacatagtaattaaatctgaaaattttacgg

SEQ ID NO: 416249 - DNA, 55 bp, Artificial
  Synthetic oligonucleotide
gctgctaacgccgtggttggttatggtgaatggccctcatacattagtccacagg

SEQ ID NO: 416250 - DNA, 60 bp, Artificial
  Synthetic oligonucleotide
gctgctaatcccaacctctgagcgtgtgcgcacaatccagtgttgctacgtcgtaacgcg

SEQ ID NO: 416251 - DNA, 58 bp, Artificial
  Synthetic oligonucleotide
gctgctaatgaattaaatcgaattcttattacaaagtctcaggtggttgctattagta

SEQ ID NO: 416252 - DNA, 55 bp, Artificial
  Synthetic oligonucleotide
gctgctaatgttggtagaagtaaaactaagttgtttgctttagctgctcctggtg

SEQ ID NO: 416253 - DNA, 55 bp, Artificial
  Synthetic oligonucleotide
gctgctacaaattactgcaggtcagccacttgacctttctaggcctaccagcgcc

SEQ ID NO: 416254 - DNA, 56 bp, Artificial
  Synthetic oligonucleotide
gctgctacgtactcattaaaccagtaaacttaaagagtaatgtgttcttctcctta

SEQ ID NO: 416255 - DNA, 55 bp, Artificial
  Synthetic oligonucleotide
gctgctactaacaagagatggtggtaacccaaacagtaccagtaccaacgagacc

SEQ ID NO: 416256 - DNA, 55 bp, Artificial
  Synthetic oligonucleotide
gctgctagaaatatcgttaggagagcaacagtatcagcagacccgttggcttcgc

SEQ ID NO: 416257 - DNA, 60 bp, Artificial
  Synthetic oligonucleotide
gctgctagagtaactagagactactttgtaattcttaggcaaaggctacatgacattggt

SEQ ID NO: 416258 - DNA, 55 bp, Artificial
  Synthetic oligonucleotide
gctgctagatgaccacaaaacactcgctgcagttgacgttcacacgagcagctgg

SEQ ID NO: 416259 - DNA, 58 bp, Artificial
  Synthetic oligonucleotide
gctgctagcatgggttgcttaaaggaggctacgacctcactttttgctttccccctga

SEQ ID NO: 416260 - DNA, 52 bp, Artificial
  Synthetic oligonucleotide
gctgctagccagagtgacctagaacaactctttggaaacgtttcatatctgg

SEQ ID NO: 416261 - DNA, 60 bp, Artificial
  Synthetic oligonucleotide
gctgctagccttcaggtgcaggagccggcagacggagttgccattgacggatctctcgcg

SEQ ID NO: 416262 - DNA, 56 bp, Artificial
  Synthetic oligonucleotide
gctgctagcgatagcaacgatgaatcgactagcgcgaaaggcgggttagccggtgg

SEQ ID NO: 416263 - DNA, 55 bp, Artificial
  Synthetic oligonucleotide
gctgctaggaatattgttagaagagcaacagtatcagctgatccactagcatcat

SEQ ID NO: 416264 - DNA, 57 bp, Artificial
  Synthetic oligonucleotide
gctgctagggacctagtggttaactatgtcaatactaacatgggcctaaaaattaga

SEQ ID NO: 416265 - DNA, 55 bp, Artificial
  Synthetic oligonucleotide
gctgctagtgctgaagttgttaatctcgagccaggatggacagatatggcacacg

SEQ ID NO: 416266 - DNA, 57 bp, Artificial
  Synthetic oligonucleotide
gctgctataaaatggggaacaaatggtcaaaaagtagcgtagttggatggcctgagg

SEQ ID NO: 416267 - DNA, 60 bp, Artificial
  Synthetic oligonucleotide
gctgctataagcctcgcgacgatagagctcacccccatatctctctactggagacccgtt

SEQ ID NO: 416268 - DNA, 58 bp, Artificial
  Synthetic oligonucleotide
gctgctatgcataatttatcatgttcattggaaggtaaggccacaggtaataatcatc

SEQ ID NO: 416269 - DNA, 55 bp, Artificial
  Synthetic oligonucleotide
gctgctatgccattgttcgaaggggtttgcccagaggattggatcagttacggga

SEQ ID NO: 416270 - DNA, 60 bp, Artificial
  Synthetic oligonucleotide
gctgctatgttaagccagagaactatgtcattagactttgtaacgacaaattatatgtca

SEQ ID NO: 416271 - DNA, 60 bp, Artificial
  Synthetic oligonucleotide
gctgctatgttgagtcagagaaccatgtcattagatttcgtaacgacaaattacatgtca

SEQ ID NO: 416272 - DNA, 60 bp, Artificial
  Synthetic oligonucleotide
gctgctattaacaagagatggtggtaacaatgagaccgagaccgagactttcagacctgg

SEQ ID NO: 416273 - DNA, 59 bp, Artificial
  Synthetic oligonucleotide
gctgctattactaacaaagttaactttagcttctcttctgcttataggactttgctata

SEQ ID NO: 416274 - DNA, 60 bp, Artificial
  Synthetic oligonucleotide
gctgctcaatttgctaagagtttcattggagcgaacaaacttgcacccgatcttgaagta

SEQ ID NO: 416275 - DNA, 60 bp, Artificial
  Synthetic oligonucleotide
gctgctccagaggttttatcattcaacatgaacacagttccgcctcctccaagtagagat

SEQ ID NO: 416276 - DNA, 60 bp, Artificial
  Synthetic oligonucleotide
gctgctccatccaagaggtgaagatcatgatccactccaaaatgcccaggcagttttaag

SEQ ID NO: 416277 - DNA, 59 bp, Artificial
  Synthetic oligonucleotide
gctgctccctgggattccgacgaggttttcttcttccactgcgtgtcacatcaccaccg

SEQ ID NO: 416278 - DNA, 55 bp, Artificial
  Synthetic oligonucleotide
gctgctccgaaagatgtcaaaccaactttaataccgatggtacgaacggcggcag

SEQ ID NO: 416279 - DNA, 60 bp, Artificial
  Synthetic oligonucleotide
gctgctcctacagtgtcaactgtatcaaacatgacaagggaacagcttgcggagtacact

SEQ ID NO: 416280 - DNA, 55 bp, Artificial
  Synthetic oligonucleotide
gctgctcctaccctgtcacccgccatgtggtgcatggtgagatcgctgccgtcta

SEQ ID NO: 416281 - DNA, 55 bp, Artificial
  Synthetic oligonucleotide
gctgctcctggaggtcacgtcggcaatccatattagccctaatctgttgggaatc

SEQ ID NO: 416282 - DNA, 55 bp, Artificial
  Synthetic oligonucleotide
gctgctcgcggatctgttaaccctattttagcggctactacgctaaacctgaacc

SEQ ID NO: 416283 - DNA, 60 bp, Artificial
  Synthetic oligonucleotide
gctgctcgcgtcactgccatacttagcagtctcactgtgacccagctcctgaggcgatta

SEQ ID NO: 416284 - DNA, 60 bp, Artificial
  Synthetic oligonucleotide
gctgctcggttatagactcataccaatggctgaagccgctagaatgttgtacttggaaat

SEQ ID NO: 416285 - DNA, 55 bp, Artificial
  Synthetic oligonucleotide
gctgctcgtgggctagagtggattggtcaaaagatctcaaagtttatcgattgga

SEQ ID NO: 416286 - DNA, 59 bp, Artificial
  Synthetic oligonucleotide
gctgctcttgtttcgactattttgggtacacctattaaaatgtataatgaatctggaca

SEQ ID NO: 416287 - DNA, 60 bp, Artificial
  Synthetic oligonucleotide
gctgctgaagccagacttccgtatcgagctacctttaactgctgcttgtactgtccctta

SEQ ID NO: 416288 - DNA, 54 bp, Artificial
  Synthetic oligonucleotide
gctgctgaagctcggtgatccgctcggtatgcagatcgccttcgttctgtccgt

SEQ ID NO: 416289 - DNA, 54 bp, Artificial
  Synthetic oligonucleotide
gctgctgacaagagtgaaaccattgtgcccacccatactcctgttttcttaaaa

SEQ ID NO: 416290 - DNA, 55 bp, Artificial
  Synthetic oligonucleotide
gctgctgacgctttcggggatttacatgggtctttacatgggcgggcacacggcc

SEQ ID NO: 416291 - DNA, 50 bp, Artificial
  Synthetic oligonucleotide
gctgctgaggaagcaacgctagtcagcaaatcacagagagaaggtcacgg

SEQ ID NO: 416292 - DNA, 60 bp, Artificial
  Synthetic oligonucleotide
gctgctgatatttgtggactgtttactaacagctctggaacacaacagtggaggggcctt

SEQ ID NO: 416293 - DNA, 56 bp, Artificial
  Synthetic oligonucleotide
gctgctgctcaacagaaggcaggaaagagagggacattgacatgctggaactgtgg

SEQ ID NO: 416294 - DNA, 50 bp, Artificial
  Synthetic oligonucleotide
gctgctgctttatagtactctaggtgggttgggcctaatgagtttttggg

SEQ ID NO: 416295 - DNA, 55 bp, Artificial
  Synthetic oligonucleotide
gctgctggaatggaggctatttccaagattactacccaaaggagattgctgaggc

SEQ ID NO: 416296 - DNA, 60 bp, Artificial
  Synthetic oligonucleotide
gctgctgggctcgggattcctgggtccaagatgggaactgttgaacgtatcatatgtcat

SEQ ID NO: 416297 - DNA, 55 bp, Artificial
  Synthetic oligonucleotide
gctgctgtatactgtgtcagtcgttatccggaatacgattatttccttgtatacg

SEQ ID NO: 416298 - DNA, 60 bp, Artificial
  Synthetic oligonucleotide
gctgctgtcagagtaagctaaacaggagatccagggtaacagtttgacttcgaccgatat

SEQ ID NO: 416299 - DNA, 55 bp, Artificial
  Synthetic oligonucleotide
gctgctgtgataaccaagataatcctgactagatcgaagaaagtgccgaagaaag

SEQ ID NO: 416300 - DNA, 55 bp, Artificial
  Synthetic oligonucleotide
gctgctgtggaactggtttacctagtgagttacatggagttccttgctgatttac

SEQ ID NO: 416301 - DNA, 55 bp, Artificial
  Synthetic oligonucleotide
gctgctgtgtcctcggcttgtcttagtgacatacccattccgtagaataccacgt

SEQ ID NO: 416302 - DNA, 57 bp, Artificial
  Synthetic oligonucleotide
gctgcttaagcatgatattcacggagcccccgtatatggatcaattcaagacgaaat

SEQ ID NO: 416303 - DNA, 60 bp, Artificial
  Synthetic oligonucleotide
gctgcttaagtctagagccgtgcttgtaaatgagggtgactgtgggtctctactcaattt

SEQ ID NO: 416304 - DNA, 60 bp, Artificial
  Synthetic oligonucleotide
gctgcttagcaataggcacggggtgcgtatatgggtcttgccaagatgtcattagggagg

SEQ ID NO: 416305 - DNA, 60 bp, Artificial
  Synthetic oligonucleotide
gctgcttatgggatcagacacacaatctccaagtccatcaaagacctatcaaggactcat

SEQ ID NO: 416306 - DNA, 53 bp, Artificial
  Synthetic oligonucleotide
gctgcttccaggaccttgtctacactctcatacaggtcgctggggcttcattt

SEQ ID NO: 416307 - DNA, 58 bp, Artificial
  Synthetic oligonucleotide
gctgcttcccatttatcacggttcaataataaccatagatgggcctgtttagtattac

SEQ ID NO: 416308 - DNA, 55 bp, Artificial
  Synthetic oligonucleotide
gctgcttggaaatctggaactattcatgttcaacttaatgttaggggtgctggtg

SEQ ID NO: 416309 - DNA, 55 bp, Artificial
  Synthetic oligonucleotide
gctgctttccgacagttttcgaagacaaaagaccccgaaacactggttcagtaca

SEQ ID NO: 416310 - DNA, 59 bp, Artificial
  Synthetic oligonucleotide
gctgctttccgcttttgagttgatggtcaaacccttgcgtatcggtgaagtgttgtgcc

SEQ ID NO: 416311 - DNA, 59 bp, Artificial
  Synthetic oligonucleotide
gctgctttcgggccctatatacgttatctggcctgtaagttgcgcgagcactcccctga

SEQ ID NO: 416312 - DNA, 58 bp, Artificial
  Synthetic oligonucleotide
gctgctttctgtccaaaagtcgtgacctttaggataataggtacggccatatccataa

SEQ ID NO: 416313 - DNA, 55 bp, Artificial
  Synthetic oligonucleotide
gctgctttggcgcctatactgcctcttcagcctttacaagtaccttatgctggtt

SEQ ID NO: 416314 - DNA, 55 bp, Artificial
  Synthetic oligonucleotide
gctgcttttaaattgctggcggtccatctagagaccctaattggagactccaggg

SEQ ID NO: 416315 - DNA, 53 bp, Artificial
  Synthetic oligonucleotide
gctggaaaacctttgtatcctagaggtgtaaagaattccaacccagggtcgaa

SEQ ID NO: 416316 - DNA, 55 bp, Artificial
  Synthetic oligonucleotide
gctggaaaaggaacccgtagtaggagcagaaactttctatgtagacggagcagct

SEQ ID NO: 416317 - DNA, 55 bp, Artificial
  Synthetic oligonucleotide
gctggaaaaggatcccatgatcggagtagaaactttctatgtagatggagcagct

SEQ ID NO: 416318 - DNA, 56 bp, Artificial
  Synthetic oligonucleotide
gctggaaaccatgctgtacatggttggttagataaaagcgtcaataaaccgggact

SEQ ID NO: 416319 - DNA, 57 bp, Artificial
  Synthetic oligonucleotide
gctggaaagagcccaaaattatcaagtcacatgagaagggtataaacccaaattatc

SEQ ID NO: 416320 - DNA, 56 bp, Artificial
  Synthetic oligonucleotide
gctggaaagagcccaacattgtaaaaccacatgaagaaggcataaaccccaattac

SEQ ID NO: 416321 - DNA, 59 bp, Artificial
  Synthetic oligonucleotide
gctggaaagagcccaacattgtcaaaccacatgagaagggcataaatcccaactacctc

SEQ ID NO: 416322 - DNA, 55 bp, Artificial
  Synthetic oligonucleotide
gctggaaaggatcctaagaaaaccggaggtccaatctatagaaggagagacggaa

SEQ ID NO: 416323 - DNA, 59 bp, Artificial
  Synthetic oligonucleotide
gctggaaaggttgcgtgaggcaagagcgaatatgtttaaggaagtagaggctggtgtta

SEQ ID NO: 416324 - DNA, 55 bp, Artificial
  Synthetic oligonucleotide
gctggaaatgacattgcaaattgcttgagaaagtcgggaaagaaggtgatccaat

SEQ ID NO: 416325 - DNA, 55 bp, Artificial
  Synthetic oligonucleotide
gctggaacacaacagtggcaggggtatatgagagtcagctaaagtggaatgagag

SEQ ID NO: 416326 - DNA, 60 bp, Artificial
  Synthetic oligonucleotide
gctggaacgcgcccagtccgcagaaataccctctgacgctgagagggagcgtgtgattca

SEQ ID NO: 416327 - DNA, 60 bp, Artificial
  Synthetic oligonucleotide
gctggaacgggtctcttacaaatcacactcgcctaccaagctgctttcagttgcgcaggc

SEQ ID NO: 416328 - DNA, 55 bp, Artificial
  Synthetic oligonucleotide
gctggaactactgactcccaggtattcatcgtgtcacccgctgcattggaccgtg

SEQ ID NO: 416329 - DNA, 55 bp, Artificial
  Synthetic oligonucleotide
gctggaaggtgactctaacgcagacgtagcgaacgctcggcgtattctcaacaag

SEQ ID NO: 416330 - DNA, 55 bp, Artificial
  Synthetic oligonucleotide
gctggaagttgccccattgattgaatctgtttacgcgtcggagttatcagtgatg

SEQ ID NO: 416331 - DNA, 55 bp, Artificial
  Synthetic oligonucleotide
gctggaataaccaagtgatcatagactttgattatagccaggccagatgatgtgg

SEQ ID NO: 416332 - DNA, 55 bp, Artificial
  Synthetic oligonucleotide
gctggaatggatgttttcaccatgcagccacatcgagctgacaccgtgatgtgcg

SEQ ID NO: 416333 - DNA, 56 bp, Artificial
  Synthetic oligonucleotide
gctggaattgactatgccttcgggtgtggttgctaccgttcgcatggcggagtccg

SEQ ID NO: 416334 - DNA, 55 bp, Artificial
  Synthetic oligonucleotide
gctggaattggcgcaagtctaggagctataggaaaacaggctattgacttcggag

SEQ ID NO: 416335 - DNA, 60 bp, Artificial
  Synthetic oligonucleotide
gctggaattttgacgtatcacaatggtaccccaaagcgcttgaactcaatatgcttctct

SEQ ID NO: 416336 - DNA, 55 bp, Artificial
  Synthetic oligonucleotide
gctggacacgccatcgacgttggcccggactattaccgccaaatgttagctgaag

SEQ ID NO: 416337 - DNA, 60 bp, Artificial
  Synthetic oligonucleotide
gctggacaggacatatgataggaacgcaaacctggagttccgcacaagcaccccacagtc

SEQ ID NO: 416338 - DNA, 56 bp, Artificial
  Synthetic oligonucleotide
gctggacattaggaactatggtgcttatggccataaccccggttttgagggagccc

SEQ ID NO: 416339 - DNA, 55 bp, Artificial
  Synthetic oligonucleotide
gctggaccaacgaattctgaagcaataccagcgctcacagcagctgagacaggtc

SEQ ID NO: 416340 - DNA, 53 bp, Artificial
  Synthetic oligonucleotide
gctggacccttcccctggattacagagcacgattgaaggaactccacctttaa

SEQ ID NO: 416341 - DNA, 56 bp, Artificial
  Synthetic oligonucleotide
gctggacctgatcagccgaggccctcacaagattccctctaattatcccgccagcc

SEQ ID NO: 416342 - DNA, 55 bp, Artificial
  Synthetic oligonucleotide
gctggaccttttcatctcaaattatactcataagaagtgcatatagtgacccctc

SEQ ID NO: 416343 - DNA, 55 bp, Artificial
  Synthetic oligonucleotide
gctggacgattctttcggtgcttgggttgaagtcgacaattggaaagacgttacg

SEQ ID NO: 416344 - DNA, 50 bp, Artificial
  Synthetic oligonucleotide
gctggacgcgcctgtactcgtcccacaaggaggtgagcgcctacatggca

SEQ ID NO: 416345 - DNA, 55 bp, Artificial
  Synthetic oligonucleotide
gctggacgttatcagaggccagtgtagaggactctgtggtttgtgtcgcctctcg

SEQ ID NO: 416346 - DNA, 60 bp, Artificial
  Synthetic oligonucleotide
gctggactaaggcacatacaaagctctatagacataatcgatcaattagtacagagaatt

SEQ ID NO: 416347 - DNA, 55 bp, Artificial
  Synthetic oligonucleotide
gctggactaggaggatttagatttaacttgtataaggctatttcacaaacaccct

SEQ ID NO: 416348 - DNA, 60 bp, Artificial
  Synthetic oligonucleotide
gctggactcgacaacaggagaactcacctctctccgatcgttgaacgcccagctgaccag

SEQ ID NO: 416349 - DNA, 55 bp, Artificial
  Synthetic oligonucleotide
gctggactgtattggttgagttcgcaggttttagcgaagcagcaacatgtgacac

SEQ ID NO: 416350 - DNA, 59 bp, Artificial
  Synthetic oligonucleotide
gctggactgtcaatgatatacagaagttagtggggaaattaaactgggcaagccagatt

SEQ ID NO: 416351 - DNA, 55 bp, Artificial
  Synthetic oligonucleotide
gctggactgtctatcacggggccggaacaagaaccatcgcatcacccaagggccc

SEQ ID NO: 416352 - DNA, 58 bp, Artificial
  Synthetic oligonucleotide
gctggactgttctttggggccttatgtggtgtttgcctctgaggtactcaggggcatt

SEQ ID NO: 416353 - DNA, 58 bp, Artificial
  Synthetic oligonucleotide
gctggacttattatgccagattttaaagtggtgattcgctacccggccaatgctttta

SEQ ID NO: 416354 - DNA, 55 bp, Artificial
  Synthetic oligonucleotide
gctggagaagatagcatgctcttcattacgagttagagatagtcataggagtagg

SEQ ID NO: 416355 - DNA, 55 bp, Artificial
  Synthetic oligonucleotide
gctggagagacgaaccactggatttgtctcaaccaacaccagttgccacaatggc

SEQ ID NO: 416356 - DNA, 60 bp, Artificial
  Synthetic oligonucleotide
gctggagatattgccccgcaggatatgttcaaccccattctgtacaaggcgtgttcgaac

SEQ ID NO: 416357 - DNA, 55 bp, Artificial
  Synthetic oligonucleotide
gctggagatcagactttaactcttacaccgcgtggggtaaatcccactaacggcg

SEQ ID NO: 416358 - DNA, 55 bp, Artificial
  Synthetic oligonucleotide
gctggagcaccaatgtatagcacttttgcaaccttagtaaggaaagcagatcctg

SEQ ID NO: 416359 - DNA, 55 bp, Artificial
  Synthetic oligonucleotide
gctggagcaggaaccggtgccactgctattgggatggtgacacactatcagcaag

SEQ ID NO: 416360 - DNA, 55 bp, Artificial
  Synthetic oligonucleotide
gctggagcatcagtggtggacgtccaaggcaccaaagtgtatttgcaaagcggcc

SEQ ID NO: 416361 - DNA, 60 bp, Artificial
  Synthetic oligonucleotide
gctggagcatgcaatttgaagattgtggagtcaaaataaagagggtcttgaatggaaatc

SEQ ID NO: 416362 - DNA, 60 bp, Artificial
  Synthetic oligonucleotide
gctggagccacatgagactctgacatcttatgggcgtttgtctgaggccatcgagaaccg

SEQ ID NO: 416363 - DNA, 60 bp, Artificial
  Synthetic oligonucleotide
gctggagcccagcctacttaggtgtctgtatgggtgcaattcgtttactgcctctgagtc

SEQ ID NO: 416364 - DNA, 60 bp, Artificial
  Synthetic oligonucleotide
gctggagccctcacctggattgcaaagcacgattgctgggatcccacctttaatttgaac

SEQ ID NO: 416365 - DNA, 60 bp, Artificial
  Synthetic oligonucleotide
gctggagcgagaggggatgtacaacagatatttcagggtcgtaatgatcctatgatgata

SEQ ID NO: 416366 - DNA, 60 bp, Artificial
  Synthetic oligonucleotide
gctggagctatatagatacctatttgcgaaatgcactggatggcaatcaggtatgcgtag

SEQ ID NO: 416367 - DNA, 56 bp, Artificial
  Synthetic oligonucleotide
gctggaggaaataccaagtagatatacatttgaaatagaagaacccacccctccaa

SEQ ID NO: 416368 - DNA, 60 bp, Artificial
  Synthetic oligonucleotide
gctggaggcgtcgtgatgtgcaggtgtgggcacaaccggtcctggcacaggtatgcgtgg

SEQ ID NO: 416369 - DNA, 54 bp, Artificial
  Synthetic oligonucleotide
gctggagggttcttcacttcggttgggaaaggaattcatacggtgtttggctct

SEQ ID NO: 416370 - DNA, 50 bp, Artificial
  Synthetic oligonucleotide
gctggaggttcttcctttagattgcaaatttaagttggtcgacggtgttc

SEQ ID NO: 416371 - DNA, 60 bp, Artificial
  Synthetic oligonucleotide
gctggagtaacattatttactcaattcacagattttgtatcattgaattcactacgattt

SEQ ID NO: 416372 - DNA, 55 bp, Artificial
  Synthetic oligonucleotide
gctggagtattgtaatgccttagcaagcacgctagacgtaaaccaaatctgccca

SEQ ID NO: 416373 - DNA, 55 bp, Artificial
  Synthetic oligonucleotide
gctggagtgttcggctgagcgttccgtctcttgaaacacctgaagagacgaccgc

SEQ ID NO: 416374 - DNA, 55 bp, Artificial
  Synthetic oligonucleotide
gctggagttagatgaatgggcttccatttggaattggcttgacataactaaatgg

SEQ ID NO: 416375 - DNA, 55 bp, Artificial
  Synthetic oligonucleotide
gctggatacgctacggcaagtagctatgtcgaacttttaatccaactgattgagg

SEQ ID NO: 416376 - DNA, 55 bp, Artificial
  Synthetic oligonucleotide
gctggatagaacttgatgaaataggggaagacattgccccaattgagcacatcgc

SEQ ID NO: 416377 - DNA, 55 bp, Artificial
  Synthetic oligonucleotide
gctggatcaagtgagcaagctgcggaggccatggagattgctagtcaggctaggc

SEQ ID NO: 416378 - DNA, 55 bp, Artificial
  Synthetic oligonucleotide
gctggatcccacgaatcgaggtacatcgtactaagtttagttccaggggttgacc

SEQ ID NO: 416379 - DNA, 52 bp, Artificial
  Synthetic oligonucleotide
gctggatcgagtgaacaagcagctgaggcaatggaggttgcaggccaggcta

SEQ ID NO: 416380 - DNA, 55 bp, Artificial
  Synthetic oligonucleotide
gctggatctgtagcttatacaaaagagagttggcggaagggtcccctctagttgt

SEQ ID NO: 416381 - DNA, 55 bp, Artificial
  Synthetic oligonucleotide
gctggatctgtgcagcgtgcctgataaggtgccagctttaccagtagtattcccc

SEQ ID NO: 416382 - DNA, 55 bp, Artificial
  Synthetic oligonucleotide
gctggatcttccactcgcatgatcctgaaataaaggggatttggtacctcccaaa

SEQ ID NO: 416383 - DNA, 55 bp, Artificial
  Synthetic oligonucleotide
gctggatgatcaaggaaacagcctgcctcagcaaagcttatgcaaacatgtggtc

SEQ ID NO: 416384 - DNA, 55 bp, Artificial
  Synthetic oligonucleotide
gctggatgcgcttccatgatctcggattgtggacaggagatcgcaatctcttgcc

SEQ ID NO: 416385 - DNA, 55 bp, Artificial
  Synthetic oligonucleotide
gctggatgggacacccggatcacgaaagctgatttggagaacgaggcaaaagttc

SEQ ID NO: 416386 - DNA, 60 bp, Artificial
  Synthetic oligonucleotide
gctggatgtacactggttgaacatattgagtcaccatcatcaatatgggtgtttgctggg

SEQ ID NO: 416387 - DNA, 55 bp, Artificial
  Synthetic oligonucleotide
gctggattcagagcgagttcaataaagcatgcgaattgacagattcaagttggat

SEQ ID NO: 416388 - DNA, 55 bp, Artificial
  Synthetic oligonucleotide
gctggattcattagactgtgatggctatctactgttgaagcctcattctgtcgag

SEQ ID NO: 416389 - DNA, 60 bp, Artificial
  Synthetic oligonucleotide
gctggattggtgcagatttggagcccacaaagagctgtgaagatgtgtacatgcgagagc

SEQ ID NO: 416390 - DNA, 60 bp, Artificial
  Synthetic oligonucleotide
gctggatttagctctttgaatgttaggatggaaatgtgctgacctggtttgagagaccag

SEQ ID NO: 416391 - DNA, 49 bp, Artificial
  Synthetic oligonucleotide
gctggattttaaccgttttactgcccggtaaaaccgtgaaaatatttaa

SEQ ID NO: 416392 - DNA, 60 bp, Artificial
  Synthetic oligonucleotide
gctggcaaagaaatctgtcgcagacgttttggaggcgcaacctgtgacgaccaatctgct

SEQ ID NO: 416393 - DNA, 55 bp, Artificial
  Synthetic oligonucleotide
gctggcaaattctagcaagtttccagtggcagtcaaccctaactcccagtgttcg

SEQ ID NO: 416394 - DNA, 60 bp, Artificial
  Synthetic oligonucleotide
gctggcaagactagatgcattgaggcttgtgaagtggactactgtatagtttatagaatg

SEQ ID NO: 416395 - DNA, 60 bp, Artificial
  Synthetic oligonucleotide
gctggcaagttggtactcatgcctggtaggcgattattcaatgatctttgtacatagcga

SEQ ID NO: 416396 - DNA, 55 bp, Artificial
  Synthetic oligonucleotide
gctggcaatactctgatgccaccatttcttgaaccgggaagtgtcagtagtaggc

SEQ ID NO: 416397 - DNA, 55 bp, Artificial
  Synthetic oligonucleotide
gctggcacagtagacgtatgatccgaacgtccagcaagcagcgcaaccgtttcag

SEQ ID NO: 416398 - DNA, 51 bp, Artificial
  Synthetic oligonucleotide
gctggcacctacccacggctaagccttaccaggggcagcgagctaaccggc

SEQ ID NO: 416399 - DNA, 60 bp, Artificial
  Synthetic oligonucleotide
gctggcagcaaatctagatttggagatatggttcacatagcccaattattctcagtgatg

SEQ ID NO: 416400 - DNA, 55 bp, Artificial
  Synthetic oligonucleotide
gctggcagccactgtgatgcagaaagcataccatgccaaggtcgtgaaggtagcc

SEQ ID NO: 416401 - DNA, 51 bp, Artificial
  Synthetic oligonucleotide
gctggcaggcggagcggtggtcactgaacggctggcgcgagtaccagaaca

SEQ ID NO: 416402 - DNA, 55 bp, Artificial
  Synthetic oligonucleotide
gctggcataagaatcccattcgtgtgcaaagaaattccagactccttgcatgagg

SEQ ID NO: 416403 - DNA, 55 bp, Artificial
  Synthetic oligonucleotide
gctggcatagacccttccgtctctacatgcccggataagacgtctgccaaacgga

SEQ ID NO: 416404 - DNA, 55 bp, Artificial
  Synthetic oligonucleotide
gctggcattacccgcctaaaccgtgcggcatagtgtcagcccggtctgtctgtgg

SEQ ID NO: 416405 - DNA, 55 bp, Artificial
  Synthetic oligonucleotide
gctggcattattagatgatgccaccggaccagcgtgggattatttggatacatac

SEQ ID NO: 416406 - DNA, 57 bp, Artificial
  Synthetic oligonucleotide
gctggcattcccactgacactcctaggggagaggatagtcaattcacaggctcatgt

SEQ ID NO: 416407 - DNA, 55 bp, Artificial
  Synthetic oligonucleotide
gctggccaatatttcagctcggaccctttatgttcgtgcgaaagggcccgaaaag

SEQ ID NO: 416408 - DNA, 55 bp, Artificial
  Synthetic oligonucleotide
gctggccagcactacggctaaggctatggagcaaatggctgggtcaagtgaacag

SEQ ID NO: 416409 - DNA, 57 bp, Artificial
  Synthetic oligonucleotide
gctggccatattggcacttgtggtaatgtcagacttcgcacccgaatcagctagtgt

SEQ ID NO: 416410 - DNA, 55 bp, Artificial
  Synthetic oligonucleotide
gctggccggcgtgacagttaacgtcggaggtgttgacatgagggcgggacgcata

SEQ ID NO: 416411 - DNA, 60 bp, Artificial
  Synthetic oligonucleotide
gctggccgtcgaaaggcatttgctgaaatgactatagcccacacttatgaattggagagc

SEQ ID NO: 416412 - DNA, 55 bp, Artificial
  Synthetic oligonucleotide
gctggcctacttgatgacttttacaattgggctatctccaacggccgccttgctc

SEQ ID NO: 416413 - DNA, 58 bp, Artificial
  Synthetic oligonucleotide
gctggccttaatttgctaaaggaactccgagacgccattggacactggggcaggtgaa

SEQ ID NO: 416414 - DNA, 54 bp, Artificial
  Synthetic oligonucleotide
gctggcctttagggtacccaacgacagattttatccaattgtcagggatcccgg

SEQ ID NO: 416415 - DNA, 60 bp, Artificial
  Synthetic oligonucleotide
gctggcgaagtagaacctccactcactaacgctaacaacaaacttgcactggtctatagc

SEQ ID NO: 416416 - DNA, 55 bp, Artificial
  Synthetic oligonucleotide
gctggcgacacatgtggtatgggatgtcggcctccaatcgagctgctcactcgtt

SEQ ID NO: 416417 - DNA, 60 bp, Artificial
  Synthetic oligonucleotide
gctggcgatctaatctctggtatcaatttaggcgcagatggtaggaatcgcattactggt

SEQ ID NO: 416418 - DNA, 58 bp, Artificial
  Synthetic oligonucleotide
gctggcggtgattttacctctaatcgtctggaaggcaatttgaagttcgtgttcgaca

SEQ ID NO: 416419 - DNA, 55 bp, Artificial
  Synthetic oligonucleotide
gctggcgtaccgcccagacaagcacagacaaaacataccggattcggtgcaccgc

SEQ ID NO: 416420 - DNA, 55 bp, Artificial
  Synthetic oligonucleotide
gctggcgtgaggaaggtccaatgtttcacagctctctttagatctagaatcagcg

SEQ ID NO: 416421 - DNA, 50 bp, Artificial
  Synthetic oligonucleotide
gctggcgttcatacgccgcccgccggatagcacggtgtcgtttaagcaac

SEQ ID NO: 416422 - DNA, 54 bp, Artificial
  Synthetic oligonucleotide
gctggctaccccctcctggtttttacactggggagtttgaccttcctgaggcta

SEQ ID NO: 416423 - DNA, 60 bp, Artificial
  Synthetic oligonucleotide
gctggctactggagagggagctgtcaatactgctggttaagatgcacggtccgcatccca

SEQ ID NO: 416424 - DNA, 55 bp, Artificial
  Synthetic oligonucleotide
gctggctagctgaagtccctggccagcagctgatcaaggtagagctccgcttgcc

SEQ ID NO: 416425 - DNA, 60 bp, Artificial
  Synthetic oligonucleotide
gctggctagggtattactacgttgggaattatcatcgcaggctcgatctatcatgttcag

SEQ ID NO: 416426 - DNA, 55 bp, Artificial
  Synthetic oligonucleotide
gctggctcccttcttgtcttcatggctccagaattctatactggtaaaggaacaa

SEQ ID NO: 416427 - DNA, 55 bp, Artificial
  Synthetic oligonucleotide
gctggctctcagacatctagcaagagagaaacatccggaatattacagagactga

SEQ ID NO: 416428 - DNA, 58 bp, Artificial
  Synthetic oligonucleotide
gctggctgaacggatagaatgtatgccacttgctcaactgagaaacaaaaaggcggca

SEQ ID NO: 416429 - DNA, 54 bp, Artificial
  Synthetic oligonucleotide
gctggctggatatgttttaaatcaattagataagtacatatagacatttaattt

SEQ ID NO: 416430 - DNA, 60 bp, Artificial
  Synthetic oligonucleotide
gctggctggtacagcaagtcgtcgagccgtctgatgagtagcacctcagggtcacgaaac

SEQ ID NO: 416431 - DNA, 60 bp, Artificial
  Synthetic oligonucleotide
gctggctggtggaacatggcatcacttccgagaagcagtggattcaggagaatcaggaga

SEQ ID NO: 416432 - DNA, 55 bp, Artificial
  Synthetic oligonucleotide
gctggctgtgatataaccaatcttctaggaacaaacacttggcgtccaggccatg

SEQ ID NO: 416433 - DNA, 55 bp, Artificial
  Synthetic oligonucleotide
gctggctgtggtatataagatcattcataatgatagtaggaggcttgataggctt

SEQ ID NO: 416434 - DNA, 60 bp, Artificial
  Synthetic oligonucleotide
gctggcttgagcccatcttgggtgctgttagggcgattcagggtgagacgaagccgaccg

SEQ ID NO: 416435 - DNA, 60 bp, Artificial
  Synthetic oligonucleotide
gctgggaaacaatgtctgaatcaattgaacgtagggtgacttttgtcgccaatgataaga

SEQ ID NO: 416436 - DNA, 55 bp, Artificial
  Synthetic oligonucleotide
gctgggaaacatcatccagtacgctccaaccatatgggttcgaatggtcctgatg

SEQ ID NO: 416437 - DNA, 59 bp, Artificial
  Synthetic oligonucleotide
gctgggaaccatcgacacccgacttagtgacattagcaatagacttactgaaaacgagc

SEQ ID NO: 416438 - DNA, 60 bp, Artificial
  Synthetic oligonucleotide
gctgggaagtatgagaatcacactgagaatgctttgttgttgtatatggcatgtactcat

SEQ ID NO: 416439 - DNA, 55 bp, Artificial
  Synthetic oligonucleotide
gctgggaattactaactgctgcttactctgattgcttgaatcctctgcggtgttt

SEQ ID NO: 416440 - DNA, 55 bp, Artificial
  Synthetic oligonucleotide
gctgggacaactagcaaccaggcagaacaaattcactggactaccaggcccaacc

SEQ ID NO: 416441 - DNA, 55 bp, Artificial
  Synthetic oligonucleotide
gctgggagaaacgctcaatgtatacacccaacatgagaatggacttgaactgctc

SEQ ID NO: 416442 - DNA, 55 bp, Artificial
  Synthetic oligonucleotide
gctgggagtcagcggcgaccaaagcgaggatcgaaagtaaagagagcaacggggc

SEQ ID NO: 416443 - DNA, 55 bp, Artificial
  Synthetic oligonucleotide
gctgggatcgtgggctctactggcttttctatccctttctatccttacctgcctg

SEQ ID NO: 416444 - DNA, 60 bp, Artificial
  Synthetic oligonucleotide
gctgggatggtgctaacacgtggacttggtctggagggtatgaagtacatgctctatatg

SEQ ID NO: 416445 - DNA, 56 bp, Artificial
  Synthetic oligonucleotide
gctgggattatcctaaatgtgatagagctatgcctagtatgatacgaatgcttgct

SEQ ID NO: 416446 - DNA, 55 bp, Artificial
  Synthetic oligonucleotide
gctgggcaatatcgcttatgacgtttcccagagaggttggaatattggagattac

SEQ ID NO: 416447 - DNA, 55 bp, Artificial
  Synthetic oligonucleotide
gctgggccccaagaagctggcaactctccaagagagtaaaagtcagacagtgagc

SEQ ID NO: 416448 - DNA, 59 bp, Artificial
  Synthetic oligonucleotide
gctgggcgatacaaagtcgagccataccacggtaaggtcattgtaccagaagggacagc

SEQ ID NO: 416449 - DNA, 60 bp, Artificial
  Synthetic oligonucleotide
gctgggcgctgatctgactcacgtgttgccagcgagtgcggttacttattcacctgccgt

SEQ ID NO: 416450 - DNA, 55 bp, Artificial
  Synthetic oligonucleotide
gctgggctcccagtttcagctaggaaaggcaatctcatcttccttggccctgctg

SEQ ID NO: 416451 - DNA, 60 bp, Artificial
  Synthetic oligonucleotide
gctgggctcggcaattgcttggtgattatggcccaacacaggggacagtcttgaaagaac

SEQ ID NO: 416452 - DNA, 60 bp, Artificial
  Synthetic oligonucleotide
gctgggctgttacttgtacgtcgagtgcgcagtaatcaagggtttgctggattatgtcgt

SEQ ID NO: 416453 - DNA, 60 bp, Artificial
  Synthetic oligonucleotide
gctgggcttttgacgatggaagtgatgtgtggatggggagaacaatcagcaaagattcac

SEQ ID NO: 416454 - DNA, 59 bp, Artificial
  Synthetic oligonucleotide
gctggggaagatatggatggatgaaaacatcaagacgaaaaaccatactaacagtgtta

SEQ ID NO: 416455 - DNA, 52 bp, Artificial
  Synthetic oligonucleotide
gctggggactttccaggggaggcgtaacttgggcgggaccggggagtggcta

SEQ ID NO: 416456 - DNA, 54 bp, Artificial
  Synthetic oligonucleotide
gctggggactttccgggggaggcgtggactgggcgggactggggagtggcgagc

SEQ ID NO: 416457 - DNA, 60 bp, Artificial
  Synthetic oligonucleotide
gctggggaggcactgtttacagtgcgaaggctgccttgggtaggaataagaggctgagag

SEQ ID NO: 416458 - DNA, 60 bp, Artificial
  Synthetic oligonucleotide
gctggggatctcctaatcactgacttcatttcttacaaactgagcaagctcaccaatctg

SEQ ID NO: 416459 - DNA, 55 bp, Artificial
  Synthetic oligonucleotide
gctggggcacctgaccgttgtccacctacatgtctgtttatagcaggaatcgcag

SEQ ID NO: 416460 - DNA, 59 bp, Artificial
  Synthetic oligonucleotide
gctggggcaggaataatcggaggatttgtggttcctcagaagccaaagaagattgagaa

SEQ ID NO: 416461 - DNA, 60 bp, Artificial
  Synthetic oligonucleotide
gctggggccaaatccattgcttcagaggggtcatccattgacaacatatctccaagagag

SEQ ID NO: 416462 - DNA, 61 bp, Artificial
  Synthetic oligonucleotide
gctggggcttattattacccccagcgctcaggacgggacatcacgtgcatctaacaaatgc

SEQ ID NO: 416463 - DNA, 56 bp, Artificial
  Synthetic oligonucleotide
gctggggggacctaatgtctctagccacctgggtgggtgtaaatttggaagatcca

SEQ ID NO: 416464 - DNA, 56 bp, Artificial
  Synthetic oligonucleotide
gctggggggagttaatgactcttgctacctgggtgggtgttaacttggaagatcca

SEQ ID NO: 416465 - DNA, 55 bp, Artificial
  Synthetic oligonucleotide
gctggggggatctacttaatttatctacctgggtgggtagtaatttggaagatca

SEQ ID NO: 416466 - DNA, 55 bp, Artificial
  Synthetic oligonucleotide
gctgggtacaatgacgtctccacggtcacagagttcaatgttggcagttctgttg

SEQ ID NO: 416467 - DNA, 55 bp, Artificial
  Synthetic oligonucleotide
gctgggtatatatggatacatacatgagaaacctattagatggaaaccctatgac

SEQ ID NO: 416468 - DNA, 55 bp, Artificial
  Synthetic oligonucleotide
gctgggtccagtctgttgagagccctgtatgggtaatccgcaatcgaaggcccat

SEQ ID NO: 416469 - DNA, 56 bp, Artificial
  Synthetic oligonucleotide
gctgggtcgtttgaaggacctttcgtgagattaaaagacaatacattaattccata

SEQ ID NO: 416470 - DNA, 58 bp, Artificial
  Synthetic oligonucleotide
gctgggtgacaagtcaccgtccactctatcctctccaacccacataaccaacacttcc

SEQ ID NO: 416471 - DNA, 55 bp, Artificial
  Synthetic oligonucleotide
gctgggtgatgtatcactgaaggtcaatattgtcttggtgcctcttaaggacatg

SEQ ID NO: 416472 - DNA, 60 bp, Artificial
  Synthetic oligonucleotide
gctgggtgcgcctggtacgagctgacaccgtctgagaccacaataaggctgagagcttac

SEQ ID NO: 416473 - DNA, 55 bp, Artificial
  Synthetic oligonucleotide
gctgggtgtgcatcatctgtcgatgatgtaatcatggtcctgcgccgctggcaga

SEQ ID NO: 416474 - DNA, 54 bp, Artificial
  Synthetic oligonucleotide
gctgggttccatcctaccacaagaacctgttacatttatgttccttaaacccag

SEQ ID NO: 416475 - DNA, 60 bp, Artificial
  Synthetic oligonucleotide
gctgggttgcagcaagtgatgttcaagcgctagatataggcggaagtagttcaagttcaa

SEQ ID NO: 416476 - DNA, 60 bp, Artificial
  Synthetic oligonucleotide
gctggtaaatgtgctctaaccaactgtgaaggaagcacgcattacaagtacttgataatt

SEQ ID NO: 416477 - DNA, 55 bp, Artificial
  Synthetic oligonucleotide
gctggtacaaagagacacaaggttgaaagactctacatttcattggcacctcagg

SEQ ID NO: 416478 - DNA, 55 bp, Artificial
  Synthetic oligonucleotide
gctggtaccaacctggttctctatgccgccccgctgaatcctctcttgcccctcc

SEQ ID NO: 416479 - DNA, 55 bp, Artificial
  Synthetic oligonucleotide
gctggtaccgctggcttcgcaaactgcgtgctagaagattcaccgagcctgaccc

SEQ ID NO: 416480 - DNA, 58 bp, Artificial
  Synthetic oligonucleotide
gctggtacgaacgtttatgggaccttacagagtggatcaatttccagacaattatcca

SEQ ID NO: 416481 - DNA, 60 bp, Artificial
  Synthetic oligonucleotide
gctggtacttcagattactgctcttacactcattttgattcacccagcgtttctgagacg

SEQ ID NO: 416482 - DNA, 55 bp, Artificial
  Synthetic oligonucleotide
gctggtagacaaatttctagtagacagtacgttccccattatgagagcgaatacg

SEQ ID NO: 416483 - DNA, 50 bp, Artificial
  Synthetic oligonucleotide
gctggtagattggttctagtaatagaggtacttcggatctcgtgcaattt

SEQ ID NO: 416484 - DNA, 55 bp, Artificial
  Synthetic oligonucleotide
gctggtatattaacggcggagctacctgcagaaagtattgcggctaggtcggggt

SEQ ID NO: 416485 - DNA, 54 bp, Artificial
  Synthetic oligonucleotide
gctggtatgccatcgttgagccacgtcctgtactcaaagaacagtacatcgcgt

SEQ ID NO: 416486 - DNA, 55 bp, Artificial
  Synthetic oligonucleotide
gctggtattcgtcaagttaccgataaatatctcgtacaagatcgttctacaggag

SEQ ID NO: 416487 - DNA, 55 bp, Artificial
  Synthetic oligonucleotide
gctggtcaagcacacataatccttcgtgtgttttgcttttccaccatgtaaatgc

SEQ ID NO: 416488 - DNA, 55 bp, Artificial
  Synthetic oligonucleotide
gctggtcaattggtgggaagagtgcctcatgcacaatgattgggtagagcaggcc

SEQ ID NO: 416489 - DNA, 60 bp, Artificial
  Synthetic oligonucleotide
gctggtcacgaaggacatcgcgcctaccgcagaagtcgagccccgtgctcaactgctgag

SEQ ID NO: 416490 - DNA, 55 bp, Artificial
  Synthetic oligonucleotide
gctggtcactcgtggatttcagccatgagagatataaagctcctccaacagacac

SEQ ID NO: 416491 - DNA, 60 bp, Artificial
  Synthetic oligonucleotide
gctggtcagtacgtgaccaatccaaggttcaatatctctgattactttgagattgtacga

SEQ ID NO: 416492 - DNA, 60 bp, Artificial
  Synthetic oligonucleotide
gctggtcatagtcgctgcatggtacatcaagggcagggctgttccagcctttacctatgg

SEQ ID NO: 416493 - DNA, 51 bp, Artificial
  Synthetic oligonucleotide
gctggtcccggtactggcgaaaatgttggccgactgccatcttttctgggg

SEQ ID NO: 416494 - DNA, 55 bp, Artificial
  Synthetic oligonucleotide
gctggtccgtggcgtgtcacctggctaccggttggcgctccactagatgagatag

SEQ ID NO: 416495 - DNA, 55 bp, Artificial
  Synthetic oligonucleotide
gctggtcctactacgcggcctctcgcccgtccgtcatgagtgtcaaggcatacac

SEQ ID NO: 416496 - DNA, 55 bp, Artificial
  Synthetic oligonucleotide
gctggtccttgttcccaggtcatctgtagcttgtggatgcaatgttagagatgca

SEQ ID NO: 416497 - DNA, 54 bp, Artificial
  Synthetic oligonucleotide
gctggtcgattactagtagatgaatgtttcctggtccatgctgggttgatctat

SEQ ID NO: 416498 - DNA, 55 bp, Artificial
  Synthetic oligonucleotide
gctggtctatctttatggatgtgctccaatggatcgttacaatgcagaatttgca

SEQ ID NO: 416499 - DNA, 55 bp, Artificial
  Synthetic oligonucleotide
gctggtctattgatgtggcaacaatgtgctctcatgtggtcactgcctcgctcag

SEQ ID NO: 416500 - DNA, 55 bp, Artificial
  Synthetic oligonucleotide
gctggtctggagatttgacagtcgcctggcattcagacacgtagctaaagagctg

SEQ ID NO: 416501 - DNA, 60 bp, Artificial
  Synthetic oligonucleotide
gctggtctggtaatcgtcgctatgttgcagtcggtcaatcagagaatggtcgacgtgtca

SEQ ID NO: 416502 - DNA, 55 bp, Artificial
  Synthetic oligonucleotide
gctggtcttgcttgaaaaccagaaaactctagatgagcatgatgcaaatgtgaac

SEQ ID NO: 416503 - DNA, 60 bp, Artificial
  Synthetic oligonucleotide
gctggtcttggcaagcctgaataacttgctataagacaactggaaacccaccagtgatta

SEQ ID NO: 416504 - DNA, 60 bp, Artificial
  Synthetic oligonucleotide
gctggtcttggcggacatgaataacccgctataagacgaagtggtaaccgccactgatca

SEQ ID NO: 416505 - DNA, 53 bp, Artificial
  Synthetic oligonucleotide
gctggtgaacgcttgagcattgatgattaccatctcgtagcctttgctctgac

SEQ ID NO: 416506 - DNA, 58 bp, Artificial
  Synthetic oligonucleotide
gctggtgaattgttgaggacacagtattgtcacccgacggttgcgcttgaatttttaa

SEQ ID NO: 416507 - DNA, 58 bp, Artificial
  Synthetic oligonucleotide
gctggtgaccggggcacaagggcggttgtcctgtaaggaagactacaggtatgcgata

SEQ ID NO: 416508 - DNA, 55 bp, Artificial
  Synthetic oligonucleotide
gctggtgagattaacggctggcctttatggttcaggtaaacttctattgcatctg

SEQ ID NO: 416509 - DNA, 55 bp, Artificial
  Synthetic oligonucleotide
gctggtgagttggaaatatcgaattatggtgggacgtacaccgctcacactggag

SEQ ID NO: 416510 - DNA, 55 bp, Artificial
  Synthetic oligonucleotide
gctggtgatgacatgtgtgctaacaagcttttgaggaagaaaggggactttgagc

SEQ ID NO: 416511 - DNA, 55 bp, Artificial
  Synthetic oligonucleotide
gctggtgcagaagcagaatattatacaagggcaacgcttttcgcagttcattcga

SEQ ID NO: 416512 - DNA, 51 bp, Artificial
  Synthetic oligonucleotide
gctggtgcagtgaagattctctcacgtgacaaggtcgcacttaaggtcgca

SEQ ID NO: 416513 - DNA, 60 bp, Artificial
  Synthetic oligonucleotide
gctggtgcatacgataatgcatagtggctatccctccacttaaatcgaagggtctttcac

SEQ ID NO: 416514 - DNA, 55 bp, Artificial
  Synthetic oligonucleotide
gctggtgcgaaatcccaaaccacgactgcttcttcagacgctttcagcgagatca

SEQ ID NO: 416515 - DNA, 55 bp, Artificial
  Synthetic oligonucleotide
gctggtgctagtggacaacttgtagccattatacccaagaaacgtcgctatgttg

SEQ ID NO: 416516 - DNA, 60 bp, Artificial
  Synthetic oligonucleotide
gctggtgctcactggggagtcctggcgggcatagcgtatttctctatggtgggaaactgg

SEQ ID NO: 416517 - DNA, 60 bp, Artificial
  Synthetic oligonucleotide
gctggtggaacaagcagtgtgtatattgaggtcctgcatttaacccaggggacatgctgg

SEQ ID NO: 416518 - DNA, 50 bp, Artificial
  Synthetic oligonucleotide
gctggtggaggattcaacgcatgcccgacggttgtgtggcgcacgtttgt

SEQ ID NO: 416519 - DNA, 60 bp, Artificial
  Synthetic oligonucleotide
gctggtgggagcatttgggtaacaagagaaccttacgtgtcatgcagctccaataaatgt

SEQ ID NO: 416520 - DNA, 57 bp, Artificial
  Synthetic oligonucleotide
gctggtgtcaataatactcgttcactgttaggattccctcctatgttaatgttaaaa

SEQ ID NO: 416521 - DNA, 55 bp, Artificial
  Synthetic oligonucleotide
gctggtgtcctggtgtcccatttatacaactctctggggaggacaccaggggcaa

SEQ ID NO: 416522 - DNA, 55 bp, Artificial
  Synthetic oligonucleotide
gctggtgtcctggtgtcccatttatactagaactctctagggtaatctcaggggc

SEQ ID NO: 416523 - DNA, 55 bp, Artificial
  Synthetic oligonucleotide
gctggtgtcggaattcctgtctcatttcagcgtcgtactggtgacgcttttacgt

SEQ ID NO: 416524 - DNA, 60 bp, Artificial
  Synthetic oligonucleotide
gctggtgtctgcaggcccagtgtttcaacgttgcttccaagatggggctatagtgaagca

SEQ ID NO: 416525 - DNA, 50 bp, Artificial
  Synthetic oligonucleotide
gctggtgtgcaatagcaattacaggtcgactcggtattttcagggacaaa

SEQ ID NO: 416526 - DNA, 60 bp, Artificial
  Synthetic oligonucleotide
gctggtgttaccaaaactggatagagatcttctgagctcttgggttgctcttgcggagaa

SEQ ID NO: 416527 - DNA, 55 bp, Artificial
  Synthetic oligonucleotide
gctggttaaagattcaagcgttggtttccaagacgctctctcaaaggtcggcgtt

SEQ ID NO: 416528 - DNA, 51 bp, Artificial
  Synthetic oligonucleotide
gctggttaactactttgaattcaccgcctccctcgactcccacacatgctt

SEQ ID NO: 416529 - DNA, 55 bp, Artificial
  Synthetic oligonucleotide
gctggttactctgatgaagagtgcaagttgattcgcggaatggctacagatgtcg

SEQ ID NO: 416530 - DNA, 55 bp, Artificial
  Synthetic oligonucleotide
gctggttaggggtaatcaactatgtcagacaatacatccctaagtgcggaacact

SEQ ID NO: 416531 - DNA, 55 bp, Artificial
  Synthetic oligonucleotide
gctggttatccttataattataacaccactgctagtgaccagaccctgattgaga

SEQ ID NO: 416532 - DNA, 60 bp, Artificial
  Synthetic oligonucleotide
gctggttatgagactttcagggttgtgagtggttggaccatggctaattccaagtcacag

SEQ ID NO: 416533 - DNA, 51 bp, Artificial
  Synthetic oligonucleotide
gctggttcaaaaggaaaggttgttcctcggcttcataagatcacaaagaga

SEQ ID NO: 416534 - DNA, 60 bp, Artificial
  Synthetic oligonucleotide
gctggttcctagcctgttgagatctctgtatgggtgtattgcgttttctaattccgagtc

SEQ ID NO: 416535 - DNA, 60 bp, Artificial
  Synthetic oligonucleotide
gctggttcgcaagaccagattcctaccagtagctggcgggacaagcagtgtgtatatcga

SEQ ID NO: 416536 - DNA, 60 bp, Artificial
  Synthetic oligonucleotide
gctggttctagccgcaatacactggctttggttttatcctatgcatgaggctagcctaac

SEQ ID NO: 416537 - DNA, 55 bp, Artificial
  Synthetic oligonucleotide
gctggttgctgcagggaaagattctgaagcggcgtactttcgaagcatgctaccc

SEQ ID NO: 416538 - DNA, 55 bp, Artificial
  Synthetic oligonucleotide
gctggttggttttcaaatcctagggatttgttggcaatgtcaaacccagtagttc

SEQ ID NO: 416539 - DNA, 60 bp, Artificial
  Synthetic oligonucleotide
gctggttgtgctcgagaggtcgccacagttcagtcgatgctatcagttcgcgaagaggtg

SEQ ID NO: 416540 - DNA, 53 bp, Artificial
  Synthetic oligonucleotide
gctggtttccccttacgtccagtccacttcccgtcctggagaagggagactcg

SEQ ID NO: 416541 - DNA, 55 bp, Artificial
  Synthetic oligonucleotide
gctggtttcttttatacaaacattggtgatataacagtatgttttaattgtggcc

SEQ ID NO: 416542 - DNA, 58 bp, Artificial
  Synthetic oligonucleotide
gctggtttgcgtcgtttatgcacacgatgagggatctggcgacgaaccgagcccaata

SEQ ID NO: 416543 - DNA, 54 bp, Artificial
  Synthetic oligonucleotide
gctggttttagttatacacacacttcccaaacccgccaagggcctcgagatttc

SEQ ID NO: 416544 - DNA, 50 bp, Artificial
  Synthetic oligonucleotide
gctgtaaagcatcctactgccagcggaatcacatctggtaacagatgcct

SEQ ID NO: 416545 - DNA, 60 bp, Artificial
  Synthetic oligonucleotide
gctgtaaaggcgtctactttgcatgatcttttgggaacaccattgcatcaaatttacatg

SEQ ID NO: 416546 - DNA, 55 bp, Artificial
  Synthetic oligonucleotide
gctgtaacaattggcgcttctaagaatgaaactaaaccagtagagactaaagtcg

SEQ ID NO: 416547 - DNA, 55 bp, Artificial
  Synthetic oligonucleotide
gctgtaacatcttatgtggatactgacatgcttgctaatggggaacaaccaatgg

SEQ ID NO: 416548 - DNA, 55 bp, Artificial
  Synthetic oligonucleotide
gctgtaaccagtgtgctctctaatgctcctaatgagatatttagaactagtgcct

SEQ ID NO: 416549 - DNA, 58 bp, Artificial
  Synthetic oligonucleotide
gctgtaactattgggttgtagctgcttatgcagtgcatgatgtatatgaaagctcaaa

SEQ ID NO: 416550 - DNA, 55 bp, Artificial
  Synthetic oligonucleotide
gctgtaagcaaggttggtcagagaaggatattgaagaaaggttggtgttcttcgc

SEQ ID NO: 416551 - DNA, 59 bp, Artificial
  Synthetic oligonucleotide
gctgtaaggtcgtccagattcggaaggttagaaaacacttgtgcagtcccagagctctc

SEQ ID NO: 416552 - DNA, 58 bp, Artificial
  Synthetic oligonucleotide
gctgtaataaatttggatcacctcctcaagtacacaccggatcaagtaacactttcaa

SEQ ID NO: 416553 - DNA, 60 bp, Artificial
  Synthetic oligonucleotide
gctgtaatacaagttggtggctctaatgtgttagacataacagcagatccaacgactaat

SEQ ID NO: 416554 - DNA, 60 bp, Artificial
  Synthetic oligonucleotide
gctgtaatccagtgactgttgatggagcagacggagtaaaggggttttcatacagatatg

SEQ ID NO: 416555 - DNA, 60 bp, Artificial
  Synthetic oligonucleotide
gctgtaatccatcagactgccctggggtgggtacaggctgtacagcatgtgggctttatc

SEQ ID NO: 416556 - DNA, 54 bp, Artificial
  Synthetic oligonucleotide
gctgtacaaatgaatgaagaaggtccattaaacccaggagtaaacccatttagg

SEQ ID NO: 416557 - DNA, 55 bp, Artificial
  Synthetic oligonucleotide
gctgtacaaggatccctctattctaaatggaggtggatatcgcttagagccacgt

SEQ ID NO: 416558 - DNA, 60 bp, Artificial
  Synthetic oligonucleotide
gctgtacaatacctcaatgccggtgggactcgtgtggatgcattcaggatcatgggtgta

SEQ ID NO: 416559 - DNA, 57 bp, Artificial
  Synthetic oligonucleotide
gctgtacaccataaggcaagaaatggccagtaggggtttatgggattcctttcgtca

SEQ ID NO: 416560 - DNA, 56 bp, Artificial
  Synthetic oligonucleotide
gctgtacacctttggactcaggtctagatgaccacataggtaattgtgtaccccca

SEQ ID NO: 416561 - DNA, 55 bp, Artificial
  Synthetic oligonucleotide
gctgtacactgcctgtgcaacccgagaaaggagactgaactctacgcctcccgcc

SEQ ID NO: 416562 - DNA, 55 bp, Artificial
  Synthetic oligonucleotide
gctgtacagattcagttcctctcaatacatcgtacaatacatgatcaactgccct

SEQ ID NO: 416563 - DNA, 55 bp, Artificial
  Synthetic oligonucleotide
gctgtacagctggatggcctactgtaagagaaagaataagacaagctgagccagc

SEQ ID NO: 416564 - DNA, 51 bp, Artificial
  Synthetic oligonucleotide
gctgtacatgcggcacgtaaatgaggcaggccaaggcccgatcaaaagtac

SEQ ID NO: 416565 - DNA, 58 bp, Artificial
  Synthetic oligonucleotide
gctgtacatggatgaatggcaccgggttcaccaagacgtgtgggggccctccgtgtaa

SEQ ID NO: 416566 - DNA, 60 bp, Artificial
  Synthetic oligonucleotide
gctgtacatggatgaatggcactgggttcaccaagacatgcgggggccccccctgtaaca

SEQ ID NO: 416567 - DNA, 55 bp, Artificial
  Synthetic oligonucleotide
gctgtacattctgatttcgcggattctcctagttttaccttgagtataggatcgg

SEQ ID NO: 416568 - DNA, 55 bp, Artificial
  Synthetic oligonucleotide
gctgtaccaatggactctatgcttaggcataacaactggagtctagtgattatac

SEQ ID NO: 416569 - DNA, 55 bp, Artificial
  Synthetic oligonucleotide
gctgtaccaggggagggatatgggaggagctggtggggaacgccctcataccttc

SEQ ID NO: 416570 - DNA, 60 bp, Artificial
  Synthetic oligonucleotide
gctgtaccccacagtagacctggcagatgaggctagatgttccccactggcgacagtgtt

SEQ ID NO: 416571 - DNA, 55 bp, Artificial
  Synthetic oligonucleotide
gctgtacctgcttggatacgctcccagacatctttaagtgaagcaactgctgagc

SEQ ID NO: 416572 - DNA, 55 bp, Artificial
  Synthetic oligonucleotide
gctgtacgcggggcgaggcagaggtttccttctatattgtaagtgaaggcactgc

SEQ ID NO: 416573 - DNA, 60 bp, Artificial
  Synthetic oligonucleotide
gctgtactggacgtagatttctaatagattactgcaacagtggctacgtgacaaactcat

SEQ ID NO: 416574 - DNA, 55 bp, Artificial
  Synthetic oligonucleotide
gctgtacttttagctcggttagctggcggttctacaattgaacaagcattaggta

SEQ ID NO: 416575 - DNA, 59 bp, Artificial
  Synthetic oligonucleotide
gctgtagaaagatacctaagagatcaacagctcctaaggatttaaagttgctctggaaa

SEQ ID NO: 416576 - DNA, 60 bp, Artificial
  Synthetic oligonucleotide
gctgtagaagctctctatcggaggattacttccttggtattttggaagaatgctacagaa

SEQ ID NO: 416577 - DNA, 55 bp, Artificial
  Synthetic oligonucleotide
gctgtagaatcaaaaggggagcgtgggtgttgtcacgttcacacggcaatttgga

SEQ ID NO: 416578 - DNA, 60 bp, Artificial
  Synthetic oligonucleotide
gctgtagaccctaggactaaggtcaatatgaccgcataggtaattatgtggacctaatga

SEQ ID NO: 416579 - DNA, 59 bp, Artificial
  Synthetic oligonucleotide
gctgtagagtcgaggtacgagattagtctggctaggttgatcattatggcactaactac

SEQ ID NO: 416580 - DNA, 60 bp, Artificial
  Synthetic oligonucleotide
gctgtagcagcacatagtttacaggtagtgctgctacaacgctgctgctctcgcctagcc

SEQ ID NO: 416581 - DNA, 57 bp, Artificial
  Synthetic oligonucleotide
gctgtagcataatgggcttttgtccattttttgtatatggaccctggttgggtccag

SEQ ID NO: 416582 - DNA, 53 bp, Artificial
  Synthetic oligonucleotide
gctgtagcataccatcgcgatctctcggcagtggccagggtcttgcgttttgg

SEQ ID NO: 416583 - DNA, 60 bp, Artificial
  Synthetic oligonucleotide
gctgtagcggcattatttccgaatgcgcagccatttgaacaccatgcaacagtaggactc

SEQ ID NO: 416584 - DNA, 55 bp, Artificial
  Synthetic oligonucleotide
gctgtagcgtattaccggggtcttgacgtgtccgtcataccaacaagtggagacg

SEQ ID NO: 416585 - DNA, 60 bp, Artificial
  Synthetic oligonucleotide
gctgtaggcatcatttatctggcttatactcttttcctgaaggactgcattcttgtctgg

SEQ ID NO: 416586 - DNA, 55 bp, Artificial
  Synthetic oligonucleotide
gctgtaggcgatctcttcccgtcgattaaggaaaggctcattagcggtgggtttg

SEQ ID NO: 416587 - DNA, 50 bp, Artificial
  Synthetic oligonucleotide
gctgtaggtgagtgtggcttgagcattaatggagggattccggtcatgca

SEQ ID NO: 416588 - DNA, 51 bp, Artificial
  Synthetic oligonucleotide
gctgtagtacttggtgcttattagaggctgcttgttctgatgatagtgacc

SEQ ID NO: 416589 - DNA, 55 bp, Artificial
  Synthetic oligonucleotide
gctgtagtcagtctatcaaatggggtcagtgttttaaccagcaaagtgttagatc

SEQ ID NO: 416590 - DNA, 55 bp, Artificial
  Synthetic oligonucleotide
gctgtagtccagaaccttgttttaacacttagtgtgactgtttgcatctcaggaa

SEQ ID NO: 416591 - DNA, 55 bp, Artificial
  Synthetic oligonucleotide
gctgtatactttcgggcttaggtccaggtgaccacataggtagttgtgtgggcct

SEQ ID NO: 416592 - DNA, 57 bp, Artificial
  Synthetic oligonucleotide
gctgtatcccattgggatcacatgtacatcggaatggcagggaaacgtcccttctac

SEQ ID NO: 416593 - DNA, 59 bp, Artificial
  Synthetic oligonucleotide
gctgtatcccgttggtgctgcgccccaatactccttctggaagaaatccatggaccact

SEQ ID NO: 416594 - DNA, 52 bp, Artificial
  Synthetic oligonucleotide
gctgtatccctcagcttccctcagattactctttggcaacgacccctcgtca

SEQ ID NO: 416595 - DNA, 55 bp, Artificial
  Synthetic oligonucleotide
gctgtatcggcggcaatttccactggggcgcaggcagccctccaagaccaggttt

SEQ ID NO: 416596 - DNA, 55 bp, Artificial
  Synthetic oligonucleotide
gctgtatctcctttcgggtgggtacagggccatgcgtgacttctggcgcagacag

SEQ ID NO: 416597 - DNA, 58 bp, Artificial
  Synthetic oligonucleotide
gctgtatgacaagctgcctccaccgtccccccaccatggtcctccggttaaggctgta

SEQ ID NO: 416598 - DNA, 55 bp, Artificial
  Synthetic oligonucleotide
gctgtatgaggcagctcattcagatgttcgtgagtctctagccaggtttatccct

SEQ ID NO: 416599 - DNA, 58 bp, Artificial
  Synthetic oligonucleotide
gctgtatggctgggcaagcctctataaacaacgttccagtgaacacgcgcagtatgaa

SEQ ID NO: 416600 - DNA, 55 bp, Artificial
  Synthetic oligonucleotide
gctgtatggtattctatgggccaagtgacaccggaaagtcattgttttgtatgag

SEQ ID NO: 416601 - DNA, 55 bp, Artificial
  Synthetic oligonucleotide
gctgtatgtatgaatggagtggaaacgcatgggtctttgggttacgacataatat

SEQ ID NO: 416602 - DNA, 54 bp, Artificial
  Synthetic oligonucleotide
gctgtattacatcttgtatgtaaacgttaaaagaagttacacttagccgttttc

SEQ ID NO: 416603 - DNA, 60 bp, Artificial
  Synthetic oligonucleotide
gctgtattgaggtgcctgaattttgcaggaacaaattgacacttagcgtgtccgtagctc

SEQ ID NO: 416604 - DNA, 60 bp, Artificial
  Synthetic oligonucleotide
gctgtattggattcaggaactaaggaatagtgctattagcttgtatgataccaccgcaat

SEQ ID NO: 416605 - DNA, 55 bp, Artificial
  Synthetic oligonucleotide
gctgtcaaatttgtacacggagatcgtgtatactccaatagcaactcctgatggc

SEQ ID NO: 416606 - DNA, 55 bp, Artificial
  Synthetic oligonucleotide
gctgtcaacaagaagttcttacatggtgagttaagcaaatctagtgtcttcaagc

SEQ ID NO: 416607 - DNA, 55 bp, Artificial
  Synthetic oligonucleotide
gctgtcaagaagttaactgccatcaaacttacatatggttatctcaatggtgtac

SEQ ID NO: 416608 - DNA, 58 bp, Artificial
  Synthetic oligonucleotide
gctgtcaagcctcggactcaacgctgtggcgtattaccggggccttgatgtgtctgtc

SEQ ID NO: 416609 - DNA, 55 bp, Artificial
  Synthetic oligonucleotide
gctgtcaagcgttcatcaattgttaaacgggttaatgggaaacgtcatcattcat

SEQ ID NO: 416610 - DNA, 55 bp, Artificial
  Synthetic oligonucleotide
gctgtcaagtatgcacacactgcaacttgcctagctgagattgatgcattgctgg

SEQ ID NO: 416611 - DNA, 55 bp, Artificial
  Synthetic oligonucleotide
gctgtcacaacaggaacattcgcttattggtatatgagaagaaatgctgctagtg

SEQ ID NO: 416612 - DNA, 60 bp, Artificial
  Synthetic oligonucleotide
gctgtcacacttcggctgggttcggaggtgcgttacccgtgacctctgcgcaagctagtg

SEQ ID NO: 416613 - DNA, 60 bp, Artificial
  Synthetic oligonucleotide
gctgtcacgatctagttgtggcaggtagtgtagcattcaccaaacgcgggggtttgtcat

SEQ ID NO: 416614 - DNA, 60 bp, Artificial
  Synthetic oligonucleotide
gctgtcactctaggctctttcttgaaaactctgatctggattctgtcccatgataagaac

SEQ ID NO: 416615 - DNA, 55 bp, Artificial
  Synthetic oligonucleotide
gctgtcacttggctgcatgcccagtgcacttacgcagtatatcttataaactttt

SEQ ID NO: 416616 - DNA, 57 bp, Artificial
  Synthetic oligonucleotide
gctgtcagagtccagtgcagcttcaaacgaatttagatggatggtggcgctgacgag

SEQ ID NO: 416617 - DNA, 55 bp, Artificial
  Synthetic oligonucleotide
gctgtcagcatacaaatttgacttattgcagaggatgtgctctataccacgtatg

SEQ ID NO: 416618 - DNA, 55 bp, Artificial
  Synthetic oligonucleotide
gctgtcagggtctcacagccccacgcgtgcaaattctgctctcagaagagactag

SEQ ID NO: 416619 - DNA, 58 bp, Artificial
  Synthetic oligonucleotide
gctgtcagtcattgataagttaaagcgtttagtgataatcttagccattttaacaggg

SEQ ID NO: 416620 - DNA, 55 bp, Artificial
  Synthetic oligonucleotide
gctgtcatcaacagacacggacacctgaagattatgcttatcctccaaagccagg

SEQ ID NO: 416621 - DNA, 55 bp, Artificial
  Synthetic oligonucleotide
gctgtcatcgatgtcgtccagacttggaagttcaggtaggctttgtggagaccca

SEQ ID NO: 416622 - DNA, 55 bp, Artificial
  Synthetic oligonucleotide
gctgtcatcttgaagcatagatctggttcaggccataaaaggtctttgcccaggt

SEQ ID NO: 416623 - DNA, 59 bp, Artificial
  Synthetic oligonucleotide
gctgtcatggaacgttacggttcctttcataatccttcgcttgccatccagtgtatgta

SEQ ID NO: 416624 - DNA, 55 bp, Artificial
  Synthetic oligonucleotide
gctgtcatggagagtgaaggaagagcaatgcaattcaagtacatgtgtaatgggg

SEQ ID NO: 416625 - DNA, 55 bp, Artificial
  Synthetic oligonucleotide
gctgtcattcgatcctgccaagcagaccatggccgctggcccgcatagtcttagt

SEQ ID NO: 416626 - DNA, 60 bp, Artificial
  Synthetic oligonucleotide
gctgtccaatgggagatatccattatgggcgtcatttaaagacgctgaagagggtaattg

SEQ ID NO: 416627 - DNA, 60 bp, Artificial
  Synthetic oligonucleotide
gctgtccaccgtaagaaggccggggcactgcgaacacgcatgctccggtcgcgcggatgg

SEQ ID NO: 416628 - DNA, 55 bp, Artificial
  Synthetic oligonucleotide
gctgtccactacgcagtggcagatccttccgtgctctttcacgaccctgccagcc

SEQ ID NO: 416629 - DNA, 60 bp, Artificial
  Synthetic oligonucleotide
gctgtccagacccttgctaatgcaactgctgcacagcaggatgtgttagaggcaacctat

SEQ ID NO: 416630 - DNA, 50 bp, Artificial
  Synthetic oligonucleotide
gctgtccccacgctggacagcacactgagggttggcgtgcaagccgatcc

SEQ ID NO: 416631 - DNA, 60 bp, Artificial
  Synthetic oligonucleotide
gctgtccccactgccccaggcatgtcatacaaaagacgtgcttggacgggtcgtccaatg

SEQ ID NO: 416632 - DNA, 55 bp, Artificial
  Synthetic oligonucleotide
gctgtccctgcagatctcttgtattgtcaggtgccaaactctctcacttccacag

SEQ ID NO: 416633 - DNA, 55 bp, Artificial
  Synthetic oligonucleotide
gctgtccgataatcagaccgcccaacaacaataagctcatatatgatgcatctcc

SEQ ID NO: 416634 - DNA, 60 bp, Artificial
  Synthetic oligonucleotide
gctgtccgatgcttatctcctctagctgctcattgtgccgataggactctccgtcgtgac

SEQ ID NO: 416635 - DNA, 60 bp, Artificial
  Synthetic oligonucleotide
gctgtccgccccgtctcttaaagccacatgcaccgctcgccatgactcccctggtactga

SEQ ID NO: 416636 - DNA, 60 bp, Artificial
  Synthetic oligonucleotide
gctgtccgcggctgggataaatgttggaccgatatcgccagactatactcaacatatggc

SEQ ID NO: 416637 - DNA, 55 bp, Artificial
  Synthetic oligonucleotide
gctgtccgctttgtaccgggcagacaaagtcaccgctaacaggtttagcgggcac

SEQ ID NO: 416638 - DNA, 60 bp, Artificial
  Synthetic oligonucleotide
gctgtcctaaatgtcatataagaggggaagcaatacatggccaggtagactgcagtccag

SEQ ID NO: 416639 - DNA, 60 bp, Artificial
  Synthetic oligonucleotide
gctgtcctcattccgtcaatatgaccctcttctttcagcaaagtgtatgacaatatgttg

SEQ ID NO: 416640 - DNA, 60 bp, Artificial
  Synthetic oligonucleotide
gctgtcctcgtcatcagaagcacttacatggaagattgggatgtggggttacaaatgttg

SEQ ID NO: 416641 - DNA, 53 bp, Artificial
  Synthetic oligonucleotide
gctgtcctcgtgatcatcgcactaatctatgctagttctttcctttctagtgg

SEQ ID NO: 416642 - DNA, 52 bp, Artificial
  Synthetic oligonucleotide
gctgtcctggtccgcaaactaccccgtgaacaacctctttacaggtctcttt

SEQ ID NO: 416643 - DNA, 58 bp, Artificial
  Synthetic oligonucleotide
gctgtcctgtccaacccgggcctcgctttgtcatactactgggcgtacgcctattcca

SEQ ID NO: 416644 - DNA, 55 bp, Artificial
  Synthetic oligonucleotide
gctgtcctgttggtgaagccccttccccatacaattcgagatttgaatcggttgc

SEQ ID NO: 416645 - DNA, 58 bp, Artificial
  Synthetic oligonucleotide
gctgtccttgaagacatacagaggtggaaaattcctgccattaaggaagggttgccac

SEQ ID NO: 416646 - DNA, 59 bp, Artificial
  Synthetic oligonucleotide
gctgtcgaaaaattgacagtgttagagaacacctatatagggaaatctctaatgggcga

SEQ ID NO: 416647 - DNA, 55 bp, Artificial
  Synthetic oligonucleotide
gctgtcgaacgcaagttagttaagtatgcaaaaggtaaaccgttggaagcagatt

SEQ ID NO: 416648 - DNA, 58 bp, Artificial
  Synthetic oligonucleotide
gctgtcgacaagaggtgcaagtgcgtgaaagtcactaatcggcctactggcttggggc

SEQ ID NO: 416649 - DNA, 55 bp, Artificial
  Synthetic oligonucleotide
gctgtcgatatatcaacttaggtgttattgccaaagaccgcttttacttcctcac

SEQ ID NO: 416650 - DNA, 60 bp, Artificial
  Synthetic oligonucleotide
gctgtcgcaactacacactcctggattccaaagaggaaccgctccattctcaataccagc

SEQ ID NO: 416651 - DNA, 55 bp, Artificial
  Synthetic oligonucleotide
gctgtcgcacagcttagtccgcgattcgaaagtatttctttgtcacctcagcaga

SEQ ID NO: 416652 - DNA, 55 bp, Artificial
  Synthetic oligonucleotide
gctgtcgcatctccaacattggaacagttatagaattccagcagaagaacagcag

SEQ ID NO: 416653 - DNA, 55 bp, Artificial
  Synthetic oligonucleotide
gctgtcgcgcagctcagtccgcggctccagtcaatatcactgtcacctcagcaga

SEQ ID NO: 416654 - DNA, 60 bp, Artificial
  Synthetic oligonucleotide
gctgtcgctccttcaatgacaatgcgttgtataggaatatcaaatagagactttgtggaa

SEQ ID NO: 416655 - DNA, 60 bp, Artificial
  Synthetic oligonucleotide
gctgtcgcttcgccagcgcagtgacgtatcctgctagctgtgcgcggatgccagcgacgt

SEQ ID NO: 416656 - DNA, 55 bp, Artificial
  Synthetic oligonucleotide
gctgtcggcagcggggattaatctagggccaatatctccagactatcaacaacat

SEQ ID NO: 416657 - DNA, 60 bp, Artificial
  Synthetic oligonucleotide
gctgtcggtgtcctcgcacctcactctgcgctggccgctttagaggacactgttgactat

SEQ ID NO: 416658 - DNA, 50 bp, Artificial
  Synthetic oligonucleotide
gctgtcgtatttagtagcacaggtatcggtcaaagatggggaaacccctc

SEQ ID NO: 416659 - DNA, 60 bp, Artificial
  Synthetic oligonucleotide
gctgtcgtgatccaagctgtagagtcattggtattgatagacctgaactgtattcagaat

SEQ ID NO: 416660 - DNA, 50 bp, Artificial
  Synthetic oligonucleotide
gctgtcgtggtgagcatgcctctaaagcgggttatgccacgggggcttcc

SEQ ID NO: 416661 - DNA, 57 bp, Artificial
  Synthetic oligonucleotide
gctgtctaaaaaaggcaatgtaaacctcatatatccaacggtttacaataaagctca

SEQ ID NO: 416662 - DNA, 60 bp, Artificial
  Synthetic oligonucleotide
gctgtctatattcgatgacgcaatggtcgattttcatacagctacgattaagccttgctg

SEQ ID NO: 416663 - DNA, 55 bp, Artificial
  Synthetic oligonucleotide
gctgtctatgtgagtcaataataccctccaatgtttcaaggtcaagtaagacggt

SEQ ID NO: 416664 - DNA, 58 bp, Artificial
  Synthetic oligonucleotide
gctgtctccgtgacctgcggtccacccagggtgcgtacagtgggactcctgttccgaa

SEQ ID NO: 416665 - DNA, 55 bp, Artificial
  Synthetic oligonucleotide
gctgtctcttgtagtcgcggtggctccttatgaggtcgatggagaccggagtcag

SEQ ID NO: 416666 - DNA, 55 bp, Artificial
  Synthetic oligonucleotide
gctgtctgcaaagtggaaattggctacacagggtattggattgccccatgagtac

SEQ ID NO: 416667 - DNA, 58 bp, Artificial
  Synthetic oligonucleotide
gctgtctggagatacctctacagggtgtgtgataagaaaggagttaacccctcggaca

SEQ ID NO: 416668 - DNA, 60 bp, Artificial
  Synthetic oligonucleotide
gctgtctgttgtcctcctctagcagatcgtccgtcgatctggaaagtaccccactcaaga

SEQ ID NO: 416669 - DNA, 59 bp, Artificial
  Synthetic oligonucleotide
gctgtcttaaatacggaagtaggccccgccacgtgatttaacacgtgtgcatgcgtcac

SEQ ID NO: 416670 - DNA, 56 bp, Artificial
  Synthetic oligonucleotide
gctgtcttagatcctcttattactgctttactaggtacttttgatacccgtaatag

SEQ ID NO: 416671 - DNA, 57 bp, Artificial
  Synthetic oligonucleotide
gctgtcttgatagagggcggattggagggtgacgaagattgcattcttgagtgtcca

SEQ ID NO: 416672 - DNA, 53 bp, Artificial
  Synthetic oligonucleotide
gctgtgaacctgtatggatctatttatttggacagcgccattgtgggaagtcg

SEQ ID NO: 416673 - DNA, 56 bp, Artificial
  Synthetic oligonucleotide
gctgtgaagtggacggttctaccttatgcgccgagtgttttcgagggtgcgaaggg

SEQ ID NO: 416674 - DNA, 60 bp, Artificial
  Synthetic oligonucleotide
gctgtgacagtacgcttctctccggcaaccgtgagggtgactaagtgagcgagtacctca

SEQ ID NO: 416675 - DNA, 57 bp, Artificial
  Synthetic oligonucleotide
gctgtgactgcgttaagtttcccatgtacatcctcgggctgttgctttccctatctc

SEQ ID NO: 416676 - DNA, 57 bp, Artificial
  Synthetic oligonucleotide
gctgtgacttggggcctcatagttgttgctctgttaattgggttgattttcaaaaag

SEQ ID NO: 416677 - DNA, 60 bp, Artificial
  Synthetic oligonucleotide
gctgtgagagttgaaactatcaaagccatcactgccataggagccaatactagttgatat

SEQ ID NO: 416678 - DNA, 60 bp, Artificial
  Synthetic oligonucleotide
gctgtgagcgctggcttcgctgacaccgttactactctgcaggacaggactcgatccctg

SEQ ID NO: 416679 - DNA, 55 bp, Artificial
  Synthetic oligonucleotide
gctgtgaggactactgcaggtccattatacatagaatggataaacctgccacgga

SEQ ID NO: 416680 - DNA, 52 bp, Artificial
  Synthetic oligonucleotide
gctgtgagtaagttgggggaaaggaacttcttttcgaggaataagcggttcg

SEQ ID NO: 416681 - DNA, 60 bp, Artificial
  Synthetic oligonucleotide
gctgtgagtgatgctaaaatggtgcgatggaaggggaacttttctcccgatctggctgca

SEQ ID NO: 416682 - DNA, 60 bp, Artificial
  Synthetic oligonucleotide
gctgtgataaatgtcagctaaaaggagaagccttgcatggacaagtagattgtagtccag

SEQ ID NO: 416683 - DNA, 60 bp, Artificial
  Synthetic oligonucleotide
gctgtgatactgttgcagagagatggctcttacttgccgcctgcgcatccccgtcccgaa

SEQ ID NO: 416684 - DNA, 55 bp, Artificial
  Synthetic oligonucleotide
gctgtgatgtctaagctaaaagcggttcgtgctatatgcttcggtgattcggagc

SEQ ID NO: 416685 - DNA, 55 bp, Artificial
  Synthetic oligonucleotide
gctgtgattcaggtagtgggtctctagggtctttgtcctatgtacagtgtgtcaa

SEQ ID NO: 416686 - DNA, 60 bp, Artificial
  Synthetic oligonucleotide
gctgtgcaaaagacaagttaaggtatcaaaatagctccgaaaaggaattgctatatagca

SEQ ID NO: 416687 - DNA, 57 bp, Artificial
  Synthetic oligonucleotide
gctgtgcaagagtccttgctacaaatctatgagagtgaatctagcagtctagaacta

SEQ ID NO: 416688 - DNA, 54 bp, Artificial
  Synthetic oligonucleotide
gctgtgcaaggtttttcctccctttcgtctcttgatctttctacctctccaggg

SEQ ID NO: 416689 - DNA, 58 bp, Artificial
  Synthetic oligonucleotide
gctgtgcacaaattttggtttagtatagagacaatttcgtcggcgccaaaccaagcta

SEQ ID NO: 416690 - DNA, 60 bp, Artificial
  Synthetic oligonucleotide
gctgtgcacctcatccggatgaagatataatccgagatgacttactgatttctttagagg

SEQ ID NO: 416691 - DNA, 55 bp, Artificial
  Synthetic oligonucleotide
gctgtgcagcttactggtcttccaggaactattattgaagcacacagctcgtccc

SEQ ID NO: 416692 - DNA, 55 bp, Artificial
  Synthetic oligonucleotide
gctgtgcattagccgtgctaggctcgaccgcaatgtcgtaaacttgtccgccttg

SEQ ID NO: 416693 - DNA, 60 bp, Artificial
  Synthetic oligonucleotide
gctgtgccgagcgtgatagtcatagcttatcaggattttcggttcagcggtcactacaat

SEQ ID NO: 416694 - DNA, 57 bp, Artificial
  Synthetic oligonucleotide
gctgtgcgacttaacttgagactacacaaccttggccgaatctccgaacggtttggc

SEQ ID NO: 416695 - DNA, 56 bp, Artificial
  Synthetic oligonucleotide
gctgtgcgagctatatgtttcggggattctgagcagattgccttctcttctcgtga

SEQ ID NO: 416696 - DNA, 60 bp, Artificial
  Synthetic oligonucleotide
gctgtgcgcggataccacgctgactattacaaacaaagactcatacatgatgtggaaaca

SEQ ID NO: 416697 - DNA, 60 bp, Artificial
  Synthetic oligonucleotide
gctgtgcggtatgacatgagcttatcgtttcacaatgtacctaggtgcaacgagtgctat

SEQ ID NO: 416698 - DNA, 55 bp, Artificial
  Synthetic oligonucleotide
gctgtgcggttcgggatcacatacgccgagatggctccgagattccgcttcgctg

SEQ ID NO: 416699 - DNA, 56 bp, Artificial
  Synthetic oligonucleotide
gctgtgcgtgcgatacttcggcctagacttagattcaggtttgttctccgcaccca

SEQ ID NO: 416700 - DNA, 52 bp, Artificial
  Synthetic oligonucleotide
gctgtgcgtgtttaagactccgacgatcgctcgcgccagcaagtgggtcgat

SEQ ID NO: 416701 - DNA, 56 bp, Artificial
  Synthetic oligonucleotide
gctgtgctataggcatagtggaaaagatattggtggcaacaggcatgataggagcc

SEQ ID NO: 416702 - DNA, 54 bp, Artificial
  Synthetic oligonucleotide
gctgtgctcaggtcttctatcgttatttgtggtttcggtcttaggaggcgtttg

SEQ ID NO: 416703 - DNA, 60 bp, Artificial
  Synthetic oligonucleotide
gctgtgcttaagggacctagtggacgtgttggactcagtcaggtttatagacctgataca

SEQ ID NO: 416704 - DNA, 60 bp, Artificial
  Synthetic oligonucleotide
gctgtgcttctgaaggcgctgcaaccgtcgccgaggtgcaaggtaagacgtttgccagtg

SEQ ID NO: 416705 - DNA, 55 bp, Artificial
  Synthetic oligonucleotide
gctgtgcttgctatcaacacaagtaagttcccaaacatgtacatcccagttggac

SEQ ID NO: 416706 - DNA, 54 bp, Artificial
  Synthetic oligonucleotide
gctgtgcttgtaaaacttggtctaaatggattcaccttcaaactaccgttaact

SEQ ID NO: 416707 - DNA, 58 bp, Artificial
  Synthetic oligonucleotide
gctgtggacagcactagaggcacgaattttacaatttctgtcccgaaaaagaacatgg

SEQ ID NO: 416708 - DNA, 58 bp, Artificial
  Synthetic oligonucleotide
gctgtggaccaactcggcaataacccttaacatatgattctgacaaaaaccacaacgc

SEQ ID NO: 416709 - DNA, 55 bp, Artificial
  Synthetic oligonucleotide
gctgtggacggtacgcaggaggcgaccgtaccgatcagtgatttaccggcgattg

SEQ ID NO: 416710 - DNA, 55 bp, Artificial
  Synthetic oligonucleotide
gctgtggagctagtagatgaacaaggggttaacctagagctcacactggtaacgc

SEQ ID NO: 416711 - DNA, 54 bp, Artificial
  Synthetic oligonucleotide
gctgtggagtgacgttaaatactaagcgatacgccgatgaattgggaggtcact

SEQ ID NO: 416712 - DNA, 60 bp, Artificial
  Synthetic oligonucleotide
gctgtggatgctgacgatagtcattttgtcagcatagagctggagtaaaaaactaccttg

SEQ ID NO: 416713 - DNA, 55 bp, Artificial
  Synthetic oligonucleotide
gctgtggatttactttggggatcggaggtgcttggtttcaagcttatttgaatgg

SEQ ID NO: 416714 - DNA, 53 bp, Artificial
  Synthetic oligonucleotide
gctgtggcagtaacagatggaccagcggacaataaggctgaccacagaatata

SEQ ID NO: 416715 - DNA, 55 bp, Artificial
  Synthetic oligonucleotide
gctgtggcagttgtcctctttgttctaactcggagcactttaccacaagttggag

SEQ ID NO: 416716 - DNA, 58 bp, Artificial
  Synthetic oligonucleotide
gctgtggccagtggatatgactttgaaagggaaggatactccctagtcggaattgacc

SEQ ID NO: 416717 - DNA, 60 bp, Artificial
  Synthetic oligonucleotide
gctgtggccccggcgcctgatactgccccggtccctgatgttgattcgcgtggtgctata

SEQ ID NO: 416718 - DNA, 53 bp, Artificial
  Synthetic oligonucleotide
gctgtggcccctagcattgaggaacaagatggaatggcggagccagactcagt

SEQ ID NO: 416719 - DNA, 60 bp, Artificial
  Synthetic oligonucleotide
gctgtggcgcaggacgcagaaggaaatcttccaactgctggtgacctaatgaaacgtgca

SEQ ID NO: 416720 - DNA, 55 bp, Artificial
  Synthetic oligonucleotide
gctgtggctatatgagcaacagaggataaaccatatcatcccaccgatttgtgac

SEQ ID NO: 416721 - DNA, 60 bp, Artificial
  Synthetic oligonucleotide
gctgtggctgacaaagaagggaagctcatacccaaagcttagcaagtcctatgtgaacaa

SEQ ID NO: 416722 - DNA, 55 bp, Artificial
  Synthetic oligonucleotide
gctgtgggactttccaacagagactgctgacactgcggggactttccacggtggg

SEQ ID NO: 416723 - DNA, 55 bp, Artificial
  Synthetic oligonucleotide
gctgtgggcacatatactatgactaaggtgcctgtctctctcgcaatgcggatcg

SEQ ID NO: 416724 - DNA, 55 bp, Artificial
  Synthetic oligonucleotide
gctgtggtacgagaattttaagaaaactaaccctccagctgctacccaatggctg

SEQ ID NO: 416725 - DNA, 60 bp, Artificial
  Synthetic oligonucleotide
gctgtggtggagcgattgaatgccttagcctcggttgacccccgccagcataactggaca

SEQ ID NO: 416726 - DNA, 55 bp, Artificial
  Synthetic oligonucleotide
gctgtggtggttcggccgtttttgtctcgtgtgcaaaccgagattcttattaatt

SEQ ID NO: 416727 - DNA, 60 bp, Artificial
  Synthetic oligonucleotide
gctgtgtaagcccagtgaatgtgccccagctaattacaagaaatgttgtccactcatatg

SEQ ID NO: 416728 - DNA, 60 bp, Artificial
  Synthetic oligonucleotide
gctgtgtacaccatgtctggttggtctttagaagggactaatcgattgtgtatgagtaat

SEQ ID NO: 416729 - DNA, 52 bp, Artificial
  Synthetic oligonucleotide
gctgtgtagactactcagaggagccaaagcactaacagaagtagtaccattg

SEQ ID NO: 416730 - DNA, 58 bp, Artificial
  Synthetic oligonucleotide
gctgtgtatgctgtgaatgatgacttaattgaaagctctaaacaattgttattgcagc

SEQ ID NO: 416731 - DNA, 55 bp, Artificial
  Synthetic oligonucleotide
gctgtgtcaaacggaactaagataaacacactaactgagagaggggtagaggttg

SEQ ID NO: 416732 - DNA, 59 bp, Artificial
  Synthetic oligonucleotide
gctgtgtcggattacaattattgttaatacattcatggaccgtagtccttacaagctcg

SEQ ID NO: 416733 - DNA, 60 bp, Artificial
  Synthetic oligonucleotide
gctgtgtcttggaaattactatgatgtacgacccgctatgcatggacgtgcgctttctaa

SEQ ID NO: 416734 - DNA, 60 bp, Artificial
  Synthetic oligonucleotide
gctgtgtgtaacgtcatcgagccagacaaggtcagactctgcctgttctcgggtgcagtt

SEQ ID NO: 416735 - DNA, 55 bp, Artificial
  Synthetic oligonucleotide
gctgtgtgtagcaagggaaaaggacaacctcgccaactgcctggactcttatgcc

SEQ ID NO: 416736 - DNA, 55 bp, Artificial
  Synthetic oligonucleotide
gctgtgtgtgcactaaaacgaaagtttgcagcatgctcagaaagtgctgtagagg

SEQ ID NO: 416737 - DNA, 54 bp, Artificial
  Synthetic oligonucleotide
gctgtgttagacggccgcaagagttggggttcttccttagcgtcctccttaacg

SEQ ID NO: 416738 - DNA, 57 bp, Artificial
  Synthetic oligonucleotide
gctgtgttaggaagggcctgctgtggtgttgcaaaattttgaaatacaggggatttc

SEQ ID NO: 416739 - DNA, 55 bp, Artificial
  Synthetic oligonucleotide
gctgtgttcaccgatgagaacaagtggaagtcagcacgcgaagcggtcgaagatg

SEQ ID NO: 416740 - DNA, 60 bp, Artificial
  Synthetic oligonucleotide
gctgtgttccctgtgatggggaacactgggatgcagctaaaccctgtcccactgcagaca

SEQ ID NO: 416741 - DNA, 51 bp, Artificial
  Synthetic oligonucleotide
gctgtgttcgcctgtgtcacatccgatggttggtacgcgattgatgacgag

SEQ ID NO: 416742 - DNA, 55 bp, Artificial
  Synthetic oligonucleotide
gctgtgttggacatcacacctgccagtgagaatgtggttattagtagtacaaact

SEQ ID NO: 416743 - DNA, 60 bp, Artificial
  Synthetic oligonucleotide
gctgtgttgtatgccaagaacattgtggtgaagcgttgggtaggacctgatctggggccc

SEQ ID NO: 416744 - DNA, 50 bp, Artificial
  Synthetic oligonucleotide
gctgtgtttgatctgtctagaatggtccagtgggcctatgatcacgatat

SEQ ID NO: 416745 - DNA, 60 bp, Artificial
  Synthetic oligonucleotide
gctgtgttttgtctcagcctgtaaggatttttgcttaagaatggcacgtgacactaatct

SEQ ID NO: 416746 - DNA, 55 bp, Artificial
  Synthetic oligonucleotide
gctgttaattggccagttgggacaggaagaggtggcttgccaacgtctacttgga

SEQ ID NO: 416747 - DNA, 60 bp, Artificial
  Synthetic oligonucleotide
gctgttacacactttccaagcatatggctcctcagcttaggacactatatcgaaacttat

SEQ ID NO: 416748 - DNA, 55 bp, Artificial
  Synthetic oligonucleotide
gctgttaccataggcgaggattttacaaacctctcttttagaggatcaatctctg

SEQ ID NO: 416749 - DNA, 60 bp, Artificial
  Synthetic oligonucleotide
gctgttacgaaagtttacgatacatccttatatattcatagcactgaatacctgaagatg

SEQ ID NO: 416750 - DNA, 55 bp, Artificial
  Synthetic oligonucleotide
gctgttacgatgaatttgagggatatttccttaaatgttaaggactgtaggatcg

SEQ ID NO: 416751 - DNA, 60 bp, Artificial
  Synthetic oligonucleotide
gctgttactataatggctcgatatgctcagaacgataagctgtttgaggatatgatggct

SEQ ID NO: 416752 - DNA, 60 bp, Artificial
  Synthetic oligonucleotide
gctgttagacattttcctaggatatggctacatggcttaggacaacatatctatgaaact

SEQ ID NO: 416753 - DNA, 55 bp, Artificial
  Synthetic oligonucleotide
gctgttagagctattcttaacatacctgtacggataagacagggcttggaaaggg

SEQ ID NO: 416754 - DNA, 60 bp, Artificial
  Synthetic oligonucleotide
gctgttagaggaacttaagcaggaagctgttagacattatcctaggcagtggctccatgg

SEQ ID NO: 416755 - DNA, 54 bp, Artificial
  Synthetic oligonucleotide
gctgttagccctggggttgtccggtatcaattcaccgctggtgttcccgggtcc

SEQ ID NO: 416756 - DNA, 55 bp, Artificial
  Synthetic oligonucleotide
gctgttaggctcctgatacaagatttaagtgagctcgggtttgaaacatgccagt

SEQ ID NO: 416757 - DNA, 55 bp, Artificial
  Synthetic oligonucleotide
gctgttagtttgcttaatgccacagctataacagtagcagaggggacagataggg

SEQ ID NO: 416758 - DNA, 55 bp, Artificial
  Synthetic oligonucleotide
gctgttatacaagtgggcggtgcgaacatccttgatatcacagctgatccaacga

SEQ ID NO: 416759 - DNA, 55 bp, Artificial
  Synthetic oligonucleotide
gctgttcaagcggcccaaatcgcaagcgtctaacatttccttgcgtgcgcacccg

SEQ ID NO: 416760 - DNA, 55 bp, Artificial
  Synthetic oligonucleotide
gctgttcaaggcataccacggtgagagtgtggagccatggatatctcaggggtgc

SEQ ID NO: 416761 - DNA, 55 bp, Artificial
  Synthetic oligonucleotide
gctgttcacgaccttccatggggcttcatcccgaaccatcgccacacctgtggga

SEQ ID NO: 416762 - DNA, 55 bp, Artificial
  Synthetic oligonucleotide
gctgttcagaagccctgatgttccacggggctgtgaaggcccatgtaaggtccag

SEQ ID NO: 416763 - DNA, 55 bp, Artificial
  Synthetic oligonucleotide
gctgttcatgcaaagtcttacagcaacatctttctaacattggctccaaccgagc

SEQ ID NO: 416764 - DNA, 56 bp, Artificial
  Synthetic oligonucleotide
gctgttccaagcccgcaagtacgctgggttcgaacggctgtggttcccctactctc

SEQ ID NO: 416765 - DNA, 55 bp, Artificial
  Synthetic oligonucleotide
gctgttccctctgttcttataaactcatatccccatgtaagaaatagaattggcc

SEQ ID NO: 416766 - DNA, 59 bp, Artificial
  Synthetic oligonucleotide
gctgttccgttggtgcctgttgtgaatcgtcgccgtacgtctaggattgatggccgttc

SEQ ID NO: 416767 - DNA, 55 bp, Artificial
  Synthetic oligonucleotide
gctgttcctgctgacttgttgtattgccagatcaccaattctctcacttcgactc

SEQ ID NO: 416768 - DNA, 60 bp, Artificial
  Synthetic oligonucleotide
gctgttcgatgtcctacacatggacaggcgccctgattacaccatgcgccgcggaggaaa

SEQ ID NO: 416769 - DNA, 55 bp, Artificial
  Synthetic oligonucleotide
gctgttcgtgctatatgcttcggtgattcggaacaaattgctttcgggtcgaggg

SEQ ID NO: 416770 - DNA, 54 bp, Artificial
  Synthetic oligonucleotide
gctgttcgttccctgcccattgtgcggatctgatgttgcggttccgctactcag

SEQ ID NO: 416771 - DNA, 50 bp, Artificial
  Synthetic oligonucleotide
gctgttctaacgtggccgagacttgttttaatcagagcgacttcgactat

SEQ ID NO: 416772 - DNA, 52 bp, Artificial
  Synthetic oligonucleotide
gctgttctatgagtctaagtctcagagaagtatttgccagcaagccgcagac

SEQ ID NO: 416773 - DNA, 60 bp, Artificial
  Synthetic oligonucleotide
gctgttctctgcaaggctgtttacatggcaacaactactctcatgtcacacaaacaaagg

SEQ ID NO: 416774 - DNA, 50 bp, Artificial
  Synthetic oligonucleotide
gctgttctgttataacacccaacactggatgcttgtctttaaggttctca

SEQ ID NO: 416775 - DNA, 58 bp, Artificial
  Synthetic oligonucleotide
gctgttgaaatttatgattggcgatgatctggttaccgttcagggtgccctcgccccg

SEQ ID NO: 416776 - DNA, 58 bp, Artificial
  Synthetic oligonucleotide
gctgttgaacacgaaagcattcttgagaagcggaggaggagtagagaggttctgagag

SEQ ID NO: 416777 - DNA, 55 bp, Artificial
  Synthetic oligonucleotide
gctgttgaactatgtgtgcctgggttccatggttgggctacagctgccctacttg

SEQ ID NO: 416778 - DNA, 57 bp, Artificial
  Synthetic oligonucleotide
gctgttgaactcaaaatgttgactcttttcggtaacaagaggccttctaagtctgcc

SEQ ID NO: 416779 - DNA, 60 bp, Artificial
  Synthetic oligonucleotide
gctgttgaagttcatgattggtgatgaactggttactgttcagggtgctctcgccccgtt

SEQ ID NO: 416780 - DNA, 55 bp, Artificial
  Synthetic oligonucleotide
gctgttgagttggtagatgaacaacaagtcaatcttgaactcactcttgttactc

SEQ ID NO: 416781 - DNA, 60 bp, Artificial
  Synthetic oligonucleotide
gctgttgatatcacagatcatagtttaagactcaggaacagaactatcgagaatgggaga

SEQ ID NO: 416782 - DNA, 59 bp, Artificial
  Synthetic oligonucleotide
gctgttgatgttgtacgacaacttatgtctatgtacaatattccgattgaaaatgttcg

SEQ ID NO: 416783 - DNA, 58 bp, Artificial
  Synthetic oligonucleotide
gctgttgatttatattcttccgtcctttctcactactgaaatcaagtacaagcgaaat

SEQ ID NO: 416784 - DNA, 60 bp, Artificial
  Synthetic oligonucleotide
gctgttgcaactacacactcctggatacctaagaggaaccgctctatcctcaacacgagc

SEQ ID NO: 416785 - DNA, 55 bp, Artificial
  Synthetic oligonucleotide
gctgttgccaccatcaaataaacgccattttaccatccaccacattggtgtgcac

SEQ ID NO: 416786 - DNA, 55 bp, Artificial
  Synthetic oligonucleotide
gctgttgccagcggatatgactttgaaagagagggatactccctggttgggattg

SEQ ID NO: 416787 - DNA, 55 bp, Artificial
  Synthetic oligonucleotide
gctgttgcgacatcttatcacatgataatgactcagatccttggggttgaaatca

SEQ ID NO: 416788 - DNA, 55 bp, Artificial
  Synthetic oligonucleotide
gctgttgctaagtgcaacctaaaccatgattctgagttttgcgacatgcttaggc

SEQ ID NO: 416789 - DNA, 60 bp, Artificial
  Synthetic oligonucleotide
gctgttgctcgcctgttgaagtcgcaattgaacaacattgaatcttcgcaatatctgtta

SEQ ID NO: 416790 - DNA, 60 bp, Artificial
  Synthetic oligonucleotide
gctgttggaatcaacccttttgctgagtgggacaatctgttagcgaatttgcagccttac

SEQ ID NO: 416791 - DNA, 55 bp, Artificial
  Synthetic oligonucleotide
gctgttggactactcatacattttgttagaagaaatgagcttccacattcaggcg

SEQ ID NO: 416792 - DNA, 50 bp, Artificial
  Synthetic oligonucleotide
gctgttggagcaacgtttcgggcgtgattacttggtagactccctggtgt

SEQ ID NO: 416793 - DNA, 55 bp, Artificial
  Synthetic oligonucleotide
gctgttggatcatgccctccaataaaactagtgcacagtactattcaagatgggg

SEQ ID NO: 416794 - DNA, 55 bp, Artificial
  Synthetic oligonucleotide
gctgttggtggtttaagccttcatgtcagtatatgcggcaaaatgagtcatgccc

SEQ ID NO: 416795 - DNA, 55 bp, Artificial
  Synthetic oligonucleotide
gctgttgtagattcctactggattcatgaacttggcactggttctccactagttc

SEQ ID NO: 416796 - DNA, 55 bp, Artificial
  Synthetic oligonucleotide
gctgttgtcaaacagttttcgttacgcaacaatcacagatacgacggaatcattg

SEQ ID NO: 416797 - DNA, 60 bp, Artificial
  Synthetic oligonucleotide
gctgttgtgtgtgggcctgacatgatacaagtatcgttgaacgcaggggcgcgaggagat

SEQ ID NO: 416798 - DNA, 60 bp, Artificial
  Synthetic oligonucleotide
gctgttgttaatgctggtgctagtaaaatcggatcacatatgcataacacattgtgtgaa

SEQ ID NO: 416799 - DNA, 55 bp, Artificial
  Synthetic oligonucleotide
gctgttgttggttcaaaaggctctggcaagtctctgtatatgtctcgtgttgctg

SEQ ID NO: 416800 - DNA, 51 bp, Artificial
  Synthetic oligonucleotide
gctgtttatccagatggtcaacacaaacccgtgcccactcaactgtgacaa

SEQ ID NO: 416801 - DNA, 55 bp, Artificial
  Synthetic oligonucleotide
gctgtttcagtgacatgtgtttggggatccgtgtcttggtttgcctccactggcg

SEQ ID NO: 416802 - DNA, 60 bp, Artificial
  Synthetic oligonucleotide
gctgtttgaaatggatgtaactacgagttatacttacatgttgtctgatggaacatatgt

SEQ ID NO: 416803 - DNA, 59 bp, Artificial
  Synthetic oligonucleotide
gctgtttgatcatgagattaattgggaagttagaggcttaattttacagtgtatgaacg

SEQ ID NO: 416804 - DNA, 60 bp, Artificial
  Synthetic oligonucleotide
gctgtttggagagatttccgaacaaatagattgctcacatctcaaacgagattgctttgt

SEQ ID NO: 416805 - DNA, 52 bp, Artificial
  Synthetic oligonucleotide
gctgtttggagtacggatcctaaagagtcaacgtacctttccgggaaccacc

SEQ ID NO: 416806 - DNA, 60 bp, Artificial
  Synthetic oligonucleotide
gctgtttgggcagaacatgcactatcattacctaggaagggcagggtataccatacacgt

SEQ ID NO: 416807 - DNA, 49 bp, Artificial
  Synthetic oligonucleotide
gctgtttggttccgttttaataaaccgtttgtgtttaacacgaccgtgg

SEQ ID NO: 416808 - DNA, 55 bp, Artificial
  Synthetic oligonucleotide
gctgtttgtaaccatggtggataacactcgtaacaccaacttcaccatctcacag

SEQ ID NO: 416809 - DNA, 59 bp, Artificial
  Synthetic oligonucleotide
gctgttttgctggtggtaacctcttcaaggagatgaacttgagtgtaggacttggcgaa

SEQ ID NO: 416810 - DNA, 50 bp, Artificial
  Synthetic oligonucleotide
gcttaaaaccatgtgtaaagttaaccccactctgtgttaacctaaactgt

SEQ ID NO: 416811 - DNA, 55 bp, Artificial
  Synthetic oligonucleotide
gcttaaaaccctcttaataaaactgcctattagaagcaagacaagtgtgtgttcc

SEQ ID NO: 416812 - DNA, 54 bp, Artificial
  Synthetic oligonucleotide
gcttaaaaccgaggaggtaaaaagtgcggagcgaaacgatgtgttgagcttacg

SEQ ID NO: 416813 - DNA, 51 bp, Artificial
  Synthetic oligonucleotide
gcttaaaagcttagtccacttttaagccggtcatacttcaaccgtgatacc

SEQ ID NO: 416814 - DNA, 53 bp, Artificial
  Synthetic oligonucleotide
gcttaaaaggtctagtccactttttaagccggctatacttcgccgtagacact

SEQ ID NO: 416815 - DNA, 55 bp, Artificial
  Synthetic oligonucleotide
gcttaaacaacatactcgaagggagcatgtgttggtcaaatgtcccatatgcggg

SEQ ID NO: 416816 - DNA, 53 bp, Artificial
  Synthetic oligonucleotide
gcttaaaccctgttacccctattataacagatctatttgaggtacagtttaaa

SEQ ID NO: 416817 - DNA, 55 bp, Artificial
  Synthetic oligonucleotide
gcttaaacgcgttggtgacaaggtgattgctggtgatttctcaaattttgatggt

SEQ ID NO: 416818 - DNA, 58 bp, Artificial
  Synthetic oligonucleotide
gcttaaagaagattcaacatggacttggaatgatactgattctcagtatatggctaag

SEQ ID NO: 416819 - DNA, 57 bp, Artificial
  Synthetic oligonucleotide
gcttaaagccaaacttaagcaggttagatcaacaactgtacctttagtcagaatcaa

SEQ ID NO: 416820 - DNA, 60 bp, Artificial
  Synthetic oligonucleotide
gcttaaagcccataatttatcttgccctcagtcacagtgtccttattgctttacacactg

SEQ ID NO: 416821 - DNA, 59 bp, Artificial
  Synthetic oligonucleotide
gcttaaagtgaagtactattatgaccgaacgaaagctccaagagatcgtattgcactta

SEQ ID NO: 416822 - DNA, 55 bp, Artificial
  Synthetic oligonucleotide
gcttaaagttgcgcaaagttcgaaatccaccgtgaggttagactgttactcaggt

SEQ ID NO: 416823 - DNA, 55 bp, Artificial
  Synthetic oligonucleotide
gcttaaataaagtgaggttttgggctggtattgtctcaaagggctggatagtaga

SEQ ID NO: 416824 - DNA, 59 bp, Artificial
  Synthetic oligonucleotide
gcttaacaccaaacccgagattcatagggtggtacttagtcatctcagctatcaccgcc

SEQ ID NO: 416825 - DNA, 60 bp, Artificial
  Synthetic oligonucleotide
gcttaacacgcgcagactggtacgtcaacgtccgatgtgttgtcgacattggaggacgtg

SEQ ID NO: 416826 - DNA, 58 bp, Artificial
  Synthetic oligonucleotide
gcttaacactggagccggagccgcgaacataacctttaactttggacagatagctgaa

SEQ ID NO: 416827 - DNA, 59 bp, Artificial
  Synthetic oligonucleotide
gcttaacagtgcgtaactgtaaacgtagcaatacgtctcgttctttgtgagcctgagtg

SEQ ID NO: 416828 - DNA, 54 bp, Artificial
  Synthetic oligonucleotide
gcttaacatggtcgcctacggggatgacgtacttgctagttaccctttcccaat

SEQ ID NO: 416829 - DNA, 52 bp, Artificial
  Synthetic oligonucleotide
gcttaaccctaccatactcaccgaactagacaacggtgtggtaggggtaaat

SEQ ID NO: 416830 - DNA, 52 bp, Artificial
  Synthetic oligonucleotide
gcttaaccctaccgcactcaccgaacttgataacggtgcggtaggggtaaat

SEQ ID NO: 416831 - DNA, 53 bp, Artificial
  Synthetic oligonucleotide
gcttaacgttttagaataggggttgaaaaagactatgactgacccattcaaac

SEQ ID NO: 416832 - DNA, 52 bp, Artificial
  Synthetic oligonucleotide
gcttaactgatggaagtaatagataaacgtatgtgtgggaggaagctaactc

SEQ ID NO: 416833 - DNA, 55 bp, Artificial
  Synthetic oligonucleotide
gcttaagaaaatgctgccgcgaggtcattttgagcgcgctaaagggagcgacgcg

SEQ ID NO: 416834 - DNA, 50 bp, Artificial
  Synthetic oligonucleotide
gcttaagaaacctgaattgaggcgcgttgttaaaacgcagggtccagata

SEQ ID NO: 416835 - DNA, 55 bp, Artificial
  Synthetic oligonucleotide
gcttaagaatggtactagcgtgtaccgatacaagaacgatgctcaaattgcgcgt

SEQ ID NO: 416836 - DNA, 55 bp, Artificial
  Synthetic oligonucleotide
gcttaagagcagcaagagtaatgtgcaaatcaaaaggcccagcatcaatactatc

SEQ ID NO: 416837 - DNA, 60 bp, Artificial
  Synthetic oligonucleotide
gcttaagcgcgttaaagaaaatgctgccgcgagctcattttgagcgagctaagggtagtg

SEQ ID NO: 416838 - DNA, 60 bp, Artificial
  Synthetic oligonucleotide
gcttaagctcatatcattggttgtcgtcatgactcgcattttttgcgatgaatgactcaa

SEQ ID NO: 416839 - DNA, 59 bp, Artificial
  Synthetic oligonucleotide
gcttaagggactagtcgccactgtggaacctacggtctaccatcagactctcaacgaca

SEQ ID NO: 416840 - DNA, 60 bp, Artificial
  Synthetic oligonucleotide
gcttaagtactggatttacacttgatgctatccttactggggaggcttttgctgctgtaa

SEQ ID NO: 416841 - DNA, 56 bp, Artificial
  Synthetic oligonucleotide
gcttaagtatgaggcaggtacgttttcccataaattacgtcttagcatcgtaattg

SEQ ID NO: 416842 - DNA, 60 bp, Artificial
  Synthetic oligonucleotide
gcttaagtgttttgggaacacagctgtggcaaaatgcaatgtaaatcatgatgaggagtt

SEQ ID NO: 416843 - DNA, 55 bp, Artificial
  Synthetic oligonucleotide
gcttaatacgttaaaatcaatagggtgggctttccgcgcagctgtagctgacttc

SEQ ID NO: 416844 - DNA, 56 bp, Artificial
  Synthetic oligonucleotide
gcttaatagccttattgatccagttcacacacgtggcgtccatccgttataatatt

SEQ ID NO: 416845 - DNA, 60 bp, Artificial
  Synthetic oligonucleotide
gcttaatatgattaacaacaaaatcgatgaccaaatacaagacctttgggcatacaatgc

SEQ ID NO: 416846 - DNA, 58 bp, Artificial
  Synthetic oligonucleotide
gcttaatcatgttgatccagcaaaacgacttctatggtctcacctggaagctatgaca

SEQ ID NO: 416847 - DNA, 55 bp, Artificial
  Synthetic oligonucleotide
gcttaatcctgaaaagaagcgtagatttaggcgcaatgtacaatatctcagctac

SEQ ID NO: 416848 - DNA, 60 bp, Artificial
  Synthetic oligonucleotide
gcttaatcgcgaagcttacgcaaaagatctcctcaagtatgcaacaccaatcgaggcagg

SEQ ID NO: 416849 - DNA, 55 bp, Artificial
  Synthetic oligonucleotide
gcttaatctatagagtccttgatatgggtattcggttgagtcgttgtccgcgtct

SEQ ID NO: 416850 - DNA, 50 bp, Artificial
  Synthetic oligonucleotide
gcttaatgaccgcccttacgtactgcctgatagcgttaatgtggtgaaag

SEQ ID NO: 416851 - DNA, 55 bp, Artificial
  Synthetic oligonucleotide
gcttaatgagcgaaactctagtgagcaattgattcatacagaaggaagcttcccc

SEQ ID NO: 416852 - DNA, 55 bp, Artificial
  Synthetic oligonucleotide
gcttaatgcgtcctgtgcagccatggatgatttccaactaattccaatgatcagc

SEQ ID NO: 416853 - DNA, 60 bp, Artificial
  Synthetic oligonucleotide
gcttaatgctagtttgtttggtcctatgttttttattgatgttgtgccactcatgttcga

SEQ ID NO: 416854 - DNA, 60 bp, Artificial
  Synthetic oligonucleotide
gcttaatgctcatcctattgtgtactctattactcacaaggtcgctggcgctcgggtgcg

SEQ ID NO: 416855 - DNA, 55 bp, Artificial
  Synthetic oligonucleotide
gcttaatgttctccagtacaatatcgccaaagcactcccacagtgtcgatttgta

SEQ ID NO: 416856 - DNA, 60 bp, Artificial
  Synthetic oligonucleotide
gcttaatgttgcaaattgggaacatgatctcaatatgggtcagtcattcaattcagacag

SEQ ID NO: 416857 - DNA, 58 bp, Artificial
  Synthetic oligonucleotide
gcttaattgcgtgactacatgcgcttcggcgtgactagcgcttcgtgcgccttccact

SEQ ID NO: 416858 - DNA, 55 bp, Artificial
  Synthetic oligonucleotide
gcttacaaagaaagggtcaaactacccaattgctaaaaggtcatacaacaacaca

SEQ ID NO: 416859 - DNA, 59 bp, Artificial
  Synthetic oligonucleotide
gcttacaactactgcagccacacgttttatgaaggacttgcacttcaccgggacaaatg

SEQ ID NO: 416860 - DNA, 57 bp, Artificial
  Synthetic oligonucleotide
gcttacaagttcactagttccagaaataagggagctattttcaaatcagaccttcca

SEQ ID NO: 416861 - DNA, 55 bp, Artificial
  Synthetic oligonucleotide
gcttacacattaactgcttggttgcgcttcgcgataaaagacttacgtcatcggg

SEQ ID NO: 416862 - DNA, 53 bp, Artificial
  Synthetic oligonucleotide
gcttacaccaaggtgtatggtccactatccgtaccggctgtggcactaccctt

SEQ ID NO: 416863 - DNA, 55 bp, Artificial
  Synthetic oligonucleotide
gcttacagatcagcgtgagtgctagacagtgtcacatccagggtcgtctctggtg

SEQ ID NO: 416864 - DNA, 50 bp, Artificial
  Synthetic oligonucleotide
gcttacagccttcccctgaaacccgcgtcaatcgactgtcccgaaaacgc

SEQ ID NO: 416865 - DNA, 55 bp, Artificial
  Synthetic oligonucleotide
gcttacagtcctcgggaaggacgcgggtgcgttaacagaagacccaggtgaaggc

SEQ ID NO: 416866 - DNA, 59 bp, Artificial
  Synthetic oligonucleotide
gcttacataaaattgaataggcttcggtacaagggtactgttaatattgagtgtgcaga

SEQ ID NO: 416867 - DNA, 55 bp, Artificial
  Synthetic oligonucleotide
gcttacatacaggttataaggatgctaactgccctagaatatgacctttctgatg

SEQ ID NO: 416868 - DNA, 55 bp, Artificial
  Synthetic oligonucleotide
gcttacatgctgcctgtcctgtttacagggaaatcacacgtatggcgcaatggat

SEQ ID NO: 416869 - DNA, 55 bp, Artificial
  Synthetic oligonucleotide
gcttaccaagcttcaagctcttggagtattcggctacgaactttctgacttgagg

SEQ ID NO: 416870 - DNA, 58 bp, Artificial
  Synthetic oligonucleotide
gcttaccacatggagaatatttagcgcctaaccctagaataacatcaataactattac

SEQ ID NO: 416871 - DNA, 55 bp, Artificial
  Synthetic oligonucleotide
gcttacccaagtatgttcccgaaacttagccaactgaccacagtaatgcttaccc

SEQ ID NO: 416872 - DNA, 52 bp, Artificial
  Synthetic oligonucleotide
gcttacccataggactggtaagaggttttgtgttaagtccgtttatgttttg

SEQ ID NO: 416873 - DNA, 60 bp, Artificial
  Synthetic oligonucleotide
gcttacccatggaatgcagccaaaccatgacctcaagaagcaagtgcatgactgggcagc

SEQ ID NO: 416874 - DNA, 60 bp, Artificial
  Synthetic oligonucleotide
gcttacccatggaatgcagccaaaccatgacctcaggaaggaaagtgcatgactcacagg

SEQ ID NO: 416875 - DNA, 53 bp, Artificial
  Synthetic oligonucleotide
gcttacccctgcatccacgagagacttgagtgcagcattccgccgctcggtag

SEQ ID NO: 416876 - DNA, 55 bp, Artificial
  Synthetic oligonucleotide
gcttacccttttcccacaccagtttatcagtcctagaaccaacatgactgcccac

SEQ ID NO: 416877 - DNA, 56 bp, Artificial
  Synthetic oligonucleotide
gcttaccgaatggttcgcaaccttcatcagagcatgtcgaaagatctgcactccct

SEQ ID NO: 416878 - DNA, 60 bp, Artificial
  Synthetic oligonucleotide
gcttaccgaggttcaggtgtgtgctaagcgcctgggcctcttattgacacctagacagca

SEQ ID NO: 416879 - DNA, 58 bp, Artificial
  Synthetic oligonucleotide
gcttaccgttcacgtacagtacgaatgacagcggtgggttgtcttatgcaacgataaa

SEQ ID NO: 416880 - DNA, 55 bp, Artificial
  Synthetic oligonucleotide
gcttacctggaaatcgtgttcctgcacgactttgcccagactcgtcacatccgcg

SEQ ID NO: 416881 - DNA, 60 bp, Artificial
  Synthetic oligonucleotide
gcttacgaccgtcagatgttacggtctatggcgatgacataatattgccatcagacgcgt

SEQ ID NO: 416882 - DNA, 59 bp, Artificial
  Synthetic oligonucleotide
gcttacgagcttgatccccactgcaaatccacttcgcttgggtcctacatcaataaatt

SEQ ID NO: 416883 - DNA, 55 bp, Artificial
  Synthetic oligonucleotide
gcttacgagttcggcttccagttctgctatgcgcttctctgatgcttcaagtaac

SEQ ID NO: 416884 - DNA, 55 bp, Artificial
  Synthetic oligonucleotide
gcttacgcagatgacgttccagacgagccttacgattggcttcggtctgagcgaa

SEQ ID NO: 416885 - DNA, 57 bp, Artificial
  Synthetic oligonucleotide
gcttacgccaatgcggatgggctcgctatccgtatcaacccggttaccggatacaaa

SEQ ID NO: 416886 - DNA, 55 bp, Artificial
  Synthetic oligonucleotide
gcttacgcccagcagacacgtggccttttgggcaccatagtggtgagcatgacgg

SEQ ID NO: 416887 - DNA, 56 bp, Artificial
  Synthetic oligonucleotide
gcttacgcccgccgagactacagttagacttcgagcgtacatgaacaccccggggc

SEQ ID NO: 416888 - DNA, 55 bp, Artificial
  Synthetic oligonucleotide
gcttacgcttgtaagttcctctccaatggacaagtggaaagaaaagggtgactgt

SEQ ID NO: 416889 - DNA, 55 bp, Artificial
  Synthetic oligonucleotide
gcttacgtacattgtcttccaactcgagcgcatcactacccctcacttccaggga

SEQ ID NO: 416890 - DNA, 59 bp, Artificial
  Synthetic oligonucleotide
gcttacgtcatctgttgcttcgggtaccaatttggtcctttatgctgccccgctgaatc

SEQ ID NO: 416891 - DNA, 55 bp, Artificial
  Synthetic oligonucleotide
gcttacgtgacgcctccttctagtagagcatctagtaatggcacagtctcaaccg

SEQ ID NO: 416892 - DNA, 60 bp, Artificial
  Synthetic oligonucleotide
gcttacgtgtgctcaaggatgtcacggatgtaactagagtgcaccatgcagattgcttgg

SEQ ID NO: 416893 - DNA, 60 bp, Artificial
  Synthetic oligonucleotide
gcttacgtttggtgccagtagtatataatatactactgatgcctcctttataggagatgc

SEQ ID NO: 416894 - DNA, 60 bp, Artificial
  Synthetic oligonucleotide
gcttactatgctcccacacattaattaactatcaatgccacactttcctcagtgcactca

SEQ ID NO: 416895 - DNA, 56 bp, Artificial
  Synthetic oligonucleotide
gcttactctccccgggtataattatgttggtcctggtaatcctctggatagtggtc

SEQ ID NO: 416896 - DNA, 60 bp, Artificial
  Synthetic oligonucleotide
gcttactgcctgtgttaagtgctgctgcgtaagcgtcgttggctgattgttgcccccctc

SEQ ID NO: 416897 - DNA, 52 bp, Artificial
  Synthetic oligonucleotide
gcttactgggaatcaaacattactcccttttatgtaattaatgttaaaaaag

SEQ ID NO: 416898 - DNA, 55 bp, Artificial
  Synthetic oligonucleotide
gcttactgtagcttatcttaatgagttatccaagcatagtgctgtgcatactggt

SEQ ID NO: 416899 - DNA, 55 bp, Artificial
  Synthetic oligonucleotide
gcttacttagataggggtttctacaagcactatggcattatagtaggagatagtg

SEQ ID NO: 416900 - DNA, 55 bp, Artificial
  Synthetic oligonucleotide
gcttacttgctagtgcgcttgaacaggattacacaacacatgacgcacttgacgc

SEQ ID NO: 416901 - DNA, 55 bp, Artificial
  Synthetic oligonucleotide
gcttagaagttcacttaaatcaaacttccgaccaacgtggtgcatacgttaatgc

SEQ ID NO: 416902 - DNA, 60 bp, Artificial
  Synthetic oligonucleotide
gcttagaattgaatctgcagtttgtgaatcagtacttgccgacgcaagcgaaacaatgct

SEQ ID NO: 416903 - DNA, 55 bp, Artificial
  Synthetic oligonucleotide
gcttagagctgagattccagccaactaccgattgaaagaatattccggactagaa

SEQ ID NO: 416904 - DNA, 54 bp, Artificial
  Synthetic oligonucleotide
gcttagagtcctgcttaaactgctttagatctgttggctcacgatagaaatgga

SEQ ID NO: 416905 - DNA, 55 bp, Artificial
  Synthetic oligonucleotide
gcttagatccaaatggccacatagatagttgtgtgggcctagagacctagcccac

SEQ ID NO: 416906 - DNA, 60 bp, Artificial
  Synthetic oligonucleotide
gcttagatctaaatgcccacacaaataattgtgagggcccaaagatctggcccatactgt

SEQ ID NO: 416907 - DNA, 60 bp, Artificial
  Synthetic oligonucleotide
gcttagatgcagctgtcactcgaggtcgtatcactggaacaacaaccgctgaggctgttg

SEQ ID NO: 416908 - DNA, 55 bp, Artificial
  Synthetic oligonucleotide
gcttagatggacattatgtctcactagattgcaagcataaagcaccaattcaaac

SEQ ID NO: 416909 - DNA, 55 bp, Artificial
  Synthetic oligonucleotide
gcttagattgcactgcagtcttcccacctggcaaggccccgagtgttgaggctgc

SEQ ID NO: 416910 - DNA, 59 bp, Artificial
  Synthetic oligonucleotide
gcttagcaaaacgcaaaatgctaggcaaaagagcgtgtcgttttgatatcggtgtacac

SEQ ID NO: 416911 - DNA, 55 bp, Artificial
  Synthetic oligonucleotide
gcttagcactgtattttcatgggtggcaaagggaccagagcgcattgggcaccat

SEQ ID NO: 416912 - DNA, 60 bp, Artificial
  Synthetic oligonucleotide
gcttagcagctgaaaaaaagtttacagatgactctccagacaaagaccaactgccttgct

SEQ ID NO: 416913 - DNA, 60 bp, Artificial
  Synthetic oligonucleotide
gcttagcattgaagacccgagtcacgagggcgaggggataccgctgtatgatgcaatcaa

SEQ ID NO: 416914 - DNA, 54 bp, Artificial
  Synthetic oligonucleotide
gcttagcccgcaaggaaatacttacgttcaccacttcgataactcttccgttaa

SEQ ID NO: 416915 - DNA, 52 bp, Artificial
  Synthetic oligonucleotide
gcttagcgtgaaacctgaggatgtgacggttactagtgacagtgacgggtca

SEQ ID NO: 416916 - DNA, 55 bp, Artificial
  Synthetic oligonucleotide
gcttagctccggatcctgactttatggacattatagctttacataggcctgcact

SEQ ID NO: 416917 - DNA, 60 bp, Artificial
  Synthetic oligonucleotide
gcttagcttagtgttcactattagatggaaccattccatgctagtccacttatgtttgtt

SEQ ID NO: 416918 - DNA, 54 bp, Artificial
  Synthetic oligonucleotide
gcttaggcaggaggccgttaggaaaagacgctaaggcagggttggttacgttga

SEQ ID NO: 416919 - DNA, 60 bp, Artificial
  Synthetic oligonucleotide
gcttaggcatctcctatggcaggaagaagcggagacagcgacgaaaatctcctcaagaca

SEQ ID NO: 416920 - DNA, 60 bp, Artificial
  Synthetic oligonucleotide
gcttagggatgttcacggtgttgattctgaatcccaagagaagtcaggtgtgtgggatgt

SEQ ID NO: 416921 - DNA, 60 bp, Artificial
  Synthetic oligonucleotide
gcttagggcaggcaattctccatggcaattgactcagtttctagattggatcagtcttgg

SEQ ID NO: 416922 - DNA, 55 bp, Artificial
  Synthetic oligonucleotide
gcttagggccagataatcaagaaagtactgttcagccaatgattacttcaattcc

SEQ ID NO: 416923 - DNA, 55 bp, Artificial
  Synthetic oligonucleotide
gcttagggtctggtgcgtaagtatagttgaaatgtctcctggagttataacaaca

SEQ ID NO: 416924 - DNA, 54 bp, Artificial
  Synthetic oligonucleotide
gcttagtaagtggaaattggttaagcgaaacactaagagataacaccccaatgg

SEQ ID NO: 416925 - DNA, 60 bp, Artificial
  Synthetic oligonucleotide
gcttagtcagagtaagtaggctgggacaaagaggcactattcgcactcgaagtggcctgc

SEQ ID NO: 416926 - DNA, 60 bp, Artificial
  Synthetic oligonucleotide
gcttagtcaggtcgtacgtgacgttgtagccgatgtagactccagcgatatcgctgagtc

SEQ ID NO: 416927 - DNA, 55 bp, Artificial
  Synthetic oligonucleotide
gcttagtctgaatgacggaggcttggaccttgatttgcacaaaaccactgacgag

SEQ ID NO: 416928 - DNA, 55 bp, Artificial
  Synthetic oligonucleotide
gcttagtcttgttgcttgagtttgtgctttaactagttgactttctaatgcctgc

SEQ ID NO: 416929 - DNA, 60 bp, Artificial
  Synthetic oligonucleotide
gcttagtgcacctgcaggcaacaacgggttcaggaagcacaatagtggtgacactacgcc

SEQ ID NO: 416930 - DNA, 52 bp, Artificial
  Synthetic oligonucleotide
gcttagtgggatggcctaaggttagggaaagaataatacagacccctccagc

SEQ ID NO: 416931 - DNA, 60 bp, Artificial
  Synthetic oligonucleotide
gcttagtggtgggtacaaagatgtgatactatggtttagcttcggggcatcatgtgtaat

SEQ ID NO: 416932 - DNA, 55 bp, Artificial
  Synthetic oligonucleotide
gcttagttcaacattacaccaaggcggctactcttggtctacacaaggatgatga

SEQ ID NO: 416933 - DNA, 54 bp, Artificial
  Synthetic oligonucleotide
gcttagttgtacttgtacttctaaggttcatttcgaaaggaatggataacgttg

SEQ ID NO: 416934 - DNA, 55 bp, Artificial
  Synthetic oligonucleotide
gcttagttgtcaagtcggaatcaacccatactccatggaatggactggtttggcc

SEQ ID NO: 416935 - DNA, 56 bp, Artificial
  Synthetic oligonucleotide
gcttagtttgggcctgtgttggtttagaggtaggtcgcgggcagccattaggtgta

SEQ ID NO: 416936 - DNA, 57 bp, Artificial
  Synthetic oligonucleotide
gcttataaacatacctgagaatgaggcgaaggactttacaaagagggttcgtgatct

SEQ ID NO: 416937 - DNA, 56 bp, Artificial
  Synthetic oligonucleotide
gcttataaaggcggttgaggggtcagatctcccgcctaccgcgcgggctccggtga

SEQ ID NO: 416938 - DNA, 55 bp, Artificial
  Synthetic oligonucleotide
gcttataagagagaaataacctatacagaggattctcaacagcacagaagcggtt

SEQ ID NO: 416939 - DNA, 60 bp, Artificial
  Synthetic oligonucleotide
gcttataatgcagagttgctggtcttgcttgaaaaccagaaaactctagatgagcatgat

SEQ ID NO: 416940 - DNA, 53 bp, Artificial
  Synthetic oligonucleotide
gcttatacgcaaaaccataagctcgcaacctggctgtgcaatcagcccggaat

SEQ ID NO: 416941 - DNA, 55 bp, Artificial
  Synthetic oligonucleotide
gcttatactatccaactgaagctgcgacacaaataaatgacaattcgtggaaaga

SEQ ID NO: 416942 - DNA, 58 bp, Artificial
  Synthetic oligonucleotide
gcttatagaccagtaaatgcccctatcttatcaacacttccggagacttgtgttgtta

SEQ ID NO: 416943 - DNA, 60 bp, Artificial
  Synthetic oligonucleotide
gcttatagcggtgcaatctatgtttcgcgggcagctgatttaaatgggacgcctacaaaa

SEQ ID NO: 416944 - DNA, 60 bp, Artificial
  Synthetic oligonucleotide
gcttataggttttacaataggttgtgcagtacttatcctatgtgactatatgtataacat

SEQ ID NO: 416945 - DNA, 59 bp, Artificial
  Synthetic oligonucleotide
gcttatatggatgatttggttttgggggcccgcacttctgagcatcttaccgccattta

SEQ ID NO: 416946 - DNA, 60 bp, Artificial
  Synthetic oligonucleotide
gcttatattacccaactgaagctgcaactcaaatagatgatagttcttggaaagatacga

SEQ ID NO: 416947 - DNA, 60 bp, Artificial
  Synthetic oligonucleotide
gcttatattgagcgcatcagcaggatacgcaagatcaaagatgagcggctatcgatgtta

SEQ ID NO: 416948 - DNA, 55 bp, Artificial
  Synthetic oligonucleotide
gcttatatttcagatagattgcagagcttgttccctgatatgactatagaatccg

SEQ ID NO: 416949 - DNA, 55 bp, Artificial
  Synthetic oligonucleotide
gcttatcaagcccaattcgagtctgtaggatggtctgcaacggcctgtcatgacg

SEQ ID NO: 416950 - DNA, 57 bp, Artificial
  Synthetic oligonucleotide
gcttatcaagtatatcatggattactttcctgtgatatctgttgatttgcagagtgg

SEQ ID NO: 416951 - DNA, 56 bp, Artificial
  Synthetic oligonucleotide
gcttatcaggtacacacagcatcgcttaaggcacaagtaatgatatcgattggaga

SEQ ID NO: 416952 - DNA, 54 bp, Artificial
  Synthetic oligonucleotide
gcttatcccggggatcggcctccgcccctccatggtggactccaggaccccgaa

SEQ ID NO: 416953 - DNA, 60 bp, Artificial
  Synthetic oligonucleotide
gcttatcctgatgagccgcgcactacgttagatatagctcgtatatggggtttgagaagc

SEQ ID NO: 416954 - DNA, 55 bp, Artificial
  Synthetic oligonucleotide
gcttatcgaaaagcatgccggaaggagtgacccagactggccgagcaattacctc

SEQ ID NO: 416955 - DNA, 55 bp, Artificial
  Synthetic oligonucleotide
gcttatcgcatgcttggacttaatgtccagacggtagactcatctcaaggttcag

SEQ ID NO: 416956 - DNA, 56 bp, Artificial
  Synthetic oligonucleotide
gcttatcgcgtgttttgaaggtggaaattaactttttgctaagctcattaacatgt

SEQ ID NO: 416957 - DNA, 55 bp, Artificial
  Synthetic oligonucleotide
gcttatcgcgttgaaacattcgaagaaataccgttcgatgtgcagaaatttgcgg

SEQ ID NO: 416958 - DNA, 50 bp, Artificial
  Synthetic oligonucleotide
gcttatctacatgccgcccaacctggagtatcctgatattcaagctactg

SEQ ID NO: 416959 - DNA, 55 bp, Artificial
  Synthetic oligonucleotide
gcttatctctatgcagtgctgaaaggagaaagggagctgctagaggcggactggg

SEQ ID NO: 416960 - DNA, 55 bp, Artificial
  Synthetic oligonucleotide
gcttatctgctcgggcgagagaaagcactacgggaatcacacttggctgagattg

SEQ ID NO: 416961 - DNA, 60 bp, Artificial
  Synthetic oligonucleotide
gcttatctgtgctcatgaaatcattgtgtaaatcaacagtcatatccaactggtagtaat

SEQ ID NO: 416962 - DNA, 60 bp, Artificial
  Synthetic oligonucleotide
gcttatgaaactgtttctctcagtgcggcactgtgtgtcgcaacccttgcagctgcttat

SEQ ID NO: 416963 - DNA, 59 bp, Artificial
  Synthetic oligonucleotide
gcttatgaaggtgaagatataagtttacagtttcagcacaatactatacataaccctcc

SEQ ID NO: 416964 - DNA, 55 bp, Artificial
  Synthetic oligonucleotide
gcttatgaccctaataacgaacttggtgacttgaaggatgtgtttccttctgcgg

SEQ ID NO: 416965 - DNA, 55 bp, Artificial
  Synthetic oligonucleotide
gcttatgagactagcgatctctaccagagatctaacccgcaattgtttggtctcc

SEQ ID NO: 416966 - DNA, 60 bp, Artificial
  Synthetic oligonucleotide
gcttatgaggcgaattcctttctagaagcgcagtcgatgaatgctaaggtggacatgctt

SEQ ID NO: 416967 - DNA, 57 bp, Artificial
  Synthetic oligonucleotide
gcttatgatttgtacaacgacagtgaccttttcgaaggttacatgtccgaccatagg

SEQ ID NO: 416968 - DNA, 55 bp, Artificial
  Synthetic oligonucleotide
gcttatgcacctcgtggtttatggaggggaccttccaccagagccaattatacgc

SEQ ID NO: 416969 - DNA, 58 bp, Artificial
  Synthetic oligonucleotide
gcttatgcagaatctataacccaaaaagatttggagcgtacatttagtaaaatagatg

SEQ ID NO: 416970 - DNA, 60 bp, Artificial
  Synthetic oligonucleotide
gcttatgcagagaatgagatgatagccttgttttgtattaggcaccaagtgaggttgatt

SEQ ID NO: 416971 - DNA, 55 bp, Artificial
  Synthetic oligonucleotide
gcttatgcgacggggaaaatgagacccgacgagcaacagtaccctgctatgcccc

SEQ ID NO: 416972 - DNA, 60 bp, Artificial
  Synthetic oligonucleotide
gcttatgcgagcgggaaattcactcccatcaaaagcacaattgacgcagagatacaggct

SEQ ID NO: 416973 - DNA, 52 bp, Artificial
  Synthetic oligonucleotide
gcttatggaatcaacctaccactagtgacatatgtcaaggacgagctgaggt

SEQ ID NO: 416974 - DNA, 55 bp, Artificial
  Synthetic oligonucleotide
gcttatggagttaccattcaagaattttatagaacgatcctacctgcttggattg

SEQ ID NO: 416975 - DNA, 60 bp, Artificial
  Synthetic oligonucleotide
gcttatggccaaaatgagctagatcttgcgcaactttctctggacgacaccagttctctt

SEQ ID NO: 416976 - DNA, 55 bp, Artificial
  Synthetic oligonucleotide
gcttatgggatcagagcttaaagccttgtgtaaaactaacagtcatgtgtgtcac

SEQ ID NO: 416977 - DNA, 60 bp, Artificial
  Synthetic oligonucleotide
gcttatgggtctaaatggccgcgcagcggcacacacaacatttacattggcccaatcgat

SEQ ID NO: 416978 - DNA, 58 bp, Artificial
  Synthetic oligonucleotide
gcttatggtggacgtggaaggtactactgctctttcaaccaggcgtttcaattgctgg

SEQ ID NO: 416979 - DNA, 55 bp, Artificial
  Synthetic oligonucleotide
gcttatgtcactgatcctgactcaatattcgattccctcaacatgaaagcagccg

SEQ ID NO: 416980 - DNA, 55 bp, Artificial
  Synthetic oligonucleotide
gcttatgtcgaaattgagctagaggtgtactatacatcttacgtggaccattcac

SEQ ID NO: 416981 - DNA, 55 bp, Artificial
  Synthetic oligonucleotide
gcttatgttaattctaatcagaacactgtttctggttcgctgagtcctaaacctc

SEQ ID NO: 416982 - DNA, 55 bp, Artificial
  Synthetic oligonucleotide
gcttattaagtgcagcaggtcgatttggtgatggtcttgttaacatattaactca

SEQ ID NO: 416983 - DNA, 58 bp, Artificial
  Synthetic oligonucleotide
gcttattaccataactactccaccctacaatggcttaaagttgattccatcgagtgcg

SEQ ID NO: 416984 - DNA, 60 bp, Artificial
  Synthetic oligonucleotide
gcttattatcttgctctcttagcagttcaattataggtctaccaatatcgaaccacttga

SEQ ID NO: 416985 - DNA, 55 bp, Artificial
  Synthetic oligonucleotide
gcttattgtcccactccactagtttcccgtcttcagtgatgcgtcctaaccactg

SEQ ID NO: 416986 - DNA, 58 bp, Artificial
  Synthetic oligonucleotide
gcttattgtgaccctcaagatgtgtgtgagactcatcactgttttttctgtgtcaatg

SEQ ID NO: 416987 - DNA, 58 bp, Artificial
  Synthetic oligonucleotide
gcttatttacctcaagtagctgttggagaagaaaaattgaattgtagtcacatttggc

SEQ ID NO: 416988 - DNA, 55 bp, Artificial
  Synthetic oligonucleotide
gcttatttcactggtgagcttaacatccatgttttatttctttgtgagaggggtt

SEQ ID NO: 416989 - DNA, 55 bp, Artificial
  Synthetic oligonucleotide
gcttatttgaggctgagttctacaagctgagcgagatagcgtcaaatgagttcgt

SEQ ID NO: 416990 - DNA, 55 bp, Artificial
  Synthetic oligonucleotide
gcttatttgattttgcatgttcttctgtggtcaaggaaagactcactaaggccgg

SEQ ID NO: 416991 - DNA, 59 bp, Artificial
  Synthetic oligonucleotide
gcttattttgtcttggcgcgcaagcccagatggaggtgagaacgcccaacttccactcg

SEQ ID NO: 416992 - DNA, 60 bp, Artificial
  Synthetic oligonucleotide
gcttcaaaatataacctcaatgggcgtgaatccatcatcaaccctggcactgctatggcc

SEQ ID NO: 416993 - DNA, 60 bp, Artificial
  Synthetic oligonucleotide
gcttcaaacccgactcattgtgacattgtctgggttccagctaattccactgcagccccc

SEQ ID NO: 416994 - DNA, 59 bp, Artificial
  Synthetic oligonucleotide
gcttcaaaccgcttcaacccatcttctgcacaccaaaggtcgcttctccacagaaccca

SEQ ID NO: 416995 - DNA, 52 bp, Artificial
  Synthetic oligonucleotide
gcttcaaagcccccaggttgtacccaccctgcgtcacaaccaggagcggttg

SEQ ID NO: 416996 - DNA, 56 bp, Artificial
  Synthetic oligonucleotide
gcttcaaagtcagctttaaactaggctttcagccctaaataaaatgcaaggccgtg

SEQ ID NO: 416997 - DNA, 60 bp, Artificial
  Synthetic oligonucleotide
gcttcaaatccaagcgtgttcttcaatgtaggtaattcagcaagattcagtgttccatac

SEQ ID NO: 416998 - DNA, 55 bp, Artificial
  Synthetic oligonucleotide
gcttcaaatgcttatccggagtttgagatttcctttactcatacccaacatgccg

SEQ ID NO: 416999 - DNA, 55 bp, Artificial
  Synthetic oligonucleotide
gcttcaacaaaggcagattatcttagaatctatgagacaggcccaacagtaggaa

SEQ ID NO: 417000 - DNA, 55 bp, Artificial
  Synthetic oligonucleotide
gcttcaacagtgaggggcgctgccgtgtcttctgcttgtcttagtgacatgccca

SEQ ID NO: 417001 - DNA, 60 bp, Artificial
  Synthetic oligonucleotide
gcttcaacccagcacacacattgacattatctcaacctgctcacacttatgatactgtca

SEQ ID NO: 417002 - DNA, 55 bp, Artificial
  Synthetic oligonucleotide
gcttcaaccgtgcaagagttggatctccaagttccagacagaggacacgcctcac

SEQ ID NO: 417003 - DNA, 60 bp, Artificial
  Synthetic oligonucleotide
gcttcaagaagcaagaatcgtattggaagctaatgtgatggaaatattggggatagcaat

SEQ ID NO: 417004 - DNA, 55 bp, Artificial
  Synthetic oligonucleotide
gcttcaagaaggagcgcggtctgtatgccaccttctgcggctactacgcctcgcg

SEQ ID NO: 417005 - DNA, 55 bp, Artificial
  Synthetic oligonucleotide
gcttcaagccatactctggcacagcttacaactccctagcacctaagggagcccc

SEQ ID NO: 417006 - DNA, 55 bp, Artificial
  Synthetic oligonucleotide
gcttcaagctgtagcaaagagtgagctagagcaaaagagaataaagcaacagctt

SEQ ID NO: 417007 - DNA, 60 bp, Artificial
  Synthetic oligonucleotide
gcttcaatctcagtaacctcaggacagacctcctttatgttttcactgacttttgattca

SEQ ID NO: 417008 - DNA, 55 bp, Artificial
  Synthetic oligonucleotide
gcttcacacccagtcccgtagtggtcggtactaccgatcgcttagggctccccac

SEQ ID NO: 417009 - DNA, 56 bp, Artificial
  Synthetic oligonucleotide
gcttcacccccctagttgggtcttccgcagttactggttctgtcacaagagcctcc

SEQ ID NO: 417010 - DNA, 55 bp, Artificial
  Synthetic oligonucleotide
gcttcacctctgcacgtcgcatgggaaccaccgtgaacgccccttggaacttgcc

SEQ ID NO: 417011 - DNA, 55 bp, Artificial
  Synthetic oligonucleotide
gcttcacctctgcacgttgcatggagaccaccgtgaacgctccccagagcttgcc

SEQ ID NO: 417012 - DNA, 55 bp, Artificial
  Synthetic oligonucleotide
gcttcacctggggtgctccgcggtgcacacaacctcgactgtgtgttaagagagg

SEQ ID NO: 417013 - DNA, 60 bp, Artificial
  Synthetic oligonucleotide
gcttcactatgcgcgggattagctgattcgattgtctacactttgccggtcgcacatccg

SEQ ID NO: 417014 - DNA, 55 bp, Artificial
  Synthetic oligonucleotide
gcttcactattacatagtatgctcgcgaagcatgctgccagacacaatggtactt

SEQ ID NO: 417015 - DNA, 54 bp, Artificial
  Synthetic oligonucleotide
gcttcacttggtgtgagaaaggttgtaataaaccggactccgtctgaaagtaag

SEQ ID NO: 417016 - DNA, 60 bp, Artificial
  Synthetic oligonucleotide
gcttcactttggccatgatcggccttgcacggtagatactaccgttatatcgtctgacct

SEQ ID NO: 417017 - DNA, 55 bp, Artificial
  Synthetic oligonucleotide
gcttcagaatcagctgaagcgttgaactacttggcacttgcaggatatgatacag

SEQ ID NO: 417018 - DNA, 55 bp, Artificial
  Synthetic oligonucleotide
gcttcagatctggtgttcctcccaaggtggtcagctatgaagcgggagaatgggc

SEQ ID NO: 417019 - DNA, 60 bp, Artificial
  Synthetic oligonucleotide
gcttcagatgggtgcacggaaacgatctttggaattggctacggatcatacatcatcacg

SEQ ID NO: 417020 - DNA, 52 bp, Artificial
  Synthetic oligonucleotide
gcttcagcctacggtggacgttaccgactcgacgctcgcgtcaaagcacgtt

SEQ ID NO: 417021 - DNA, 60 bp, Artificial
  Synthetic oligonucleotide
gcttcagctaataggccctgggaacataacggtacatatgcgcggatgacccagattata

SEQ ID NO: 417022 - DNA, 60 bp, Artificial
  Synthetic oligonucleotide
gcttcagctattgggtacatcctcctatacccctggcaccccatcacacggtgggtcatc

SEQ ID NO: 417023 - DNA, 55 bp, Artificial
  Synthetic oligonucleotide
gcttcagctcttagtattaccctagcccttgcgcttttcggcccaagtttacgta

SEQ ID NO: 417024 - DNA, 55 bp, Artificial
  Synthetic oligonucleotide
gcttcagctgatcaatgttactcaacaccctgctaggatagcagagacacctggg

SEQ ID NO: 417025 - DNA, 57 bp, Artificial
  Synthetic oligonucleotide
gcttcaggattgtaagttaaaagctctttgagcctatcttgattaatcataaccacc

SEQ ID NO: 417026 - DNA, 52 bp, Artificial
  Synthetic oligonucleotide
gcttcaggtaggtcttacaatgaaaatggatgtgcaaagcaaatctaactcc

SEQ ID NO: 417027 - DNA, 55 bp, Artificial
  Synthetic oligonucleotide
gcttcaggtctaggtataatcggaatgtacaggggaagagtgccaaacacagagc

SEQ ID NO: 417028 - DNA, 55 bp, Artificial
  Synthetic oligonucleotide
gcttcaggttcgaggaaccagctccgaagacggagtcgaaagacagggaaccttc

SEQ ID NO: 417029 - DNA, 55 bp, Artificial
  Synthetic oligonucleotide
gcttcagtatgggtgccattccctcatgttattgagaaacctagctttacaacac

SEQ ID NO: 417030 - DNA, 55 bp, Artificial
  Synthetic oligonucleotide
gcttcagtcactgacatttcgacggtggctcggtgccccacgactggagaagctc

SEQ ID NO: 417031 - DNA, 60 bp, Artificial
  Synthetic oligonucleotide
gcttcagtctaaggattcgaatgaacgattgactcaacctgtacgagtcacttcattaat

SEQ ID NO: 417032 - DNA, 55 bp, Artificial
  Synthetic oligonucleotide
gcttcagtggcattagcgggcaattcctctctctgccctattagtgggtgggcta

SEQ ID NO: 417033 - DNA, 55 bp, Artificial
  Synthetic oligonucleotide
gcttcatacttctacaattttgtggcagttctctcggctctgctgttttacgacg

SEQ ID NO: 417034 - DNA, 55 bp, Artificial
  Synthetic oligonucleotide
gcttcatcagaggaacgagggtggtcccaaggggacagctgtccaccagaggagt

SEQ ID NO: 417035 - DNA, 59 bp, Artificial
  Synthetic oligonucleotide
gcttcatcggttattctcatttctttcgtacaatagaacgtccaattcaagtgcggata

SEQ ID NO: 417036 - DNA, 54 bp, Artificial
  Synthetic oligonucleotide
gcttcatgcacttttagctcatggaactgaacaatctatgatacaattaagaaa

SEQ ID NO: 417037 - DNA, 58 bp, Artificial
  Synthetic oligonucleotide
gcttcattcgctgatttacttgaggtgacagctatgtcatatgaaagaccgttgaagt

SEQ ID NO: 417038 - DNA, 60 bp, Artificial
  Synthetic oligonucleotide
gcttcattgaatgacttcggatcactggctgttcgagtggtgaatgaccacaaccctacg

SEQ ID NO: 417039 - DNA, 60 bp, Artificial
  Synthetic oligonucleotide
gcttcattgagcccaggaatgatgatgggcatgtttaacatgctgagtacagtcttagga

SEQ ID NO: 417040 - DNA, 55 bp, Artificial
  Synthetic oligonucleotide
gcttcattgttacgtagccatgggtttgaaggaaggaagttcatcacagatactg

SEQ ID NO: 417041 - DNA, 55 bp, Artificial
  Synthetic oligonucleotide
gcttcatttccatcgcaacgcggtaacgtgctagatgttaatactttagttgaca

SEQ ID NO: 417042 - DNA, 59 bp, Artificial
  Synthetic oligonucleotide
gcttcattttactaaccttgctactcgctttaactatctgcctgctacctcttcgcctc

SEQ ID NO: 417043 - DNA, 55 bp, Artificial
  Synthetic oligonucleotide
gcttcattttggtcagctgtgtgctgtcatgtccaaactgaaggctgtccgagct

SEQ ID NO: 417044 - DNA, 58 bp, Artificial
  Synthetic oligonucleotide
gcttccaacttgacccaggtaactcatctgtcatgtcgcgtacactgctaggggagat

SEQ ID NO: 417045 - DNA, 57 bp, Artificial
  Synthetic oligonucleotide
gcttccacaacgctcccacctctgcggcacaaccatcccgtttggggcctatcggac

SEQ ID NO: 417046 - DNA, 59 bp, Artificial
  Synthetic oligonucleotide
gcttccacacccgaagacactgattctacagcccgtcaacctcaagtgacgccaactcg

SEQ ID NO: 417047 - DNA, 55 bp, Artificial
  Synthetic oligonucleotide
gcttccacagtttcgatctcaagaggagagttagggtcaataggtttacttttag

SEQ ID NO: 417048 - DNA, 55 bp, Artificial
  Synthetic oligonucleotide
gcttccaccatgagacgaatgaacaggcccttactgctaagctggcacccttctc

SEQ ID NO: 417049 - DNA, 55 bp, Artificial
  Synthetic oligonucleotide
gcttccactgattctcatttcaagctgagcctctggctaagggttccaaaggttt

SEQ ID NO: 417050 - DNA, 59 bp, Artificial
  Synthetic oligonucleotide
gcttccagaggaaaccacgtcgcccctactcactacgtgacggagtcggatgcgtcgca

SEQ ID NO: 417051 - DNA, 60 bp, Artificial
  Synthetic oligonucleotide
gcttccaggaagctgtctattctttattacaaattgctggtgcggcttttgtcacctcac

SEQ ID NO: 417052 - DNA, 60 bp, Artificial
  Synthetic oligonucleotide
gcttccagtggcatgttatggatggccgatgtcccacttcaatggatcgcgtcggctata

SEQ ID NO: 417053 - DNA, 59 bp, Artificial
  Synthetic oligonucleotide
gcttccataaggatgcctgggagtatatttggttccggatgaatgggggattggctcga

SEQ ID NO: 417054 - DNA, 59 bp, Artificial
  Synthetic oligonucleotide
gcttcccaaagatggacgtcatctaaatactgatattcctccccgaatgggatggttgc

SEQ ID NO: 417055 - DNA, 55 bp, Artificial
  Synthetic oligonucleotide
gcttcccagggattcgagtcgggtcctggacatcctgcggtactcatcgagagcg

SEQ ID NO: 417056 - DNA, 53 bp, Artificial
  Synthetic oligonucleotide
gcttcccataagcattaatgctaaaatacctcaactagggttcaatgttgaag

SEQ ID NO: 417057 - DNA, 55 bp, Artificial
  Synthetic oligonucleotide
gcttcccatccacataatagttaagacaccgccagaattgttatacacgtacgca

SEQ ID NO: 417058 - DNA, 60 bp, Artificial
  Synthetic oligonucleotide
gcttcccatttccgcaaagctattgcaccatccaacgacagaaatacgatcagagtttta

SEQ ID NO: 417059 - DNA, 60 bp, Artificial
  Synthetic oligonucleotide
gcttcccgaattacgatacggcgacacgcaaacttgacttcagatgtattacagacagcg

SEQ ID NO: 417060 - DNA, 55 bp, Artificial
  Synthetic oligonucleotide
gcttcccgccggaagaccgcggcggttctgttcctcccacaggagtacggcaaca

SEQ ID NO: 417061 - DNA, 60 bp, Artificial
  Synthetic oligonucleotide
gcttcccgcctactcatgagatggaaatgcactatcttgtaggcaaggaaagcttaacct

SEQ ID NO: 417062 - DNA, 54 bp, Artificial
  Synthetic oligonucleotide
gcttcccgtactttgtatttgattgccagtctctttgggcccccataaattctt

SEQ ID NO: 417063 - DNA, 54 bp, Artificial
  Synthetic oligonucleotide
gcttcccgtatttggtgttggattgccagtccctttgggcccccatgaactctt

SEQ ID NO: 417064 - DNA, 60 bp, Artificial
  Synthetic oligonucleotide
gcttccctgtacatgttactagtaaatccaaggccctcagtggtggtgccaagcacgctc

SEQ ID NO: 417065 - DNA, 54 bp, Artificial
  Synthetic oligonucleotide
gcttccctgtgcaacctcgagtccccttaagacagatgacctataaattagcag

SEQ ID NO: 417066 - DNA, 57 bp, Artificial
  Synthetic oligonucleotide
gcttccctgttcgccctcaagtaccattaaggcccatgacttacaaacaagcattcg

SEQ ID NO: 417067 - DNA, 55 bp, Artificial
  Synthetic oligonucleotide
gcttcccttcgaactgaagcagaacatggagataaggctgtccatcttcatgaag

SEQ ID NO: 417068 - DNA, 55 bp, Artificial
  Synthetic oligonucleotide
gcttcccttttacgcaggtatctcactgcagagcagggacaaattgagtacatcg

SEQ ID NO: 417069 - DNA, 54 bp, Artificial
  Synthetic oligonucleotide
gcttccgaaggaaggaacaacgaaatattcaatttcgttgtgacaggtgtacgt

SEQ ID NO: 417070 - DNA, 58 bp, Artificial
  Synthetic oligonucleotide
gcttccgacagaattgatttcgtcggctggaggccagctgttttactcacgccccgtc

SEQ ID NO: 417071 - DNA, 52 bp, Artificial
  Synthetic oligonucleotide
gcttccgacataatcctgtgcaaggttcacgatggtcccttgcagagatgct

SEQ ID NO: 417072 - DNA, 55 bp, Artificial
  Synthetic oligonucleotide
gcttccgaccgcagtaaagcatattgccgctgttagagttttacgaataaatgac

SEQ ID NO: 417073 - DNA, 55 bp, Artificial
  Synthetic oligonucleotide
gcttccgctatcattgaaactgtcgcgcagatgtttccggactttcgcagagaac

SEQ ID NO: 417074 - DNA, 55 bp, Artificial
  Synthetic oligonucleotide
gcttccggagtttactccggcaacttgtcaagacgtgtcgtggtaacgacaccgc

SEQ ID NO: 417075 - DNA, 59 bp, Artificial
  Synthetic oligonucleotide
gcttccgtcagcctacaattgtccggtcattgttacttgggacgaggctcgctgtattg

SEQ ID NO: 417076 - DNA, 60 bp, Artificial
  Synthetic oligonucleotide
gcttccgtggcggtgcaggcctctcagcgccactgagacacacttggaaacatcttgtaa

SEQ ID NO: 417077 - DNA, 58 bp, Artificial
  Synthetic oligonucleotide
gcttcctaaagacaggcgtaggatatatgcaacttggcgtaacagggccgcataaaat

SEQ ID NO: 417078 - DNA, 54 bp, Artificial
  Synthetic oligonucleotide
gcttcctaagtcggttgtggtagaagtcccgaacggtgagaagtcacccgagga

SEQ ID NO: 417079 - DNA, 57 bp, Artificial
  Synthetic oligonucleotide
gcttcctaccaccaagccacaactcgggagttacacctcatggggtgtaacgccatc

SEQ ID NO: 417080 - DNA, 54 bp, Artificial
  Synthetic oligonucleotide
gcttcctaccagaaaacctaaaccgggagctttgatggtggtatacgcgcggga

SEQ ID NO: 417081 - DNA, 60 bp, Artificial
  Synthetic oligonucleotide
gcttcctacctctcatagtctgtggctcaggcaacactcaatttaactttatcacacatg

SEQ ID NO: 417082 - DNA, 55 bp, Artificial
  Synthetic oligonucleotide
gcttcctaggcagatcggggtgcatccatgaatcagtgttggatattgtggacaa

SEQ ID NO: 417083 - DNA, 55 bp, Artificial
  Synthetic oligonucleotide
gcttcctatagaactctgctcgggactttccagttaccatgactacggggcccgg

SEQ ID NO: 417084 - DNA, 59 bp, Artificial
  Synthetic oligonucleotide
gcttcctatgtggtaatcggaccttatgaagctattgctaaaagccgacccgcgatggc

SEQ ID NO: 417085 - DNA, 58 bp, Artificial
  Synthetic oligonucleotide
gcttcctattgcaaacggaggtacttcaacaaatgacggagttatagatacaattgcc

SEQ ID NO: 417086 - DNA, 55 bp, Artificial
  Synthetic oligonucleotide
gcttcctcacatccatcatggaggaaccttcattccaggaacttacaagatagtg

SEQ ID NO: 417087 - DNA, 60 bp, Artificial
  Synthetic oligonucleotide
gcttcctccgcaaggcggctcacaagttctgctgctttatgcggtggcttgggcaggagt

SEQ ID NO: 417088 - DNA, 58 bp, Artificial
  Synthetic oligonucleotide
gcttcctctcgaccttcccatattcgacatgggagaagtctatgtctttcccggtgaa

SEQ ID NO: 417089 - DNA, 55 bp, Artificial
  Synthetic oligonucleotide
gcttcctgctttaattgtcataccaatctccgaatagtagtcgtcgcttcacctg

SEQ ID NO: 417090 - DNA, 60 bp, Artificial
  Synthetic oligonucleotide
gcttccttgaattgcaagttcagctctactgggaatagatccaaagtgcccagagatata

SEQ ID NO: 417091 - DNA, 60 bp, Artificial
  Synthetic oligonucleotide
gcttccttgcttttcttcttcggaacaatgacaccgttgtgtgctctgcagaggtggccg

SEQ ID NO: 417092 - DNA, 53 bp, Artificial
  Synthetic oligonucleotide
gcttcctttaccccacaaatcttagacggtaatacaggacggaaacaagtcgc

SEQ ID NO: 417093 - DNA, 53 bp, Artificial
  Synthetic oligonucleotide
gcttcgaaaataagttttcctccccgtcaaccgacgtgctcggtccgtgcttc

SEQ ID NO: 417094 - DNA, 59 bp, Artificial
  Synthetic oligonucleotide
gcttcgaaaccttcactggaggctggttcagattgaaccaactactcttctgtgggcta

SEQ ID NO: 417095 - DNA, 60 bp, Artificial
  Synthetic oligonucleotide
gcttcgaaatatttcacaagtgtgatgacgattgtatggccagtattagaaacaacacat

SEQ ID NO: 417096 - DNA, 55 bp, Artificial
  Synthetic oligonucleotide
gcttcgacagagctaactgacgatctcctcaaacagtgtctgccagtcggactca

SEQ ID NO: 417097 - DNA, 57 bp, Artificial
  Synthetic oligonucleotide
gcttcgacccactttgagaggacatcctcccgtcctccccttcgttctctcttcgca

SEQ ID NO: 417098 - DNA, 60 bp, Artificial
  Synthetic oligonucleotide
gcttcgagcgtgggcagattggagaggttgcgtgaggcaagaactaatatgtttagagaa

SEQ ID NO: 417099 - DNA, 60 bp, Artificial
  Synthetic oligonucleotide
gcttcgatccacgctgctttctgccatgcgagctggtcctgttctttatgttgagacgtg

SEQ ID NO: 417100 - DNA, 55 bp, Artificial
  Synthetic oligonucleotide
gcttcgatttctttgagaaactttacaatcaagcagttaaggagaagagaactgg

SEQ ID NO: 417101 - DNA, 52 bp, Artificial
  Synthetic oligonucleotide
gcttcgcagagcaatctggatcacggacgaagtggacttggggagacagtac

SEQ ID NO: 417102 - DNA, 59 bp, Artificial
  Synthetic oligonucleotide
gcttcgcccggaggccagcgtaggccccgagcgtggagtagccctcagagtcccgagca

SEQ ID NO: 417103 - DNA, 58 bp, Artificial
  Synthetic oligonucleotide
gcttcgccgacctcatgggatacattccgctcgtaggcgcccccgtaggtggcgtcgc

SEQ ID NO: 417104 - DNA, 58 bp, Artificial
  Synthetic oligonucleotide
gcttcgccgacctcatggggtacataccgctcgtcggcgccccccttggaggcgctgc

SEQ ID NO: 417105 - DNA, 55 bp, Artificial
  Synthetic oligonucleotide
gcttcgccgaggtgagactaacatggggttggcagtatcgcgaggctgtgccaaa

SEQ ID NO: 417106 - DNA, 57 bp, Artificial
  Synthetic oligonucleotide
gcttcgctattgtgtcggagctattaagcgcgagctacgtaggaggtgggagtccgt

SEQ ID NO: 417107 - DNA, 55 bp, Artificial
  Synthetic oligonucleotide
gcttcgctcatatacagacagctgctcactaattcttacacagtggatttgtctg

SEQ ID NO: 417108 - DNA, 60 bp, Artificial
  Synthetic oligonucleotide
gcttcgctgactggtggatcgagatccttcgcaccacgatgcgtctccctgtgtacgtgt

SEQ ID NO: 417109 - DNA, 60 bp, Artificial
  Synthetic oligonucleotide
gcttcgctgcccaatttctattattgtaggcatttctcgtgcaatatgtcgcaacgacag

SEQ ID NO: 417110 - DNA, 60 bp, Artificial
  Synthetic oligonucleotide
gcttcggacttagaagaagcattcaacgcttctgcatatacctgagctaaatgctgaccc

SEQ ID NO: 417111 - DNA, 60 bp, Artificial
  Synthetic oligonucleotide
gcttcggactttcgcatatatagcgagtccgcatgccgggcaaatggcgaggaggttcca

SEQ ID NO: 417112 - DNA, 60 bp, Artificial
  Synthetic oligonucleotide
gcttcggcatatgcgtcgttggcagattgctgacctcctctagcagttcttccgtcgatt

SEQ ID NO: 417113 - DNA, 53 bp, Artificial
  Synthetic oligonucleotide
gcttcggccttaataggcgtttaaacccctttctcagatcccactttctggcc

SEQ ID NO: 417114 - DNA, 53 bp, Artificial
  Synthetic oligonucleotide
gcttcggctgtcacccgaagtccgcctttcacccccccattgaaagggggcgc

SEQ ID NO: 417115 - DNA, 55 bp, Artificial
  Synthetic oligonucleotide
gcttcggcttataaacctgaaattgttgtgaagaagggtaagtatagggtgagga

SEQ ID NO: 417116 - DNA, 55 bp, Artificial
  Synthetic oligonucleotide
gcttcggtacaagggtactgttaatattgagtgtgcagacccagatgttggaatg

SEQ ID NO: 417117 - DNA, 55 bp, Artificial
  Synthetic oligonucleotide
gcttcggtggattcactttcaaaagaacaagtgggtcatcagtcaagagagaaga

SEQ ID NO: 417118 - DNA, 55 bp, Artificial
  Synthetic oligonucleotide
gcttcggtgggtgaacaccatctcggggcccatgcgagggcgctcaaaatcgaga

SEQ ID NO: 417119 - DNA, 57 bp, Artificial
  Synthetic oligonucleotide
gcttcgtatgttcccggtcctgtcggtggaattgccaccggtgttcaacacattgga

SEQ ID NO: 417120 - DNA, 55 bp, Artificial
  Synthetic oligonucleotide
gcttcgtattgaagatgagtctcaatccggttaataagagcgacccgaagtcgtc

SEQ ID NO: 417121 - DNA, 55 bp, Artificial
  Synthetic oligonucleotide
gcttcgtgatcttataggtgtggttcgtgcgaagaactatgtcgaagcgtcctgc

SEQ ID NO: 417122 - DNA, 53 bp, Artificial
  Synthetic oligonucleotide
gcttcgtgcatgtactcaattttctcaggttaattaaacaagtactcaatgct

SEQ ID NO: 417123 - DNA, 55 bp, Artificial
  Synthetic oligonucleotide
gcttcgtgcttaaaactcacagtgtccgaaaggactttgtgcactccgtcaaggt

SEQ ID NO: 417124 - DNA, 55 bp, Artificial
  Synthetic oligonucleotide
gcttcgtggaatatttaactatttcagtcgcagatactacactcagctacctacg

SEQ ID NO: 417125 - DNA, 60 bp, Artificial
  Synthetic oligonucleotide
gcttcgtgggcagggaatatattaaggactcaggagtcggaatgtgtatgccataatgga

SEQ ID NO: 417126 - DNA, 51 bp, Artificial
  Synthetic oligonucleotide
gcttctaaagtaattgcgcttcatagaaggtggcagctcgccttatataaa

SEQ ID NO: 417127 - DNA, 60 bp, Artificial
  Synthetic oligonucleotide
gcttctaacatcagtgattacgctagtgtatcttgtgtacagactttttgctggatgtca

SEQ ID NO: 417128 - DNA, 60 bp, Artificial
  Synthetic oligonucleotide
gcttctaagaagtgcaataggccaagtatcaaggcccatgttcttgtatgtgaggacaaa

SEQ ID NO: 417129 - DNA, 55 bp, Artificial
  Synthetic oligonucleotide
gcttctaagcttacttctttcagagtagttagggaccgttgacgacagctccacg

SEQ ID NO: 417130 - DNA, 55 bp, Artificial
  Synthetic oligonucleotide
gcttctacagatgcgacgagacatggtcaatgacgacgcaatagaaatgcaagcg

SEQ ID NO: 417131 - DNA, 54 bp, Artificial
  Synthetic oligonucleotide
gcttctacccggttcatagtggataacaagttctccacctttgggtggtacacc

SEQ ID NO: 417132 - DNA, 55 bp, Artificial
  Synthetic oligonucleotide
gcttctacgtgctacacgccccagtgacctggtcctcaacctacataacaatctg

SEQ ID NO: 417133 - DNA, 60 bp, Artificial
  Synthetic oligonucleotide
gcttctactagtaattgtgtactcactgcacgtgagcgttggaatgctcctgacgttcat

SEQ ID NO: 417134 - DNA, 60 bp, Artificial
  Synthetic oligonucleotide
gcttctactggtaaaacaaacatggcaaaggccatagtccaaggcattagactatatggc

SEQ ID NO: 417135 - DNA, 60 bp, Artificial
  Synthetic oligonucleotide
gcttctagatgtggattgacagtcgaatacgtataaattagagtacaagcatggaatgtt

SEQ ID NO: 417136 - DNA, 55 bp, Artificial
  Synthetic oligonucleotide
gcttctatcaaagcttcgggagagactaatctttcatatgcccatgcacgagctt

SEQ ID NO: 417137 - DNA, 54 bp, Artificial
  Synthetic oligonucleotide
gcttctatccaacagaccccccgttctacccctggctaccccccaagcgagata

SEQ ID NO: 417138 - DNA, 60 bp, Artificial
  Synthetic oligonucleotide
gcttctatccatgtggttcaccacttctcagctactgagaaggatactattatagctggc

SEQ ID NO: 417139 - DNA, 56 bp, Artificial
  Synthetic oligonucleotide
gcttctatccctcagacacccctcactacccgtggttaccccccaagcgcgatatc

SEQ ID NO: 417140 - DNA, 60 bp, Artificial
  Synthetic oligonucleotide
gcttctatgggctggaatgttcgcgggagcaagaagttttataagatacacgtggagatg

SEQ ID NO: 417141 - DNA, 60 bp, Artificial
  Synthetic oligonucleotide
gcttctatgttcctgagcatggcgtaattatgactttatctgttactcgcttccctccta

SEQ ID NO: 417142 - DNA, 58 bp, Artificial
  Synthetic oligonucleotide
gcttctatgttgagttgattcgtggaagaccaaaggaggacaaagtgtggtggaccag

SEQ ID NO: 417143 - DNA, 58 bp, Artificial
  Synthetic oligonucleotide
gcttctcaacagaccaaaagtccacacagttctcgttgtagtccttggacaatatatt

SEQ ID NO: 417144 - DNA, 60 bp, Artificial
  Synthetic oligonucleotide
gcttctcaatctcccgttatatctgcaatagttgattttgctactataaaagcaatacgc

SEQ ID NO: 417145 - DNA, 57 bp, Artificial
  Synthetic oligonucleotide
gcttctcatctgatttaagccagcaccctttaggtagaaagtttttatatcaggtgg

SEQ ID NO: 417146 - DNA, 55 bp, Artificial
  Synthetic oligonucleotide
gcttctccatattaagttgtctagttagttgtacagcagtagctccttcgagtcc

SEQ ID NO: 417147 - DNA, 60 bp, Artificial
  Synthetic oligonucleotide
gcttctccttatgagtatattttgctgtcgccaacagatgttccttggttaacacagcaa

SEQ ID NO: 417148 - DNA, 55 bp, Artificial
  Synthetic oligonucleotide
gcttctcgaccggcagtcatgagtgttagggcatataccattggtggaagagggc

SEQ ID NO: 417149 - DNA, 55 bp, Artificial
  Synthetic oligonucleotide
gcttctcgcgcaacttagaaaacaacaatgctcaataatgtacggattcgagacc

SEQ ID NO: 417150 - DNA, 55 bp, Artificial
  Synthetic oligonucleotide
gcttctcggtggtttaccgacagaattgatttcgtcggctgggggtcagatgttt

SEQ ID NO: 417151 - DNA, 55 bp, Artificial
  Synthetic oligonucleotide
gcttctctaaacctagccttgttttcgtagaggccagtgagtattaccctgctag

SEQ ID NO: 417152 - DNA, 60 bp, Artificial
  Synthetic oligonucleotide
gcttctgacagacacagcgaaacgtaggacctatatatacctctactagttggtgtcaac

SEQ ID NO: 417153 - DNA, 55 bp, Artificial
  Synthetic oligonucleotide
gcttctgatcaggatgtagcagtttctttgagaacaccattcgagatattgaatg

SEQ ID NO: 417154 - DNA, 55 bp, Artificial
  Synthetic oligonucleotide
gcttctgcaccttaccttggaagaggatactgaaggcctgttagaatggtgtaag

SEQ ID NO: 417155 - DNA, 60 bp, Artificial
  Synthetic oligonucleotide
gcttctgcggcagcgtcgttagctgtctggcaacctcctctagcacttcttccgtcgacc

SEQ ID NO: 417156 - DNA, 55 bp, Artificial
  Synthetic oligonucleotide
gcttctgctgatgacctgtatcgcacctgcaaggccgctggcacatgtcccgagg

SEQ ID NO: 417157 - DNA, 60 bp, Artificial
  Synthetic oligonucleotide
gcttctggaagcccatgagtcgcctggctttaattctattgggcctggcagcccaaatct

SEQ ID NO: 417158 - DNA, 58 bp, Artificial
  Synthetic oligonucleotide
gcttctggagacaacagaccattccgtattattgactcttcgaagtacgtgaagcacc

SEQ ID NO: 417159 - DNA, 55 bp, Artificial
  Synthetic oligonucleotide
gcttctggcattgtgtttcgagagttatgtctaatgagctgagacttaccaagga

SEQ ID NO: 417160 - DNA, 55 bp, Artificial
  Synthetic oligonucleotide
gcttctggcgtagtctctctgcgctaacacgatacaacttgagcgaagtgaagag

SEQ ID NO: 417161 - DNA, 57 bp, Artificial
  Synthetic oligonucleotide
gcttctgtcgatgaaatgaattaccctgaaaaagcccgtaaggttcgcaagttcatg

SEQ ID NO: 417162 - DNA, 60 bp, Artificial
  Synthetic oligonucleotide
gcttctgtctccattgtagaccaacttgtggccaggatgctcttccgagaccaaaatgaa

SEQ ID NO: 417163 - DNA, 56 bp, Artificial
  Synthetic oligonucleotide
gcttctgtgtgacaacatggttttgagagaacatgattacatggcaaatagctaca

SEQ ID NO: 417164 - DNA, 56 bp, Artificial
  Synthetic oligonucleotide
gcttcttaagggtccgagaccagcggggaaatgtgctcttatctcctgaggaagtt

SEQ ID NO: 417165 - DNA, 57 bp, Artificial
  Synthetic oligonucleotide
gcttcttactcgttgcactacttttagcctttattttgtgggcttgtcagaatggaa

SEQ ID NO: 417166 - DNA, 55 bp, Artificial
  Synthetic oligonucleotide
gcttcttataagcacgaaggttacaagtcgtcaccgtcgaataagctgttgcttc

SEQ ID NO: 417167 - DNA, 60 bp, Artificial
  Synthetic oligonucleotide
gcttcttccgtcgcttgccgtaatggtggcatcaggtggcgctcgcgtgattcagatgac

SEQ ID NO: 417168 - DNA, 60 bp, Artificial
  Synthetic oligonucleotide
gcttcttctgcgtcataccgcttccttgtcaggtctatgtactcacgatgtaaccccgaa

SEQ ID NO: 417169 - DNA, 55 bp, Artificial
  Synthetic oligonucleotide
gcttcttcttttaagaggagagcggaagaaaagaataacgtcaacccgcgacagc

SEQ ID NO: 417170 - DNA, 59 bp, Artificial
  Synthetic oligonucleotide
gcttcttgactttgcactcgagcttgaattcaggaacttgacccctgggaacaccaata

SEQ ID NO: 417171 - DNA, 60 bp, Artificial
  Synthetic oligonucleotide
gcttcttgcatcatgaggatatctactagttctatcatgtcctctgccttgaaccccccc

SEQ ID NO: 417172 - DNA, 55 bp, Artificial
  Synthetic oligonucleotide
gcttcttggagttgatggctaaatgttcaaaacctgattgggtctcggagagcag

SEQ ID NO: 417173 - DNA, 56 bp, Artificial
  Synthetic oligonucleotide
gcttctttaaagggaaatctacggggatccaaagtgaagtgccagttgacatcaat

SEQ ID NO: 417174 - DNA, 56 bp, Artificial
  Synthetic oligonucleotide
gcttctttagctgatgtgtatgcggctttgaggccagatttcagaatgaatggtgt

SEQ ID NO: 417175 - DNA, 55 bp, Artificial
  Synthetic oligonucleotide
gcttctttggaggtgaacacatcgtctttgcacgatctgaacgtcgctcttgctg

SEQ ID NO: 417176 - DNA, 56 bp, Artificial
  Synthetic oligonucleotide
gcttgaaacgaccggcatttttagcgtacaaacctgagaataccccgcactggatc

SEQ ID NO: 417177 - DNA, 54 bp, Artificial
  Synthetic oligonucleotide
gcttgaaagctatttaagtgcgtaccgcactacaaaagcagtcccatttacagc

SEQ ID NO: 417178 - DNA, 57 bp, Artificial
  Synthetic oligonucleotide
gcttgaaaggaggggggagcctcggttgagcttcaagtatgaaggattgaccacgtg

SEQ ID NO: 417179 - DNA, 55 bp, Artificial
  Synthetic oligonucleotide
gcttgaaatggctactgatattggctttgtcgtgaaacctaaagctggctggtat

SEQ ID NO: 417180 - DNA, 55 bp, Artificial
  Synthetic oligonucleotide
gcttgaaatggtgcgttcaatagaggacgccgttttggaccttgaggcgttggaa

SEQ ID NO: 417181 - DNA, 55 bp, Artificial
  Synthetic oligonucleotide
gcttgaaatttcaggcgagcttggatataagtcttctctggatgtaaaaggtatg

SEQ ID NO: 417182 - DNA, 51 bp, Artificial
  Synthetic oligonucleotide
gcttgaacaattcagaccagaatgtatcctagcaacacttgtctgcccacc

SEQ ID NO: 417183 - DNA, 52 bp, Artificial
  Synthetic oligonucleotide
gcttgaacataatcaggggttctgcttacgaaatagagccaaaagggaagat

SEQ ID NO: 417184 - DNA, 55 bp, Artificial
  Synthetic oligonucleotide
gcttgaaccacaaatacgctcagaacaaatcgtaaataagtactattattcgcgg

SEQ ID NO: 417185 - DNA, 60 bp, Artificial
  Synthetic oligonucleotide
gcttgaaccgtataggccaaagagcatccttgcacctgcgcagtggcacaattgttggaa

SEQ ID NO: 417186 - DNA, 50 bp, Artificial
  Synthetic oligonucleotide
gcttgaacctagccgcttacatagaatctgagagaggttgtctagttgtg

SEQ ID NO: 417187 - DNA, 55 bp, Artificial
  Synthetic oligonucleotide
gcttgaacctgaaaggatagtttccatcttagagtgggataggagcaaggaactt

SEQ ID NO: 417188 - DNA, 58 bp, Artificial
  Synthetic oligonucleotide
gcttgaacgccccgtctactctccagtcacagttcttaccgctgagcacttttattag

SEQ ID NO: 417189 - DNA, 55 bp, Artificial
  Synthetic oligonucleotide
gcttgaagatctttgagaggctctgcttacattacggtgcgatcgcgtaaccagg

SEQ ID NO: 417190 - DNA, 55 bp, Artificial
  Synthetic oligonucleotide
gcttgaagcaatctgtgcagctatgattgaggcatggggttatgactggttggtg

SEQ ID NO: 417191 - DNA, 55 bp, Artificial
  Synthetic oligonucleotide
gcttgaagcacttgacctgacaactagtgcaggatacccttatgtgacaatggga

SEQ ID NO: 417192 - DNA, 55 bp, Artificial
  Synthetic oligonucleotide
gcttgaagccgcgtctgaggaagtaccgttagttggttctgggatggcgacggct

SEQ ID NO: 417193 - DNA, 55 bp, Artificial
  Synthetic oligonucleotide
gcttgaaggagcgaagtcacagttgctcgagtttagaaacctgaatgccgatcac

SEQ ID NO: 417194 - DNA, 55 bp, Artificial
  Synthetic oligonucleotide
gcttgaagtcatgcgagtgctgtggcccggaggttatactgctagcgggcacgca

SEQ ID NO: 417195 - DNA, 54 bp, Artificial
  Synthetic oligonucleotide
gcttgaatacatggctgtttaacccaattatattgagaccaaacaacgtacaag

SEQ ID NO: 417196 - DNA, 59 bp, Artificial
  Synthetic oligonucleotide
gcttgaatgatacagttgctctcggaaattacggaggtaccgtccggtctgaagtgcac

SEQ ID NO: 417197 - DNA, 60 bp, Artificial
  Synthetic oligonucleotide
gcttgaattatacttgcgagttcacgtaacgctcggtgagtccattccattggccataga

SEQ ID NO: 417198 - DNA, 59 bp, Artificial
  Synthetic oligonucleotide
gcttgacaaacggcgtgtggatttggctcgagttggaaatagcgagttgctttcgtatg

SEQ ID NO: 417199 - DNA, 60 bp, Artificial
  Synthetic oligonucleotide
gcttgacaacggtgaggtttattgcgtggatcttgtacattccaaattctcacaccatct

SEQ ID NO: 417200 - DNA, 55 bp, Artificial
  Synthetic oligonucleotide
gcttgacaagaatggcaactttatttggggtcagcgcggatatcatgctaagcgg

SEQ ID NO: 417201 - DNA, 52 bp, Artificial
  Synthetic oligonucleotide
gcttgacacagtatctcatagaagcaattctatggggggactggattctgac

SEQ ID NO: 417202 - DNA, 55 bp, Artificial
  Synthetic oligonucleotide
gcttgacacccctagacgggtgcccgttgttatcatccttactggggcacctggc

SEQ ID NO: 417203 - DNA, 55 bp, Artificial
  Synthetic oligonucleotide
gcttgacagcacaaagagagtattagagttctcagttacaatagatttcacgcac

SEQ ID NO: 417204 - DNA, 60 bp, Artificial
  Synthetic oligonucleotide
gcttgacagcctgcgtaccgtaacgccgagacgtgcctcagataatgggcacgcagtttc

SEQ ID NO: 417205 - DNA, 57 bp, Artificial
  Synthetic oligonucleotide
gcttgacatcctacccgaaaagacactaaccacctatggcttcggacatcaaaacaa

SEQ ID NO: 417206 - DNA, 55 bp, Artificial
  Synthetic oligonucleotide
gcttgaccaaaggataatatggcaaaattggtacgcatttacgtcctcaatgaag

SEQ ID NO: 417207 - DNA, 55 bp, Artificial
  Synthetic oligonucleotide
gcttgaccccaaagttccaagtagaagtcaataatctcatgagctgtggtgcatc

SEQ ID NO: 417208 - DNA, 60 bp, Artificial
  Synthetic oligonucleotide
gcttgacccgcagtgatgctctcccctgtgcgtgaatccattgtctgcgcagttaatgtg

SEQ ID NO: 417209 - DNA, 55 bp, Artificial
  Synthetic oligonucleotide
gcttgaccgcaatccgtgtcattacacggccacgatatgcagcaagacgtgcaag

SEQ ID NO: 417210 - DNA, 60 bp, Artificial
  Synthetic oligonucleotide
gcttgaccggtttacaagagtaggtgtaccaccaattgacccagagattcaatgtgcagc

SEQ ID NO: 417211 - DNA, 55 bp, Artificial
  Synthetic oligonucleotide
gcttgaccgtgtcctaactgccaatggcctgtcaccagtatccgagggtcttgac

SEQ ID NO: 417212 - DNA, 55 bp, Artificial
  Synthetic oligonucleotide
gcttgacctcagattgcctgagttggcctattatgcccaaaatgtgtactgagca

SEQ ID NO: 417213 - DNA, 60 bp, Artificial
  Synthetic oligonucleotide
gcttgacgagcagtgatgggttcccctgtgcgtgaatccatggttatggcagttgaaatg

SEQ ID NO: 417214 - DNA, 55 bp, Artificial
  Synthetic oligonucleotide
gcttgactccacgctcggtccactagcgagtgtcagtagtagcactgttgcttcg

SEQ ID NO: 417215 - DNA, 60 bp, Artificial
  Synthetic oligonucleotide
gcttgactgcattaccagctaatgaggagagatgtgtgcgcaccgtgataaaaggtgtgt

SEQ ID NO: 417216 - DNA, 58 bp, Artificial
  Synthetic oligonucleotide
gcttgacttatcgcaatggacgcttcggacgggacataattattacgaaattcggcag

SEQ ID NO: 417217 - DNA, 55 bp, Artificial
  Synthetic oligonucleotide
gcttgagaaaggcgagcctttaatggcgcatgacgtggtacaaaccctcgagaac

SEQ ID NO: 417218 - DNA, 59 bp, Artificial
  Synthetic oligonucleotide
gcttgagagggcggttctaggagaagtcaaatcatgcacctggccagaaacccacactc

SEQ ID NO: 417219 - DNA, 59 bp, Artificial
  Synthetic oligonucleotide
gcttgagatgctaaattacgtggattataacatcatatttcggcgtatgaattgatgag

SEQ ID NO: 417220 - DNA, 55 bp, Artificial
  Synthetic oligonucleotide
gcttgagctacgggcacacactccaggaataaggaagatgctggaggatggagag

SEQ ID NO: 417221 - DNA, 60 bp, Artificial
  Synthetic oligonucleotide
gcttgagctgcagtgatgggttcccctgtgtgtgaatccatggttgtggcagttgatgtg

SEQ ID NO: 417222 - DNA, 55 bp, Artificial
  Synthetic oligonucleotide
gcttgaggacacgtagtaaaaggtccagtatatcgtgtaacgataccttgacgtg

SEQ ID NO: 417223 - DNA, 60 bp, Artificial
  Synthetic oligonucleotide
gcttgaggattaacgatgaatctaaggatgaaatgatggtgttattcaataaagaaccta

SEQ ID NO: 417224 - DNA, 60 bp, Artificial
  Synthetic oligonucleotide
gcttgaggcgaagtaatgtacgatgtcacaatttatacagtaaatcataataatcagtag

SEQ ID NO: 417225 - DNA, 60 bp, Artificial
  Synthetic oligonucleotide
gcttgatcacgtcttcgttcctcaaccagcggccgatcgatggctatctcccgttcctat

SEQ ID NO: 417226 - DNA, 56 bp, Artificial
  Synthetic oligonucleotide
gcttgatccatccagaatgctagagtagatgctgtaactttggcaccagaattaag

SEQ ID NO: 417227 - DNA, 50 bp, Artificial
  Synthetic oligonucleotide
gcttgatccgtttcaccgggtcgagagtgtatcgtggtgcgcgtaccccc

SEQ ID NO: 417228 - DNA, 59 bp, Artificial
  Synthetic oligonucleotide
gcttgatcctcaaaagaagtcaagagcgactcaacttttgaaccaagcaaatagaacta

SEQ ID NO: 417229 - DNA, 60 bp, Artificial
  Synthetic oligonucleotide
gcttgatcctctacactctcttcgttggatttcacttcttccatccgagggcgtgtgctt

SEQ ID NO: 417230 - DNA, 60 bp, Artificial
  Synthetic oligonucleotide
gcttgatcctctcctagtcgctagaagcctagaacaagcagtaatgtctgcacgagttcc

SEQ ID NO: 417231 - DNA, 60 bp, Artificial
  Synthetic oligonucleotide
gcttgatctatgcagccgtgatgtgtcccggataacattcttccagaaggattgtaataa

SEQ ID NO: 417232 - DNA, 55 bp, Artificial
  Synthetic oligonucleotide
gcttgatgtcttttgggctctttgcgtttgcgtaaacgtttgcccacttcttcgt

SEQ ID NO: 417233 - DNA, 55 bp, Artificial
  Synthetic oligonucleotide
gcttgatgtgcgtgagaaattcttgcgcggccatttggggcctgctggggcgtgg

SEQ ID NO: 417234 - DNA, 58 bp, Artificial
  Synthetic oligonucleotide
gcttgattcctggccatctttatgttgctgatcttaagtttcagaggacaaatggtgc

SEQ ID NO: 417235 - DNA, 55 bp, Artificial
  Synthetic oligonucleotide
gcttgcaaagaggatctacaacattgcatcaacacacgaatgccaagtgagcgac

SEQ ID NO: 417236 - DNA, 57 bp, Artificial
  Synthetic oligonucleotide
gcttgcaacaactgttattgtaaacattgtagctaccattgtctagtttgctttcag

SEQ ID NO: 417237 - DNA, 55 bp, Artificial
  Synthetic oligonucleotide
gcttgcaacaccgcgtctgtacccaaaagtaaatttagataactacgctttgcca

SEQ ID NO: 417238 - DNA, 55 bp, Artificial
  Synthetic oligonucleotide
gcttgcaacagcactggatttcaacccagacgtgagtagattgagcatcgaggtg

SEQ ID NO: 417239 - DNA, 60 bp, Artificial
  Synthetic oligonucleotide
gcttgcaaggacttctgcttgcgaatggctcgggataccaatctacacaagcaaagtggc

SEQ ID NO: 417240 - DNA, 55 bp, Artificial
  Synthetic oligonucleotide
gcttgcaaggtcctaccggtaaaggtctgaactatctgggagtgtggcctaacgg

SEQ ID NO: 417241 - DNA, 55 bp, Artificial
  Synthetic oligonucleotide
gcttgcaatgcagctaaaggcttggaatggatagccaataaaatctccaaactca

SEQ ID NO: 417242 - DNA, 60 bp, Artificial
  Synthetic oligonucleotide
gcttgcacaaggggacaatcaggtattgagttctagatacaggatacgtacatcgcggga

SEQ ID NO: 417243 - DNA, 55 bp, Artificial
  Synthetic oligonucleotide
gcttgcacagcatcttggctcagagcaaaggagtacaataagatgggagcacgtt

SEQ ID NO: 417244 - DNA, 52 bp, Artificial
  Synthetic oligonucleotide
gcttgcaccaatgggagcacaacaaggagatcacggtggtggcccacatcaa

SEQ ID NO: 417245 - DNA, 51 bp, Artificial
  Synthetic oligonucleotide
gcttgcacccaagcactaatggtcgcagtgtcaacctcatgaccagctaat

SEQ ID NO: 417246 - DNA, 53 bp, Artificial
  Synthetic oligonucleotide
gcttgcacccacgaaatgaggggcagctttccgaccggccattctgtaatgtt

SEQ ID NO: 417247 - DNA, 60 bp, Artificial
  Synthetic oligonucleotide
gcttgcacggctttagatgtatgcttgccatcaaatatcttcaaagcttacagggcaaat

SEQ ID NO: 417248 - DNA, 55 bp, Artificial
  Synthetic oligonucleotide
gcttgcactccctgctatagcgacaattgagcgcagcctttcgatgaaggcagcg

SEQ ID NO: 417249 - DNA, 56 bp, Artificial
  Synthetic oligonucleotide
gcttgcactttcgaggagttacacttatgtatggccgggttaagacccgacttata

SEQ ID NO: 417250 - DNA, 60 bp, Artificial
  Synthetic oligonucleotide
gcttgcagaggcaatcattgatctgacctaccgccataaagtggtgaaagtcatgagacc

SEQ ID NO: 417251 - DNA, 54 bp, Artificial
  Synthetic oligonucleotide
gcttgcaggggaacattgaaggtggcggaacgccaccgcgatagatttgtagtt

SEQ ID NO: 417252 - DNA, 60 bp, Artificial
  Synthetic oligonucleotide
gcttgcagtggggtttgctgcctttctgttctgggccatgtccaatggatcttgcagatg

SEQ ID NO: 417253 - DNA, 60 bp, Artificial
  Synthetic oligonucleotide
gcttgcatgatatgttactacatttattaggaaccataccgtgtgatgagtttttagtcg

SEQ ID NO: 417254 - DNA, 59 bp, Artificial
  Synthetic oligonucleotide
gcttgcattccaaaccataacagtgttgagacagctttaaacgtttctgttatttgcaa

SEQ ID NO: 417255 - DNA, 53 bp, Artificial
  Synthetic oligonucleotide
gcttgccagactctagctctgatgcacgactacgtcatcatgacgctcggccc

SEQ ID NO: 417256 - DNA, 60 bp, Artificial
  Synthetic oligonucleotide
gcttgccataaaatatttgcaggccgttgaagagtcttacgagcccaatacattgggcca

SEQ ID NO: 417257 - DNA, 55 bp, Artificial
  Synthetic oligonucleotide
gcttgccatctaataccaaaccattttccggctggtatacaaaacctgctgtacc

SEQ ID NO: 417258 - DNA, 55 bp, Artificial
  Synthetic oligonucleotide
gcttgccattccacccgaaggaaggaggagatgtgaaatcggacctcgagtccca

SEQ ID NO: 417259 - DNA, 50 bp, Artificial
  Synthetic oligonucleotide
gcttgcccaggcaaaatatcccgtgtgttacttggaagagaccgattgtg

SEQ ID NO: 417260 - DNA, 60 bp, Artificial
  Synthetic oligonucleotide
gcttgccgacccccctctgcgctccgcttggaattgagccgatccatgatccacctccct

SEQ ID NO: 417261 - DNA, 60 bp, Artificial
  Synthetic oligonucleotide
gcttgcctgagctcactactgtcaggcagccgggtgaagccaacacggcgttcagtgttc

SEQ ID NO: 417262 - DNA, 55 bp, Artificial
  Synthetic oligonucleotide
gcttgccttagatgccactagcatgagtatggaccagggcctcaagactctctgt

SEQ ID NO: 417263 - DNA, 57 bp, Artificial
  Synthetic oligonucleotide
gcttgccttattatagtccagcagaaaatttagttattgattccaagtctttccctc

SEQ ID NO: 417264 - DNA, 50 bp, Artificial
  Synthetic oligonucleotide
gcttgcgacccccatggttttggcccactccgtgccactgatgggcaagt

SEQ ID NO: 417265 - DNA, 54 bp, Artificial
  Synthetic oligonucleotide
gcttgcgcaagcatcctacggcctatgctgatcctaagttcgactggaccggtg

SEQ ID NO: 417266 - DNA, 54 bp, Artificial
  Synthetic oligonucleotide
gcttgcgcggctgaaggagaaaacgttcgttacccggccaattacttcgagaaa

SEQ ID NO: 417267 - DNA, 55 bp, Artificial
  Synthetic oligonucleotide
gcttgcgcgtcccttgacaagaccacctccagtggccatccgcatcacatgcgga

SEQ ID NO: 417268 - DNA, 55 bp, Artificial
  Synthetic oligonucleotide
gcttgcgctggacagatcgaacaggaatgagaaattcgggagcctggagcccgag

SEQ ID NO: 417269 - DNA, 60 bp, Artificial
  Synthetic oligonucleotide
gcttgctactattgatttaagtagtgctagcgattccgtctctgatcgcctcgtctggga

SEQ ID NO: 417270 - DNA, 60 bp, Artificial
  Synthetic oligonucleotide
gcttgctatcacgggtgatgtgatcgcgtctgctgggatggcggcgattcgtaagggcgc

SEQ ID NO: 417271 - DNA, 55 bp, Artificial
  Synthetic oligonucleotide
gcttgctgaacacgctatgacaaacgcacgctatgacaaaaggggaccagcaaag

SEQ ID NO: 417272 - DNA, 52 bp, Artificial
  Synthetic oligonucleotide
gcttgctgaattctgcagagcagccattttgcgctttccttaaaggcgccgc

SEQ ID NO: 417273 - DNA, 60 bp, Artificial
  Synthetic oligonucleotide
gcttgctgccagatggtttgaggccaataggccgacctgcccaactctcactataactga

SEQ ID NO: 417274 - DNA, 60 bp, Artificial
  Synthetic oligonucleotide
gcttgctgcctgtattcggagggatcgcctctgcagcactggatgagttcacaaacatac

SEQ ID NO: 417275 - DNA, 55 bp, Artificial
  Synthetic oligonucleotide
gcttgctggttatggctgaggctatggccccacaacggtcgagagcttcaatccc

SEQ ID NO: 417276 - DNA, 59 bp, Artificial
  Synthetic oligonucleotide
gcttgctgtaggcgaaccgcggagggtatctgctaaggcggtgatcaagggtaatcact

SEQ ID NO: 417277 - DNA, 51 bp, Artificial
  Synthetic oligonucleotide
gcttgctgtccgacggcttatcacctgagacgtcgtacagcgaagcatgtc

SEQ ID NO: 417278 - DNA, 55 bp, Artificial
  Synthetic oligonucleotide
gcttgcttatactgtgccccaatgccacttacaccgcctgctaactacacctcag

SEQ ID NO: 417279 - DNA, 55 bp, Artificial
  Synthetic oligonucleotide
gcttgcttccctctattcgccaacgcggcaacgtgaatacaagtatcgccaagct

SEQ ID NO: 417280 - DNA, 56 bp, Artificial
  Synthetic oligonucleotide
gcttggaaaactcaaagaagggtctctcacttaaaaatctgttcactgaatataaa

SEQ ID NO: 417281 - DNA, 53 bp, Artificial
  Synthetic oligonucleotide
gcttggaaagggctttgttataagatgggtggcaagtggtcaaaacgttgttt

SEQ ID NO: 417282 - DNA, 55 bp, Artificial
  Synthetic oligonucleotide
gcttggaaaggtccaattatacacgaatgggattgtaaaattggagatagcgggg

SEQ ID NO: 417283 - DNA, 60 bp, Artificial
  Synthetic oligonucleotide
gcttggaacacaggggaccagtggagccatgggatgctcctcccgatgtccatccatccc

SEQ ID NO: 417284 - DNA, 60 bp, Artificial
  Synthetic oligonucleotide
gcttggaaggcctattttctcacagagtgaaggtttagtcagagtaagcagactaggtca

SEQ ID NO: 417285 - DNA, 55 bp, Artificial
  Synthetic oligonucleotide
gcttggaataccgacacctacaacccaggaaccgttcaagtctgcatactgcctc

SEQ ID NO: 417286 - DNA, 55 bp, Artificial
  Synthetic oligonucleotide
gcttggaatccaggagcgggtttgaaatggtctgggatgcaaatgggtgggtgtc

SEQ ID NO: 417287 - DNA, 54 bp, Artificial
  Synthetic oligonucleotide
gcttggaatccataaaatccttcgggtgggcttggatttcgggtacttgtttga

SEQ ID NO: 417288 - DNA, 55 bp, Artificial
  Synthetic oligonucleotide
gcttggaatctgggacaagtgggcggtccttccgcgtcacgctaagccaggagat

SEQ ID NO: 417289 - DNA, 60 bp, Artificial
  Synthetic oligonucleotide
gcttggactcgtggctgctgagtgagttccactatgcaattgtggggaaggagatcgggg

SEQ ID NO: 417290 - DNA, 59 bp, Artificial
  Synthetic oligonucleotide
gcttggactctaaacccttgcttacgtggcattttgaatcggaggctctcaaagctcta

SEQ ID NO: 417291 - DNA, 58 bp, Artificial
  Synthetic oligonucleotide
gcttggagaacacccgacgttcctcgaggatgtgaaggcccatgtaaggtccagtcat

SEQ ID NO: 417292 - DNA, 55 bp, Artificial
  Synthetic oligonucleotide
gcttggagaacgatctcgttgactaccggtgtgttctatggggcccgatgaggtt

SEQ ID NO: 417293 - DNA, 60 bp, Artificial
  Synthetic oligonucleotide
gcttggagccctgactggcacctatgtgtatgaccatcttgccccactgtcagactgggc

SEQ ID NO: 417294 - DNA, 60 bp, Artificial
  Synthetic oligonucleotide
gcttggagcgcgaggggacccagcggagccatgggatgctcttcccgattccgtccatcc

SEQ ID NO: 417295 - DNA, 55 bp, Artificial
  Synthetic oligonucleotide
gcttggagctgacataaacggcaaggaagggctcggtggtttcactcctctgcat

SEQ ID NO: 417296 - DNA, 55 bp, Artificial
  Synthetic oligonucleotide
gcttggagctgggacacaagttatagtggaactaggagcatatgtccaggctgaa

SEQ ID NO: 417297 - DNA, 55 bp, Artificial
  Synthetic oligonucleotide
gcttggaggatgccatgtacggcactgatgggctggaggcattggacttgtctac

SEQ ID NO: 417298 - DNA, 55 bp, Artificial
  Synthetic oligonucleotide
gcttggagggacctccttgctgatcacggtggtgttggatggatgacatcgagct

SEQ ID NO: 417299 - DNA, 55 bp, Artificial
  Synthetic oligonucleotide
gcttggaggggtaaggaggatgaacagtagtaatccgatagaccagcgaatcttt

SEQ ID NO: 417300 - DNA, 55 bp, Artificial
  Synthetic oligonucleotide
gcttggagtgcatgataatgtggctgtgcttccaacacatgcatcacccggtgac

SEQ ID NO: 417301 - DNA, 51 bp, Artificial
  Synthetic oligonucleotide
gcttggatacacgccgcacatgtaaaggctgccgaccctgggagtagacca

SEQ ID NO: 417302 - DNA, 59 bp, Artificial
  Synthetic oligonucleotide
gcttggatcagtcactaggatgtttacacagtggcgaggttcccttgttattcggtgtg

SEQ ID NO: 417303 - DNA, 55 bp, Artificial
  Synthetic oligonucleotide
gcttggatgctaaatctggatactaccagctaaggctccatgaaaatacaaagcc

SEQ ID NO: 417304 - DNA, 55 bp, Artificial
  Synthetic oligonucleotide
gcttggattgatgagccctggagaatcatctaagacagaggcatttatccaccgg

SEQ ID NO: 417305 - DNA, 55 bp, Artificial
  Synthetic oligonucleotide
gcttggatttcaataaagcgaggccgtgggagtttcacccgtcggtgtctgttta

SEQ ID NO: 417306 - DNA, 60 bp, Artificial
  Synthetic oligonucleotide
gcttggccaggtgcaatggaaaagatgttgagtgaccagtgtgaatatatgaccaaggat

SEQ ID NO: 417307 - DNA, 60 bp, Artificial
  Synthetic oligonucleotide
gcttggccataggccatcagcgcatgcgtggaacctttgtgtctccactgccgatccata

SEQ ID NO: 417308 - DNA, 60 bp, Artificial
  Synthetic oligonucleotide
gcttggcctactgtcgaagcagcacttgacagtttccgtcgtcggaagcgtatgcatgtg

SEQ ID NO: 417309 - DNA, 55 bp, Artificial
  Synthetic oligonucleotide
gcttggcgcccaagtatggctgagttgtgggacccacttcagaacccgctcccag

SEQ ID NO: 417310 - DNA, 51 bp, Artificial
  Synthetic oligonucleotide
gcttggctaagaaaagtggaggaggtagaacaatgtgtcatcaaatgtctt

SEQ ID NO: 417311 - DNA, 60 bp, Artificial
  Synthetic oligonucleotide
gcttggcttgtatggacatttcatacggttgtgaggtcgacgccaataatcggtcagctg

SEQ ID NO: 417312 - DNA, 55 bp, Artificial
  Synthetic oligonucleotide
gcttggctttctagtgaagtacgctgtcactctgttcacatccaatggtgagccg

SEQ ID NO: 417313 - DNA, 55 bp, Artificial
  Synthetic oligonucleotide
gcttgggaaatcattaagaccgttgtcgaaaccgcaataaacgttgtgcttggga

SEQ ID NO: 417314 - DNA, 54 bp, Artificial
  Synthetic oligonucleotide
gcttgggaatcaaatttaatatcgacaccttatttaaaggctagtccaccgaaa

SEQ ID NO: 417315 - DNA, 58 bp, Artificial
  Synthetic oligonucleotide
gcttgggaccactaagacagcgactgcagttcgatataccagaggaagacgacaaaga

SEQ ID NO: 417316 - DNA, 55 bp, Artificial
  Synthetic oligonucleotide
gcttgggacttttgacacagttcagataataaaacttctcccctttgctgctgcc

SEQ ID NO: 417317 - DNA, 55 bp, Artificial
  Synthetic oligonucleotide
gcttgggagagcatcaaacccgtccttggtaacaatggcacatcacgtgaccgat

SEQ ID NO: 417318 - DNA, 60 bp, Artificial
  Synthetic oligonucleotide
gcttgggaggactcaatcgcggtcttcatccttatggcagctaacatctgggcctattgg

SEQ ID NO: 417319 - DNA, 60 bp, Artificial
  Synthetic oligonucleotide
gcttgggaggtgccattctctctcctcaaccggtactcagcataactctcctataaatcg

SEQ ID NO: 417320 - DNA, 60 bp, Artificial
  Synthetic oligonucleotide
gcttgggagtgcacacagaaaagaacaagcagttagaagcaggctttctcagcattaatt

SEQ ID NO: 417321 - DNA, 56 bp, Artificial
  Synthetic oligonucleotide
gcttgggcaaaggtcaaccaggtgccggtgactcacgagtttatggttcccaagaa

SEQ ID NO: 417322 - DNA, 56 bp, Artificial
  Synthetic oligonucleotide
gcttgggcaaaggtcaatcaggtgccggtgactcacgagtttaaagttcccaggga

SEQ ID NO: 417323 - DNA, 58 bp, Artificial
  Synthetic oligonucleotide
gcttgggcccaattggtgaagttctctatacgggtgcatctccgaatcccttgaaggc

SEQ ID NO: 417324 - DNA, 51 bp, Artificial
  Synthetic oligonucleotide
gcttgggcgaagtagcagcgctagttcccgacatggtagacttgcgtgagt

SEQ ID NO: 417325 - DNA, 60 bp, Artificial
  Synthetic oligonucleotide
gcttgggcgtgacaaacccaagttgcatctcttacgtggttaatcacactgtatgttgac

SEQ ID NO: 417326 - DNA, 55 bp, Artificial
  Synthetic oligonucleotide
gcttgggctagtaccctacagaggggtcatcagattgatcatgttaatctaccag

SEQ ID NO: 417327 - DNA, 54 bp, Artificial
  Synthetic oligonucleotide
gcttgggtggttttcctaaagggtatgttatgggcttgttccgttcatacaaga

SEQ ID NO: 417328 - DNA, 60 bp, Artificial
  Synthetic oligonucleotide
gcttgggtgtgctcgagacattgtttaggctcgacaaagacacaggaccctcaaacactg

SEQ ID NO: 417329 - DNA, 60 bp, Artificial
  Synthetic oligonucleotide
gcttgggttggtcctccacacatcccaaatgctgcgccgactgagaagtatgaagtagcc

SEQ ID NO: 417330 - DNA, 60 bp, Artificial
  Synthetic oligonucleotide
gcttggtacctagtatatccggatctgttaaagcatgcctgactgagaaacaggaaaatc

SEQ ID NO: 417331 - DNA, 57 bp, Artificial
  Synthetic oligonucleotide
gcttggtactgccaagaatgtttagggacgtttgactcgctagaagaagctcggaaa

SEQ ID NO: 417332 - DNA, 60 bp, Artificial
  Synthetic oligonucleotide
gcttggtatgagctcacacccgccgagactacagttaggctacgagcgtacatgaacacc

SEQ ID NO: 417333 - DNA, 55 bp, Artificial
  Synthetic oligonucleotide
gcttggtatgagctcacgcccgccgagacctcggttaggttgcgggcctacctaa

SEQ ID NO: 417334 - DNA, 55 bp, Artificial
  Synthetic oligonucleotide
gcttggtattccttaggcgcactatctccaaggatgcagctggttaccagggccg

SEQ ID NO: 417335 - DNA, 60 bp, Artificial
  Synthetic oligonucleotide
gcttggtcaatgataagaaagagcattgtggtacttatccagcaaacgccttggaactag

SEQ ID NO: 417336 - DNA, 57 bp, Artificial
  Synthetic oligonucleotide
gcttggtccacgtgtcccatacccgtacgtggaccacccatcgtccaatcataacgc

SEQ ID NO: 417337 - DNA, 60 bp, Artificial
  Synthetic oligonucleotide
gcttggtcccagacgattgagctctctatatgggtgtatctctgactctgtctccgtgtg

SEQ ID NO: 417338 - DNA, 53 bp, Artificial
  Synthetic oligonucleotide
gcttggtcctggcgtaggttcggttgtagacgagttctccggttggtccccaa

SEQ ID NO: 417339 - DNA, 55 bp, Artificial
  Synthetic oligonucleotide
gcttggtgctggtggattgggttctaccattagcaataatggtatgattactatg

SEQ ID NO: 417340 - DNA, 53 bp, Artificial
  Synthetic oligonucleotide
gcttggttaaagttcgtgaacggtaggtcgatcttggggtcattaacgtggaa

SEQ ID NO: 417341 - DNA, 52 bp, Artificial
  Synthetic oligonucleotide
gcttggttactgcttgagagttgcgtagaccagcttaacgccaaccacctct

SEQ ID NO: 417342 - DNA, 56 bp, Artificial
  Synthetic oligonucleotide
gcttggttcaaacataccgcaggctttaagccattaaaataatggcctgtgttact

SEQ ID NO: 417343 - DNA, 55 bp, Artificial
  Synthetic oligonucleotide
gcttggttcagtaataacactgggttaaattataacaatgggagtaatactggtg

SEQ ID NO: 417344 - DNA, 55 bp, Artificial
  Synthetic oligonucleotide
gcttggttggactcgggccttatcgaattcaagttgtctacgagagaacctactg

SEQ ID NO: 417345 - DNA, 58 bp, Artificial
  Synthetic oligonucleotide
gcttggttggtaaagaatggttaccaatctaccatggcaagctactgtgctaaatggg

SEQ ID NO: 417346 - DNA, 60 bp, Artificial
  Synthetic oligonucleotide
gcttggttggtacgaactttcaagagaaattcttaagtagtctcatatcagcagatagca

SEQ ID NO: 417347 - DNA, 50 bp, Artificial
  Synthetic oligonucleotide
gcttggttggttcacgttttcaacagaagagcctttcaagtgaagtctcc

SEQ ID NO: 417348 - DNA, 60 bp, Artificial
  Synthetic oligonucleotide
gcttggtttaatcaatggtgcactgtcagattcaaatcgcgaagagtgggcttccgtgtt

SEQ ID NO: 417349 - DNA, 59 bp, Artificial
  Synthetic oligonucleotide
gcttggtttactcctgtgggcctagctgtggatactccctgggttgaaaagcaatcagc

SEQ ID NO: 417350 - DNA, 55 bp, Artificial
  Synthetic oligonucleotide
gcttgtaaaccctgccaatcaagaggagacactcccttttcatttccagttagat

SEQ ID NO: 417351 - DNA, 55 bp, Artificial
  Synthetic oligonucleotide
gcttgtaacaaaaggactctcgatggtttatacatctgacttcaaggaaatggca

SEQ ID NO: 417352 - DNA, 55 bp, Artificial
  Synthetic oligonucleotide
gcttgtaaccatcagggatgataagtggtagtcctggacacacaattccagattc

SEQ ID NO: 417353 - DNA, 55 bp, Artificial
  Synthetic oligonucleotide
gcttgtaaccctggtctaatggaaacggcagaaggatgtgagcagttattaaggc

SEQ ID NO: 417354 - DNA, 60 bp, Artificial
  Synthetic oligonucleotide
gcttgtaataccatgtgctccctggtcagtgcgctttgaagctcagagtgctgttaagga

SEQ ID NO: 417355 - DNA, 57 bp, Artificial
  Synthetic oligonucleotide
gcttgtacctatcggtgttactgctggagcggagcagtcgtcagaatacgtcagtgg

SEQ ID NO: 417356 - DNA, 55 bp, Artificial
  Synthetic oligonucleotide
gcttgtacgccatagggcatcgttcgtactggtttagctgtgaaacactcctgtg

SEQ ID NO: 417357 - DNA, 60 bp, Artificial
  Synthetic oligonucleotide
gcttgtagatcagcaaaagaattcgccctgttacaggatgatcttacagtattacgctat

SEQ ID NO: 417358 - DNA, 60 bp, Artificial
  Synthetic oligonucleotide
gcttgtagcactgagctctggtaagcacaatgcaatggctccgccatacgacgtttgaag

SEQ ID NO: 417359 - DNA, 60 bp, Artificial
  Synthetic oligonucleotide
gcttgtagtaagtgccgcggtgtgtttgatagttgtgcgcagcaagatgagttggacaac

SEQ ID NO: 417360 - DNA, 55 bp, Artificial
  Synthetic oligonucleotide
gcttgtattctaaaacgctttggaggtgccatgtcagcagaaacgaattggagac

SEQ ID NO: 417361 - DNA, 60 bp, Artificial
  Synthetic oligonucleotide
gcttgtcaatgccccatcatgtagagtagtgggtcgtaaagaacccatctgtcctccgag

SEQ ID NO: 417362 - DNA, 55 bp, Artificial
  Synthetic oligonucleotide
gcttgtcactatccccagcatttgatccgcgcttatcacacaccatgcttgggga

SEQ ID NO: 417363 - DNA, 55 bp, Artificial
  Synthetic oligonucleotide
gcttgtccctcttcaagtcgaacttagaatatgttagttctccccaagctaccac

SEQ ID NO: 417364 - DNA, 57 bp, Artificial
  Synthetic oligonucleotide
gcttgtcctccttacacaccgtgatcaggtaagagacggattttgtaacaccgtatc

SEQ ID NO: 417365 - DNA, 57 bp, Artificial
  Synthetic oligonucleotide
gcttgtcgagctctcgaccgtatttggggtgggcctactgttatgaaaggatatacc

SEQ ID NO: 417366 - DNA, 53 bp, Artificial
  Synthetic oligonucleotide
gcttgtcgattaacaaaatgggtatgtggttactttgaaagaataacatacac

SEQ ID NO: 417367 - DNA, 55 bp, Artificial
  Synthetic oligonucleotide
gcttgtcgggcatggaccccatggagaaggacacctcccctggattgccctacac

SEQ ID NO: 417368 - DNA, 60 bp, Artificial
  Synthetic oligonucleotide
gcttgtgaattgactgattcaagttggatagaactcgatgaaataggggaggatgttgcc

SEQ ID NO: 417369 - DNA, 55 bp, Artificial
  Synthetic oligonucleotide
gcttgtgagctgacagattcaagctggatagagctcgatgaaattggggaggata

SEQ ID NO: 417370 - DNA, 55 bp, Artificial
  Synthetic oligonucleotide
gcttgtgctaccaaccagaggatcctttgagacaacttagggaggcagctaaggc

SEQ ID NO: 417371 - DNA, 55 bp, Artificial
  Synthetic oligonucleotide
gcttgtgctcaggggaagaaattgacccaaaggtcctgcatgaaatagcaaagtc

SEQ ID NO: 417372 - DNA, 60 bp, Artificial
  Synthetic oligonucleotide
gcttgtggaccaaaagaatgcagacactttgctctgacccattatgcagctcagccgggg

SEQ ID NO: 417373 - DNA, 58 bp, Artificial
  Synthetic oligonucleotide
gcttgtggatacagcgatagggttaggcaaattaccctagggaattccacaatcacta

SEQ ID NO: 417374 - DNA, 55 bp, Artificial
  Synthetic oligonucleotide
gcttgtggcaacaatcatagcagtaattagcgttggattgacccaaacagagccg

SEQ ID NO: 417375 - DNA, 56 bp, Artificial
  Synthetic oligonucleotide
gcttgtggcttgttttcctgcttccggagtttactccggcaacttgtcaagacgtg

SEQ ID NO: 417376 - DNA, 56 bp, Artificial
  Synthetic oligonucleotide
gcttgtgtgcggggaaatttacgctttcaattagcaagttaagttatgaaccatta

SEQ ID NO: 417377 - DNA, 60 bp, Artificial
  Synthetic oligonucleotide
gcttgtgttccagttacttcgaagatcatagctaagcagcagactgcctccaagtctccc

SEQ ID NO: 417378 - DNA, 55 bp, Artificial
  Synthetic oligonucleotide
gcttgttaaagtggtattcaaaccttttagctaggagctgctttcttgtcagctg

SEQ ID NO: 417379 - DNA, 60 bp, Artificial
  Synthetic oligonucleotide
gcttgttaacatcgacaggaatacagtgaagagtgaacttttatggaagttcacactaga

SEQ ID NO: 417380 - DNA, 57 bp, Artificial
  Synthetic oligonucleotide
gcttgttaagtacttaatctcagttatacgaaaaacaactgcttggcatttaggaca

SEQ ID NO: 417381 - DNA, 55 bp, Artificial
  Synthetic oligonucleotide
gcttgttaccttttcagccaaagtagaagactattggaaggtagaaatgtcacga

SEQ ID NO: 417382 - DNA, 55 bp, Artificial
  Synthetic oligonucleotide
gcttgttaggctcacattaccagggaaaactgagaaggagagaagagtcaaacgc

SEQ ID NO: 417383 - DNA, 55 bp, Artificial
  Synthetic oligonucleotide
gcttgttatcggatgattcaatcggcctcaaacatgccaatcactccagacggtc

SEQ ID NO: 417384 - DNA, 55 bp, Artificial
  Synthetic oligonucleotide
gcttgttattatcttgagctgtgtgatcgaaggaacccgactggcttcagacact

SEQ ID NO: 417385 - DNA, 60 bp, Artificial
  Synthetic oligonucleotide
gcttgttcagtagcaattcctcgcctgtcaatacgataagaaggagatatcactataatt

SEQ ID NO: 417386 - DNA, 55 bp, Artificial
  Synthetic oligonucleotide
gcttgttccaatggaggtgtcaagttatatcaacgacctaacaaacctttagtgc

SEQ ID NO: 417387 - DNA, 59 bp, Artificial
  Synthetic oligonucleotide
gcttgttgaactccacaagtttagaaacgagcttgtcaattgaagctccatggggggca

SEQ ID NO: 417388 - DNA, 59 bp, Artificial
  Synthetic oligonucleotide
gcttgttgccacccaaaagtcagttactagagtattggaaaagtaatccatcagtgata

SEQ ID NO: 417389 - DNA, 54 bp, Artificial
  Synthetic oligonucleotide
gcttgttgcgtggggtagcctgtggcaagtattgccaaatggctatgcttaagg

SEQ ID NO: 417390 - DNA, 57 bp, Artificial
  Synthetic oligonucleotide
gcttgttgggttaccgttagctccgcgtagagagcaccaccgccatgtggttaaatg

SEQ ID NO: 417391 - DNA, 55 bp, Artificial
  Synthetic oligonucleotide
gcttgttgtcgtcgctatcaatattctcatgttgctgagtttgttaatgtcttac

SEQ ID NO: 417392 - DNA, 58 bp, Artificial
  Synthetic oligonucleotide
gcttgttgtggtcttcatggcaaagttaaaggtgtcacattaggttctgtcaagccgg

SEQ ID NO: 417393 - DNA, 55 bp, Artificial
  Synthetic oligonucleotide
gcttgtttagttatacgcacttaagcttctaattcaacaaagcggtaaggggcta

SEQ ID NO: 417394 - DNA, 55 bp, Artificial
  Synthetic oligonucleotide
gcttgtttcaaagggctttgaagaatgtggttacgtcactgatccggaggacatc

SEQ ID NO: 417395 - DNA, 55 bp, Artificial
  Synthetic oligonucleotide
gcttgtttggttttgatgtgtcattagcttatcgaggtcgagtcagaactggttc

SEQ ID NO: 417396 - DNA, 57 bp, Artificial
  Synthetic oligonucleotide
gctttaaaactactgttgattcaagggtacaacccacttcaagtagggcatgccatc

SEQ ID NO: 417397 - DNA, 60 bp, Artificial
  Synthetic oligonucleotide
gctttaaatgcttggccgctacgtttagtgcgctgtccactatgtgggatccgcttttga

SEQ ID NO: 417398 - DNA, 55 bp, Artificial
  Synthetic oligonucleotide
gctttaaccaacatatgtcttgtgtacgattcttgcataggacaatactcccagg

SEQ ID NO: 417399 - DNA, 57 bp, Artificial
  Synthetic oligonucleotide
gctttaaccgaccggttaaatgcactagcaggacttgttaatgcaggtgttctggac

SEQ ID NO: 417400 - DNA, 59 bp, Artificial
  Synthetic oligonucleotide
gctttaacgtgtctgagcctatattcaatacgagtatcaaccttacaccaccttatgac

SEQ ID NO: 417401 - DNA, 56 bp, Artificial
  Synthetic oligonucleotide
gctttaactatacaatctgaaacgcaatttcttgctggtataaattcacaagcggc

SEQ ID NO: 417402 - DNA, 55 bp, Artificial
  Synthetic oligonucleotide
gctttaagacacagtgtggctcaggtatatgcagatacacaaacctatacacatg

SEQ ID NO: 417403 - DNA, 55 bp, Artificial
  Synthetic oligonucleotide
gctttaagacacggtgtggctcaggtgtatgcagacacccaaatctatactcatg

SEQ ID NO: 417404 - DNA, 60 bp, Artificial
  Synthetic oligonucleotide
gctttaagcaacacatgtcttgtgttcgattcttacacaggagcatactaccagggtcaa

SEQ ID NO: 417405 - DNA, 55 bp, Artificial
  Synthetic oligonucleotide
gctttaagtacaattggtgctaatagttatggtgaggacggtgtaatgggacccc

SEQ ID NO: 417406 - DNA, 56 bp, Artificial
  Synthetic oligonucleotide
gctttaagttaagggatacccttagaaagcatgaagatgcatataagagagagatg

SEQ ID NO: 417407 - DNA, 59 bp, Artificial
  Synthetic oligonucleotide
gctttaataaagggctttggtcccgacatgcaagatcgactaatgagtcgcttcctcca

SEQ ID NO: 417408 - DNA, 54 bp, Artificial
  Synthetic oligonucleotide
gctttaataaagttccgtgattgctcatttcgcccccccaatcaagtatttccc

SEQ ID NO: 417409 - DNA, 56 bp, Artificial
  Synthetic oligonucleotide
gctttaattaagcttaatgtggttcaaacaaccaatattcgaggtgggatattgcc

SEQ ID NO: 417410 - DNA, 55 bp, Artificial
  Synthetic oligonucleotide
gctttaattcgacatgcctaagcgggatgccccgtggcgctcttctgcgggaacc

SEQ ID NO: 417411 - DNA, 60 bp, Artificial
  Synthetic oligonucleotide
gctttaattgtaggaactagaggtagatatcagatgcaggctggaccagtctttcctcct

SEQ ID NO: 417412 - DNA, 60 bp, Artificial
  Synthetic oligonucleotide
gctttacaggattcagagccagaagtgaacatagtaacagactcacaatatgcattagga

SEQ ID NO: 417413 - DNA, 55 bp, Artificial
  Synthetic oligonucleotide
gctttacagtggagattaaggaataaacctccaaaaggagggtgtaaatgctgga

SEQ ID NO: 417414 - DNA, 60 bp, Artificial
  Synthetic oligonucleotide
gctttacataagttatgactcatgactgactcatatatgactcataatttcgcacctagt

SEQ ID NO: 417415 - DNA, 58 bp, Artificial
  Synthetic oligonucleotide
gctttacatcgccctccgaggtcatcgcgaccctcgggacactatagaattaacctca

SEQ ID NO: 417416 - DNA, 60 bp, Artificial
  Synthetic oligonucleotide
gctttacatggaacaactatcctgacacagcgtacgaaaagtgtgaaacattcatacaaa

SEQ ID NO: 417417 - DNA, 55 bp, Artificial
  Synthetic oligonucleotide
gctttaccaattcctgaagctggtcctactggcccaactggtccacctggatcag

SEQ ID NO: 417418 - DNA, 60 bp, Artificial
  Synthetic oligonucleotide
gctttaccccacaagcaatatgatgcagttttcgggttcagttcaagtgtggagagttga

SEQ ID NO: 417419 - DNA, 55 bp, Artificial
  Synthetic oligonucleotide
gctttaccggagacttcgactcggtgatagactgcaacacgtgtgtcacccagac

SEQ ID NO: 417420 - DNA, 53 bp, Artificial
  Synthetic oligonucleotide
gctttaccgggatacaagacccctccaaggtacacaccacagtgcttaacccc

SEQ ID NO: 417421 - DNA, 50 bp, Artificial
  Synthetic oligonucleotide
gctttactaatgttataccgtcatatggtatagatactgacaagttaaca

SEQ ID NO: 417422 - DNA, 55 bp, Artificial
  Synthetic oligonucleotide
gctttactattgtatatggcatgtacccatgcgtcaaaccctgtgtatgctagtc

SEQ ID NO: 417423 - DNA, 55 bp, Artificial
  Synthetic oligonucleotide
gctttactcctaataggctctctgtgttcaatgcaagattcagggtacacgatga

SEQ ID NO: 417424 - DNA, 59 bp, Artificial
  Synthetic oligonucleotide
gctttactggtattattggtgacgatggggcccagagtgcacccggccacgatactcag

SEQ ID NO: 417425 - DNA, 60 bp, Artificial
  Synthetic oligonucleotide
gctttagaggatacgtacgagcccagcactttgggccacgatctggttagagatctagtc

SEQ ID NO: 417426 - DNA, 55 bp, Artificial
  Synthetic oligonucleotide
gctttagcgagttcagttgcattgggtgatatactttctctcgctatgtcaccgt

SEQ ID NO: 417427 - DNA, 56 bp, Artificial
  Synthetic oligonucleotide
gctttagctgtcggtagtatgttacgaacacgtggtgttagtaatataactccgag

SEQ ID NO: 417428 - DNA, 55 bp, Artificial
  Synthetic oligonucleotide
gctttaggccactggtttgatggtcgtctcaatcttaagacatcctttcactgct

SEQ ID NO: 417429 - DNA, 55 bp, Artificial
  Synthetic oligonucleotide
gctttaggcgctcaccccgactacgttccccatgacgttattcgcgcccaggacc

SEQ ID NO: 417430 - DNA, 54 bp, Artificial
  Synthetic oligonucleotide
gctttagggagtttaatgatgtgtcaatgtcctttcgccacattgaatggtggc

SEQ ID NO: 417431 - DNA, 55 bp, Artificial
  Synthetic oligonucleotide
gctttagttataattgttaggaatcatgaagacttggtgaccgtgactgcgacct

SEQ ID NO: 417432 - DNA, 56 bp, Artificial
  Synthetic oligonucleotide
gctttataaccgtaagttgaacagagccatcaaggtttccggcagtcagaagaagt

SEQ ID NO: 417433 - DNA, 55 bp, Artificial
  Synthetic oligonucleotide
gctttatagggaagaattctgaaccactaattgtcccagctctggaagatatcag

SEQ ID NO: 417434 - DNA, 52 bp, Artificial
  Synthetic oligonucleotide
gctttatatacattgatccgatttccgttgttaataagagtacttttcggac

SEQ ID NO: 417435 - DNA, 60 bp, Artificial
  Synthetic oligonucleotide
gctttatcacgacccgagtacatgcgaagagcattcgcgatgcaggcgtgcgcaaactaa

SEQ ID NO: 417436 - DNA, 60 bp, Artificial
  Synthetic oligonucleotide
gctttatccaatgatatttcacaagggattaagagacaaagaatgacagttgagtccatg

SEQ ID NO: 417437 - DNA, 53 bp, Artificial
  Synthetic oligonucleotide
gctttatccccgcctacctgctgccgaagcgccaatcggagctgcagtgggcg

SEQ ID NO: 417438 - DNA, 55 bp, Artificial
  Synthetic oligonucleotide
gctttatcgtccattgagtttgcataagctgatttgtttgcatgagctactaaca

SEQ ID NO: 417439 - DNA, 56 bp, Artificial
  Synthetic oligonucleotide
gctttatctagataagcctgtggacttaaattagatactttgccatgaacgctttg

SEQ ID NO: 417440 - DNA, 57 bp, Artificial
  Synthetic oligonucleotide
gctttattcactggggtcgacagctctggggagagaagggagggtcggctgggaaga

SEQ ID NO: 417441 - DNA, 55 bp, Artificial
  Synthetic oligonucleotide
gctttattgaaaggaataaggcctggcttactgttgtctcagccgttactagtgc

SEQ ID NO: 417442 - DNA, 55 bp, Artificial
  Synthetic oligonucleotide
gctttcaaagtgatggactaagatttgcaactcaagggacaatgtcaggatctca

SEQ ID NO: 417443 - DNA, 55 bp, Artificial
  Synthetic oligonucleotide
gctttcaacgcgtgggagacagaccgtgaaagagaataaagggacacgtataaga

SEQ ID NO: 417444 - DNA, 57 bp, Artificial
  Synthetic oligonucleotide
gctttcaatacccccgcaggatgcgtacatagtcattgagacggatggttcaatgaa

SEQ ID NO: 417445 - DNA, 60 bp, Artificial
  Synthetic oligonucleotide
gctttcaatagatcttttgagccgatccgtcgaaacgagatgctagaaagtgcgccgcta

SEQ ID NO: 417446 - DNA, 55 bp, Artificial
  Synthetic oligonucleotide
gctttcacagatctctttactggtcttagtatccctgtaaatctagtgcacattg

SEQ ID NO: 417447 - DNA, 57 bp, Artificial
  Synthetic oligonucleotide
gctttcacagtgggggtacgatagtcagttccctgccattccaaaacatcaacccta

SEQ ID NO: 417448 - DNA, 60 bp, Artificial
  Synthetic oligonucleotide
gctttcacgctttgaggtgaaccacctcactggagcaccagatttcatctaatgggtaac

SEQ ID NO: 417449 - DNA, 56 bp, Artificial
  Synthetic oligonucleotide
gctttcactcgaccaccaacacctttcctcgaaacatttgttctcgtcaaaccaga

SEQ ID NO: 417450 - DNA, 55 bp, Artificial
  Synthetic oligonucleotide
gctttcactttctcgccaacttataaaacctttctccgtacacaatatctctccc

SEQ ID NO: 417451 - DNA, 50 bp, Artificial
  Synthetic oligonucleotide
gctttcagcaattctaacgaatgtcaaagattggtgaaagcatgcaatta

SEQ ID NO: 417452 - DNA, 56 bp, Artificial
  Synthetic oligonucleotide
gctttcagcccagaaacaatacccatgttctcagcattatcagagggagccacacc

SEQ ID NO: 417453 - DNA, 55 bp, Artificial
  Synthetic oligonucleotide
gctttcaggacgtccgccctgggacacgtgtacgttattaatgaaaagatgcctt

SEQ ID NO: 417454 - DNA, 60 bp, Artificial
  Synthetic oligonucleotide
gctttcagtggtaaggtccgcgttgaggcagcgacaaccggtgcgaaagcgctgcaagtc

SEQ ID NO: 417455 - DNA, 58 bp, Artificial
  Synthetic oligonucleotide
gctttcagttgtttttgaaagcacatagctaacaattcctctcttgaactttcttgta

SEQ ID NO: 417456 - DNA, 55 bp, Artificial
  Synthetic oligonucleotide
gctttcatctgcttgcaagcaataaccacattcgtgtcagtagctgggatcatct

SEQ ID NO: 417457 - DNA, 57 bp, Artificial
  Synthetic oligonucleotide
gctttcatggcaaagagcccttgactaccctggtcaagaccgcctaaacagactaaa

SEQ ID NO: 417458 - DNA, 56 bp, Artificial
  Synthetic oligonucleotide
gctttccaaacctaaaagcaatggacgtttggcgcgcggtttacgcgaacatgcca

SEQ ID NO: 417459 - DNA, 55 bp, Artificial
  Synthetic oligonucleotide
gctttccaacttatacactgagattgtatacacaccaattgcaacaccagatggc

SEQ ID NO: 417460 - DNA, 55 bp, Artificial
  Synthetic oligonucleotide
gctttccaaggtaccagtaggactttaactcaacagtcctcagcggcgacgtctg

SEQ ID NO: 417461 - DNA, 60 bp, Artificial
  Synthetic oligonucleotide
gctttccaccagaggagttcagattgcttccaatgagaacatggagactatggactctag

SEQ ID NO: 417462 - DNA, 52 bp, Artificial
  Synthetic oligonucleotide
gctttccacccggggtagacaaacagtaaaggagaataaagggactagaatc

SEQ ID NO: 417463 - DNA, 60 bp, Artificial
  Synthetic oligonucleotide
gctttccagcttgcactcgactctcactcatcgaccgtccacaaagacgcgtctttgaac

SEQ ID NO: 417464 - DNA, 58 bp, Artificial
  Synthetic oligonucleotide
gctttccagtcagacctcaagtacctttaaggccaatgacttataaagcagcggtaga

SEQ ID NO: 417465 - DNA, 58 bp, Artificial
  Synthetic oligonucleotide
gctttccatatttacagttggactgccagtctctttgggacccaatcagttccttcca

SEQ ID NO: 417466 - DNA, 54 bp, Artificial
  Synthetic oligonucleotide
gctttccatatttacagttggattgccagtccttttgtgccccaattagctctt

SEQ ID NO: 417467 - DNA, 55 bp, Artificial
  Synthetic oligonucleotide
gctttccccttcaatcactatactaatcggtctacttggccgcgcagcggcctca

SEQ ID NO: 417468 - DNA, 56 bp, Artificial
  Synthetic oligonucleotide
gctttccgtatttacagtttgattgccagtccttctgggcccccatgaattcctta

SEQ ID NO: 417469 - DNA, 55 bp, Artificial
  Synthetic oligonucleotide
gctttcctcaggttgtggttgaactgtatctggatcgttatgatgtcgtggttgg

SEQ ID NO: 417470 - DNA, 55 bp, Artificial
  Synthetic oligonucleotide
gctttcctgcggctaacgcgtccgtggtagagatcaaggacagcactggtaaagt

SEQ ID NO: 417471 - DNA, 55 bp, Artificial
  Synthetic oligonucleotide
gctttccttatccaaatccgaagcagcctgccatcctaagcgccgaagatgatcg

SEQ ID NO: 417472 - DNA, 60 bp, Artificial
  Synthetic oligonucleotide
gctttccttctattgttgaagagcctgtgagtgtgcactctgaaagcattgtcactgagt

SEQ ID NO: 417473 - DNA, 57 bp, Artificial
  Synthetic oligonucleotide
gctttccttgaagaatcccacccagggatctttgaaaactcatgtcttgaaacgatg

SEQ ID NO: 417474 - DNA, 52 bp, Artificial
  Synthetic oligonucleotide
gctttcgaaagcacttcaggtttggtctggacttctggtcctgcaacttgag

SEQ ID NO: 417475 - DNA, 60 bp, Artificial
  Synthetic oligonucleotide
gctttcgaggcttgggataatccgctggtaaaacaagcagagagtaatatacatctactc

SEQ ID NO: 417476 - DNA, 56 bp, Artificial
  Synthetic oligonucleotide
gctttcgagtggttgcttggcgctacacaaaaagcctggcgtaaccaccgagttct

SEQ ID NO: 417477 - DNA, 57 bp, Artificial
  Synthetic oligonucleotide
gctttcgcaaaatacctatgggagtgggcctcagcccgtttctcttggctcagttta

SEQ ID NO: 417478 - DNA, 55 bp, Artificial
  Synthetic oligonucleotide
gctttcgcactgaataaggggtctgactcaggaattataacatcagatgctccag

SEQ ID NO: 417479 - DNA, 56 bp, Artificial
  Synthetic oligonucleotide
gctttcgcagcaaccacatgttaagatagatttttgtgagtccactggcggtgtat

SEQ ID NO: 417480 - DNA, 60 bp, Artificial
  Synthetic oligonucleotide
gctttcgctctacagtcatggatgaataacatcgaaaaggcggaaatagaacatgaaaaa

SEQ ID NO: 417481 - DNA, 55 bp, Artificial
  Synthetic oligonucleotide
gctttcggcaacataagtcatgtattcgttacttcaaggggtcaatcctacctga

SEQ ID NO: 417482 - DNA, 55 bp, Artificial
  Synthetic oligonucleotide
gctttcgggatccagcatacacctatatcatacgtctgccttttagagactggcg

SEQ ID NO: 417483 - DNA, 55 bp, Artificial
  Synthetic oligonucleotide
gctttcgggtctagagatgcttcttttgatatgcgaaggtcattcatcaaacccg

SEQ ID NO: 417484 - DNA, 54 bp, Artificial
  Synthetic oligonucleotide
gctttcgggttccttgagtaacctcgataagatattgcgtgactactggtcaca

SEQ ID NO: 417485 - DNA, 55 bp, Artificial
  Synthetic oligonucleotide
gctttcggtgggccggatgctaatataactattctaagagatacttcaggtcaaa

SEQ ID NO: 417486 - DNA, 60 bp, Artificial
  Synthetic oligonucleotide
gctttcgtaaggcatatatccaacttgcgcggaagaacgccaagtcgcaattacttgcac

SEQ ID NO: 417487 - DNA, 60 bp, Artificial
  Synthetic oligonucleotide
gctttcgtgcggccatagcactggacggggggctgcatacaacgcgagactagctttccg

SEQ ID NO: 417488 - DNA, 60 bp, Artificial
  Synthetic oligonucleotide
gctttctaaattaagagctagaagaccagaggtgccattctttgctggtgtgatctcggg

SEQ ID NO: 417489 - DNA, 60 bp, Artificial
  Synthetic oligonucleotide
gctttctaatacagagtatgcttatatctcgtctgtcattcaaaacggtccttcagtaag

SEQ ID NO: 417490 - DNA, 55 bp, Artificial
  Synthetic oligonucleotide
gctttctagatgatgcaacgcatacatgctggacatatatggacacgtatcttag

SEQ ID NO: 417491 - DNA, 56 bp, Artificial
  Synthetic oligonucleotide
gctttctatcgtggcgataagaaacttatgtctaaattagagttatgtgtttgggc

SEQ ID NO: 417492 - DNA, 57 bp, Artificial
  Synthetic oligonucleotide
gctttctcactcctgaagaaatccttttcagctcttcggtctacaccgaaatgtttg

SEQ ID NO: 417493 - DNA, 57 bp, Artificial
  Synthetic oligonucleotide
gctttctcatatagaacgccacaggaggagcttctgaacaggttaccccaaacccaa

SEQ ID NO: 417494 - DNA, 52 bp, Artificial
  Synthetic oligonucleotide
gctttctccagagggtcaaatcaaaaaataaggctccaaaaaactacaaagg

SEQ ID NO: 417495 - DNA, 55 bp, Artificial
  Synthetic oligonucleotide
gctttctcccattggcaacttttctttaggtgagcaatcaggccaatctgtcatc

SEQ ID NO: 417496 - DNA, 60 bp, Artificial
  Synthetic oligonucleotide
gctttctctagcgccttaatcaaacataggataccagctatgagagatgaataccactgt

SEQ ID NO: 417497 - DNA, 55 bp, Artificial
  Synthetic oligonucleotide
gctttctgacaatatccaggatacaatggaatagagatatccaggtcttaggacc

SEQ ID NO: 417498 - DNA, 54 bp, Artificial
  Synthetic oligonucleotide
gctttctgactcatcctctcgaagctttcccaaacgggaaggtcccctcggaag

SEQ ID NO: 417499 - DNA, 55 bp, Artificial
  Synthetic oligonucleotide
gctttctgatgtcatcggagccttgacagcttagaaccatcccctgcggaagagc

SEQ ID NO: 417500 - DNA, 60 bp, Artificial
  Synthetic oligonucleotide
gctttctgccatgcgagctggtcctgttctctacgttgagacgtggccgaatatgatctc

SEQ ID NO: 417501 - DNA, 55 bp, Artificial
  Synthetic oligonucleotide
gctttctgcccgcccttgcttcccggctgggtgtctccgccaagatgggcgaagt

SEQ ID NO: 417502 - DNA, 55 bp, Artificial
  Synthetic oligonucleotide
gctttctgccgctcaaattaaggaattgggccttgatccaaagtctgagctgagc

SEQ ID NO: 417503 - DNA, 51 bp, Artificial
  Synthetic oligonucleotide
gctttctgcgtggtaggcctcggagtgagaggcccctgcatcatccctaat

SEQ ID NO: 417504 - DNA, 58 bp, Artificial
  Synthetic oligonucleotide
gctttctgctgttcgtttgttatctagtaggataccaaatatgccagctttgtccgtt

SEQ ID NO: 417505 - DNA, 60 bp, Artificial
  Synthetic oligonucleotide
gctttctgcttgtactaagtctctcttagtagaccagatagagcctaggagctctctgac

SEQ ID NO: 417506 - DNA, 55 bp, Artificial
  Synthetic oligonucleotide
gctttcttatcataggctgctttagcttatataggcatgttttgtcgcattataa

SEQ ID NO: 417507 - DNA, 58 bp, Artificial
  Synthetic oligonucleotide
gctttcttcaacccgtggttgaacatgatccgtatttgggtcacatacatctgggacc

SEQ ID NO: 417508 - DNA, 55 bp, Artificial
  Synthetic oligonucleotide
gctttcttcttccatgagtccgtgagaaataagaacatcacgaagttgctgcgcg

SEQ ID NO: 417509 - DNA, 56 bp, Artificial
  Synthetic oligonucleotide
gctttctttgcaacatagatttagttttacgtctgctttgtgtgtttgacagtctg

SEQ ID NO: 417510 - DNA, 55 bp, Artificial
  Synthetic oligonucleotide
gctttgaaagagcctgatatatggttccgccactcggaaggctgctccttggaat

SEQ ID NO: 417511 - DNA, 60 bp, Artificial
  Synthetic oligonucleotide
gctttgaaatatatcacaactgcgatgatagctgtatggagagcattagaaacaacacct

SEQ ID NO: 417512 - DNA, 54 bp, Artificial
  Synthetic oligonucleotide
gctttgaagatggtacctttatggatgatttaaccctttacactcccgaccaac

SEQ ID NO: 417513 - DNA, 60 bp, Artificial
  Synthetic oligonucleotide
gctttgaaggagtgacgaccttcagagtccaggcttaattagcttggtcagatactcctg

SEQ ID NO: 417514 - DNA, 55 bp, Artificial
  Synthetic oligonucleotide
gctttgaagtcgccgacggctttgttcctactgccgttccgactttatatgacgt

SEQ ID NO: 417515 - DNA, 55 bp, Artificial
  Synthetic oligonucleotide
gctttgaattattcgtttagttaaaacaagtccagcagaagcccaaacaccatgg

SEQ ID NO: 417516 - DNA, 58 bp, Artificial
  Synthetic oligonucleotide
gctttgacaacgattatcaagcttgtaagttcttacagacgcctgcaagctataggct

SEQ ID NO: 417517 - DNA, 53 bp, Artificial
  Synthetic oligonucleotide
gctttgacacggaatttaccttcgtgttgaccgaaaggtattacacccagaac

SEQ ID NO: 417518 - DNA, 55 bp, Artificial
  Synthetic oligonucleotide
gctttgacaggaaatctacaagctgtggcaacaatgaagagccaactagtaacca

SEQ ID NO: 417519 - DNA, 50 bp, Artificial
  Synthetic oligonucleotide
gctttgactaggcacaaggtcaccttccgctacgagtattgcggtgtatt

SEQ ID NO: 417520 - DNA, 55 bp, Artificial
  Synthetic oligonucleotide
gctttgagtctccttcatgtaaccttgtgtcgtgcatttctatgaccacatgccc

SEQ ID NO: 417521 - DNA, 50 bp, Artificial
  Synthetic oligonucleotide
gctttgattacttttctcgatcatgtgaagcctgaagtgatgcttgcgtc

SEQ ID NO: 417522 - DNA, 55 bp, Artificial
  Synthetic oligonucleotide
gctttgattgaatttatcgaggtaacagtgactgcagatgtggctaaaggcatcc

SEQ ID NO: 417523 - DNA, 56 bp, Artificial
  Synthetic oligonucleotide
gctttgattgcgtcgaagtttgcacgttcgccacgaccgtaccagccaccaccagt

SEQ ID NO: 417524 - DNA, 55 bp, Artificial
  Synthetic oligonucleotide
gctttgcaaactttagtagcccgggagcttcgcctgggtcacatagagccttcgc

SEQ ID NO: 417525 - DNA, 55 bp, Artificial
  Synthetic oligonucleotide
gctttgcaagattcaggacccagggtgaatatagtcactgattcccagtatgcac

SEQ ID NO: 417526 - DNA, 55 bp, Artificial
  Synthetic oligonucleotide
gctttgcacaaagctaacatggagctaaaccctaaatacgctgaagcatacaacg

SEQ ID NO: 417527 - DNA, 55 bp, Artificial
  Synthetic oligonucleotide
gctttgcaggctgataaatctagtgctcctttggatgtcattgccacagtttgta

SEQ ID NO: 417528 - DNA, 50 bp, Artificial
  Synthetic oligonucleotide
gctttgcagtaagatgggtggcaagtggtcaaaaagtagtctggtaggat

SEQ ID NO: 417529 - DNA, 56 bp, Artificial
  Synthetic oligonucleotide
gctttgccagtccatctgggcccccataaactctttaaagtgctttaggtaatgcg

SEQ ID NO: 417530 - DNA, 56 bp, Artificial
  Synthetic oligonucleotide
gctttgccagtccctttgggcccccatgaattctttgaaatgctttaggtagtgcg

SEQ ID NO: 417531 - DNA, 55 bp, Artificial
  Synthetic oligonucleotide
gctttgccagtctctttgggcccccatgaattctttaaagtgtttaagatagtgg

SEQ ID NO: 417532 - DNA, 56 bp, Artificial
  Synthetic oligonucleotide
gctttgcccggtggcagtgcctccagaccaggagaacaatgagtgtaacaaattgc

SEQ ID NO: 417533 - DNA, 56 bp, Artificial
  Synthetic oligonucleotide
gctttgccgtcgataacttcagtttacccttaaacttcgcgaaatgcgtcctctga

SEQ ID NO: 417534 - DNA, 55 bp, Artificial
  Synthetic oligonucleotide
gctttgcctatagaaggccttaattaccacatgttcgctgtgggcggtgagcccc

SEQ ID NO: 417535 - DNA, 55 bp, Artificial
  Synthetic oligonucleotide
gctttgcgacacttttagctcgatggggcagcggtgacgtttaaaagcgtaaact

SEQ ID NO: 417536 - DNA, 60 bp, Artificial
  Synthetic oligonucleotide
gctttgcgagcagctaagcagcttacctcagttgcggagggtgatctactacgcaacaaa

SEQ ID NO: 417537 - DNA, 55 bp, Artificial
  Synthetic oligonucleotide
gctttgcgtacaatttgccagtcatgacaagcaatgcttccaccagcatcatatc

SEQ ID NO: 417538 - DNA, 55 bp, Artificial
  Synthetic oligonucleotide
gctttgctactaacactatggttcgcgcacgtagaaccaaacgtgcatctgttac

SEQ ID NO: 417539 - DNA, 55 bp, Artificial
  Synthetic oligonucleotide
gctttgctatagaagggatttcaagagcgtgtttagcacagttgactaggcatag

SEQ ID NO: 417540 - DNA, 54 bp, Artificial
  Synthetic oligonucleotide
gctttgctggggatgatatgtgtgcactgaggaatctcagggagatcgatactc

SEQ ID NO: 417541 - DNA, 55 bp, Artificial
  Synthetic oligonucleotide
gctttgcttagggacattgactgccgccgaaattacaagccagacaagcctgtgc

SEQ ID NO: 417542 - DNA, 57 bp, Artificial
  Synthetic oligonucleotide
gctttggacgagctggttgaagttggtcctatgagtttacaagttggtagtataaga

SEQ ID NO: 417543 - DNA, 55 bp, Artificial
  Synthetic oligonucleotide
gctttggagaaccctgggaaggaataaaagacccagattatgcacgagagaggag

SEQ ID NO: 417544 - DNA, 60 bp, Artificial
  Synthetic oligonucleotide
gctttggagaagcgagtaactgtgtcagttgctcagccatctcgtaaccgtaagaactat

SEQ ID NO: 417545 - DNA, 55 bp, Artificial
  Synthetic oligonucleotide
gctttggagccgagagggatgggcccgcttgtgcgcttatgtgttacacggtgcc

SEQ ID NO: 417546 - DNA, 55 bp, Artificial
  Synthetic oligonucleotide
gctttggagcgtatatgtccaaggcacatggcatcgagcctaacatcagaactgg

SEQ ID NO: 417547 - DNA, 53 bp, Artificial
  Synthetic oligonucleotide
gctttggataggagctgttgtgtatttttctgacacttcataatgaattccca

SEQ ID NO: 417548 - DNA, 56 bp, Artificial
  Synthetic oligonucleotide
gctttggcaaataagctctcctcctttaagggacggaaagtaactcttgatgttga

SEQ ID NO: 417549 - DNA, 55 bp, Artificial
  Synthetic oligonucleotide
gctttggcacaaactacatgttctctcaagctctctgccaaggcacaatcgacct

SEQ ID NO: 417550 - DNA, 59 bp, Artificial
  Synthetic oligonucleotide
gctttggcctgcgaacagaataaacctaatcaggccagtgtacgtctaagtacaactgc

SEQ ID NO: 417551 - DNA, 58 bp, Artificial
  Synthetic oligonucleotide
gctttggccttagcttaatgtcagtagtagaacaatttactaatgtatgtcctaacag

SEQ ID NO: 417552 - DNA, 55 bp, Artificial
  Synthetic oligonucleotide
gctttggcttcatggcttaggacagcatatctataacacttatggggatacttgg

SEQ ID NO: 417553 - DNA, 60 bp, Artificial
  Synthetic oligonucleotide
gctttggctttagatattgcggtgcgacgtcatcaatgacgttatactccacttcgttgg

SEQ ID NO: 417554 - DNA, 60 bp, Artificial
  Synthetic oligonucleotide
gctttgggaccacagacataatgattgtgttatccgtcagtgcggtacacgtggtccaat

SEQ ID NO: 417555 - DNA, 60 bp, Artificial
  Synthetic oligonucleotide
gctttgggcagcactatctagtgctcaactatatacctatgttgacgccagtagaatcgg

SEQ ID NO: 417556 - DNA, 60 bp, Artificial
  Synthetic oligonucleotide
gctttgggccaactaccgggatgctacaacagcaggagagattttgacactctcacggac

SEQ ID NO: 417557 - DNA, 55 bp, Artificial
  Synthetic oligonucleotide
gctttgggccacttcgccctttttcgacccgtgttatgctatgcgcttttcgacc

SEQ ID NO: 417558 - DNA, 55 bp, Artificial
  Synthetic oligonucleotide
gctttggtgctttcggtgcggtgccctttgctttgtctataagaggggaggccgc

SEQ ID NO: 417559 - DNA, 54 bp, Artificial
  Synthetic oligonucleotide
gctttggttcagtggttttggacaaggaaaggctagtgtttggtctgggtacaa

SEQ ID NO: 417560 - DNA, 57 bp, Artificial
  Synthetic oligonucleotide
gctttgtaagcctgttctacctctccgagtttcagtctgtctatttctctaaatagt

SEQ ID NO: 417561 - DNA, 59 bp, Artificial
  Synthetic oligonucleotide
gctttgtaaggccatggcggtaatctcgtcgggagtcaaaaggcaagacatccctctca

SEQ ID NO: 417562 - DNA, 55 bp, Artificial
  Synthetic oligonucleotide
gctttgtaatccaatggacataccgttgtattattatcagcagacggacgaggcg

SEQ ID NO: 417563 - DNA, 55 bp, Artificial
  Synthetic oligonucleotide
gctttgtacaacaacgtagaaagctagagatgttcacatatatgaggtttgacgc

SEQ ID NO: 417564 - DNA, 60 bp, Artificial
  Synthetic oligonucleotide
gctttgtcacccgtggacatgcacgtgcacacagatgtcagtttcttgcttgaccggttc

SEQ ID NO: 417565 - DNA, 59 bp, Artificial
  Synthetic oligonucleotide
gctttgtccaactacttaatgctgagttttcatccttgtcgaggaaacatttatagctg

SEQ ID NO: 417566 - DNA, 52 bp, Artificial
  Synthetic oligonucleotide
gctttgtcctccaagagattcggggcgttcaagcccccatcacccacctgac

SEQ ID NO: 417567 - DNA, 60 bp, Artificial
  Synthetic oligonucleotide
gctttgtcgcgcgaactgcttttatgagttgaattattgtcgcgcgatgtctgactaggg

SEQ ID NO: 417568 - DNA, 55 bp, Artificial
  Synthetic oligonucleotide
gctttgtgagccattcgctgatttggcccgtgagtttcttcatgaaaggtggtca

SEQ ID NO: 417569 - DNA, 55 bp, Artificial
  Synthetic oligonucleotide
gctttgtgctgtttggctgggattcataatgtgggcctgccagaaaggcaacatt

SEQ ID NO: 417570 - DNA, 59 bp, Artificial
  Synthetic oligonucleotide
gctttgtggagatccaatgctctccgtaggttgtggttgaaccggacttggatgtggta

SEQ ID NO: 417571 - DNA, 55 bp, Artificial
  Synthetic oligonucleotide
gctttgtgtaactatgatcttgcacttacgaacttcgaagtctcgaggcgtcagg

SEQ ID NO: 417572 - DNA, 57 bp, Artificial
  Synthetic oligonucleotide
gctttgtgtagattcagtgacttccttaggttgtaattgaaccggatttggatgtgg

SEQ ID NO: 417573 - DNA, 60 bp, Artificial
  Synthetic oligonucleotide
gctttgttgttgtatatggcatgtactcatgcctctaatcctgtgtatgcgactctgaaa

SEQ ID NO: 417574 - DNA, 57 bp, Artificial
  Synthetic oligonucleotide
gcttttaaaagacgtgctgacgaaaagaatgctgttagtggtttactcacgcagtcc

SEQ ID NO: 417575 - DNA, 55 bp, Artificial
  Synthetic oligonucleotide
gcttttaaagctagctacttaccatcagttggtgacaatttgcattctttgccac

SEQ ID NO: 417576 - DNA, 55 bp, Artificial
  Synthetic oligonucleotide
gcttttaacatgtgagcttattgtctgggcagctagtgcggaaactccactgctg

SEQ ID NO: 417577 - DNA, 59 bp, Artificial
  Synthetic oligonucleotide
gcttttaagaggaagcaaatacagtggcctcctacacctaatgagatggttaatgaatg

SEQ ID NO: 417578 - DNA, 57 bp, Artificial
  Synthetic oligonucleotide
gcttttaattaatgacgcaggtacggagctgtccgcagccatcaaaaccggtagtaa

SEQ ID NO: 417579 - DNA, 55 bp, Artificial
  Synthetic oligonucleotide
gcttttacaggcggtagtcctactatagttgcaactgcagactttacagttcctg

SEQ ID NO: 417580 - DNA, 55 bp, Artificial
  Synthetic oligonucleotide
gcttttaccatgccagacgacaaatttactgaacaaggggatgcgattccaaggg

SEQ ID NO: 417581 - DNA, 60 bp, Artificial
  Synthetic oligonucleotide
gcttttacggcaccaaggaggtcacttgctgagtccattaatcatgatttgggactcgcg

SEQ ID NO: 417582 - DNA, 50 bp, Artificial
  Synthetic oligonucleotide
gcttttactatgtggaaactaacatatctagatcataaactaatgcctat

SEQ ID NO: 417583 - DNA, 55 bp, Artificial
  Synthetic oligonucleotide
gcttttacttcaactcatttagtccgcgcggccatgaatcaacgtcccatggtcg

SEQ ID NO: 417584 - DNA, 59 bp, Artificial
  Synthetic oligonucleotide
gcttttagactattcaagagtcacatacgcctttcacctggactacgagaagtggaata

SEQ ID NO: 417585 - DNA, 55 bp, Artificial
  Synthetic oligonucleotide
gcttttagatagagttcctgctctgcaagaggtggatgacatcggtggtcaatgg

SEQ ID NO: 417586 - DNA, 60 bp, Artificial
  Synthetic oligonucleotide
gcttttagcgcgattgcatcatcaacgccatgaaagagagcgaaacgttgtgaaatggtg

SEQ ID NO: 417587 - DNA, 60 bp, Artificial
  Synthetic oligonucleotide
gcttttataattgcgagagcctcttctgcagttccggcattgatggcattatggaacacg

SEQ ID NO: 417588 - DNA, 55 bp, Artificial
  Synthetic oligonucleotide
gcttttataggagaactccagacttccttacagaagctatagtacattcagtgtt

SEQ ID NO: 417589 - DNA, 60 bp, Artificial
  Synthetic oligonucleotide
gcttttatcagccagatgcagcggatgattgggtggctccagacatataccccatgcgaa

SEQ ID NO: 417590 - DNA, 55 bp, Artificial
  Synthetic oligonucleotide
gcttttatgcagaactcaaatggctagtgtcaaagagtaagggacaaaacttccc

SEQ ID NO: 417591 - DNA, 60 bp, Artificial
  Synthetic oligonucleotide
gcttttatgccacagttctcagtaacactgaaaagggctacagtggcgctccctactgga

SEQ ID NO: 417592 - DNA, 55 bp, Artificial
  Synthetic oligonucleotide
gcttttatgctcacacttttctcgccgcggggctctatggctccaggtgattggt

SEQ ID NO: 417593 - DNA, 60 bp, Artificial
  Synthetic oligonucleotide
gcttttatgtgtaataggcgcgtcggagtgcgctgataaagttaacattctctctcctaa

SEQ ID NO: 417594 - DNA, 52 bp, Artificial
  Synthetic oligonucleotide
gcttttatgtgttaggcccaagttatccgggttttttaaatggatcatttta

SEQ ID NO: 417595 - DNA, 53 bp, Artificial
  Synthetic oligonucleotide
gcttttattatcctttcacgtggcaaaatctagagagacagtcacaaatctgt

SEQ ID NO: 417596 - DNA, 60 bp, Artificial
  Synthetic oligonucleotide
gcttttcagtcagccctagaagcactcaactcgaccacacatcgagatgctgtgtctcat

SEQ ID NO: 417597 - DNA, 55 bp, Artificial
  Synthetic oligonucleotide
gcttttcagtggttgatgctcaagatggagtctacacagcagatggctagttcga

SEQ ID NO: 417598 - DNA, 55 bp, Artificial
  Synthetic oligonucleotide
gcttttcagtggttgttgctcaagatggagtctactcagcagatggtaagctcca

SEQ ID NO: 417599 - DNA, 52 bp, Artificial
  Synthetic oligonucleotide
gcttttcattccaccatggcgcgcgccgtatacgacttcttcactgctcaat

SEQ ID NO: 417600 - DNA, 60 bp, Artificial
  Synthetic oligonucleotide
gcttttccacccatggctcagattcgaggccttcggttgtctacgacactctcagctcca

SEQ ID NO: 417601 - DNA, 55 bp, Artificial
  Synthetic oligonucleotide
gcttttccactctatatctcgcgctgcagttccgaatggctgagtttatgctgcc

SEQ ID NO: 417602 - DNA, 58 bp, Artificial
  Synthetic oligonucleotide
gcttttccacttctagcgtgttgtcgtcatgtcaaccaactggggagacgcacccgtg

SEQ ID NO: 417603 - DNA, 59 bp, Artificial
  Synthetic oligonucleotide
gcttttcccaccatggcctatctggcgatacctgtgccaggaggtagtaactacaactc

SEQ ID NO: 417604 - DNA, 55 bp, Artificial
  Synthetic oligonucleotide
gcttttccgttagggaaggcaagagaatcggtctcgactaccttgggtctccatc

SEQ ID NO: 417605 - DNA, 54 bp, Artificial
  Synthetic oligonucleotide
gcttttcgaaccctagcgtgacaatggagcgtactctgcgtgccggagtttcga

SEQ ID NO: 417606 - DNA, 60 bp, Artificial
  Synthetic oligonucleotide
gcttttcgaagaagaatcgacgagtgctcgacgggaatggagcaatcctgtttctgatgt

SEQ ID NO: 417607 - DNA, 55 bp, Artificial
  Synthetic oligonucleotide
gcttttcgatcccttgcgtgtccgatgcctagattacccggtgggtcttgtaacg

SEQ ID NO: 417608 - DNA, 60 bp, Artificial
  Synthetic oligonucleotide
gcttttcgatccttgccgcgcaagccgctatggaggtccgtgcgccgaactttcactcga

SEQ ID NO: 417609 - DNA, 59 bp, Artificial
  Synthetic oligonucleotide
gcttttcgatgtgattcataattaactatacacttgagcttaaaaccaattgttatgcg

SEQ ID NO: 417610 - DNA, 60 bp, Artificial
  Synthetic oligonucleotide
gcttttcgtctgataggcacaccagagttctccgattttgtgatagcttacaagggcact

SEQ ID NO: 417611 - DNA, 60 bp, Artificial
  Synthetic oligonucleotide
gcttttctacgcttcaaatgtcgagaagatcaagagtatcatgagaatgcgtagcacgac

SEQ ID NO: 417612 - DNA, 57 bp, Artificial
  Synthetic oligonucleotide
gcttttctagagaagtggttggccctgttgatggttttgcttccatgggttggaatg

SEQ ID NO: 417613 - DNA, 56 bp, Artificial
  Synthetic oligonucleotide
gcttttctagagcctattaaagcacatctacgaagtggttttactccaaatagatc

SEQ ID NO: 417614 - DNA, 58 bp, Artificial
  Synthetic oligonucleotide
gcttttctccgaacgccgaaatgagttcgcgcaaagtggctagacgacgccataagga

SEQ ID NO: 417615 - DNA, 60 bp, Artificial
  Synthetic oligonucleotide
gcttttctcgacatggcctatctagccacacctgtgctaggagtcggttctcgcattacc

SEQ ID NO: 417616 - DNA, 55 bp, Artificial
  Synthetic oligonucleotide
gcttttctctaacagaccgttaattccctctgttaatggaacatggccttccagt

SEQ ID NO: 417617 - DNA, 57 bp, Artificial
  Synthetic oligonucleotide
gcttttgacaccttcgattatgtgaccaacaccgctgctatccaaccagtcgaaggt

SEQ ID NO: 417618 - DNA, 55 bp, Artificial
  Synthetic oligonucleotide
gcttttgacatgccatagtgtcacatattggtgataatcctcacatgataactcc

SEQ ID NO: 417619 - DNA, 60 bp, Artificial
  Synthetic oligonucleotide
gcttttgacttctttggacagagacatcttgtcactcaatgatacccaagacaaatacgc

SEQ ID NO: 417620 - DNA, 55 bp, Artificial
  Synthetic oligonucleotide
gcttttgaggtgaacttggcaacacagaacaaccggtcactaaatcttccgctgc

SEQ ID NO: 417621 - DNA, 50 bp, Artificial
  Synthetic oligonucleotide
gcttttgagttaaatcaatacttacaggcaaagtcccaagttatggcagc

SEQ ID NO: 417622 - DNA, 57 bp, Artificial
  Synthetic oligonucleotide
gcttttgatgaggcatacaatgatgaaagccacctaaaaaagtttcagaagactaac

SEQ ID NO: 417623 - DNA, 55 bp, Artificial
  Synthetic oligonucleotide
gcttttgcaagagcttatgctcgtgctcgtgatctttataacagacgagtacagc

SEQ ID NO: 417624 - DNA, 50 bp, Artificial
  Synthetic oligonucleotide
gcttttgcaagatttaagggcggtaaatgccaccatggtattaatgggag

SEQ ID NO: 417625 - DNA, 55 bp, Artificial
  Synthetic oligonucleotide
gcttttgcacaagcactaaattatgagcaccgcttctatgcggtcttagcaccta

SEQ ID NO: 417626 - DNA, 57 bp, Artificial
  Synthetic oligonucleotide
gcttttgccgagctttcagatttggtttcgtaaacatactgatttacgcagattggg

SEQ ID NO: 417627 - DNA, 57 bp, Artificial
  Synthetic oligonucleotide
gcttttgcgtgggaccaccaagagttagtgctattcgactttcctcgaagcttcgag

SEQ ID NO: 417628 - DNA, 59 bp, Artificial
  Synthetic oligonucleotide
gcttttggacagacttctatgacgcgctctttgcttaacagattttcctctgccaacga

SEQ ID NO: 417629 - DNA, 55 bp, Artificial
  Synthetic oligonucleotide
gcttttgggcatctagagaaattggaactccccactgaacacaagggcgtctacg

SEQ ID NO: 417630 - DNA, 50 bp, Artificial
  Synthetic oligonucleotide
gcttttgtcaacgctcgctgatgcttatacagtgttgagacccgaatttg

SEQ ID NO: 417631 - DNA, 60 bp, Artificial
  Synthetic oligonucleotide
gcttttgtcatgcggtgctttgccgatttggaccactgctgaggcaaacggaaaaggcat

SEQ ID NO: 417632 - DNA, 59 bp, Artificial
  Synthetic oligonucleotide
gcttttgtgtctggaaggcgcgtggaagtgcgctgaaaaagttaacattctctctcctc

SEQ ID NO: 417633 - DNA, 55 bp, Artificial
  Synthetic oligonucleotide
gcttttgtgtgtattgtgcagctatgcactcaatgtttgagggccatataagacc

SEQ ID NO: 417634 - DNA, 60 bp, Artificial
  Synthetic oligonucleotide
gcttttgttatccatggggcaagaaggaatctctagcacagaagcggcaatggtgctaga

SEQ ID NO: 417635 - DNA, 54 bp, Artificial
  Synthetic oligonucleotide
gctttttactagcaatttcgtcctggcttccacaaactcaaacaccctaagtcc

SEQ ID NO: 417636 - DNA, 54 bp, Artificial
  Synthetic oligonucleotide
gctttttcaatcccttgtgtcgatgttcccgtatgtcatctggttcatgtaacg

SEQ ID NO: 417637 - DNA, 60 bp, Artificial
  Synthetic oligonucleotide
gctttttcagtgccagtctttctcacaagatgggtaacgcgacgtctgttgtgcagaact

SEQ ID NO: 417638 - DNA, 60 bp, Artificial
  Synthetic oligonucleotide
gctttttccggttgcattcattcgttgctctgctctcacagagaacggacctcaggtcag

SEQ ID NO: 417639 - DNA, 59 bp, Artificial
  Synthetic oligonucleotide
gctttttcgatgccagacgatcagtttaacgtgttattagcgaatatggtggtaggcca

SEQ ID NO: 417640 - DNA, 56 bp, Artificial
  Synthetic oligonucleotide
gctttttcttccacgatggcgcgtgccatatacgacttcttttctacgcctttcgg

SEQ ID NO: 417641 - DNA, 59 bp, Artificial
  Synthetic oligonucleotide
gctttttgagtccttagcgtgcaagccgcaatggaggtacgtgtgccaaactttcactc

SEQ ID NO: 417642 - DNA, 58 bp, Artificial
  Synthetic oligonucleotide
gctttttgagtgctagtctttctcacaaaatgggtaacgcaacgtctgtcgttcagaa

SEQ ID NO: 417643 - DNA, 53 bp, Artificial
  Synthetic oligonucleotide
ggaaaaaaaagaccctatggggttttcgtatgatacccgatgctttgactcaa

SEQ ID NO: 417644 - DNA, 53 bp, Artificial
  Synthetic oligonucleotide
ggaaaaaatcgcgacgtggaaatcggtcgtccaaacgccccagttgtgagtac

SEQ ID NO: 417645 - DNA, 57 bp, Artificial
  Synthetic oligonucleotide
ggaaaaacacgtgttattgaggccagtagcgtgaatgacactgtattatttaggaca

SEQ ID NO: 417646 - DNA, 56 bp, Artificial
  Synthetic oligonucleotide
ggaaaaacagctaacgcactttaccgcattatgtctcgtgttagaaatactttgga

SEQ ID NO: 417647 - DNA, 54 bp, Artificial
  Synthetic oligonucleotide
ggaaaaaccccggtcaattactctatggtctggccctaaagtgtgtctttctga

SEQ ID NO: 417648 - DNA, 60 bp, Artificial
  Synthetic oligonucleotide
ggaaaaactccgatatctcgcgattcagccaccaattcacgacacgcgcgggcggtgcga

SEQ ID NO: 417649 - DNA, 58 bp, Artificial
  Synthetic oligonucleotide
ggaaaaactcgtgtcatagaggctagcagtgtgaatgatacagtagcatttagaatgg

SEQ ID NO: 417650 - DNA, 57 bp, Artificial
  Synthetic oligonucleotide
ggaaaaacttgaatgtcacctgcgacgagagagaagggaacgtacttcccatggcta

SEQ ID NO: 417651 - DNA, 59 bp, Artificial
  Synthetic oligonucleotide
ggaaaaagaggacggttgtcctgacagagtccactgtgtcttctgccctggcggagctc

SEQ ID NO: 417652 - DNA, 49 bp, Artificial
  Synthetic oligonucleotide
ggaaaaagctgtgccggcccttttttcgagggttaaaacggtacgcgtc

SEQ ID NO: 417653 - DNA, 57 bp, Artificial
  Synthetic oligonucleotide
ggaaaaattagtgtgttggcgagacaaaatagagtcatgttgatatttaaagttgaa

SEQ ID NO: 417654 - DNA, 60 bp, Artificial
  Synthetic oligonucleotide
ggaaaaattcgccagctatcgagcaattacatactagagctcttgtataagttccgcgac

SEQ ID NO: 417655 - DNA, 55 bp, Artificial
  Synthetic oligonucleotide
ggaaaacacagcttgcctcaatgctggttaacctcaaacgggagctatttaaacg

SEQ ID NO: 417656 - DNA, 54 bp, Artificial
  Synthetic oligonucleotide
ggaaaacatgcctttctggtggggccgacgcaacaaattctggtatggccgaaa

SEQ ID NO: 417657 - DNA, 60 bp, Artificial
  Synthetic oligonucleotide
ggaaaacccgtgtcattgatgtggcagggtttgggcatgcaatagttggccgaatgctat

SEQ ID NO: 417658 - DNA, 57 bp, Artificial
  Synthetic oligonucleotide
ggaaaaccttttcgaggcacctatcatcctacctgacggtagaatgtacagacgcca

SEQ ID NO: 417659 - DNA, 54 bp, Artificial
  Synthetic oligonucleotide
ggaaaaccttttgactctaggtttgttttctgtagcacaaatcaaactctcttg

SEQ ID NO: 417660 - DNA, 54 bp, Artificial
  Synthetic oligonucleotide
ggaaaacgactcgtatttaagtgacttaacaccattcgttggtccagtatctta

SEQ ID NO: 417661 - DNA, 52 bp, Artificial
  Synthetic oligonucleotide
ggaaaacgccgtacattaaaagctacaagttacctactcaaatgttgaccgt

SEQ ID NO: 417662 - DNA, 52 bp, Artificial
  Synthetic oligonucleotide
ggaaaacgccttttgcccgcgttaagcggtagcacaactagttcccttcaag

SEQ ID NO: 417663 - DNA, 56 bp, Artificial
  Synthetic oligonucleotide
ggaaaacggtcaaacgtgtcgattacttccaagtgatgggaggtgagagattacca

SEQ ID NO: 417664 - DNA, 54 bp, Artificial
  Synthetic oligonucleotide
ggaaaactaaaagggcactttaataagacaataatctttcaaccatcctcagga

SEQ ID NO: 417665 - DNA, 51 bp, Artificial
  Synthetic oligonucleotide
ggaaaactagtgctctttgggtaaccactaaaatcccgaaagggtgggctg

SEQ ID NO: 417666 - DNA, 55 bp, Artificial
  Synthetic oligonucleotide
ggaaaactgaacacaggactagtaacaagaacaggagactccaacaccttccatc

SEQ ID NO: 417667 - DNA, 57 bp, Artificial
  Synthetic oligonucleotide
ggaaaactgcaacgccttaaacaactgtgaaaagataactggactcatgtgtggccc

SEQ ID NO: 417668 - DNA, 60 bp, Artificial
  Synthetic oligonucleotide
ggaaaactgtatctgtgcaagagactcggagcctaggcggctccaagttcagtgtctgta

SEQ ID NO: 417669 - DNA, 55 bp, Artificial
  Synthetic oligonucleotide
ggaaaactgtcacatgttttgacctttcatgtaatcagactgtatgtcaacccac

SEQ ID NO: 417670 - DNA, 55 bp, Artificial
  Synthetic oligonucleotide
ggaaaacttagtccagtttgtttgtatctacttctccagtgtctactactaggag

SEQ ID NO: 417671 - DNA, 55 bp, Artificial
  Synthetic oligonucleotide
ggaaaagatattgctgaaattttaggatatgcaagggcagacaatgccatcagaa

SEQ ID NO: 417672 - DNA, 55 bp, Artificial
  Synthetic oligonucleotide
ggaaaagatctttggactaagatccagatgtccacacatgtaattatgggcccct

SEQ ID NO: 417673 - DNA, 55 bp, Artificial
  Synthetic oligonucleotide
ggaaaagcaaagtcactgtgacaaagcaaaatgtaaccgcaagtgctgacaaatg

SEQ ID NO: 417674 - DNA, 60 bp, Artificial
  Synthetic oligonucleotide
ggaaaagcaagagctgcctcaggccgtataaggcagctaactctcgccgctgacaagggg

SEQ ID NO: 417675 - DNA, 58 bp, Artificial
  Synthetic oligonucleotide
ggaaaagcaggaaccctgggaatgctgaaatcgaggatcttatctttctggcacggtc

SEQ ID NO: 417676 - DNA, 55 bp, Artificial
  Synthetic oligonucleotide
ggaaaagcgcttgagaactacgactattggcatacttatagccgccgcactggtg

SEQ ID NO: 417677 - DNA, 55 bp, Artificial
  Synthetic oligonucleotide
ggaaaaggataaagtcacgtgccgaaaataggttgcttcgccgcgaagcaaacta

SEQ ID NO: 417678 - DNA, 57 bp, Artificial
  Synthetic oligonucleotide
ggaaaagggcaatttaattgattgtatagataattatgcaattgaactttcgtacgc

SEQ ID NO: 417679 - DNA, 55 bp, Artificial
  Synthetic oligonucleotide
ggaaaagtcaacagtgacacattcgaattagctgtgagcgatacaatcgccgatc

SEQ ID NO: 417680 - DNA, 60 bp, Artificial
  Synthetic oligonucleotide
ggaaaagtcatcatagtggcagtacatgtggctagtggattcatggaagcagaagtaatt

SEQ ID NO: 417681 - DNA, 53 bp, Artificial
  Synthetic oligonucleotide
ggaaaagtccacatctttgtctgtgaactgtttgacagtatctttaccgtcgg

SEQ ID NO: 417682 - DNA, 55 bp, Artificial
  Synthetic oligonucleotide
ggaaaagttacaagatatcctttttgagttacatgtccaggagaactcaaaaaca

SEQ ID NO: 417683 - DNA, 55 bp, Artificial
  Synthetic oligonucleotide
ggaaaataatacacgtccgtatccgtttcgtgaatacataaactgttgataggct

SEQ ID NO: 417684 - DNA, 52 bp, Artificial
  Synthetic oligonucleotide
ggaaaatacaagccagttgaagtgggcactcggtgagaacatggcaccagag

SEQ ID NO: 417685 - DNA, 55 bp, Artificial
  Synthetic oligonucleotide
ggaaaataccaggatctatacttgcaagagtacattgtgaagtggctcctacatg

SEQ ID NO: 417686 - DNA, 58 bp, Artificial
  Synthetic oligonucleotide
ggaaaatattcatcagatgtatacgcgtatgggaaaattaataagtggagttatcgcc

SEQ ID NO: 417687 - DNA, 55 bp, Artificial
  Synthetic oligonucleotide
ggaaaatcactgtgcaatacaacctgagtcatagcttcgcagtggatgcagcagg

SEQ ID NO: 417688 - DNA, 54 bp, Artificial
  Synthetic oligonucleotide
ggaaaatcggtcccaggaggcggggtgccaaacagaggaggcaggtggatagca

SEQ ID NO: 417689 - DNA, 60 bp, Artificial
  Synthetic oligonucleotide
ggaaaatcgttcatattagcacattgtcaggaagtgctcagcatgtcgaggagtgctcct

SEQ ID NO: 417690 - DNA, 60 bp, Artificial
  Synthetic oligonucleotide
ggaaaatggcttcagtcaagtgcccacctaagtatgagctcactgaggactgcaactttt

SEQ ID NO: 417691 - DNA, 55 bp, Artificial
  Synthetic oligonucleotide
ggaaaatggtgtgtttaagcactacattgatgcaggtgacttatttgtcaccgac

SEQ ID NO: 417692 - DNA, 55 bp, Artificial
  Synthetic oligonucleotide
ggaaaattcagtgacgcaatcaaccatcattggttggtgacaacgcagtactttc

SEQ ID NO: 417693 - DNA, 53 bp, Artificial
  Synthetic oligonucleotide
ggaaaattgacttttccccagggtgtgacaagtgaggttcgaaggatgcctct

SEQ ID NO: 417694 - DNA, 58 bp, Artificial
  Synthetic oligonucleotide
ggaaaattgctcagacttggatgttgttttcactacttgtcccaaggatgaattaaga

SEQ ID NO: 417695 - DNA, 54 bp, Artificial
  Synthetic oligonucleotide
ggaaaatttggttcagcagcaagaaatagaaattggatggttgatactagaact

SEQ ID NO: 417696 - DNA, 57 bp, Artificial
  Synthetic oligonucleotide
ggaaacaactgagattgtggaattccaagctaaaaacacgggccaagctagcttgga

SEQ ID NO: 417697 - DNA, 54 bp, Artificial
  Synthetic oligonucleotide
ggaaacaagagtttccgcgtgtggaagacccggaggtatcgagaacggaagcgc

SEQ ID NO: 417698 - DNA, 52 bp, Artificial
  Synthetic oligonucleotide
ggaaacaagagtttccgcttgtggaagtcccggaagtcccaaaattggaagc

SEQ ID NO: 417699 - DNA, 55 bp, Artificial
  Synthetic oligonucleotide
ggaaacaagcttatcaattgaagcaccatggggtgcaataaatgtccaatcaacc

SEQ ID NO: 417700 - DNA, 55 bp, Artificial
  Synthetic oligonucleotide
ggaaacaagtatgtcataccacagtggagtggccctggacaaatcggactccgga

SEQ ID NO: 417701 - DNA, 48 bp, Artificial
  Synthetic oligonucleotide
ggaaacaagttcaacgtcaaaccgaacgggtaaccccgtttcagggtc

SEQ ID NO: 417702 - DNA, 54 bp, Artificial
  Synthetic oligonucleotide
ggaaacaagttgccccctgccgtctgcaacggtatccactggtttctttggtta

SEQ ID NO: 417703 - DNA, 60 bp, Artificial
  Synthetic oligonucleotide
ggaaacaatgggaattgcaatgaaacaattatcagggaatacaatgagacagtaaggatc

SEQ ID NO: 417704 - DNA, 55 bp, Artificial
  Synthetic oligonucleotide
ggaaacacaatcattattgctgcatgtctgtcctctatgttaccgatggaaagat

SEQ ID NO: 417705 - DNA, 55 bp, Artificial
  Synthetic oligonucleotide
ggaaacacacatgccagctctgctatctaaaacactcgaaacagatgcagacatg

SEQ ID NO: 417706 - DNA, 60 bp, Artificial
  Synthetic oligonucleotide
ggaaacaccaatcaacagagagcatctgcaggacaaatcagtgtgcaacctactttctcg

SEQ ID NO: 417707 - DNA, 54 bp, Artificial
  Synthetic oligonucleotide
ggaaacaccccgaggccacttacaccagatgcggctcggggccttggttaacac

SEQ ID NO: 417708 - DNA, 55 bp, Artificial
  Synthetic oligonucleotide
ggaaacaccgtcataatagcggcgtgtctggcttctatgcttccgatggataagg

SEQ ID NO: 417709 - DNA, 55 bp, Artificial
  Synthetic oligonucleotide
ggaaacacgaggccaattgggcgtaacatgatccgctggcaaacaaagttggact

SEQ ID NO: 417710 - DNA, 55 bp, Artificial
  Synthetic oligonucleotide
ggaaacacgggtgtgctactcgggaagtacaataagggcaagatgcatgctgagg

SEQ ID NO: 417711 - DNA, 60 bp, Artificial
  Synthetic oligonucleotide
ggaaacactcgccatgcttaaagccatgtgcacgttgctaccgtacaatccatgtgggct

SEQ ID NO: 417712 - DNA, 55 bp, Artificial
  Synthetic oligonucleotide
ggaaacactgtctcccggaccatcggacgacccccaatgggcaggtctgaagggc

SEQ ID NO: 417713 - DNA, 55 bp, Artificial
  Synthetic oligonucleotide
ggaaacactttcctgctaaagaggagatcagtcgtcagatcactgttgtcacctc

SEQ ID NO: 417714 - DNA, 58 bp, Artificial
  Synthetic oligonucleotide
ggaaacagaatttaccaatgcagtgccatttaaacaaagtgatggaatacgaagctgt

SEQ ID NO: 417715 - DNA, 58 bp, Artificial
  Synthetic oligonucleotide
ggaaacagcgagtatatcagtagcaaacccatcacaaagtaaatggcgttttgttgac

SEQ ID NO: 417716 - DNA, 55 bp, Artificial
  Synthetic oligonucleotide
ggaaacagctaccaggcatatcacctgatagaaataggtctctccggcaagaggg

SEQ ID NO: 417717 - DNA, 53 bp, Artificial
  Synthetic oligonucleotide
ggaaacaggtgtgagaccgggtcctgggaaacaggctgggatggtcccgtaag

SEQ ID NO: 417718 - DNA, 59 bp, Artificial
  Synthetic oligonucleotide
ggaaacagtcgacatggaagtccgccgattaattgaagcatttgtgaagaatgaaccga

SEQ ID NO: 417719 - DNA, 57 bp, Artificial
  Synthetic oligonucleotide
ggaaacatggccaattggagagtcacccaaaggagtggaggaaggctctatcgggaa

SEQ ID NO: 417720 - DNA, 56 bp, Artificial
  Synthetic oligonucleotide
ggaaacatggccaattggagagtcccccaaaggagtggaagagggctccattggaa

SEQ ID NO: 417721 - DNA, 55 bp, Artificial
  Synthetic oligonucleotide
ggaaacatgttcgtttcgcataatttcggtgtgacggataccctgggagggtatc

SEQ ID NO: 417722 - DNA, 55 bp, Artificial
  Synthetic oligonucleotide
ggaaaccaattcaacggcggctgccttctggtggccatggtcccggagtggaaag

SEQ ID NO: 417723 - DNA, 56 bp, Artificial
  Synthetic oligonucleotide
ggaaaccacaaaatttgaattgccgaccacaaactgccatatgctaattagttccc

SEQ ID NO: 417724 - DNA, 59 bp, Artificial
  Synthetic oligonucleotide
ggaaaccacaagttgatggaaaatcggtgacgatgaatttggcatccgcctactgtggc

SEQ ID NO: 417725 - DNA, 57 bp, Artificial
  Synthetic oligonucleotide
ggaaaccacggaaattccatggattgaatcggtatcgtaatatctgttccgccggca

SEQ ID NO: 417726 - DNA, 55 bp, Artificial
  Synthetic oligonucleotide
ggaaaccactatgttccgaattacgattcccaacgaagaatcatctaataatagg

SEQ ID NO: 417727 - DNA, 53 bp, Artificial
  Synthetic oligonucleotide
ggaaaccaggctttcctccaggagttcgttcttccgccagtccaactacccca

SEQ ID NO: 417728 - DNA, 55 bp, Artificial
  Synthetic oligonucleotide
ggaaaccataaatgcacgcctgaccatctccaatccagaggcaaacctcgcggag

SEQ ID NO: 417729 - DNA, 59 bp, Artificial
  Synthetic oligonucleotide
ggaaaccatagtgaatgtctactatcagaagaatggggacggtggtccactccattcaa

SEQ ID NO: 417730 - DNA, 59 bp, Artificial
  Synthetic oligonucleotide
ggaaaccatgcgcttgctatttagtggatacgcaagtatacctttgaacgtcatacctg

SEQ ID NO: 417731 - DNA, 55 bp, Artificial
  Synthetic oligonucleotide
ggaaacccagaatgcgaattactgatttccagggaatcatggtcctacattgtag

SEQ ID NO: 417732 - DNA, 56 bp, Artificial
  Synthetic oligonucleotide
ggaaacccagattttaccgggtcagaaggagcagtgacgttcctcgtggctgtgaa

SEQ ID NO: 417733 - DNA, 54 bp, Artificial
  Synthetic oligonucleotide
ggaaacccgctttattcactggggacgacaactctggggagagaagggtggatc

SEQ ID NO: 417734 - DNA, 60 bp, Artificial
  Synthetic oligonucleotide
ggaaacccggcatgtaccagcaactttgggatcagagagtggtcatacctgattgaggat

SEQ ID NO: 417735 - DNA, 55 bp, Artificial
  Synthetic oligonucleotide
ggaaaccctataaagaattgagattggaagttgggaaacaaagactcaagtatgc

SEQ ID NO: 417736 - DNA, 56 bp, Artificial
  Synthetic oligonucleotide
ggaaaccctgcttgcagtacctatagtatattactaaatagtacgttcgtgaggcc

SEQ ID NO: 417737 - DNA, 56 bp, Artificial
  Synthetic oligonucleotide
ggaaaccgtacgttgtgacaagagcggacgaacagcgtcttctggccaggttcgac

SEQ ID NO: 417738 - DNA, 54 bp, Artificial
  Synthetic oligonucleotide
ggaaaccgtggaacccacaaccatggactgcaaatcaacaagttgagacaaccg

SEQ ID NO: 417739 - DNA, 55 bp, Artificial
  Synthetic oligonucleotide
ggaaacctaatcgccccttggtatgcatacaaattcgtcagcaccagtagaaaag

SEQ ID NO: 417740 - DNA, 57 bp, Artificial
  Synthetic oligonucleotide
ggaaacctaatcgctcctcgaggctacttcaaaatgcgtattgggaaaagctcaata

SEQ ID NO: 417741 - DNA, 56 bp, Artificial
  Synthetic oligonucleotide
ggaaacctaccatctcgacgttcctcggttgagacccgaagagatagatatcggtc

SEQ ID NO: 417742 - DNA, 51 bp, Artificial
  Synthetic oligonucleotide
ggaaacctcaaagtcctccgcaatccctacgacatcttgaaatctatcaag

SEQ ID NO: 417743 - DNA, 60 bp, Artificial
  Synthetic oligonucleotide
ggaaacctctctctctggccacgatcgcatcagttgtgtctgatgcaaaccccagtgcca

SEQ ID NO: 417744 - DNA, 59 bp, Artificial
  Synthetic oligonucleotide
ggaaacgaaactaggtgacgtttattcaatgatgcgctcatggtacgattggagtgttc

SEQ ID NO: 417745 - DNA, 59 bp, Artificial
  Synthetic oligonucleotide
ggaaacgaggaggatgagcgaaacctgagagctttcacggaggctatgaccaggtattc

SEQ ID NO: 417746 - DNA, 55 bp, Artificial
  Synthetic oligonucleotide
ggaaacgaggtgtgttgtaggcgtagcgagggaaacgaggtgtgacgcgtgcagg

SEQ ID NO: 417747 - DNA, 53 bp, Artificial
  Synthetic oligonucleotide
ggaaacgattggtcaggttggccggaaatcatacccctgtacctcgggagaaa

SEQ ID NO: 417748 - DNA, 55 bp, Artificial
  Synthetic oligonucleotide
ggaaacgcagatcagaacgggttatgcaatcccgggaagctatgccgaagcgttg

SEQ ID NO: 417749 - DNA, 58 bp, Artificial
  Synthetic oligonucleotide
ggaaacgcttatcgcggactttggcccggcgatgtttccagctctcgactttatgcga

SEQ ID NO: 417750 - DNA, 50 bp, Artificial
  Synthetic oligonucleotide
ggaaacgtagctacgggagcattgcaagaaggttcgacagtaattgatgt

SEQ ID NO: 417751 - DNA, 59 bp, Artificial
  Synthetic oligonucleotide
ggaaacgtatcagcccggtcgttggtttatgcgagctgcgcaggctgtaaccgctgtgg

SEQ ID NO: 417752 - DNA, 53 bp, Artificial
  Synthetic oligonucleotide
ggaaacgtgtgggtcacctgggcaaataagacgggccgaacagatttttgcct

SEQ ID NO: 417753 - DNA, 55 bp, Artificial
  Synthetic oligonucleotide
ggaaactaaaagatggtctagagtgacttgtgtcactaatgatcaattgccatcc

SEQ ID NO: 417754 - DNA, 49 bp, Artificial
  Synthetic oligonucleotide
ggaaactaccatgcggtccccggtctttacggacaattcgtcccccccg

SEQ ID NO: 417755 - DNA, 51 bp, Artificial
  Synthetic oligonucleotide
ggaaactccccgttaacaggccaattgattggaaagtctgtcaacgaataa

SEQ ID NO: 417756 - DNA, 56 bp, Artificial
  Synthetic oligonucleotide
ggaaactctgcagactcaggtaaccctagatacaaatgtgtttggggatgggaaaa

SEQ ID NO: 417757 - DNA, 50 bp, Artificial
  Synthetic oligonucleotide
ggaaactgaagggttataggagtggcgtctgtagtgagcgtatattcagt

SEQ ID NO: 417758 - DNA, 53 bp, Artificial
  Synthetic oligonucleotide
ggaaactgacatacttggagcataagctaatgccaatattagaccaaaacttc

SEQ ID NO: 417759 - DNA, 56 bp, Artificial
  Synthetic oligonucleotide
ggaaactgagcccatctgtatatcaatttaccatgcaaaagattttagaggattgg

SEQ ID NO: 417760 - DNA, 53 bp, Artificial
  Synthetic oligonucleotide
ggaaactgcaacccggggacgatcctctcctgggaaccaagtcgttactagaa

SEQ ID NO: 417761 - DNA, 59 bp, Artificial
  Synthetic oligonucleotide
ggaaactgcaagatgtacccattcataaaaggaacagctaagttgaagacagtgcgtaa

SEQ ID NO: 417762 - DNA, 51 bp, Artificial
  Synthetic oligonucleotide
ggaaactggtatatcgtgacatttgcgagaaggtacacacgtaagcttggc

SEQ ID NO: 417763 - DNA, 55 bp, Artificial
  Synthetic oligonucleotide
ggaaactgtgtttactcctgtcactagctccacaccaccagggtcaccaggagga

SEQ ID NO: 417764 - DNA, 52 bp, Artificial
  Synthetic oligonucleotide
ggaaactgttcggttgacggggggacccattgtatattattaaccggctctg

SEQ ID NO: 417765 - DNA, 56 bp, Artificial
  Synthetic oligonucleotide
ggaaacttgtgggtcacagtatattatggggtacctgcgtggagagaagcaaaagc

SEQ ID NO: 417766 - DNA, 55 bp, Artificial
  Synthetic oligonucleotide
ggaaacttgttgacccggcccacacaactgagatcggccccagctactcgtccct

SEQ ID NO: 417767 - DNA, 50 bp, Artificial
  Synthetic oligonucleotide
ggaaactttacggggctttattcttttacggtacctcgctttaatcctga

SEQ ID NO: 417768 - DNA, 55 bp, Artificial
  Synthetic oligonucleotide
ggaaactttatcattggatagcaaaccaagtgccataaacaaggacttactggtg

SEQ ID NO: 417769 - DNA, 60 bp, Artificial
  Synthetic oligonucleotide
ggaaactttgtgtagttatgtcactccttttgctatcaatgccgatcttagacatgcttc

SEQ ID NO: 417770 - DNA, 55 bp, Artificial
  Synthetic oligonucleotide
ggaaagaaagttgtggtgcttacaagcaagaccttccatgataactatccgaagc

SEQ ID NO: 417771 - DNA, 55 bp, Artificial
  Synthetic oligonucleotide
ggaaagaactaccgaacctgccatcctctcccagcgagacaaacgacttaaggac

SEQ ID NO: 417772 - DNA, 52 bp, Artificial
  Synthetic oligonucleotide
ggaaagaagccccgcaacttccccgtggcccaaatcccgcaggggctaacac

SEQ ID NO: 417773 - DNA, 55 bp, Artificial
  Synthetic oligonucleotide
ggaaagaagtccgcatactttgatggagcaactagcgatgaaataaacgaactct

SEQ ID NO: 417774 - DNA, 60 bp, Artificial
  Synthetic oligonucleotide
ggaaagaatgggtcctcatagtgtcaaaaactatgatataatcaatcggcttgtgacttc

SEQ ID NO: 417775 - DNA, 55 bp, Artificial
  Synthetic oligonucleotide
ggaaagacaacaccttagcagatttgttgtccaggttaaatgcagcacttaaggc

SEQ ID NO: 417776 - DNA, 57 bp, Artificial
  Synthetic oligonucleotide
ggaaagacaatggcatttgggtcagggggtctccatagaatggaggctgaaaaggta

SEQ ID NO: 417777 - DNA, 55 bp, Artificial
  Synthetic oligonucleotide
ggaaagacactggatatatgtaggctgtataattatgagggaattgtaatatttg

SEQ ID NO: 417778 - DNA, 58 bp, Artificial
  Synthetic oligonucleotide
ggaaagacatacaacaatgggaaccttcaagaggatggaacgattggacacaagtgcc

SEQ ID NO: 417779 - DNA, 57 bp, Artificial
  Synthetic oligonucleotide
ggaaagacctactggtgtgtgacaccatgggccggacgagggtcgtttgccagacaa

SEQ ID NO: 417780 - DNA, 52 bp, Artificial
  Synthetic oligonucleotide
ggaaagagaaattgggcttcggttatgcaattgggcccttaaagtatagggt

SEQ ID NO: 417781 - DNA, 53 bp, Artificial
  Synthetic oligonucleotide
ggaaagagagtttcaacgttagtggtaacccacgggcggagagctcttacgga

SEQ ID NO: 417782 - DNA, 55 bp, Artificial
  Synthetic oligonucleotide
ggaaagagcctgttacgctcaacaaaagggaagacgctagatagctctgaggcgt

SEQ ID NO: 417783 - DNA, 53 bp, Artificial
  Synthetic oligonucleotide
ggaaagaggaaggcggaagaaaaggagggagccctccgaatctcgaggaggcc

SEQ ID NO: 417784 - DNA, 55 bp, Artificial
  Synthetic oligonucleotide
ggaaagaggctcgtcgaggtgatcccacactcgctcttcgagctcgatccaccgg

SEQ ID NO: 417785 - DNA, 56 bp, Artificial
  Synthetic oligonucleotide
ggaaagatacctaacggatcaacagctcctagggctttggggctgctctggaaaaa

SEQ ID NO: 417786 - DNA, 60 bp, Artificial
  Synthetic oligonucleotide
ggaaagatatcctctctggagcttaagaatgtccgcttgaataacagatactttcttgaa

SEQ ID NO: 417787 - DNA, 60 bp, Artificial
  Synthetic oligonucleotide
ggaaagatgtcagcccagcggatacacgagaaccaatttgggcctgaatttgcgatgggc

SEQ ID NO: 417788 - DNA, 50 bp, Artificial
  Synthetic oligonucleotide
ggaaagattctttaccaccagcctcgcaaaaccgcctatcagaagtcacc

SEQ ID NO: 417789 - DNA, 59 bp, Artificial
  Synthetic oligonucleotide
ggaaagattgtagcccaagctggaaatccagttatggattatgaagtaaacattgcaaa

SEQ ID NO: 417790 - DNA, 55 bp, Artificial
  Synthetic oligonucleotide
ggaaagcaaagatcggtactacttttgaagacaatctgctggaattattcgtgca

SEQ ID NO: 417791 - DNA, 57 bp, Artificial
  Synthetic oligonucleotide
ggaaagcaagcctagaacggtcagaataacaggagctcctgtaaagaagaggtcagg

SEQ ID NO: 417792 - DNA, 60 bp, Artificial
  Synthetic oligonucleotide
ggaaagcacgagcgagacttatcaggttgggacgcagagatggatacagctgcgtaaagg

SEQ ID NO: 417793 - DNA, 59 bp, Artificial
  Synthetic oligonucleotide
ggaaagcagaacagtccggccccaatatgctcgaacgcttctctggacctcaaccggca

SEQ ID NO: 417794 - DNA, 55 bp, Artificial
  Synthetic oligonucleotide
ggaaagcatggttgcacgtttgtgtcactggggatgatagaaatgcaactgctag

SEQ ID NO: 417795 - DNA, 53 bp, Artificial
  Synthetic oligonucleotide
ggaaagcccatgactcccccgggttttgatttctattgggcctcctgtaccca

SEQ ID NO: 417796 - DNA, 55 bp, Artificial
  Synthetic oligonucleotide
ggaaagccgggatcacacggatggtaatcgctaggccaaaccaacttcaacgttg

SEQ ID NO: 417797 - DNA, 54 bp, Artificial
  Synthetic oligonucleotide
ggaaagcctgacctaaccggtcataggtaatttcttcggaaacgcctgatcaag

SEQ ID NO: 417798 - DNA, 56 bp, Artificial
  Synthetic oligonucleotide
ggaaagcgacccccagaatcacctaatctgcattgacgtgtttccttccgcttttc

SEQ ID NO: 417799 - DNA, 55 bp, Artificial
  Synthetic oligonucleotide
ggaaagcgagaagctcctcctaagatagacggtcgtataactaacatagagacaa

SEQ ID NO: 417800 - DNA, 55 bp, Artificial
  Synthetic oligonucleotide
ggaaagcgcctgagatggatgtcggccaagaagttaaagaacctgcaggagacag

SEQ ID NO: 417801 - DNA, 55 bp, Artificial
  Synthetic oligonucleotide
ggaaagcgtagagaataaccaaaccgtcaacacggaagtaaacgtctcaagatgc

SEQ ID NO: 417802 - DNA, 57 bp, Artificial
  Synthetic oligonucleotide
ggaaagcgtcgttacaacggctggatggtgcacggtgatccgggtttgtgggcagtc

SEQ ID NO: 417803 - DNA, 56 bp, Artificial
  Synthetic oligonucleotide
ggaaagcgtggaacattctggttgactccgttaagtcctatgcgagccgtaagaag

SEQ ID NO: 417804 - DNA, 55 bp, Artificial
  Synthetic oligonucleotide
ggaaagctatattaggacatagagttagtcccatttgtgactatcaagcaggaca

SEQ ID NO: 417805 - DNA, 60 bp, Artificial
  Synthetic oligonucleotide
ggaaagctcatggcccaaccacaccgtaaccaaaggagtgacggcatcatgctcccataa

SEQ ID NO: 417806 - DNA, 56 bp, Artificial
  Synthetic oligonucleotide
ggaaagctgttagtcgcttacgcccctccgggagcacaaccaccgaccagtcgcaa

SEQ ID NO: 417807 - DNA, 55 bp, Artificial
  Synthetic oligonucleotide
ggaaagcttctcccaagaagaactgggacgctctcaagaaggaggagatttcccg

SEQ ID NO: 417808 - DNA, 60 bp, Artificial
  Synthetic oligonucleotide
ggaaagcttggcagcaactatggaatcatggtctacaaaatccctgaatgaggttggccg

SEQ ID NO: 417809 - DNA, 60 bp, Artificial
  Synthetic oligonucleotide
ggaaagcttggtactctccacaactgagtctgctatcagtcgtttcaggccaacagacac

SEQ ID NO: 417810 - DNA, 55 bp, Artificial
  Synthetic oligonucleotide
ggaaaggaactacaatggtttgcccaggttgaatggtgtcctactgctggttacc

SEQ ID NO: 417811 - DNA, 60 bp, Artificial
  Synthetic oligonucleotide
ggaaaggaagcagtggataatttccaccttggagatgacatggatcctgagttgagaaca

SEQ ID NO: 417812 - DNA, 53 bp, Artificial
  Synthetic oligonucleotide
ggaaaggaaggacacggacgcgaaccgtgagtggaaccctcgatcctttattg

SEQ ID NO: 417813 - DNA, 60 bp, Artificial
  Synthetic oligonucleotide
ggaaaggaaggtgcaggcattgcaaagcaatagaatgattgggaaacaagctactcttcg

SEQ ID NO: 417814 - DNA, 60 bp, Artificial
  Synthetic oligonucleotide
ggaaaggaatggatgcatgtttgcatgactgggaacgacaatgatgcaagtgcccaaata

SEQ ID NO: 417815 - DNA, 58 bp, Artificial
  Synthetic oligonucleotide
ggaaaggaccattttgttatgcgtgttgtagaagttgtatgagattaacagctgcctt

SEQ ID NO: 417816 - DNA, 55 bp, Artificial
  Synthetic oligonucleotide
ggaaaggaccctgttctaatgtatcagtagttcactgtactcatggaatttatcc

SEQ ID NO: 417817 - DNA, 57 bp, Artificial
  Synthetic oligonucleotide
ggaaaggacgctattaagcgagtgtcagaaaaaccgacagatcctgactactttaca

SEQ ID NO: 417818 - DNA, 55 bp, Artificial
  Synthetic oligonucleotide
ggaaaggagtacgggttaatcatgactcctgctgataagagtagttgtttcaatg

SEQ ID NO: 417819 - DNA, 55 bp, Artificial
  Synthetic oligonucleotide
ggaaaggatcttcaccgtcggggcacggaaaggtatgtctacagagtgtttcgcc

SEQ ID NO: 417820 - DNA, 55 bp, Artificial
  Synthetic oligonucleotide
ggaaaggattgtgtagacattgtagggcgatagaatgattgggaaagaagctact

SEQ ID NO: 417821 - DNA, 55 bp, Artificial
  Synthetic oligonucleotide
ggaaaggccaccgcgagaagctagggacactatgtggattcctccagtctggacc

SEQ ID NO: 417822 - DNA, 59 bp, Artificial
  Synthetic oligonucleotide
ggaaaggcggtacatcaggtctttggaggagccttcagaactctcttcggtggcatgtc

SEQ ID NO: 417823 - DNA, 58 bp, Artificial
  Synthetic oligonucleotide
ggaaaggctatcgttcaaaatgcctctgccgacagtggtcccaaagatggatccccac

SEQ ID NO: 417824 - DNA, 57 bp, Artificial
  Synthetic oligonucleotide
ggaaagggcaaccacaagcagtgaagctgatatcggaaggagaacccaaaagaaaca

SEQ ID NO: 417825 - DNA, 55 bp, Artificial
  Synthetic oligonucleotide
ggaaagggcatataagtattatcgcttagttcagaaagctctctttgtgcatttc

SEQ ID NO: 417826 - DNA, 50 bp, Artificial
  Synthetic oligonucleotide
ggaaagggcgacgggtacaacgcgttttgaggccgggcaccgcggtagtt

SEQ ID NO: 417827 - DNA, 52 bp, Artificial
  Synthetic oligonucleotide
ggaaagggctttaatataaaatgggtggcaagtggtcaaagagtagtaaaat

SEQ ID NO: 417828 - DNA, 53 bp, Artificial
  Synthetic oligonucleotide
ggaaaggggtttcttcggagctattgctggtttcctagaaggaggatgggaag

SEQ ID NO: 417829 - DNA, 60 bp, Artificial
  Synthetic oligonucleotide
ggaaagggtgtttcgagctataccataaatgtgatgaccagtgcatggaaacaattcgaa

SEQ ID NO: 417830 - DNA, 50 bp, Artificial
  Synthetic oligonucleotide
ggaaaggtaattcaacaattccgaaagtcaccttaccacatgagggcggc

SEQ ID NO: 417831 - DNA, 55 bp, Artificial
  Synthetic oligonucleotide
ggaaaggtacggcattgtgaatgccggctctctggccagaactgaaaactggtac

SEQ ID NO: 417832 - DNA, 59 bp, Artificial
  Synthetic oligonucleotide
ggaaaggtcgacgcaacattgcgctaaatttgtacactataacaacactagcagtacac

SEQ ID NO: 417833 - DNA, 55 bp, Artificial
  Synthetic oligonucleotide
ggaaaggtgcaacctatggtagattacgcgccttatatcagcaggtttctacagc

SEQ ID NO: 417834 - DNA, 52 bp, Artificial
  Synthetic oligonucleotide
ggaaaggttaaacgaaggacaaagacgatacgcttgggaacaatataatttg

SEQ ID NO: 417835 - DNA, 55 bp, Artificial
  Synthetic oligonucleotide
ggaaaggttcgcctattgatattcgtttcatgcaagctaacggaatcgacaaacc

SEQ ID NO: 417836 - DNA, 55 bp, Artificial
  Synthetic oligonucleotide
ggaaagtataagaaacggaacgtataactacccgcattattcagaagaagcaaga

SEQ ID NO: 417837 - DNA, 52 bp, Artificial
  Synthetic oligonucleotide
ggaaagtcccaccgcagtttcaggttccccaaacgaccgagagataccccaa

SEQ ID NO: 417838 - DNA, 58 bp, Artificial
  Synthetic oligonucleotide
ggaaagtccgagatttctattagcacatgcttatcatacattacgtgatgtgcgttac

SEQ ID NO: 417839 - DNA, 55 bp, Artificial
  Synthetic oligonucleotide
ggaaagtcgtaatcaacaatctggtcaaggtaactcttcgcaaaacgataacagt

SEQ ID NO: 417840 - DNA, 56 bp, Artificial
  Synthetic oligonucleotide
ggaaagtcttcaaaattgtgtccttgaggtataccaggaaagtgtgtattcaatta

SEQ ID NO: 417841 - DNA, 55 bp, Artificial
  Synthetic oligonucleotide
ggaaagtgaacaaccacgtggtgtacaatcaccaggaagccgcgaagtacgagaa

SEQ ID NO: 417842 - DNA, 56 bp, Artificial
  Synthetic oligonucleotide
ggaaagtgactatgttgacctataaatactcattcggttacaggataaacgattgt

SEQ ID NO: 417843 - DNA, 55 bp, Artificial
  Synthetic oligonucleotide
ggaaagtgagcagatgatatgcgccgtgtcgttaaatgagatgttattgggtgtt

SEQ ID NO: 417844 - DNA, 59 bp, Artificial
  Synthetic oligonucleotide
ggaaagtgcttcctctttagtaagagagcactgtggatatgtgaggaaatagttcctcg

SEQ ID NO: 417845 - DNA, 58 bp, Artificial
  Synthetic oligonucleotide
ggaaagtgcttcttctttagtcagggagcacttgggataagtgatgaaataattcttg

SEQ ID NO: 417846 - DNA, 54 bp, Artificial
  Synthetic oligonucleotide
ggaaagtggggataggaaggtagaaaagagcgagcctcccgatccgggattgcc

SEQ ID NO: 417847 - DNA, 59 bp, Artificial
  Synthetic oligonucleotide
ggaaagtgtgggtcgactccccgtgacaatcggcacagggaccactctgcagtgccggc

SEQ ID NO: 417848 - DNA, 54 bp, Artificial
  Synthetic oligonucleotide
ggaaagttatcctgggttgtataagggcaggaggttccaaatttatgcgggcgc

SEQ ID NO: 417849 - DNA, 60 bp, Artificial
  Synthetic oligonucleotide
ggaaagttatcgcacatttgtgaagccgcagtgctttccgcaggttgtggttgaacacta

SEQ ID NO: 417850 - DNA, 56 bp, Artificial
  Synthetic oligonucleotide
ggaaagttcacgagcgaacaaccactagaaattagcacggctgtaggacaagaacc

SEQ ID NO: 417851 - DNA, 60 bp, Artificial
  Synthetic oligonucleotide
ggaaagttgatgactgatggtatctgcttcaggcctacattgtcgaaatcagttgaagat

SEQ ID NO: 417852 - DNA, 58 bp, Artificial
  Synthetic oligonucleotide
ggaaagttgtgcagattaagcgggatccctccattggaattaggggattgcagcattg

SEQ ID NO: 417853 - DNA, 56 bp, Artificial
  Synthetic oligonucleotide
ggaaagtttagctcagctattagaaatagaaattggatgactgattctaaaacggt

SEQ ID NO: 417854 - DNA, 55 bp, Artificial
  Synthetic oligonucleotide
ggaaagtttgacatttactcgttgatggttggaaatagtactcagtgggatgatt

SEQ ID NO: 417855 - DNA, 60 bp, Artificial
  Synthetic oligonucleotide
ggaaataacattccacggggccaaggaagtagcgctcagttactctgctggtgcacttgc

SEQ ID NO: 417856 - DNA, 51 bp, Artificial
  Synthetic oligonucleotide
ggaaataagtgtgtgacagctaaactcctgcatccagcttgcaaccatggt

SEQ ID NO: 417857 - DNA, 55 bp, Artificial
  Synthetic oligonucleotide
ggaaataataatactacaactgaaaccttcagacctggaggaggagatatgaggg

SEQ ID NO: 417858 - DNA, 55 bp, Artificial
  Synthetic oligonucleotide
ggaaataatgagtgcgactcagagagtcgatgacgctaccgtaaatattcgggcg

SEQ ID NO: 417859 - DNA, 57 bp, Artificial
  Synthetic oligonucleotide
ggaaataatgggcatactatgccctaaaggatagttaagcgaaattaatggagctgg

SEQ ID NO: 417860 - DNA, 55 bp, Artificial
  Synthetic oligonucleotide
ggaaatacatgtacaacatatgccagtcgtcattgtgtctgtctaatgcgtgacc

SEQ ID NO: 417861 - DNA, 55 bp, Artificial
  Synthetic oligonucleotide
ggaaataccacagtaattccaagtccacaaacactgtttcactattataacgtaa

SEQ ID NO: 417862 - DNA, 56 bp, Artificial
  Synthetic oligonucleotide
ggaaatacgacatccagagctcgacccttcccgctggtctgtatgcactcaacggg

SEQ ID NO: 417863 - DNA, 56 bp, Artificial
  Synthetic oligonucleotide
ggaaatacgacgctttacaacactcgtatgctggaggcgattctgcacatcgtgga

SEQ ID NO: 417864 - DNA, 57 bp, Artificial
  Synthetic oligonucleotide
ggaaatacgctgtatttttgcgtcaactcgcaattaatttttgatgtactagatggt

SEQ ID NO: 417865 - DNA, 57 bp, Artificial
  Synthetic oligonucleotide
ggaaatacggccacaaccagttgagtgtccagagaactgggtatgtcaaaataccga

SEQ ID NO: 417866 - DNA, 55 bp, Artificial
  Synthetic oligonucleotide
ggaaatactccctcgccgtcaggtactgttgttgctgatatccctattagtcctg

SEQ ID NO: 417867 - DNA, 60 bp, Artificial
  Synthetic oligonucleotide
ggaaatagataagctacttcttgagcctacctgagatgtatgattactttgaccaagaat

SEQ ID NO: 417868 - DNA, 54 bp, Artificial
  Synthetic oligonucleotide
ggaaatagatccaaagtgcccagagatataccagagctagagactaacacatcc

SEQ ID NO: 417869 - DNA, 55 bp, Artificial
  Synthetic oligonucleotide
ggaaatagcgttcaaggattcatgccaatcttcacatagttttgctgccgcacac

SEQ ID NO: 417870 - DNA, 55 bp, Artificial
  Synthetic oligonucleotide
ggaaatagcttctggacaagccattataccccatactgtctgagctctagaaggt

SEQ ID NO: 417871 - DNA, 54 bp, Artificial
  Synthetic oligonucleotide
ggaaatagtggagaagcgacccctgcgggagaggcaccggacccctccccaatg

SEQ ID NO: 417872 - DNA, 55 bp, Artificial
  Synthetic oligonucleotide
ggaaatataatccagacacagttctatggggacctctacaactcactaagggaac

SEQ ID NO: 417873 - DNA, 55 bp, Artificial
  Synthetic oligonucleotide
ggaaatatataccagaacatgaagatgattacccagactgcaatctggctttatc

SEQ ID NO: 417874 - DNA, 55 bp, Artificial
  Synthetic oligonucleotide
ggaaatattcataccaggtgaagttaagaatctctcagaaatctgccaagtagac

SEQ ID NO: 417875 - DNA, 60 bp, Artificial
  Synthetic oligonucleotide
ggaaatattcatttccagggttatattgaaatgaagaagcgtacatctcttgctggtatg

SEQ ID NO: 417876 - DNA, 53 bp, Artificial
  Synthetic oligonucleotide
ggaaatcaacagatatgtggatcgagaggacggcggacatctcctgggaaagt

SEQ ID NO: 417877 - DNA, 55 bp, Artificial
  Synthetic oligonucleotide
ggaaatccacttagaatctgattggtgggtcttgacctctacacgtagtccacag

SEQ ID NO: 417878 - DNA, 50 bp, Artificial
  Synthetic oligonucleotide
ggaaatccccagtgtgacatcttgcttggggaccagagttggtcttacat

SEQ ID NO: 417879 - DNA, 55 bp, Artificial
  Synthetic oligonucleotide
ggaaatcgaagaaagacgcatcagaataactagcaataatccgacgctaaacatc

SEQ ID NO: 417880 - DNA, 53 bp, Artificial
  Synthetic oligonucleotide
ggaaatctaagaaagtccccatggggttttcctatgacacccgttgctttgac

SEQ ID NO: 417881 - DNA, 55 bp, Artificial
  Synthetic oligonucleotide
ggaaatctaattgcccctcgaggttattttaagatgcgcactgggaaaagctcga

SEQ ID NO: 417882 - DNA, 58 bp, Artificial
  Synthetic oligonucleotide
ggaaatctagatatgaacaattggaaaagcgatttgaatcactgaaacaaagggtgaa

SEQ ID NO: 417883 - DNA, 55 bp, Artificial
  Synthetic oligonucleotide
ggaaatctcttccacaggggtggatcttgagtcccttaatataccagagcacttt

SEQ ID NO: 417884 - DNA, 55 bp, Artificial
  Synthetic oligonucleotide
ggaaatctgtccaagagaacaggtattagcttggaagtcgttggaaagacttcaa

SEQ ID NO: 417885 - DNA, 55 bp, Artificial
  Synthetic oligonucleotide
ggaaatcttgtgctatattggggtctggagctaaaggggagtgctattagtttgc

SEQ ID NO: 417886 - DNA, 60 bp, Artificial
  Synthetic oligonucleotide
ggaaatcttgtgttggaccttgattgggacttgagaagagtggctctgtgagggagacga

SEQ ID NO: 417887 - DNA, 60 bp, Artificial
  Synthetic oligonucleotide
ggaaatctttatagctggccccctctccaggattgcagagcacgattgatgggataccgc

SEQ ID NO: 417888 - DNA, 55 bp, Artificial
  Synthetic oligonucleotide
ggaaatgaactgttgtacaaggcacctagaaaggccttagcaactgtctgtagtg

SEQ ID NO: 417889 - DNA, 60 bp, Artificial
  Synthetic oligonucleotide
ggaaatgaatcagtctgcagctgcaactaaaatgttcctggctgtttgcctctgtaccgc

SEQ ID NO: 417890 - DNA, 60 bp, Artificial
  Synthetic oligonucleotide
ggaaatgacaacagcacagcaacgctgtgcctgggacatcatgcggtgccaaacggaaca

SEQ ID NO: 417891 - DNA, 55 bp, Artificial
  Synthetic oligonucleotide
ggaaatgacaccgctgtcgctatactggcgtgtggtgtatactccccaatacctc

SEQ ID NO: 417892 - DNA, 55 bp, Artificial
  Synthetic oligonucleotide
ggaaatgactcattgttgagtgggacaaactcagtagtgccatcacctttggcac

SEQ ID NO: 417893 - DNA, 55 bp, Artificial
  Synthetic oligonucleotide
ggaaatgactttcagacaggagggattggaaatttgccaattagaaactggacct

SEQ ID NO: 417894 - DNA, 60 bp, Artificial
  Synthetic oligonucleotide
ggaaatgagacgctgccttcttcgatctctccaacagattgagagcatgattgaagctga

SEQ ID NO: 417895 - DNA, 55 bp, Artificial
  Synthetic oligonucleotide
ggaaatgagagtgatggggatgctgaggaattggcaaccatggtggatatggagc

SEQ ID NO: 417896 - DNA, 56 bp, Artificial
  Synthetic oligonucleotide
ggaaatgataaggttagttttactataaatataatgcctacatggaacagtggaag

SEQ ID NO: 417897 - DNA, 55 bp, Artificial
  Synthetic oligonucleotide
ggaaatgatctaccagaccttaattttcctagatatgttcctttgggtcaaccaa

SEQ ID NO: 417898 - DNA, 55 bp, Artificial
  Synthetic oligonucleotide
ggaaatgatgagatgctgacgaagctgctcaatgtttaacctcagtgacatgagg

SEQ ID NO: 417899 - DNA, 55 bp, Artificial
  Synthetic oligonucleotide
ggaaatgatgtcgtggctcattagaaatggcctctggctgtgttctgttatcttg

SEQ ID NO: 417900 - DNA, 55 bp, Artificial
  Synthetic oligonucleotide
ggaaatgcccaacacattgaagagtgctcatgctatggggcaaaagaattgatca

SEQ ID NO: 417901 - DNA, 60 bp, Artificial
  Synthetic oligonucleotide
ggaaatgcccaacatatcgaagaatgttcgtgctatggagcagtaagggtaatcaaatgt

SEQ ID NO: 417902 - DNA, 55 bp, Artificial
  Synthetic oligonucleotide
ggaaatgcccaattggaggggtttagtgccgagtctaggagacttctactgttga

SEQ ID NO: 417903 - DNA, 55 bp, Artificial
  Synthetic oligonucleotide
ggaaatgccccaaatacataccatcagggagtctaaaactggcaataggactcag

SEQ ID NO: 417904 - DNA, 55 bp, Artificial
  Synthetic oligonucleotide
ggaaatgcccctgttatctttgttcacgaatcacttgacttagataacttgaagg

SEQ ID NO: 417905 - DNA, 58 bp, Artificial
  Synthetic oligonucleotide
ggaaatgccttttacagcactttaggatatgaagctaataaattacaatcccaatgga

SEQ ID NO: 417906 - DNA, 58 bp, Artificial
  Synthetic oligonucleotide
ggaaatgcggatcgacgtcatcaatgacgttaaaccacgcgtcgttgctgtacacttt

SEQ ID NO: 417907 - DNA, 53 bp, Artificial
  Synthetic oligonucleotide
ggaaatgctgaaatcgaggacctcatctttctggccaggtctgcacttattct

SEQ ID NO: 417908 - DNA, 55 bp, Artificial
  Synthetic oligonucleotide
ggaaatggagtggttaccaaatcaggtgactacgtcagtgccataacgcaagccg

SEQ ID NO: 417909 - DNA, 59 bp, Artificial
  Synthetic oligonucleotide
ggaaatggccactaaagcggactataccctcgatgaagagagcagggcaagaatcaaaa

SEQ ID NO: 417910 - DNA, 55 bp, Artificial
  Synthetic oligonucleotide
ggaaatgggaattgtattgtgatatcgttaaatagaattctgccctgcctaggca

SEQ ID NO: 417911 - DNA, 55 bp, Artificial
  Synthetic oligonucleotide
ggaaatgggccaagcacccagtccatataatgctagagttgaatgcataggatgg

SEQ ID NO: 417912 - DNA, 55 bp, Artificial
  Synthetic oligonucleotide
ggaaatgggcgaagagagttctggattggattcgtggcaaagtcaagactgaccc

SEQ ID NO: 417913 - DNA, 55 bp, Artificial
  Synthetic oligonucleotide
ggaaatggggcacaatgctccttgggttgttaatgatctatagtgctgcaggaaa

SEQ ID NO: 417914 - DNA, 55 bp, Artificial
  Synthetic oligonucleotide
ggaaatgggtgctttgagttttggcataaatgtgacaatgaatgcatagagtctg

SEQ ID NO: 417915 - DNA, 55 bp, Artificial
  Synthetic oligonucleotide
ggaaatgtaatgggattgagatattacacggccagtaatgtctgtcagatcgcag

SEQ ID NO: 417916 - DNA, 60 bp, Artificial
  Synthetic oligonucleotide
ggaaatgtagaagggacagctgagtcaatctgtagttattggctcaagacaatgtcactg

SEQ ID NO: 417917 - DNA, 55 bp, Artificial
  Synthetic oligonucleotide
ggaaatgtcagcagatgagctcaccaacctggaggccaccctgcgaaaggctttc

SEQ ID NO: 417918 - DNA, 60 bp, Artificial
  Synthetic oligonucleotide
ggaaatgtccttgatgtgaatgcaatcgatattgatgagcccagtggacaaacagcagat

SEQ ID NO: 417919 - DNA, 60 bp, Artificial
  Synthetic oligonucleotide
ggaaatgtccttgatgtgaatgccattgatattgaagaaccaagtggccaaactgcagat

SEQ ID NO: 417920 - DNA, 57 bp, Artificial
  Synthetic oligonucleotide
ggaaatgtgctgacctggttggggatgtgaggtcgaagaatctattgtttttgcact

SEQ ID NO: 417921 - DNA, 54 bp, Artificial
  Synthetic oligonucleotide
ggaaatgtggggaagaaggacgtattcaggccaactgcccaaaccagaaggcgg

SEQ ID NO: 417922 - DNA, 55 bp, Artificial
  Synthetic oligonucleotide
ggaaatgttcctgggtagatcagcaatttgggctaatatcacactcaatcaaggg

SEQ ID NO: 417923 - DNA, 60 bp, Artificial
  Synthetic oligonucleotide
ggaaatgttcttgacttaaaccacctggatattgtagagccgacaggacagacagcagat

SEQ ID NO: 417924 - DNA, 59 bp, Artificial
  Synthetic oligonucleotide
ggaaattaacatatgtgggctataatggaaaggacacgcgaggccactataatttcaca

SEQ ID NO: 417925 - DNA, 59 bp, Artificial
  Synthetic oligonucleotide
ggaaattaagtttcatactcttaaacccatcatgcaatcatacaacccaatcttgagaa

SEQ ID NO: 417926 - DNA, 60 bp, Artificial
  Synthetic oligonucleotide
ggaaattaatggaccagaatcagtgttagtcaatacctaccaatggatcatcagaaactg

SEQ ID NO: 417927 - DNA, 60 bp, Artificial
  Synthetic oligonucleotide
ggaaattaatggccctgagtcagtgctagttaacacctatcaatggattatcagaaactg

SEQ ID NO: 417928 - DNA, 59 bp, Artificial
  Synthetic oligonucleotide
ggaaattaatgtctgaatgcgtctctttattgcttatgtgttccccatatgtcttttcg

SEQ ID NO: 417929 - DNA, 54 bp, Artificial
  Synthetic oligonucleotide
ggaaattacatcttggatctgatatacggcctacacaagcagatcaacagaggg

SEQ ID NO: 417930 - DNA, 55 bp, Artificial
  Synthetic oligonucleotide
ggaaattatgcataggacagaggcaatttgcgcagccatgattgaagcatggggt

SEQ ID NO: 417931 - DNA, 58 bp, Artificial
  Synthetic oligonucleotide
ggaaattcaggactgcgtcgtgacgatagacgtcggtaggcctatcggactagcctcc

SEQ ID NO: 417932 - DNA, 54 bp, Artificial
  Synthetic oligonucleotide
ggaaattcatacccaaagctcaacaaatcctatgttaacaataaggggaaggaa

SEQ ID NO: 417933 - DNA, 60 bp, Artificial
  Synthetic oligonucleotide
ggaaattcatgaaggtgaacaatcatgtgacttacaaccatcaagaagctgcgaagtatg

SEQ ID NO: 417934 - DNA, 52 bp, Artificial
  Synthetic oligonucleotide
ggaaattcatgatcaaaaattaataggatattgggatacaggagcacaaatc

SEQ ID NO: 417935 - DNA, 55 bp, Artificial
  Synthetic oligonucleotide
ggaaattccaaaccagtatgctaaaggtggcggggcccgaccgctgcaacccaga

SEQ ID NO: 417936 - DNA, 59 bp, Artificial
  Synthetic oligonucleotide
ggaaattccatcttgaacgagattttggttaagtatgcttactggcattgcttcgaaga

SEQ ID NO: 417937 - DNA, 58 bp, Artificial
  Synthetic oligonucleotide
ggaaattcgttaagagactcaagcctagacgggtatttggtggcaacgactgattgca

SEQ ID NO: 417938 - DNA, 54 bp, Artificial
  Synthetic oligonucleotide
ggaaattcttttttcaggaccagattcaaactcgcgggggtgacatttggagga

SEQ ID NO: 417939 - DNA, 53 bp, Artificial
  Synthetic oligonucleotide
ggaaattgaatatcctgacgtaaaacccctccaagaaggtgatgggactaaaa

SEQ ID NO: 417940 - DNA, 59 bp, Artificial
  Synthetic oligonucleotide
ggaaattgaatcagaccaatttcgaaatgtcagagacctcactactgagggtgttgaac

SEQ ID NO: 417941 - DNA, 52 bp, Artificial
  Synthetic oligonucleotide
ggaaattgaattgcaagtgtttcgcacaagcacgccccgcacacctgatgcc

SEQ ID NO: 417942 - DNA, 57 bp, Artificial
  Synthetic oligonucleotide
ggaaattgattccgtcaacaatgctgtggtaatgccagctcatggcccggccaaaag

SEQ ID NO: 417943 - DNA, 55 bp, Artificial
  Synthetic oligonucleotide
ggaaattgccagtggcatctactactgacaaagggtatgatgcatctttgatgta

SEQ ID NO: 417944 - DNA, 60 bp, Artificial
  Synthetic oligonucleotide
ggaaattggatactccgaagacgcagtgtctctcatagaagggatcaatcacacccacca

SEQ ID NO: 417945 - DNA, 57 bp, Artificial
  Synthetic oligonucleotide
ggaaattgtaatcttcgaactttgtataatacataacagggtgagttccagccctca

SEQ ID NO: 417946 - DNA, 60 bp, Artificial
  Synthetic oligonucleotide
ggaaattgtggatgacaaccaagatgcaaaaatgaattatgattgcttagcaaaactcta

SEQ ID NO: 417947 - DNA, 55 bp, Artificial
  Synthetic oligonucleotide
ggaaatttactgcaacggttacaggtggtcagtatgcttccaaggaacaggcatt

SEQ ID NO: 417948 - DNA, 58 bp, Artificial
  Synthetic oligonucleotide
ggaaatttatcagcagcctttttttatgcaggctacgggagcggcaatcagagcgttt

SEQ ID NO: 417949 - DNA, 60 bp, Artificial
  Synthetic oligonucleotide
ggaaatttcaaacagctgcacaaagagcaatggtggatcaagtgagagaaagtcggaacc

SEQ ID NO: 417950 - DNA, 56 bp, Artificial
  Synthetic oligonucleotide
ggaaatttcagacagctgcacagaaggcaatgatggatcaagtgagggaaagtcgg

SEQ ID NO: 417951 - DNA, 55 bp, Artificial
  Synthetic oligonucleotide
ggaaatttctgaaactcagcagggttccgaatatgttcttcataacaaccgttac

SEQ ID NO: 417952 - DNA, 60 bp, Artificial
  Synthetic oligonucleotide
ggaaatttgacagcagactagcatttgagcacaaggcccgagagctacatccggagtact

SEQ ID NO: 417953 - DNA, 60 bp, Artificial
  Synthetic oligonucleotide
ggaaatttttgtatcagataggcctgctaaatggcaaacgtcctcgcactgtttatgcag

SEQ ID NO: 417954 - DNA, 54 bp, Artificial
  Synthetic oligonucleotide
ggaacaaagcagttccacccagagacaaagaacaaacaactcggaatcccaacc

SEQ ID NO: 417955 - DNA, 55 bp, Artificial
  Synthetic oligonucleotide
ggaacaacaattatgggacgacatgactagcttatacagacaatcttttaaaccc

SEQ ID NO: 417956 - DNA, 55 bp, Artificial
  Synthetic oligonucleotide
ggaacaacgattagagggagacactcaaatggaacaatacacgacaggtcccagt

SEQ ID NO: 417957 - DNA, 60 bp, Artificial
  Synthetic oligonucleotide
ggaacaactcaggcccctgttaccagaggatgtcactgagcccctgaccctagatcaggc

SEQ ID NO: 417958 - DNA, 53 bp, Artificial
  Synthetic oligonucleotide
ggaacaactgacgtccctggccctgcccatcattagcacaaggctcccaagcc

SEQ ID NO: 417959 - DNA, 55 bp, Artificial
  Synthetic oligonucleotide
ggaacaagaaggatcctactacaaggaaagggtaccgctagaagcaacagtacag

SEQ ID NO: 417960 - DNA, 58 bp, Artificial
  Synthetic oligonucleotide
ggaacaagcaggacctagctagattcctgggggtatactcagagaaaacaggcctgac

SEQ ID NO: 417961 - DNA, 55 bp, Artificial
  Synthetic oligonucleotide
ggaacaaggtgttacagattacatcaaaggtcttggagatgccttcggaactgga

SEQ ID NO: 417962 - DNA, 57 bp, Artificial
  Synthetic oligonucleotide
ggaacaagtaggaccaaagtatgagattcgacaatacgttcgagacttattactgga

SEQ ID NO: 417963 - DNA, 51 bp, Artificial
  Synthetic oligonucleotide
ggaacaagtgtttcatctgtaaatagacatcaaacagagcaagaattggag

SEQ ID NO: 417964 - DNA, 60 bp, Artificial
  Synthetic oligonucleotide
ggaacaatcataaaatacgagaaggtgccagacgacaagatacagcacttggaagagtgt

SEQ ID NO: 417965 - DNA, 60 bp, Artificial
  Synthetic oligonucleotide
ggaacaatcatatggtcgtcatgttaatgctctactcatgcttaaggttattcaaccttc

SEQ ID NO: 417966 - DNA, 55 bp, Artificial
  Synthetic oligonucleotide
ggaacaatgcgaattaccaaggaaacaattacccaacagaacaactgactgtgtt

SEQ ID NO: 417967 - DNA, 58 bp, Artificial
  Synthetic oligonucleotide
ggaacaattcgtggcttagggtgaatggtggaaattctgattctactgagcaatcccc

SEQ ID NO: 417968 - DNA, 52 bp, Artificial
  Synthetic oligonucleotide
ggaacacaaggatttggaagtacaggagcttttgtcctacagtcacggatga

SEQ ID NO: 417969 - DNA, 54 bp, Artificial
  Synthetic oligonucleotide
ggaacacactggaatgaaacgttagaacgggtaaaagcagagctaaactcttac

SEQ ID NO: 417970 - DNA, 60 bp, Artificial
  Synthetic oligonucleotide
ggaacaccaatcgttggcctgatgaagactgaaggcagcagttacatgtggtctggtgag

SEQ ID NO: 417971 - DNA, 55 bp, Artificial
  Synthetic oligonucleotide
ggaacaccatgtacacgaagctattcgtatcgatggtagtaactctaagttcgcg

SEQ ID NO: 417972 - DNA, 55 bp, Artificial
  Synthetic oligonucleotide
ggaacacccaaccaatctgcagatagatatagcactgactattctgttggcgctg

SEQ ID NO: 417973 - DNA, 56 bp, Artificial
  Synthetic oligonucleotide
ggaacacccccacattggcaagataggattaatggatcaaggggagtaaatgggac

SEQ ID NO: 417974 - DNA, 50 bp, Artificial
  Synthetic oligonucleotide
ggaacacctaaacaaactaagatgtaggcaatcctgagctaagctcttag

SEQ ID NO: 417975 - DNA, 52 bp, Artificial
  Synthetic oligonucleotide
ggaacacctgcccccgtgaaagctaagctgagacaaacagtcgggctgtgtt

SEQ ID NO: 417976 - DNA, 54 bp, Artificial
  Synthetic oligonucleotide
ggaacacctggaagaaggtacaccacatatacaaggatacttaagaaccaaaag

SEQ ID NO: 417977 - DNA, 51 bp, Artificial
  Synthetic oligonucleotide
ggaacacggctggttaatgtgcattgcagtagcaagatataaccacagcta

SEQ ID NO: 417978 - DNA, 50 bp, Artificial
  Synthetic oligonucleotide
ggaacacgtgaccgtccacattggtcactgtgcagcgcagtacgggagcg

SEQ ID NO: 417979 - DNA, 53 bp, Artificial
  Synthetic oligonucleotide
ggaacactactgccctaacaaataccaaacccgcaactaccttacccacgaca

SEQ ID NO: 417980 - DNA, 53 bp, Artificial
  Synthetic oligonucleotide
ggaacactagcgtgtttggtagtagttggatgggaatggtgtcaggtagatga

SEQ ID NO: 417981 - DNA, 58 bp, Artificial
  Synthetic oligonucleotide
ggaacactaggaaaaaggctcaagcagtacagagagttaaaacctcagacctgcacca

SEQ ID NO: 417982 - DNA, 55 bp, Artificial
  Synthetic oligonucleotide
ggaacactcctaaacagtgcatgcagctcaatttaacaagtgatgaaaagtatgc

SEQ ID NO: 417983 - DNA, 55 bp, Artificial
  Synthetic oligonucleotide
ggaacacttaaggagaaactaatgtccattgctcttctggccgttcattctggac

SEQ ID NO: 417984 - DNA, 55 bp, Artificial
  Synthetic oligonucleotide
ggaacagaaagtatgttgatttggatgactgagcagggcattataacaaaagaag

SEQ ID NO: 417985 - DNA, 55 bp, Artificial
  Synthetic oligonucleotide
ggaacagactacagttaaagaggaaaagctagaactacctactactattagaggc

SEQ ID NO: 417986 - DNA, 60 bp, Artificial
  Synthetic oligonucleotide
ggaacagagaagctgacaataacttactcgtcatcaatgatgtgggaaattaatggtcct

SEQ ID NO: 417987 - DNA, 55 bp, Artificial
  Synthetic oligonucleotide
ggaacagataagagactacaaggtagacgtacctttgaagacacacctatcacca

SEQ ID NO: 417988 - DNA, 56 bp, Artificial
  Synthetic oligonucleotide
ggaacagatccgttgtacagtttagagtagggtggaaggtgtcaaagacaagcaac

SEQ ID NO: 417989 - DNA, 55 bp, Artificial
  Synthetic oligonucleotide
ggaacagatccgtttgagcagcccaatccttactttaactgttcgcaacgggcaa

SEQ ID NO: 417990 - DNA, 55 bp, Artificial
  Synthetic oligonucleotide
ggaacagatgaaaggcgaaccagtagaaccatacccagtaacagtcgagtgtgtg

SEQ ID NO: 417991 - DNA, 55 bp, Artificial
  Synthetic oligonucleotide
ggaacagatggctggatcgagtgaacaggcagcggaggccatggaggttgccagt

SEQ ID NO: 417992 - DNA, 55 bp, Artificial
  Synthetic oligonucleotide
ggaacagcccgccaacaacattgggagctatggaggttgatttgagcaaaggagc

SEQ ID NO: 417993 - DNA, 55 bp, Artificial
  Synthetic oligonucleotide
ggaacagccgcagttcaagtcaatccgtcgtcgacgtatggctctcttcttggca

SEQ ID NO: 417994 - DNA, 55 bp, Artificial
  Synthetic oligonucleotide
ggaacagcgggagtggagtctgctgtcctgcggggattcctcattttgggcaagg

SEQ ID NO: 417995 - DNA, 57 bp, Artificial
  Synthetic oligonucleotide
ggaacaggacccaactggggttgaacctggagaccatcttaaggagagatcaatgct

SEQ ID NO: 417996 - DNA, 60 bp, Artificial
  Synthetic oligonucleotide
ggaacaggattggatgtgaagtttgaacatattgacggcaaggataatgtgctagcagac

SEQ ID NO: 417997 - DNA, 54 bp, Artificial
  Synthetic oligonucleotide
ggaacaggcggagacaaaaccattgttctggtaaatagcccttccgatggtccg

SEQ ID NO: 417998 - DNA, 55 bp, Artificial
  Synthetic oligonucleotide
ggaacagggagtgagagattatgtcgagcaacttggcaacgcctttggatcgggg

SEQ ID NO: 417999 - DNA, 60 bp, Artificial
  Synthetic oligonucleotide
ggaacaggggaagtccagattaattgaagcatctagtctgaatgattcggttgcaatgag

SEQ ID NO: 418000 - DNA, 52 bp, Artificial
  Synthetic oligonucleotide
ggaacagggtgtggatagaggacaatccatggatggaagacaaaactccagt

SEQ ID NO: 418001 - DNA, 59 bp, Artificial
  Synthetic oligonucleotide
ggaacaggttactacattagtgttgcacagccaacagtggtgaaactagccggagaatg

SEQ ID NO: 418002 - DNA, 58 bp, Artificial
  Synthetic oligonucleotide
ggaacagtaaacaatataaattgcagtttaccgcattacaatgagagtaacaaatgga

SEQ ID NO: 418003 - DNA, 55 bp, Artificial
  Synthetic oligonucleotide
ggaacagtcagaaggacgcatagaccgcttaaatacgccttatacggacctacat

SEQ ID NO: 418004 - DNA, 53 bp, Artificial
  Synthetic oligonucleotide
ggaacagtggatttattataaagacctaaaggataaagtatggaaaggcccta

SEQ ID NO: 418005 - DNA, 60 bp, Artificial
  Synthetic oligonucleotide
ggaacataacagagatagtgtatttgaataacaccaccatagagaaagagatatgcccca

SEQ ID NO: 418006 - DNA, 60 bp, Artificial
  Synthetic oligonucleotide
ggaacatacgtgtgaatcagacttagatgtcgaggaatgcggagtagtggcagcgatttt

SEQ ID NO: 418007 - DNA, 53 bp, Artificial
  Synthetic oligonucleotide
ggaacatatacaggaggtgttagcactccacctgtgctgcagttcacaaatac

SEQ ID NO: 418008 - DNA, 55 bp, Artificial
  Synthetic oligonucleotide
ggaacatatgaccacactgagtatgcagaggagtcaaagttaaagaggcaggaaa

SEQ ID NO: 418009 - DNA, 55 bp, Artificial
  Synthetic oligonucleotide
ggaacatcaacactgaatcagagatcaatcccagaaatagccattagacccaaag

SEQ ID NO: 418010 - DNA, 55 bp, Artificial
  Synthetic oligonucleotide
ggaacatcaagccaaagatgtaaaattggaacgactccgaaaggataggcaacga

SEQ ID NO: 418011 - DNA, 60 bp, Artificial
  Synthetic oligonucleotide
ggaacatcactcgcgtggagtcagagaataaggtagtaatcctagactcttttgaccagc

SEQ ID NO: 418012 - DNA, 53 bp, Artificial
  Synthetic oligonucleotide
ggaacatccaaacccatcaaagacccgtggggtaacccagtgtcaaccgattg

SEQ ID NO: 418013 - DNA, 55 bp, Artificial
  Synthetic oligonucleotide
ggaacatccatttcgggggtcttgtggactgtttaccacggaactggcaataaga

SEQ ID NO: 418014 - DNA, 55 bp, Artificial
  Synthetic oligonucleotide
ggaacatccgcgtttgtgttggtatcgatcctttagtaacacggtggacccgaga

SEQ ID NO: 418015 - DNA, 60 bp, Artificial
  Synthetic oligonucleotide
ggaacatctggaactcatactgtgccacgaattaaagctatcacgtccaaaatgagaatg

SEQ ID NO: 418016 - DNA, 60 bp, Artificial
  Synthetic oligonucleotide
ggaacatgcaaagcgcaccgagcacgcttgagagactcaacatcaacgccacaggtttcg

SEQ ID NO: 418017 - DNA, 56 bp, Artificial
  Synthetic oligonucleotide
ggaacatgctcaaaatgttgtctaacaatccaattaaatgggaaaggctgttagac

SEQ ID NO: 418018 - DNA, 55 bp, Artificial
  Synthetic oligonucleotide
ggaacatgctcgctgcgcatcttcattctgtgccctactccgacctcgagtctca

SEQ ID NO: 418019 - DNA, 60 bp, Artificial
  Synthetic oligonucleotide
ggaacatgtaacaatgtcagttcagtacaatgtacgcatgggattaagccagtggtatca

SEQ ID NO: 418020 - DNA, 56 bp, Artificial
  Synthetic oligonucleotide
ggaacatgtacgaaccccgcatacctaggtctgcggatttcgtacctcttactgaa

SEQ ID NO: 418021 - DNA, 55 bp, Artificial
  Synthetic oligonucleotide
ggaacattaccggtgcgacgcagccaacagatatggatcgcctaccattccggtc

SEQ ID NO: 418022 - DNA, 55 bp, Artificial
  Synthetic oligonucleotide
ggaacattctattgtgacatgtcatctgcgagaaaacatgcgtcgagttttggag

SEQ ID NO: 418023 - DNA, 57 bp, Artificial
  Synthetic oligonucleotide
ggaacattctggcgatgctacaatagtccagggtcctgtggaaagtacgttcgtaaa

SEQ ID NO: 418024 - DNA, 55 bp, Artificial
  Synthetic oligonucleotide
ggaacattcttggccgtacaggcgaaggtctgattcgtacttccaccgttctggc

SEQ ID NO: 418025 - DNA, 60 bp, Artificial
  Synthetic oligonucleotide
ggaacattgaaggtggcggaacggcactgtgatagattcgtagttctgaatcagtcttcc

SEQ ID NO: 418026 - DNA, 60 bp, Artificial
  Synthetic oligonucleotide
ggaacattggatgcctatctacctgatgatatccacgtttgccacgtttcagcagtatgg

SEQ ID NO: 418027 - DNA, 58 bp, Artificial
  Synthetic oligonucleotide
ggaacatttgaattcacgagctttttctatcgctatggatttgtagccaatttcagta

SEQ ID NO: 418028 - DNA, 56 bp, Artificial
  Synthetic oligonucleotide
ggaaccaaaggaaggttgttaagtgtttcaattgtggcaaaattggacatatagca

SEQ ID NO: 418029 - DNA, 58 bp, Artificial
  Synthetic oligonucleotide
ggaaccaaatccatcaactatcgaggcccatctcaccacacctcctcaacaacccctc

SEQ ID NO: 418030 - DNA, 54 bp, Artificial
  Synthetic oligonucleotide
ggaaccaaccacgacggagtgctcctagaaaggcgcgggtcggtaccagacggc

SEQ ID NO: 418031 - DNA, 54 bp, Artificial
  Synthetic oligonucleotide
ggaaccaacgtagaagccggaataaagagaagccctactggttgacttgtgacg

SEQ ID NO: 418032 - DNA, 60 bp, Artificial
  Synthetic oligonucleotide
ggaaccaactgatgcgtaagttgccagatgattgggtgtattgtgatgctgatggatcgc

SEQ ID NO: 418033 - DNA, 55 bp, Artificial
  Synthetic oligonucleotide
ggaaccaacttcgagttcaatatccgtgtatctgactctcgacgcttcaggcgac

SEQ ID NO: 418034 - DNA, 55 bp, Artificial
  Synthetic oligonucleotide
ggaaccaatcaattgtttggtccagctcaggtttgggggtgaagtacctggagtg

SEQ ID NO: 418035 - DNA, 52 bp, Artificial
  Synthetic oligonucleotide
ggaaccacacggcagatccatgacttgtaatgggccaaatgacgtggaccat

SEQ ID NO: 418036 - DNA, 55 bp, Artificial
  Synthetic oligonucleotide
ggaaccacccgtttgtggtcatgccattatggagggcccgaagggtccccacgca

SEQ ID NO: 418037 - DNA, 60 bp, Artificial
  Synthetic oligonucleotide
ggaaccacgactgatggcatggatcctggtgttgtagccactaccagtgtgatcactgca

SEQ ID NO: 418038 - DNA, 60 bp, Artificial
  Synthetic oligonucleotide
ggaaccagaacgaatagtatcgatcctagagtgggatcgatcaaaagagccatgccaccg

SEQ ID NO: 418039 - DNA, 55 bp, Artificial
  Synthetic oligonucleotide
ggaaccagcagtagtgccattaatatgtgcttcagctaataatagcttgtgggtg

SEQ ID NO: 418040 - DNA, 60 bp, Artificial
  Synthetic oligonucleotide
ggaaccagggttattccatttgcaccatcagcatgtatgattaatgacacacatcttatg

SEQ ID NO: 418041 - DNA, 60 bp, Artificial
  Synthetic oligonucleotide
ggaaccagtaaagcatgatgaccatttgttacaggattctgaattggctggtttactatc

SEQ ID NO: 418042 - DNA, 55 bp, Artificial
  Synthetic oligonucleotide
ggaaccagttctactctgtgcatgcaggaagcctgcaattcagttagtgtccaga

SEQ ID NO: 418043 - DNA, 55 bp, Artificial
  Synthetic oligonucleotide
ggaaccatagtctcaagattcaaggactgtgcagcacttgcgacattcggacatc

SEQ ID NO: 418044 - DNA, 55 bp, Artificial
  Synthetic oligonucleotide
ggaaccatcaagtcttgggatgagagctatactgaacttaaagttggggtcccca

SEQ ID NO: 418045 - DNA, 55 bp, Artificial
  Synthetic oligonucleotide
ggaaccatgatcttggggatgttaataatctatagtgctgctgaaaacttgtggg

SEQ ID NO: 418046 - DNA, 58 bp, Artificial
  Synthetic oligonucleotide
ggaaccatgcataggcttgccaaccaaagtctcccgccgaacttctccagccttgaaa

SEQ ID NO: 418047 - DNA, 55 bp, Artificial
  Synthetic oligonucleotide
ggaaccatgccgtccaaggagggctccggctgtcgccgttggtgctttaccctta

SEQ ID NO: 418048 - DNA, 60 bp, Artificial
  Synthetic oligonucleotide
ggaaccatgtctcccccacgcactacgtgccagagagcgatgcagctgctcgcgtcacca

SEQ ID NO: 418049 - DNA, 58 bp, Artificial
  Synthetic oligonucleotide
ggaaccatgtgaaaagtggtttgcacaggtggtatggggggtattgtgggtgctgcaa

SEQ ID NO: 418050 - DNA, 55 bp, Artificial
  Synthetic oligonucleotide
ggaacccaaagactggttcttcattggagctgatggctgagataaatcgatatct

SEQ ID NO: 418051 - DNA, 59 bp, Artificial
  Synthetic oligonucleotide
ggaacccacgtttttacactcaaaacagcgagagagctgcactccacgcttcatatagg

SEQ ID NO: 418052 - DNA, 55 bp, Artificial
  Synthetic oligonucleotide
ggaacccagtgtgttccacgatatctttgagggaaagaaagaaccagcagtcctg

SEQ ID NO: 418053 - DNA, 55 bp, Artificial
  Synthetic oligonucleotide
ggaaccccagagcctgcattgcgtacccataaggtacggttcctgtgagatccgc

SEQ ID NO: 418054 - DNA, 60 bp, Artificial
  Synthetic oligonucleotide
ggaacccccaatgtgacctattgcttggtaatcgaagctggtcatatatagtggagagac

SEQ ID NO: 418055 - DNA, 60 bp, Artificial
  Synthetic oligonucleotide
ggaacccctaactgctgcaccgtctgtacgagtatccaacgtctgtgcacgttgtgcctc

SEQ ID NO: 418056 - DNA, 55 bp, Artificial
  Synthetic oligonucleotide
ggaacccctgcacggacaaccagctatctcccgacccccgtagacggcctagaga

SEQ ID NO: 418057 - DNA, 55 bp, Artificial
  Synthetic oligonucleotide
ggaacccgacagacccgacagaatccaagaaggaggtggcgagcaggccacacac

SEQ ID NO: 418058 - DNA, 56 bp, Artificial
  Synthetic oligonucleotide
ggaacccgtgtggaaatcagactacgccagtaatacacttacaaggtgatcctaat

SEQ ID NO: 418059 - DNA, 53 bp, Artificial
  Synthetic oligonucleotide
ggaacccgttcgccgtaaatccgggttgtgggcccagctttcattcattggac

SEQ ID NO: 418060 - DNA, 55 bp, Artificial
  Synthetic oligonucleotide
ggaaccctcgtcatccttgtcctcgtaggggacttgacagatcggtggtcgatcg

SEQ ID NO: 418061 - DNA, 60 bp, Artificial
  Synthetic oligonucleotide
ggaaccgaagccgcgcgtcttgtctgctgcagcatcgttctgtgttgtctctgtctgact

SEQ ID NO: 418062 - DNA, 55 bp, Artificial
  Synthetic oligonucleotide
ggaaccgcatacctttcccaagagtttcaacagttttgcagctcactttctatca

SEQ ID NO: 418063 - DNA, 60 bp, Artificial
  Synthetic oligonucleotide
ggaaccgctttcgattgaagtcgctactctgctgatgttcacgaattacatacttgaaga

SEQ ID NO: 418064 - DNA, 55 bp, Artificial
  Synthetic oligonucleotide
ggaaccggatatattatcaggatctgtcggacacatggcgactctcaaagagtca

SEQ ID NO: 418065 - DNA, 55 bp, Artificial
  Synthetic oligonucleotide
ggaaccggtatggagggaagtacgacctccatcttacccagcaggagttagctcc

SEQ ID NO: 418066 - DNA, 54 bp, Artificial
  Synthetic oligonucleotide
ggaaccgtattaacgacaagatccagaaacttcgccgtttctctgttggtcacg

SEQ ID NO: 418067 - DNA, 57 bp, Artificial
  Synthetic oligonucleotide
ggaaccgtcaaggacagaagtccttatagaaccttaatgagctgtcctgttggtgaa

SEQ ID NO: 418068 - DNA, 50 bp, Artificial
  Synthetic oligonucleotide
ggaaccgtcatagtaggcaaagcacctccgccagtattaataggtccttt

SEQ ID NO: 418069 - DNA, 57 bp, Artificial
  Synthetic oligonucleotide
ggaaccgtgaaagacagaagcccctacagaaccttaatgagctgtcctgttggtgaa

SEQ ID NO: 418070 - DNA, 59 bp, Artificial
  Synthetic oligonucleotide
ggaaccgtgtttaataggtttcagtccttgtgtgctcatcttgagggctactcaggtga

SEQ ID NO: 418071 - DNA, 60 bp, Artificial
  Synthetic oligonucleotide
ggaaccgttaggattgagcgtgttcacgctgatgtgaacatggacggattaagctctaag

SEQ ID NO: 418072 - DNA, 59 bp, Artificial
  Synthetic oligonucleotide
ggaacctaaaagccagggcagcacacaaaattgggctgccactggttggcatgacccag

SEQ ID NO: 418073 - DNA, 50 bp, Artificial
  Synthetic oligonucleotide
ggaacctaattgtatccacgaatttctctttgttacgacagcaaatggtt

SEQ ID NO: 418074 - DNA, 57 bp, Artificial
  Synthetic oligonucleotide
ggaacctaccgatggaggagagagctgtagtagcggaacacaacccgactttattga

SEQ ID NO: 418075 - DNA, 60 bp, Artificial
  Synthetic oligonucleotide
ggaacctagacacagcataatgacagctggaccaagcgacatgtatgtccatgctggtaa

SEQ ID NO: 418076 - DNA, 57 bp, Artificial
  Synthetic oligonucleotide
ggaacctcaaaggttagccgcaatgctaattattctccccgtgcaggtattgggcca

SEQ ID NO: 418077 - DNA, 55 bp, Artificial
  Synthetic oligonucleotide
ggaacctcagtggaagagagtgacatgtttatgccccgttccattggaggcccag

SEQ ID NO: 418078 - DNA, 58 bp, Artificial
  Synthetic oligonucleotide
ggaacctcccagataaaaacggaattctctgcctgagctacagtgatgctctccccgg

SEQ ID NO: 418079 - DNA, 60 bp, Artificial
  Synthetic oligonucleotide
ggaacctcccagatatacacgccactctctgaacgatccacagtgatgtactcccctgtg

SEQ ID NO: 418080 - DNA, 55 bp, Artificial
  Synthetic oligonucleotide
ggaacctcgacatcaattcggtggtgtgattcatcgatctcacgatggcgtcgcg

SEQ ID NO: 418081 - DNA, 55 bp, Artificial
  Synthetic oligonucleotide
ggaacctcttgctgcaaatccagtcgctacgggttataaatacaaggctactgac

SEQ ID NO: 418082 - DNA, 55 bp, Artificial
  Synthetic oligonucleotide
ggaacctgacccctgggaacactaacatccgtgtgtcccgttacactagtacagc

SEQ ID NO: 418083 - DNA, 53 bp, Artificial
  Synthetic oligonucleotide
ggaacctgagcgtattgtgtccattcttgagtgggatcgcagtgcagagccac

SEQ ID NO: 418084 - DNA, 52 bp, Artificial
  Synthetic oligonucleotide
ggaacctggaaatgttttggtgttcgtcgcatcatatagggatgttgatgtt

SEQ ID NO: 418085 - DNA, 54 bp, Artificial
  Synthetic oligonucleotide
ggaacctggtctcgctaaagagtggggtggacgtattctacaaaccctcggagc

SEQ ID NO: 418086 - DNA, 60 bp, Artificial
  Synthetic oligonucleotide
ggaacctggttcctgtattcaagaatgacatggtcaatcctcaaacatttgcccatgagc

SEQ ID NO: 418087 - DNA, 55 bp, Artificial
  Synthetic oligonucleotide
ggaacctgttgcctgaactcaatcacacagtggtctatcttcatacagctacggc

SEQ ID NO: 418088 - DNA, 55 bp, Artificial
  Synthetic oligonucleotide
ggaaccttagaagaaaaggtgacagtcctagataggaatgtctcaaatgatatgg

SEQ ID NO: 418089 - DNA, 55 bp, Artificial
  Synthetic oligonucleotide
ggaaccttagattcacgagcccgcgtgattaatcgggtttgtcactgggatccgg

SEQ ID NO: 418090 - DNA, 51 bp, Artificial
  Synthetic oligonucleotide
ggaaccttcggccccgttcacttccgaaaccaggtgaaaatacgtcgccga

SEQ ID NO: 418091 - DNA, 52 bp, Artificial
  Synthetic oligonucleotide
ggaaccttgaatgtaaagtgttcgactttaagtaccccgcattttgtggtaa

SEQ ID NO: 418092 - DNA, 55 bp, Artificial
  Synthetic oligonucleotide
ggaacctttcttggccactctgaaatgacagatctgagtacgtcactaaataccc

SEQ ID NO: 418093 - DNA, 50 bp, Artificial
  Synthetic oligonucleotide
ggaacctttggtcccgtccatttccgaaaccaagttaaaatacgtcgcag

SEQ ID NO: 418094 - DNA, 55 bp, Artificial
  Synthetic oligonucleotide
ggaacgaaccggctataggccagaagttggtttttacgcaggccgctaaggctgc

SEQ ID NO: 418095 - DNA, 58 bp, Artificial
  Synthetic oligonucleotide
ggaacgaagctacggcccttctagagccacttgctaaggcctcccctattgctcgtgc

SEQ ID NO: 418096 - DNA, 53 bp, Artificial
  Synthetic oligonucleotide
ggaacgaataaccgcgttcgttcctatatcaagttaaagagtttgaacttatc

SEQ ID NO: 418097 - DNA, 53 bp, Artificial
  Synthetic oligonucleotide
ggaacgaatccgttttacggataggcaacgagtgttttacgctgggagaaatc

SEQ ID NO: 418098 - DNA, 55 bp, Artificial
  Synthetic oligonucleotide
ggaacgacactgtcaccggaattatgaacactggattggcctttgtgtactccgg

SEQ ID NO: 418099 - DNA, 50 bp, Artificial
  Synthetic oligonucleotide
ggaacgacagacgctttgacttctacgccaacggtcgggctctgacccgc

SEQ ID NO: 418100 - DNA, 56 bp, Artificial
  Synthetic oligonucleotide
ggaacgaccgacaaagcgggcgcgcctacctacagctggggtagcaatgtcacgga

SEQ ID NO: 418101 - DNA, 54 bp, Artificial
  Synthetic oligonucleotide
ggaacgaccgacaagttgggcgcgccaacctataactggggtgcgaatgaaacg

SEQ ID NO: 418102 - DNA, 53 bp, Artificial
  Synthetic oligonucleotide
ggaacgaccgacaggtcgggcgcgccaacctacaactggggtgaaaatgaaac

SEQ ID NO: 418103 - DNA, 54 bp, Artificial
  Synthetic oligonucleotide
ggaacgaccgacaggtcgggcgcgcctacctacagctggggtgaaaacgatacg

SEQ ID NO: 418104 - DNA, 52 bp, Artificial
  Synthetic oligonucleotide
ggaacgactccgaaaggataggcaacgaacgttcccactttagtggaaacag

SEQ ID NO: 418105 - DNA, 60 bp, Artificial
  Synthetic oligonucleotide
ggaacgagagggtacgaccatcagggagtgacgccagtcgatctggcagtcggcattctt

SEQ ID NO: 418106 - DNA, 55 bp, Artificial
  Synthetic oligonucleotide
ggaacgagcagtgtgtacattgaggtgttacatttaactcagggagcgtgctggg

SEQ ID NO: 418107 - DNA, 59 bp, Artificial
  Synthetic oligonucleotide
ggaacgataactctggcagacgaaacgccacctactatcagcccaacaggacgagattc

SEQ ID NO: 418108 - DNA, 56 bp, Artificial
  Synthetic oligonucleotide
ggaacgatcaatagaacaatgaagtcaacgtaacctcaaaaactttatcaacatac

SEQ ID NO: 418109 - DNA, 55 bp, Artificial
  Synthetic oligonucleotide
ggaacgatgttttatgggagtcggagaggaataactgcctcactatcccaaagcc

SEQ ID NO: 418110 - DNA, 55 bp, Artificial
  Synthetic oligonucleotide
ggaacgattcctaaattactttggtattcacggagatgaagcagcggatgttttg

SEQ ID NO: 418111 - DNA, 55 bp, Artificial
  Synthetic oligonucleotide
ggaacgcagatgcatacgaaaaggttggtgagatcgaaaacggtacaccccatct

SEQ ID NO: 418112 - DNA, 60 bp, Artificial
  Synthetic oligonucleotide
ggaacgcatatcgactagggacattcttcagacacgcgatttgcactcattgtgcatgcc

SEQ ID NO: 418113 - DNA, 58 bp, Artificial
  Synthetic oligonucleotide
ggaacgcatgtagttctaatccttatctaccttacattacattgctacttgtaactta

SEQ ID NO: 418114 - DNA, 57 bp, Artificial
  Synthetic oligonucleotide
ggaacgccagattttgtgggaaagatccaaggcttactcacccagaccacaagagcg

SEQ ID NO: 418115 - DNA, 58 bp, Artificial
  Synthetic oligonucleotide
ggaacgcccattaaatctctgtataaatgtacccgcttcttgcattgtaaccagtcgc

SEQ ID NO: 418116 - DNA, 55 bp, Artificial
  Synthetic oligonucleotide
ggaacgcctctgaggatgcgctcactgctgtgatcaccgcggcttatttgactat

SEQ ID NO: 418117 - DNA, 59 bp, Artificial
  Synthetic oligonucleotide
ggaacgccttataatatgtcttatagctgcgtactgctgaacgtcattccaaccgtacc

SEQ ID NO: 418118 - DNA, 55 bp, Artificial
  Synthetic oligonucleotide
ggaacgcgctctgttggaaagctcacagagaagccagacctccggaaagttgggg

SEQ ID NO: 418119 - DNA, 56 bp, Artificial
  Synthetic oligonucleotide
ggaacgctagatggagtctggaacggatcactcaaagccgagctacgctcttcgca

SEQ ID NO: 418120 - DNA, 52 bp, Artificial
  Synthetic oligonucleotide
ggaacggaccaacaacaaatacagcccactacccaaaggtatataaaactta

SEQ ID NO: 418121 - DNA, 59 bp, Artificial
  Synthetic oligonucleotide
ggaacggagagtgaccgagggatctgagccttgttcgactgattgcatgaagggtacgg

SEQ ID NO: 418122 - DNA, 50 bp, Artificial
  Synthetic oligonucleotide
ggaacggatagagggattcttggcagcggaatgccctttcttacctaagc

SEQ ID NO: 418123 - DNA, 60 bp, Artificial
  Synthetic oligonucleotide
ggaacggccggagttgtctggaattgcacaacagcggttggcctctgcaacctcatgagg

SEQ ID NO: 418124 - DNA, 60 bp, Artificial
  Synthetic oligonucleotide
ggaacggctctttggtgtgcgcgtggtcttgtacgttgatcacggcggtgatgacataga

SEQ ID NO: 418125 - DNA, 58 bp, Artificial
  Synthetic oligonucleotide
ggaacgggggagagcagcctccagaggccgtagagggtacagcaacaggaggtcaaga

SEQ ID NO: 418126 - DNA, 59 bp, Artificial
  Synthetic oligonucleotide
ggaacggggtctcatttatacaagaagcctcaatagaactctcaatctcgttcgcacac

SEQ ID NO: 418127 - DNA, 55 bp, Artificial
  Synthetic oligonucleotide
ggaacggttcctctgtcatggtgtctgttgagtgcaaatatggtactcataattc

SEQ ID NO: 418128 - DNA, 57 bp, Artificial
  Synthetic oligonucleotide
ggaacgtagatttaacagagcgcttttcagctgaattgtcccagtttcctctaggtc

SEQ ID NO: 418129 - DNA, 55 bp, Artificial
  Synthetic oligonucleotide
ggaacgtcccatgaaagagtactaatagaagtaagttcaggtacgtcaccaagca

SEQ ID NO: 418130 - DNA, 55 bp, Artificial
  Synthetic oligonucleotide
ggaacgtgagcgtatggcggcacatgcaatagacttccatgtactcaccgtgccc

SEQ ID NO: 418131 - DNA, 55 bp, Artificial
  Synthetic oligonucleotide
ggaacgtgcgcaagtcgataactggaaagctagatgatatttacacgacagaggg

SEQ ID NO: 418132 - DNA, 55 bp, Artificial
  Synthetic oligonucleotide
ggaacgtgctattggaggtgtaactcgtagtgatcaagcgccgagacgtgttgca

SEQ ID NO: 418133 - DNA, 54 bp, Artificial
  Synthetic oligonucleotide
ggaacgtggagtttaaagaggccgaggtggcactctccaggctacgacttagca

SEQ ID NO: 418134 - DNA, 55 bp, Artificial
  Synthetic oligonucleotide
ggaacgtggatctaaccgaaaaattatctttagatttggatcaatatcctctagg

SEQ ID NO: 418135 - DNA, 59 bp, Artificial
  Synthetic oligonucleotide
ggaacgtgttgggaacaaatgtacactccaggtggagaagtgagaaatgacgatgttga

SEQ ID NO: 418136 - DNA, 56 bp, Artificial
  Synthetic oligonucleotide
ggaacgttagtcaacgtcgttggaagaatctcaaagtttaggatggccctcactca

SEQ ID NO: 418137 - DNA, 52 bp, Artificial
  Synthetic oligonucleotide
ggaacgttccaaagcctacggacttctcggggaacggttatacgctgtagcg

SEQ ID NO: 418138 - DNA, 57 bp, Artificial
  Synthetic oligonucleotide
ggaacgttgcttttgggggcgatgccctatctgttgcttctttgtcggctgttttgc

SEQ ID NO: 418139 - DNA, 54 bp, Artificial
  Synthetic oligonucleotide
ggaacgttgttctcggtccaagtgtacggtatacgcgaaaggtgcgatccgtcg

SEQ ID NO: 418140 - DNA, 54 bp, Artificial
  Synthetic oligonucleotide
ggaactaaatgctcttctcgatgatttattattcagagtgcggcgtccggaagg

SEQ ID NO: 418141 - DNA, 57 bp, Artificial
  Synthetic oligonucleotide
ggaactaagagcatccactacaattcgcctagggcccagagtcagatctcaggtgca

SEQ ID NO: 418142 - DNA, 51 bp, Artificial
  Synthetic oligonucleotide
ggaactaagtccctggagccatgcacgtgtggagctgtcgacctgtacctc

SEQ ID NO: 418143 - DNA, 55 bp, Artificial
  Synthetic oligonucleotide
ggaactacaacatattatgctatcactggtactgctaattctctagaacctgatc

SEQ ID NO: 418144 - DNA, 55 bp, Artificial
  Synthetic oligonucleotide
ggaactacatccacaacgtattcgttggttagttcctctcctcgtgcgtcatagg

SEQ ID NO: 418145 - DNA, 59 bp, Artificial
  Synthetic oligonucleotide
ggaactaccaatatctgcgaaattgttacatcatccaactacagaaattaggtcagaat

SEQ ID NO: 418146 - DNA, 55 bp, Artificial
  Synthetic oligonucleotide
ggaactaccaccagttcccatacagcaggttgagtctttaaagctggaaagttct

SEQ ID NO: 418147 - DNA, 60 bp, Artificial
  Synthetic oligonucleotide
ggaactaccatcaggaacaagcattcaaatgggaccatccatgatagaacggcttttcga

SEQ ID NO: 418148 - DNA, 55 bp, Artificial
  Synthetic oligonucleotide
ggaactacccactcctgaacaaagcttgcaagaacaatgcaagtgcagctcggcg

SEQ ID NO: 418149 - DNA, 58 bp, Artificial
  Synthetic oligonucleotide
ggaactactagtacccttcaagaacaaataggatggatgacaagcaatccacctatcc

SEQ ID NO: 418150 - DNA, 55 bp, Artificial
  Synthetic oligonucleotide
ggaactactctgtgccgaacaccctctcttgggtgagaaaactgccggtttcgga

SEQ ID NO: 418151 - DNA, 57 bp, Artificial
  Synthetic oligonucleotide
ggaactactttattgttatctattgaggattgtgtaggttctaatcacgacctagct

SEQ ID NO: 418152 - DNA, 55 bp, Artificial
  Synthetic oligonucleotide
ggaactagaaacacaataaagctccgtagcggtacacacatcggaggctccaccc

SEQ ID NO: 418153 - DNA, 55 bp, Artificial
  Synthetic oligonucleotide
ggaactagaacgcttcgcagtcaatcctggcctgttagaaacaacagaaggctgc

SEQ ID NO: 418154 - DNA, 59 bp, Artificial
  Synthetic oligonucleotide
ggaactagcttcagaaataacgaacagagcaggagacctagcagttgaagtctccccag

SEQ ID NO: 418155 - DNA, 55 bp, Artificial
  Synthetic oligonucleotide
ggaactagcttcgaactttccttgtgtcaactgggacatcaagagacagcaattg

SEQ ID NO: 418156 - DNA, 57 bp, Artificial
  Synthetic oligonucleotide
ggaactatgcataaggaaggagaattgatacccatagatgataaatataggggccca

SEQ ID NO: 418157 - DNA, 60 bp, Artificial
  Synthetic oligonucleotide
ggaactatgtggcttaatgctggatcagaaattcaggtagctggatttgattattcatgc

SEQ ID NO: 418158 - DNA, 55 bp, Artificial
  Synthetic oligonucleotide
ggaactattagactgcgatccggaacacaaataggagaaactgtacatttatact

SEQ ID NO: 418159 - DNA, 55 bp, Artificial
  Synthetic oligonucleotide
ggaactattattggatctagtcgaggctgggctaaagatagtagatcaggtatcg

SEQ ID NO: 418160 - DNA, 53 bp, Artificial
  Synthetic oligonucleotide
ggaactcaacacacaccagggttagggatcttctacgaaggatcactgggaac

SEQ ID NO: 418161 - DNA, 55 bp, Artificial
  Synthetic oligonucleotide
ggaactcaagttagtttcacttgcaaagcacaaaaccacatacaatgtaacagtg

SEQ ID NO: 418162 - DNA, 55 bp, Artificial
  Synthetic oligonucleotide
ggaactcaatatgacatcgtgcgtatcagtccagacgaaaactttggttttaacc

SEQ ID NO: 418163 - DNA, 55 bp, Artificial
  Synthetic oligonucleotide
ggaactcagaatgtgatctcccaaatcagaagaatattgctaggagacagcccaa

SEQ ID NO: 418164 - DNA, 55 bp, Artificial
  Synthetic oligonucleotide
ggaactcataacatcgtgctcctccaatgtttccgtcgcacacgacgggactggc

SEQ ID NO: 418165 - DNA, 57 bp, Artificial
  Synthetic oligonucleotide
ggaactcattccagattgaggagtttggcatgggggtcttcacaacacgagttttta

SEQ ID NO: 418166 - DNA, 60 bp, Artificial
  Synthetic oligonucleotide
ggaactccctgacatatcaaatgcaacgcatgacattgaatgagaccacgaatggactac

SEQ ID NO: 418167 - DNA, 55 bp, Artificial
  Synthetic oligonucleotide
ggaactcgcgcttttgtagttaccaggcatgagactggagtgaagcgaaggtcga

SEQ ID NO: 418168 - DNA, 55 bp, Artificial
  Synthetic oligonucleotide
ggaactcgcttcgtccactagtgagaactcggttgagacccaagaaatcacaacc

SEQ ID NO: 418169 - DNA, 52 bp, Artificial
  Synthetic oligonucleotide
ggaactctaaaccaatagcccaaccccggttagaagggtcgagtgattctac

SEQ ID NO: 418170 - DNA, 55 bp, Artificial
  Synthetic oligonucleotide
ggaactctattagagtcctaaattcttctgggtctctttgcaaaagctctgtgag

SEQ ID NO: 418171 - DNA, 55 bp, Artificial
  Synthetic oligonucleotide
ggaactctcgctatcccttgctgtggatttcccttatggctattttggggactag

SEQ ID NO: 418172 - DNA, 55 bp, Artificial
  Synthetic oligonucleotide
ggaactctctgcctgatatgcagtgatgggatcccctgtgcgtaaatccatcgtc

SEQ ID NO: 418173 - DNA, 55 bp, Artificial
  Synthetic oligonucleotide
ggaactgaaagcatgaattttgccaaaagtccggaaattgcggctaggcctgctg

SEQ ID NO: 418174 - DNA, 55 bp, Artificial
  Synthetic oligonucleotide
ggaactgagcttgacccatccgattacccctgagaaacagtccaccaaatcatgc

SEQ ID NO: 418175 - DNA, 53 bp, Artificial
  Synthetic oligonucleotide
ggaactgaggaatattacgagagactgtcagaattgtttcgtgagcgagaaaa

SEQ ID NO: 418176 - DNA, 55 bp, Artificial
  Synthetic oligonucleotide
ggaactgagtcaagtacaatccctattactatttctattagccccatgtttgctg

SEQ ID NO: 418177 - DNA, 57 bp, Artificial
  Synthetic oligonucleotide
ggaactgagtctatagacaacgttatgggaatgattgggatactccctgacttaacc

SEQ ID NO: 418178 - DNA, 55 bp, Artificial
  Synthetic oligonucleotide
ggaactgatagggttttagaactattacaaagaacctttagagctattatccaca

SEQ ID NO: 418179 - DNA, 60 bp, Artificial
  Synthetic oligonucleotide
ggaactgatgtatggatggggcggacaattagtcgaacctccaggtcaggatttgagata

SEQ ID NO: 418180 - DNA, 58 bp, Artificial
  Synthetic oligonucleotide
ggaactgatgtcttgtgtggaaaccacgtgaaggaccccaatgttcttgtagtcgcaa

SEQ ID NO: 418181 - DNA, 60 bp, Artificial
  Synthetic oligonucleotide
ggaactgcagagatatttgggcaacatccaggctttggcacacactgctttttaggtggt

SEQ ID NO: 418182 - DNA, 60 bp, Artificial
  Synthetic oligonucleotide
ggaactgcaggaagcactatgggcgcggcgtcaataacgctgacggtacaagccagacaa

SEQ ID NO: 418183 - DNA, 52 bp, Artificial
  Synthetic oligonucleotide
ggaactgccgcccacggtgtgaacgttcttactagattccttaaccggggcc

SEQ ID NO: 418184 - DNA, 60 bp, Artificial
  Synthetic oligonucleotide
ggaactgcttagtatgatgccgtggaagccaggtaaatgtcacctgttggcagcaggcct

SEQ ID NO: 418185 - DNA, 60 bp, Artificial
  Synthetic oligonucleotide
ggaactggactcacacatcgcgtaggaaagcgattttgtgtgaaatctgtctatgtgctg

SEQ ID NO: 418186 - DNA, 51 bp, Artificial
  Synthetic oligonucleotide
ggaactggagggttaggagtcgtttaaaattccgcaaacttggtcgcggtc

SEQ ID NO: 418187 - DNA, 55 bp, Artificial
  Synthetic oligonucleotide
ggaactggattcttggcgagacttatggtaagtgggtgaagagaacccttgaccc

SEQ ID NO: 418188 - DNA, 60 bp, Artificial
  Synthetic oligonucleotide
ggaactggcaggaagttttccacgacctcaattgcctgaacagtccagcctgctagagca

SEQ ID NO: 418189 - DNA, 60 bp, Artificial
  Synthetic oligonucleotide
ggaactggcatgacacaggagtggtgacctgtctcatacatgacaccttgaaaccccacc

SEQ ID NO: 418190 - DNA, 60 bp, Artificial
  Synthetic oligonucleotide
ggaactgggctttgacaggaggcatggaactgacaagggaccccactgtctccgagcatg

SEQ ID NO: 418191 - DNA, 55 bp, Artificial
  Synthetic oligonucleotide
ggaactggtgtatttgacatggatgacgcagatcacagataaggagttagcctcg

SEQ ID NO: 418192 - DNA, 55 bp, Artificial
  Synthetic oligonucleotide
ggaactgtcactgaaactggtcgatatgcaacctgctcgggaggaccacctgctg

SEQ ID NO: 418193 - DNA, 60 bp, Artificial
  Synthetic oligonucleotide
ggaactgtgaccacagaggtggcattaggcctagtgtgtgccacttgtgagcaaattgct

SEQ ID NO: 418194 - DNA, 53 bp, Artificial
  Synthetic oligonucleotide
ggaactgtgatgcaccgataaccggagggagcccagatcctggcgtgaaagga

SEQ ID NO: 418195 - DNA, 52 bp, Artificial
  Synthetic oligonucleotide
ggaactgtttatggcaatggagttcccagatttgactacctatgccatttag

SEQ ID NO: 418196 - DNA, 56 bp, Artificial
  Synthetic oligonucleotide
ggaacttaacaattgagcgtagagaagttaacagaacagaactttataggttagca

SEQ ID NO: 418197 - DNA, 51 bp, Artificial
  Synthetic oligonucleotide
ggaacttaactgactacggtttggctagatatgcttttgatttctaccgac

SEQ ID NO: 418198 - DNA, 55 bp, Artificial
  Synthetic oligonucleotide
ggaacttaccagatactgtcaatttattcaacagtagcgagttccctagtactgg

SEQ ID NO: 418199 - DNA, 52 bp, Artificial
  Synthetic oligonucleotide
ggaacttactgcggtgacaataaaaaatgtcaatacgcttcgacaatttacg

SEQ ID NO: 418200 - DNA, 53 bp, Artificial
  Synthetic oligonucleotide
ggaacttagaagttacacacactgatcaacagtgggcatagcatgccagctat

SEQ ID NO: 418201 - DNA, 55 bp, Artificial
  Synthetic oligonucleotide
ggaacttcaggctgggctgggaccccgaaactaagttaatcatgcctggggtcta

SEQ ID NO: 418202 - DNA, 55 bp, Artificial
  Synthetic oligonucleotide
ggaacttcccacagatcataagggtatctacggacaactggttgactcacatgcg

SEQ ID NO: 418203 - DNA, 60 bp, Artificial
  Synthetic oligonucleotide
ggaacttccgagatatagacgccactccatgcttgagctgcagtgatgggttcccctgtg

SEQ ID NO: 418204 - DNA, 54 bp, Artificial
  Synthetic oligonucleotide
ggaacttctgattgggtagaaccacttcttttccgcttgcccttgggcttgtta

SEQ ID NO: 418205 - DNA, 55 bp, Artificial
  Synthetic oligonucleotide
ggaacttgacaatccccgcagcacagggactcccggttatgaacaccccaggtag

SEQ ID NO: 418206 - DNA, 60 bp, Artificial
  Synthetic oligonucleotide
ggaacttgactcattatcggctcagacacgttcccccatcactagagttgctgaaagggc

SEQ ID NO: 418207 - DNA, 53 bp, Artificial
  Synthetic oligonucleotide
ggaacttggcctcacagttgagagaggtcaccttagagagccaaaaggtggac

SEQ ID NO: 418208 - DNA, 51 bp, Artificial
  Synthetic oligonucleotide
ggaacttgttggtcgatcttttgtcgaagctccaagacctggacgacatta

SEQ ID NO: 418209 - DNA, 55 bp, Artificial
  Synthetic oligonucleotide
ggaactttagtggttcttgctagtgcattcgttgctttgaaagttgttaatggaa

SEQ ID NO: 418210 - DNA, 56 bp, Artificial
  Synthetic oligonucleotide
ggaactttattagcgtctgtggtctgatgtttgagaattgcatactctgtttgagc

SEQ ID NO: 418211 - DNA, 58 bp, Artificial
  Synthetic oligonucleotide
ggaactttgaagcaagcggtgactaatgcaatggcgggagtacttctggatactaagc

SEQ ID NO: 418212 - DNA, 60 bp, Artificial
  Synthetic oligonucleotide
ggaactttgatctttgggttcttaggagcagcaggaagcactatgggcgcagcgtctgta

SEQ ID NO: 418213 - DNA, 52 bp, Artificial
  Synthetic oligonucleotide
ggaactttgctataatgcgtttcactggcgaggctagtacctttctcttcaa

SEQ ID NO: 418214 - DNA, 58 bp, Artificial
  Synthetic oligonucleotide
ggaacttttctcccgatctggctgcactgtcccgaactttctatgggaagactgtaga

SEQ ID NO: 418215 - DNA, 52 bp, Artificial
  Synthetic oligonucleotide
ggaacttttggccctgtccatttcggaaaccaagtcaaaatacgtcgaagag

SEQ ID NO: 418216 - DNA, 55 bp, Artificial
  Synthetic oligonucleotide
ggaagaaacccttcacaggtgggagatgagtactgctacggaggacacacgaacg

SEQ ID NO: 418217 - DNA, 50 bp, Artificial
  Synthetic oligonucleotide
ggaagaaagactaggctttgagccacgactgccaaatctacaactaagat

SEQ ID NO: 418218 - DNA, 59 bp, Artificial
  Synthetic oligonucleotide
ggaagaaagatggctgacggtagcgtactgcgcccacggattattctgcggctgtaaaa

SEQ ID NO: 418219 - DNA, 55 bp, Artificial
  Synthetic oligonucleotide
ggaagaaagcctgtctgaaacgaaggccttaagaagatggttaggcatactcaat

SEQ ID NO: 418220 - DNA, 60 bp, Artificial
  Synthetic oligonucleotide
ggaagaaatccagagagaaatcagtgctcacgaggggcagcttgtgatagcacgccagaa

SEQ ID NO: 418221 - DNA, 50 bp, Artificial
  Synthetic oligonucleotide
ggaagaaattgcttgaacgtcgattcaggctgatctcttctgtttctcta

SEQ ID NO: 418222 - DNA, 55 bp, Artificial
  Synthetic oligonucleotide
ggaagaaattggcgtgaggtctagactggtgaacaacggggacgactgcgtgctt

SEQ ID NO: 418223 - DNA, 55 bp, Artificial
  Synthetic oligonucleotide
ggaagaaatttcctagccaaatttggggtaacacttaatatggtcagcacagaaa

SEQ ID NO: 418224 - DNA, 60 bp, Artificial
  Synthetic oligonucleotide
ggaagaacaaaaactgcccatcaacgcactaagcaactcattgctgcgtcaccacaatct

SEQ ID NO: 418225 - DNA, 60 bp, Artificial
  Synthetic oligonucleotide
ggaagaacaataagcacagcttctagatctgggtacgagatgctgaaagtgcctaatgca

SEQ ID NO: 418226 - DNA, 60 bp, Artificial
  Synthetic oligonucleotide
ggaagaacaatcagcaaagattcacgctcaggttatgagactttcagagtcattggtggt

SEQ ID NO: 418227 - DNA, 55 bp, Artificial
  Synthetic oligonucleotide
ggaagaacagaagctgcccatcaacgcactgagcaacacgctgttgcgccaccac

SEQ ID NO: 418228 - DNA, 55 bp, Artificial
  Synthetic oligonucleotide
ggaagaaccactaaagggatcagccaaacatattgaggaatgctcctgttatgga

SEQ ID NO: 418229 - DNA, 52 bp, Artificial
  Synthetic oligonucleotide
ggaagaaccctaaaaacgtacagacagcgccgggtacctttaagacttctga

SEQ ID NO: 418230 - DNA, 56 bp, Artificial
  Synthetic oligonucleotide
ggaagaactaacacaagagaactactaccaggacacaaactggttgaccaactcac

SEQ ID NO: 418231 - DNA, 55 bp, Artificial
  Synthetic oligonucleotide
ggaagaactaccagacaccatagaaacgttgatgctcctagctttgatagctgtg

SEQ ID NO: 418232 - DNA, 60 bp, Artificial
  Synthetic oligonucleotide
ggaagaactcaggatgctcaaatcttcctctatgatgagctgcactattggagcatgaga

SEQ ID NO: 418233 - DNA, 51 bp, Artificial
  Synthetic oligonucleotide
ggaagaactcttctacccgggcggccaggctctcactgttggcggcccggt

SEQ ID NO: 418234 - DNA, 50 bp, Artificial
  Synthetic oligonucleotide
ggaagaagatatagtacggctgatctccagggcctaaggtggaacataag

SEQ ID NO: 418235 - DNA, 58 bp, Artificial
  Synthetic oligonucleotide
ggaagaagcggagacagcgacgaagacctgctaaagacagttcgactaatcaagtttc

SEQ ID NO: 418236 - DNA, 55 bp, Artificial
  Synthetic oligonucleotide
ggaagaagtcaactcactcgcagctgaaggtaatgaacatggtatagatagagat

SEQ ID NO: 418237 - DNA, 57 bp, Artificial
  Synthetic oligonucleotide
ggaagaagtccccctgattggagcgggcatggctaccgcggttgcaacaggaagggc

SEQ ID NO: 418238 - DNA, 50 bp, Artificial
  Synthetic oligonucleotide
ggaagaatacagtagttcagctattgttaactaaaggatggccgacgact

SEQ ID NO: 418239 - DNA, 55 bp, Artificial
  Synthetic oligonucleotide
ggaagaatacgggatagtcagcagcaacttacaagcggctaatactgcagcccag

SEQ ID NO: 418240 - DNA, 53 bp, Artificial
  Synthetic oligonucleotide
ggaagaatcatcgatgatctccactgggttcagttctaaattcatttcagcta

SEQ ID NO: 418241 - DNA, 55 bp, Artificial
  Synthetic oligonucleotide
ggaagaatgctacagaacaatccacggaggaagggggccagttcgtcaccctttc

SEQ ID NO: 418242 - DNA, 55 bp, Artificial
  Synthetic oligonucleotide
ggaagaatgtaacagaggtggattatttgtatttggcattctattgtagtgctgg

SEQ ID NO: 418243 - DNA, 55 bp, Artificial
  Synthetic oligonucleotide
ggaagaattcttcgttaaactcaccattcttgagcttgtgatgtaatttcctcac

SEQ ID NO: 418244 - DNA, 59 bp, Artificial
  Synthetic oligonucleotide
ggaagaattggcacccgaagaaatagcagctagacaattagacctagcagatttcttac

SEQ ID NO: 418245 - DNA, 60 bp, Artificial
  Synthetic oligonucleotide
ggaagaatttgatccgtgatatcgcatgtggccataaacccaaactgaatataccatcat

SEQ ID NO: 418246 - DNA, 60 bp, Artificial
  Synthetic oligonucleotide
ggaagacaaagaatggtgcctcgtgatgctagatccacaaccaaatttcatgacatgcaa

SEQ ID NO: 418247 - DNA, 60 bp, Artificial
  Synthetic oligonucleotide
ggaagacaaatctatatggattcatcataaaggggaggtcccatctgaggaatgacactg

SEQ ID NO: 418248 - DNA, 58 bp, Artificial
  Synthetic oligonucleotide
ggaagacaacgtacgggacacaacccacgcggcgtggtgaccttgctgttcttgcaca

SEQ ID NO: 418249 - DNA, 60 bp, Artificial
  Synthetic oligonucleotide
ggaagacaactcagttcttgctgatcaaattagggactacagcagaggacaaaggattaa

SEQ ID NO: 418250 - DNA, 55 bp, Artificial
  Synthetic oligonucleotide
ggaagacatgcccaatctaaatttgttttcctcatgctataactattggagaggc

SEQ ID NO: 418251 - DNA, 55 bp, Artificial
  Synthetic oligonucleotide
ggaagacatggggcaaagcgaaaatcctctctacagagtcccataaccagacctt

SEQ ID NO: 418252 - DNA, 55 bp, Artificial
  Synthetic oligonucleotide
ggaagacatgttaccctaaaggatattgtattagacctgcaacctccagaccctg

SEQ ID NO: 418253 - DNA, 54 bp, Artificial
  Synthetic oligonucleotide
ggaagacccctcccctggattgcaaagcacgatagcgggaattccacctttaat

SEQ ID NO: 418254 - DNA, 58 bp, Artificial
  Synthetic oligonucleotide
ggaagaccctgcagctagggatttagtagttaactatgtcaacactaatatgggcctg

SEQ ID NO: 418255 - DNA, 55 bp, Artificial
  Synthetic oligonucleotide
ggaagaccggggccacaccaactgcgtacagacgcaaaaccccttggttcagctc

SEQ ID NO: 418256 - DNA, 59 bp, Artificial
  Synthetic oligonucleotide
ggaagacctgagacccgatcatttggtacttgcctgcactggagcggagttcggttcta

SEQ ID NO: 418257 - DNA, 54 bp, Artificial
  Synthetic oligonucleotide
ggaagacgaacgcttgggttaactcggcgtacgtcagcaactttcctgcgttgg

SEQ ID NO: 418258 - DNA, 55 bp, Artificial
  Synthetic oligonucleotide
ggaagacgactgacgtaattcagaaaccaatagcaaacggagatgattggggtgg

SEQ ID NO: 418259 - DNA, 60 bp, Artificial
  Synthetic oligonucleotide
ggaagacgaggaggttacagagccatggaagtgtcagcgcattgtcgaagaagtgactca

SEQ ID NO: 418260 - DNA, 54 bp, Artificial
  Synthetic oligonucleotide
ggaagacgataggagaagaactgtaccctacgttaccaagtcacttgctacagt

SEQ ID NO: 418261 - DNA, 60 bp, Artificial
  Synthetic oligonucleotide
ggaagacgcaactgctggtctcactcatttaatgatttggcattccaacctgaatgatgc

SEQ ID NO: 418262 - DNA, 55 bp, Artificial
  Synthetic oligonucleotide
ggaagacgctagctggtgacccctggataaagacacttacagctaaataccccgg

SEQ ID NO: 418263 - DNA, 57 bp, Artificial
  Synthetic oligonucleotide
ggaagacggtggccatttgctgcgccaccggagtgtttggtactgcctaccttgtcc

SEQ ID NO: 418264 - DNA, 54 bp, Artificial
  Synthetic oligonucleotide
ggaagacggtggccatttgttgtgctaccggagtgtttggcactgcgtacctcg

SEQ ID NO: 418265 - DNA, 60 bp, Artificial
  Synthetic oligonucleotide
ggaagacgtcaaacctaagacagatctgattaatagcatggtcagttacaatatcccggc

SEQ ID NO: 418266 - DNA, 60 bp, Artificial
  Synthetic oligonucleotide
ggaagacgtgcttcaacaagcgaggcgccaccgggtaggagtgtatctctggaagactca

SEQ ID NO: 418267 - DNA, 60 bp, Artificial
  Synthetic oligonucleotide
ggaagactaccggtgggcagacaattgcccaggaagctgatcctttgcaacataggatca

SEQ ID NO: 418268 - DNA, 53 bp, Artificial
  Synthetic oligonucleotide
ggaagactcacatagacccgacaaaggaacttctgacggttcctccccctgaa

SEQ ID NO: 418269 - DNA, 60 bp, Artificial
  Synthetic oligonucleotide
ggaagactctagtactgccattcaacagattagctgagcaaacgaaaccgtcagccgtcg

SEQ ID NO: 418270 - DNA, 58 bp, Artificial
  Synthetic oligonucleotide
ggaagactttgtaaccccatgaatccgtttgtcagccacaaagagatagagtctgtaa

SEQ ID NO: 418271 - DNA, 55 bp, Artificial
  Synthetic oligonucleotide
ggaagagaaactccagaaactgctttactcagagggtgagaagattcgaagacgt

SEQ ID NO: 418272 - DNA, 55 bp, Artificial
  Synthetic oligonucleotide
ggaagagacgaacaatcgatagtcgaagcaatggttgtagcaatggtattctcac

SEQ ID NO: 418273 - DNA, 55 bp, Artificial
  Synthetic oligonucleotide
ggaagagacttgtgcccaataaagggatgggcacctttgagtaaggacaacggaa

SEQ ID NO: 418274 - DNA, 57 bp, Artificial
  Synthetic oligonucleotide
ggaagagatcaacagacctgggtcaatgcggaattctgggaatattgacgggtcccc

SEQ ID NO: 418275 - DNA, 58 bp, Artificial
  Synthetic oligonucleotide
ggaagagatgctctcccctctgaagcaggaaccgagggacaaggaactatatcctcct

SEQ ID NO: 418276 - DNA, 55 bp, Artificial
  Synthetic oligonucleotide
ggaagagcaatggcagatagagggctattgagagacatcaaagccaagacggcct

SEQ ID NO: 418277 - DNA, 55 bp, Artificial
  Synthetic oligonucleotide
ggaagagcagcgtaagagatgtccgatcatccgtcgcagttgttagacgccgtcc

SEQ ID NO: 418278 - DNA, 60 bp, Artificial
  Synthetic oligonucleotide
ggaagagcatgtaacaggatatgccacttctgcccctaggatccccaacactgcttgggt

SEQ ID NO: 418279 - DNA, 59 bp, Artificial
  Synthetic oligonucleotide
ggaagagccaattccagctgaaggggtatatcatggtgtaactaagcctaagcaagtga

SEQ ID NO: 418280 - DNA, 58 bp, Artificial
  Synthetic oligonucleotide
ggaagagcgaggtgtgcactggcgaccacatattctgtcagaagtacacttgttccac

SEQ ID NO: 418281 - DNA, 60 bp, Artificial
  Synthetic oligonucleotide
ggaagagcggacatacgcacatggattatggcccactactttaataaagaagtgtatgac

SEQ ID NO: 418282 - DNA, 53 bp, Artificial
  Synthetic oligonucleotide
ggaagagcgtttacgacgaaatttttgatccgtttcgtcgtatcggaataata

SEQ ID NO: 418283 - DNA, 60 bp, Artificial
  Synthetic oligonucleotide
ggaagagctgtctacatgcagtgaacgacttccagtcttagcagattgtttcctcgtgtt

SEQ ID NO: 418284 - DNA, 55 bp, Artificial
  Synthetic oligonucleotide
ggaagaggaattaggaacatcccaaggagaattagacagggctttgaacgagctt

SEQ ID NO: 418285 - DNA, 56 bp, Artificial
  Synthetic oligonucleotide
ggaagaggaccatttcacggccaaatagtagtacagaatggccattaactaaaaca

SEQ ID NO: 418286 - DNA, 55 bp, Artificial
  Synthetic oligonucleotide
ggaagaggagcgaaaaggcactcgaatggttactgatggctggacaaggagcgtt

SEQ ID NO: 418287 - DNA, 55 bp, Artificial
  Synthetic oligonucleotide
ggaagaggccatggagcaaggcatttctaactacattgagtctcttggagcagca

SEQ ID NO: 418288 - DNA, 59 bp, Artificial
  Synthetic oligonucleotide
ggaagaggtgtttgggtgtttaagatcgaagaatctgcaatttgtgcactggaacttgc

SEQ ID NO: 418289 - DNA, 55 bp, Artificial
  Synthetic oligonucleotide
ggaagaggttcccattccggagctgcccttgtggttggccccagcatggatggtg

SEQ ID NO: 418290 - DNA, 52 bp, Artificial
  Synthetic oligonucleotide
ggaagagtaatagcttttaaacctgtcaagaatccggaacctaaaggatacg

SEQ ID NO: 418291 - DNA, 55 bp, Artificial
  Synthetic oligonucleotide
ggaagagtacttcaaactgtttggtattcaagctagtattatatgggatggggag

SEQ ID NO: 418292 - DNA, 55 bp, Artificial
  Synthetic oligonucleotide
ggaagagtatagacacaagcggttgaccgaaggtgccaacgagtacgctgagcag

SEQ ID NO: 418293 - DNA, 56 bp, Artificial
  Synthetic oligonucleotide
ggaagagtatatcctatgggaatccctgagtccccctcgtgtccagcccatccccg

SEQ ID NO: 418294 - DNA, 54 bp, Artificial
  Synthetic oligonucleotide
ggaagagtatatcctatgggaatccctggtttcccctcacgtccagcccctccc

SEQ ID NO: 418295 - DNA, 52 bp, Artificial
  Synthetic oligonucleotide
ggaagagtcctcaacaccttcgaggatcaacaactggtggctcaacttcaag

SEQ ID NO: 418296 - DNA, 57 bp, Artificial
  Synthetic oligonucleotide
ggaagagtcgataatcagattaggaagggaaccaatatatcaaataccctgttccaa

SEQ ID NO: 418297 - DNA, 60 bp, Artificial
  Synthetic oligonucleotide
ggaagagtcgcactgaaagcgcggagtgagtgcgcagtgcgcgaacacaccaatatggcg

SEQ ID NO: 418298 - DNA, 59 bp, Artificial
  Synthetic oligonucleotide
ggaagagtctcccacgactcgacgtcgccacctgcaggggtatctccaattgaaaggca

SEQ ID NO: 418299 - DNA, 55 bp, Artificial
  Synthetic oligonucleotide
ggaagagtgatcttgatgtcactggtacctcaagtcttgaaacaacagtattcct

SEQ ID NO: 418300 - DNA, 52 bp, Artificial
  Synthetic oligonucleotide
ggaagagtgttcatgttacacagatatagacatctactgtgtttgcagagac

SEQ ID NO: 418301 - DNA, 58 bp, Artificial
  Synthetic oligonucleotide
ggaagagtttaatgatgatatgaatgcggtagaggaactttgtatgaagtttggaaag

SEQ ID NO: 418302 - DNA, 53 bp, Artificial
  Synthetic oligonucleotide
ggaagagttttcatataccacgagatcataagaggttgataaaacatcaagac

SEQ ID NO: 418303 - DNA, 54 bp, Artificial
  Synthetic oligonucleotide
ggaagataaacgtaccgttgcaggtttccatctcgttggcccgtgggaacagac

SEQ ID NO: 418304 - DNA, 60 bp, Artificial
  Synthetic oligonucleotide
ggaagataatctgcgtgcagctggcatagcttttgggaccacaacacccacgcaaaccat

SEQ ID NO: 418305 - DNA, 58 bp, Artificial
  Synthetic oligonucleotide
ggaagatacacaccaggcataataccaccagtaaatgttgacaaaccgataccattag

SEQ ID NO: 418306 - DNA, 58 bp, Artificial
  Synthetic oligonucleotide
ggaagatacacaccaggcataataccaccagtgaacgtcgacagaccaataccgttag

SEQ ID NO: 418307 - DNA, 60 bp, Artificial
  Synthetic oligonucleotide
ggaagatacacaccattgtcagaagaaggacgaacttcagctcgtgcatcaacctcaacc

SEQ ID NO: 418308 - DNA, 55 bp, Artificial
  Synthetic oligonucleotide
ggaagatacacgccaggtataataccgctagtaaacgttgacaaaccaataccat

SEQ ID NO: 418309 - DNA, 60 bp, Artificial
  Synthetic oligonucleotide
ggaagatacatttgggactctgtaacttcagaagctagaggacaaataggccatgcctca

SEQ ID NO: 418310 - DNA, 55 bp, Artificial
  Synthetic oligonucleotide
ggaagatacgtagcgtgagcgctggacgcgcgctatatatccctccatatgagct

SEQ ID NO: 418311 - DNA, 55 bp, Artificial
  Synthetic oligonucleotide
ggaagatagtggccatgcatataggaggggatggcctaaatggctacggtgccat

SEQ ID NO: 418312 - DNA, 50 bp, Artificial
  Synthetic oligonucleotide
ggaagatagtgggaattccacctttaatttgaacgggtttcccgtatttc

SEQ ID NO: 418313 - DNA, 53 bp, Artificial
  Synthetic oligonucleotide
ggaagatagtgggaattccacctttaatttgaactggcttcccgtacttacag

SEQ ID NO: 418314 - DNA, 58 bp, Artificial
  Synthetic oligonucleotide
ggaagatatacaccaggtataataccaccagtgaatgtcgataaaccgataccattag

SEQ ID NO: 418315 - DNA, 60 bp, Artificial
  Synthetic oligonucleotide
ggaagatcacgacagtgctctatcatctgtgagtacctttagaattgcagggaaattaag

SEQ ID NO: 418316 - DNA, 60 bp, Artificial
  Synthetic oligonucleotide
ggaagatcagtcaaaactaccctatagtgcaaaatcatcaaggacaaatggtacatcagc

SEQ ID NO: 418317 - DNA, 60 bp, Artificial
  Synthetic oligonucleotide
ggaagatcagtcactcatgcacgcacccatttcaccacgaccctcctgtgataggccggg

SEQ ID NO: 418318 - DNA, 60 bp, Artificial
  Synthetic oligonucleotide
ggaagatcatatggcactggttcggaagtgtgcagcccaacttgataatagtaacactat

SEQ ID NO: 418319 - DNA, 55 bp, Artificial
  Synthetic oligonucleotide
ggaagatcatggacagagtcaaagttctggactctcttgaattagaagatgggtt

SEQ ID NO: 418320 - DNA, 55 bp, Artificial
  Synthetic oligonucleotide
ggaagatccagcatccagggatctagtaagtttaaagatcaggcaactattgtgg

SEQ ID NO: 418321 - DNA, 55 bp, Artificial
  Synthetic oligonucleotide
ggaagatcccatttaaggaatgacaccgacgtggtaaactttgtaagcatggagt

SEQ ID NO: 418322 - DNA, 60 bp, Artificial
  Synthetic oligonucleotide
ggaagatcccatttgaggaacgatactgatgtagtgaattttgtgagcatggaattttcc

SEQ ID NO: 418323 - DNA, 55 bp, Artificial
  Synthetic oligonucleotide
ggaagatcttcacgttatcgccgcttgtatgcttgctttgactgtgctctcaggg

SEQ ID NO: 418324 - DNA, 55 bp, Artificial
  Synthetic oligonucleotide
ggaagatcttgtggaaaccaagttgtttcctctccctgtagttcacttgaagttg

SEQ ID NO: 418325 - DNA, 53 bp, Artificial
  Synthetic oligonucleotide
ggaagatgaagcggtgcggagtgcaactgcttgaggattaccgcaaaaatggg

SEQ ID NO: 418326 - DNA, 55 bp, Artificial
  Synthetic oligonucleotide
ggaagatgagtaagacattgatgactcagctaggcttccataggaatttatgcta

SEQ ID NO: 418327 - DNA, 60 bp, Artificial
  Synthetic oligonucleotide
ggaagatgcaatgcagggccattatgtaatttatgatactggaattgatagcagtgctga

SEQ ID NO: 418328 - DNA, 58 bp, Artificial
  Synthetic oligonucleotide
ggaagatgcccgatgctggtagttcacataacttagtaggtttgtcccggcataagaa

SEQ ID NO: 418329 - DNA, 55 bp, Artificial
  Synthetic oligonucleotide
ggaagatgcccggaacttctcgcgcaacatatatatgcgaaatgttgagcaggag

SEQ ID NO: 418330 - DNA, 60 bp, Artificial
  Synthetic oligonucleotide
ggaagatggccagtaaaagcaatacatacagacaatggcagcaatttcactagcactaca

SEQ ID NO: 418331 - DNA, 58 bp, Artificial
  Synthetic oligonucleotide
ggaagatgggtttctagatgtatggacatataatgccgaacttctggttttaatggaa

SEQ ID NO: 418332 - DNA, 55 bp, Artificial
  Synthetic oligonucleotide
ggaagatggtactcccgaacgatgtctaaaactgaaagaatggggatggaactgt

SEQ ID NO: 418333 - DNA, 55 bp, Artificial
  Synthetic oligonucleotide
ggaagatggtttatgagacctgcacaagcggttacgcctgtcatatgcggaccgg

SEQ ID NO: 418334 - DNA, 58 bp, Artificial
  Synthetic oligonucleotide
ggaagattacttctactaggtaacaagatctacatatacacaagatctacaagttggc

SEQ ID NO: 418335 - DNA, 60 bp, Artificial
  Synthetic oligonucleotide
ggaagattggccaacgataaccaacaaccagggctctcagatttatattgcaccgagaca

SEQ ID NO: 418336 - DNA, 55 bp, Artificial
  Synthetic oligonucleotide
ggaagattggtgggttggacaagagatgcttgaaaatctatatgcagagatagtg

SEQ ID NO: 418337 - DNA, 55 bp, Artificial
  Synthetic oligonucleotide
ggaagattgtcaagttcaggtagcacttgtgcatttgcagtgctttcctcagatt

SEQ ID NO: 418338 - DNA, 53 bp, Artificial
  Synthetic oligonucleotide
ggaagattgttggaatcccgcctttaatttgacctggcttcccgtacttggtg

SEQ ID NO: 418339 - DNA, 50 bp, Artificial
  Synthetic oligonucleotide
ggaagcaaacactttgctgtaggagtggattcgaagggcgacaatatcat

SEQ ID NO: 418340 - DNA, 55 bp, Artificial
  Synthetic oligonucleotide
ggaagcaaagaacatggacccccccactccttacatatgttcaaagtttctatta

SEQ ID NO: 418341 - DNA, 59 bp, Artificial
  Synthetic oligonucleotide
ggaagcaaccagattgtgcaaagactgtcaccaaccagccaactttaaaaagtgctgcc

SEQ ID NO: 418342 - DNA, 60 bp, Artificial
  Synthetic oligonucleotide
ggaagcaaccggagatgcagagctcgtcagaagtagtgtggaagacagacgcgatcaaca

SEQ ID NO: 418343 - DNA, 60 bp, Artificial
  Synthetic oligonucleotide
ggaagcaactcaatgatgaatactttatgcgcaaacttccggctcaaggagaagactcat

SEQ ID NO: 418344 - DNA, 55 bp, Artificial
  Synthetic oligonucleotide
ggaagcaaggggtcaaaagaggattacatgaggtcaatgaaaagtggtcttctgc

SEQ ID NO: 418345 - DNA, 55 bp, Artificial
  Synthetic oligonucleotide
ggaagcaagttatccgagggagcatttatctatcctggagttggtctgatgacac

SEQ ID NO: 418346 - DNA, 60 bp, Artificial
  Synthetic oligonucleotide
ggaagcaatacaagagatagctgggatgaccgccgatgtgttggaggcggcgtcggaaga

SEQ ID NO: 418347 - DNA, 55 bp, Artificial
  Synthetic oligonucleotide
ggaagcaatagcaaagtcagccagaattatcctatagtgcaaaatgcacaagggc

SEQ ID NO: 418348 - DNA, 55 bp, Artificial
  Synthetic oligonucleotide
ggaagcaatcaacattgctctaatagctgtcagcctcattgctatcctaaaaggg

SEQ ID NO: 418349 - DNA, 57 bp, Artificial
  Synthetic oligonucleotide
ggaagcaatggctttccttgaagaatcccacccagggatctttgaaaactcatgtct

SEQ ID NO: 418350 - DNA, 55 bp, Artificial
  Synthetic oligonucleotide
ggaagcaattgcgcaggaaggtgttaagtatggactgacaataactcctgctgac

SEQ ID NO: 418351 - DNA, 60 bp, Artificial
  Synthetic oligonucleotide
ggaagcacactccccagaagatcaggtgcaactggtgttgcgatcaaaggaggtggaact

SEQ ID NO: 418352 - DNA, 52 bp, Artificial
  Synthetic oligonucleotide
ggaagcacatcggaacaaccccggcggactgtagctacccctgaggtagggg

SEQ ID NO: 418353 - DNA, 55 bp, Artificial
  Synthetic oligonucleotide
ggaagcactgattacctttctcgaccatgtgaagcctgaagtaatgctagcttct

SEQ ID NO: 418354 - DNA, 50 bp, Artificial
  Synthetic oligonucleotide
ggaagcagcaccccgagctagacatccgtattgtcttctcaagctcacgt

SEQ ID NO: 418355 - DNA, 57 bp, Artificial
  Synthetic oligonucleotide
ggaagcagtcaagaaattttctaaggaaatataacagcaataccactaacaggtatc

SEQ ID NO: 418356 - DNA, 60 bp, Artificial
  Synthetic oligonucleotide
ggaagcagtcagttaaagccgcatgcttaacgcacggctcaagcggtctcatcttcaaac

SEQ ID NO: 418357 - DNA, 55 bp, Artificial
  Synthetic oligonucleotide
ggaagcatattgtactgtgatggagcccagtaatcttgtgttatcaaaactcaga

SEQ ID NO: 418358 - DNA, 60 bp, Artificial
  Synthetic oligonucleotide
ggaagcatccccaatgacatgccctttcagaatgtaaacaagatcacttacggagcatgt

SEQ ID NO: 418359 - DNA, 60 bp, Artificial
  Synthetic oligonucleotide
ggaagcatggtaaacatatgtaccagcgcatctgtgccactgaagttctggaccccaata

SEQ ID NO: 418360 - DNA, 55 bp, Artificial
  Synthetic oligonucleotide
ggaagcatgtgggtacagtgaccgtgtgaggcaaatcactttaggtaactcgacc

SEQ ID NO: 418361 - DNA, 55 bp, Artificial
  Synthetic oligonucleotide
ggaagcattccattccgtgtgtctccctaagatattgggaggttacggactcggc

SEQ ID NO: 418362 - DNA, 59 bp, Artificial
  Synthetic oligonucleotide
ggaagcattcccaatgacaaaccctttcaaaatgtaaacaggatcacatatggggcatg

SEQ ID NO: 418363 - DNA, 57 bp, Artificial
  Synthetic oligonucleotide
ggaagccaacacggtgggatgtcgtctacctcccagaggttagcgcgacagttgcgg

SEQ ID NO: 418364 - DNA, 54 bp, Artificial
  Synthetic oligonucleotide
ggaagccaagtcacaagtgatggcagctaacataatgaacaaacactgggatcg

SEQ ID NO: 418365 - DNA, 53 bp, Artificial
  Synthetic oligonucleotide
ggaagccacacggttcctccttagacaatcctccttttctaattccacggaac

SEQ ID NO: 418366 - DNA, 55 bp, Artificial
  Synthetic oligonucleotide
ggaagccagagaggctatagtgtccctcacagaaaggctctacgtgggtggtccc

SEQ ID NO: 418367 - DNA, 52 bp, Artificial
  Synthetic oligonucleotide
ggaagccagggtcaaaagccaagttgtcccgtcgtgacttcatcaaatcaat

SEQ ID NO: 418368 - DNA, 55 bp, Artificial
  Synthetic oligonucleotide
ggaagccatggaggttgccagtcaggccaggcaaatggtgcaggcgatgaggacc

SEQ ID NO: 418369 - DNA, 53 bp, Artificial
  Synthetic oligonucleotide
ggaagcccaaacacttgtatgtgtccttgcctacagcacagtcaacaatgaag

SEQ ID NO: 418370 - DNA, 60 bp, Artificial
  Synthetic oligonucleotide
ggaagcccaagtatgcccttgtggaatggcatctgtagtgtatctggaagactgtgacct

SEQ ID NO: 418371 - DNA, 55 bp, Artificial
  Synthetic oligonucleotide
ggaagcccagaatctaccgcacgttaaggacgcatgacattccgagaggctgtga

SEQ ID NO: 418372 - DNA, 60 bp, Artificial
  Synthetic oligonucleotide
ggaagcccaggatctatcggactctgaggagtcctgatgtgcccagaggatgtgaaggcc

SEQ ID NO: 418373 - DNA, 55 bp, Artificial
  Synthetic oligonucleotide
ggaagccccagtggatctctggtatccagtgatcagcagatttataataggccct

SEQ ID NO: 418374 - DNA, 55 bp, Artificial
  Synthetic oligonucleotide
ggaagccctacccgggcccgacccagtcagccctccagccccgcagctccacaca

SEQ ID NO: 418375 - DNA, 55 bp, Artificial
  Synthetic oligonucleotide
ggaagccctagtaatacggctccgcaaacggcgtttcaaagtataatgccgtctc

SEQ ID NO: 418376 - DNA, 60 bp, Artificial
  Synthetic oligonucleotide
ggaagccctctccagtgatgggcatcatagtttcttgtaactctccagcccattatatct

SEQ ID NO: 418377 - DNA, 60 bp, Artificial
  Synthetic oligonucleotide
ggaagcctagtaccatcctggaatcttcgatgcgttgcgctcagcactcaaccccagagt

SEQ ID NO: 418378 - DNA, 60 bp, Artificial
  Synthetic oligonucleotide
ggaagcctagtgcgcccagttattgaagaacaccacttggctgaattgctgaaatgggct

SEQ ID NO: 418379 - DNA, 58 bp, Artificial
  Synthetic oligonucleotide
ggaagccttcattgaaccaagaccgagtgttttcaaatgctttgcaaccaaagttgca

SEQ ID NO: 418380 - DNA, 52 bp, Artificial
  Synthetic oligonucleotide
ggaagccttcggggtagggggtcactgcggtgcctttctcgtggggtggttg

SEQ ID NO: 418381 - DNA, 55 bp, Artificial
  Synthetic oligonucleotide
ggaagccttgaacatagctttggtggctgttagccttatagctgttatcaaaggc

SEQ ID NO: 418382 - DNA, 60 bp, Artificial
  Synthetic oligonucleotide
ggaagcgaagagatagcacaatgtctccagaataggtacggagtgagtattcctgtgtat

SEQ ID NO: 418383 - DNA, 55 bp, Artificial
  Synthetic oligonucleotide
ggaagcgacaagccagtcgtgacaggtcaagcacttctgtttccccggtcaaagt

SEQ ID NO: 418384 - DNA, 54 bp, Artificial
  Synthetic oligonucleotide
ggaagcgactcgtcctagtcccgcacgggttataggagagccggtctttgaccc

SEQ ID NO: 418385 - DNA, 55 bp, Artificial
  Synthetic oligonucleotide
ggaagcgattgaaataattcctgtggtcacgtcgcacgtgaggtggttgttacca

SEQ ID NO: 418386 - DNA, 55 bp, Artificial
  Synthetic oligonucleotide
ggaagcgcacagttcctaacgtccgatgacttccagtccccgtgtgccatgccac

SEQ ID NO: 418387 - DNA, 55 bp, Artificial
  Synthetic oligonucleotide
ggaagcgcacccgtgcacgtttaacggtgccggtcacacgtacatcacagccgac

SEQ ID NO: 418388 - DNA, 60 bp, Artificial
  Synthetic oligonucleotide
ggaagcggcatcatctgtaagattgacgtcagtaagatcagtgggcgccattacattgcc

SEQ ID NO: 418389 - DNA, 57 bp, Artificial
  Synthetic oligonucleotide
ggaagcggggacggccgtacattgatgaactttgcgaaacgatcaccagagcgtttc

SEQ ID NO: 418390 - DNA, 57 bp, Artificial
  Synthetic oligonucleotide
ggaagcgtacaatccttagttacgggagaatcctatggtgagagcgtcaaacaagcg

SEQ ID NO: 418391 - DNA, 60 bp, Artificial
  Synthetic oligonucleotide
ggaagcgtcatggagagtgagtcttctgacgatttccctgatatcgttaagatcctctca

SEQ ID NO: 418392 - DNA, 55 bp, Artificial
  Synthetic oligonucleotide
ggaagcgtgaagaggacccattacagctgtgatcgcacccacaagctgtgtcaga

SEQ ID NO: 418393 - DNA, 60 bp, Artificial
  Synthetic oligonucleotide
ggaagcgtggcgtgggtggtcgaagtcagcttttgcgtgcgctacaggaatggagccggc

SEQ ID NO: 418394 - DNA, 58 bp, Artificial
  Synthetic oligonucleotide
ggaagctaagaatatggaccccccaactccgtacatctgctcgaagtttctactcaca

SEQ ID NO: 418395 - DNA, 55 bp, Artificial
  Synthetic oligonucleotide
ggaagctacaacacctcctcatccaattctcggattcgagtgatggcagctttcc

SEQ ID NO: 418396 - DNA, 59 bp, Artificial
  Synthetic oligonucleotide
ggaagctaggctcctctcaacggaggatgcctgcagcttgacccccccccactcggctc

SEQ ID NO: 418397 - DNA, 56 bp, Artificial
  Synthetic oligonucleotide
ggaagctatccagttaaaaggtgctttaatccagtcccataagctagaaatagaag

SEQ ID NO: 418398 - DNA, 55 bp, Artificial
  Synthetic oligonucleotide
ggaagctattggaagtctctgtcaagagttagaatttcgaggggagtcatttgtg

SEQ ID NO: 418399 - DNA, 60 bp, Artificial
  Synthetic oligonucleotide
ggaagctccggaggctcgatctgtccgtggggctcagcgatgtacttgggccatctatct

SEQ ID NO: 418400 - DNA, 52 bp, Artificial
  Synthetic oligonucleotide
ggaagctctaaaggttgatctcacaccacatgtaccaacactcttatgccaa

SEQ ID NO: 418401 - DNA, 55 bp, Artificial
  Synthetic oligonucleotide
ggaagctctgaggcaagttctcagggaatcaggcggaattgagaaggagacaata

SEQ ID NO: 418402 - DNA, 54 bp, Artificial
  Synthetic oligonucleotide
ggaagctgcgcggcctcgtaaatcgacgccagagcgaacgaaacctgtgggaga

SEQ ID NO: 418403 - DNA, 55 bp, Artificial
  Synthetic oligonucleotide
ggaagctgctaacattgtggtgggttatggtaaatggccagaacatctgaagcca

SEQ ID NO: 418404 - DNA, 60 bp, Artificial
  Synthetic oligonucleotide
ggaagctgtagaatgggatagattgcacccagtgcctgcagggcctaatccaccaggcca

SEQ ID NO: 418405 - DNA, 55 bp, Artificial
  Synthetic oligonucleotide
ggaagctgtcagagcgcagtgggtagacaggattctctcaagggaagttagggaa

SEQ ID NO: 418406 - DNA, 55 bp, Artificial
  Synthetic oligonucleotide
ggaagctgtttgcaaaatgggctattacctacactgacacagtacaactgagaag

SEQ ID NO: 418407 - DNA, 60 bp, Artificial
  Synthetic oligonucleotide
ggaagcttcactgcacagagtccttggatcttggacgggagattcggttaactatgcagc

SEQ ID NO: 418408 - DNA, 60 bp, Artificial
  Synthetic oligonucleotide
ggaaggaaactgaaggactatctcagtcaaatcatgcgatagctggtattcatctctatg

SEQ ID NO: 418409 - DNA, 55 bp, Artificial
  Synthetic oligonucleotide
ggaaggaaagggctgtggaatggttcacttaaagctgagttaaggccacttgaga

SEQ ID NO: 418410 - DNA, 60 bp, Artificial
  Synthetic oligonucleotide
ggaaggaaagtgcatgactgggcagccagccagtggcactgggcagccagccagtggcag

SEQ ID NO: 418411 - DNA, 58 bp, Artificial
  Synthetic oligonucleotide
ggaaggaaagttgcctatcaatccactcagcaactccttgttgcggtaccacaacaag

SEQ ID NO: 418412 - DNA, 55 bp, Artificial
  Synthetic oligonucleotide
ggaaggaatggcttgagcatgggctattgcctaaggtgaagaaaggcttagccaa

SEQ ID NO: 418413 - DNA, 53 bp, Artificial
  Synthetic oligonucleotide
ggaaggaatgttgggaccaaattcacagcagtcaatgaatacttcgcagttag

SEQ ID NO: 418414 - DNA, 50 bp, Artificial
  Synthetic oligonucleotide
ggaaggacataggcttccgcgttaatgcaaacacagcggccctaagcaac

SEQ ID NO: 418415 - DNA, 56 bp, Artificial
  Synthetic oligonucleotide
ggaaggacattggggaatgggagcactcggccggcttttcaagctgggaggaggtc

SEQ ID NO: 418416 - DNA, 52 bp, Artificial
  Synthetic oligonucleotide
ggaaggaccttacgagggaccggtgaagaaacctgtcgctttgaaagtgaaa

SEQ ID NO: 418417 - DNA, 55 bp, Artificial
  Synthetic oligonucleotide
ggaaggacgattctcccatacaccttaacaggcttttaatagctgttttacctgc

SEQ ID NO: 418418 - DNA, 55 bp, Artificial
  Synthetic oligonucleotide
ggaaggactcaatcattacaggaatggtcttccctgttgaagctaggaaggcaca

SEQ ID NO: 418419 - DNA, 60 bp, Artificial
  Synthetic oligonucleotide
ggaaggacttcggtccgtgtacttctagcacaatgagctacttctagcacaagatgctag

SEQ ID NO: 418420 - DNA, 60 bp, Artificial
  Synthetic oligonucleotide
ggaaggagagctcacattcagaatagcagctcgtttgtctggagacatcagtttcacagg

SEQ ID NO: 418421 - DNA, 55 bp, Artificial
  Synthetic oligonucleotide
ggaaggaggcctccatcacgcgttggcaggagccatcgtggtggagtactcaagc

SEQ ID NO: 418422 - DNA, 55 bp, Artificial
  Synthetic oligonucleotide
ggaaggagggaaaatgaagatgttggctactgagctgattacttcgaacggaggc

SEQ ID NO: 418423 - DNA, 55 bp, Artificial
  Synthetic oligonucleotide
ggaaggagggatgtgttcaggatctccatgtaccactgtggtcaattctattgtg

SEQ ID NO: 418424 - DNA, 55 bp, Artificial
  Synthetic oligonucleotide
ggaaggaggtggtgaagtttcttaggcatcaggggcttgagtttatagagttctt

SEQ ID NO: 418425 - DNA, 60 bp, Artificial
  Synthetic oligonucleotide
ggaaggagtgccggagtccatgagggaagagtatcggcagaagcagcagagtgctgtgga

SEQ ID NO: 418426 - DNA, 60 bp, Artificial
  Synthetic oligonucleotide
ggaaggatattgaagatgtgcaaggatatgttcggtcgcaagtacaaacgatgataacga

SEQ ID NO: 418427 - DNA, 55 bp, Artificial
  Synthetic oligonucleotide
ggaaggatttcgaaagggcttcacgccacttgaaatggaacttgcgcataagtgt

SEQ ID NO: 418428 - DNA, 55 bp, Artificial
  Synthetic oligonucleotide
ggaaggcaaagactttgtactggtcgagacactggaagaagtagccgaagcccgg

SEQ ID NO: 418429 - DNA, 51 bp, Artificial
  Synthetic oligonucleotide
ggaaggcaaagcgcctggctaattcagcgtagcccactcaggcgggctttt

SEQ ID NO: 418430 - DNA, 55 bp, Artificial
  Synthetic oligonucleotide
ggaaggcaacagacgggtcttacatggattggacgaactccttagttccgcatta

SEQ ID NO: 418431 - DNA, 55 bp, Artificial
  Synthetic oligonucleotide
ggaaggcaagagaatcggtctcgactaccttgggtctccatcgtggactagtggc

SEQ ID NO: 418432 - DNA, 60 bp, Artificial
  Synthetic oligonucleotide
ggaaggcagcctaccccgctgactccaccgttgagagacactcatcctcaggccatgcag

SEQ ID NO: 418433 - DNA, 56 bp, Artificial
  Synthetic oligonucleotide
ggaaggccacaggagactagggtatggtggacctcaaacagtatcgtcgtattttg

SEQ ID NO: 418434 - DNA, 55 bp, Artificial
  Synthetic oligonucleotide
ggaaggccatcacgtgcgcagttattacaaaatgtatcaggacggttttgcgctc

SEQ ID NO: 418435 - DNA, 55 bp, Artificial
  Synthetic oligonucleotide
ggaaggccgcttttgcgtataagctgcaacaggaggacaggaaagtttgcggtac

SEQ ID NO: 418436 - DNA, 56 bp, Artificial
  Synthetic oligonucleotide
ggaaggcgagagtcgttgagattctcccacccaactcattctaggaggttaagtta

SEQ ID NO: 418437 - DNA, 53 bp, Artificial
  Synthetic oligonucleotide
ggaaggcggagtctcgcaaaagacccgccccttccggggaaggctatataagc

SEQ ID NO: 418438 - DNA, 57 bp, Artificial
  Synthetic oligonucleotide
ggaaggcggcggaaaggttcgcggagagtgagattgggtccgcggcaattgatggac

SEQ ID NO: 418439 - DNA, 55 bp, Artificial
  Synthetic oligonucleotide
ggaaggcgtttcattcgatgaactagttgcattgagagaggagaatgccaaactg

SEQ ID NO: 418440 - DNA, 50 bp, Artificial
  Synthetic oligonucleotide
ggaaggctattcccctggaatacatccgtggcggtaggcacctcattttc

SEQ ID NO: 418441 - DNA, 51 bp, Artificial
  Synthetic oligonucleotide
ggaaggctgtccatcaagtgttcggtggagctttccgctcactgttcggag

SEQ ID NO: 418442 - DNA, 55 bp, Artificial
  Synthetic oligonucleotide
ggaagggaagatacagtggtgtaagggaccagaagcattcaaacagcaacttgac

SEQ ID NO: 418443 - DNA, 55 bp, Artificial
  Synthetic oligonucleotide
ggaagggagattaaaattctcgacgcacaagccctagtggaccaggctggtacca

SEQ ID NO: 418444 - DNA, 54 bp, Artificial
  Synthetic oligonucleotide
ggaagggagtgtttctggtcgtgacggatcctacgggcccaaactcgctggacc

SEQ ID NO: 418445 - DNA, 55 bp, Artificial
  Synthetic oligonucleotide
ggaagggatactcacccttatcgttccagacccgcctcccagcacagaggggaca

SEQ ID NO: 418446 - DNA, 55 bp, Artificial
  Synthetic oligonucleotide
ggaagggatcagaggcttctggaccaatgcaggcaggaatttgaggaaacgaaac

SEQ ID NO: 418447 - DNA, 55 bp, Artificial
  Synthetic oligonucleotide
ggaagggatcgggctaaaacgctttgcttacctctcgtcaatttcccaatgagca

SEQ ID NO: 418448 - DNA, 59 bp, Artificial
  Synthetic oligonucleotide
ggaagggatctccttccatctttcagagtagcatgacaaagatcttagaaccctttaga

SEQ ID NO: 418449 - DNA, 60 bp, Artificial
  Synthetic oligonucleotide
ggaagggatctgctatccaggatcgatagagaaccaagaggagttgagatcattgttctc

SEQ ID NO: 418450 - DNA, 55 bp, Artificial
  Synthetic oligonucleotide
ggaagggcacatagccaaaaattgcagagcccctagaaaaaagggctgttggaaa

SEQ ID NO: 418451 - DNA, 51 bp, Artificial
  Synthetic oligonucleotide
ggaagggcagtcccaggctcgagttcacgtctcattcgcgccgcattatcc

SEQ ID NO: 418452 - DNA, 55 bp, Artificial
  Synthetic oligonucleotide
ggaagggcatatagccagaaattgcagggcccctaagaaaaaaggctgttagaaa

SEQ ID NO: 418453 - DNA, 60 bp, Artificial
  Synthetic oligonucleotide
ggaaggggaggatgatttaaatgctgtgtgtgcactaaagcgaaagtttgccgcatgttc

SEQ ID NO: 418454 - DNA, 54 bp, Artificial
  Synthetic oligonucleotide
ggaaggggggagtatttccttggaagcatgacttccgaggaatgaaagtacctc

SEQ ID NO: 418455 - DNA, 55 bp, Artificial
  Synthetic oligonucleotide
ggaagggtgagtggatgacaacagaagacatgttgagtgtctggaaccgtgtgtg

SEQ ID NO: 418456 - DNA, 60 bp, Artificial
  Synthetic oligonucleotide
ggaagggtggtatttgattgtcttgggagtctgctctacattgacactggcaatgcctag

SEQ ID NO: 418457 - DNA, 54 bp, Artificial
  Synthetic oligonucleotide
ggaagggttcgtatcgttgcctgaattaccaaaacctcacaaaatgttgtctaa

SEQ ID NO: 418458 - DNA, 54 bp, Artificial
  Synthetic oligonucleotide
ggaagggttgcttatgtctccctcagacttatattccccggggtcctgggatcc

SEQ ID NO: 418459 - DNA, 57 bp, Artificial
  Synthetic oligonucleotide
ggaagggtttttggcacgtcgctgcactgctaaaaaggataggcgagaggaatcctc

SEQ ID NO: 418460 - DNA, 60 bp, Artificial
  Synthetic oligonucleotide
ggaaggtaagctaattgatgcatgttcgcgtgtcaactcaagaaattcgggactcgaaca

SEQ ID NO: 418461 - DNA, 60 bp, Artificial
  Synthetic oligonucleotide
ggaaggtcaacaatcatgtggtgtacaatcaccaggaagctgggaagtacgagaaccaca

SEQ ID NO: 418462 - DNA, 53 bp, Artificial
  Synthetic oligonucleotide
ggaaggtcatgtgcatctctgacgtcacccgtggcaacggtatagcacaccgt

SEQ ID NO: 418463 - DNA, 58 bp, Artificial
  Synthetic oligonucleotide
ggaaggtcatgtgtattagtgatgtgactcgtggtacggggttaacacatagagttgg

SEQ ID NO: 418464 - DNA, 55 bp, Artificial
  Synthetic oligonucleotide
ggaaggtcccatttgagaaatgatactgacgtggtgaactttgtgagtatggaat

SEQ ID NO: 418465 - DNA, 58 bp, Artificial
  Synthetic oligonucleotide
ggaaggtcgactcgagaaaagctttaaagagcacacggcctggctcgttgccagagct

SEQ ID NO: 418466 - DNA, 58 bp, Artificial
  Synthetic oligonucleotide
ggaaggtctcaaatactataaagctatcaacgtaagtagtgatggtggtgtagaaaca

SEQ ID NO: 418467 - DNA, 50 bp, Artificial
  Synthetic oligonucleotide
ggaaggtctcttaggagcaactttaaaaagatcagatggaagatcaacga

SEQ ID NO: 418468 - DNA, 60 bp, Artificial
  Synthetic oligonucleotide
ggaaggtgatgcccggcagactcaattcccgagaactttcgactcaagatcgagcttgga

SEQ ID NO: 418469 - DNA, 59 bp, Artificial
  Synthetic oligonucleotide
ggaaggtgcttcctgatgtccgacttgagatacaagtacgaccaattcgcctattacgc

SEQ ID NO: 418470 - DNA, 55 bp, Artificial
  Synthetic oligonucleotide
ggaaggtggcagcagcggaatatgcggaggtgacacgacatggttcctatgctta

SEQ ID NO: 418471 - DNA, 52 bp, Artificial
  Synthetic oligonucleotide
ggaaggttacaaacaaacacccccgaggcaaggccagggcttaagcgggtca

SEQ ID NO: 418472 - DNA, 54 bp, Artificial
  Synthetic oligonucleotide
ggaaggttagaaaacacttgtgaattcccagagctttccgtaggttgtagttga

SEQ ID NO: 418473 - DNA, 55 bp, Artificial
  Synthetic oligonucleotide
ggaaggttagaaaacatttgtgtatccccaacgctttcctcaggttgtgattgaa

SEQ ID NO: 418474 - DNA, 60 bp, Artificial
  Synthetic oligonucleotide
ggaaggttcaagccagggatgtccggaatacatgccatgttgttggattcgagatgagag

SEQ ID NO: 418475 - DNA, 57 bp, Artificial
  Synthetic oligonucleotide
ggaaggtttaacgactatctacaatgtagagtacatttggatataagcaccaaatgg

SEQ ID NO: 418476 - DNA, 51 bp, Artificial
  Synthetic oligonucleotide
ggaaggtttactcagtggcgaagtttgcctggcgtggactaccagtggcga

SEQ ID NO: 418477 - DNA, 55 bp, Artificial
  Synthetic oligonucleotide
ggaaggtttgagatggctgttcacgtggaaagcgtaaatgatttggctaagacaa

SEQ ID NO: 418478 - DNA, 58 bp, Artificial
  Synthetic oligonucleotide
ggaagtaaagaatcttcaaagactaagcggagccatggatgaactccacaacgaaata

SEQ ID NO: 418479 - DNA, 55 bp, Artificial
  Synthetic oligonucleotide
ggaagtaactctgcatcaggaacagaagggcgagggactgtatcctcccttagcc

SEQ ID NO: 418480 - DNA, 54 bp, Artificial
  Synthetic oligonucleotide
ggaagtaatagttctcgcagctttaagttgttcagcactcttgggtctttcata

SEQ ID NO: 418481 - DNA, 55 bp, Artificial
  Synthetic oligonucleotide
ggaagtacacccccctgtggtaggcgtcttagatgcccccccgagccacattgga

SEQ ID NO: 418482 - DNA, 54 bp, Artificial
  Synthetic oligonucleotide
ggaagtacctgttcgcccacgtgggtaagtgcccgtccgttcatcggccttcca

SEQ ID NO: 418483 - DNA, 60 bp, Artificial
  Synthetic oligonucleotide
ggaagtagaagcgcttggagctagactgctacttgaattgttggcgcgcgttaagactga

SEQ ID NO: 418484 - DNA, 57 bp, Artificial
  Synthetic oligonucleotide
ggaagtagcgagacacctcccgggatataacaggtggattacccttgaggacatcag

SEQ ID NO: 418485 - DNA, 60 bp, Artificial
  Synthetic oligonucleotide
ggaagtatcccattgcagagccactgaatacataatgaagggagtgtacataaacacagc

SEQ ID NO: 418486 - DNA, 60 bp, Artificial
  Synthetic oligonucleotide
ggaagtatgcaaaaatgaaagctacccacactaatgatgtgagacagttaacagaggcag

SEQ ID NO: 418487 - DNA, 54 bp, Artificial
  Synthetic oligonucleotide
ggaagtattacgaatgaaaggtgttccgaaatgggttgtagaggaacaactaga

SEQ ID NO: 418488 - DNA, 56 bp, Artificial
  Synthetic oligonucleotide
ggaagtatttcgactcggttctcggtacaggaacgtacacactctgatggcgtaca

SEQ ID NO: 418489 - DNA, 58 bp, Artificial
  Synthetic oligonucleotide
ggaagtatttgcatagtagaataaagcagattagctttttaaacccatgtccattgga

SEQ ID NO: 418490 - DNA, 56 bp, Artificial
  Synthetic oligonucleotide
ggaagtcaggggttccgtatatcactttgcataaggtggaaaaagacatacagcct

SEQ ID NO: 418491 - DNA, 59 bp, Artificial
  Synthetic oligonucleotide
ggaagtcctcgtgctatggggcattcaccacccatctaccagtgccgaccaacgaagtc

SEQ ID NO: 418492 - DNA, 60 bp, Artificial
  Synthetic oligonucleotide
ggaagtccttgtgctatggggcattcaccatccacctaccagtactgatcaacaaagtct

SEQ ID NO: 418493 - DNA, 56 bp, Artificial
  Synthetic oligonucleotide
ggaagtctattgggctatatattttgagttttgcactaccaattatccttaaggcc

SEQ ID NO: 418494 - DNA, 55 bp, Artificial
  Synthetic oligonucleotide
ggaagtctctagcaacaggcatcatcgcccgtgcgatagctgataaatatcactc

SEQ ID NO: 418495 - DNA, 60 bp, Artificial
  Synthetic oligonucleotide
ggaagtctgcttgaagtgggagctaatggatgtagattatcggggaagattgtgtaatcc

SEQ ID NO: 418496 - DNA, 57 bp, Artificial
  Synthetic oligonucleotide
ggaagtctggggctgaggctgctttaatgttaggcgcctttaagaaatataccgcta

SEQ ID NO: 418497 - DNA, 55 bp, Artificial
  Synthetic oligonucleotide
ggaagtcttgcgcagtattggggtcgggaactaacaaagagtgctattagtctgt

SEQ ID NO: 418498 - DNA, 55 bp, Artificial
  Synthetic oligonucleotide
ggaagtcttggttgtacctaacacacaaccaagtggaccaattcacactactaaa

SEQ ID NO: 418499 - DNA, 59 bp, Artificial
  Synthetic oligonucleotide
ggaagtctttaatgcaactttggagagacgttatgctgagtataaacgtgtggtggcga

SEQ ID NO: 418500 - DNA, 55 bp, Artificial
  Synthetic oligonucleotide
ggaagtgaaatttgtatccagtgacgcgatgaccagaaaactcgaacagaccgcc

SEQ ID NO: 418501 - DNA, 52 bp, Artificial
  Synthetic oligonucleotide
ggaagtgagggttcccgacgtgggaaattctgttattttgcaggatttttac

SEQ ID NO: 418502 - DNA, 55 bp, Artificial
  Synthetic oligonucleotide
ggaagtgatctcgataataagacatactgttctaaatctggcgaggtatggatgc

SEQ ID NO: 418503 - DNA, 55 bp, Artificial
  Synthetic oligonucleotide
ggaagtgcaaagaaggcctgtcccacatgtgcatgcaagagccatctcattgggc

SEQ ID NO: 418504 - DNA, 60 bp, Artificial
  Synthetic oligonucleotide
ggaagtgcacacaggcagccagatagaagagcacacagggaccacgcgggtgttagaact

SEQ ID NO: 418505 - DNA, 56 bp, Artificial
  Synthetic oligonucleotide
ggaagtgcagaagcgactatcactttttccaaagttaaatttctcaggaacttcat

SEQ ID NO: 418506 - DNA, 51 bp, Artificial
  Synthetic oligonucleotide
ggaagtgcagcatcgctggatggatcttagggaacccagaatgcgaatcac

SEQ ID NO: 418507 - DNA, 59 bp, Artificial
  Synthetic oligonucleotide
ggaagtgcatgtgggtgctcaggtaattgtttgtcctacatctatgtttagtaacgaaa

SEQ ID NO: 418508 - DNA, 56 bp, Artificial
  Synthetic oligonucleotide
ggaagtgcgataggctgtttaggatttggttctaggtgtatcaaataggggttgag

SEQ ID NO: 418509 - DNA, 55 bp, Artificial
  Synthetic oligonucleotide
ggaagtggaatctagtacttacaaaatgcagttgttggcacaggccctaaggccc

SEQ ID NO: 418510 - DNA, 58 bp, Artificial
  Synthetic oligonucleotide
ggaagtggcatcaacttttcacgttagatgctgagaaattcgacgcggctaaatggtt

SEQ ID NO: 418511 - DNA, 59 bp, Artificial
  Synthetic oligonucleotide
ggaagtggcatgcaactgtgaccggaggaacatacgcatgtagggagcaagcattagtt

SEQ ID NO: 418512 - DNA, 56 bp, Artificial
  Synthetic oligonucleotide
ggaagtggctaataatggccgttttggtgtggccatgttttgccctaaggaatgta

SEQ ID NO: 418513 - DNA, 55 bp, Artificial
  Synthetic oligonucleotide
ggaagtggtgaacaaatcatgaatttgagatccttactaagaacgtttaggacca

SEQ ID NO: 418514 - DNA, 50 bp, Artificial
  Synthetic oligonucleotide
ggaagtggttcacccccctccactgacttgactttaataggaaagctaac

SEQ ID NO: 418515 - DNA, 54 bp, Artificial
  Synthetic oligonucleotide
ggaagtgtcgtcctgggtacacgtacacttcgttggatgttagaccgacaaaaa

SEQ ID NO: 418516 - DNA, 60 bp, Artificial
  Synthetic oligonucleotide
ggaagtgtctaggatggatatagaccatgataaggatggctacacaaaggtccaggttaa

SEQ ID NO: 418517 - DNA, 57 bp, Artificial
  Synthetic oligonucleotide
ggaagtgtctggccaattgattaaagacccctctgacgacaccctcccccatcacta

SEQ ID NO: 418518 - DNA, 57 bp, Artificial
  Synthetic oligonucleotide
ggaagtgtgcttactaatgttataggtatcttttgtatattattaattctaatagga

SEQ ID NO: 418519 - DNA, 55 bp, Artificial
  Synthetic oligonucleotide
ggaagtgtgtttcatgtattcagatttccacttcattgatgaacgaggtgaatcg

SEQ ID NO: 418520 - DNA, 53 bp, Artificial
  Synthetic oligonucleotide
ggaagttaactccactggtaggagtaatttcaatgttttggacgtcgacggta

SEQ ID NO: 418521 - DNA, 53 bp, Artificial
  Synthetic oligonucleotide
ggaagttacacgcctcccgcgtcatgggcctcctcatgcgggcatataacctg

SEQ ID NO: 418522 - DNA, 58 bp, Artificial
  Synthetic oligonucleotide
ggaagttcaggtaggctttgtggagatgcaacgctctcctcaggttgtggttgaaccg

SEQ ID NO: 418523 - DNA, 58 bp, Artificial
  Synthetic oligonucleotide
ggaagttccaaacagcggcacaacgagcaatgatggaccaggtgagggaaagccggaa

SEQ ID NO: 418524 - DNA, 53 bp, Artificial
  Synthetic oligonucleotide
ggaagttccatactattagaagggttgaccaagactgaatcaaactttaactt

SEQ ID NO: 418525 - DNA, 56 bp, Artificial
  Synthetic oligonucleotide
ggaagttcctgaaccaggtcaacgcgactgaggagtcgtggatcgcaccgtctgag

SEQ ID NO: 418526 - DNA, 55 bp, Artificial
  Synthetic oligonucleotide
ggaagttctcattgatctaacagatagtaagggtgatgcaacaccaatctttgag

SEQ ID NO: 418527 - DNA, 55 bp, Artificial
  Synthetic oligonucleotide
ggaagttctctacaaggagttcgatgagatggaagagtgctcccagcacttaccg

SEQ ID NO: 418528 - DNA, 55 bp, Artificial
  Synthetic oligonucleotide
ggaagttcttttcatatgacaccatcatgggccgctcgccgctactttccttagg

SEQ ID NO: 418529 - DNA, 55 bp, Artificial
  Synthetic oligonucleotide
ggaagttgatgaccaacgttatcgccttcaggaatcaggaaattacttactagaa

SEQ ID NO: 418530 - DNA, 55 bp, Artificial
  Synthetic oligonucleotide
ggaagttgtggactggttcagtagtaagattaaatcaatgttgagttttgtggag

SEQ ID NO: 418531 - DNA, 52 bp, Artificial
  Synthetic oligonucleotide
ggaagttgtggtttaaaaatggagtctgtggttttgtggtcggctagggaaa

SEQ ID NO: 418532 - DNA, 54 bp, Artificial
  Synthetic oligonucleotide
ggaagttgttcaacaaacaagggtggataaactaactcaaggtcgccagactta

SEQ ID NO: 418533 - DNA, 60 bp, Artificial
  Synthetic oligonucleotide
ggaagtttagagtgcacatcgaaacagctgtagcgacctcacagtagcagcggaaccccc

SEQ ID NO: 418534 - DNA, 52 bp, Artificial
  Synthetic oligonucleotide
ggaagtttagttaaagaataaggctgaacaaaactgggacaggggccaaaca

SEQ ID NO: 418535 - DNA, 57 bp, Artificial
  Synthetic oligonucleotide
ggaagtttatcctattgtgaatttgcaagcaggagggagaagttggaaggcggtaga

SEQ ID NO: 418536 - DNA, 60 bp, Artificial
  Synthetic oligonucleotide
ggaagtttcgttcaacatcctgagctaacaggactagactgtatgaggccttgcttctgg

SEQ ID NO: 418537 - DNA, 60 bp, Artificial
  Synthetic oligonucleotide
ggaagtttcttgcatctagtgacacaattgtcgcacgaattgtgttcccacctgaggcaa

SEQ ID NO: 418538 - DNA, 59 bp, Artificial
  Synthetic oligonucleotide
ggaagtttgacagccgcctagcatttacccatgtcgccagagagaaacatccggagttc

SEQ ID NO: 418539 - DNA, 55 bp, Artificial
  Synthetic oligonucleotide
ggaagtttggaagaggcagctgaacatgttagggaaacaagaatttgagaggtac

SEQ ID NO: 418540 - DNA, 56 bp, Artificial
  Synthetic oligonucleotide
ggaataaaaggtttagatgtattaggaggagtaatagactcaggttatagaggaga

SEQ ID NO: 418541 - DNA, 59 bp, Artificial
  Synthetic oligonucleotide
ggaataaacatctactcagaggggattcaaggcataacatttctgaacttgagtggttg

SEQ ID NO: 418542 - DNA, 59 bp, Artificial
  Synthetic oligonucleotide
ggaataaactcacactctgcgtctctgttgctaggaacctcattagcacccactcccgt

SEQ ID NO: 418543 - DNA, 53 bp, Artificial
  Synthetic oligonucleotide
ggaataaatctaccattagtaacctatgttaaagatgagctcagatccaaatc

SEQ ID NO: 418544 - DNA, 59 bp, Artificial
  Synthetic oligonucleotide
ggaataaatgcatcaaagacagagacattcagacctggaggaggagatatgagggacaa

SEQ ID NO: 418545 - DNA, 53 bp, Artificial
  Synthetic oligonucleotide
ggaataacacaaaactaaactccgggaaaattaaatggtacagtcctggcaca

SEQ ID NO: 418546 - DNA, 55 bp, Artificial
  Synthetic oligonucleotide
ggaataagctctgtctcgttctcgttttgcctcctttctgaaagtgttggtggac

SEQ ID NO: 418547 - DNA, 55 bp, Artificial
  Synthetic oligonucleotide
ggaataaggaagacttgtggtttatgtcccacaaaggagttttgatcgatggact

SEQ ID NO: 418548 - DNA, 55 bp, Artificial
  Synthetic oligonucleotide
ggaataagttgagtgtctgaatgggttagtgtttccttctcgtgagtgtaaagta

SEQ ID NO: 418549 - DNA, 55 bp, Artificial
  Synthetic oligonucleotide
ggaataatcaaacaactacctaaaggctgctcatacataactaaccaggacgcag

SEQ ID NO: 418550 - DNA, 55 bp, Artificial
  Synthetic oligonucleotide
ggaataatcactgggataactccccgtcgcctaacatgtacgggctgaataagga

SEQ ID NO: 418551 - DNA, 59 bp, Artificial
  Synthetic oligonucleotide
ggaatacaacatgtcaagtggaacccagcaattgaacctgtgaaagagttccgcttcaa

SEQ ID NO: 418552 - DNA, 58 bp, Artificial
  Synthetic oligonucleotide
ggaatacaatcatggcatcaaaaacagtgggaacatctgaagaaaaattacggaagaa

SEQ ID NO: 418553 - DNA, 60 bp, Artificial
  Synthetic oligonucleotide
ggaatacacattggaccaggttacagctatttcccttgactgcggatcaggtgtcacgga

SEQ ID NO: 418554 - DNA, 55 bp, Artificial
  Synthetic oligonucleotide
ggaatacacctggtattcctcccctagattgatatctagtaccggtgcttcctgc

SEQ ID NO: 418555 - DNA, 55 bp, Artificial
  Synthetic oligonucleotide
ggaataccgagccggagataaaattgagaccccgcgaatctgtgaaggtgtccac

SEQ ID NO: 418556 - DNA, 53 bp, Artificial
  Synthetic oligonucleotide
ggaataccgctgtatggaggggtttcagtttgcggacccttatttaccgccac

SEQ ID NO: 418557 - DNA, 56 bp, Artificial
  Synthetic oligonucleotide
ggaatacctgtggttgagaaattttactctaggttcacgttgtatgacgtgcctcg

SEQ ID NO: 418558 - DNA, 56 bp, Artificial
  Synthetic oligonucleotide
ggaatacgtcgcttacgaaagccaactgcatactaatgtcgtttcaaatcttcaac

SEQ ID NO: 418559 - DNA, 60 bp, Artificial
  Synthetic oligonucleotide
ggaatactattgacaagagatggtggtactaatactagtgacaatgagaccttcagacct

SEQ ID NO: 418560 - DNA, 55 bp, Artificial
  Synthetic oligonucleotide
ggaatacttaagtcctaccaccgttacaagatcacaagtatccgtgttgagttta

SEQ ID NO: 418561 - DNA, 60 bp, Artificial
  Synthetic oligonucleotide
ggaatagaattggtcagccaacccgccacaatagcattatcatcgcttctagtagaaatg

SEQ ID NO: 418562 - DNA, 55 bp, Artificial
  Synthetic oligonucleotide
ggaatagagaaatttcaagcgagcgagtactaccctgagagataccaaacgcacg

SEQ ID NO: 418563 - DNA, 55 bp, Artificial
  Synthetic oligonucleotide
ggaatagatgatagtgatgctatagaatgtattaaggattcggtggaccagattc

SEQ ID NO: 418564 - DNA, 51 bp, Artificial
  Synthetic oligonucleotide
ggaatagcagtttacaacaggtagctaaacagttaggcaaatactttagga

SEQ ID NO: 418565 - DNA, 60 bp, Artificial
  Synthetic oligonucleotide
ggaatagctctaactgagaaagcgaaattgaattcatatgcaccaatatcacttgagaaa

SEQ ID NO: 418566 - DNA, 59 bp, Artificial
  Synthetic oligonucleotide
ggaatagctttaactgaaaaagcgaaattgaattcgtatgcaccaatatcgctcgagaa

SEQ ID NO: 418567 - DNA, 59 bp, Artificial
  Synthetic oligonucleotide
ggaataggaactgttctccttaggttcttaggagcagcaggaagcactatgggcgcggc

SEQ ID NO: 418568 - DNA, 55 bp, Artificial
  Synthetic oligonucleotide
ggaataggagcattgatagcagcactaatcataacaatagttgtgtggatcatag

SEQ ID NO: 418569 - DNA, 55 bp, Artificial
  Synthetic oligonucleotide
ggaataggatgtacaactacaaatacggcgacatttgaagaagtggcagcgagcg

SEQ ID NO: 418570 - DNA, 59 bp, Artificial
  Synthetic oligonucleotide
ggaataggctgtactactacaaatacagcaacatttgaagaggtggctacaagtgaaaa

SEQ ID NO: 418571 - DNA, 57 bp, Artificial
  Synthetic oligonucleotide
ggaatagggttgtcacagccgctggcttgactccttctccggggaagaatttcgtca

SEQ ID NO: 418572 - DNA, 58 bp, Artificial
  Synthetic oligonucleotide
ggaataggtaacttagctttcaatgcagttattcatggtaaagttgaggatcataaag

SEQ ID NO: 418573 - DNA, 54 bp, Artificial
  Synthetic oligonucleotide
ggaataggtaccccgtaatgccaagggtaaatacaatacgaaggcacagaggac

SEQ ID NO: 418574 - DNA, 55 bp, Artificial
  Synthetic oligonucleotide
ggaataggtcaggaatgtgttagcattcctgtgcctgaatgaacggtttgcagcc

SEQ ID NO: 418575 - DNA, 59 bp, Artificial
  Synthetic oligonucleotide
ggaatagtaagtctggtgctacaaattggaaatataatctcaatatgggttagccattc

SEQ ID NO: 418576 - DNA, 55 bp, Artificial
  Synthetic oligonucleotide
ggaatagtactgaagattcaactaacgctgatggaaataacacaatcatactccc

SEQ ID NO: 418577 - DNA, 60 bp, Artificial
  Synthetic oligonucleotide
ggaatagtgctgttagtttgtttgataccatagctatagcagtagctgagggaacagata

SEQ ID NO: 418578 - DNA, 56 bp, Artificial
  Synthetic oligonucleotide
ggaatataacttgctggtacgtagaagatttttgacttttgttcgcttcattatgc

SEQ ID NO: 418579 - DNA, 51 bp, Artificial
  Synthetic oligonucleotide
ggaatataagggctgacatttaacggtgtagttaatataggaacagggtag

SEQ ID NO: 418580 - DNA, 55 bp, Artificial
  Synthetic oligonucleotide
ggaatatacagtgccatattcctttcagcaggcagactgtcaccagactttccag

SEQ ID NO: 418581 - DNA, 55 bp, Artificial
  Synthetic oligonucleotide
ggaatatcgcatggactcgtttgtcagagactaataaagatcttcatgtgcctga

SEQ ID NO: 418582 - DNA, 55 bp, Artificial
  Synthetic oligonucleotide
ggaatatctatggatgacatgtgatgaaggtccatcgagcagaaaataagagccc

SEQ ID NO: 418583 - DNA, 60 bp, Artificial
  Synthetic oligonucleotide
ggaatatgatgctgttgcgactacacactcatggattcctaagaggaaccgttccattct

SEQ ID NO: 418584 - DNA, 60 bp, Artificial
  Synthetic oligonucleotide
ggaatatgatgctgttgctaccacgcactcttggatccccaagaggaaccgctccattct

SEQ ID NO: 418585 - DNA, 60 bp, Artificial
  Synthetic oligonucleotide
ggaatatgatgctgttgctactacacactcctgggtccctaagaggaaccgctccatcct

SEQ ID NO: 418586 - DNA, 55 bp, Artificial
  Synthetic oligonucleotide
ggaatatgcagccgctggcttcacgctattccgaaggaatgaaggtttcccctgg

SEQ ID NO: 418587 - DNA, 54 bp, Artificial
  Synthetic oligonucleotide
ggaatatgccctgtggtgatgacggatggcccagctaataacagagcagagacg

SEQ ID NO: 418588 - DNA, 55 bp, Artificial
  Synthetic oligonucleotide
ggaatatgcggaaatcgggactaggtttgatgatgagccaactgacgagaagtta

SEQ ID NO: 418589 - DNA, 55 bp, Artificial
  Synthetic oligonucleotide
ggaatatggagtcccacacagcgcacacgtctggcgacgcgacgtctccagccaa

SEQ ID NO: 418590 - DNA, 55 bp, Artificial
  Synthetic oligonucleotide
ggaatatggcaattagactgcacacacttggaaggaaagatcatcctagtggcag

SEQ ID NO: 418591 - DNA, 59 bp, Artificial
  Synthetic oligonucleotide
ggaatatgtgcaagacaacactttaaagaatgctgtaatattgctacagataatggctc

SEQ ID NO: 418592 - DNA, 55 bp, Artificial
  Synthetic oligonucleotide
ggaatatgttttgcacaacaacagatacatgacctcatacgtaacatatccgtcg

SEQ ID NO: 418593 - DNA, 59 bp, Artificial
  Synthetic oligonucleotide
ggaatattactactatctaataggcttggacagttggttgacctgactagattgttagc

SEQ ID NO: 418594 - DNA, 60 bp, Artificial
  Synthetic oligonucleotide
ggaatattagtcagactgaagggtcatacaacactgaagaaaatatcacactcccatgca

SEQ ID NO: 418595 - DNA, 55 bp, Artificial
  Synthetic oligonucleotide
ggaatattctacactggactagctgtgttgataattgccttgatagcagtctaca

SEQ ID NO: 418596 - DNA, 59 bp, Artificial
  Synthetic oligonucleotide
ggaatattgaggtctgaaagcaaaccacaattcacaacagcgacaattccgaaatacaa

SEQ ID NO: 418597 - DNA, 60 bp, Artificial
  Synthetic oligonucleotide
ggaatattggtgacccattagtcgcgtccatcgcagacaccaagagatttgtgaagtgcc

SEQ ID NO: 418598 - DNA, 55 bp, Artificial
  Synthetic oligonucleotide
ggaatatttcaccagattatgatcaagcgttggcaactgtgggagctctcgcaac

SEQ ID NO: 418599 - DNA, 55 bp, Artificial
  Synthetic oligonucleotide
ggaatattttgcgcataaaggtgaagtggatgtgaacaatgttattcaccgggta

SEQ ID NO: 418600 - DNA, 50 bp, Artificial
  Synthetic oligonucleotide
ggaatcaaatgggtactcaaataaagactttccaaaaatacccccgtgtt

SEQ ID NO: 418601 - DNA, 58 bp, Artificial
  Synthetic oligonucleotide
ggaatcaacaaggatttaccaaattttggcgatctactcaactgtcgccagttcattg

SEQ ID NO: 418602 - DNA, 55 bp, Artificial
  Synthetic oligonucleotide
ggaatcaactgtttaaataccccgggtgttacatcgaggaggatgggagctttgc

SEQ ID NO: 418603 - DNA, 59 bp, Artificial
  Synthetic oligonucleotide
ggaatcaagtactcttgaactgagaagcaagtactgggccataaggaccagaagtggag

SEQ ID NO: 418604 - DNA, 53 bp, Artificial
  Synthetic oligonucleotide
ggaatcaatggacaaaggggaaatggaaataacaacgcacttccaacgaaaaa

SEQ ID NO: 418605 - DNA, 55 bp, Artificial
  Synthetic oligonucleotide
ggaatcaattgataggtcgaccctacaatcagaccttggagcaggtagtagatcc

SEQ ID NO: 418606 - DNA, 56 bp, Artificial
  Synthetic oligonucleotide
ggaatcaatttaccgttagtaacgtatgtcaaagatgagctaaggtctaagaccaa

SEQ ID NO: 418607 - DNA, 51 bp, Artificial
  Synthetic oligonucleotide
ggaatcacatactaataatgacataaagttaatgacttttcgtcaagtgtg

SEQ ID NO: 418608 - DNA, 55 bp, Artificial
  Synthetic oligonucleotide
ggaatcaccaccagtcagctatcattgtcaactgtgtttcctgagatcattggga

SEQ ID NO: 418609 - DNA, 55 bp, Artificial
  Synthetic oligonucleotide
ggaatcactgaagccggcactgaggacagcaatgccagaaaggcgacagggtagt

SEQ ID NO: 418610 - DNA, 60 bp, Artificial
  Synthetic oligonucleotide
ggaatcagaaagcccaaacatctgtatgtgtcaatgccaaatgcccaatcaagcatgaaa

SEQ ID NO: 418611 - DNA, 55 bp, Artificial
  Synthetic oligonucleotide
ggaatcagcaattcctaaacctgtggggctgtaagggacaattagtctgctacac

SEQ ID NO: 418612 - DNA, 55 bp, Artificial
  Synthetic oligonucleotide
ggaatcagcgaatgagattgcgaggatgagtggagagacaggaacgtggggacca

SEQ ID NO: 418613 - DNA, 55 bp, Artificial
  Synthetic oligonucleotide
ggaatcaggaaaccaaaacatctctatgtgtcactgcctacagcacaatccacaa

SEQ ID NO: 418614 - DNA, 55 bp, Artificial
  Synthetic oligonucleotide
ggaatcaggaaagtgctgtttctagacggaatagataaggcccaagaagaacatg

SEQ ID NO: 418615 - DNA, 55 bp, Artificial
  Synthetic oligonucleotide
ggaatcagtctgcagtgaacattcgccgtgtgaacacggtaatctagagtgcgag

SEQ ID NO: 418616 - DNA, 60 bp, Artificial
  Synthetic oligonucleotide
ggaatcagtgctagttaacacataccaatggatcattaggaattgggagactgtgaagat

SEQ ID NO: 418617 - DNA, 60 bp, Artificial
  Synthetic oligonucleotide
ggaatcagtggccagagacgattttgacgggaaaatcatcactattgcatgtgctaagga

SEQ ID NO: 418618 - DNA, 59 bp, Artificial
  Synthetic oligonucleotide
ggaatcagtttagagcatttagattactactaccagatcccaatagattcgccttggta

SEQ ID NO: 418619 - DNA, 60 bp, Artificial
  Synthetic oligonucleotide
ggaatcatggcgtgggtggtcaaagtcagctttcgcatgcgctacaggaatggagccagc

SEQ ID NO: 418620 - DNA, 55 bp, Artificial
  Synthetic oligonucleotide
ggaatccaactgaatctggggttaaatgcttgaccatcgttgaggatgtgcgggc

SEQ ID NO: 418621 - DNA, 55 bp, Artificial
  Synthetic oligonucleotide
ggaatccaatgggaatttagtagctccttggtatgcttacaagttcactagttcc

SEQ ID NO: 418622 - DNA, 55 bp, Artificial
  Synthetic oligonucleotide
ggaatccacaagggcaacctgaactcgaatgctgttaaagggtggagacgacgcg

SEQ ID NO: 418623 - DNA, 60 bp, Artificial
  Synthetic oligonucleotide
ggaatccagaccaagcttaatgacagctggaccaagtgacatgtatgtccacgttggtga

SEQ ID NO: 418624 - DNA, 60 bp, Artificial
  Synthetic oligonucleotide
ggaatccagctattgagccagtgaaagaattccgctttaagccattttcatgcgttgatt

SEQ ID NO: 418625 - DNA, 55 bp, Artificial
  Synthetic oligonucleotide
ggaatccaggagtgaaaggctgggcctttgacaatggagatgacgtgtggatggg

SEQ ID NO: 418626 - DNA, 56 bp, Artificial
  Synthetic oligonucleotide
ggaatccatcaagaaataccaaggcgcggaatggaatatcaagcccatcaaggtag

SEQ ID NO: 418627 - DNA, 53 bp, Artificial
  Synthetic oligonucleotide
ggaatcccaaaggaagacctctgggccaccctttgccacatctttccccccag

SEQ ID NO: 418628 - DNA, 55 bp, Artificial
  Synthetic oligonucleotide
ggaatcccgaccactctgatacaaaggcgcgtgtccaggctagcacaaatgaggc

SEQ ID NO: 418629 - DNA, 59 bp, Artificial
  Synthetic oligonucleotide
ggaatccgacatagtgatcgacttgactttgatgagtagtcctatgatggggggaactt

SEQ ID NO: 418630 - DNA, 58 bp, Artificial
  Synthetic oligonucleotide
ggaatccgcgctgaactgtccgcattaacgacaaggataactacggaagtagcgaggc

SEQ ID NO: 418631 - DNA, 55 bp, Artificial
  Synthetic oligonucleotide
ggaatcctagcgtactagtaaggaaacctatggcgatcccatatacttacagaag

SEQ ID NO: 418632 - DNA, 60 bp, Artificial
  Synthetic oligonucleotide
ggaatcctcaataggagcttaccaggtgacaagaatcctgtggtcagggtaatatcacgc

SEQ ID NO: 418633 - DNA, 55 bp, Artificial
  Synthetic oligonucleotide
ggaatcctcaccactcccaagacgaaaccatgccaactccgtgatacccccgaat

SEQ ID NO: 418634 - DNA, 53 bp, Artificial
  Synthetic oligonucleotide
ggaatcgaccaaaagatgagagtacttaatgcttgttttagtgtaaaacgaat

SEQ ID NO: 418635 - DNA, 60 bp, Artificial
  Synthetic oligonucleotide
ggaatcgatccattttgaacacgagccaaagggggatacttgaggatgagcaaatgtatc

SEQ ID NO: 418636 - DNA, 60 bp, Artificial
  Synthetic oligonucleotide
ggaatcgatgattatgaatctcttgttcggtttttcagtgagaatcctcattcagcagaa

SEQ ID NO: 418637 - DNA, 58 bp, Artificial
  Synthetic oligonucleotide
ggaatcgcaacacaacatggttacccatagattgaggaaatttccaataaactcagta

SEQ ID NO: 418638 - DNA, 55 bp, Artificial
  Synthetic oligonucleotide
ggaatcgcaggttattgtgtcgctgacagacatagacagagatcacgagaagagc

SEQ ID NO: 418639 - DNA, 55 bp, Artificial
  Synthetic oligonucleotide
ggaatcggacagcttcgatcgacagtcgttgatcgcaaataacgtgattaaagcc

SEQ ID NO: 418640 - DNA, 57 bp, Artificial
  Synthetic oligonucleotide
ggaatcgtaagaataagggtaattcacaggcaatggtgcacgtaggtggtatgggcg

SEQ ID NO: 418641 - DNA, 60 bp, Artificial
  Synthetic oligonucleotide
ggaatcgtactctatgacgtagacttgacaatcgagaacactgtatcagtgctctacgct

SEQ ID NO: 418642 - DNA, 60 bp, Artificial
  Synthetic oligonucleotide
ggaatcgtctgtctcaagcctgcaaggatctgttaatggacttgatcagagtcttaccca

SEQ ID NO: 418643 - DNA, 60 bp, Artificial
  Synthetic oligonucleotide
ggaatcgtgaatcaatggtacgatgttactgaattagactacttgcctctgtgtacagaa

SEQ ID NO: 418644 - DNA, 60 bp, Artificial
  Synthetic oligonucleotide
ggaatcgtgaatcgatggtgcaacgtaaacgaattggatgacttgcctttatgcactgaa

SEQ ID NO: 418645 - DNA, 55 bp, Artificial
  Synthetic oligonucleotide
ggaatctaatggaaatctaatcgccccttggtatgcatacaaatttgtcagcaca

SEQ ID NO: 418646 - DNA, 60 bp, Artificial
  Synthetic oligonucleotide
ggaatctccaatggccttatgggaatctatgggtaacaagcaaatatatgtgggatatac

SEQ ID NO: 418647 - DNA, 57 bp, Artificial
  Synthetic oligonucleotide
ggaatctcccttttgaaagagcaaccgttatggcagctttcagcgggaacaatgaag

SEQ ID NO: 418648 - DNA, 55 bp, Artificial
  Synthetic oligonucleotide
ggaatctcctacagtattggagtcgggaactgaagaacagtgctagtagcttgct

SEQ ID NO: 418649 - DNA, 55 bp, Artificial
  Synthetic oligonucleotide
ggaatctcctgcaatattggagtcgagaactgaagaatagtgctattagcttggt

SEQ ID NO: 418650 - DNA, 55 bp, Artificial
  Synthetic oligonucleotide
ggaatctcgaaggggttctcttgtacatatactgtgaaacagctcattcttctct

SEQ ID NO: 418651 - DNA, 60 bp, Artificial
  Synthetic oligonucleotide
ggaatctcggtgtggaagatgcttctgaatcaaagacactcactgtatcagtcatggact

SEQ ID NO: 418652 - DNA, 59 bp, Artificial
  Synthetic oligonucleotide
ggaatctgaaggaacttacaaaatcctcaccatttattcgactgtcgcctcatctcttg

SEQ ID NO: 418653 - DNA, 55 bp, Artificial
  Synthetic oligonucleotide
ggaatctgagagatagagaactggcccgctatgcttttgacttctatgaggtcac

SEQ ID NO: 418654 - DNA, 60 bp, Artificial
  Synthetic oligonucleotide
ggaatctgctgccgagtacgtggactgtgcaacgtgcttggtcgcatcgattcgtggtga

SEQ ID NO: 418655 - DNA, 55 bp, Artificial
  Synthetic oligonucleotide
ggaatctggtgacaaaatgaacgggctattcgtgttatctatcctgttggacaag

SEQ ID NO: 418656 - DNA, 58 bp, Artificial
  Synthetic oligonucleotide
ggaatcttcgtcacacgagattatggaaaaaacctatctcgcactgttagagacgtcc

SEQ ID NO: 418657 - DNA, 55 bp, Artificial
  Synthetic oligonucleotide
ggaatctttatgagttgaagatagaatgcccgcatacagtagggttaggtcaagg

SEQ ID NO: 418658 - DNA, 56 bp, Artificial
  Synthetic oligonucleotide
ggaatgaaattggccattattgtctaagtcataaatgtggaacagacagataccct

SEQ ID NO: 418659 - DNA, 57 bp, Artificial
  Synthetic oligonucleotide
ggaatgaactatgaaacttcaatgtttaataaagtggcggcgttaatttgtgaagca

SEQ ID NO: 418660 - DNA, 53 bp, Artificial
  Synthetic oligonucleotide
ggaatgaaggaccgtacctataacggttctatctgtacccctaccaagcccac

SEQ ID NO: 418661 - DNA, 60 bp, Artificial
  Synthetic oligonucleotide
ggaatgaatcatgtcctatattcgatcagaagaaactatcctagtatctttgatgagcac

SEQ ID NO: 418662 - DNA, 55 bp, Artificial
  Synthetic oligonucleotide
ggaatgacaccgacgtggtaaactttgtaagcatggagttttctctcaccgatcc

SEQ ID NO: 418663 - DNA, 59 bp, Artificial
  Synthetic oligonucleotide
ggaatgaccttataggtgagttatgtgtggttcaagctgccagggtagcaagttccgtg

SEQ ID NO: 418664 - DNA, 56 bp, Artificial
  Synthetic oligonucleotide
ggaatgagaatacctgtgagaggtaattcccctgtgtttaactataacaaggcaac

SEQ ID NO: 418665 - DNA, 55 bp, Artificial
  Synthetic oligonucleotide
ggaatgagatgcttgaaatcgccccactgatcgagtccgtttatgcgtcggaact

SEQ ID NO: 418666 - DNA, 57 bp, Artificial
  Synthetic oligonucleotide
ggaatgagctaccaagacgcaccgaacaacgtgcgcagggacctcgacaacctgcac

SEQ ID NO: 418667 - DNA, 60 bp, Artificial
  Synthetic oligonucleotide
ggaatgatactcatagtatttggaatggtactatttggaatggtactcggaatgatacta

SEQ ID NO: 418668 - DNA, 55 bp, Artificial
  Synthetic oligonucleotide
ggaatgatactggtacttggaatgatactacaggaaatagcactatcacactccc

SEQ ID NO: 418669 - DNA, 60 bp, Artificial
  Synthetic oligonucleotide
ggaatgatcaagtgtccactgtggggaatgtcaatcatgcgtttggccagggattatatg

SEQ ID NO: 418670 - DNA, 60 bp, Artificial
  Synthetic oligonucleotide
ggaatgatccacatgccgcttataggttagcagagatggctcataatacgatgctggaca

SEQ ID NO: 418671 - DNA, 60 bp, Artificial
  Synthetic oligonucleotide
ggaatgatgatgggcatgtttaacatgctaagcacagttttaggagtctcaatcctaaac

SEQ ID NO: 418672 - DNA, 60 bp, Artificial
  Synthetic oligonucleotide
ggaatgcaaaatcgcccctctgatggtcgcatacatgctagaaagagagttggtccgcaa

SEQ ID NO: 418673 - DNA, 60 bp, Artificial
  Synthetic oligonucleotide
ggaatgcaactgagaggtatatgccgcgttatggcctccagaggaacttaactgactatg

SEQ ID NO: 418674 - DNA, 60 bp, Artificial
  Synthetic oligonucleotide
ggaatgcacccaattcgactagcatttatactagagtagggaactgcccagcctcattta

SEQ ID NO: 418675 - DNA, 55 bp, Artificial
  Synthetic oligonucleotide
ggaatgcagagtacggacgcagttctcaacaaaacgctgagctcaaagcccttgt

SEQ ID NO: 418676 - DNA, 50 bp, Artificial
  Synthetic oligonucleotide
ggaatgcagatcaggggatttgtgtactttgtcgaaacgctagcgagaag

SEQ ID NO: 418677 - DNA, 60 bp, Artificial
  Synthetic oligonucleotide
ggaatgcattgacctcttctaactatactgacactgagctaacacttctgttagattgac

SEQ ID NO: 418678 - DNA, 53 bp, Artificial
  Synthetic oligonucleotide
ggaatgccacctttaatttgaaccggtttcccgtactttgtgttgctttgcca

SEQ ID NO: 418679 - DNA, 60 bp, Artificial
  Synthetic oligonucleotide
ggaatgcgaactcctcgcagaggacatctgcgacgaagccgaggaatccgagttgcttga

SEQ ID NO: 418680 - DNA, 55 bp, Artificial
  Synthetic oligonucleotide
ggaatgcgtgaaataaacctgacatggctgcacccttgtgagtaacgctgtctgg

SEQ ID NO: 418681 - DNA, 60 bp, Artificial
  Synthetic oligonucleotide
ggaatgctatgaaaggctttcatggcaaagagctcttgattatcctggtcaagatcgcct

SEQ ID NO: 418682 - DNA, 55 bp, Artificial
  Synthetic oligonucleotide
ggaatgctcctgttatggacacagtcaaaaggtgacctgtgtgtgcagagataac

SEQ ID NO: 418683 - DNA, 55 bp, Artificial
  Synthetic oligonucleotide
ggaatgctgaattacctcgtatacttgttgaccacacaagtcagactatgcacgt

SEQ ID NO: 418684 - DNA, 60 bp, Artificial
  Synthetic oligonucleotide
ggaatgcttcacacactagtagtagcaagtgcaggacctacatctgctcgggatggtata

SEQ ID NO: 418685 - DNA, 56 bp, Artificial
  Synthetic oligonucleotide
ggaatggaacacattacccttagtgtttatactggcgataactacacactacgagg

SEQ ID NO: 418686 - DNA, 55 bp, Artificial
  Synthetic oligonucleotide
ggaatggaagtccctgttcaccacctgagacaatcatttgagtctaagcggaagc

SEQ ID NO: 418687 - DNA, 55 bp, Artificial
  Synthetic oligonucleotide
ggaatggacacgttattaatcaattaatggaggccttaatgcaattgtcacgaca

SEQ ID NO: 418688 - DNA, 55 bp, Artificial
  Synthetic oligonucleotide
ggaatggacagtttcgacaaggaacgcttgctctatctcagctgtgaaaggctgt

SEQ ID NO: 418689 - DNA, 53 bp, Artificial
  Synthetic oligonucleotide
ggaatggaccgacaacaaacacagttcactacccgaaggtataccggacttac

SEQ ID NO: 418690 - DNA, 59 bp, Artificial
  Synthetic oligonucleotide
ggaatggaccgccttgacggctaagccagttgacagcggcctctgccgagacttcgacg

SEQ ID NO: 418691 - DNA, 60 bp, Artificial
  Synthetic oligonucleotide
ggaatggaccttgtgagatactttggctgcttagtatatctatacccacttaaagatcag

SEQ ID NO: 418692 - DNA, 57 bp, Artificial
  Synthetic oligonucleotide
ggaatggagacccaaacaacatggacagagcagtcaaactttacaggaaactgaaaa

SEQ ID NO: 418693 - DNA, 60 bp, Artificial
  Synthetic oligonucleotide
ggaatggagagacgtgccctacttgcctaaggcgcaggacatggtctgcgggtcactcat

SEQ ID NO: 418694 - DNA, 55 bp, Artificial
  Synthetic oligonucleotide
ggaatggatacacacttcaatctgggaatgcatgactgggtccaagggctcggtc

SEQ ID NO: 418695 - DNA, 55 bp, Artificial
  Synthetic oligonucleotide
ggaatggatcagaagtttaaggggtatgtagatagcattggtaagatcgggactg

SEQ ID NO: 418696 - DNA, 55 bp, Artificial
  Synthetic oligonucleotide
ggaatggatttcaatcggtaatctaccacggatgtcgctcattcctgtcaaggct

SEQ ID NO: 418697 - DNA, 55 bp, Artificial
  Synthetic oligonucleotide
ggaatggatttcagggatattcagtggtaattggattgtactcattgttctctgc

SEQ ID NO: 418698 - DNA, 55 bp, Artificial
  Synthetic oligonucleotide
ggaatggcaactgggatttgtacctacccctgatactccaattcatgacacctac

SEQ ID NO: 418699 - DNA, 55 bp, Artificial
  Synthetic oligonucleotide
ggaatggcactatgaatactactagcactaggaatactactacagccaatattag

SEQ ID NO: 418700 - DNA, 60 bp, Artificial
  Synthetic oligonucleotide
ggaatggcagacgtggttgctgccaatgatactggtgaggattgctgtgagagagccggc

SEQ ID NO: 418701 - DNA, 60 bp, Artificial
  Synthetic oligonucleotide
ggaatggcagctaggctttgtaccaacaccagataactcagtacatgatacttacagata

SEQ ID NO: 418702 - DNA, 60 bp, Artificial
  Synthetic oligonucleotide
ggaatggcatttggattatccatgtgataaacttccaagtgtgctggcccgaggtgaccc

SEQ ID NO: 418703 - DNA, 54 bp, Artificial
  Synthetic oligonucleotide
ggaatggcgggaataaccgccatcacgggcttttccaacgattacttacaaaca

SEQ ID NO: 418704 - DNA, 60 bp, Artificial
  Synthetic oligonucleotide
ggaatggctgctttgagttctaccacaaatgtgataacacatgcatggagagcgtcaaaa

SEQ ID NO: 418705 - DNA, 60 bp, Artificial
  Synthetic oligonucleotide
ggaatggcttattgattacatggataggaagcatacatgtcagctgtgctacttgaagca

SEQ ID NO: 418706 - DNA, 55 bp, Artificial
  Synthetic oligonucleotide
ggaatgggacaggagtactgaaatatcacaccgggctgaggcaatttgtgcagca

SEQ ID NO: 418707 - DNA, 58 bp, Artificial
  Synthetic oligonucleotide
ggaatgggacccaaaaatctctctagcttcccagtgagaagcgagagaaaactggctc

SEQ ID NO: 418708 - DNA, 57 bp, Artificial
  Synthetic oligonucleotide
ggaatgggacggaaaactcgcaactttgtgcatttgtacggtgtggagcctgagatt

SEQ ID NO: 418709 - DNA, 54 bp, Artificial
  Synthetic oligonucleotide
ggaatgggccaacaacaagtacagtccactatccaaaggtctataaaacttatt

SEQ ID NO: 418710 - DNA, 55 bp, Artificial
  Synthetic oligonucleotide
ggaatgggtaatgggaccaccttcggagttcacaacaattctcttgctaatttac

SEQ ID NO: 418711 - DNA, 55 bp, Artificial
  Synthetic oligonucleotide
ggaatgggtccttatttataggtgaggacctaaatggcattaatgtaattagtta

SEQ ID NO: 418712 - DNA, 55 bp, Artificial
  Synthetic oligonucleotide
ggaatggtaaactccgcctgcttggaatcaccctcgtataacctggtatcatgca

SEQ ID NO: 418713 - DNA, 57 bp, Artificial
  Synthetic oligonucleotide
ggaatggtagacggttggtacggtttcaggcatcaaaattctgagggcacaggacaa

SEQ ID NO: 418714 - DNA, 54 bp, Artificial
  Synthetic oligonucleotide
ggaatggtctttttggtctgtacaaacatcgggctttagggcgcttccttagta

SEQ ID NO: 418715 - DNA, 52 bp, Artificial
  Synthetic oligonucleotide
ggaatggtgacccacgcctcaaagctaatttcgaggaggccatcttttccaa

SEQ ID NO: 418716 - DNA, 55 bp, Artificial
  Synthetic oligonucleotide
ggaatggtgccctaaccggtgggtggaagtacgccaccggaacagcatctagtgt

SEQ ID NO: 418717 - DNA, 55 bp, Artificial
  Synthetic oligonucleotide
ggaatggttaatagtccagtagcattcttaaaggtaacaaaggcccatgtaccta

SEQ ID NO: 418718 - DNA, 55 bp, Artificial
  Synthetic oligonucleotide
ggaatggttcggggtcgcaaaccgttacaatcgatgaccaaatgtgagccccacc

SEQ ID NO: 418719 - DNA, 55 bp, Artificial
  Synthetic oligonucleotide
ggaatgtatgaggctctctgcgtgggaaggctcttggaaaacaacccagacggaa

SEQ ID NO: 418720 - DNA, 55 bp, Artificial
  Synthetic oligonucleotide
ggaatgtcactcagagggctgtttatcaacccttgcaaaccagaaggattgcacg

SEQ ID NO: 418721 - DNA, 55 bp, Artificial
  Synthetic oligonucleotide
ggaatgtcataaattggacaagagactcagtaactgaattgtggtcatacaatgc

SEQ ID NO: 418722 - DNA, 60 bp, Artificial
  Synthetic oligonucleotide
ggaatgtcctggatcacacagggactgcttggagcccttctcctgtggatggggttgcag

SEQ ID NO: 418723 - DNA, 50 bp, Artificial
  Synthetic oligonucleotide
ggaatgtcgagtcatattatgcaaacgagtcattgtcgtcaagaccgaag

SEQ ID NO: 418724 - DNA, 60 bp, Artificial
  Synthetic oligonucleotide
ggaatgtcgatgtatatatgtgtgcaatgtcggatccagtctatcgagtacataataggt

SEQ ID NO: 418725 - DNA, 57 bp, Artificial
  Synthetic oligonucleotide
ggaatgtcggtcagacaggcagtcttaagatttccaatttgcgaggtataaacacct

SEQ ID NO: 418726 - DNA, 52 bp, Artificial
  Synthetic oligonucleotide
ggaatgtggttttacaccttccgtgaaggacgccacgaggggaaaccgtgta

SEQ ID NO: 418727 - DNA, 60 bp, Artificial
  Synthetic oligonucleotide
ggaatgtgtcttacagtataagttatacaagtgactaatgtagcacacaatagtttatgc

SEQ ID NO: 418728 - DNA, 60 bp, Artificial
  Synthetic oligonucleotide
ggaatgtgtttgtatcaatggcacctgcacagtagtaatgactgatgggagtgcttcagg

SEQ ID NO: 418729 - DNA, 55 bp, Artificial
  Synthetic oligonucleotide
ggaatgttatgatactcaaggtctatgtcaacaccggttacggtgctgcctacgc

SEQ ID NO: 418730 - DNA, 55 bp, Artificial
  Synthetic oligonucleotide
ggaatgttcaatcttagttctactctactagccttaatagcagcagataggtctg

SEQ ID NO: 418731 - DNA, 55 bp, Artificial
  Synthetic oligonucleotide
ggaatgttctagacgtgaactccattgaccttgaagagcccagtggtcagactgc

SEQ ID NO: 418732 - DNA, 59 bp, Artificial
  Synthetic oligonucleotide
ggaattaaatactgattacgaactgagtctaactacctactatcgagctgttgacgcaa

SEQ ID NO: 418733 - DNA, 55 bp, Artificial
  Synthetic oligonucleotide
ggaattaaatgggcctgtggattgggtcaatcgtacaataactatgaactggacc

SEQ ID NO: 418734 - DNA, 53 bp, Artificial
  Synthetic oligonucleotide
ggaattaacagctaaattatacctggcgttagatgatttgactatggctttag

SEQ ID NO: 418735 - DNA, 57 bp, Artificial
  Synthetic oligonucleotide
ggaattaactcccatccttggattcaggtacagttctatttgggttatgctgtcttc

SEQ ID NO: 418736 - DNA, 60 bp, Artificial
  Synthetic oligonucleotide
ggaattaatgtgctccgtcgaatgttgggaggtacttttggcgctatgtatgcagctata

SEQ ID NO: 418737 - DNA, 55 bp, Artificial
  Synthetic oligonucleotide
ggaattacaaagagagaatggtaacattcaaggttcctcatgccaagagacagga

SEQ ID NO: 418738 - DNA, 60 bp, Artificial
  Synthetic oligonucleotide
ggaattacaaggagatatgtgtggcttggtcgagtagcagttgcttcgatggaaaggaat

SEQ ID NO: 418739 - DNA, 58 bp, Artificial
  Synthetic oligonucleotide
ggaattacagatgcacatattaaggggaccactacatttccaaaggcgggcgatacta

SEQ ID NO: 418740 - DNA, 47 bp, Artificial
  Synthetic oligonucleotide
ggaattacccaatgtctaaaaaaccaggaaaacccggtagaaaccgg

SEQ ID NO: 418741 - DNA, 59 bp, Artificial
  Synthetic oligonucleotide
ggaattactggaacgcatggaggaagatgggtagtcctaacggaagagattgctcgcgc

SEQ ID NO: 418742 - DNA, 55 bp, Artificial
  Synthetic oligonucleotide
ggaattagcgagagcgttgcagcgtgagtcggagtcgagaagtgacgaggagacc

SEQ ID NO: 418743 - DNA, 54 bp, Artificial
  Synthetic oligonucleotide
ggaattaggatcaaaggtcaaattgagtaagggagaggttgaatatttggccgt

SEQ ID NO: 418744 - DNA, 60 bp, Artificial
  Synthetic oligonucleotide
ggaattatcgctagggctatagcagacaagtatcactctagtgtgtattccttacctcca

SEQ ID NO: 418745 - DNA, 51 bp, Artificial
  Synthetic oligonucleotide
ggaattatgaagacaccacaacagtgctcgctaccctggcccttcttgggt

SEQ ID NO: 418746 - DNA, 57 bp, Artificial
  Synthetic oligonucleotide
ggaattatgaggacaccaccactgtactagctactctagctctccttggttgtgaca

SEQ ID NO: 418747 - DNA, 54 bp, Artificial
  Synthetic oligonucleotide
ggaattattcaaagcgggaaatatgaacccgttttgaaaattgtagaatatgtg

SEQ ID NO: 418748 - DNA, 55 bp, Artificial
  Synthetic oligonucleotide
ggaattcaagtaaggcctcacatagagcctctaaaagaccttcgaggagctgtga

SEQ ID NO: 418749 - DNA, 55 bp, Artificial
  Synthetic oligonucleotide
ggaattcaattgataagggtcataatctgaccgatctgggtaaagccaacggtga

SEQ ID NO: 418750 - DNA, 59 bp, Artificial
  Synthetic oligonucleotide
ggaattcacaatggttggacgaagagcaactgccattctaagaaaagcaaccagaagga

SEQ ID NO: 418751 - DNA, 59 bp, Artificial
  Synthetic oligonucleotide
ggaattcacagcaaacgctggccggcgtgacagttaacgtcggaggtgttgacatgagg

SEQ ID NO: 418752 - DNA, 60 bp, Artificial
  Synthetic oligonucleotide
ggaattcaccacccttccagcattcaggagaagaatgatctatatggaacacaatcatta

SEQ ID NO: 418753 - DNA, 55 bp, Artificial
  Synthetic oligonucleotide
ggaattcacgatgcttggaatctatgacaggtgggcagtgctaccccggcatgcc

SEQ ID NO: 418754 - DNA, 55 bp, Artificial
  Synthetic oligonucleotide
ggaattcacgatggttgggcgaagagcaacagcaatcataaggaaagcaaccaga

SEQ ID NO: 418755 - DNA, 55 bp, Artificial
  Synthetic oligonucleotide
ggaattcatacagctggaggtcatcgttttggagttggcagttgctttgctactc

SEQ ID NO: 418756 - DNA, 60 bp, Artificial
  Synthetic oligonucleotide
ggaattcatcacccttctagcactcaagagaagaatgatctatatgggacacgatcattg

SEQ ID NO: 418757 - DNA, 50 bp, Artificial
  Synthetic oligonucleotide
ggaattcattcatgaccgcgctctcgcttttgtcggcgtactcactcagc

SEQ ID NO: 418758 - DNA, 55 bp, Artificial
  Synthetic oligonucleotide
ggaattccaaaattcatggggttcccaaatggacttgactgaccctttgtgcgtg

SEQ ID NO: 418759 - DNA, 55 bp, Artificial
  Synthetic oligonucleotide
ggaattccatataaccctcaaagtcaaggggtagtagaatccatgaataaagagc

SEQ ID NO: 418760 - DNA, 59 bp, Artificial
  Synthetic oligonucleotide
ggaattccatctatagtgatttgagggtgtccaaatgatgaccctgcaaaatcccctaa

SEQ ID NO: 418761 - DNA, 54 bp, Artificial
  Synthetic oligonucleotide
ggaattccccacgggtaaccgtgtcctagcctgcgtggcggccaacccagcatt

SEQ ID NO: 418762 - DNA, 53 bp, Artificial
  Synthetic oligonucleotide
ggaattccccctttaatttgaatgggcttcccgtactttgtgttgctttgcca

SEQ ID NO: 418763 - DNA, 55 bp, Artificial
  Synthetic oligonucleotide
ggaattcccgatcaaaccgctcattgatcacgccaagcccacatttaggcagata

SEQ ID NO: 418764 - DNA, 59 bp, Artificial
  Synthetic oligonucleotide
ggaattccgcactttacatccgataccctcacagagatctggggccacggatttacaca

SEQ ID NO: 418765 - DNA, 56 bp, Artificial
  Synthetic oligonucleotide
ggaattccgcgtctaatttgaaccggcttcccgtatgtggtgttagattgccagtc

SEQ ID NO: 418766 - DNA, 55 bp, Artificial
  Synthetic oligonucleotide
ggaattcctactgatgtagtcaattcctgggcaggagatattctaagaacccagg

SEQ ID NO: 418767 - DNA, 60 bp, Artificial
  Synthetic oligonucleotide
ggaattcgattgaggaaatgagtttggatgatgtccaaagagatttgctgacgagagagt

SEQ ID NO: 418768 - DNA, 54 bp, Artificial
  Synthetic oligonucleotide
ggaattcggagaggtaggttacgatgtggcaaaacaccttgtggaacgtgttac

SEQ ID NO: 418769 - DNA, 55 bp, Artificial
  Synthetic oligonucleotide
ggaattcggtttgaccttaacgattcggcagggaaccaagaagcgtatgcattga

SEQ ID NO: 418770 - DNA, 60 bp, Artificial
  Synthetic oligonucleotide
ggaattctcactgacaccagtcgacctggggacaaatctagtggtgattgttccaatcca

SEQ ID NO: 418771 - DNA, 60 bp, Artificial
  Synthetic oligonucleotide
ggaattctctgcctgagacgcagtgatgcttccccctgtgcgtgaatccattatccgcgc

SEQ ID NO: 418772 - DNA, 60 bp, Artificial
  Synthetic oligonucleotide
ggaattctctgcttgagccgcagtgatgaactcccctgtgcgtgaatccattatcagcgc

SEQ ID NO: 418773 - DNA, 60 bp, Artificial
  Synthetic oligonucleotide
ggaattctgggcgctgttagattcgactttctcagcaggattacatcgtcaacttgcgac

SEQ ID NO: 418774 - DNA, 56 bp, Artificial
  Synthetic oligonucleotide
ggaattctttgaaaacaagtcggagacatggccaattggagagtcacccaaaggag

SEQ ID NO: 418775 - DNA, 60 bp, Artificial
  Synthetic oligonucleotide
ggaattgaaatcgagatgaccgctcagataattatgtgggcctaaagcacgagcccacat

SEQ ID NO: 418776 - DNA, 55 bp, Artificial
  Synthetic oligonucleotide
ggaattgaacatacagagtgagctcgcatacataagatatctttacttccggctg

SEQ ID NO: 418777 - DNA, 57 bp, Artificial
  Synthetic oligonucleotide
ggaattgatggcacattttacgcgtatagagttgatactttcgatgaagttccgttc

SEQ ID NO: 418778 - DNA, 50 bp, Artificial
  Synthetic oligonucleotide
ggaattgccgatgggttcagaaaaaggtatctgcgcgattatacatcaca

SEQ ID NO: 418779 - DNA, 56 bp, Artificial
  Synthetic oligonucleotide
ggaattgctctggcagcaaccggtatggcaaagctaatagagctagacggtcctaa

SEQ ID NO: 418780 - DNA, 56 bp, Artificial
  Synthetic oligonucleotide
ggaattggccacactggtggatatggggaatcttaggcttttggatgctaataatt

SEQ ID NO: 418781 - DNA, 55 bp, Artificial
  Synthetic oligonucleotide
ggaattggcggacctgatacttaatgaatggttatgcaatccaatggacataacg

SEQ ID NO: 418782 - DNA, 55 bp, Artificial
  Synthetic oligonucleotide
ggaattggctgtctgaccaccgatgtatcgacgtttgaagaggttgcaaccactg

SEQ ID NO: 418783 - DNA, 60 bp, Artificial
  Synthetic oligonucleotide
ggaattgggagactgtgaagattcaatggtcccaagaccctacaatgctatacaataaga

SEQ ID NO: 418784 - DNA, 58 bp, Artificial
  Synthetic oligonucleotide
ggaattgggagattctacatccaaatgtgcactgaacttaaactcagtgatcatgaag

SEQ ID NO: 418785 - DNA, 58 bp, Artificial
  Synthetic oligonucleotide
ggaattggtttgtacgtggcatattgaattgggtgctctacaaacctcataggaatgg

SEQ ID NO: 418786 - DNA, 55 bp, Artificial
  Synthetic oligonucleotide
ggaattgtaataaactaggaccgagagaaaatgtggccataatacaggttggcgg

SEQ ID NO: 418787 - DNA, 54 bp, Artificial
  Synthetic oligonucleotide
ggaattgtatccaaatactcggaagtggtctggacaactgggccgttttgggaa

SEQ ID NO: 418788 - DNA, 57 bp, Artificial
  Synthetic oligonucleotide
ggaattgtcatagaacatcacgttatttatatactgatcgggataaaagtttaattc

SEQ ID NO: 418789 - DNA, 60 bp, Artificial
  Synthetic oligonucleotide
ggaattgtgaatcaatggtgcaacgtgagtgaattggatgatttacctctatgtactgaa

SEQ ID NO: 418790 - DNA, 60 bp, Artificial
  Synthetic oligonucleotide
ggaattgtgaattccgcttgtttcgtgtctccctctgtcaatctcatgtcgtgtatctct

SEQ ID NO: 418791 - DNA, 54 bp, Artificial
  Synthetic oligonucleotide
ggaatttaactccaggactcaactccttcataaaacgtaatcactttccttcac

SEQ ID NO: 418792 - DNA, 51 bp, Artificial
  Synthetic oligonucleotide
ggaatttcccggagttttatgagcgattacggagcactcgaggcagtacat

SEQ ID NO: 418793 - DNA, 58 bp, Artificial
  Synthetic oligonucleotide
ggaatttctggtcccgacaatggggctgtggctgtattgaaatacaatggtataataa

SEQ ID NO: 418794 - DNA, 55 bp, Artificial
  Synthetic oligonucleotide
ggaatttgatcgaaaattgattccttatcgtcagtatcaaccaccgtacaggctg

SEQ ID NO: 418795 - DNA, 55 bp, Artificial
  Synthetic oligonucleotide
ggaatttgttaggtacgtaggtatgatctcattatccgggtaaaaccacgcgata

SEQ ID NO: 418796 - DNA, 59 bp, Artificial
  Synthetic oligonucleotide
ggaattttagtggtttctctgattacattgtctggcttctaggacagttagaaagatga

SEQ ID NO: 418797 - DNA, 55 bp, Artificial
  Synthetic oligonucleotide
ggaattttccagactgttgggagtggtcttgaccacatcctgtctctggcagata

SEQ ID NO: 418798 - DNA, 59 bp, Artificial
  Synthetic oligonucleotide
ggaattttccttcgaattggatgaggacatgcaagtgaggagtcccatcttcgtgtaat

SEQ ID NO: 418799 - DNA, 58 bp, Artificial
  Synthetic oligonucleotide
ggaattttggctagatggggctcattcaagaagaatggagcgatcaaagtgttacggg

SEQ ID NO: 418800 - DNA, 60 bp, Artificial
  Synthetic oligonucleotide
ggacaaaaaattgtagatgagtttaagaaactgggcatgacagctacttctgctgacaag

SEQ ID NO: 418801 - DNA, 54 bp, Artificial
  Synthetic oligonucleotide
ggacaaaaacttaacggtttttatgggcggagttacgcatggtatataagcaga

SEQ ID NO: 418802 - DNA, 60 bp, Artificial
  Synthetic oligonucleotide
ggacaaaacaagtagatgcatgcagaggcctcaacggaaaaatatcaccctagacgctca

SEQ ID NO: 418803 - DNA, 55 bp, Artificial
  Synthetic oligonucleotide
ggacaaaacttcagtgacattggccggcaattcatctctttgttctatcagtgga

SEQ ID NO: 418804 - DNA, 60 bp, Artificial
  Synthetic oligonucleotide
ggacaaaagatacggaccagcattgagcatcaacgaattgagcaatcttgcaaaggggga

SEQ ID NO: 418805 - DNA, 55 bp, Artificial
  Synthetic oligonucleotide
ggacaaaatattaggaatcaatcatctccctctcttaccgttagttctgcccgag

SEQ ID NO: 418806 - DNA, 60 bp, Artificial
  Synthetic oligonucleotide
ggacaaacaattcaagtaccattgttgtaccctacatcaactgtacacctatggacagca

SEQ ID NO: 418807 - DNA, 58 bp, Artificial
  Synthetic oligonucleotide
ggacaaacatggtaagtccaggaagatggtgaaatactgtgaacgcgtactattagta

SEQ ID NO: 418808 - DNA, 55 bp, Artificial
  Synthetic oligonucleotide
ggacaaaccccaattccatttatgtcaaaggaattctcaaattccctggctacaa

SEQ ID NO: 418809 - DNA, 57 bp, Artificial
  Synthetic oligonucleotide
ggacaaaccctccctatcatttcttattgacatattggaagcgcagcgaaaaaggga

SEQ ID NO: 418810 - DNA, 58 bp, Artificial
  Synthetic oligonucleotide
ggacaaaccctctggagcaaaacaaacgatgccggttcagaccgagtgatggtatcac

SEQ ID NO: 418811 - DNA, 57 bp, Artificial
  Synthetic oligonucleotide
ggacaaactagtccttgcaacaggactgaggaatgtgccccaaagagaaacaagagg

SEQ ID NO: 418812 - DNA, 50 bp, Artificial
  Synthetic oligonucleotide
ggacaaactgatgagggctttaccggacgggtgggtttattgtcatgctg

SEQ ID NO: 418813 - DNA, 54 bp, Artificial
  Synthetic oligonucleotide
ggacaaagacatcttgttgtagagcactgtatcctaagacagactaacacaaaa

SEQ ID NO: 418814 - DNA, 55 bp, Artificial
  Synthetic oligonucleotide
ggacaaagaggggaaaattgtaggcatcagatgcacattaggcatgtttatggga

SEQ ID NO: 418815 - DNA, 56 bp, Artificial
  Synthetic oligonucleotide
ggacaaagagtggaaaggtccaacacaagtagaatattggggacaaggagcagtcc

SEQ ID NO: 418816 - DNA, 55 bp, Artificial
  Synthetic oligonucleotide
ggacaaagcgggcgaattgatttccactggacattagtacagccgggtgacaaca

SEQ ID NO: 418817 - DNA, 55 bp, Artificial
  Synthetic oligonucleotide
ggacaaagggcgtggaggcatcaagggaggatttgttcatcaaagaatggcatcc

SEQ ID NO: 418818 - DNA, 55 bp, Artificial
  Synthetic oligonucleotide
ggacaaaggtaagtctggagtggattccaccttaatgacaggtcagacttccaat

SEQ ID NO: 418819 - DNA, 60 bp, Artificial
  Synthetic oligonucleotide
ggacaaagtattggaatcaaagactagagcaattgatgcttgtccattggattatacaat

SEQ ID NO: 418820 - DNA, 51 bp, Artificial
  Synthetic oligonucleotide
ggacaaagtggccgaataagtttctactggaccattgtagaaccaggagat

SEQ ID NO: 418821 - DNA, 55 bp, Artificial
  Synthetic oligonucleotide
ggacaaataatatgtaactcaagtatcacaggaatactactgacacgggatggag

SEQ ID NO: 418822 - DNA, 55 bp, Artificial
  Synthetic oligonucleotide
ggacaaatacaaccaatgttgcccataccctccagaaaatttattagtattacga

SEQ ID NO: 418823 - DNA, 55 bp, Artificial
  Synthetic oligonucleotide
ggacaaatattacctttagtgcagaggtggcagaactataccgagtagaattggg

SEQ ID NO: 418824 - DNA, 53 bp, Artificial
  Synthetic oligonucleotide
ggacaaatgagtggagaaggaagtttaccagtttgggctttaccacctagaac

SEQ ID NO: 418825 - DNA, 55 bp, Artificial
  Synthetic oligonucleotide
ggacaaattagagaacaagcagaacacttgaggacagcagtccagatggcagtgt

SEQ ID NO: 418826 - DNA, 55 bp, Artificial
  Synthetic oligonucleotide
ggacaaattagagaacaagcagagcatttaaagacagcagttcaaatggcagtgt

SEQ ID NO: 418827 - DNA, 55 bp, Artificial
  Synthetic oligonucleotide
ggacaacaaaggattgatggcgaacctacagaaacaagggtgatgggaagggtgt

SEQ ID NO: 418828 - DNA, 55 bp, Artificial
  Synthetic oligonucleotide
ggacaacaccatgtgctacgtcatggttgagggacatctgggattgggtttgcac

SEQ ID NO: 418829 - DNA, 53 bp, Artificial
  Synthetic oligonucleotide
ggacaaccacaaagacgtgagtgtactgcgcaaggtcacgggacccagactgc

SEQ ID NO: 418830 - DNA, 57 bp, Artificial
  Synthetic oligonucleotide
ggacaaccagaccaatcattagaccagcaacccttgccccaccaagcaacaaacgaa

SEQ ID NO: 418831 - DNA, 54 bp, Artificial
  Synthetic oligonucleotide
ggacaaccaggtcatgtgcccgtacactggtttcggggtccatagggaataggt

SEQ ID NO: 418832 - DNA, 56 bp, Artificial
  Synthetic oligonucleotide
ggacaaccagtcaaattgaaggacaaatataaattgatggacccagaaaatactaa

SEQ ID NO: 418833 - DNA, 55 bp, Artificial
  Synthetic oligonucleotide
ggacaaccattcactgttaaatttcgtcagaaagggaagattcagcacattgagc

SEQ ID NO: 418834 - DNA, 60 bp, Artificial
  Synthetic oligonucleotide
ggacaaccgcgttcgttcctatatcaagctaaagagtctgaacatatctgggacatttgc

SEQ ID NO: 418835 - DNA, 55 bp, Artificial
  Synthetic oligonucleotide
ggacaacctttggtgtgctcatcctaaagaccagatccttgctcagcactggcct

SEQ ID NO: 418836 - DNA, 54 bp, Artificial
  Synthetic oligonucleotide
ggacaacggagtcgttacccgaaccactcgaacctgggtcctgcccagctacaa

SEQ ID NO: 418837 - DNA, 55 bp, Artificial
  Synthetic oligonucleotide
ggacaacgtgtccaccaactatgaggaccttccagtctcagatgctacaggcgag

SEQ ID NO: 418838 - DNA, 55 bp, Artificial
  Synthetic oligonucleotide
ggacaactatccacagtacgccctgaatctgtccaagatgtggtcagtcaatctc

SEQ ID NO: 418839 - DNA, 59 bp, Artificial
  Synthetic oligonucleotide
ggacaactcaatccgactctctgctggtggagacatttgggtaacaagagaaccctatg

SEQ ID NO: 418840 - DNA, 57 bp, Artificial
  Synthetic oligonucleotide
ggacaactgatagatcaaatttatggtatatgtcacaccaagggcttataattgacg

SEQ ID NO: 418841 - DNA, 54 bp, Artificial
  Synthetic oligonucleotide
ggacaactgtgttttcaaggaacatctaacacttatttataaccgttcaattat

SEQ ID NO: 418842 - DNA, 60 bp, Artificial
  Synthetic oligonucleotide
ggacaacttcccaggagcaggcagtatcttcgtcgaactactgccattcgagatgagcgt

SEQ ID NO: 418843 - DNA, 56 bp, Artificial
  Synthetic oligonucleotide
ggacaacttggaccagaggccctactgttggcactacgcaccccgaccgtgtggta

SEQ ID NO: 418844 - DNA, 55 bp, Artificial
  Synthetic oligonucleotide
ggacaagaaccaagtcgagggggaggtgcaagtggtttccaccgctacacaatct

SEQ ID NO: 418845 - DNA, 55 bp, Artificial
  Synthetic oligonucleotide
ggacaagaagaaatttgcacacaaggaacctaccaagaacagctcacctcaagtg

SEQ ID NO: 418846 - DNA, 60 bp, Artificial
  Synthetic oligonucleotide
ggacaagaagatgacacaaggcgtatatcatatgatgtttgactgggctaattttaatgc

SEQ ID NO: 418847 - DNA, 55 bp, Artificial
  Synthetic oligonucleotide
ggacaagaatggaaattttgtttggggtgagcgtggtaagcattcaaagcggttc

SEQ ID NO: 418848 - DNA, 55 bp, Artificial
  Synthetic oligonucleotide
ggacaagacgagtaccggcgtctcttcgagcccttccaggggacgttcgagattc

SEQ ID NO: 418849 - DNA, 60 bp, Artificial
  Synthetic oligonucleotide
ggacaagagaagctagtttgagcaacatggagttattcaatcaaggttatgcgcatcgag

SEQ ID NO: 418850 - DNA, 60 bp, Artificial
  Synthetic oligonucleotide
ggacaagattaggagtgttagcgctggacgtgcactctatataccaccatatgaagtctt

SEQ ID NO: 418851 - DNA, 53 bp, Artificial
  Synthetic oligonucleotide
ggacaagcaatgtatgcccctcccatccaaggagtaataaggtgtaactcaag

SEQ ID NO: 418852 - DNA, 50 bp, Artificial
  Synthetic oligonucleotide
ggacaagcaatgtatgctcctcccatcaggggacatattaattgtgtatc

SEQ ID NO: 418853 - DNA, 54 bp, Artificial
  Synthetic oligonucleotide
ggacaagcagggaagtttaatgcaatggcattcaagggaagaagtgctattggc

SEQ ID NO: 418854 - DNA, 55 bp, Artificial
  Synthetic oligonucleotide
ggacaagctatatgttaagaaattgtaacacctcaatgattacacaggcctgtcc

SEQ ID NO: 418855 - DNA, 55 bp, Artificial
  Synthetic oligonucleotide
ggacaagcttataaagaactgataacgaaactcgcaaagcatggcgactctggtg

SEQ ID NO: 418856 - DNA, 58 bp, Artificial
  Synthetic oligonucleotide
ggacaaggaaagtgattttgctcatggagcaatggaaaaacaggaaccccacggctgc

SEQ ID NO: 418857 - DNA, 55 bp, Artificial
  Synthetic oligonucleotide
ggacaaggatgttaatactggcacgagcggtacatttagcatcccaaggctcaag

SEQ ID NO: 418858 - DNA, 55 bp, Artificial
  Synthetic oligonucleotide
ggacaaggcctatcatctattggctcagctatgtatgctaattctgcccgtgatt

SEQ ID NO: 418859 - DNA, 55 bp, Artificial
  Synthetic oligonucleotide
ggacaaggggacatagtgttggtaatgaaacgaaaacgggactctagcatactta

SEQ ID NO: 418860 - DNA, 59 bp, Artificial
  Synthetic oligonucleotide
ggacaagtagactgtagtccagggatatggcaattagattgtacacatttagaaggaaa

SEQ ID NO: 418861 - DNA, 50 bp, Artificial
  Synthetic oligonucleotide
ggacaagtggcaaaatctgtggaattggtctgacataacaaagtggctat

SEQ ID NO: 418862 - DNA, 55 bp, Artificial
  Synthetic oligonucleotide
ggacaagtggccatggaagtaagagtggagaacattcgggcaatagacatgttca

SEQ ID NO: 418863 - DNA, 55 bp, Artificial
  Synthetic oligonucleotide
ggacaagttcatggggatgtgaagaatttggttgcctagctgtaagtgatgggtg

SEQ ID NO: 418864 - DNA, 55 bp, Artificial
  Synthetic oligonucleotide
ggacaagttgatagtgagacgacacaatgacgatcttaatacatggcttacgcga

SEQ ID NO: 418865 - DNA, 57 bp, Artificial
  Synthetic oligonucleotide
ggacaataaacaccgaaactggggcaccacaactaaatccaattgatggaccgctgc

SEQ ID NO: 418866 - DNA, 60 bp, Artificial
  Synthetic oligonucleotide
ggacaataaaggacttacagatagcagcaggactaatgtttcacagccagataatagcag

SEQ ID NO: 418867 - DNA, 55 bp, Artificial
  Synthetic oligonucleotide
ggacaataaagttagcgcggtttataggtgcaatagattacgcgcgaggttccct

SEQ ID NO: 418868 - DNA, 55 bp, Artificial
  Synthetic oligonucleotide
ggacaatagaagtttctgttggtcctattgtaggcctagattacactctgttgta

SEQ ID NO: 418869 - DNA, 57 bp, Artificial
  Synthetic oligonucleotide
ggacaatatgccagcaacgagcaagccttggttaggcgtttctggaaggttaacaac

SEQ ID NO: 418870 - DNA, 60 bp, Artificial
  Synthetic oligonucleotide
ggacaatatgtctataacaactatggagatacatgggtgggagttgaagctatgataaga

SEQ ID NO: 418871 - DNA, 56 bp, Artificial
  Synthetic oligonucleotide
ggacaatattaaggccgaacgattcaatcttctttgagagtactgggaactttata

SEQ ID NO: 418872 - DNA, 57 bp, Artificial
  Synthetic oligonucleotide
ggacaatattttacacaataattgattacattaatacgattgttcaaacaatgaccc

SEQ ID NO: 418873 - DNA, 58 bp, Artificial
  Synthetic oligonucleotide
ggacaatcaagaatgtttattccacacataacattaagtttcagtgataagaaagtag

SEQ ID NO: 418874 - DNA, 59 bp, Artificial
  Synthetic oligonucleotide
ggacaatcacacgttctggtatcaaaaaagcgctcctaagctagagattaccaatcaac

SEQ ID NO: 418875 - DNA, 57 bp, Artificial
  Synthetic oligonucleotide
ggacaatcaccaatcaatgaatacaataacaaaatacacccaggtaagttggagagg

SEQ ID NO: 418876 - DNA, 57 bp, Artificial
  Synthetic oligonucleotide
ggacaatcaccaatcactctcaaccatcaataaactgaccaaggtaatatggagaaa

SEQ ID NO: 418877 - DNA, 52 bp, Artificial
  Synthetic oligonucleotide
ggacaatccaaccaatggcttatgttatccgggagacttcaatgattatgaa

SEQ ID NO: 418878 - DNA, 55 bp, Artificial
  Synthetic oligonucleotide
ggacaatcgagaatgtttattccgcatataacattaagttttagtaacaagaaag

SEQ ID NO: 418879 - DNA, 55 bp, Artificial
  Synthetic oligonucleotide
ggacaatcgagggacgcaacatatccgattcgatgcactcttgggaaagtttgtc

SEQ ID NO: 418880 - DNA, 59 bp, Artificial
  Synthetic oligonucleotide
ggacaatcgggtacgctccaagcgcactctatacaagcaacggcatggccgcaaggaat

SEQ ID NO: 418881 - DNA, 55 bp, Artificial
  Synthetic oligonucleotide
ggacaatctgattgacggtgtcagggttaaccattcgctatccctagcaatggaa

SEQ ID NO: 418882 - DNA, 60 bp, Artificial
  Synthetic oligonucleotide
ggacaatgataagcaatgagtatttaacaacgctgtcgtttatagtgttaatgatggttc

SEQ ID NO: 418883 - DNA, 59 bp, Artificial
  Synthetic oligonucleotide
ggacaatgcaatacggctgggtgagaacaaggacgtaatagtcacaagggagccttatg

SEQ ID NO: 418884 - DNA, 59 bp, Artificial
  Synthetic oligonucleotide
ggacaatgcagcggaattccctcagttggtcgtacaatacatgtacataccacccggta

SEQ ID NO: 418885 - DNA, 60 bp, Artificial
  Synthetic oligonucleotide
ggacaatgcatgataaactgcaacctcaaaaaggctgcctaagtcgatacatttgtgcct

SEQ ID NO: 418886 - DNA, 60 bp, Artificial
  Synthetic oligonucleotide
ggacaatggaatcagaataggatcaaggggacatgtgtttgtcataagagaaccatttgt

SEQ ID NO: 418887 - DNA, 55 bp, Artificial
  Synthetic oligonucleotide
ggacaatggccgacaatgtttgatgtggctacagctgtgtacatgttgacagtct

SEQ ID NO: 418888 - DNA, 55 bp, Artificial
  Synthetic oligonucleotide
ggacaatggtttgacttgcttcagtacccgagatgggctaaccgccaacgtgagc

SEQ ID NO: 418889 - DNA, 60 bp, Artificial
  Synthetic oligonucleotide
ggacaatgtaccttatggagcgattcttccacggaatacatgttcatgtccgaagggcta

SEQ ID NO: 418890 - DNA, 56 bp, Artificial
  Synthetic oligonucleotide
ggacaatgtggtattggaggcaagccaggaggacatcttctcgagggtacaaggga

SEQ ID NO: 418891 - DNA, 54 bp, Artificial
  Synthetic oligonucleotide
ggacaatgtgtctgtggactacaagcaaacccagttgttaattgtaggctgtaa

SEQ ID NO: 418892 - DNA, 55 bp, Artificial
  Synthetic oligonucleotide
ggacaattacaatttgcatctacatcccgagtcgttcactctgggctggaaacga

SEQ ID NO: 418893 - DNA, 55 bp, Artificial
  Synthetic oligonucleotide
ggacaattcggaatggtgaatgcaacggcagccttagggacgctatatgtgctcg

SEQ ID NO: 418894 - DNA, 55 bp, Artificial
  Synthetic oligonucleotide
ggacaattggaattttgctgtagctcctccaccatctgccagtttggtagacact

SEQ ID NO: 418895 - DNA, 56 bp, Artificial
  Synthetic oligonucleotide
ggacaattggagaagcgaactatacaagtataaagtagtacaaattgaaccaatag

SEQ ID NO: 418896 - DNA, 55 bp, Artificial
  Synthetic oligonucleotide
ggacaattggccagaagccaacaaggtaggagtgggagcattcgggcccgggttc

SEQ ID NO: 418897 - DNA, 55 bp, Artificial
  Synthetic oligonucleotide
ggacaattgttcgaccagagggaaagacaatgagcgctgcacttgtcaaatgaca

SEQ ID NO: 418898 - DNA, 58 bp, Artificial
  Synthetic oligonucleotide
ggacaatttcgcgcagctctgaggcgagttatggatgatgatggttgggtaagatttg

SEQ ID NO: 418899 - DNA, 53 bp, Artificial
  Synthetic oligonucleotide
ggacaatttggcactgacgtcgaatttgctggccaacaaaagggtggacatta

SEQ ID NO: 418900 - DNA, 57 bp, Artificial
  Synthetic oligonucleotide
ggacacaagaaggagatgaagatagatccattatagctgcaatggaagctgatctat

SEQ ID NO: 418901 - DNA, 56 bp, Artificial
  Synthetic oligonucleotide
ggacacaagagagtaggtacaacgaaggaggttcttacagcaatcaagaaacgaaa

SEQ ID NO: 418902 - DNA, 54 bp, Artificial
  Synthetic oligonucleotide
ggacacaagcgggtatattaaatacgcgcaacccgcaaatattgtttactacca

SEQ ID NO: 418903 - DNA, 60 bp, Artificial
  Synthetic oligonucleotide
ggacacaataatagagagtaatgtcacggttactagctcaattgaactggttgaaaatga

SEQ ID NO: 418904 - DNA, 56 bp, Artificial
  Synthetic oligonucleotide
ggacacaatgttctatttgtcgggaaaccagatatcgttaatcttaagtgcttttg

SEQ ID NO: 418905 - DNA, 55 bp, Artificial
  Synthetic oligonucleotide
ggacacacgacttcgacgacccagtcgagtgtcggggtaacgtacgggtatgcaa

SEQ ID NO: 418906 - DNA, 55 bp, Artificial
  Synthetic oligonucleotide
ggacacacgcggagacaactatggtaaaagagtatcggaataagattgacgctct

SEQ ID NO: 418907 - DNA, 55 bp, Artificial
  Synthetic oligonucleotide
ggacacacggatctgcacgctagacgacgcagcagaccacgccttcgacagcatg

SEQ ID NO: 418908 - DNA, 55 bp, Artificial
  Synthetic oligonucleotide
ggacacactgacgcagtcaaggaaataggtagagttacagaacaaataccccgtc

SEQ ID NO: 418909 - DNA, 55 bp, Artificial
  Synthetic oligonucleotide
ggacacactggttccggaaagtccacacgactaccaactgcatacgccaactgtc

SEQ ID NO: 418910 - DNA, 59 bp, Artificial
  Synthetic oligonucleotide
ggacacagaaactctttgcctcattacagctgactccggaaaggtgtacggcattttga

SEQ ID NO: 418911 - DNA, 60 bp, Artificial
  Synthetic oligonucleotide
ggacacagaacaccacaagcagcttgacacaatctacgaagaaattgttaacacgaagat

SEQ ID NO: 418912 - DNA, 59 bp, Artificial
  Synthetic oligonucleotide
ggacacagattttttacactgcccctagtcggaatgtattggccatggattactctgga

SEQ ID NO: 418913 - DNA, 55 bp, Artificial
  Synthetic oligonucleotide
ggacacaggaaaaccaccagggcagatccatcatagcaaccatggaagctgacct

SEQ ID NO: 418914 - DNA, 55 bp, Artificial
  Synthetic oligonucleotide
ggacacaggcgctacaacgtgttgtaccaatatcaactcagtgcctaaaactgct

SEQ ID NO: 418915 - DNA, 60 bp, Artificial
  Synthetic oligonucleotide
ggacacagtttgtaaatacaagagtgatgctggatttggaaggatctctagtgctagcgc

SEQ ID NO: 418916 - DNA, 55 bp, Artificial
  Synthetic oligonucleotide
ggacacatactaaccccagaattggttctgatgtattgtgacgtagttgagggtc

SEQ ID NO: 418917 - DNA, 58 bp, Artificial
  Synthetic oligonucleotide
ggacacatagtcacccctaggtgtaactatcaagcaggacataataaggtaggatccc

SEQ ID NO: 418918 - DNA, 60 bp, Artificial
  Synthetic oligonucleotide
ggacacatagttattcctaggtgtgactatcaagcaggacataataaggtaggatcttta

SEQ ID NO: 418919 - DNA, 55 bp, Artificial
  Synthetic oligonucleotide
ggacacatagttttccataggtgtaactatccagcaggacatagcaaggtaggat

SEQ ID NO: 418920 - DNA, 55 bp, Artificial
  Synthetic oligonucleotide
ggacacatgtaggtttggcaaggccaactatacaatctgtagcaagttcactacc

SEQ ID NO: 418921 - DNA, 59 bp, Artificial
  Synthetic oligonucleotide
ggacacattgtaaccaaagtggatgggagaaccatgaagaatggtaaaacagagatcga

SEQ ID NO: 418922 - DNA, 55 bp, Artificial
  Synthetic oligonucleotide
ggacaccaagccatgccgtggtctctgccgagacataatatcagaacgagagaag

SEQ ID NO: 418923 - DNA, 55 bp, Artificial
  Synthetic oligonucleotide
ggacaccaaggatactttatctagagcccaagaggttcacaccaactctggaatc

SEQ ID NO: 418924 - DNA, 55 bp, Artificial
  Synthetic oligonucleotide
ggacaccagacccgtctgatgttctggtatttgttccgtacgatcaagaaccact

SEQ ID NO: 418925 - DNA, 55 bp, Artificial
  Synthetic oligonucleotide
ggacaccatcatgctaaaggcctctaagttaacacctggggttgtgtgctgacaa

SEQ ID NO: 418926 - DNA, 60 bp, Artificial
  Synthetic oligonucleotide
ggacaccatgctgtatccaacgggacaatggtgaaaaccttgactgatgaccaagtagaa

SEQ ID NO: 418927 - DNA, 55 bp, Artificial
  Synthetic oligonucleotide
ggacaccatggagtctaattgactctaatgcttggggagtttggtttcaaccaag

SEQ ID NO: 418928 - DNA, 55 bp, Artificial
  Synthetic oligonucleotide
ggacaccatgtctggtagaataggaggacaggtccacctagccatcatggcagtg

SEQ ID NO: 418929 - DNA, 54 bp, Artificial
  Synthetic oligonucleotide
ggacacccctttggaacggtgtttgatagtatgggtatgttaagagatcccacc

SEQ ID NO: 418930 - DNA, 58 bp, Artificial
  Synthetic oligonucleotide
ggacaccccttttggctatgtgcgggataatggattctcgtactgatgaccccaacga

SEQ ID NO: 418931 - DNA, 55 bp, Artificial
  Synthetic oligonucleotide
ggacacccgacggggaggaggaaccaggagcaagaaatacaagtagccctgacag

SEQ ID NO: 418932 - DNA, 54 bp, Artificial
  Synthetic oligonucleotide
ggacaccctttattccgcttaccccttaaatatccatcgaaagcgataccgaca

SEQ ID NO: 418933 - DNA, 58 bp, Artificial
  Synthetic oligonucleotide
ggacaccgaaatagttaaaatcatgggatatagggcaatggatgtaagtggagatatg

SEQ ID NO: 418934 - DNA, 55 bp, Artificial
  Synthetic oligonucleotide
ggacaccgaacggcacacagcagaggatgtgaatagaaacatgcacaatctgctg

SEQ ID NO: 418935 - DNA, 57 bp, Artificial
  Synthetic oligonucleotide
ggacaccgaactctcctttaccattactggagataacaccaagtggaatgaaaatca

SEQ ID NO: 418936 - DNA, 57 bp, Artificial
  Synthetic oligonucleotide
ggacaccgataggtaaatgggacaccgatatatcggtgcctcaattggtacccatta

SEQ ID NO: 418937 - DNA, 55 bp, Artificial
  Synthetic oligonucleotide
ggacaccgattgactcttcagaacaacttactctatgaatcggtgtctggggtct

SEQ ID NO: 418938 - DNA, 54 bp, Artificial
  Synthetic oligonucleotide
ggacaccgattttgttagacgtgttgccgaagtttcattccggcagtacaaaag

SEQ ID NO: 418939 - DNA, 56 bp, Artificial
  Synthetic oligonucleotide
ggacaccgcaaaagactcttgaagagcgaaccaaaacggaccgagcaccctatgac

SEQ ID NO: 418940 - DNA, 54 bp, Artificial
  Synthetic oligonucleotide
ggacaccgtacttggcaaactaaggggttgcccgttgcggcgtattgatggaaa

SEQ ID NO: 418941 - DNA, 55 bp, Artificial
  Synthetic oligonucleotide
ggacaccgtctatccagcctcaaacctgctataccgtgccaatgcatctcatgac

SEQ ID NO: 418942 - DNA, 57 bp, Artificial
  Synthetic oligonucleotide
ggacaccgttttaagcttatttacatggaaagttagagagaagtcgcacactctctc

SEQ ID NO: 418943 - DNA, 55 bp, Artificial
  Synthetic oligonucleotide
ggacacctagctagaaattgcagggcccctagaaaaaagggctgttggaaatgtg

SEQ ID NO: 418944 - DNA, 58 bp, Artificial
  Synthetic oligonucleotide
ggacacctcatgcctatggcaatcgggggaacgggggacaatatatagtatgtcccca

SEQ ID NO: 418945 - DNA, 55 bp, Artificial
  Synthetic oligonucleotide
ggacacctgaagtgatcaagtactgtcaagataacaaatggatagtgcctgcaga

SEQ ID NO: 418946 - DNA, 54 bp, Artificial
  Synthetic oligonucleotide
ggacacctgctgaggggaaagtggcccttaaaaatgacgatgacctaaaacttg

SEQ ID NO: 418947 - DNA, 55 bp, Artificial
  Synthetic oligonucleotide
ggacacctgcttgcttcaacgcgatgctttccctttgttccgatgcgacagaccc

SEQ ID NO: 418948 - DNA, 60 bp, Artificial
  Synthetic oligonucleotide
ggacacctgtttcatgaagatgggactcgataagaatcggtggtcagcaatagtatacgg

SEQ ID NO: 418949 - DNA, 55 bp, Artificial
  Synthetic oligonucleotide
ggacaccttaaatccagtggagcccacaacttcctctattgttccactcacagac

SEQ ID NO: 418950 - DNA, 55 bp, Artificial
  Synthetic oligonucleotide
ggacaccttcacaaactcctattccttttgcgagagtgttcccaatttggacagg

SEQ ID NO: 418951 - DNA, 55 bp, Artificial
  Synthetic oligonucleotide
ggacaccttcacaaactcctattccttttgtgaaaacgttccaaatctggacaga

SEQ ID NO: 418952 - DNA, 55 bp, Artificial
  Synthetic oligonucleotide
ggacaccttcacaaactcttactccttttgtgagagtgtccctaaccttgacagg

SEQ ID NO: 418953 - DNA, 55 bp, Artificial
  Synthetic oligonucleotide
ggacacgaattaaggcccaattcagctgtgaaagtaacataggacaattagatgg

SEQ ID NO: 418954 - DNA, 60 bp, Artificial
  Synthetic oligonucleotide
ggacacgactcacatggcgacgggcgctcaggagtgataaacctgccgccgtcatgttat

SEQ ID NO: 418955 - DNA, 60 bp, Artificial
  Synthetic oligonucleotide
ggacacgacttaaaattagtcgtccacgctgttgcttcgaccaatatgaactctgctgtc

SEQ ID NO: 418956 - DNA, 60 bp, Artificial
  Synthetic oligonucleotide
ggacacgagactcaatgactgaagtatggtcgtataatgctgagctattggtggcaatgg

SEQ ID NO: 418957 - DNA, 59 bp, Artificial
  Synthetic oligonucleotide
ggacacgataatcaattgtccagctaaagctaaacgctttggtttccgatatgagcctg

SEQ ID NO: 418958 - DNA, 60 bp, Artificial
  Synthetic oligonucleotide
ggacacgatctactgagactatttcgtgcagcactatacgcagccttcttaggaattgac

SEQ ID NO: 418959 - DNA, 51 bp, Artificial
  Synthetic oligonucleotide
ggacacgccacctgcgtactatacttcatagccgatgaggtctccacagta

SEQ ID NO: 418960 - DNA, 50 bp, Artificial
  Synthetic oligonucleotide
ggacacgcctagcaacaagcacacgcacctgtgtcgcgagctccccttgc

SEQ ID NO: 418961 - DNA, 55 bp, Artificial
  Synthetic oligonucleotide
ggacacgcgcaacaaccaagaattaactcctgtaatggatgaggccaacacggat

SEQ ID NO: 418962 - DNA, 55 bp, Artificial
  Synthetic oligonucleotide
ggacacgcgttcaatggattatcttgggcgtgctcctgaacgtgccgcaaggttg

SEQ ID NO: 418963 - DNA, 60 bp, Artificial
  Synthetic oligonucleotide
ggacacgctgaaagcttggccggcaacatggaaagtgagccgggagctgtgtcatcgctt

SEQ ID NO: 418964 - DNA, 56 bp, Artificial
  Synthetic oligonucleotide
ggacacggctttaaacatcttgtatattaagtccgttcttcggtctattgatatat

SEQ ID NO: 418965 - DNA, 55 bp, Artificial
  Synthetic oligonucleotide
ggacacgggagtgctctgtcgtatgttagaggactgacccctgatgtcaagtgca

SEQ ID NO: 418966 - DNA, 59 bp, Artificial
  Synthetic oligonucleotide
ggacacggtgaattgtctgactcaacactggttcaaccgacgttagatggaccatacca

SEQ ID NO: 418967 - DNA, 54 bp, Artificial
  Synthetic oligonucleotide
ggacacggtggaggtagtagcttaggtaaaggtttagcggtatcacaagcaaaa

SEQ ID NO: 418968 - DNA, 50 bp, Artificial
  Synthetic oligonucleotide
ggacacggtggtttaggtcgaggtaatacaaccgattatactaaccaagg

SEQ ID NO: 418969 - DNA, 55 bp, Artificial
  Synthetic oligonucleotide
ggacacggtgtacctgcacagaattgacctcggtcctcccatatcattggagagg

SEQ ID NO: 418970 - DNA, 57 bp, Artificial
  Synthetic oligonucleotide
ggacacgtagtgcggcgccattaaataacgtgtacttgtcctattcttgtcggtgtg

SEQ ID NO: 418971 - DNA, 59 bp, Artificial
  Synthetic oligonucleotide
ggacacgtcaatagagcacacagtactcacacgctagcgttgaagtctacatttaggat

SEQ ID NO: 418972 - DNA, 55 bp, Artificial
  Synthetic oligonucleotide
ggacacgtgcacttttacactgacattagtcccattaggactctagaagacattg

SEQ ID NO: 418973 - DNA, 55 bp, Artificial
  Synthetic oligonucleotide
ggacacgtggtcatgcaatacatgtatgttccacctggtgcacctacacctgaga

SEQ ID NO: 418974 - DNA, 55 bp, Artificial
  Synthetic oligonucleotide
ggacacgtttcacaaatgctcaaggcgagctgactatgcttttgccatccactct

SEQ ID NO: 418975 - DNA, 60 bp, Artificial
  Synthetic oligonucleotide
ggacactaaaatagatctctggtcctataatgcagaacttcttgttgctctggagaatca

SEQ ID NO: 418976 - DNA, 55 bp, Artificial
  Synthetic oligonucleotide
ggacactaataactgggacttaccactaaactacagactagtactaatatgccct

SEQ ID NO: 418977 - DNA, 55 bp, Artificial
  Synthetic oligonucleotide
ggacactactgtccgtgtccgctgggctgatgtcacatccttcgcccacgtggtc

SEQ ID NO: 418978 - DNA, 55 bp, Artificial
  Synthetic oligonucleotide
ggacactaggatcacaagggttgatctggacaatgaggcgaaggtactagagctc

SEQ ID NO: 418979 - DNA, 55 bp, Artificial
  Synthetic oligonucleotide
ggacactatcccataccttgacaccaaggttgaagcctcagtgcttccagccgcc

SEQ ID NO: 418980 - DNA, 60 bp, Artificial
  Synthetic oligonucleotide
ggacactcaacccaagtgatcctgcaacattcaattgggtgcaaccgctctccacagggt

SEQ ID NO: 418981 - DNA, 58 bp, Artificial
  Synthetic oligonucleotide
ggacactcaggtgctattgggtcatatacgtgccataacacccttctaaaccgtcctg

SEQ ID NO: 418982 - DNA, 55 bp, Artificial
  Synthetic oligonucleotide
ggacactcggagagtagaaggaggagaacttttgttacaacaacttgccggaaga

SEQ ID NO: 418983 - DNA, 55 bp, Artificial
  Synthetic oligonucleotide
ggacactcttggtcatcccacttgtcccacttgagtatgcggctggtgctacaac

SEQ ID NO: 418984 - DNA, 60 bp, Artificial
  Synthetic oligonucleotide
ggacactgaacgatgactttcaccgaagcacaagccgcactcgaagctatccgcaaccta

SEQ ID NO: 418985 - DNA, 58 bp, Artificial
  Synthetic oligonucleotide
ggacactgagtacgggaaactgagaacagaggtgcctagtccagaacagttgctaggt

SEQ ID NO: 418986 - DNA, 60 bp, Artificial
  Synthetic oligonucleotide
ggacactgatcctgatacaacggcactaaacattatacaatcaaggagtgcacaatgtgc

SEQ ID NO: 418987 - DNA, 57 bp, Artificial
  Synthetic oligonucleotide
ggacactgtatgttgcctagtaactctttgtcaaaagaccctaaatcatttgcggtc

SEQ ID NO: 418988 - DNA, 57 bp, Artificial
  Synthetic oligonucleotide
ggacactgtccgaggaaataactccttggtcaacgatctagcaaagcgtcgtcttta

SEQ ID NO: 418989 - DNA, 55 bp, Artificial
  Synthetic oligonucleotide
ggacactgtgggatgtccaaaagctagtgggagctctccagtggataaggggagc

SEQ ID NO: 418990 - DNA, 59 bp, Artificial
  Synthetic oligonucleotide
ggacactgtgttcaaggatagtgacaagtgagcaagtacataaggttaaagtagtaaca

SEQ ID NO: 418991 - DNA, 53 bp, Artificial
  Synthetic oligonucleotide
ggacactgttataaccgctgtcaattccctaatctcggacaacatcctaatga

SEQ ID NO: 418992 - DNA, 55 bp, Artificial
  Synthetic oligonucleotide
ggacacttatatctattagtgcaatacatttagcagctgtcaagattggtgtcag

SEQ ID NO: 418993 - DNA, 55 bp, Artificial
  Synthetic oligonucleotide
ggacacttcgtccctgaagatctccaactagacgccacaaaggcccttggacagc

SEQ ID NO: 418994 - DNA, 55 bp, Artificial
  Synthetic oligonucleotide
ggacacttgatcttgtccgagcgctccaatcaactggtaaggaatcccaatctcc

SEQ ID NO: 418995 - DNA, 59 bp, Artificial
  Synthetic oligonucleotide
ggacacttgttatccatttgatgtaccggattaccaaagcctacggagcatcttagcaa

SEQ ID NO: 418996 - DNA, 58 bp, Artificial
  Synthetic oligonucleotide
ggacactttaactcaaaatgccgaagcgcgatgccccatggcgttcattggcggggac

SEQ ID NO: 418997 - DNA, 60 bp, Artificial
  Synthetic oligonucleotide
ggacagaaagcatacgtgtcaactatgctatctaaaacattcaaagcagatacagacatg

SEQ ID NO: 418998 - DNA, 57 bp, Artificial
  Synthetic oligonucleotide
ggacagaaatatatgctgtagatgacaatgatcagtggcataaatatactagtggtg

SEQ ID NO: 418999 - DNA, 55 bp, Artificial
  Synthetic oligonucleotide
ggacagaacacaggactggctactaccagaaccatggaacccgcctatggatccc

SEQ ID NO: 419000 - DNA, 60 bp, Artificial
  Synthetic oligonucleotide
ggacagaaccccgacggagcagatttccaattcttgtgtcagatgatttcgacagttgac

SEQ ID NO: 419001 - DNA, 55 bp, Artificial
  Synthetic oligonucleotide
ggacagaaggagtacacgaagacttcttattggtgggacggtctccaatcgtctg

SEQ ID NO: 419002 - DNA, 58 bp, Artificial
  Synthetic oligonucleotide
ggacagaagtccctatagggctttaatgagctgtcctctaggtgaagctccgtcccca

SEQ ID NO: 419003 - DNA, 60 bp, Artificial
  Synthetic oligonucleotide
ggacagaatgatgattatctcctcggagcgccgaaaggagatcgaaaatgtggcagggta

SEQ ID NO: 419004 - DNA, 55 bp, Artificial
  Synthetic oligonucleotide
ggacagaatttcatgcagcagatagacactcaaattatgagagagataagctcta

SEQ ID NO: 419005 - DNA, 55 bp, Artificial
  Synthetic oligonucleotide
ggacagacccgtctcctacaccatgaacaggaccaggtctcgcaagcaaaccagc

SEQ ID NO: 419006 - DNA, 55 bp, Artificial
  Synthetic oligonucleotide
ggacagacctatctgtcaggtgaagtcggtggagttagcacaaacgcggtagttc

SEQ ID NO: 419007 - DNA, 53 bp, Artificial
  Synthetic oligonucleotide
ggacagacgacgatcaaagaaaccccgacgaggaagaaaccctagcaaacaac

SEQ ID NO: 419008 - DNA, 55 bp, Artificial
  Synthetic oligonucleotide
ggacagagatcgcgcaaggccccacagagccgtttcaggagtttgcagacagact

SEQ ID NO: 419009 - DNA, 55 bp, Artificial
  Synthetic oligonucleotide
ggacagagcgccagaactactggagctgtttaaatgcagtaatgtaagagccgcc

SEQ ID NO: 419010 - DNA, 60 bp, Artificial
  Synthetic oligonucleotide
ggacagagcgggttgaggaatggcttgacctcccgtgcaagctactatctgagccatctc

SEQ ID NO: 419011 - DNA, 55 bp, Artificial
  Synthetic oligonucleotide
ggacagagctgttcggttttgagccttggaggtctagcattatactcgggagaga

SEQ ID NO: 419012 - DNA, 60 bp, Artificial
  Synthetic oligonucleotide
ggacagaggatgtacgtccatcactcggctatttacctcctttatatgccaaacatacta

SEQ ID NO: 419013 - DNA, 60 bp, Artificial
  Synthetic oligonucleotide
ggacagaggcaaagattatgctagacaacatacatatgcctaacggactagtggcccagc

SEQ ID NO: 419014 - DNA, 55 bp, Artificial
  Synthetic oligonucleotide
ggacagaggttaagatagagttaataaacccagatagtatagtctatcagaagcc

SEQ ID NO: 419015 - DNA, 55 bp, Artificial
  Synthetic oligonucleotide
ggacagagtcggttcagtcgtatatgtgaccgtatttaatcagaagttgcgtgaa

SEQ ID NO: 419016 - DNA, 55 bp, Artificial
  Synthetic oligonucleotide
ggacagagtggaaggatggagtttttttggacaatactaaggccgaacgactcaa

SEQ ID NO: 419017 - DNA, 57 bp, Artificial
  Synthetic oligonucleotide
ggacagataaaactgatgttggagaaccgcgcaatggtaaggaggaaaggatttgga

SEQ ID NO: 419018 - DNA, 56 bp, Artificial
  Synthetic oligonucleotide
ggacagataagaaagaggtagatcaaaaggtagagggtgttaacattgtattcaag

SEQ ID NO: 419019 - DNA, 55 bp, Artificial
  Synthetic oligonucleotide
ggacagatacatcattttctgactgtccatagaaccggtctgcatagtttgggaa

SEQ ID NO: 419020 - DNA, 60 bp, Artificial
  Synthetic oligonucleotide
ggacagataggattattgaagtagtacaaagaatttgtagagctatcctcaacataccta

SEQ ID NO: 419021 - DNA, 57 bp, Artificial
  Synthetic oligonucleotide
ggacagatggagtaacgagtacttgcaggagatcaggttcctcattctatgcggaaa

SEQ ID NO: 419022 - DNA, 59 bp, Artificial
  Synthetic oligonucleotide
ggacagattacatccacctcaggcaggaccgattccaccaggccagataagggaaccta

SEQ ID NO: 419023 - DNA, 60 bp, Artificial
  Synthetic oligonucleotide
ggacagattgcacccagtgcaagcagggcctgtagcaccaggccagatgagagacccaag

SEQ ID NO: 419024 - DNA, 59 bp, Artificial
  Synthetic oligonucleotide
ggacagcactggtcaggaacgagttttaaacttacgcttccatcgagagtctcgcattc

SEQ ID NO: 419025 - DNA, 53 bp, Artificial
  Synthetic oligonucleotide
ggacagcagcggagcaacttaacagagagcagtttccgagtgggggtggagga

SEQ ID NO: 419026 - DNA, 55 bp, Artificial
  Synthetic oligonucleotide
ggacagcaggggagaatggattactattgggccgttcttaaacctggacaaacag

SEQ ID NO: 419027 - DNA, 60 bp, Artificial
  Synthetic oligonucleotide
ggacagcatagaccccttcgctggcaataaaaccccttgcaacacatgctactgtaaaca

SEQ ID NO: 419028 - DNA, 58 bp, Artificial
  Synthetic oligonucleotide
ggacagcccgtccgcccattctgtgcagagagtttagtgggcacattggcagatatga

SEQ ID NO: 419029 - DNA, 55 bp, Artificial
  Synthetic oligonucleotide
ggacagccggaactcccataaacccttatctctcacctggttacttactggctcc

SEQ ID NO: 419030 - DNA, 60 bp, Artificial
  Synthetic oligonucleotide
ggacagcctcaaatgaggacctagatctctgtagatatctaggatgcactttttacttct

SEQ ID NO: 419031 - DNA, 55 bp, Artificial
  Synthetic oligonucleotide
ggacagcggcgagcccgcagcttcaagaggccacttcccaagtttgactggagca

SEQ ID NO: 419032 - DNA, 55 bp, Artificial
  Synthetic oligonucleotide
ggacagctaaagtgcaaggcccagggtttgattacgcagtggctatggccaaaag

SEQ ID NO: 419033 - DNA, 55 bp, Artificial
  Synthetic oligonucleotide
ggacagctggaacactctgtggagttggtttaacataacaaattggctgtggtat

SEQ ID NO: 419034 - DNA, 60 bp, Artificial
  Synthetic oligonucleotide
ggacagctggactgtcaatgatatacagaagttagtggggaaattaaattgggcaagcca

SEQ ID NO: 419035 - DNA, 55 bp, Artificial
  Synthetic oligonucleotide
ggacagctggcgcgcactatgagttatgtgtacgtggcatcatgtgggtcgttgg

SEQ ID NO: 419036 - DNA, 55 bp, Artificial
  Synthetic oligonucleotide
ggacagctggctacactagatattagcacagagcccatgaaactagaggacgccg

SEQ ID NO: 419037 - DNA, 53 bp, Artificial
  Synthetic oligonucleotide
ggacagcttagtgctgtttccgtggatccgcgtccttctgttaggacgacacc

SEQ ID NO: 419038 - DNA, 60 bp, Artificial
  Synthetic oligonucleotide
ggacaggaaatctaaagtcaggtacagtgtggacactgtggtctctgagctgattaggga

SEQ ID NO: 419039 - DNA, 56 bp, Artificial
  Synthetic oligonucleotide
ggacaggaacatttgaattcacaagctttttctaccgctatgggtttgtagccaat

SEQ ID NO: 419040 - DNA, 59 bp, Artificial
  Synthetic oligonucleotide
ggacaggacgttgcatagcatgttggagaagacctcgtactgaaacccaagtgtaaaca

SEQ ID NO: 419041 - DNA, 58 bp, Artificial
  Synthetic oligonucleotide
ggacaggatcttgaccgttggtgctctgaacggaatgtctacggaatgtttcgccgtc

SEQ ID NO: 419042 - DNA, 55 bp, Artificial
  Synthetic oligonucleotide
ggacagggaggacgtgagcgtggtgacaggccctttgaggtcaaggatggtgtct

SEQ ID NO: 419043 - DNA, 60 bp, Artificial
  Synthetic oligonucleotide
ggacagggcaagctgcagatctaaagagcactcaagcagccattgaccagatcaatggga

SEQ ID NO: 419044 - DNA, 52 bp, Artificial
  Synthetic oligonucleotide
ggacagggcaatgcatattgaagacctaagtgccggttacattagttcaacc

SEQ ID NO: 419045 - DNA, 50 bp, Artificial
  Synthetic oligonucleotide
ggacaggggcgggtaactctcatatggtaatagagagcattgtagtataa

SEQ ID NO: 419046 - DNA, 56 bp, Artificial
  Synthetic oligonucleotide
ggacagggtgccaatattaacactttagcccaggtgccctctgcaggtgccataac

SEQ ID NO: 419047 - DNA, 55 bp, Artificial
  Synthetic oligonucleotide
ggacagggtggcagcattcaccagcttggctcgtgctaacgggttggggcttatc

SEQ ID NO: 419048 - DNA, 55 bp, Artificial
  Synthetic oligonucleotide
ggacaggtatggtagacggatggtacggatatcatcatgagaattcacaagggtc

SEQ ID NO: 419049 - DNA, 60 bp, Artificial
  Synthetic oligonucleotide
ggacaggtattatcctataaaagtcactagtcatgattggtacgaaattcaagagagtga

SEQ ID NO: 419050 - DNA, 60 bp, Artificial
  Synthetic oligonucleotide
ggacaggtctatcacgtggcatgaggtgagcagtaatagccccctcgtgcctaagactgg

SEQ ID NO: 419051 - DNA, 55 bp, Artificial
  Synthetic oligonucleotide
ggacagtaactgcacgacctgctagcaatagtagtgaccttatactagctatacc

SEQ ID NO: 419052 - DNA, 58 bp, Artificial
  Synthetic oligonucleotide
ggacagtagtttcactggttcctgcactaatgctgttggagggagtggaactaacaac

SEQ ID NO: 419053 - DNA, 55 bp, Artificial
  Synthetic oligonucleotide
ggacagtatatcggatctttctagccaagtgactactaacgcctcttcgcccacg

SEQ ID NO: 419054 - DNA, 55 bp, Artificial
  Synthetic oligonucleotide
ggacagtctgcagttaatagggaagcagacgtcaagaaagacatgggtccatcgg

SEQ ID NO: 419055 - DNA, 55 bp, Artificial
  Synthetic oligonucleotide
ggacagtgaatgggtcactttgcttacctataagcataagcacaccaagaaggac

SEQ ID NO: 419056 - DNA, 60 bp, Artificial
  Synthetic oligonucleotide
ggacagtgctgcaaggattcatgactttaggtatagccaattggctaagctgggaataaa

SEQ ID NO: 419057 - DNA, 60 bp, Artificial
  Synthetic oligonucleotide
ggacagtggggactatgctgatgggccctcagataaccctggtacaggtattgctaagga

SEQ ID NO: 419058 - DNA, 52 bp, Artificial
  Synthetic oligonucleotide
ggacagtggttagtgcgacacccctgcgtaagcaggattgtgtcgtagtggt

SEQ ID NO: 419059 - DNA, 55 bp, Artificial
  Synthetic oligonucleotide
ggacagtgtggttggtcccctttttttggtggttatgaggcaagaatgtccaggc

SEQ ID NO: 419060 - DNA, 55 bp, Artificial
  Synthetic oligonucleotide
ggacagttcctaatgaacataagtcaacggtattgttcgacggtggagcaaatgg

SEQ ID NO: 419061 - DNA, 60 bp, Artificial
  Synthetic oligonucleotide
ggacagttgggactcatcctagctccagtgctggtctgaaagatgatctccttgaaaatt

SEQ ID NO: 419062 - DNA, 56 bp, Artificial
  Synthetic oligonucleotide
ggacagtttctagtgagatggtgtgtagagaaggtactagcttctggacaagtcat

SEQ ID NO: 419063 - DNA, 54 bp, Artificial
  Synthetic oligonucleotide
ggacataaaacaagggccaaaggaaccttttagagactatgtagatcgattctt

SEQ ID NO: 419064 - DNA, 54 bp, Artificial
  Synthetic oligonucleotide
ggacataagacaaggaccaaaggaaccctttagggactatgtagacaggttcta

SEQ ID NO: 419065 - DNA, 55 bp, Artificial
  Synthetic oligonucleotide
ggacataagctcatatctaaaggatagactatgagtcaagaacgagtcgacaaac

SEQ ID NO: 419066 - DNA, 54 bp, Artificial
  Synthetic oligonucleotide
ggacataataggagatataagacaagcacattgtaacattagtgaaaaggtatg

SEQ ID NO: 419067 - DNA, 55 bp, Artificial
  Synthetic oligonucleotide
ggacatacaagagcgtttggttttctttgcaaatggagatgacatcatactctct

SEQ ID NO: 419068 - DNA, 53 bp, Artificial
  Synthetic oligonucleotide
ggacatactgtggtgcaccaatcctaggcccagggagtgccccaacacttagc

SEQ ID NO: 419069 - DNA, 60 bp, Artificial
  Synthetic oligonucleotide
ggacatagagttagccctaggtgtgactatcaagcaggacataataaggtaggatcacta

SEQ ID NO: 419070 - DNA, 55 bp, Artificial
  Synthetic oligonucleotide
ggacatagcccgctacccagaggaaacggttgtggaacaccttgagtccactccc

SEQ ID NO: 419071 - DNA, 55 bp, Artificial
  Synthetic oligonucleotide
ggacatagtaaggtgtctagacctacttttgaaagccgtactcatttatatgcgc

SEQ ID NO: 419072 - DNA, 59 bp, Artificial
  Synthetic oligonucleotide
ggacatagtgatggctctgtagcaaattccatataatatcccataataagtaacacatc

SEQ ID NO: 419073 - DNA, 51 bp, Artificial
  Synthetic oligonucleotide
ggacatagttatatttgactgggttcgtgttagacccacttgtgatgccga

SEQ ID NO: 419074 - DNA, 53 bp, Artificial
  Synthetic oligonucleotide
ggacatataaacagaaacgaggggaaacaatgacacctaaacagcgtaaattt

SEQ ID NO: 419075 - DNA, 55 bp, Artificial
  Synthetic oligonucleotide
ggacatataagacaagcattttgtacccttaatagaacaaagtggataaacactt

SEQ ID NO: 419076 - DNA, 55 bp, Artificial
  Synthetic oligonucleotide
ggacatataagcccagctatacaatccgctttggcgaaacgctacactggcgctt

SEQ ID NO: 419077 - DNA, 55 bp, Artificial
  Synthetic oligonucleotide
ggacatataccagttgataagttggtctcgcgcaccaagaaagtccaggatccat

SEQ ID NO: 419078 - DNA, 50 bp, Artificial
  Synthetic oligonucleotide
ggacatatactgtagacgtgtcgaaggtgatctaacgccgtggtgttgta

SEQ ID NO: 419079 - DNA, 59 bp, Artificial
  Synthetic oligonucleotide
ggacatatatcacagcgtgtcccgtgcccgaccccgctatttactcctgtgcctactcc

SEQ ID NO: 419080 - DNA, 55 bp, Artificial
  Synthetic oligonucleotide
ggacatatatggacacgtatcttagaaatgcattagatggcaaccctgtacaggt

SEQ ID NO: 419081 - DNA, 55 bp, Artificial
  Synthetic oligonucleotide
ggacatatctggtgcctccagcgtttcggtgtctaagcgcatgtttctagagcga

SEQ ID NO: 419082 - DNA, 55 bp, Artificial
  Synthetic oligonucleotide
ggacatatgatgtatatcctgcttggatctatgttaggagtaccttacggattgg

SEQ ID NO: 419083 - DNA, 55 bp, Artificial
  Synthetic oligonucleotide
ggacatatgggcgtagacgaagctatgtacgattatataagctgttgccgccatc

SEQ ID NO: 419084 - DNA, 55 bp, Artificial
  Synthetic oligonucleotide
ggacatcaaagtcaatgatatgtaaatcagacactagtaccacgatatcccctgc

SEQ ID NO: 419085 - DNA, 56 bp, Artificial
  Synthetic oligonucleotide
ggacatcaaatgaaagactgcacagaagggagacaggctaattttttagggaaact

SEQ ID NO: 419086 - DNA, 55 bp, Artificial
  Synthetic oligonucleotide
ggacatcacactttgccttttcgccactcattggtggagtcgggattacagggca

SEQ ID NO: 419087 - DNA, 60 bp, Artificial
  Synthetic oligonucleotide
ggacatcacgtgcctccctgtacacgcacgtgacatcaaatggcttgcttcgcaagatag

SEQ ID NO: 419088 - DNA, 53 bp, Artificial
  Synthetic oligonucleotide
ggacatcagagatgtacggttttggatttggagcgtacataatagcgaaccac

SEQ ID NO: 419089 - DNA, 59 bp, Artificial
  Synthetic oligonucleotide
ggacatcaggcttcagtgtgaccaaattgaggaaactccaacatcttactcttacatct

SEQ ID NO: 419090 - DNA, 57 bp, Artificial
  Synthetic oligonucleotide
ggacatcataaatatgagatcccctcgttttatgttgaaggtgccagtaccagagag

SEQ ID NO: 419091 - DNA, 55 bp, Artificial
  Synthetic oligonucleotide
ggacatcataggagtgaaattgggagtaccaagaccggatatctcaacgaagcac

SEQ ID NO: 419092 - DNA, 60 bp, Artificial
  Synthetic oligonucleotide
ggacatcatccaacaggaagtcctagggctcaaggaggccttgatccagagaagaccgct

SEQ ID NO: 419093 - DNA, 55 bp, Artificial
  Synthetic oligonucleotide
ggacatcattgagacagtagcccaaaatgcactccaattgtcacaacccagacct

SEQ ID NO: 419094 - DNA, 60 bp, Artificial
  Synthetic oligonucleotide
ggacatccactgtgcatcaacggcagttacaggatggtccgcaaacccgagagcatgtct

SEQ ID NO: 419095 - DNA, 55 bp, Artificial
  Synthetic oligonucleotide
ggacatccctgacttctacagcctacgcaccaggatctccactacccttgctaac

SEQ ID NO: 419096 - DNA, 60 bp, Artificial
  Synthetic oligonucleotide
ggacatccgatatgaggactgagatcatacggatgatggaaagtgcaagaccagaagatg

SEQ ID NO: 419097 - DNA, 55 bp, Artificial
  Synthetic oligonucleotide
ggacatcgaatggcttgggatatgatgatgaactggtcccctgctgttggcatgg

SEQ ID NO: 419098 - DNA, 55 bp, Artificial
  Synthetic oligonucleotide
ggacatcgatcaaacgttctacagtgatttcactaagatgtgtaatgttactgtg

SEQ ID NO: 419099 - DNA, 55 bp, Artificial
  Synthetic oligonucleotide
ggacatcgatgtgtactgcatatgtagggacaattggaaaggttccaacaggcct

SEQ ID NO: 419100 - DNA, 53 bp, Artificial
  Synthetic oligonucleotide
ggacatcggtagcagttacgttcgaccgggaatgcggttaacggatataaacc

SEQ ID NO: 419101 - DNA, 60 bp, Artificial
  Synthetic oligonucleotide
ggacatctagcaagaaactgccgagcacctagaaagaaaggttgctggaaatgtggacaa

SEQ ID NO: 419102 - DNA, 55 bp, Artificial
  Synthetic oligonucleotide
ggacatctgcggcctagtggcggggtggtgcaacgtagcacgccagtctactgaa

SEQ ID NO: 419103 - DNA, 55 bp, Artificial
  Synthetic oligonucleotide
ggacatctgggcaaagatgagacagttgctcaagacttcggagctacaagattac

SEQ ID NO: 419104 - DNA, 55 bp, Artificial
  Synthetic oligonucleotide
ggacatcttaacgagttctggtggagccacgcgagacgagaacatgcttctttgg

SEQ ID NO: 419105 - DNA, 55 bp, Artificial
  Synthetic oligonucleotide
ggacatgaatcggatggtggacgccgacctcctcttggacgtcagtgggatgccg

SEQ ID NO: 419106 - DNA, 55 bp, Artificial
  Synthetic oligonucleotide
ggacatgacaccacacgaacctttaagggttgttactggcaacaatatagcagga

SEQ ID NO: 419107 - DNA, 55 bp, Artificial
  Synthetic oligonucleotide
ggacatgactcgactactgatctcagttgctccacctggagcagccaacaaactg

SEQ ID NO: 419108 - DNA, 55 bp, Artificial
  Synthetic oligonucleotide
ggacatgagcttaatcatattgccggtcggcgtttaggcgcttgtgatcgcgtga

SEQ ID NO: 419109 - DNA, 55 bp, Artificial
  Synthetic oligonucleotide
ggacatgatggagtcaggattcattgggaaagtgacaggcatagatgagaagctt

SEQ ID NO: 419110 - DNA, 55 bp, Artificial
  Synthetic oligonucleotide
ggacatgcaaacagagatcccagacagagcctggaacactggatatgaatggata

SEQ ID NO: 419111 - DNA, 55 bp, Artificial
  Synthetic oligonucleotide
ggacatgcaagcaagcgggcacatgtccaccagatgtgataccaaaggtagaagg

SEQ ID NO: 419112 - DNA, 55 bp, Artificial
  Synthetic oligonucleotide
ggacatgcacgagtgtaacacaaaacaacacgactttaatcgaaaacacatatgt

SEQ ID NO: 419113 - DNA, 55 bp, Artificial
  Synthetic oligonucleotide
ggacatgccactgccaattttaataggtcaaggtattgtgagaaaacaaagacca

SEQ ID NO: 419114 - DNA, 55 bp, Artificial
  Synthetic oligonucleotide
ggacatgccatcagcatgccgctttcttgactcgtattggcaaggacacgaggag

SEQ ID NO: 419115 - DNA, 55 bp, Artificial
  Synthetic oligonucleotide
ggacatgctagcctttgtaagtgcatgtccagatttctcagtgcggcttttgaga

SEQ ID NO: 419116 - DNA, 55 bp, Artificial
  Synthetic oligonucleotide
ggacatgctggaagtgtggaaccgggtctggattcttgacaaccccttcatgggg

SEQ ID NO: 419117 - DNA, 60 bp, Artificial
  Synthetic oligonucleotide
ggacatgctgggagcaaatgtacactccaggaggggaagtgaggaatgatgatgttgacc

SEQ ID NO: 419118 - DNA, 53 bp, Artificial
  Synthetic oligonucleotide
ggacatgcttactggtgtccacaatattgaagacaaatacgttttcaggatgc

SEQ ID NO: 419119 - DNA, 60 bp, Artificial
  Synthetic oligonucleotide
ggacatggagttagtatagaatggcaatacaagaagtatagaacacagattgatcctgaa

SEQ ID NO: 419120 - DNA, 60 bp, Artificial
  Synthetic oligonucleotide
ggacatggatattgttgcctctgagcacctgctgcaccagtctcttgttggcaagcaatc

SEQ ID NO: 419121 - DNA, 55 bp, Artificial
  Synthetic oligonucleotide
ggacatgggcgacggaagcattttcgttgctctgatggctgactacggcccctgg

SEQ ID NO: 419122 - DNA, 55 bp, Artificial
  Synthetic oligonucleotide
ggacatgggtagtgtgcttttctcaacaacctacatggctcgctgtgcccgatgg

SEQ ID NO: 419123 - DNA, 52 bp, Artificial
  Synthetic oligonucleotide
ggacatgggtcaccatagcatgacctacgcagggtgtcaagggctcaccgca

SEQ ID NO: 419124 - DNA, 58 bp, Artificial
  Synthetic oligonucleotide
ggacatggttatattggactgtgtcctttgggctcccactattgaggccgactcaccg

SEQ ID NO: 419125 - DNA, 55 bp, Artificial
  Synthetic oligonucleotide
ggacatgtacaaagttgatgcaggtacgcaatagcaattacagataaactcggtg

SEQ ID NO: 419126 - DNA, 53 bp, Artificial
  Synthetic oligonucleotide
ggacatgtagttatgcagtatatgtatgtcccacctggagcccctctacccac

SEQ ID NO: 419127 - DNA, 54 bp, Artificial
  Synthetic oligonucleotide
ggacatgtcattaatcagttgatggaggctttaatgcaactatcacgacaacag

SEQ ID NO: 419128 - DNA, 55 bp, Artificial
  Synthetic oligonucleotide
ggacatgttgtaatgcagtacatgtatataccacctggagcaccagtcccaacaa

SEQ ID NO: 419129 - DNA, 55 bp, Artificial
  Synthetic oligonucleotide
ggacattacactgacaaccaatcgaaacaaataattgatatcagtgaggcgctca

SEQ ID NO: 419130 - DNA, 60 bp, Artificial
  Synthetic oligonucleotide
ggacattagagcttctgactgtccattgtctagccatgaagcaagtatactaagtgaatt

SEQ ID NO: 419131 - DNA, 57 bp, Artificial
  Synthetic oligonucleotide
ggacattagcgatctaaaacaatatgatagtgatgaaccggagcccagatcactagc

SEQ ID NO: 419132 - DNA, 55 bp, Artificial
  Synthetic oligonucleotide
ggacattagcggcatgtcggccgcatgtttgttagaaattgttaaatgtgcgtcg

SEQ ID NO: 419133 - DNA, 56 bp, Artificial
  Synthetic oligonucleotide
ggacattagtcatcttactatcggggatcaaggagataacactcagcctgatcgag

SEQ ID NO: 419134 - DNA, 55 bp, Artificial
  Synthetic oligonucleotide
ggacattatgaaccagcacttaatcgagaaaacatgttgtcatacacgcatctta

SEQ ID NO: 419135 - DNA, 55 bp, Artificial
  Synthetic oligonucleotide
ggacattcaggaagtacctttagcgtgtgtagtaactggcagccgaaattttccg

SEQ ID NO: 419136 - DNA, 58 bp, Artificial
  Synthetic oligonucleotide
ggacattcatggtactagatataaatccacagggtttgctagtacctaaaacgtatgc

SEQ ID NO: 419137 - DNA, 55 bp, Artificial
  Synthetic oligonucleotide
ggacattccgataagctgttcaaattccgcttggaagtctttactgctggcagat

SEQ ID NO: 419138 - DNA, 55 bp, Artificial
  Synthetic oligonucleotide
ggacattcttcagacacgcgatttgcactcattgtgcatgccaactcctgacgcg

SEQ ID NO: 419139 - DNA, 58 bp, Artificial
  Synthetic oligonucleotide
ggacattggagtacttggtagaagagctgacaagtcacccgccatttctcaatctttt

SEQ ID NO: 419140 - DNA, 56 bp, Artificial
  Synthetic oligonucleotide
ggacattgggaggtgcatgttaataaagatactgtgtttacccctgttaccagttc

SEQ ID NO: 419141 - DNA, 56 bp, Artificial
  Synthetic oligonucleotide
ggacattggtgacagcccggaaatgtggtcggctgtcgtgatggctgagcggagca

SEQ ID NO: 419142 - DNA, 57 bp, Artificial
  Synthetic oligonucleotide
ggacattggtgtacaatatatactagaagttcttaagggtcctatagcggccatccg

SEQ ID NO: 419143 - DNA, 55 bp, Artificial
  Synthetic oligonucleotide
ggacattggttactgagttcgctgcattgcttaagccgttgcctactagccgtgt

SEQ ID NO: 419144 - DNA, 56 bp, Artificial
  Synthetic oligonucleotide
ggacattgtaaaaaattgcgaggtttgccagaacggacaaatgcctactaccataa

SEQ ID NO: 419145 - DNA, 60 bp, Artificial
  Synthetic oligonucleotide
ggacattgtgcagttcgacgcaaaatcagaaactgtgcgtggactacccgacctgacgac

SEQ ID NO: 419146 - DNA, 54 bp, Artificial
  Synthetic oligonucleotide
ggacattgttagaaagtggttatctggagaggaagtatcaaacaacagatcgag

SEQ ID NO: 419147 - DNA, 54 bp, Artificial
  Synthetic oligonucleotide
ggacatttaaaagtgacagaactacctgtagcgattgggtaaccgccatttttg

SEQ ID NO: 419148 - DNA, 55 bp, Artificial
  Synthetic oligonucleotide
ggacatttacgattgtcgttatttagttgacgcaattgggtggtcttattagtcg

SEQ ID NO: 419149 - DNA, 58 bp, Artificial
  Synthetic oligonucleotide
ggacatttagtatcattagattgtaaacatagagcaccaatgcaaattaaatttcctc

SEQ ID NO: 419150 - DNA, 60 bp, Artificial
  Synthetic oligonucleotide
ggacatttcatggtgaaacaccgagggctaccactgatagctcaaacactgcaaatttga

SEQ ID NO: 419151 - DNA, 60 bp, Artificial
  Synthetic oligonucleotide
ggacatttcatttcaagcgctatttagtagcgcattcagcttatataatcgttacacgga

SEQ ID NO: 419152 - DNA, 56 bp, Artificial
  Synthetic oligonucleotide
ggacatttctcaagacaatgtagaaatgctccaaaaaacgggaaacaaggggctca

SEQ ID NO: 419153 - DNA, 60 bp, Artificial
  Synthetic oligonucleotide
ggacatttctccgactacgaggagctgagggagcaattgagttcaatatcatcattcgag

SEQ ID NO: 419154 - DNA, 59 bp, Artificial
  Synthetic oligonucleotide
ggacatttgggtaacaagagagccttatgtgtcatgtgacaccagtaaatgttaccaat

SEQ ID NO: 419155 - DNA, 55 bp, Artificial
  Synthetic oligonucleotide
ggacatttggtactagaagatgtgttctctcagcgtttcctgacacttactgttc

SEQ ID NO: 419156 - DNA, 55 bp, Artificial
  Synthetic oligonucleotide
ggacattttcacggtatcccatacaaaagtggacaatgtatttggccgcgcatgg

SEQ ID NO: 419157 - DNA, 60 bp, Artificial
  Synthetic oligonucleotide
ggaccaaaatcgatacagtttcatgcttgcttcaatcagcatatgtcttgtgtgcgattc

SEQ ID NO: 419158 - DNA, 55 bp, Artificial
  Synthetic oligonucleotide
ggaccaaaattgattttgtgtcgtgattcagatagcatggctgatatgctagcag

SEQ ID NO: 419159 - DNA, 54 bp, Artificial
  Synthetic oligonucleotide
ggaccaaagaagtcttagcagtgcctaatcctttaaaacttctacagaaattgg

SEQ ID NO: 419160 - DNA, 55 bp, Artificial
  Synthetic oligonucleotide
ggaccaaagacgcacgaaacacccaagatcacgtgcgctccctctgcttgttagc

SEQ ID NO: 419161 - DNA, 59 bp, Artificial
  Synthetic oligonucleotide
ggaccaaagactggcccactccaggagaacagctctataaaggaaagtccagcagcaaa

SEQ ID NO: 419162 - DNA, 59 bp, Artificial
  Synthetic oligonucleotide
ggaccaaagatccgcgaaacacacaggatcatgtccgatcattgtgcttattggcatgg

SEQ ID NO: 419163 - DNA, 55 bp, Artificial
  Synthetic oligonucleotide
ggaccaaagcatggatgtgcagagacccatcttggtgtttctcctgagaaaccct

SEQ ID NO: 419164 - DNA, 55 bp, Artificial
  Synthetic oligonucleotide
ggaccaaagcctaaagccatgcgtaaagctgaccccactttgtgtcactctaaac

SEQ ID NO: 419165 - DNA, 59 bp, Artificial
  Synthetic oligonucleotide
ggaccaaatatgtatcgggtatcatgccaacaattccacagaaaaagtcgacacaatct

SEQ ID NO: 419166 - DNA, 55 bp, Artificial
  Synthetic oligonucleotide
ggaccaaatcgagcagggatgtcgttaccaacgttttctgcaatttggaacatgc

SEQ ID NO: 419167 - DNA, 59 bp, Artificial
  Synthetic oligonucleotide
ggaccaaatgtggaaatgtctcatcagactcaagcctactctcacggggcctacgccct

SEQ ID NO: 419168 - DNA, 57 bp, Artificial
  Synthetic oligonucleotide
ggaccaacaaacagtgattcacccaacaataacgacccctgcaataccgaactgcag

SEQ ID NO: 419169 - DNA, 56 bp, Artificial
  Synthetic oligonucleotide
ggaccaacatacataccagatcctggactcaccggttcaaaaatgcgtgtgccata

SEQ ID NO: 419170 - DNA, 55 bp, Artificial
  Synthetic oligonucleotide
ggaccaacatatttagtttcgatgtacaacaacccacggcttatatgccacagta

SEQ ID NO: 419171 - DNA, 54 bp, Artificial
  Synthetic oligonucleotide
ggaccaaccaactcagccagacgtagcaacgtgcaggttctataccctggagtc

SEQ ID NO: 419172 - DNA, 53 bp, Artificial
  Synthetic oligonucleotide
ggaccaaccccaacacagtttctaaattcggtcgtttataggaatctacaggc

SEQ ID NO: 419173 - DNA, 56 bp, Artificial
  Synthetic oligonucleotide
ggaccaacccgcaccaagttagaacctagtgtattccatgatatcttcgagggaaa

SEQ ID NO: 419174 - DNA, 57 bp, Artificial
  Synthetic oligonucleotide
ggaccaagagaaaatgttgcggtagttcaagtaggaggtccaaatgtacttgatata

SEQ ID NO: 419175 - DNA, 55 bp, Artificial
  Synthetic oligonucleotide
ggaccaagagagaacgtagcagtcatacaggtaggcggcgcgaacattttagaca

SEQ ID NO: 419176 - DNA, 54 bp, Artificial
  Synthetic oligonucleotide
ggaccaagagcccatctgttccaggaccgcttgccacaagtgtggtctaagcaa

SEQ ID NO: 419177 - DNA, 60 bp, Artificial
  Synthetic oligonucleotide
ggaccaagccaggttaaattcatggggatgtgcttggaaacagatctgctacacctctgt

SEQ ID NO: 419178 - DNA, 55 bp, Artificial
  Synthetic oligonucleotide
ggaccaaggataactgtcaaaggtgtctgcaagataggaaacttcgtgtacaaac

SEQ ID NO: 419179 - DNA, 60 bp, Artificial
  Synthetic oligonucleotide
ggaccaagggccacagagggagccatacaatgaatggacactagagcttttagaggagct

SEQ ID NO: 419180 - DNA, 55 bp, Artificial
  Synthetic oligonucleotide
ggaccaagtactttaccagatattgttactgaagcgtcggagaagtttataccaa

SEQ ID NO: 419181 - DNA, 55 bp, Artificial
  Synthetic oligonucleotide
ggaccaagttcgcagccggagagctaggctatgctgctagcgaccgatgttcttt

SEQ ID NO: 419182 - DNA, 55 bp, Artificial
  Synthetic oligonucleotide
ggaccaagttgatgagcaccacaagaactgtgcaacgggaagaaatacctagtct

SEQ ID NO: 419183 - DNA, 55 bp, Artificial
  Synthetic oligonucleotide
ggaccaatagacttaatgataagcggttactctagacagctgcggatcactgggg

SEQ ID NO: 419184 - DNA, 59 bp, Artificial
  Synthetic oligonucleotide
ggaccaatcacatgatgcgctcaaagcttaattgttatgtggtcccctatttaaacttc

SEQ ID NO: 419185 - DNA, 59 bp, Artificial
  Synthetic oligonucleotide
ggaccaatcctgttccagtctcggtcgccaagtatggctgaattgtgggacccacacta

SEQ ID NO: 419186 - DNA, 59 bp, Artificial
  Synthetic oligonucleotide
ggaccaatcctgttccagtcttggtcgccaagtatggctgatttgtgggaccctttgca

SEQ ID NO: 419187 - DNA, 58 bp, Artificial
  Synthetic oligonucleotide
ggaccaatgaaagcatgcaagtaaatagcacagaatcaaatgacactataactctccc

SEQ ID NO: 419188 - DNA, 55 bp, Artificial
  Synthetic oligonucleotide
ggaccaatgagttacacctatcagtcccacactacaagcgcaaacgttacatcgt

SEQ ID NO: 419189 - DNA, 54 bp, Artificial
  Synthetic oligonucleotide
ggaccacaaataccgcccagcccacgccagtaatatcttaccggaacggcggaa

SEQ ID NO: 419190 - DNA, 54 bp, Artificial
  Synthetic oligonucleotide
ggaccacaagcgacgaagattttcagagtgaccccgaccccctccacaataagc

SEQ ID NO: 419191 - DNA, 55 bp, Artificial
  Synthetic oligonucleotide
ggaccacaggcctattccatcacatcggcaatagatgcagctgaagcggcaggaa

SEQ ID NO: 419192 - DNA, 60 bp, Artificial
  Synthetic oligonucleotide
ggaccacatgaattctgttcgcaacacaccctacagattgtaggaccggatggtgattat

SEQ ID NO: 419193 - DNA, 59 bp, Artificial
  Synthetic oligonucleotide
ggaccaccagtgatctgtggtatgaccctagccgacttcgaggagaaacactataagag

SEQ ID NO: 419194 - DNA, 51 bp, Artificial
  Synthetic oligonucleotide
ggaccacccgtgtgggattgggaggacgtgcgttgggtcttttcgtgtcga

SEQ ID NO: 419195 - DNA, 55 bp, Artificial
  Synthetic oligonucleotide
ggaccacgagagtaactccatgttcagaggattgcgcgactacaacccaatctcg

SEQ ID NO: 419196 - DNA, 55 bp, Artificial
  Synthetic oligonucleotide
ggaccacgcaagattcaccgttctgcttcttagcgttctgcttcgagtacgcagg

SEQ ID NO: 419197 - DNA, 60 bp, Artificial
  Synthetic oligonucleotide
ggaccacggctaattccaagtcacagataaatagacaagtcatagttgacagtgacaact

SEQ ID NO: 419198 - DNA, 60 bp, Artificial
  Synthetic oligonucleotide
ggaccacggtgcagttcgcgcatacgtacatcctatatcgatagaattgacgtcatacta

SEQ ID NO: 419199 - DNA, 57 bp, Artificial
  Synthetic oligonucleotide
ggaccacgtaaaagaatacgcaccaaccgcgttgcttctgacaagtctacatattta

SEQ ID NO: 419200 - DNA, 60 bp, Artificial
  Synthetic oligonucleotide
ggaccactacgcaggacagctggctacactagatattagcacagagcccatgaaactaga

SEQ ID NO: 419201 - DNA, 56 bp, Artificial
  Synthetic oligonucleotide
ggaccactatataaaaagactggcaagagtggccagcgaacctttaacaaagaaga

SEQ ID NO: 419202 - DNA, 60 bp, Artificial
  Synthetic oligonucleotide
ggaccactcacttgcatgcggctcacaggcgagccaggcacttatgatgacaacactgac

SEQ ID NO: 419203 - DNA, 52 bp, Artificial
  Synthetic oligonucleotide
ggaccactcgactgtagtgtacccaacgataacaaccccggtggtaccaaac

SEQ ID NO: 419204 - DNA, 53 bp, Artificial
  Synthetic oligonucleotide
ggaccacttattgatctactcacggaggaccctccgccttaccgggacccagg

SEQ ID NO: 419205 - DNA, 54 bp, Artificial
  Synthetic oligonucleotide
ggaccacttcgaggttctcggcaacgcgatccgaccgcagccgtggatgcagtt

SEQ ID NO: 419206 - DNA, 55 bp, Artificial
  Synthetic oligonucleotide
ggaccacttgcctatctctcacttgcactaacgcgggtaggaaggaaatcgtgag

SEQ ID NO: 419207 - DNA, 58 bp, Artificial
  Synthetic oligonucleotide
ggaccagaagtctatgcagtcttttgtgtagcccttggataagatgttaattgttggg

SEQ ID NO: 419208 - DNA, 60 bp, Artificial
  Synthetic oligonucleotide
ggaccagacaaagaactgtggagggattatgacaccatcgtctatggagacgacagattg

SEQ ID NO: 419209 - DNA, 53 bp, Artificial
  Synthetic oligonucleotide
ggaccagacagggttcgtagatccccgaaagttttggcgaataagctttcctc

SEQ ID NO: 419210 - DNA, 57 bp, Artificial
  Synthetic oligonucleotide
ggaccagacttattcgtaccgagggatgacttacggtattgaacgctgcgttattca

SEQ ID NO: 419211 - DNA, 60 bp, Artificial
  Synthetic oligonucleotide
ggaccagacttcttatggcgccaatgagactcgcgctctatcggcaccatatctgtttgg

SEQ ID NO: 419212 - DNA, 55 bp, Artificial
  Synthetic oligonucleotide
ggaccagagctccgtaaacatccacaagagcctcagaaccaatagtaaggacgtg

SEQ ID NO: 419213 - DNA, 55 bp, Artificial
  Synthetic oligonucleotide
ggaccagagctctggcaagaggcattcgataacttgagagaactcgttcgtttcc

SEQ ID NO: 419214 - DNA, 55 bp, Artificial
  Synthetic oligonucleotide
ggaccagatgcactgctgaatcctaaacacagttgtaaccgaaccgctctaaact

SEQ ID NO: 419215 - DNA, 55 bp, Artificial
  Synthetic oligonucleotide
ggaccagcactaaatatgtggacatatcttaaaacagtgaatgcactgcaaagcc

SEQ ID NO: 419216 - DNA, 55 bp, Artificial
  Synthetic oligonucleotide
ggaccagcagaaccaggcgattgtggaggcattttaagatgtgtacatggaccaa

SEQ ID NO: 419217 - DNA, 55 bp, Artificial
  Synthetic oligonucleotide
ggaccagcagacaataaggcagaccacagagtatactggataagagaagggagaa

SEQ ID NO: 419218 - DNA, 51 bp, Artificial
  Synthetic oligonucleotide
ggaccagcggtctcggtcgtttagggtgcggtggattctttccaacacgtg

SEQ ID NO: 419219 - DNA, 57 bp, Artificial
  Synthetic oligonucleotide
ggaccaggaaccagatacccactaacatttggatggtgcttcaagctagtaccagtg

SEQ ID NO: 419220 - DNA, 60 bp, Artificial
  Synthetic oligonucleotide
ggaccaggacaacacccagatgccatagacaggatcgaacaaataaatgaaggatggcct

SEQ ID NO: 419221 - DNA, 59 bp, Artificial
  Synthetic oligonucleotide
ggaccaggacaagccttctatacaactggtgccattataggggatataagacaagcata

SEQ ID NO: 419222 - DNA, 60 bp, Artificial
  Synthetic oligonucleotide
ggaccaggagcggagggaacacaaatcagcagcgggcatcggctggacaaatcagcgtac

SEQ ID NO: 419223 - DNA, 59 bp, Artificial
  Synthetic oligonucleotide
ggaccaggcacacatgctgcctagaggggttagggaattgggaaggatgtagattgttg

SEQ ID NO: 419224 - DNA, 60 bp, Artificial
  Synthetic oligonucleotide
ggaccagggagagcaatttatgcaacaggaggcataataggagatataagacgagcatat

SEQ ID NO: 419225 - DNA, 60 bp, Artificial
  Synthetic oligonucleotide
ggaccaggggtcagatatccactgacctttggatggcccttcaagctagtgccagtcgac

SEQ ID NO: 419226 - DNA, 60 bp, Artificial
  Synthetic oligonucleotide
ggaccaggggtcagatatccactgacctttggatggtgctacaagctagtgcctattgac

SEQ ID NO: 419227 - DNA, 60 bp, Artificial
  Synthetic oligonucleotide
ggaccagggtccccagagggagccatacaatgaatggatgctagatctgttagaagatct

SEQ ID NO: 419228 - DNA, 55 bp, Artificial
  Synthetic oligonucleotide
ggaccaggtcttgcatgcaaactagccacagatcggataacatcctggatcacag

SEQ ID NO: 419229 - DNA, 55 bp, Artificial
  Synthetic oligonucleotide
ggaccagtacacattgcctggcatcaactcgattgtagcagctgttggcaacgcc

SEQ ID NO: 419230 - DNA, 55 bp, Artificial
  Synthetic oligonucleotide
ggaccagtaggcgtggtacttgtccggatagagccagttcagggtgccccagagg

SEQ ID NO: 419231 - DNA, 55 bp, Artificial
  Synthetic oligonucleotide
ggaccagtatccgggtcagctactattatccgagcctatggggacgcacagagcc

SEQ ID NO: 419232 - DNA, 55 bp, Artificial
  Synthetic oligonucleotide
ggaccagtgcgattcgtgctggccttgatgacattcttcaagttcaccgcgcttg

SEQ ID NO: 419233 - DNA, 55 bp, Artificial
  Synthetic oligonucleotide
ggaccatacaggagaagttgatctccgtggcgggactcgccgtccactctggacc

SEQ ID NO: 419234 - DNA, 55 bp, Artificial
  Synthetic oligonucleotide
ggaccatacagggttcaagttgtttatgagaggacatattgtatgtcaggagtgc

SEQ ID NO: 419235 - DNA, 55 bp, Artificial
  Synthetic oligonucleotide
ggaccatacgctctcgtgtcactgactgtaagtacgtgaccacccagacaagaag

SEQ ID NO: 419236 - DNA, 55 bp, Artificial
  Synthetic oligonucleotide
ggaccatatctggttaaagacacaattaaactaaagcaagaaaggtggcttggca

SEQ ID NO: 419237 - DNA, 60 bp, Artificial
  Synthetic oligonucleotide
ggaccatcacgtacaccaaggaaactttctgttcagagtaatgaaagttgctcagatgat

SEQ ID NO: 419238 - DNA, 55 bp, Artificial
  Synthetic oligonucleotide
ggaccatcacttggcatcgataagaacatgtgcagtttatattgccgaacaagat

SEQ ID NO: 419239 - DNA, 55 bp, Artificial
  Synthetic oligonucleotide
ggaccatcccttgtggtaaagcaccgatgactgatgatgtcagccctggttgtgc

SEQ ID NO: 419240 - DNA, 58 bp, Artificial
  Synthetic oligonucleotide
ggaccatccgacaacagggtcttaactgccctccagctgtgacctttacctccagcca

SEQ ID NO: 419241 - DNA, 55 bp, Artificial
  Synthetic oligonucleotide
ggaccatctagttatgtttaggaacgatttcccgctggaaccgagcgctatccga

SEQ ID NO: 419242 - DNA, 60 bp, Artificial
  Synthetic oligonucleotide
ggaccatctatgaagcacaggttgacgcagctacgcgatgtcattaagtcaagctaccca

SEQ ID NO: 419243 - DNA, 60 bp, Artificial
  Synthetic oligonucleotide
ggaccatctatgaagcataggttaacacaactgcgcgatgtcatcaaatcaagctaccca

SEQ ID NO: 419244 - DNA, 60 bp, Artificial
  Synthetic oligonucleotide
ggaccatcttcaggactccacctatcccaaagcctcgagtgaggagtacatccacagacg

SEQ ID NO: 419245 - DNA, 55 bp, Artificial
  Synthetic oligonucleotide
ggaccatcttggcaacagaagaactgtaagtgtggacaatctgaagctaactgct

SEQ ID NO: 419246 - DNA, 51 bp, Artificial
  Synthetic oligonucleotide
ggaccatgcattgcggtgccatatcctgttattagtagagtgtaccggtat

SEQ ID NO: 419247 - DNA, 55 bp, Artificial
  Synthetic oligonucleotide
ggaccatggagtgtcgggatgtctaaattcaccagaggatgggacactttgcttc

SEQ ID NO: 419248 - DNA, 54 bp, Artificial
  Synthetic oligonucleotide
ggaccatggctgacacccagttccaaatttcctcttccgtcgctcccagcgact

SEQ ID NO: 419249 - DNA, 51 bp, Artificial
  Synthetic oligonucleotide
ggaccatgtcaagggagtcagacccgatctactccctatagcagtgagcat

SEQ ID NO: 419250 - DNA, 55 bp, Artificial
  Synthetic oligonucleotide
ggaccatgtggcgtaatcaaagaatgtattggtcgtaacgaatatcaagtagagg

SEQ ID NO: 419251 - DNA, 51 bp, Artificial
  Synthetic oligonucleotide
ggaccatgttcatttggttattaatgatctgtagtgctacagaacaattgt

SEQ ID NO: 419252 - DNA, 57 bp, Artificial
  Synthetic oligonucleotide
ggaccattcaaaacagtacaaggtgtggttaacttcatttcaagagctggtgtgagg

SEQ ID NO: 419253 - DNA, 59 bp, Artificial
  Synthetic oligonucleotide
ggaccattcaagtgacaagctatgccggacgatggcctaaagtgggcaacagcgttacg

SEQ ID NO: 419254 - DNA, 55 bp, Artificial
  Synthetic oligonucleotide
ggaccattcacgtttgacctgtcgagccaaattaatattagcctaactgaatcgc

SEQ ID NO: 419255 - DNA, 56 bp, Artificial
  Synthetic oligonucleotide
ggaccattcaggccaggacacaacccttttagagctcccggaataacggagcaaga

SEQ ID NO: 419256 - DNA, 59 bp, Artificial
  Synthetic oligonucleotide
ggaccattcgttcctggtcagggataagcagtaagccatgtcgacgtccaagaggaagc

SEQ ID NO: 419257 - DNA, 56 bp, Artificial
  Synthetic oligonucleotide
ggaccattctgtgtgaaaaatgaaccactggaatttcaggtatacccgccagaacc

SEQ ID NO: 419258 - DNA, 55 bp, Artificial
  Synthetic oligonucleotide
ggaccattgccacgattccctgctagttcggggtatcctatgccgaggatgcaac

SEQ ID NO: 419259 - DNA, 55 bp, Artificial
  Synthetic oligonucleotide
ggaccatttgaagcgaagtgggtcattgagatgcagatcacagaaattacaaccc

SEQ ID NO: 419260 - DNA, 48 bp, Artificial
  Synthetic oligonucleotide
ggacccaaagacggctgaccccgtttacgggaaagtgttcaacccccc

SEQ ID NO: 419261 - DNA, 58 bp, Artificial
  Synthetic oligonucleotide
ggacccaaatacagtcgagccccttgatcaaagacactttagtgtccagagaaattca

SEQ ID NO: 419262 - DNA, 55 bp, Artificial
  Synthetic oligonucleotide
ggacccaaatgggtggaccgaaacagacagtagcttctcgttgaagcaagacatc

SEQ ID NO: 419263 - DNA, 53 bp, Artificial
  Synthetic oligonucleotide
ggacccaactgttcaatcaatacgccactttcgcaacaacgttgcacgtagtc

SEQ ID NO: 419264 - DNA, 54 bp, Artificial
  Synthetic oligonucleotide
ggacccaagacaaggcttggctgctctaaggaaagttaaaagagtggttgccgg

SEQ ID NO: 419265 - DNA, 55 bp, Artificial
  Synthetic oligonucleotide
ggacccaagtcacgagggagagggaataccactgtatgatgccatcaaatgcatg

SEQ ID NO: 419266 - DNA, 55 bp, Artificial
  Synthetic oligonucleotide
ggacccacacagtggagcaaccccagctccctcctacaaagctttgtgagaatga

SEQ ID NO: 419267 - DNA, 60 bp, Artificial
  Synthetic oligonucleotide
ggacccacgcgagtgattgacatgaacgccatgattgacgccaaactcacactggacgtc

SEQ ID NO: 419268 - DNA, 55 bp, Artificial
  Synthetic oligonucleotide
ggacccacgtaacacgcaagatcacgtgcggtcactgtgtctcctagcgtggcac

SEQ ID NO: 419269 - DNA, 57 bp, Artificial
  Synthetic oligonucleotide
ggacccaggcgtttaaattgatcgttgcaatcgacaagtgcaacgattatcttcggg

SEQ ID NO: 419270 - DNA, 57 bp, Artificial
  Synthetic oligonucleotide
ggacccaggtccaagcaagcacacatcgacactccaaccagtcgagcggagaccacc

SEQ ID NO: 419271 - DNA, 52 bp, Artificial
  Synthetic oligonucleotide
ggacccataggcttcgcggaggctaaccctgttgaactgccgttcgggaaca

SEQ ID NO: 419272 - DNA, 57 bp, Artificial
  Synthetic oligonucleotide
ggacccatcgtccagcccaatggtctaccaatggttgcctaaccctcagaacaagcg

SEQ ID NO: 419273 - DNA, 55 bp, Artificial
  Synthetic oligonucleotide
ggacccatctcaaagtgtgacctttgcaactaatgatgctagctttgttccctac

SEQ ID NO: 419274 - DNA, 51 bp, Artificial
  Synthetic oligonucleotide
ggaccccaagaaaaccgttaacaccagtgccccatcttttctgggttgccg

SEQ ID NO: 419275 - DNA, 52 bp, Artificial
  Synthetic oligonucleotide
ggaccccactatacggcagtctctgcacgccacctatttgagatgtgggttg

SEQ ID NO: 419276 - DNA, 56 bp, Artificial
  Synthetic oligonucleotide
ggaccccataaattccttaaagtgctttaggtagtggggatcgacgtcatcaatga

SEQ ID NO: 419277 - DNA, 55 bp, Artificial
  Synthetic oligonucleotide
ggaccccattttgagtgatccagactcactgctaatcctgagagtcgcacaacag

SEQ ID NO: 419278 - DNA, 56 bp, Artificial
  Synthetic oligonucleotide
ggacccccctcggttattaggtaagctgtgagtaagcagccgctagcgttctggat

SEQ ID NO: 419279 - DNA, 59 bp, Artificial
  Synthetic oligonucleotide
ggaccccctacatggccttatgcacctcaatcgccttttgataccacccatgatgtagt

SEQ ID NO: 419280 - DNA, 55 bp, Artificial
  Synthetic oligonucleotide
ggaccccctatccatttgttttaccttcaccctccactatatagtctgttgcctg

SEQ ID NO: 419281 - DNA, 52 bp, Artificial
  Synthetic oligonucleotide
ggacccccttccgaaaagactgaggggggatcttggagcgtggaggacccag

SEQ ID NO: 419282 - DNA, 60 bp, Artificial
  Synthetic oligonucleotide
ggaccccgcatctgcaagggtttgtgcatctaaagcagaaaaagcggcttccgcaactga

SEQ ID NO: 419283 - DNA, 52 bp, Artificial
  Synthetic oligonucleotide
ggaccccgcatttgcaagggtttatacacctaaagcagaagaagcggctttc

SEQ ID NO: 419284 - DNA, 53 bp, Artificial
  Synthetic oligonucleotide
ggaccccgcgaccggtgtacgcttttgcttatggacccaccttatctttagtc

SEQ ID NO: 419285 - DNA, 50 bp, Artificial
  Synthetic oligonucleotide
ggaccccgcgatagggtctgttagggtcgggggttcggcctgtcatcacg

SEQ ID NO: 419286 - DNA, 54 bp, Artificial
  Synthetic oligonucleotide
ggaccccgtggggtactgacaaagaactcccacccgaggcctattatctgaagc

SEQ ID NO: 419287 - DNA, 53 bp, Artificial
  Synthetic oligonucleotide
ggacccctataatcctccgagcgatccaactgactgtgatctatcggaagtcc

SEQ ID NO: 419288 - DNA, 45 bp, Artificial
  Synthetic oligonucleotide
ggacccctccgacgtcttggtgttcgtcccgtacgatcaagaacc

SEQ ID NO: 419289 - DNA, 55 bp, Artificial
  Synthetic oligonucleotide
ggacccctctcagatcccagatacagtcaaaaccttccgtctcacaaccgaccct

SEQ ID NO: 419290 - DNA, 55 bp, Artificial
  Synthetic oligonucleotide
ggaccccttcagcgaacagaagacgctcacggacggtaggagtaagaccgtagcg

SEQ ID NO: 419291 - DNA, 54 bp, Artificial
  Synthetic oligonucleotide
ggacccctttctttggtgggtttgcaagaaaaatgaggcgactcgacaagaata

SEQ ID NO: 419292 - DNA, 60 bp, Artificial
  Synthetic oligonucleotide
ggacccgaattcagtgatatggatgggaagtgatgcaaagataaacaccacaaactccag

SEQ ID NO: 419293 - DNA, 56 bp, Artificial
  Synthetic oligonucleotide
ggacccgaatttttgatgggttggctcgagtgtcgcctaaggcactaaatggagac

SEQ ID NO: 419294 - DNA, 60 bp, Artificial
  Synthetic oligonucleotide
ggacccgagccatgagggcgagggaataccgctgtatgatgcaatcaaatgcatgaagac

SEQ ID NO: 419295 - DNA, 55 bp, Artificial
  Synthetic oligonucleotide
ggacccgcgggcccaatcattcagatccatcagagactctagtgccacacactca

SEQ ID NO: 419296 - DNA, 54 bp, Artificial
  Synthetic oligonucleotide
ggacccggcgttcggagccaactcaaacaatccagattgggacttcaaccccaa

SEQ ID NO: 419297 - DNA, 55 bp, Artificial
  Synthetic oligonucleotide
ggacccggtgagctattgtggaaaggggaaggagcagtcatcctaaaggtaggga

SEQ ID NO: 419298 - DNA, 55 bp, Artificial
  Synthetic oligonucleotide
ggacccgtggataataggacaactatacggggcgtatagacactggggacatccc

SEQ ID NO: 419299 - DNA, 55 bp, Artificial
  Synthetic oligonucleotide
ggacccgtgtcgtatgcgaggatctcagtcaatacaggcgaccgttcatttcgag

SEQ ID NO: 419300 - DNA, 60 bp, Artificial
  Synthetic oligonucleotide
ggacccgtgttgtggcgctatacaatgccatcatgggggcagcggccaccactgtcctgt

SEQ ID NO: 419301 - DNA, 54 bp, Artificial
  Synthetic oligonucleotide
ggaccctaataatgagagagggaatccaggagtaaaagggtgggcctttgacaa

SEQ ID NO: 419302 - DNA, 54 bp, Artificial
  Synthetic oligonucleotide
ggaccctaccagttcagaaagcaaaaggggccaacaagaggatcaagtacctgg

SEQ ID NO: 419303 - DNA, 60 bp, Artificial
  Synthetic oligonucleotide
ggaccctagaaacacacaggatcacgtacgctcattgtgcctattggcttggcataacgg

SEQ ID NO: 419304 - DNA, 55 bp, Artificial
  Synthetic oligonucleotide
ggaccctattatgctggtgtgtggagacgacctggtcgtcatctcagagagccaa

SEQ ID NO: 419305 - DNA, 57 bp, Artificial
  Synthetic oligonucleotide
ggaccctccttcaaaccgtactcgggcaccgcgtacaacatcatggctcccaagagc

SEQ ID NO: 419306 - DNA, 52 bp, Artificial
  Synthetic oligonucleotide
ggaccctcgttacgatttggtccaaccgggacaagttgccaagcgaccgcgt

SEQ ID NO: 419307 - DNA, 51 bp, Artificial
  Synthetic oligonucleotide
ggaccctcgttcttctacgctacacgttcggagcacccgagaccggtagcg

SEQ ID NO: 419308 - DNA, 59 bp, Artificial
  Synthetic oligonucleotide
ggaccctgacacgtacgaacaatcggtgatgtggttgcgtgatggagatttccaggacg

SEQ ID NO: 419309 - DNA, 52 bp, Artificial
  Synthetic oligonucleotide
ggaccctgcattcaaggccaactccgacagtcccgattgggacctcaaccct

SEQ ID NO: 419310 - DNA, 53 bp, Artificial
  Synthetic oligonucleotide
ggaccctgccgcggttggagacttcgtagtcagggaatcccgggatttccttc

SEQ ID NO: 419311 - DNA, 55 bp, Artificial
  Synthetic oligonucleotide
ggaccctgccttgactttgccttgtccctacttcgtaggaatattagacaagtgc

SEQ ID NO: 419312 - DNA, 55 bp, Artificial
  Synthetic oligonucleotide
ggaccctggattgtgtggggtcacaactaacagtgagaactgtaacaagcgacgg

SEQ ID NO: 419313 - DNA, 58 bp, Artificial
  Synthetic oligonucleotide
ggaccctgtaccgaacatggagaacatcacatcaggactcctaggacccctggccgtg

SEQ ID NO: 419314 - DNA, 55 bp, Artificial
  Synthetic oligonucleotide
ggacccttcctgatgtcattaggtttgccgggcggccttcagagaagaactgggg

SEQ ID NO: 419315 - DNA, 58 bp, Artificial
  Synthetic oligonucleotide
ggacccttctgagtctgagctcttttaatgggctcggcgtgagattcctctacagttt

SEQ ID NO: 419316 - DNA, 55 bp, Artificial
  Synthetic oligonucleotide
ggacccttgccctaggcaccttccaaggcaggtcctctcaggccccctttcaggc

SEQ ID NO: 419317 - DNA, 52 bp, Artificial
  Synthetic oligonucleotide
ggacccttttgatgaacgaactgggtgttccgttccatttaggaaccaaaca

SEQ ID NO: 419318 - DNA, 55 bp, Artificial
  Synthetic oligonucleotide
ggaccgacaaatccagatgggacatacacttccacattacagaaccgaggggcac

SEQ ID NO: 419319 - DNA, 59 bp, Artificial
  Synthetic oligonucleotide
ggaccgacaaatccagatggggcatacacttccacattacagaaccgaggggcacttca

SEQ ID NO: 419320 - DNA, 52 bp, Artificial
  Synthetic oligonucleotide
ggaccgaccacgaactccacttccggttcagttggacctccacacccaaccc

SEQ ID NO: 419321 - DNA, 51 bp, Artificial
  Synthetic oligonucleotide
ggaccgacgagcctttatcaccaggccaacaaaggggtcagagtcgcctat

SEQ ID NO: 419322 - DNA, 57 bp, Artificial
  Synthetic oligonucleotide
ggaccgactgggttggtagggcgtaatgattggcctttgttagctcaacaattgtca

SEQ ID NO: 419323 - DNA, 53 bp, Artificial
  Synthetic oligonucleotide
ggaccgacttttttacaaagtcgagaggtggtgtttacgcaccactttcctgc

SEQ ID NO: 419324 - DNA, 55 bp, Artificial
  Synthetic oligonucleotide
ggaccgaggtgttctttcacagcactgctaggcttaatccacgaagactggcaaa

SEQ ID NO: 419325 - DNA, 53 bp, Artificial
  Synthetic oligonucleotide
ggaccgagtccagttcgggcctatagtagccttaaacccggctaccctgcttc

SEQ ID NO: 419326 - DNA, 55 bp, Artificial
  Synthetic oligonucleotide
ggaccgatgagacatgttagattaacacatctctacaaacatactaagctctgga

SEQ ID NO: 419327 - DNA, 55 bp, Artificial
  Synthetic oligonucleotide
ggaccgatgcaatccaaaattttcacatttgcccttactatggcaagtggcagaa

SEQ ID NO: 419328 - DNA, 54 bp, Artificial
  Synthetic oligonucleotide
ggaccgatgtaccgcctattttgtactgccaaaggaatgtccgagcgggcttac

SEQ ID NO: 419329 - DNA, 55 bp, Artificial
  Synthetic oligonucleotide
ggaccgccaagtggttttatggatacgccgaatgtatcgtcagctcagtcatctg

SEQ ID NO: 419330 - DNA, 59 bp, Artificial
  Synthetic oligonucleotide
ggaccgccaggcacttcgctcggatactttcacaaccggcaatttccgatgaagctcca

SEQ ID NO: 419331 - DNA, 55 bp, Artificial
  Synthetic oligonucleotide
ggaccgcgagaacttcgagaaacatgggtcaagtgctggctacaggtccacaaaa

SEQ ID NO: 419332 - DNA, 55 bp, Artificial
  Synthetic oligonucleotide
ggaccgctgcacccattatgttttcatggagagcacaaacgccctcacagagctc

SEQ ID NO: 419333 - DNA, 55 bp, Artificial
  Synthetic oligonucleotide
ggaccgctgggtttacaaatacaatgtcgaacaaacaaggatgaacactgaccct

SEQ ID NO: 419334 - DNA, 56 bp, Artificial
  Synthetic oligonucleotide
ggaccggacaccctccggggtgatgaggtcaaaggaactcaagaatccatggccca

SEQ ID NO: 419335 - DNA, 53 bp, Artificial
  Synthetic oligonucleotide
ggaccggaggatacggccacctacagcgtcccggagaggatggacccatcacc

SEQ ID NO: 419336 - DNA, 51 bp, Artificial
  Synthetic oligonucleotide
ggaccggagttaggactgtcaccaccggagctgctatcacatactctactt

SEQ ID NO: 419337 - DNA, 55 bp, Artificial
  Synthetic oligonucleotide
ggaccggataactgatgaatttgagcggacaaaatttaaacatgagcttacacag

SEQ ID NO: 419338 - DNA, 60 bp, Artificial
  Synthetic oligonucleotide
ggaccggctatgttggagaatacatttcgtggagtgaagccacacttctcatatgctcaa

SEQ ID NO: 419339 - DNA, 50 bp, Artificial
  Synthetic oligonucleotide
ggaccgggggcccctcgtcttgtaaaacgccctcgacggccctgcgtgtg

SEQ ID NO: 419340 - DNA, 56 bp, Artificial
  Synthetic oligonucleotide
ggaccgggtcttgtggaagttcaggagagtgagtattacccgaaaagatatcagtc

SEQ ID NO: 419341 - DNA, 52 bp, Artificial
  Synthetic oligonucleotide
ggaccggtacacatttgaaccgtacccaacctactcccaggagttatttaga

SEQ ID NO: 419342 - DNA, 57 bp, Artificial
  Synthetic oligonucleotide
ggaccggtctattgtttcacccctagccctgttgtcgtgggcaccactgacaagcag

SEQ ID NO: 419343 - DNA, 59 bp, Artificial
  Synthetic oligonucleotide
ggaccggttcagtaggcagtggcttaagcgcaagttcacacctagggcagcggagcacc

SEQ ID NO: 419344 - DNA, 55 bp, Artificial
  Synthetic oligonucleotide
ggaccgtagtggaacttcatcctgacataagatatatttacagaagtctgaaaga

SEQ ID NO: 419345 - DNA, 55 bp, Artificial
  Synthetic oligonucleotide
ggaccgtcgccacggtgttaatcaaacgggcgtcgggagaactcgtgccgcttgc

SEQ ID NO: 419346 - DNA, 55 bp, Artificial
  Synthetic oligonucleotide
ggaccgtctcaagatggggctccctgttcaactcgacaccagtcaaggtccgctc

SEQ ID NO: 419347 - DNA, 55 bp, Artificial
  Synthetic oligonucleotide
ggaccgtgacggcagagttactaatccatctagagttgttcagatagatggtgac

SEQ ID NO: 419348 - DNA, 55 bp, Artificial
  Synthetic oligonucleotide
ggaccgtgacttcaaggaaaggcggtcgtgatgagtgcagacactgacgacttcc

SEQ ID NO: 419349 - DNA, 55 bp, Artificial
  Synthetic oligonucleotide
ggaccgtgtaaaattcccatctcctcggtggcgtctctaaatgatctcacgcctg

SEQ ID NO: 419350 - DNA, 55 bp, Artificial
  Synthetic oligonucleotide
ggaccgtgtacatatgtcagcacagtacagtgtacacatggcgttaagccagtag

SEQ ID NO: 419351 - DNA, 60 bp, Artificial
  Synthetic oligonucleotide
ggaccgtgtgcacttcgcttcacctctgcacgttgcatggagaccaccgtgaacgcccct

SEQ ID NO: 419352 - DNA, 54 bp, Artificial
  Synthetic oligonucleotide
ggaccgtgtgtggactcgtgtgggggactccgggtaaggctaacgaaggcagga

SEQ ID NO: 419353 - DNA, 51 bp, Artificial
  Synthetic oligonucleotide
ggaccgttaaactgtacgtaacgacggatgaagctgaggtacaaaagccgg

SEQ ID NO: 419354 - DNA, 56 bp, Artificial
  Synthetic oligonucleotide
ggaccgttaccaccagggcagcttagagacccaacaggaggggatattgcaggaac

SEQ ID NO: 419355 - DNA, 55 bp, Artificial
  Synthetic oligonucleotide
ggaccgttgtcctaactaactcgtttaattgggccattgacattgtaatgtttga

SEQ ID NO: 419356 - DNA, 60 bp, Artificial
  Synthetic oligonucleotide
ggaccgtttgctcaaacgaattatgcaccagtgacttggagtcatggggaagtgaatgat

SEQ ID NO: 419357 - DNA, 55 bp, Artificial
  Synthetic oligonucleotide
ggacctaaagcctatctgttcccagaacgcttaccacccatgtggaccaagcaag

SEQ ID NO: 419358 - DNA, 58 bp, Artificial
  Synthetic oligonucleotide
ggacctaacatcattccaggtgtgaacgtcaaccgcaaatctaaactcggtcgctctc

SEQ ID NO: 419359 - DNA, 54 bp, Artificial
  Synthetic oligonucleotide
ggacctaactgcagagtgtgcgaggcctcgtggactggccgaaataatgcaaga

SEQ ID NO: 419360 - DNA, 55 bp, Artificial
  Synthetic oligonucleotide
ggacctaagagaaatcttagaataccttaagcaccaatctacatgagcgctgatt

SEQ ID NO: 419361 - DNA, 54 bp, Artificial
  Synthetic oligonucleotide
ggacctaagcccccggctaggggctatatccctaggacggcggtcagccaaagc

SEQ ID NO: 419362 - DNA, 51 bp, Artificial
  Synthetic oligonucleotide
ggacctaatcgctacttgtattccgttagtctgaacgcggaatgtccgaag

SEQ ID NO: 419363 - DNA, 60 bp, Artificial
  Synthetic oligonucleotide
ggacctaatgagtactaccaaggatggacttcatctgatgctaccgttagcgtaaatgta

SEQ ID NO: 419364 - DNA, 55 bp, Artificial
  Synthetic oligonucleotide
ggacctaatggtggggaagggaaatccactttcgccagagacctatacagaagtg

SEQ ID NO: 419365 - DNA, 55 bp, Artificial
  Synthetic oligonucleotide
ggacctaattggagtcacgtgaccccttctagagcacgtggacgtgcattgaagt

SEQ ID NO: 419366 - DNA, 54 bp, Artificial
  Synthetic oligonucleotide
ggacctacgtcgggtggagttggcgatcacgggccaggccccgtttcgcacgct

SEQ ID NO: 419367 - DNA, 60 bp, Artificial
  Synthetic oligonucleotide
ggacctactataggtgttaacactaaacatgatgaattatgcacagggccatgtcctgtc

SEQ ID NO: 419368 - DNA, 56 bp, Artificial
  Synthetic oligonucleotide
ggacctactcgcactaagcttgagccaagtgtctttcacgatgtgttcgaaggcac

SEQ ID NO: 419369 - DNA, 60 bp, Artificial
  Synthetic oligonucleotide
ggacctagaaaaacatggagcactcacaagtagcaatacagcagctaccaatgctgattg

SEQ ID NO: 419370 - DNA, 51 bp, Artificial
  Synthetic oligonucleotide
ggacctagacaaatgggcgaggacatgggtagaaagcatgaccgggactga

SEQ ID NO: 419371 - DNA, 59 bp, Artificial
  Synthetic oligonucleotide
ggacctagacctggccctgtactatggctgccgcttcaggttttacagacacgaccgca

SEQ ID NO: 419372 - DNA, 60 bp, Artificial
  Synthetic oligonucleotide
ggacctagccacaaagccagagtgttggctgaggcaatgagccaaacacaaggtgtaaac

SEQ ID NO: 419373 - DNA, 60 bp, Artificial
  Synthetic oligonucleotide
ggacctagccgctcactggcacgcactcggggctgctcaggaggcgaagggacgtactct

SEQ ID NO: 419374 - DNA, 51 bp, Artificial
  Synthetic oligonucleotide
ggacctaggcgggcctcttatgaggctaacttatcgacaataagttaggtc

SEQ ID NO: 419375 - DNA, 55 bp, Artificial
  Synthetic oligonucleotide
ggacctagtagtcaattatgtcaactctaatatgggcctaaagttcagacaactg

SEQ ID NO: 419376 - DNA, 55 bp, Artificial
  Synthetic oligonucleotide
ggacctagtgatcaatgtgtacataccaaggatgcaatatacacttgtgcacact

SEQ ID NO: 419377 - DNA, 60 bp, Artificial
  Synthetic oligonucleotide
ggacctatcaagaagtgtaagtggtgtggctatgacttcgtcaactcagagggactgccg

SEQ ID NO: 419378 - DNA, 57 bp, Artificial
  Synthetic oligonucleotide
ggacctatcgtcatacagtatttctccgttaaggagagttggatccgccacgtgaaa

SEQ ID NO: 419379 - DNA, 59 bp, Artificial
  Synthetic oligonucleotide
ggacctcaagtgggctagattccctaagagtgatggtacaggtactatctatacagaac

SEQ ID NO: 419380 - DNA, 55 bp, Artificial
  Synthetic oligonucleotide
ggacctcagtgtatgtgcaaaatgaggaaggcttttggcagaaacatagcagtga

SEQ ID NO: 419381 - DNA, 55 bp, Artificial
  Synthetic oligonucleotide
ggacctcatatttatgtagggacccctagtggctctttagtatccagtgaatccc

SEQ ID NO: 419382 - DNA, 53 bp, Artificial
  Synthetic oligonucleotide
ggacctccaattggaagaacatttggatcgctgcctttaggagttgggcgtac

SEQ ID NO: 419383 - DNA, 51 bp, Artificial
  Synthetic oligonucleotide
ggacctccagctattgccaatgaaccacctatctgattaagtgccgttgcg

SEQ ID NO: 419384 - DNA, 54 bp, Artificial
  Synthetic oligonucleotide
ggacctccgtaccaattcagaggttgaccttgtggtcccatatgtgaactacac

SEQ ID NO: 419385 - DNA, 58 bp, Artificial
  Synthetic oligonucleotide
ggacctcgacctactggggtggtccgccacgtactcgcgtcacatggacatgtgggtc

SEQ ID NO: 419386 - DNA, 56 bp, Artificial
  Synthetic oligonucleotide
ggacctcgcagcgtacaagcggttgacccgaaatacaataccccagaagtcacttg

SEQ ID NO: 419387 - DNA, 58 bp, Artificial
  Synthetic oligonucleotide
ggacctctaaggtatcccgctctaccaattatacgcctcgtgcaggcatgggcccaaa

SEQ ID NO: 419388 - DNA, 58 bp, Artificial
  Synthetic oligonucleotide
ggacctctaaggtgtcccgcaatgctaactactcacctcgtgcaggtataacccataa

SEQ ID NO: 419389 - DNA, 55 bp, Artificial
  Synthetic oligonucleotide
ggacctctctacctgctgcaggcgagtttgttgcgcgtaccgtattacgtgcgcg

SEQ ID NO: 419390 - DNA, 56 bp, Artificial
  Synthetic oligonucleotide
ggacctctgtaaagcttattgaacttgacgtttggtatgcttttgatagattcaag

SEQ ID NO: 419391 - DNA, 55 bp, Artificial
  Synthetic oligonucleotide
ggacctcttagaggagacataggctcagtagtgcatacatgtagaagacattatg

SEQ ID NO: 419392 - DNA, 53 bp, Artificial
  Synthetic oligonucleotide
ggacctgaactctaaatacccttaagaaacgaccagtctgaggccgtaaggtc

SEQ ID NO: 419393 - DNA, 55 bp, Artificial
  Synthetic oligonucleotide
ggacctgacattgatgcacaaatgcttgatattctgtcagccacccaccaggccc

SEQ ID NO: 419394 - DNA, 55 bp, Artificial
  Synthetic oligonucleotide
ggacctgacgagtaccggcgtctctttgaacctttccaaggtctcttcgagattc

SEQ ID NO: 419395 - DNA, 54 bp, Artificial
  Synthetic oligonucleotide
ggacctgagatggtccagaggaggaccattgaaggaccagagatagaggtccac

SEQ ID NO: 419396 - DNA, 53 bp, Artificial
  Synthetic oligonucleotide
ggacctgagcggcgctatcggctacgacgacgaggtcggggcaccggccacgt

SEQ ID NO: 419397 - DNA, 53 bp, Artificial
  Synthetic oligonucleotide
ggacctgcgatagtgccaacccacgtcttttcccactcctaacccggttccca

SEQ ID NO: 419398 - DNA, 50 bp, Artificial
  Synthetic oligonucleotide
ggacctggaacggtgacgtttttaaggtgagtatggtttttaccatttac

SEQ ID NO: 419399 - DNA, 59 bp, Artificial
  Synthetic oligonucleotide
ggacctggccacaaggcaagagttttagccgaggcaatgagccaagtaggccatacaaa

SEQ ID NO: 419400 - DNA, 58 bp, Artificial
  Synthetic oligonucleotide
ggacctggcccacattgtcttccccgttctactctcaccctccaacactatactcatg

SEQ ID NO: 419401 - DNA, 53 bp, Artificial
  Synthetic oligonucleotide
ggacctgtcgaaatttaacgatgttgaccccaatttgaattgttgggaacctg

SEQ ID NO: 419402 - DNA, 55 bp, Artificial
  Synthetic oligonucleotide
ggacctgtggagaggcaacgcaaaagtgtgcatttgtaacaatatggtatgctaa

SEQ ID NO: 419403 - DNA, 59 bp, Artificial
  Synthetic oligonucleotide
ggacctgttatatatagcccaggattgtttcctaggttgaaccaatcttcatgtgataa

SEQ ID NO: 419404 - DNA, 59 bp, Artificial
  Synthetic oligonucleotide
ggacctgtttgtgctgaagcctcagatgtgtatagcccatgtatgatagctagcactcc

SEQ ID NO: 419405 - DNA, 56 bp, Artificial
  Synthetic oligonucleotide
ggacctgtttttccaccgggtatgaattggacagatcttatcactaactactcacc

SEQ ID NO: 419406 - DNA, 55 bp, Artificial
  Synthetic oligonucleotide
ggaccttaacattagagcagaagccggatagctctctccttaggtgttgtgtcca

SEQ ID NO: 419407 - DNA, 55 bp, Artificial
  Synthetic oligonucleotide
ggaccttaactcggtggaagttaagataggttcttatcctatagatcctgaaata

SEQ ID NO: 419408 - DNA, 55 bp, Artificial
  Synthetic oligonucleotide
ggaccttaagcttaaagaatccacaatcattagaggaacgtatggacgctgccaa

SEQ ID NO: 419409 - DNA, 55 bp, Artificial
  Synthetic oligonucleotide
ggaccttacgcccgctacattgaccgacgcatacgagcacttctgccgccacacg

SEQ ID NO: 419410 - DNA, 55 bp, Artificial
  Synthetic oligonucleotide
ggaccttactggcaaagtctgtattcaatagcctgtacgcatccccacaactcga

SEQ ID NO: 419411 - DNA, 55 bp, Artificial
  Synthetic oligonucleotide
ggaccttcgataacaggctagaagcgtcggaaaatggaatagaacgttccgacat

SEQ ID NO: 419412 - DNA, 60 bp, Artificial
  Synthetic oligonucleotide
ggaccttcgatcttggtgggctatatgaagcaattgaggagtgcctgattaacgatcctt

SEQ ID NO: 419413 - DNA, 51 bp, Artificial
  Synthetic oligonucleotide
ggaccttcgattcggaccacgaccattagaaccccggctccgccttgtcct

SEQ ID NO: 419414 - DNA, 60 bp, Artificial
  Synthetic oligonucleotide
ggaccttctattctgatctgtcgtctgcaaaattgcatgcaaagagatgtaatcaaaaga

SEQ ID NO: 419415 - DNA, 55 bp, Artificial
  Synthetic oligonucleotide
ggaccttctggaaccgggaagtccaagcgagccaatgagacctggccggacgcat

SEQ ID NO: 419416 - DNA, 55 bp, Artificial
  Synthetic oligonucleotide
ggaccttgaggttacggtggtctcactagagccggatctggaatttgctgtaggg

SEQ ID NO: 419417 - DNA, 55 bp, Artificial
  Synthetic oligonucleotide
ggaccttgcacctggaacggtatcagcattagaatgcatagatctactggatagg

SEQ ID NO: 419418 - DNA, 55 bp, Artificial
  Synthetic oligonucleotide
ggaccttgcagaagctcaattaggacttccgcatccaggaggaatgcagcacatg

SEQ ID NO: 419419 - DNA, 55 bp, Artificial
  Synthetic oligonucleotide
ggaccttgctgcattaaggttatgtattgaagtttggcgctggtgcaaagcaaac

SEQ ID NO: 419420 - DNA, 59 bp, Artificial
  Synthetic oligonucleotide
ggaccttgtaaggttcagtcttacgagcagagacatgatgtttctcatgtcgggaaggt

SEQ ID NO: 419421 - DNA, 55 bp, Artificial
  Synthetic oligonucleotide
ggaccttgtaatcagacagtcataacacactgtacacatggaattaagccaacag

SEQ ID NO: 419422 - DNA, 55 bp, Artificial
  Synthetic oligonucleotide
ggaccttgtggtctacacgttaagtcccttcgctggactgagctagacgaccgct

SEQ ID NO: 419423 - DNA, 55 bp, Artificial
  Synthetic oligonucleotide
ggaccttgttcccagaactgtcatccacagatgaggaactaggaaagactgagag

SEQ ID NO: 419424 - DNA, 55 bp, Artificial
  Synthetic oligonucleotide
ggacctttagacgatcgatactcacgtccaatgccatatgttcgacccgaaactc

SEQ ID NO: 419425 - DNA, 53 bp, Artificial
  Synthetic oligonucleotide
ggacctttccaggaaattcgactttggactcaagctttgacgggtacaccgtg

SEQ ID NO: 419426 - DNA, 55 bp, Artificial
  Synthetic oligonucleotide
ggaccttttaggccctatctgggttccggcacaagcgagggtacaagcatcctgc

SEQ ID NO: 419427 - DNA, 55 bp, Artificial
  Synthetic oligonucleotide
ggacgaaaacagtatggacatacacggacagctcatcagaaacaggttactcagt

SEQ ID NO: 419428 - DNA, 55 bp, Artificial
  Synthetic oligonucleotide
ggacgaaacgagcctgagagagttcatcgaggtcggtgataccccgtgacgaccg

SEQ ID NO: 419429 - DNA, 60 bp, Artificial
  Synthetic oligonucleotide
ggacgaaagtccgatctccgatctgcttgcccatgattcgttcggacctatagccagata

SEQ ID NO: 419430 - DNA, 55 bp, Artificial
  Synthetic oligonucleotide
ggacgaaagtttctgtatcaagctggtatacgtactgctgttacgggccgcgggg

SEQ ID NO: 419431 - DNA, 54 bp, Artificial
  Synthetic oligonucleotide
ggacgaaatagtcaatagaggtaaaggtgttattacttttgtttgtccaatgcc

SEQ ID NO: 419432 - DNA, 54 bp, Artificial
  Synthetic oligonucleotide
ggacgaaatcttatcggcatacggggtaacaccctgcataaacccgtctacaac

SEQ ID NO: 419433 - DNA, 55 bp, Artificial
  Synthetic oligonucleotide
ggacgaaattcgcaagagtccaagtagcacacttactcgggaagagagcacagcg

SEQ ID NO: 419434 - DNA, 58 bp, Artificial
  Synthetic oligonucleotide
ggacgaacaatcaagaaagattcgcgctctggttatgagactttcagggtcgttggtg

SEQ ID NO: 419435 - DNA, 57 bp, Artificial
  Synthetic oligonucleotide
ggacgaacagatatgcgtgttgtccgaaggaaggggactttccagtatgcgcctaaa

SEQ ID NO: 419436 - DNA, 56 bp, Artificial
  Synthetic oligonucleotide
ggacgaacattcccaggatttgtactaaggggaagaaagcaattgatcttggtcag

SEQ ID NO: 419437 - DNA, 55 bp, Artificial
  Synthetic oligonucleotide
ggacgaagactatcaggggaggctttgcaaccctctgaacccgtttgtcagccac

SEQ ID NO: 419438 - DNA, 55 bp, Artificial
  Synthetic oligonucleotide
ggacgaaggctggaggaaagatctacgcggatgacactgcaggctgggacacacg

SEQ ID NO: 419439 - DNA, 55 bp, Artificial
  Synthetic oligonucleotide
ggacgaagtggtgctgttacacttcggacaactctgtgccgtgatggcgaagctg

SEQ ID NO: 419440 - DNA, 56 bp, Artificial
  Synthetic oligonucleotide
ggacgaagttagattgcacccccttcctgaagaccttcttggagctttcaagagaa

SEQ ID NO: 419441 - DNA, 51 bp, Artificial
  Synthetic oligonucleotide
ggacgaagtttcacaggtaggaatttaattcgttatcggtttgagggtggg

SEQ ID NO: 419442 - DNA, 60 bp, Artificial
  Synthetic oligonucleotide
ggacgaataattcagcaacccttgtgctgccctacgtaaactccctagcaatagactgca

SEQ ID NO: 419443 - DNA, 58 bp, Artificial
  Synthetic oligonucleotide
ggacgaatatctgtctggaccttacagtgagggctttgatctgtttctttccgatcct

SEQ ID NO: 419444 - DNA, 55 bp, Artificial
  Synthetic oligonucleotide
ggacgaatgcaatacgttatcccaaacgagttcttaaaatacactggtcgagtac

SEQ ID NO: 419445 - DNA, 60 bp, Artificial
  Synthetic oligonucleotide
ggacgaatgtccaaatgggcggaatctatgtcgccatggcactagatgcctgcgacatgg

SEQ ID NO: 419446 - DNA, 56 bp, Artificial
  Synthetic oligonucleotide
ggacgacaaacacagaaactggagcaccacaacttaacccaattgacggaccatta

SEQ ID NO: 419447 - DNA, 55 bp, Artificial
  Synthetic oligonucleotide
ggacgacaaccccgggagcatacactatctatggtggtagacccgaattcggagc

SEQ ID NO: 419448 - DNA, 56 bp, Artificial
  Synthetic oligonucleotide
ggacgacagcatttcttcctttcactcccacgacttcaacagcccctccggaccac

SEQ ID NO: 419449 - DNA, 55 bp, Artificial
  Synthetic oligonucleotide
ggacgacagtgtactatggggtaccggtatggagggacgcaactccaccattgtt

SEQ ID NO: 419450 - DNA, 55 bp, Artificial
  Synthetic oligonucleotide
ggacgacataatgcggcatggtagaacagcggatggtaagaccaattcagctcag

SEQ ID NO: 419451 - DNA, 60 bp, Artificial
  Synthetic oligonucleotide
ggacgacattgctcgtggactattgcatcgagattggcgtcgtcaatccatcatcgtttt

SEQ ID NO: 419452 - DNA, 60 bp, Artificial
  Synthetic oligonucleotide
ggacgacattgctcgtggactgttgcatcgggactggcgtcgtcaatctatcatcatctt

SEQ ID NO: 419453 - DNA, 55 bp, Artificial
  Synthetic oligonucleotide
ggacgacccatacgcaatggaagcacttaaggtgaagactggtcgtaacgccgcg

SEQ ID NO: 419454 - DNA, 53 bp, Artificial
  Synthetic oligonucleotide
ggacgacccctctcggggccgcttggggctctaccgcccacttctccgtctgt

SEQ ID NO: 419455 - DNA, 55 bp, Artificial
  Synthetic oligonucleotide
ggacgacgacagcaaggatagtgctacggatagcggcaattgcgatgccccacct

SEQ ID NO: 419456 - DNA, 55 bp, Artificial
  Synthetic oligonucleotide
ggacgacggacagagccggcgttcctacctacagatggggtgccaatgagacgga

SEQ ID NO: 419457 - DNA, 52 bp, Artificial
  Synthetic oligonucleotide
ggacgactaaagaagtgtttacggccattaagaaacgtaatgctaccgttcc

SEQ ID NO: 419458 - DNA, 55 bp, Artificial
  Synthetic oligonucleotide
ggacgactaccttgtgatatgcccggtcttcaagggatgggcatggacacttatg

SEQ ID NO: 419459 - DNA, 55 bp, Artificial
  Synthetic oligonucleotide
ggacgactatgtggagttctgtatatcgacaattggtcgaaaagaattgagacga

SEQ ID NO: 419460 - DNA, 55 bp, Artificial
  Synthetic oligonucleotide
ggacgactcctcagacagattagacttaggaaaatactatcaggggatccgtctg

SEQ ID NO: 419461 - DNA, 60 bp, Artificial
  Synthetic oligonucleotide
ggacgactgcgcctcctaccgggccctcttcagcaatggattggctgcctggctgttagg

SEQ ID NO: 419462 - DNA, 53 bp, Artificial
  Synthetic oligonucleotide
ggacgactttccccataacgccagtgaaactctaggaaggggaaagaggtatg

SEQ ID NO: 419463 - DNA, 60 bp, Artificial
  Synthetic oligonucleotide
ggacgagagagtcgacgggccttctctgcagcaggttatgcgggatcagcttaaacccta

SEQ ID NO: 419464 - DNA, 55 bp, Artificial
  Synthetic oligonucleotide
ggacgagaggggatgaggtggtaaagagcattggaacatcgaggggacacctccc

SEQ ID NO: 419465 - DNA, 55 bp, Artificial
  Synthetic oligonucleotide
ggacgagatttggaataatatgacttggatgcagtgggatagagaaattaacaac

SEQ ID NO: 419466 - DNA, 51 bp, Artificial
  Synthetic oligonucleotide
ggacgagcccatctatcaccgctcaccactctgccgccagaacggtcatgt

SEQ ID NO: 419467 - DNA, 55 bp, Artificial
  Synthetic oligonucleotide
ggacgagcgggtttattccggacaagatggatgccaacgtgcagataagacccgc

SEQ ID NO: 419468 - DNA, 58 bp, Artificial
  Synthetic oligonucleotide
ggacgaggatccgatttaaggatgatacatcatttgaagacattaacgggattagaag

SEQ ID NO: 419469 - DNA, 54 bp, Artificial
  Synthetic oligonucleotide
ggacgaggttaggcgtgggatcaaagagtgatcccagtccggttcttttagaac

SEQ ID NO: 419470 - DNA, 55 bp, Artificial
  Synthetic oligonucleotide
ggacgagtaccacctctacgtcctggagctagtcggcttcggcgtcaaagtgggg

SEQ ID NO: 419471 - DNA, 60 bp, Artificial
  Synthetic oligonucleotide
ggacgatattcacacgtcttctaggagcgaagaatttgagtggacaggcactggcctcgc

SEQ ID NO: 419472 - DNA, 60 bp, Artificial
  Synthetic oligonucleotide
ggacgatgcatcattgtattctaactcaggacaatgggaagtgcattttgaaaacaaagt

SEQ ID NO: 419473 - DNA, 55 bp, Artificial
  Synthetic oligonucleotide
ggacgattacacaaaattgcccaggggctacattgaggctttcgtgcagaatgca

SEQ ID NO: 419474 - DNA, 55 bp, Artificial
  Synthetic oligonucleotide
ggacgattagtccgttggcaaaattggttcagcaagtatcaatttgatgtcgaac

SEQ ID NO: 419475 - DNA, 50 bp, Artificial
  Synthetic oligonucleotide
ggacgattagtgggtggattcttaacacttatctgggtcgatctgaggag

SEQ ID NO: 419476 - DNA, 60 bp, Artificial
  Synthetic oligonucleotide
ggacgattctacatccaaatgtgcaccgaactcaaactcagtgattatgagggacggttg

SEQ ID NO: 419477 - DNA, 58 bp, Artificial
  Synthetic oligonucleotide
ggacgatttccatgggaaacccatgagacctttgggtcgatgcttgcgtttggtgcca

SEQ ID NO: 419478 - DNA, 52 bp, Artificial
  Synthetic oligonucleotide
ggacgatttccatttcaccttggagatgaagatatgggagcgtttaggctta

SEQ ID NO: 419479 - DNA, 60 bp, Artificial
  Synthetic oligonucleotide
ggacgatttgatttttaacctgaatagcctgaatgcaaatctgagatacttcggagcttg

SEQ ID NO: 419480 - DNA, 54 bp, Artificial
  Synthetic oligonucleotide
ggacgatttttcgttcggaaggttccaatttgcaccgaatcttgtgcggattaa

SEQ ID NO: 419481 - DNA, 52 bp, Artificial
  Synthetic oligonucleotide
ggacgattttttatacgtacccatttagactaactaccaagggtagacctga

SEQ ID NO: 419482 - DNA, 55 bp, Artificial
  Synthetic oligonucleotide
ggacgcaaaaggatggacattattaaggatttgttggacgcgggtatagatgaag

SEQ ID NO: 419483 - DNA, 55 bp, Artificial
  Synthetic oligonucleotide
ggacgcaaaatctacccaggaccacgtgagatcactgtgcttattggcttggcac

SEQ ID NO: 419484 - DNA, 54 bp, Artificial
  Synthetic oligonucleotide
ggacgcaaattcttatttcaagcaggtttacaacaagcgaccgtaaacggtaca

SEQ ID NO: 419485 - DNA, 60 bp, Artificial
  Synthetic oligonucleotide
ggacgcaagagtctgaatgtgtatgccacaatggaacatgtgtagtaataatgaccgatg

SEQ ID NO: 419486 - DNA, 55 bp, Artificial
  Synthetic oligonucleotide
ggacgcacaatgaagatgggcaacgttgagattccaacgaaaggaactccttcaa

SEQ ID NO: 419487 - DNA, 55 bp, Artificial
  Synthetic oligonucleotide
ggacgcacatggaccattggaaaggtaacaagctttgcctcccaccacctattcg

SEQ ID NO: 419488 - DNA, 60 bp, Artificial
  Synthetic oligonucleotide
ggacgcatacaagcgatcactcgttctgtccacgtgcttctttggtacttcagggctttc

SEQ ID NO: 419489 - DNA, 60 bp, Artificial
  Synthetic oligonucleotide
ggacgcatatcgagcagcacaacccatttaatgaaccaaggggttggtcagatataatga

SEQ ID NO: 419490 - DNA, 52 bp, Artificial
  Synthetic oligonucleotide
ggacgcatcagagacctgctcagggcccgtggactgaccgctgaggccgctc

SEQ ID NO: 419491 - DNA, 55 bp, Artificial
  Synthetic oligonucleotide
ggacgcatgtacaccgcaatgctccttagtgacaataagaatacattagacccgc

SEQ ID NO: 419492 - DNA, 60 bp, Artificial
  Synthetic oligonucleotide
ggacgcatgtgtagccaaggatatcgatgtcgacctattgatggccagacatgattattt

SEQ ID NO: 419493 - DNA, 55 bp, Artificial
  Synthetic oligonucleotide
ggacgccaactatccattcttggtgcactggggatccaacgcgttcctcgtcacc

SEQ ID NO: 419494 - DNA, 55 bp, Artificial
  Synthetic oligonucleotide
ggacgccatgtacggtaccgatggcctagaagcacttgatttgtccaccagtgct

SEQ ID NO: 419495 - DNA, 60 bp, Artificial
  Synthetic oligonucleotide
ggacgccattctcctggatatgcgttcgaatgagcttaacctcgagatggccaaccataa

SEQ ID NO: 419496 - DNA, 59 bp, Artificial
  Synthetic oligonucleotide
ggacgcccttttaaggacatggtgtgaagactcgcatgtgcttggttgtgagtcctccg

SEQ ID NO: 419497 - DNA, 55 bp, Artificial
  Synthetic oligonucleotide
ggacgccgaatactacgtcgcgagtgccaacacgtcgggaaccatgtcgaacgtg

SEQ ID NO: 419498 - DNA, 52 bp, Artificial
  Synthetic oligonucleotide
ggacgccgtcgttagatccccggtacgaatggcggaagagaacccctctgtt

SEQ ID NO: 419499 - DNA, 56 bp, Artificial
  Synthetic oligonucleotide
ggacgccgttttgaaccccgtcctcaatcactctgtccgtcctcttcaggactcac

SEQ ID NO: 419500 - DNA, 56 bp, Artificial
  Synthetic oligonucleotide
ggacgcctatttttcctgtcccctagatgaggactttagaaaatacactgctttca

SEQ ID NO: 419501 - DNA, 55 bp, Artificial
  Synthetic oligonucleotide
ggacgcctgttgttgctggtgactctttcgagtgtgatatggttggcgctattcg

SEQ ID NO: 419502 - DNA, 55 bp, Artificial
  Synthetic oligonucleotide
ggacgccttagtttcagcttggcgtttggattgtctattccaatgcaaatagcat

SEQ ID NO: 419503 - DNA, 53 bp, Artificial
  Synthetic oligonucleotide
ggacgcgaaccgtgagtggaaccctcgatcctttattggggggtacactcgag

SEQ ID NO: 419504 - DNA, 57 bp, Artificial
  Synthetic oligonucleotide
ggacgcgcatctaatgggcttcctttcccatttcccgtagtcgacatggttgaagtc

SEQ ID NO: 419505 - DNA, 55 bp, Artificial
  Synthetic oligonucleotide
ggacgcggactatctcgtaccgctacttgtcgatgacgtaatacccggcgacact

SEQ ID NO: 419506 - DNA, 58 bp, Artificial
  Synthetic oligonucleotide
ggacgcggcgagcctacgagtcttcacggaggctatgactagatactctgcccccccc

SEQ ID NO: 419507 - DNA, 55 bp, Artificial
  Synthetic oligonucleotide
ggacgcgtggacgttggcgaatgggtgggtccgacagaaagcgttagtgcgttcc

SEQ ID NO: 419508 - DNA, 55 bp, Artificial
  Synthetic oligonucleotide
ggacgctattccagcaaatgcgtgatgtgttggggacatttgacaccgtccaggt

SEQ ID NO: 419509 - DNA, 57 bp, Artificial
  Synthetic oligonucleotide
ggacgctctggttgtcctcgaacagatttggatttgagcgttggtacggaagttgaa

SEQ ID NO: 419510 - DNA, 60 bp, Artificial
  Synthetic oligonucleotide
ggacgctgctacgactgctgcagacatggttcaaggtccaaatacccatagaaacttgga

SEQ ID NO: 419511 - DNA, 56 bp, Artificial
  Synthetic oligonucleotide
ggacgctgggtttgtggtcggacggattcgtcctgagacctaaactatcactgtag

SEQ ID NO: 419512 - DNA, 55 bp, Artificial
  Synthetic oligonucleotide
ggacgctggttctcgttacaatggggtgttcgtgatgacattgcttcaggatatg

SEQ ID NO: 419513 - DNA, 55 bp, Artificial
  Synthetic oligonucleotide
ggacgctgtggtttgtgtcgcctatctgtggaagtatgattgggaatgcacccac

SEQ ID NO: 419514 - DNA, 55 bp, Artificial
  Synthetic oligonucleotide
ggacgcttatacgtgtcgtatactattcaactgatagagcccactgctttggcct

SEQ ID NO: 419515 - DNA, 55 bp, Artificial
  Synthetic oligonucleotide
ggacgcttatcaacaggaccactcgcacatcaagctacagctggcccctcaagga

SEQ ID NO: 419516 - DNA, 55 bp, Artificial
  Synthetic oligonucleotide
ggacgcttcatcgggggccgggcgaatagatacgttgcgcccgctggtgggggac

SEQ ID NO: 419517 - DNA, 58 bp, Artificial
  Synthetic oligonucleotide
ggacgcttccaaagcgttttcagctcgtcctataaatatagcaccattggttggcaat

SEQ ID NO: 419518 - DNA, 54 bp, Artificial
  Synthetic oligonucleotide
ggacgcttgatttcctgaaataccccatattccgcttcggatattggggatttc

SEQ ID NO: 419519 - DNA, 55 bp, Artificial
  Synthetic oligonucleotide
ggacggaaaagtggcgagagtgaatgagaatttccatgtaatccctaaatctgaa

SEQ ID NO: 419520 - DNA, 55 bp, Artificial
  Synthetic oligonucleotide
ggacggaaataatcgccggcattaacagtgaaatggagtacccgcagaggcgacc

SEQ ID NO: 419521 - DNA, 60 bp, Artificial
  Synthetic oligonucleotide
ggacggaagcatatcatgagaaaccttggctaagtgttgatgtgattagaagtggtaacc

SEQ ID NO: 419522 - DNA, 55 bp, Artificial
  Synthetic oligonucleotide
ggacggacaacccaccgactccagtagacaccctagaggaatacaagtggcggac

SEQ ID NO: 419523 - DNA, 59 bp, Artificial
  Synthetic oligonucleotide
ggacggacaatgtcctcatacaagaatgagcagttcacagggggtttattcttggttga

SEQ ID NO: 419524 - DNA, 55 bp, Artificial
  Synthetic oligonucleotide
ggacggaccctcatagcatagccgctagaggccacttatattcaatggccaaaga

SEQ ID NO: 419525 - DNA, 58 bp, Artificial
  Synthetic oligonucleotide
ggacggacgagactccacctatcccgatagacagcgccgcgacttacaagttgttgac

SEQ ID NO: 419526 - DNA, 52 bp, Artificial
  Synthetic oligonucleotide
ggacggactacgatcaaagaaaccccaacggataagaaaccctagcaaacaa

SEQ ID NO: 419527 - DNA, 55 bp, Artificial
  Synthetic oligonucleotide
ggacggagaacaagaattgcttacgaaagaatgtgcaacattctcaaggggaaat

SEQ ID NO: 419528 - DNA, 55 bp, Artificial
  Synthetic oligonucleotide
ggacggagatcactcatgagcgaatatgaccttgagaacgcgcgccgagcgctcc

SEQ ID NO: 419529 - DNA, 60 bp, Artificial
  Synthetic oligonucleotide
ggacggagcttacataaggcctttctcaggaccagttgcaaatctcgtcaacattcttga

SEQ ID NO: 419530 - DNA, 55 bp, Artificial
  Synthetic oligonucleotide
ggacggagcttgcgcgctatacgcgtgtggcagtgaggccctagttgagttcgag

SEQ ID NO: 419531 - DNA, 55 bp, Artificial
  Synthetic oligonucleotide
ggacggataaggaaggaaactgacatgcagtagttgtacgctgttatcggcgagt

SEQ ID NO: 419532 - DNA, 54 bp, Artificial
  Synthetic oligonucleotide
ggacggatacaagcagcaatcatgcgtcatcatagacgacttttatgggtggat

SEQ ID NO: 419533 - DNA, 54 bp, Artificial
  Synthetic oligonucleotide
ggacggatcaggactggtaccggtggagatgcaaagcaggtggagaccgtacct

SEQ ID NO: 419534 - DNA, 57 bp, Artificial
  Synthetic oligonucleotide
ggacggatcgcaaagttgagttcgcaaccgtactgtcagattaaaattggaagagta

SEQ ID NO: 419535 - DNA, 55 bp, Artificial
  Synthetic oligonucleotide
ggacggcaaactccccacaacgcaacttcggcgtaacatcgatctgcttgtcggg

SEQ ID NO: 419536 - DNA, 60 bp, Artificial
  Synthetic oligonucleotide
ggacggcaacgaaatcaaaccatctaacacaattgacatgacaaagctcgccgtgtacca

SEQ ID NO: 419537 - DNA, 55 bp, Artificial
  Synthetic oligonucleotide
ggacggcagacgtacaatattcaatatggcaacatgaaagagtcggacacgatca

SEQ ID NO: 419538 - DNA, 60 bp, Artificial
  Synthetic oligonucleotide
ggacggcagacgtacaatattctatctggcaacatgagagagtgaatcacgaccatctcc

SEQ ID NO: 419539 - DNA, 54 bp, Artificial
  Synthetic oligonucleotide
ggacggcccgtggcagtcaaccatgctgggccagctgtgtggatactacactca

SEQ ID NO: 419540 - DNA, 55 bp, Artificial
  Synthetic oligonucleotide
ggacggccttgaattgcaacgaaagccttaacaccggctttatagcagggctctt

SEQ ID NO: 419541 - DNA, 55 bp, Artificial
  Synthetic oligonucleotide
ggacggccttttgggcgatagacggcctctacgaatggttagtaatgccattcgg

SEQ ID NO: 419542 - DNA, 55 bp, Artificial
  Synthetic oligonucleotide
ggacggcgcattagcgcaggtagtggacataaacgagcggcgcaacgctgttgcc

SEQ ID NO: 419543 - DNA, 51 bp, Artificial
  Synthetic oligonucleotide
ggacggcgctaacgccagagcaaaaaggacacgtgtacagtgtccctcgga

SEQ ID NO: 419544 - DNA, 60 bp, Artificial
  Synthetic oligonucleotide
ggacggctgttacatacacccctctctcgaaagcaatatatattccacataggctatgtg

SEQ ID NO: 419545 - DNA, 47 bp, Artificial
  Synthetic oligonucleotide
ggacggcttttagggccggggttctacccttaaacgccgtaaattta

SEQ ID NO: 419546 - DNA, 60 bp, Artificial
  Synthetic oligonucleotide
ggacgggacatcacgtgcctcgggacgggacatcacgtgcaactaacaagtgcacgcaac

SEQ ID NO: 419547 - DNA, 59 bp, Artificial
  Synthetic oligonucleotide
ggacgggaccagaggctaaaatccttgaactgatacccgcaacctctccagtcacatgc

SEQ ID NO: 419548 - DNA, 57 bp, Artificial
  Synthetic oligonucleotide
ggacgggattaactatcaagcagaagacgtgaagccttacgcaaaagtaacgagcca

SEQ ID NO: 419549 - DNA, 55 bp, Artificial
  Synthetic oligonucleotide
ggacgggcaaccgtaccttgttctgccccactgattgtttccgcaaacatccgga

SEQ ID NO: 419550 - DNA, 55 bp, Artificial
  Synthetic oligonucleotide
ggacgggccggcaaacaggcaagcacaatacagggcgtttaaagccaagcaaggg

SEQ ID NO: 419551 - DNA, 57 bp, Artificial
  Synthetic oligonucleotide
ggacgggcgcaatagacattccgaatcagcgtaaacttcctcgcgggcgtgtattaa

SEQ ID NO: 419552 - DNA, 57 bp, Artificial
  Synthetic oligonucleotide
ggacggggcgtcgatggttgtgtccctgagtcagacacagtctacataccgacggtg

SEQ ID NO: 419553 - DNA, 55 bp, Artificial
  Synthetic oligonucleotide
ggacgggtagttgtacctagtggtactgccattccaattccagacttccaagcgc

SEQ ID NO: 419554 - DNA, 59 bp, Artificial
  Synthetic oligonucleotide
ggacggtaaaggatagaagcccatttaggactctcatgagtgtcgaagtgggccaatca

SEQ ID NO: 419555 - DNA, 59 bp, Artificial
  Synthetic oligonucleotide
ggacggtaacctcaaataagttcatgtatgatcctagccctatatcagagagagatttt

SEQ ID NO: 419556 - DNA, 55 bp, Artificial
  Synthetic oligonucleotide
ggacggtaacttctgatgctgaaggttcccttcgcatttatctagccgaccttgg

SEQ ID NO: 419557 - DNA, 60 bp, Artificial
  Synthetic oligonucleotide
ggacggtacaagtccaatgattgaaggagtcttctctctggttgtagtcgttgatcgcaa

SEQ ID NO: 419558 - DNA, 55 bp, Artificial
  Synthetic oligonucleotide
ggacggtagcgctaaattcgattcgatgactgaacgtaatttcgaagaacggaac

SEQ ID NO: 419559 - DNA, 57 bp, Artificial
  Synthetic oligonucleotide
ggacggtagtgattggttaagacttggcgtaaggttcatgtgccaacgccctgtgcg

SEQ ID NO: 419560 - DNA, 55 bp, Artificial
  Synthetic oligonucleotide
ggacggtcacgcggaaagatccttgtggtcgtcaactcacccctcaagacatgcg

SEQ ID NO: 419561 - DNA, 50 bp, Artificial
  Synthetic oligonucleotide
ggacggtcgtcgtaattcgaaataagtgcgccaggattgtgattgacact

SEQ ID NO: 419562 - DNA, 55 bp, Artificial
  Synthetic oligonucleotide
ggacggtctatcatggtgccgggtcgaaaacgctggcaggtccgaaagggcccat

SEQ ID NO: 419563 - DNA, 57 bp, Artificial
  Synthetic oligonucleotide
ggacggtctcagatagacagattaagaatccgccaaagataaggacaactaacgtta

SEQ ID NO: 419564 - DNA, 55 bp, Artificial
  Synthetic oligonucleotide
ggacggtggtaggtccggacaacgacgccacctttatccgccatgtgatgcggca

SEQ ID NO: 419565 - DNA, 56 bp, Artificial
  Synthetic oligonucleotide
ggacggtgtcaacacggcgcgtctcgacgttgtcgctcctgcgtactatgcgtacg

SEQ ID NO: 419566 - DNA, 50 bp, Artificial
  Synthetic oligonucleotide
ggacggttaaacgggacgttctagaactagtgcacacgaaagttgttgtt

SEQ ID NO: 419567 - DNA, 55 bp, Artificial
  Synthetic oligonucleotide
ggacggttgtcgtggttgaggatcttgaaatacaggggatttggaaccttccaga

SEQ ID NO: 419568 - DNA, 54 bp, Artificial
  Synthetic oligonucleotide
ggacgtaaaacttctaagacagtagccgacgggtattatatgacccaaggcgat

SEQ ID NO: 419569 - DNA, 55 bp, Artificial
  Synthetic oligonucleotide
ggacgtaatagtcacaagggaaccttatgtgagttgcgacaatgatggttgctgg

SEQ ID NO: 419570 - DNA, 51 bp, Artificial
  Synthetic oligonucleotide
ggacgtaattacgttctcctagtctttgccaatagactttaaactagatgg

SEQ ID NO: 419571 - DNA, 54 bp, Artificial
  Synthetic oligonucleotide
ggacgtacgaaacacccaacatcacagtccaggggtatcacctgcgcatcctaa

SEQ ID NO: 419572 - DNA, 53 bp, Artificial
  Synthetic oligonucleotide
ggacgtagactcatatatcaggaataccgggcttactgcattcttcttgacac

SEQ ID NO: 419573 - DNA, 55 bp, Artificial
  Synthetic oligonucleotide
ggacgtatacagcaagtcaaaacttgtctcaatggtcgcatctaacaaaggatat

SEQ ID NO: 419574 - DNA, 55 bp, Artificial
  Synthetic oligonucleotide
ggacgtatctcagtgggactcgtctcaacacaatacgcagccatttaggaaaggg

SEQ ID NO: 419575 - DNA, 58 bp, Artificial
  Synthetic oligonucleotide
ggacgtattaagaacagcataatgcagatgggggttagtgtttggggacggaacatca

SEQ ID NO: 419576 - DNA, 55 bp, Artificial
  Synthetic oligonucleotide
ggacgtattgacgctacacgcactgagtgacagggaccgcttccgcacgttgcgg

SEQ ID NO: 419577 - DNA, 56 bp, Artificial
  Synthetic oligonucleotide
ggacgtcaactgttgggacgttttgcatctagatttcaaacaaaccctggcttaga

SEQ ID NO: 419578 - DNA, 55 bp, Artificial
  Synthetic oligonucleotide
ggacgtcaaggagggttgactgtcaaattagtgggtgtgagaagcacagttgtgg

SEQ ID NO: 419579 - DNA, 57 bp, Artificial
  Synthetic oligonucleotide
ggacgtcacacgtcacttacgtttcacatggttggtcagttctaaaaatgataagcg

SEQ ID NO: 419580 - DNA, 56 bp, Artificial
  Synthetic oligonucleotide
ggacgtcacgccgttgtctgagaaacttaattccacaatattttcccatgtgcgta

SEQ ID NO: 419581 - DNA, 55 bp, Artificial
  Synthetic oligonucleotide
ggacgtcagcttgcaacttggccgtatcgtaagtattatgttcggctgcagccta

SEQ ID NO: 419582 - DNA, 58 bp, Artificial
  Synthetic oligonucleotide
ggacgtcagggcggtggattatcacgagacaggagttggtggggctatagcaagtttg

SEQ ID NO: 419583 - DNA, 54 bp, Artificial
  Synthetic oligonucleotide
ggacgtcagtgggatgccgatcaattggctcgataatcccgactacgccacggc

SEQ ID NO: 419584 - DNA, 55 bp, Artificial
  Synthetic oligonucleotide
ggacgtcgagatgttcctggacgaagaacaagaataatattcatactaccatacg

SEQ ID NO: 419585 - DNA, 58 bp, Artificial
  Synthetic oligonucleotide
ggacgtcgcacttcgccttctcaccgctcattggtggagttgggattacgggacagta

SEQ ID NO: 419586 - DNA, 55 bp, Artificial
  Synthetic oligonucleotide
ggacgtcggagtgtggatattttctgaactgaacaccccaattgcgatagctcgg

SEQ ID NO: 419587 - DNA, 55 bp, Artificial
  Synthetic oligonucleotide
ggacgtctacaagaatgacccaatagttaggcaggcagtggcaaagggagtagct

SEQ ID NO: 419588 - DNA, 57 bp, Artificial
  Synthetic oligonucleotide
ggacgtctatgttacggacaaactacatcaccaccccctatccaattatatcaatac

SEQ ID NO: 419589 - DNA, 56 bp, Artificial
  Synthetic oligonucleotide
ggacgtcttcgtcctcaacaacactagaccaccgctgggcaattggttcggttgta

SEQ ID NO: 419590 - DNA, 55 bp, Artificial
  Synthetic oligonucleotide
ggacgtgaaagacaagaattacactagagataaacttctagtcaagatgacccag

SEQ ID NO: 419591 - DNA, 55 bp, Artificial
  Synthetic oligonucleotide
ggacgtgaagcttagaagcgtatcagtgcgcgtcataagagacgacgcaacgact

SEQ ID NO: 419592 - DNA, 55 bp, Artificial
  Synthetic oligonucleotide
ggacgtgacacgtggtaatggtatcactcatcgtgtagggaagcgtttctgcgtg

SEQ ID NO: 419593 - DNA, 53 bp, Artificial
  Synthetic oligonucleotide
ggacgtgactatattgggtagcttattacaattggatttccaaaacccaaggg

SEQ ID NO: 419594 - DNA, 50 bp, Artificial
  Synthetic oligonucleotide
ggacgtgatctctcttttcaagacctaagtgaaacaccctgtcaggtaga

SEQ ID NO: 419595 - DNA, 60 bp, Artificial
  Synthetic oligonucleotide
ggacgtgatcttagtaatacgaagagcggactcgtctatggtatcacttctcttgacaga

SEQ ID NO: 419596 - DNA, 57 bp, Artificial
  Synthetic oligonucleotide
ggacgtgcaatacttgtacggtatagggtcggtggttgtctcctttgcaatcaaatg

SEQ ID NO: 419597 - DNA, 53 bp, Artificial
  Synthetic oligonucleotide
ggacgtgccctacgaacgcctgggccccgccactaaagtagactacattccac

SEQ ID NO: 419598 - DNA, 50 bp, Artificial
  Synthetic oligonucleotide
ggacgtgcctccgaaacttgctccaaagactactccggcccctccgctcg

SEQ ID NO: 419599 - DNA, 55 bp, Artificial
  Synthetic oligonucleotide
ggacgtgcgccataggatctggaactacaaccaggataccatgttcgtgcgctcc

SEQ ID NO: 419600 - DNA, 55 bp, Artificial
  Synthetic oligonucleotide
ggacgtgcgctatatatccctccatatgaattactcctgcatgagtggtacgaaa

SEQ ID NO: 419601 - DNA, 55 bp, Artificial
  Synthetic oligonucleotide
ggacgtgcgtgacattgctcgccacgagggacacaaggaagccattcaaagctac

SEQ ID NO: 419602 - DNA, 55 bp, Artificial
  Synthetic oligonucleotide
ggacgtgctgtatgcatcacctccgcattgttgacaagtagattcgcattctaca

SEQ ID NO: 419603 - DNA, 60 bp, Artificial
  Synthetic oligonucleotide
ggacgtgcttacaaaccaatcagagtaatggctgaatacgctatatttccgactttgcca

SEQ ID NO: 419604 - DNA, 55 bp, Artificial
  Synthetic oligonucleotide
ggacgtgcttacaagccaattagagttatggctgaatatgctatctttccaacct

SEQ ID NO: 419605 - DNA, 55 bp, Artificial
  Synthetic oligonucleotide
ggacgtggcatgaatatggcggcgctttcccggcttagtcagcctgggttggcgt

SEQ ID NO: 419606 - DNA, 59 bp, Artificial
  Synthetic oligonucleotide
ggacgtgggaacagcagttcggtcagttggtagacaacattcacgaggacttgacagac

SEQ ID NO: 419607 - DNA, 55 bp, Artificial
  Synthetic oligonucleotide
ggacgtgggtttgtcggagacagtaaatccaaggtgctcagtgagcgtaaagcct

SEQ ID NO: 419608 - DNA, 55 bp, Artificial
  Synthetic oligonucleotide
ggacgtggtgacctccctttgtcaccttgccttccacagcggacccaagacgtac

SEQ ID NO: 419609 - DNA, 55 bp, Artificial
  Synthetic oligonucleotide
ggacgtgtggactcagtctggtactgtccacctgaccccgatcacttcgatggct

SEQ ID NO: 419610 - DNA, 59 bp, Artificial
  Synthetic oligonucleotide
ggacgtgttcccccggaactgcaatcctcgttatgttgtcgctgattactatcagctcg

SEQ ID NO: 419611 - DNA, 51 bp, Artificial
  Synthetic oligonucleotide
ggacgtgttcctggtcgttaacatgagacccgttaaacccaaccgttgtta

SEQ ID NO: 419612 - DNA, 55 bp, Artificial
  Synthetic oligonucleotide
ggacgttaaaagtctcggaggctttgtggctacgccagtgtcagacaacttccgg

SEQ ID NO: 419613 - DNA, 56 bp, Artificial
  Synthetic oligonucleotide
ggacgttaaatggtctcccattgttcacttgaaacttttctgacgacactgtagac

SEQ ID NO: 419614 - DNA, 58 bp, Artificial
  Synthetic oligonucleotide
ggacgttacatcgagcgggtccaatgtgcacgtcagtgtgcaaacgtttaacaaccca

SEQ ID NO: 419615 - DNA, 55 bp, Artificial
  Synthetic oligonucleotide
ggacgttactgtcaccactggctctaattatacactaaaagggccttcctcaggt

SEQ ID NO: 419616 - DNA, 60 bp, Artificial
  Synthetic oligonucleotide
ggacgttatcatatatcggtttttactaatagctgtcgtcatgctgccatttattaaagc

SEQ ID NO: 419617 - DNA, 56 bp, Artificial
  Synthetic oligonucleotide
ggacgttcctcggagttcgattgctaaccttattatgaacatagcgacgtgtttac

SEQ ID NO: 419618 - DNA, 60 bp, Artificial
  Synthetic oligonucleotide
ggacgttctgggcacatcatcgtctggccatctaagttctgaaaccgcactttagatatg

SEQ ID NO: 419619 - DNA, 55 bp, Artificial
  Synthetic oligonucleotide
ggacgttctttcttactcaaggttccctactcaatgacaagcactctaatggcac

SEQ ID NO: 419620 - DNA, 55 bp, Artificial
  Synthetic oligonucleotide
ggacgttgaatggtgaagtttgggatccgagaaactatagactgagtttatttgg

SEQ ID NO: 419621 - DNA, 59 bp, Artificial
  Synthetic oligonucleotide
ggacgttgaccgtgagtcatgtaatggcgtctacgctaacattagcaagaacgccctcc

SEQ ID NO: 419622 - DNA, 55 bp, Artificial
  Synthetic oligonucleotide
ggacgttgagcctggtatctctgatcgtatgtcggctacgctggcaccaatcggc

SEQ ID NO: 419623 - DNA, 60 bp, Artificial
  Synthetic oligonucleotide
ggacgttgcagcagcaacagtgatcgccggaggttccgttcatgagggacgagaacacct

SEQ ID NO: 419624 - DNA, 50 bp, Artificial
  Synthetic oligonucleotide
ggacgttggatgccggggaagactgctggtgttttgccacgccgggggag

SEQ ID NO: 419625 - DNA, 55 bp, Artificial
  Synthetic oligonucleotide
ggacgttggtaactgagttcgctgcattacttaagccgctgcctacctctcgtgt

SEQ ID NO: 419626 - DNA, 60 bp, Artificial
  Synthetic oligonucleotide
ggacgtttacatgaggcccttgagcgtgagtcactcaaattagctaatgatcgtaggacc

SEQ ID NO: 419627 - DNA, 55 bp, Artificial
  Synthetic oligonucleotide
ggacgtttatctattgaagcatgtgtgtgtaaatgcgaagccttttgagcaggac

SEQ ID NO: 419628 - DNA, 53 bp, Artificial
  Synthetic oligonucleotide
ggactaaaagtatgatcatgagagatatacaacacggtataacccgtggacgt

SEQ ID NO: 419629 - DNA, 55 bp, Artificial
  Synthetic oligonucleotide
ggactaaagaccctaggaacacacaggatcatgttcgctcactgtgcttattggc

SEQ ID NO: 419630 - DNA, 55 bp, Artificial
  Synthetic oligonucleotide
ggactaaaggtgctgtgtgtaagtccacacaagttaccacaggggactgcccgcc

SEQ ID NO: 419631 - DNA, 58 bp, Artificial
  Synthetic oligonucleotide
ggactaaaggttttcatctgtggaggtactgttggatacgtgacaagaggatgcccac

SEQ ID NO: 419632 - DNA, 59 bp, Artificial
  Synthetic oligonucleotide
ggactaaatccaagtgtctcttacaagacatgcccctgtttttcatgtgctatggctac

SEQ ID NO: 419633 - DNA, 55 bp, Artificial
  Synthetic oligonucleotide
ggactaacaagcactcgcatgttcctgaggattcgggaaacgaacacaacggaat

SEQ ID NO: 419634 - DNA, 54 bp, Artificial
  Synthetic oligonucleotide
ggactaacagaggctggggacaggcttccaattaccctggtagcgtggaaactt

SEQ ID NO: 419635 - DNA, 55 bp, Artificial
  Synthetic oligonucleotide
ggactaaccatgacacctgctgacaaatcagccacttttgaaacagtcacgtggg

SEQ ID NO: 419636 - DNA, 55 bp, Artificial
  Synthetic oligonucleotide
ggactaagaacagcacaattggccactggatcccactacaagttacgatctatac

SEQ ID NO: 419637 - DNA, 55 bp, Artificial
  Synthetic oligonucleotide
ggactaagaacggcaatactaaatagaacaaccttaccaaatatgcttccaccga

SEQ ID NO: 419638 - DNA, 55 bp, Artificial
  Synthetic oligonucleotide
ggactaagcaagaggaatgctaaatcatcctgtgctcagttctatggtttaatac

SEQ ID NO: 419639 - DNA, 55 bp, Artificial
  Synthetic oligonucleotide
ggactaagccatagtacggaaaaaactatgctacctgtgagccccgtccaaggac

SEQ ID NO: 419640 - DNA, 56 bp, Artificial
  Synthetic oligonucleotide
ggactaagctaccagaacagttattggacacggctcaattcggttatgctagtgaa

SEQ ID NO: 419641 - DNA, 53 bp, Artificial
  Synthetic oligonucleotide
ggactaaggtcaatatgaccgcataggtaattatgtggacctaatgatctagc

SEQ ID NO: 419642 - DNA, 58 bp, Artificial
  Synthetic oligonucleotide
ggactaaggtctaagtgaccacacagataattatgtggacccaaagacctagcccaca

SEQ ID NO: 419643 - DNA, 60 bp, Artificial
  Synthetic oligonucleotide
ggactaatcatgacaccagcagacaaaggggagtgcttcaatgaagttacttggactaac

SEQ ID NO: 419644 - DNA, 55 bp, Artificial
  Synthetic oligonucleotide
ggactaatggaaatcccattgggtcgttgactttgtcaacgagttaactacgatg

SEQ ID NO: 419645 - DNA, 55 bp, Artificial
  Synthetic oligonucleotide
ggactacaacagagacttgcttgttagcaccaccacagcccacgggtgtgacgtc

SEQ ID NO: 419646 - DNA, 55 bp, Artificial
  Synthetic oligonucleotide
ggactacacaaaattcctcagggatgaattagtcgagcgacttggaaagtggccg

SEQ ID NO: 419647 - DNA, 55 bp, Artificial
  Synthetic oligonucleotide
ggactacacaatttccctagtctcaaagataggatgttgcaggcacaaaagaccc

SEQ ID NO: 419648 - DNA, 54 bp, Artificial
  Synthetic oligonucleotide
ggactacacactcgatgaagagagcagggcaagaataaaaaccagactgttcac

SEQ ID NO: 419649 - DNA, 54 bp, Artificial
  Synthetic oligonucleotide
ggactacacccttgatgaagagagcagggcgagaatcaaaaccaggctgttcac

SEQ ID NO: 419650 - DNA, 58 bp, Artificial
  Synthetic oligonucleotide
ggactacacgaaaatctttggaatattgtgctcaagtttaaagatgtgtcaatctttc

SEQ ID NO: 419651 - DNA, 56 bp, Artificial
  Synthetic oligonucleotide
ggactacagttttgagtgccaaacctttctgaaagacgagataagacccagtgaaa

SEQ ID NO: 419652 - DNA, 55 bp, Artificial
  Synthetic oligonucleotide
ggactacatactgtaccctcccaggtgggtgcagagcataaagctaagtcagcca

SEQ ID NO: 419653 - DNA, 55 bp, Artificial
  Synthetic oligonucleotide
ggactacatgaaatcaatgaagagtggtcttctgcagagaatgtgctctggattg

SEQ ID NO: 419654 - DNA, 56 bp, Artificial
  Synthetic oligonucleotide
ggactacatgacatcactcaggaggtatgaagacactttggtccaggaagatagag

SEQ ID NO: 419655 - DNA, 60 bp, Artificial
  Synthetic oligonucleotide
ggactacatgggctctgtgtgaggctctaaccttagcgacagggcccatctccacattgt

SEQ ID NO: 419656 - DNA, 60 bp, Artificial
  Synthetic oligonucleotide
ggactaccaacatgccgcctgcccatgcaacctagagtgcgcgggagaagagttctacgg

SEQ ID NO: 419657 - DNA, 60 bp, Artificial
  Synthetic oligonucleotide
ggactaccaattgtggggctgctgcctctcggacttccactgaatcgcataagaaccaga

SEQ ID NO: 419658 - DNA, 57 bp, Artificial
  Synthetic oligonucleotide
ggactaccactacgacctgttacaggcacaaaggtacgggatagaagatggtatcaa

SEQ ID NO: 419659 - DNA, 60 bp, Artificial
  Synthetic oligonucleotide
ggactacccagactatgtgcacgcggagaagagccggttggcgtcagaagaacagatcct

SEQ ID NO: 419660 - DNA, 55 bp, Artificial
  Synthetic oligonucleotide
ggactacccgctgtggatatgtactgacgtttagtactcacaattcggccagggt

SEQ ID NO: 419661 - DNA, 55 bp, Artificial
  Synthetic oligonucleotide
ggactaccgtggacacgaagtcatgacagcagcagcatctcagggcctcacccgc

SEQ ID NO: 419662 - DNA, 51 bp, Artificial
  Synthetic oligonucleotide
ggactacctaaacgatcccctgttgcaacccgttcgtaataagaactttcc

SEQ ID NO: 419663 - DNA, 51 bp, Artificial
  Synthetic oligonucleotide
ggactacgaccctagaaaccctagcgaagaacgaagtttttttgcaaagga

SEQ ID NO: 419664 - DNA, 55 bp, Artificial
  Synthetic oligonucleotide
ggactacgcccaacggcgctttgtcggacgcttgcgggaaacctcacggcgcacg

SEQ ID NO: 419665 - DNA, 55 bp, Artificial
  Synthetic oligonucleotide
ggactacggcagtcgatttcctttcgaactacggaatatcttgtgactctcgttc

SEQ ID NO: 419666 - DNA, 56 bp, Artificial
  Synthetic oligonucleotide
ggactacggtggttcttctcaggcgatgcagctgacacgaaataccttacgcagtg

SEQ ID NO: 419667 - DNA, 52 bp, Artificial
  Synthetic oligonucleotide
ggactacgtccctccagtggtacacgggtgcccattgccacctatcaaggcc

SEQ ID NO: 419668 - DNA, 55 bp, Artificial
  Synthetic oligonucleotide
ggactactattagtacgtgatgaaggcacaggtaacggcacaaataacgacacag

SEQ ID NO: 419669 - DNA, 55 bp, Artificial
  Synthetic oligonucleotide
ggactactcaagtacaatgagccagtcaaagttggattcgttaactatgagtgtc

SEQ ID NO: 419670 - DNA, 55 bp, Artificial
  Synthetic oligonucleotide
ggactactcttggtacgtgatggaggaaacgcatcggataacacagagatattca

SEQ ID NO: 419671 - DNA, 55 bp, Artificial
  Synthetic oligonucleotide
ggactactggatttaaggtggggtctctggtcgcgtgttctagtggacactgctc

SEQ ID NO: 419672 - DNA, 60 bp, Artificial
  Synthetic oligonucleotide
ggactagaacctatagatattacaaccagtgcaggatttccctatgtgagtcttgggatc

SEQ ID NO: 419673 - DNA, 58 bp, Artificial
  Synthetic oligonucleotide
ggactagaaggattatataagttggtggagccgtatcaaaataaaatggctagtgctc

SEQ ID NO: 419674 - DNA, 58 bp, Artificial
  Synthetic oligonucleotide
ggactagacgctggattacaaggtgatagttcaaaagcgacttacaacattggcctag

SEQ ID NO: 419675 - DNA, 55 bp, Artificial
  Synthetic oligonucleotide
ggactagacggcaccccagtttcactggatgtgaagcatagagcacctatgcaaa

SEQ ID NO: 419676 - DNA, 55 bp, Artificial
  Synthetic oligonucleotide
ggactaggactaggtcccggaggtgcaactgggtcacaccggagtcgcaaggaga

SEQ ID NO: 419677 - DNA, 60 bp, Artificial
  Synthetic oligonucleotide
ggactaggagccatgatctttgggttcttgggagcagctgggagcactatgggcgcggcg

SEQ ID NO: 419678 - DNA, 55 bp, Artificial
  Synthetic oligonucleotide
ggactaggagctgggttgaggatcaaaacaggaatttgtcacctttcatgagggg

SEQ ID NO: 419679 - DNA, 55 bp, Artificial
  Synthetic oligonucleotide
ggactaggtggtaatcaggaagtagaccacctagtaagtcaaggaattaggcagg

SEQ ID NO: 419680 - DNA, 59 bp, Artificial
  Synthetic oligonucleotide
ggactatagaaattggtcaaagccgcagtgtcaaattacaggatttgcgcctttctcta

SEQ ID NO: 419681 - DNA, 56 bp, Artificial
  Synthetic oligonucleotide
ggactatagtagctatagaagctaggaaaatactacagcaaaggaaaatagacagg

SEQ ID NO: 419682 - DNA, 55 bp, Artificial
  Synthetic oligonucleotide
ggactatatcctgcacagatcaaggccagacaaatgatcagcccggtaatgagtg

SEQ ID NO: 419683 - DNA, 60 bp, Artificial
  Synthetic oligonucleotide
ggactatattatttacagagtagcattcatagttgtgacactatcaatgctatctaacgc

SEQ ID NO: 419684 - DNA, 53 bp, Artificial
  Synthetic oligonucleotide
ggactatatttaattggcacgagaattttattacccaaccgaaataaacacca

SEQ ID NO: 419685 - DNA, 55 bp, Artificial
  Synthetic oligonucleotide
ggactatccattttattctctaggtgaccgtcccgtctcgcttctacctagcaac

SEQ ID NO: 419686 - DNA, 55 bp, Artificial
  Synthetic oligonucleotide
ggactatcgaccgcaaaccaaccattatggtaagaactaatgagatcggcgccag

SEQ ID NO: 419687 - DNA, 55 bp, Artificial
  Synthetic oligonucleotide
ggactatctctaactcccggagattgtattacatgggactcagcagtcgctactc

SEQ ID NO: 419688 - DNA, 55 bp, Artificial
  Synthetic oligonucleotide
ggactatgaagcctttgatgcctcacaggaccacttcattttagcttttgagctt

SEQ ID NO: 419689 - DNA, 55 bp, Artificial
  Synthetic oligonucleotide
ggactatggacgttcattcgttgaagaataccttggagacttgaagtcccttgag

SEQ ID NO: 419690 - DNA, 58 bp, Artificial
  Synthetic oligonucleotide
ggactatgtggttagaacactaattaattaggacactaacttggaacattggacatga

SEQ ID NO: 419691 - DNA, 55 bp, Artificial
  Synthetic oligonucleotide
ggactattcccagtgtcaatcccaatcacagctgcggcttggtacctatgggaga

SEQ ID NO: 419692 - DNA, 60 bp, Artificial
  Synthetic oligonucleotide
ggactattgtcacagagaactagagatatctatatcagtcgaagacttctcggaactttc

SEQ ID NO: 419693 - DNA, 60 bp, Artificial
  Synthetic oligonucleotide
ggactcaaaaatggctgtcttagcgcgcgctctacagcgagaggcttcggagagaagcga

SEQ ID NO: 419694 - DNA, 55 bp, Artificial
  Synthetic oligonucleotide
ggactcaagtaagagagacaacaggtcatatgtaccacacaagtgtcaggatagc

SEQ ID NO: 419695 - DNA, 55 bp, Artificial
  Synthetic oligonucleotide
ggactcaatgcaaatgcaagtgatgaatgattctttgaggggtggtgtactttac

SEQ ID NO: 419696 - DNA, 60 bp, Artificial
  Synthetic oligonucleotide
ggactcaatgggggtctatcagattctggcgatctactcaactgtcgccagttccctggt

SEQ ID NO: 419697 - DNA, 60 bp, Artificial
  Synthetic oligonucleotide
ggactcaattgtcctttttctacgatgctacgttgactgcgacggattttactgatgtga

SEQ ID NO: 419698 - DNA, 55 bp, Artificial
  Synthetic oligonucleotide
ggactcacaaatcctcacctcaaagagacgattctcaatgtaggattagactgtc

SEQ ID NO: 419699 - DNA, 60 bp, Artificial
  Synthetic oligonucleotide
ggactcacacatcgcgtagggaagcgattctgtgagaaatccgtctatgtgctgggaaag

SEQ ID NO: 419700 - DNA, 55 bp, Artificial
  Synthetic oligonucleotide
ggactcacaccaaaaccacctaaggaatgaactaccagtttcttaattgctgctc

SEQ ID NO: 419701 - DNA, 53 bp, Artificial
  Synthetic oligonucleotide
ggactcacgaccaccattcggcccagggaaccgcatctcgatgtgcaatagct

SEQ ID NO: 419702 - DNA, 55 bp, Artificial
  Synthetic oligonucleotide
ggactcagaggactttgtgtattaagagataacatgaaactaggagcacaagagc

SEQ ID NO: 419703 - DNA, 60 bp, Artificial
  Synthetic oligonucleotide
ggactcagatccagatgaccgcataggtagttatgtggacctaacgacctagcccacatc

SEQ ID NO: 419704 - DNA, 60 bp, Artificial
  Synthetic oligonucleotide
ggactcagatggagaagtactggtgtggagatttgacagcagcctggcacggaggcactt

SEQ ID NO: 419705 - DNA, 60 bp, Artificial
  Synthetic oligonucleotide
ggactcagcgtcacatgctggtagtactaaaatgcactcagaacgcttgacgcgtagcgc

SEQ ID NO: 419706 - DNA, 60 bp, Artificial
  Synthetic oligonucleotide
ggactcagcgtgtcgacgttcctgcagagcggtcgtgcaatacaggtcctccagtcgctc

SEQ ID NO: 419707 - DNA, 55 bp, Artificial
  Synthetic oligonucleotide
ggactcaggtccagatgtccgcacaaatagttatgtggtcccaatgacctagccc

SEQ ID NO: 419708 - DNA, 54 bp, Artificial
  Synthetic oligonucleotide
ggactcagttcaatagggtggtgcgtggttttcatcggtgtgcgtcctataggg

SEQ ID NO: 419709 - DNA, 51 bp, Artificial
  Synthetic oligonucleotide
ggactcataaggggggaaactttacggggctttagtcttctacggcaccta

SEQ ID NO: 419710 - DNA, 53 bp, Artificial
  Synthetic oligonucleotide
ggactcataaggtgggaaacttgacggggctttattcttctacggtacctagc

SEQ ID NO: 419711 - DNA, 60 bp, Artificial
  Synthetic oligonucleotide
ggactcatacgttcaaataccagatggcaacgtcatcaagaaaatacaatacggagctgt

SEQ ID NO: 419712 - DNA, 60 bp, Artificial
  Synthetic oligonucleotide
ggactcatcgtgcctgataatgaacctgcaaattaagacctatggtcaaggcagcgggaa

SEQ ID NO: 419713 - DNA, 50 bp, Artificial
  Synthetic oligonucleotide
ggactcatgctcatgtgctagtgggaccaacaccagtgaatattataggg

SEQ ID NO: 419714 - DNA, 55 bp, Artificial
  Synthetic oligonucleotide
ggactcatggtgtggtgtattgagaatggcacatcaccaaatctcagtggagact

SEQ ID NO: 419715 - DNA, 60 bp, Artificial
  Synthetic oligonucleotide
ggactcatttgaagtcatccaagagtctgatacagctgagagtgaggaaagcgtcttcaa

SEQ ID NO: 419716 - DNA, 55 bp, Artificial
  Synthetic oligonucleotide
ggactccaagatgcgaaggagattcctttctgtgccatttctccgcacttggtta

SEQ ID NO: 419717 - DNA, 55 bp, Artificial
  Synthetic oligonucleotide
ggactccaaggagaaaccgctagcaacaagcaagaaagacccggagaagacaccc

SEQ ID NO: 419718 - DNA, 55 bp, Artificial
  Synthetic oligonucleotide
ggactccaatgcaatggctctctacagcttgctactcgagagggacttcaacgga

SEQ ID NO: 419719 - DNA, 55 bp, Artificial
  Synthetic oligonucleotide
ggactccacctatcccaaagcctcgagtgaggagtacatccacagacgtggacag

SEQ ID NO: 419720 - DNA, 55 bp, Artificial
  Synthetic oligonucleotide
ggactccacctcgtcttccaactgcctagtatagccatcaatccccaacccctgc

SEQ ID NO: 419721 - DNA, 60 bp, Artificial
  Synthetic oligonucleotide
ggactccagttgagggactccaattgagctctctcaaacttgctcattcaattggagtat

SEQ ID NO: 419722 - DNA, 51 bp, Artificial
  Synthetic oligonucleotide
ggactccataggacacgtgtaaggctctcagcggccatccgtaataatatt

SEQ ID NO: 419723 - DNA, 57 bp, Artificial
  Synthetic oligonucleotide
ggactccatgatgcaggcaccgggtcgtatgggcttccgtcagcaaggatttggcga

SEQ ID NO: 419724 - DNA, 51 bp, Artificial
  Synthetic oligonucleotide
ggactccctgaaaccatactgtgagaaagttgagggtcctccccatgatat

SEQ ID NO: 419725 - DNA, 57 bp, Artificial
  Synthetic oligonucleotide
ggactcccttgcggccgttcgtcacgctatctcggactctgaaggcatgggttccga

SEQ ID NO: 419726 - DNA, 60 bp, Artificial
  Synthetic oligonucleotide
ggactccgaaggatcatgcgcaactacagtgatgaaaccgtcttactcatcacaaacaac

SEQ ID NO: 419727 - DNA, 60 bp, Artificial
  Synthetic oligonucleotide
ggactccgtagggccagttgacatcttgtggtctggtcaaatgactatgcaggacgaatg

SEQ ID NO: 419728 - DNA, 58 bp, Artificial
  Synthetic oligonucleotide
ggactccgttgcgccgctacccgatgtagccactgttagtggcaagccccggccgata

SEQ ID NO: 419729 - DNA, 55 bp, Artificial
  Synthetic oligonucleotide
ggactcctgttgtcgctggtgattcttacgaaactgaaatggtaggcgctattcg

SEQ ID NO: 419730 - DNA, 55 bp, Artificial
  Synthetic oligonucleotide
ggactccttcctacagagctgcgaagatgcttattacaacgagctcgattggcag

SEQ ID NO: 419731 - DNA, 60 bp, Artificial
  Synthetic oligonucleotide
ggactcgaggagagcgttgcaacttggaggacagggataggtcagagcttagtccgctac

SEQ ID NO: 419732 - DNA, 55 bp, Artificial
  Synthetic oligonucleotide
ggactcgataaattggtgactgtgcttttcaatgggagaccagaagtaacttggg

SEQ ID NO: 419733 - DNA, 55 bp, Artificial
  Synthetic oligonucleotide
ggactcgcccctatggaacgcacagcaacgtattaaccggctcgagcacgaacgt

SEQ ID NO: 419734 - DNA, 57 bp, Artificial
  Synthetic oligonucleotide
ggactcgccgtccactctggaccagacgagtaccggcgtctctttgagcccttccaa

SEQ ID NO: 419735 - DNA, 55 bp, Artificial
  Synthetic oligonucleotide
ggactcggaaggaagttctagtcaataaggacttcgttttcacagttcttaatca

SEQ ID NO: 419736 - DNA, 51 bp, Artificial
  Synthetic oligonucleotide
ggactcggaggcagtgtaaccatggctgattatcccgaatcacccgactcg

SEQ ID NO: 419737 - DNA, 57 bp, Artificial
  Synthetic oligonucleotide
ggactcggctattcagtccgcatagaacacgttaaagttagatgtaacgacaacaag

SEQ ID NO: 419738 - DNA, 59 bp, Artificial
  Synthetic oligonucleotide
ggactcggggagaacgttgtgacttggaggacagggacagatcagagcttagtccgcta

SEQ ID NO: 419739 - DNA, 55 bp, Artificial
  Synthetic oligonucleotide
ggactcgtgcggaatcaatcgacaaacctcaaagcataataccggcacccgttgt

SEQ ID NO: 419740 - DNA, 60 bp, Artificial
  Synthetic oligonucleotide
ggactcgtgttgatgcgcatgatggggatcttgtggcatgccatagctggcactgccaga

SEQ ID NO: 419741 - DNA, 60 bp, Artificial
  Synthetic oligonucleotide
ggactcgtgttgcacaccaccttcttcgaaatagacatttcgtagcaggtgattttgcta

SEQ ID NO: 419742 - DNA, 50 bp, Artificial
  Synthetic oligonucleotide
ggactcgttgcaaagagtggtgaatgtggcggggaatcattggataggat

SEQ ID NO: 419743 - DNA, 57 bp, Artificial
  Synthetic oligonucleotide
ggactcgttgtgcgatgagctacttagcattgtgcgtgagcgtaaactctcactcac

SEQ ID NO: 419744 - DNA, 51 bp, Artificial
  Synthetic oligonucleotide
ggactctaaaaccaagataccttccttggttagtatagaaaccccaaaaga

SEQ ID NO: 419745 - DNA, 60 bp, Artificial
  Synthetic oligonucleotide
ggactctaatttcggtagagccgcatgatgacagaaaccctcagtcatcaggttctatag

SEQ ID NO: 419746 - DNA, 60 bp, Artificial
  Synthetic oligonucleotide
ggactctagcatacttactgacagccagacagcgaccaaaagaattcggatggccaccaa

SEQ ID NO: 419747 - DNA, 56 bp, Artificial
  Synthetic oligonucleotide
ggactctagctggtagagaaagctatgcttttgcctaaagccatgattggccaatc

SEQ ID NO: 419748 - DNA, 57 bp, Artificial
  Synthetic oligonucleotide
ggactctagtcgtcagacaatttcagcccccttaccagagacgctgtagggtgtccg

SEQ ID NO: 419749 - DNA, 55 bp, Artificial
  Synthetic oligonucleotide
ggactctagttggagtaataaatctcaagaggctatttgggagaacatgacctgg

SEQ ID NO: 419750 - DNA, 60 bp, Artificial
  Synthetic oligonucleotide
ggactctatgatgtcctctatgtccttgcgactcattgaattcgattgagcttgagaaat

SEQ ID NO: 419751 - DNA, 60 bp, Artificial
  Synthetic oligonucleotide
ggactctatgatgtcctctatgtccttgcgactcattgaattggactgggtctgagagat

SEQ ID NO: 419752 - DNA, 55 bp, Artificial
  Synthetic oligonucleotide
ggactctatgctcagacacaataactggagtctagtaattatacctatctgccca

SEQ ID NO: 419753 - DNA, 55 bp, Artificial
  Synthetic oligonucleotide
ggactctccgcgatgtcaacgaccgaccttaaggcctacttaaaagactgtgtgt

SEQ ID NO: 419754 - DNA, 52 bp, Artificial
  Synthetic oligonucleotide
ggactctctgacgggcgaaatccagtatatgtctagggtacacatcggagat

SEQ ID NO: 419755 - DNA, 55 bp, Artificial
  Synthetic oligonucleotide
ggactctcttccagagccacctgggcgaagaacattcacacggccataacccagg

SEQ ID NO: 419756 - DNA, 57 bp, Artificial
  Synthetic oligonucleotide
ggactctcttgtagcgaacgggctgccagctgggaacgtaagcgtacgtggtgcgta

SEQ ID NO: 419757 - DNA, 55 bp, Artificial
  Synthetic oligonucleotide
ggactctggctctccaacctattttctttcccggagatttgcgtgcttgagtttg

SEQ ID NO: 419758 - DNA, 55 bp, Artificial
  Synthetic oligonucleotide
ggactcttacgttaccgtggatccatcttttcactctcccagaatctcacttgag

SEQ ID NO: 419759 - DNA, 60 bp, Artificial
  Synthetic oligonucleotide
ggactcttgcgcaaacgtggtgtgaccactgtccgggtcgagacctatgaccatttcatc

SEQ ID NO: 419760 - DNA, 55 bp, Artificial
  Synthetic oligonucleotide
ggactctttgtgtcaacacctacaactgtatgtcagagtagctggacttatgacc

SEQ ID NO: 419761 - DNA, 57 bp, Artificial
  Synthetic oligonucleotide
ggactgaaagttataacacataatgtatcaacaacacatctggcaaaatgcactgtc

SEQ ID NO: 419762 - DNA, 60 bp, Artificial
  Synthetic oligonucleotide
ggactgaacacatcggttttgagagcagtgctgcccagagatatggtgttcagaacatcg

SEQ ID NO: 419763 - DNA, 55 bp, Artificial
  Synthetic oligonucleotide
ggactgaactaacaattcagtatccgatcttaatcagcatgtagctatatcaagc

SEQ ID NO: 419764 - DNA, 56 bp, Artificial
  Synthetic oligonucleotide
ggactgaagaagaagaccattatactgggctttaatcattaaagcccaataagaaa

SEQ ID NO: 419765 - DNA, 57 bp, Artificial
  Synthetic oligonucleotide
ggactgaagaagaggtctatcagtgttgtaacctggaccctgaggcccgcaaggtaa

SEQ ID NO: 419766 - DNA, 55 bp, Artificial
  Synthetic oligonucleotide
ggactgaagagggctatgctgagcctgattgacggaagaggaccgatacggtttg

SEQ ID NO: 419767 - DNA, 60 bp, Artificial
  Synthetic oligonucleotide
ggactgacacaacaacgagtgtggcaacagaagatataaataggaccttcaaaccattga

SEQ ID NO: 419768 - DNA, 55 bp, Artificial
  Synthetic oligonucleotide
ggactgacggacggggcaaaatagagccctactggcaagtaaggtggaggcccga

SEQ ID NO: 419769 - DNA, 52 bp, Artificial
  Synthetic oligonucleotide
ggactgacttaccagaaagaaggagttgttagggtgttcccttttggggaga

SEQ ID NO: 419770 - DNA, 50 bp, Artificial
  Synthetic oligonucleotide
ggactgacttaccgctcatatgcgatattgtcatggaaccccagggaaac

SEQ ID NO: 419771 - DNA, 55 bp, Artificial
  Synthetic oligonucleotide
ggactgagcgcacgattgcgcaacaggttcaatacattctgtttgatgaggcttc

SEQ ID NO: 419772 - DNA, 52 bp, Artificial
  Synthetic oligonucleotide
ggactgagttccctacttttgaggaaagagtaggagagtgggagatgggcgc

SEQ ID NO: 419773 - DNA, 51 bp, Artificial
  Synthetic oligonucleotide
ggactgataacaagctaggccaaattcctgtaaatcacttgtggtgttata

SEQ ID NO: 419774 - DNA, 55 bp, Artificial
  Synthetic oligonucleotide
ggactgatctgagactctatcaaccttggttacagtctccttgagggtcctatca

SEQ ID NO: 419775 - DNA, 60 bp, Artificial
  Synthetic oligonucleotide
ggactgatggctcaaatatatcaacacaatggccaagtcaacgaaatgagggtgtcgttc

SEQ ID NO: 419776 - DNA, 60 bp, Artificial
  Synthetic oligonucleotide
ggactgatggtttagaagcactggacttgtcaactagtgcaggctatccctacgtggccc

SEQ ID NO: 419777 - DNA, 60 bp, Artificial
  Synthetic oligonucleotide
ggactgatgtcatcgatgacgttatactcaacctcgttagagtacactgaagaattgaaa

SEQ ID NO: 419778 - DNA, 50 bp, Artificial
  Synthetic oligonucleotide
ggactgattatctctatgctttgactagaaatcctgcggttataaagtat

SEQ ID NO: 419779 - DNA, 58 bp, Artificial
  Synthetic oligonucleotide
ggactgattggtgagtgccgagctttcctagattctataactagtaccttaaagtcaa

SEQ ID NO: 419780 - DNA, 55 bp, Artificial
  Synthetic oligonucleotide
ggactgatttaatcaccaattattcaccgtctagggaggacaatttgcaacgcgt

SEQ ID NO: 419781 - DNA, 56 bp, Artificial
  Synthetic oligonucleotide
ggactgcaatgcgagcctcgacaccggctgggtagcgggcctcttctatcaccaca

SEQ ID NO: 419782 - DNA, 60 bp, Artificial
  Synthetic oligonucleotide
ggactgcacactgagttccagactgtgtccttctcaatggtgggcctcctttccaacaat

SEQ ID NO: 419783 - DNA, 55 bp, Artificial
  Synthetic oligonucleotide
ggactgcattacagtggtgaaccaactactcttggaggcatcatcactcgtggtg

SEQ ID NO: 419784 - DNA, 60 bp, Artificial
  Synthetic oligonucleotide
ggactgcattgcatatccctaggcacctattgagatttctctggggcccaccagcatgga

SEQ ID NO: 419785 - DNA, 60 bp, Artificial
  Synthetic oligonucleotide
ggactgcatttggtagtgactgtgatatatctgtctgtccattagatactacaagtaatg

SEQ ID NO: 419786 - DNA, 55 bp, Artificial
  Synthetic oligonucleotide
ggactgccaaagttcaggggccagggtttgactacgctgtggcaatggcgaagag

SEQ ID NO: 419787 - DNA, 55 bp, Artificial
  Synthetic oligonucleotide
ggactgccaatccgttacctgacaccagctgtgaggaatgaacatcagggcaatg

SEQ ID NO: 419788 - DNA, 55 bp, Artificial
  Synthetic oligonucleotide
ggactgccagtccctttgggcccccatgaactctttaaagtgcttgaggaagtgg

SEQ ID NO: 419789 - DNA, 55 bp, Artificial
  Synthetic oligonucleotide
ggactgccagtccctttgggcccccatgaactctttaaagtgtttcaaataatgc

SEQ ID NO: 419790 - DNA, 57 bp, Artificial
  Synthetic oligonucleotide
ggactgccagtctctttgggcccccatgaactctttaaagtgtttgaggaaatgcgc

SEQ ID NO: 419791 - DNA, 54 bp, Artificial
  Synthetic oligonucleotide
ggactgccctcgcgcgacgaatagcactcgcggtaccgaccttttggggtggcg

SEQ ID NO: 419792 - DNA, 60 bp, Artificial
  Synthetic oligonucleotide
ggactgccgcctcacagattggtcaagccacggtggttaactatgtccagctatatgccg

SEQ ID NO: 419793 - DNA, 60 bp, Artificial
  Synthetic oligonucleotide
ggactgcgcgaacgcatcaaatgttcaggctgtgaatcattctgcaacagaagagatgac

SEQ ID NO: 419794 - DNA, 59 bp, Artificial
  Synthetic oligonucleotide
ggactgcggtaattaccagagcagtggccgcaaacaatgggctgacggccggcatcgac

SEQ ID NO: 419795 - DNA, 55 bp, Artificial
  Synthetic oligonucleotide
ggactgcggtgcatgtgacttcggtcaccaggggcatagcattgctcacccctga

SEQ ID NO: 419796 - DNA, 58 bp, Artificial
  Synthetic oligonucleotide
ggactgcgtgttggaagcaatggctttccttgaagaatcacacccagggatttttgaa

SEQ ID NO: 419797 - DNA, 55 bp, Artificial
  Synthetic oligonucleotide
ggactgctgctaatcacgtttatgtttatgtgactgcttctcttggacctgacgc

SEQ ID NO: 419798 - DNA, 60 bp, Artificial
  Synthetic oligonucleotide
ggactgcttagccgatgacattttcagtttcccttgcatcctgcagaaatgtaccccgtc

SEQ ID NO: 419799 - DNA, 58 bp, Artificial
  Synthetic oligonucleotide
ggactgcttcctcgtcatatgaggaccagtccacgttattctgccagtagttgtggcg

SEQ ID NO: 419800 - DNA, 59 bp, Artificial
  Synthetic oligonucleotide
ggactgctttgaactgcaatgattccctccagacggggttcatagcgtcgctcttttac

SEQ ID NO: 419801 - DNA, 55 bp, Artificial
  Synthetic oligonucleotide
ggactggaacgagcctttacaagactcgctgttagtgactctcctgaagtggctc

SEQ ID NO: 419802 - DNA, 56 bp, Artificial
  Synthetic oligonucleotide
ggactggaactttgggttgactttaccaccatccactagcttggaggacacgtata

SEQ ID NO: 419803 - DNA, 55 bp, Artificial
  Synthetic oligonucleotide
ggactggaagggataatttggtctaagagaaggcaagacatccttgatttgtggg

SEQ ID NO: 419804 - DNA, 56 bp, Artificial
  Synthetic oligonucleotide
ggactggaataattgacttgcctggatattatgaggctgtacatccttgcacagtg

SEQ ID NO: 419805 - DNA, 55 bp, Artificial
  Synthetic oligonucleotide
ggactggaccaacgacttgactggctttgttaccacacttgtaaggttactggaa

SEQ ID NO: 419806 - DNA, 55 bp, Artificial
  Synthetic oligonucleotide
ggactggacggtagggtaggaacacaggaagaggacaccgaacggcacacagcag

SEQ ID NO: 419807 - DNA, 53 bp, Artificial
  Synthetic oligonucleotide
ggactggagcacttactccccagaaatgctcgaatactgcgcccaggacgtca

SEQ ID NO: 419808 - DNA, 60 bp, Artificial
  Synthetic oligonucleotide
ggactggagcgggacaaggtactgggctcccgatgctaggactacaacatataatgcagg

SEQ ID NO: 419809 - DNA, 55 bp, Artificial
  Synthetic oligonucleotide
ggactggaggacgtcgcgaaagtcatcattacgatgagacgtgatcatccgaggc

SEQ ID NO: 419810 - DNA, 58 bp, Artificial
  Synthetic oligonucleotide
ggactggaggcgactagtcgacatctgtttcgaaaatcgtgaagccgacattgggcgg

SEQ ID NO: 419811 - DNA, 58 bp, Artificial
  Synthetic oligonucleotide
ggactggatctcccttattgggccgtatttcactgggctttgaatggaatatgtattg

SEQ ID NO: 419812 - DNA, 53 bp, Artificial
  Synthetic oligonucleotide
ggactggattatgactccagcagagccataattgctaaactgggaactggcct

SEQ ID NO: 419813 - DNA, 54 bp, Artificial
  Synthetic oligonucleotide
ggactggcagcggctcatcaacaaccactggggcatccgccccaagcggctcca

SEQ ID NO: 419814 - DNA, 51 bp, Artificial
  Synthetic oligonucleotide
ggactggcgagcggtatgcccggtgcgaaggacaagatcgtagccctcgca

SEQ ID NO: 419815 - DNA, 59 bp, Artificial
  Synthetic oligonucleotide
ggactggctcatcttcgacgagaggcggggcgtcccgagaactcttatcttcctgctta

SEQ ID NO: 419816 - DNA, 55 bp, Artificial
  Synthetic oligonucleotide
ggactggcttatagtcgcctatggtaacaaggaaggactgctactcccctctggc

SEQ ID NO: 419817 - DNA, 55 bp, Artificial
  Synthetic oligonucleotide
ggactgggacctctagaatggaaaatggaaacaccaataactctggcaacaccgg

SEQ ID NO: 419818 - DNA, 50 bp, Artificial
  Synthetic oligonucleotide
ggactgggagctgtgttcttggggttacctaaaggatcaacagctcctag

SEQ ID NO: 419819 - DNA, 55 bp, Artificial
  Synthetic oligonucleotide
ggactgggatgattgatttacctggatactacgaagctgtccacccttgtacagt

SEQ ID NO: 419820 - DNA, 59 bp, Artificial
  Synthetic oligonucleotide
ggactgggatgattgatttacctggatactatgaggccatacacccttgcacagttttt

SEQ ID NO: 419821 - DNA, 58 bp, Artificial
  Synthetic oligonucleotide
ggactggggtcctatatatactagaaccctctataggactttcaatctcgttcacaca

SEQ ID NO: 419822 - DNA, 55 bp, Artificial
  Synthetic oligonucleotide
ggactgggtaatatgtgcgtttggtgtataccatgctgtggcagaggctgtaaaa

SEQ ID NO: 419823 - DNA, 52 bp, Artificial
  Synthetic oligonucleotide
ggactggtacaagctgccacaatactgctacacaaccgtaggcatggaaagt

SEQ ID NO: 419824 - DNA, 60 bp, Artificial
  Synthetic oligonucleotide
ggactggtatgttgcaagggatcagagaagcgatgactccttatagggatctgcggtatg

SEQ ID NO: 419825 - DNA, 59 bp, Artificial
  Synthetic oligonucleotide
ggactggtcactcaattaaatggagtcgtgggtgttactggaaccgtcgctatgacgca

SEQ ID NO: 419826 - DNA, 58 bp, Artificial
  Synthetic oligonucleotide
ggactggttatgctttgcattcacggctcccctgtcaattcttacactaatacacctt

SEQ ID NO: 419827 - DNA, 54 bp, Artificial
  Synthetic oligonucleotide
ggactggttggggtctaggtggtaaatggtggacatccgactggggtgttctta

SEQ ID NO: 419828 - DNA, 55 bp, Artificial
  Synthetic oligonucleotide
ggactggttgttgtgctcaaccaacctccaactactcgcgctggaggttctagtg

SEQ ID NO: 419829 - DNA, 60 bp, Artificial
  Synthetic oligonucleotide
ggactggtttggcaaatagactgttgagcaagggaaatgacattttgtgttgtgactatg

SEQ ID NO: 419830 - DNA, 55 bp, Artificial
  Synthetic oligonucleotide
ggactgtaataccatattccgaatctatgtctagcactgccctctgcgagagagt

SEQ ID NO: 419831 - DNA, 59 bp, Artificial
  Synthetic oligonucleotide
ggactgtactcatgtttgaacgccctaatggtcgtaaggtgctgaatcgtgagcggcgt

SEQ ID NO: 419832 - DNA, 56 bp, Artificial
  Synthetic oligonucleotide
ggactgtaggatcgacttctcgaaatctgtgcaagtgccgaaagaacggccggttt

SEQ ID NO: 419833 - DNA, 55 bp, Artificial
  Synthetic oligonucleotide
ggactgtatcagttggcgatggttacgcgtaactacttagttgacaatgatcatg

SEQ ID NO: 419834 - DNA, 57 bp, Artificial
  Synthetic oligonucleotide
ggactgtatcccttgacaatccgcttcctcctctcaggtcacttcgccctccctccc

SEQ ID NO: 419835 - DNA, 60 bp, Artificial
  Synthetic oligonucleotide
ggactgtatgagaccttgcttctgggttgaattagtcagagggctacctagagaaaatgc

SEQ ID NO: 419836 - DNA, 60 bp, Artificial
  Synthetic oligonucleotide
ggactgtcaaagacagaagccctcacagaacattgatgagttgtcctgtgggtgaggctc

SEQ ID NO: 419837 - DNA, 55 bp, Artificial
  Synthetic oligonucleotide
ggactgtcaagacgtaatttgaaatttccttcagttacagagcgtctgagtagac

SEQ ID NO: 419838 - DNA, 55 bp, Artificial
  Synthetic oligonucleotide
ggactgtcgccaatcacaactgggctgctatcagccaccactacagggctatcag

SEQ ID NO: 419839 - DNA, 55 bp, Artificial
  Synthetic oligonucleotide
ggactgtctgcacttagaaaaggagtcgatggcaattctgtatctagcccttaca

SEQ ID NO: 419840 - DNA, 60 bp, Artificial
  Synthetic oligonucleotide
ggactgtgcaacacgcttcaaccgtgcaagagttggatctccaagttccagacagaggac

SEQ ID NO: 419841 - DNA, 55 bp, Artificial
  Synthetic oligonucleotide
ggactgtggggctgctctggaaaactcgtctgcaccactgctgtgccttggaacc

SEQ ID NO: 419842 - DNA, 55 bp, Artificial
  Synthetic oligonucleotide
ggactgtggggttttgaatcctatttatggtcctaatactgccagtcaagaccaa

SEQ ID NO: 419843 - DNA, 55 bp, Artificial
  Synthetic oligonucleotide
ggactgttagaggtccgaatgtgccgccccgaatacccaagggttttgttgcaca

SEQ ID NO: 419844 - DNA, 55 bp, Artificial
  Synthetic oligonucleotide
ggactgttcgctttagtagattaggtcaacgggcaactatgtttacccgcagcgg

SEQ ID NO: 419845 - DNA, 55 bp, Artificial
  Synthetic oligonucleotide
ggactgttgaagggcgaaaatattggcttaactatcacaagcaggtccaaactgt

SEQ ID NO: 419846 - DNA, 58 bp, Artificial
  Synthetic oligonucleotide
ggactgttggtttcagatggagggccgaatttatacaacatccggaatcttcacattc

SEQ ID NO: 419847 - DNA, 56 bp, Artificial
  Synthetic oligonucleotide
ggactgttgtcctaactaactcgttcaactggcccaaagacattgtaatgttggat

SEQ ID NO: 419848 - DNA, 55 bp, Artificial
  Synthetic oligonucleotide
ggactgtttaataatgagaccataagcaatgggaccatcacactcccatgtagga

SEQ ID NO: 419849 - DNA, 58 bp, Artificial
  Synthetic oligonucleotide
ggactgtttaatagtacacacaattctacattctggaatgagacacattggccatact

SEQ ID NO: 419850 - DNA, 59 bp, Artificial
  Synthetic oligonucleotide
ggactgtttaatagtacatacatgcctgaatactggcctaatagtacagaaagtaattc

SEQ ID NO: 419851 - DNA, 54 bp, Artificial
  Synthetic oligonucleotide
ggactgtttaatagttcttgggatattaatggttcttggtatggtaatagaggg

SEQ ID NO: 419852 - DNA, 60 bp, Artificial
  Synthetic oligonucleotide
ggactgtttagctgaagacatcttcagcttgccttgcatcctacagaaatgtaccccgtt

SEQ ID NO: 419853 - DNA, 56 bp, Artificial
  Synthetic oligonucleotide
ggactgtttcgcagttcttagcccgccacaacggagggaatcaccctgaccaaata

SEQ ID NO: 419854 - DNA, 59 bp, Artificial
  Synthetic oligonucleotide
ggactgtttgatgcccaaaatgtcaattattactccagcttcgacgaattcatcatacc

SEQ ID NO: 419855 - DNA, 53 bp, Artificial
  Synthetic oligonucleotide
ggactgttttactttgacggccctgtaaaggtgtactatgttacatttgggac

SEQ ID NO: 419856 - DNA, 55 bp, Artificial
  Synthetic oligonucleotide
ggacttaaaaccgtatgtgcctatagaatcattcgacccctttcacgagctttcg

SEQ ID NO: 419857 - DNA, 55 bp, Artificial
  Synthetic oligonucleotide
ggacttaaatcattgatggactcacatcgtgaaagcggaggtacattacatggtg

SEQ ID NO: 419858 - DNA, 55 bp, Artificial
  Synthetic oligonucleotide
ggacttaacaaccctactttaggtagatacattcagcatagtaatacttggaacg

SEQ ID NO: 419859 - DNA, 58 bp, Artificial
  Synthetic oligonucleotide
ggacttaacgtcggacgaggatttagctccctgtatgttaggatggaaatgtgctgac

SEQ ID NO: 419860 - DNA, 55 bp, Artificial
  Synthetic oligonucleotide
ggacttacccgcttgagcgacgttctgatgattctcgtcgagacatcgccgcatc

SEQ ID NO: 419861 - DNA, 55 bp, Artificial
  Synthetic oligonucleotide
ggacttacgctacgtattgagtctgcggtttgtgaatcagtgcttgcggatgcaa

SEQ ID NO: 419862 - DNA, 56 bp, Artificial
  Synthetic oligonucleotide
ggacttacggaagaagtcttccctgatctgaaaacctacactatgtgcgaaactgg

SEQ ID NO: 419863 - DNA, 58 bp, Artificial
  Synthetic oligonucleotide
ggacttacgtactatgactcttgaactttcaggactgtcgacgtccgaccttgaggca

SEQ ID NO: 419864 - DNA, 55 bp, Artificial
  Synthetic oligonucleotide
ggacttacgttgtcggggaataatctcgccattcggttgccaggcaatacgggtc

SEQ ID NO: 419865 - DNA, 53 bp, Artificial
  Synthetic oligonucleotide
ggacttactaaagagggttacgtgttattgaggtgggataatgagaagcgggg

SEQ ID NO: 419866 - DNA, 60 bp, Artificial
  Synthetic oligonucleotide
ggacttagaactctagctagattcattcactatatatcacctgagcactggggagctgat

SEQ ID NO: 419867 - DNA, 55 bp, Artificial
  Synthetic oligonucleotide
ggacttagactacgtgcggccgttacgactagtacttcagaagtccgccaaagcg

SEQ ID NO: 419868 - DNA, 55 bp, Artificial
  Synthetic oligonucleotide
ggacttagatcatgactcttgtaagggtgtttatgataatataagcaagaacgcc

SEQ ID NO: 419869 - DNA, 54 bp, Artificial
  Synthetic oligonucleotide
ggacttagccttccttaccggagcgcttcggatataccttattactcctgcccg

SEQ ID NO: 419870 - DNA, 51 bp, Artificial
  Synthetic oligonucleotide
ggacttaggctacattggggaagagcccttgaaacattgggctaagaatca

SEQ ID NO: 419871 - DNA, 60 bp, Artificial
  Synthetic oligonucleotide
ggacttatagatgatgccacatttccatgttttcagtttatggatgtatatatgcgaagt

SEQ ID NO: 419872 - DNA, 56 bp, Artificial
  Synthetic oligonucleotide
ggacttatattaaccttccaattggaacacatggacgtggaaatttagacagcatt

SEQ ID NO: 419873 - DNA, 53 bp, Artificial
  Synthetic oligonucleotide
ggacttatggtttggtgcattgaaaatggaacctcgccaaacattaatgggac

SEQ ID NO: 419874 - DNA, 50 bp, Artificial
  Synthetic oligonucleotide
ggacttcacaacgctgtcgatcgttagacactggaaagatttatataacg

SEQ ID NO: 419875 - DNA, 55 bp, Artificial
  Synthetic oligonucleotide
ggacttcacatcttctcttgcaccgctaaccagattgacgcaactggacaacgag

SEQ ID NO: 419876 - DNA, 57 bp, Artificial
  Synthetic oligonucleotide
ggacttccaagcgcattgtgtaagagaggaaaggttttattgttggagcctacacga

SEQ ID NO: 419877 - DNA, 55 bp, Artificial
  Synthetic oligonucleotide
ggacttccgggtgcccggaacaagaactgctgacagagagacttttggactcggg

SEQ ID NO: 419878 - DNA, 55 bp, Artificial
  Synthetic oligonucleotide
ggacttcctgcttatgtcagtgcaggcagtctttcactacttgctgttcagcccc

SEQ ID NO: 419879 - DNA, 60 bp, Artificial
  Synthetic oligonucleotide
ggacttcgccatagctgattgcccgaattggcaaggagctgctcccaagacccaattctg

SEQ ID NO: 419880 - DNA, 54 bp, Artificial
  Synthetic oligonucleotide
ggacttcggctttctcgttacgctaagccgcgtaacgggaatcgcccttagcga

SEQ ID NO: 419881 - DNA, 58 bp, Artificial
  Synthetic oligonucleotide
ggacttcgtacaaaacagccaattaataaagagttcatgataaatgtacaaagtgatg

SEQ ID NO: 419882 - DNA, 50 bp, Artificial
  Synthetic oligonucleotide
ggacttcgtcgaagttcacaaaaggtcggggttccggtttctgatcccgg

SEQ ID NO: 419883 - DNA, 57 bp, Artificial
  Synthetic oligonucleotide
ggacttctaactccgaattcagaacgaccttgacgctttttctcaatcaataatcta

SEQ ID NO: 419884 - DNA, 60 bp, Artificial
  Synthetic oligonucleotide
ggacttctcgcgacctaattacacatccgactacacacagtatgaccagtctcaagacgc

SEQ ID NO: 419885 - DNA, 60 bp, Artificial
  Synthetic oligonucleotide
ggacttgaaaccatacgtggtggcatgatggaaatcgaaagtctagctactagattttca

SEQ ID NO: 419886 - DNA, 60 bp, Artificial
  Synthetic oligonucleotide
ggacttgaagcgaaagtagaaccagagaagatctctcgacgcggggactcggcttgctga

SEQ ID NO: 419887 - DNA, 60 bp, Artificial
  Synthetic oligonucleotide
ggacttgacatctgttgagcttttagctgcctgaatgttcggatggaaatgtgctgacct

SEQ ID NO: 419888 - DNA, 60 bp, Artificial
  Synthetic oligonucleotide
ggacttgagctcaccttgaccaacaccagcattcttaatcacaaattctgtaacctctct

SEQ ID NO: 419889 - DNA, 60 bp, Artificial
  Synthetic oligonucleotide
ggacttgataagggatggccaatatcgaagatggacataggagttccacttctcgcctta

SEQ ID NO: 419890 - DNA, 58 bp, Artificial
  Synthetic oligonucleotide
ggacttgatccactactttgacgattattatcttatagaagtggtttgttctatgacc

SEQ ID NO: 419891 - DNA, 55 bp, Artificial
  Synthetic oligonucleotide
ggacttgatcctatatcgccaggggacttaactatggttatcacccaggattgtg

SEQ ID NO: 419892 - DNA, 55 bp, Artificial
  Synthetic oligonucleotide
ggacttgatgcaagtcgattcgatcaacactgttcgaaagatgcgctcaagttcg

SEQ ID NO: 419893 - DNA, 54 bp, Artificial
  Synthetic oligonucleotide
ggacttgcattttaccgggacaaacggtgttggtgaggtaggtcgtggtatagc

SEQ ID NO: 419894 - DNA, 57 bp, Artificial
  Synthetic oligonucleotide
ggacttgctgtggccagtggttatgactttgaaaaagagggatactccctagttgga

SEQ ID NO: 419895 - DNA, 56 bp, Artificial
  Synthetic oligonucleotide
ggacttggattgggatgaatcatgtatatacgatgacttgtttgaatactttcacg

SEQ ID NO: 419896 - DNA, 60 bp, Artificial
  Synthetic oligonucleotide
ggacttggattggtgtcatatgctcacccatgtcttgaggaactaaatttcgatgttctt

SEQ ID NO: 419897 - DNA, 54 bp, Artificial
  Synthetic oligonucleotide
ggacttggcggttcatcttggaccgctggagtacgcgaggcttttccgcccatt

SEQ ID NO: 419898 - DNA, 55 bp, Artificial
  Synthetic oligonucleotide
ggacttgggagagatgtgtgatgacacggtcacttacaaatgccccttcattgcc

SEQ ID NO: 419899 - DNA, 57 bp, Artificial
  Synthetic oligonucleotide
ggacttggtcggaggttgatgctgtttctagtccagcccagcccgacttaggtttca

SEQ ID NO: 419900 - DNA, 51 bp, Artificial
  Synthetic oligonucleotide
ggacttgtaactggtaagtgataatccttggaagctaggtactcgttacgc

SEQ ID NO: 419901 - DNA, 55 bp, Artificial
  Synthetic oligonucleotide
ggacttgtacagtagtgatgactgatggaagtgcatcaggaagagccgatactag

SEQ ID NO: 419902 - DNA, 57 bp, Artificial
  Synthetic oligonucleotide
ggacttgtactctccgcaataataatgttcccgtctttcacacagtgttaaggtgag

SEQ ID NO: 419903 - DNA, 60 bp, Artificial
  Synthetic oligonucleotide
ggacttgtactttgtgcattgtgagtgttcccgtctttcacacagtgttgaggtgagtgt

SEQ ID NO: 419904 - DNA, 56 bp, Artificial
  Synthetic oligonucleotide
ggacttgttgtgccctacggattgttttaggaagcatcctgatgccacttatatta

SEQ ID NO: 419905 - DNA, 55 bp, Artificial
  Synthetic oligonucleotide
ggactttaccgtcagtgtatacgtggcaaggagcagctgcaactactcatgcctc

SEQ ID NO: 419906 - DNA, 54 bp, Artificial
  Synthetic oligonucleotide
ggactttagagcgtcggggtggctactgtggttacacttattccgcaaaccttc

SEQ ID NO: 419907 - DNA, 57 bp, Artificial
  Synthetic oligonucleotide
ggactttatcatatatcggtttttactaatagttgttgtcgtactgccatttattga

SEQ ID NO: 419908 - DNA, 60 bp, Artificial
  Synthetic oligonucleotide
ggactttatttggaaagtatttggcatggagtctagatttctgcgagatgcttccttgat

SEQ ID NO: 419909 - DNA, 60 bp, Artificial
  Synthetic oligonucleotide
ggactttcatagtcctattgcctcagatctactgttgcaacgcagcgcagggcatgaaaa

SEQ ID NO: 419910 - DNA, 49 bp, Artificial
  Synthetic oligonucleotide
ggactttccaccggggacttttaggggaggtgtcaagggcggagttggg

SEQ ID NO: 419911 - DNA, 55 bp, Artificial
  Synthetic oligonucleotide
ggactttccgagaggggcagtaacaagggaggaacatgggaggagctggtgggga

SEQ ID NO: 419912 - DNA, 52 bp, Artificial
  Synthetic oligonucleotide
ggactttccgaggggactttccagaagaggcgtaacctgggcgggactggga

SEQ ID NO: 419913 - DNA, 55 bp, Artificial
  Synthetic oligonucleotide
ggactttcgacgtgtctattatttcctaccgcaacaatacattcgtagtgcgcgc

SEQ ID NO: 419914 - DNA, 60 bp, Artificial
  Synthetic oligonucleotide
ggactttcgggatgcgcaaaagcacgttggattcgtcttgactagacaaatccaatgagc

SEQ ID NO: 419915 - DNA, 55 bp, Artificial
  Synthetic oligonucleotide
ggactttcggggtggaccaattcctatttgaggcgcgtgatgtgttaaaggcggc

SEQ ID NO: 419916 - DNA, 50 bp, Artificial
  Synthetic oligonucleotide
ggactttctcccaacctacacaactacttagtcgcgttggtattgattag

SEQ ID NO: 419917 - DNA, 52 bp, Artificial
  Synthetic oligonucleotide
ggactttctgctgggggctttccaggggaggtgtggtttgggcggagttggg

SEQ ID NO: 419918 - DNA, 55 bp, Artificial
  Synthetic oligonucleotide
ggactttgaatgcgtgggtaaaagtgatagaggaaaaggccttcagcccagaggt

SEQ ID NO: 419919 - DNA, 55 bp, Artificial
  Synthetic oligonucleotide
ggactttgagtgactcggaagggaacgacatgccaggtggttactgtctcacaag

SEQ ID NO: 419920 - DNA, 60 bp, Artificial
  Synthetic oligonucleotide
ggactttgatctcatgaaaagaagcacaacattcagaactcagatttacattctccaagg

SEQ ID NO: 419921 - DNA, 60 bp, Artificial
  Synthetic oligonucleotide
ggactttgctggagaaatgaattcaacttatcacagtaagagcaacttcctactacatga

SEQ ID NO: 419922 - DNA, 59 bp, Artificial
  Synthetic oligonucleotide
ggactttggtcaagtttttaacatgtatgataatgaacccagtactgccactgtgaaga

SEQ ID NO: 419923 - DNA, 54 bp, Artificial
  Synthetic oligonucleotide
ggactttgtgcactccgtcaagttaacgcttgcacggaggcgcgatcttcagta

SEQ ID NO: 419924 - DNA, 60 bp, Artificial
  Synthetic oligonucleotide
ggactttttggagcaatagctggattcatagagaatggatggcaaggcctaattgacggt

SEQ ID NO: 419925 - DNA, 60 bp, Artificial
  Synthetic oligonucleotide
ggagaaaacaacagtctgctacaccctgtgtgccagcatggaatggatggtgatcacaga

SEQ ID NO: 419926 - DNA, 55 bp, Artificial
  Synthetic oligonucleotide
ggagaaaacaactgcctgttacaccccatgaaccagcatgggtttgaggacgacg

SEQ ID NO: 419927 - DNA, 55 bp, Artificial
  Synthetic oligonucleotide
ggagaaaacatcgggtactcgtacagacattaggagaactctcgcttcagttacc

SEQ ID NO: 419928 - DNA, 55 bp, Artificial
  Synthetic oligonucleotide
ggagaaaacatggcacctgaaaaggtggactttgaggattgcaaagacgttagcg

SEQ ID NO: 419929 - DNA, 60 bp, Artificial
  Synthetic oligonucleotide
ggagaaaactgctggtgacccatggctcaaaggtcttttggatctccaacagacagagga

SEQ ID NO: 419930 - DNA, 55 bp, Artificial
  Synthetic oligonucleotide
ggagaaaagtgaaacaaggctagaagtcaggtcatattaagccatagtacggaac

SEQ ID NO: 419931 - DNA, 51 bp, Artificial
  Synthetic oligonucleotide
ggagaaaagtgggaaggggctttaaaaggatataagagaacgggttctgcc

SEQ ID NO: 419932 - DNA, 53 bp, Artificial
  Synthetic oligonucleotide
ggagaaaattaatacaaatgacatggttgatgcactgtttcaagggccgagga

SEQ ID NO: 419933 - DNA, 50 bp, Artificial
  Synthetic oligonucleotide
ggagaaacacaagagctcacgcaagcgtcacaggatcaaccgcaaattgc

SEQ ID NO: 419934 - DNA, 54 bp, Artificial
  Synthetic oligonucleotide
ggagaaacagacccggtagttttggaagtgagttgggcttcgatctggttcgct

SEQ ID NO: 419935 - DNA, 55 bp, Artificial
  Synthetic oligonucleotide
ggagaaaggacataggtttccgtgtcaatgcaaacacagcggctctgagcaacaa

SEQ ID NO: 419936 - DNA, 55 bp, Artificial
  Synthetic oligonucleotide
ggagaaagttaattatgacagctccttcgggcgctatatgggaaacgtgtacgct

SEQ ID NO: 419937 - DNA, 55 bp, Artificial
  Synthetic oligonucleotide
ggagaaagttctttagctgatcacattattgtgacgtcaggtgctggaggccaag

SEQ ID NO: 419938 - DNA, 57 bp, Artificial
  Synthetic oligonucleotide
ggagaaatattggaccggttcagtaggcagtggcttaagcgcaagttcacacctagg

SEQ ID NO: 419939 - DNA, 54 bp, Artificial
  Synthetic oligonucleotide
ggagaaatcactcccaagaaggtaagagagaactcaagaaccggaagatttccc

SEQ ID NO: 419940 - DNA, 55 bp, Artificial
  Synthetic oligonucleotide
ggagaaatgcctattacttgtttgttataatggcatgtactcatgcctcaaaccc

SEQ ID NO: 419941 - DNA, 55 bp, Artificial
  Synthetic oligonucleotide
ggagaaatggatccagtagaccctaacatagagccctggaaccacccaggaagtc

SEQ ID NO: 419942 - DNA, 60 bp, Artificial
  Synthetic oligonucleotide
ggagaaattgttttgcaaaatgcagcattcacgatgtggaagttgacgtacttggaacat

SEQ ID NO: 419943 - DNA, 60 bp, Artificial
  Synthetic oligonucleotide
ggagaacaaccatggcatctaggccatggagtgtccatagagtggaggcagagaacatat

SEQ ID NO: 419944 - DNA, 55 bp, Artificial
  Synthetic oligonucleotide
ggagaacaaggaagatctctggttcatgtctcataaaggcatcatgtgcgaaggc

SEQ ID NO: 419945 - DNA, 55 bp, Artificial
  Synthetic oligonucleotide
ggagaacaagttgttgacaccagtgtagaagatttacggagagatttggtatcgg

SEQ ID NO: 419946 - DNA, 57 bp, Artificial
  Synthetic oligonucleotide
ggagaacagatgccttaacagaattttctgtaaaggtgctgactttcaacaacccta

SEQ ID NO: 419947 - DNA, 59 bp, Artificial
  Synthetic oligonucleotide
ggagaaccaccattcgcaatactcaggacacgaatgtcaggtttatatggactaccagc

SEQ ID NO: 419948 - DNA, 55 bp, Artificial
  Synthetic oligonucleotide
ggagaaccccggtgtgagtttctttacctagcagaagatatactctagtatcctc

SEQ ID NO: 419949 - DNA, 55 bp, Artificial
  Synthetic oligonucleotide
ggagaacccggccaaaacacgcgagtactgtctgcatgccaagctatcggacacc

SEQ ID NO: 419950 - DNA, 55 bp, Artificial
  Synthetic oligonucleotide
ggagaaccctgtggatccacctgaacttccggagccttcagccgtcgccacacct

SEQ ID NO: 419951 - DNA, 55 bp, Artificial
  Synthetic oligonucleotide
ggagaaccgcgcaatggtaaggaggaaaggatttggaatcctgataggggtctac

SEQ ID NO: 419952 - DNA, 55 bp, Artificial
  Synthetic oligonucleotide
ggagaacggtttcgttgagcactggcactagacgagtcgctccaaatgctcgtgt

SEQ ID NO: 419953 - DNA, 51 bp, Artificial
  Synthetic oligonucleotide
ggagaacgttccactaaaccgtaaggaatctactgtagatcttactaagga

SEQ ID NO: 419954 - DNA, 58 bp, Artificial
  Synthetic oligonucleotide
ggagaacgttccgatctacaattacgatgaagctagcggaaactatcgttttgtgtca

SEQ ID NO: 419955 - DNA, 55 bp, Artificial
  Synthetic oligonucleotide
ggagaactaaggtgtgagactacggcattgaaactagggatcaagctcacccaac

SEQ ID NO: 419956 - DNA, 60 bp, Artificial
  Synthetic oligonucleotide
ggagaactgctgaatatgaagtttcctctgactttcttcagacccagatgaaggattatc

SEQ ID NO: 419957 - DNA, 54 bp, Artificial
  Synthetic oligonucleotide
ggagaacttacagttttatgatcacatgattaagtccgatgttaagccagttgt

SEQ ID NO: 419958 - DNA, 55 bp, Artificial
  Synthetic oligonucleotide
ggagaacttctttcagtgcttggacatcagaagtggagaatatcatggcgcagcc

SEQ ID NO: 419959 - DNA, 57 bp, Artificial
  Synthetic oligonucleotide
ggagaagaatagggacattttcaagcgcggcggggaacgcacaagagacaccacaag

SEQ ID NO: 419960 - DNA, 60 bp, Artificial
  Synthetic oligonucleotide
ggagaagacgcaactgctggtctcactcacctgatgatctggcattccaatctaaaggat

SEQ ID NO: 419961 - DNA, 57 bp, Artificial
  Synthetic oligonucleotide
ggagaagactgaccttcgacagccctttggccctacctgctcctgctttacgtgccc

SEQ ID NO: 419962 - DNA, 60 bp, Artificial
  Synthetic oligonucleotide
ggagaagagatggcaacaaaggccgactacacactagatgaagaaagtagagctagaata

SEQ ID NO: 419963 - DNA, 57 bp, Artificial
  Synthetic oligonucleotide
ggagaagagcgacgaagggggcacacaagtgccaactaatgcgcctcggacggaacc

SEQ ID NO: 419964 - DNA, 55 bp, Artificial
  Synthetic oligonucleotide
ggagaagatagcgctcttaatgtggcacatcaactttcggagttagctgatttgc

SEQ ID NO: 419965 - DNA, 55 bp, Artificial
  Synthetic oligonucleotide
ggagaagatccatacatactccttatgggtttgatctcaccatccattttaattc

SEQ ID NO: 419966 - DNA, 56 bp, Artificial
  Synthetic oligonucleotide
ggagaagattccaagaactaaaaacatgaaaaagacgagtcagcttaagtgggcac

SEQ ID NO: 419967 - DNA, 60 bp, Artificial
  Synthetic oligonucleotide
ggagaagccatgcatggacaagtagactgtagtccaggaatatggcaactagattgtaca

SEQ ID NO: 419968 - DNA, 60 bp, Artificial
  Synthetic oligonucleotide
ggagaagcccgcacccgatgctattagcgacctgctagctagtgttgatagtgaagaggt

SEQ ID NO: 419969 - DNA, 55 bp, Artificial
  Synthetic oligonucleotide
ggagaagcgagaagaatcgtatatctgattcagagcgttactgggatacgtcgac

SEQ ID NO: 419970 - DNA, 56 bp, Artificial
  Synthetic oligonucleotide
ggagaagcgtgtgcttaaacttccaagacgtggtcaaacctctgggtctgtcaaaa

SEQ ID NO: 419971 - DNA, 60 bp, Artificial
  Synthetic oligonucleotide
ggagaagctaatctcctgataacacgtggcatgacagggcgactatccaacactcccaat

SEQ ID NO: 419972 - DNA, 55 bp, Artificial
  Synthetic oligonucleotide
ggagaagcttgagttctgccagggacatccactgtgcatcaacggcagttacagg

SEQ ID NO: 419973 - DNA, 59 bp, Artificial
  Synthetic oligonucleotide
ggagaaggcagagaaatcacctccagaggaccccttcaacgaacaaagaagcgctctga

SEQ ID NO: 419974 - DNA, 55 bp, Artificial
  Synthetic oligonucleotide
ggagaaggtatatggaggggttcattcgatgattccgatgtttgcatagttgtcc

SEQ ID NO: 419975 - DNA, 55 bp, Artificial
  Synthetic oligonucleotide
ggagaaggttacatctattataccttggctgaaagacagccctcaggacacactg

SEQ ID NO: 419976 - DNA, 55 bp, Artificial
  Synthetic oligonucleotide
ggagaagtactgtgttcttgagataggagatatgcttataagaagtgccataggc

SEQ ID NO: 419977 - DNA, 60 bp, Artificial
  Synthetic oligonucleotide
ggagaagtcttatatgccaagatatggacttcaaagaaatcttaccgatatgtcattagc

SEQ ID NO: 419978 - DNA, 58 bp, Artificial
  Synthetic oligonucleotide
ggagaagtgaaagctcggatgtttagaccactgctacccgccaaccacacaacgcacc

SEQ ID NO: 419979 - DNA, 60 bp, Artificial
  Synthetic oligonucleotide
ggagaagtgagaaatgatgatgttgaccagagtttgatcattgctgctagaaacctcgtt

SEQ ID NO: 419980 - DNA, 60 bp, Artificial
  Synthetic oligonucleotide
ggagaagtggaggtatggatccacgacagcttgttgcccaacctcaacagcgttgggcca

SEQ ID NO: 419981 - DNA, 55 bp, Artificial
  Synthetic oligonucleotide
ggagaagttcttgacatagttggccccaccaacgttcaaatcttgaatggggcag

SEQ ID NO: 419982 - DNA, 55 bp, Artificial
  Synthetic oligonucleotide
ggagaagtttgagatctacggggattcaaaactggctaagtggacgagtctccac

SEQ ID NO: 419983 - DNA, 55 bp, Artificial
  Synthetic oligonucleotide
ggagaataaatctgtatagcaagatagaatatctccgccacgagaattaccgccc

SEQ ID NO: 419984 - DNA, 55 bp, Artificial
  Synthetic oligonucleotide
ggagaataatcttagcagttccaaagactccatatctgtggagataatgaacgct

SEQ ID NO: 419985 - DNA, 55 bp, Artificial
  Synthetic oligonucleotide
ggagaatacgtcacagacacaatggaagttcattgatgtgagtacaactacgcca

SEQ ID NO: 419986 - DNA, 60 bp, Artificial
  Synthetic oligonucleotide
ggagaatagatgggtaggacccacatctactcgccaagttggtcccaaagctcaatatga

SEQ ID NO: 419987 - DNA, 55 bp, Artificial
  Synthetic oligonucleotide
ggagaatagtgcgggaaatgttacagtatcggaaataggcataaacggaacgtac

SEQ ID NO: 419988 - DNA, 55 bp, Artificial
  Synthetic oligonucleotide
ggagaatcacccaagggagtggaagaaggctccattggcaaagtgtgcagaacct

SEQ ID NO: 419989 - DNA, 58 bp, Artificial
  Synthetic oligonucleotide
ggagaatcacgtcctgtggcaggacccaagtcttagaacttgatcggacgcggttcga

SEQ ID NO: 419990 - DNA, 55 bp, Artificial
  Synthetic oligonucleotide
ggagaatcagctgtttctaacagtggctgataacacgcgtggtacacctttgacc

SEQ ID NO: 419991 - DNA, 55 bp, Artificial
  Synthetic oligonucleotide
ggagaatccgtggttcttgaagccctcaaaatgaagagactgaacattccgagcc

SEQ ID NO: 419992 - DNA, 55 bp, Artificial
  Synthetic oligonucleotide
ggagaatcctgccaaaacacgtgagtactgccttcatgcaaagttatcggatacc

SEQ ID NO: 419993 - DNA, 55 bp, Artificial
  Synthetic oligonucleotide
ggagaatctagggttgctctctaggatgctatctgtgtgccaagatgatataacc

SEQ ID NO: 419994 - DNA, 60 bp, Artificial
  Synthetic oligonucleotide
ggagaatgaactattactggacactagtagagcctggagacaaaataacattcgaagcaa

SEQ ID NO: 419995 - DNA, 59 bp, Artificial
  Synthetic oligonucleotide
ggagaatggagcaagctctgtttggaacgcaacaactgccatcggactctgccacatta

SEQ ID NO: 419996 - DNA, 57 bp, Artificial
  Synthetic oligonucleotide
ggagaatgtcgcggattctacgcttttccagtatatgagaggtccgactatggcgat

SEQ ID NO: 419997 - DNA, 55 bp, Artificial
  Synthetic oligonucleotide
ggagaatgtggaattctttgatgctttggttcttggaacgtcagagggatttcct

SEQ ID NO: 419998 - DNA, 60 bp, Artificial
  Synthetic oligonucleotide
ggagaatgtgttgcatcatcgttaagtagatagactgaacccgtgttagacttaatatcc

SEQ ID NO: 419999 - DNA, 55 bp, Artificial
  Synthetic oligonucleotide
ggagaattaatcagtacctgatattaaccccggatggttatgcgcccgcccccga

SEQ ID NO: 420000 - DNA, 55 bp, Artificial
  Synthetic oligonucleotide
ggagaattagttggtatacattctagcaaagtgtctcatcttgatagagagcatc

SEQ ID NO: 420001 - DNA, 58 bp, Artificial
  Synthetic oligonucleotide
ggagaattcaggacctagagaaatacgttgaagacactaaaatagatctctggtctta

SEQ ID NO: 420002 - DNA, 60 bp, Artificial
  Synthetic oligonucleotide
ggagaattcttctattgcaatacatcaaagctgtttactgaatcgcttaatagtacagac

SEQ ID NO: 420003 - DNA, 52 bp, Artificial
  Synthetic oligonucleotide
ggagaattgtatccatgcagggctgatatatttagagaaacatatgatgaag

SEQ ID NO: 420004 - DNA, 56 bp, Artificial
  Synthetic oligonucleotide
ggagaattgtgcggtcacgccatgtggtttaagtccacaacatttgagtctccaaa

SEQ ID NO: 420005 - DNA, 60 bp, Artificial
  Synthetic oligonucleotide
ggagaatttggcgtcaagcgaacaatggggaagaagcaactgctggcctcactcatctga

SEQ ID NO: 420006 - DNA, 53 bp, Artificial
  Synthetic oligonucleotide
ggagacaaattttttgtagcctcctgagaatagtctccttcaagacctagcac

SEQ ID NO: 420007 - DNA, 60 bp, Artificial
  Synthetic oligonucleotide
ggagacaacaactgtttgctacacccgatgagccagcatggaatagatgatgaacacgga

SEQ ID NO: 420008 - DNA, 56 bp, Artificial
  Synthetic oligonucleotide
ggagacaagcccatttactcgggaagtgcaccacacctgcgtacaattggatccgc

SEQ ID NO: 420009 - DNA, 60 bp, Artificial
  Synthetic oligonucleotide
ggagacaatcaagaatatcgcagatatggctactggagttgttagctctgttgactcaac

SEQ ID NO: 420010 - DNA, 55 bp, Artificial
  Synthetic oligonucleotide
ggagacaatgtgtatgtagctcagagggtttacaaggtagaggctgagtgtaagc

SEQ ID NO: 420011 - DNA, 55 bp, Artificial
  Synthetic oligonucleotide
ggagacacaagggattgacaagaatatacctgatctatatcgacatgcaggaaat

SEQ ID NO: 420012 - DNA, 55 bp, Artificial
  Synthetic oligonucleotide
ggagacacaccagaatggatacaaagacaaacacaattgcaacacagtttacagg

SEQ ID NO: 420013 - DNA, 55 bp, Artificial
  Synthetic oligonucleotide
ggagacacaccggaagcaggaaaccctagcactagtgagacaaactccacaacca

SEQ ID NO: 420014 - DNA, 51 bp, Artificial
  Synthetic oligonucleotide
ggagacacagcggaagataagttgaaggtctacagttactaccaatggatc

SEQ ID NO: 420015 - DNA, 56 bp, Artificial
  Synthetic oligonucleotide
ggagacacatagccagagagatgcatccggagttttataaagactgctgacagcct

SEQ ID NO: 420016 - DNA, 55 bp, Artificial
  Synthetic oligonucleotide
ggagacacccaaacggcataaggaagttatcgatcgacaaacttattgtttcaac

SEQ ID NO: 420017 - DNA, 56 bp, Artificial
  Synthetic oligonucleotide
ggagacaccgataggtaaatttgtccccgatatatcggtgttcaattggggatcaa

SEQ ID NO: 420018 - DNA, 57 bp, Artificial
  Synthetic oligonucleotide
ggagacacctcgcccgtgtcccttcaaccgtgatgttcatgaagccctccaaattcc

SEQ ID NO: 420019 - DNA, 60 bp, Artificial
  Synthetic oligonucleotide
ggagacacctcggtggatgtctctactgaattggagacaatatatagtgtctctaaatgg

SEQ ID NO: 420020 - DNA, 60 bp, Artificial
  Synthetic oligonucleotide
ggagacactccaacaatgcaatgtgacatgctccagctgaaacctggaagatattcagta

SEQ ID NO: 420021 - DNA, 55 bp, Artificial
  Synthetic oligonucleotide
ggagacactgcggaacaccgtggatttatatccggtgcactctacggtgctggag

SEQ ID NO: 420022 - DNA, 55 bp, Artificial
  Synthetic oligonucleotide
ggagacagatgtagcggatgacatgctaggctaagacctataagcaaagtcaggc

SEQ ID NO: 420023 - DNA, 60 bp, Artificial
  Synthetic oligonucleotide
ggagacagcccgatggactatacatagttcatatacctcggctgaggagacctatagaaa

SEQ ID NO: 420024 - DNA, 60 bp, Artificial
  Synthetic oligonucleotide
ggagacagccgatgcgcacaagctgcaaagacatgtgaataaggaagttgcaggtgttgc

SEQ ID NO: 420025 - DNA, 55 bp, Artificial
  Synthetic oligonucleotide
ggagacagcgacgaagcgctcctccaagcagtgaggatcatcaagatcttgtacc

SEQ ID NO: 420026 - DNA, 55 bp, Artificial
  Synthetic oligonucleotide
ggagacagctgaaggatgtgaaaatctactaaaacagttagaaccagctctcagg

SEQ ID NO: 420027 - DNA, 54 bp, Artificial
  Synthetic oligonucleotide
ggagacaggacacgatttgggttttagccttacagctaccggtaaatccgcaag

SEQ ID NO: 420028 - DNA, 60 bp, Artificial
  Synthetic oligonucleotide
ggagacagtccgacacactccagtcaattcctggttgggaaacatcatagtctacgctcc

SEQ ID NO: 420029 - DNA, 55 bp, Artificial
  Synthetic oligonucleotide
ggagacatatatcacagcttgtctcatgcccggccccgctggttcatgtggtgcc

SEQ ID NO: 420030 - DNA, 58 bp, Artificial
  Synthetic oligonucleotide
ggagacatcagaaaggcatattgtaatgttagtggagaacaatggcatggaaggttaa

SEQ ID NO: 420031 - DNA, 58 bp, Artificial
  Synthetic oligonucleotide
ggagacatctataaaagatggataatcctgggattaaataaaatagtaagaatgtaca

SEQ ID NO: 420032 - DNA, 56 bp, Artificial
  Synthetic oligonucleotide
ggagacattaaaaacgattggtggcgtggaaacccgcataaccgatatggactcat

SEQ ID NO: 420033 - DNA, 55 bp, Artificial
  Synthetic oligonucleotide
ggagaccaaagcatctatatgtttctatgcctactgctcaatcaactatgaaggc

SEQ ID NO: 420034 - DNA, 55 bp, Artificial
  Synthetic oligonucleotide
ggagaccaaatcatggaaccaggtgacaagttaagtggcctatttatcctgactg

SEQ ID NO: 420035 - DNA, 59 bp, Artificial
  Synthetic oligonucleotide
ggagaccaccaatcaaaaggctgaattaatggcaatattattagccttacaggattcca

SEQ ID NO: 420036 - DNA, 55 bp, Artificial
  Synthetic oligonucleotide
ggagaccaggaatgtcataaacacacatggtgttgcagagactagcttagagggt

SEQ ID NO: 420037 - DNA, 58 bp, Artificial
  Synthetic oligonucleotide
ggagaccatatggtacccctatggatttcgggcaggtgttcaacatgtatgacaacga

SEQ ID NO: 420038 - DNA, 55 bp, Artificial
  Synthetic oligonucleotide
ggagaccattttagaaatcaacaatgtacccacgaatgccaccagtttaatggag

SEQ ID NO: 420039 - DNA, 55 bp, Artificial
  Synthetic oligonucleotide
ggagacccaacccgacgtcgacgcttcgttgggaccacataagactcaatttgcc

SEQ ID NO: 420040 - DNA, 55 bp, Artificial
  Synthetic oligonucleotide
ggagacccacagacaccattccagatagcggaacagcaaatacaaaactttcagg

SEQ ID NO: 420041 - DNA, 52 bp, Artificial
  Synthetic oligonucleotide
ggagacccatacgtcaggggggacggcagcccgtaacacctggggggtcgcg

SEQ ID NO: 420042 - DNA, 60 bp, Artificial
  Synthetic oligonucleotide
ggagacccatctccttatgtgactcaaggaggtgaaatggcgcttaataaactctcgcaa

SEQ ID NO: 420043 - DNA, 55 bp, Artificial
  Synthetic oligonucleotide
ggagacccatggactgacagtgacgcccttgctcctagtggagtaatggtctcaa

SEQ ID NO: 420044 - DNA, 51 bp, Artificial
  Synthetic oligonucleotide
ggagaccccagcaccattccctgcccctacggccccggagatcctccccaa

SEQ ID NO: 420045 - DNA, 55 bp, Artificial
  Synthetic oligonucleotide
ggagaccccgacgtagacaaacacaagtgtaacctgtaacaacgccatgagagga

SEQ ID NO: 420046 - DNA, 51 bp, Artificial
  Synthetic oligonucleotide
ggagaccccggtttacgaactcggggagcttgaattttgtcaatccaaacc

SEQ ID NO: 420047 - DNA, 55 bp, Artificial
  Synthetic oligonucleotide
ggagacccctcttggctcatggtcacaaatggtcagtctcatcggagctgagttg

SEQ ID NO: 420048 - DNA, 58 bp, Artificial
  Synthetic oligonucleotide
ggagaccctcccgagcactatagcggaccatattgacgcctgggaaagaccggagaca

SEQ ID NO: 420049 - DNA, 55 bp, Artificial
  Synthetic oligonucleotide
ggagaccgaagcgaggaggaaagcaaagaaagcaacggggctagcaggtgggtgt

SEQ ID NO: 420050 - DNA, 55 bp, Artificial
  Synthetic oligonucleotide
ggagaccgcccgcacacgatgtcacggggctggagagaaactggtatgagtcctg

SEQ ID NO: 420051 - DNA, 54 bp, Artificial
  Synthetic oligonucleotide
ggagaccggttgggatttctagtatggtggaggccatggtttctagggcccgaa

SEQ ID NO: 420052 - DNA, 55 bp, Artificial
  Synthetic oligonucleotide
ggagaccgtcacctccaactaagtataaaggatggtgtttggactgctgtcagca

SEQ ID NO: 420053 - DNA, 55 bp, Artificial
  Synthetic oligonucleotide
ggagaccgttaatggtcaacttgcgttgcgtaaagatacacccgtctataaggca

SEQ ID NO: 420054 - DNA, 55 bp, Artificial
  Synthetic oligonucleotide
ggagaccgttggacatcagcgcagtacataacttcagatgcctaattccaatgtc

SEQ ID NO: 420055 - DNA, 60 bp, Artificial
  Synthetic oligonucleotide
ggagacctaaacacttatatgtgtctatgcctacagcacaatccacaatgaaagcagaag

SEQ ID NO: 420056 - DNA, 53 bp, Artificial
  Synthetic oligonucleotide
ggagacctcgtgggatggcctagcccccccgggactaagtcattagacccctg

SEQ ID NO: 420057 - DNA, 53 bp, Artificial
  Synthetic oligonucleotide
ggagaccttgtggtgtgcgctacagacgcgctatccactgggtacactgggaa

SEQ ID NO: 420058 - DNA, 55 bp, Artificial
  Synthetic oligonucleotide
ggagacgacaacaaaatgggtatttctccagactttccaaagtataatcatactg

SEQ ID NO: 420059 - DNA, 60 bp, Artificial
  Synthetic oligonucleotide
ggagacgagaacctacgaggcacaagtcagtgatccggatcctgagaaacaggcagtccg

SEQ ID NO: 420060 - DNA, 55 bp, Artificial
  Synthetic oligonucleotide
ggagacgatcctctcctcggaaatcattcgctgctggacacgcatccgctgtacc

SEQ ID NO: 420061 - DNA, 55 bp, Artificial
  Synthetic oligonucleotide
ggagacgatttcagggagcgagatgcgtggtaatcacaaaacaaaatataaaaga

SEQ ID NO: 420062 - DNA, 59 bp, Artificial
  Synthetic oligonucleotide
ggagacgcgagtaggcccgcgtgtcgaaaatgtagtcgttgcaggtccgcagcaggtac

SEQ ID NO: 420063 - DNA, 55 bp, Artificial
  Synthetic oligonucleotide
ggagacgctatacaatgcgtttctggagtgctatgcaccgtgcagctgacggtac

SEQ ID NO: 420064 - DNA, 56 bp, Artificial
  Synthetic oligonucleotide
ggagacggaaaactaacctgtatggattcattataaaaggaagatcccatttgaga

SEQ ID NO: 420065 - DNA, 60 bp, Artificial
  Synthetic oligonucleotide
ggagacggcaacaccacagtggcagccggctgatcttgggcgggagccgaaggtgagtga

SEQ ID NO: 420066 - DNA, 51 bp, Artificial
  Synthetic oligonucleotide
ggagacggtctcctgagatcgcaacgacgccccacgtacgggaacgccgcc

SEQ ID NO: 420067 - DNA, 60 bp, Artificial
  Synthetic oligonucleotide
ggagacggtgtcgcagtgctctcacttcctgctggaagcgacctgccttatgttagactt

SEQ ID NO: 420068 - DNA, 60 bp, Artificial
  Synthetic oligonucleotide
ggagacggtttcgctaaggcggctactgaggcactccgcatcgttggagctaacatggct

SEQ ID NO: 420069 - DNA, 55 bp, Artificial
  Synthetic oligonucleotide
ggagacgtaaatcatgtgtggcgttagtctttatgtagtggatgatcgacggcct

SEQ ID NO: 420070 - DNA, 60 bp, Artificial
  Synthetic oligonucleotide
ggagacgtatcaactgacaagtcatatctgccacatgtgaccgtcaagtcatccgccggc

SEQ ID NO: 420071 - DNA, 52 bp, Artificial
  Synthetic oligonucleotide
ggagacgtctattaggcctcacagagcagtcctcctgggaccatgggcgggg

SEQ ID NO: 420072 - DNA, 52 bp, Artificial
  Synthetic oligonucleotide
ggagacgtgaatgtgtcactcggacaatgcccacaaatggtatcgctgtatt

SEQ ID NO: 420073 - DNA, 57 bp, Artificial
  Synthetic oligonucleotide
ggagacgtgatatacaataccacaaacttcccgtagaggttaacatctcagggatcc

SEQ ID NO: 420074 - DNA, 60 bp, Artificial
  Synthetic oligonucleotide
ggagacgtgctcagcaaatctgtcgaaagaaatcgacaactggcagattacgctgacagg

SEQ ID NO: 420075 - DNA, 55 bp, Artificial
  Synthetic oligonucleotide
ggagacgtgctcccgtctcgggacggcagcttaccccttacttggcgtcggtata

SEQ ID NO: 420076 - DNA, 55 bp, Artificial
  Synthetic oligonucleotide
ggagacgtggaccagttataaccattatacatcgtcaaattagtttgccgtctct

SEQ ID NO: 420077 - DNA, 55 bp, Artificial
  Synthetic oligonucleotide
ggagactaatactatgactactcaggctaacgttcgtatgactgtaggaactctg

SEQ ID NO: 420078 - DNA, 55 bp, Artificial
  Synthetic oligonucleotide
ggagactatgatgttagagagtactttctgaatttgtatgaccaagtgctagctg

SEQ ID NO: 420079 - DNA, 55 bp, Artificial
  Synthetic oligonucleotide
ggagactattttggaagtgaataacaccacagaagcaacaggattaacaaggctc

SEQ ID NO: 420080 - DNA, 60 bp, Artificial
  Synthetic oligonucleotide
ggagactcccagatttcttgattcaattagatcaagtagacgaccgtcaatcttgtccaa

SEQ ID NO: 420081 - DNA, 56 bp, Artificial
  Synthetic oligonucleotide
ggagactcctggttgaaaaaatttactgaggcttgtaacgcagcaaaaggactgga

SEQ ID NO: 420082 - DNA, 60 bp, Artificial
  Synthetic oligonucleotide
ggagactctgtctaccgaagaacagtcagcaaagactccaaagacctcatccctgaagct

SEQ ID NO: 420083 - DNA, 59 bp, Artificial
  Synthetic oligonucleotide
ggagactctttcaaagtgaagccaaggcaatagaaagctgcttagtgggactccctcta

SEQ ID NO: 420084 - DNA, 55 bp, Artificial
  Synthetic oligonucleotide
ggagactgagtctgcatagcctgtgtacgtcggtcacttttatgcggcagttgca

SEQ ID NO: 420085 - DNA, 60 bp, Artificial
  Synthetic oligonucleotide
ggagactgctctcttcaaatcatccaacattctcgttgttgatgaaatttacaaactccc

SEQ ID NO: 420086 - DNA, 57 bp, Artificial
  Synthetic oligonucleotide
ggagactgggtatacccaagtgacgtcctccaggtatccgtggctgtcttccgtgat

SEQ ID NO: 420087 - DNA, 55 bp, Artificial
  Synthetic oligonucleotide
ggagactgggtcatgatggacggagaggaacaagtctcattccccttgaagccga

SEQ ID NO: 420088 - DNA, 51 bp, Artificial
  Synthetic oligonucleotide
ggagacttaaaacccttattcgacacccttaaaggagactctgaccccaat

SEQ ID NO: 420089 - DNA, 55 bp, Artificial
  Synthetic oligonucleotide
ggagacttacaagtctaccatgttggcaacttgttaaagggggacaaagtcaatg

SEQ ID NO: 420090 - DNA, 55 bp, Artificial
  Synthetic oligonucleotide
ggagacttggcgtataggaaatctaatcatgccgaggacagttctctatttcctc

SEQ ID NO: 420091 - DNA, 60 bp, Artificial
  Synthetic oligonucleotide
ggagactttgtggcaatcggaagagactacaagggagctatcttatgcttcagagaagga

SEQ ID NO: 420092 - DNA, 53 bp, Artificial
  Synthetic oligonucleotide
ggagagaaaatctcgcgaaaaacgcatacgtttaaacgatttggtgttgcacg

SEQ ID NO: 420093 - DNA, 54 bp, Artificial
  Synthetic oligonucleotide
ggagagaaatcatacggtatgccgagtgttaaaaggttgaggggttcgaatccc

SEQ ID NO: 420094 - DNA, 55 bp, Artificial
  Synthetic oligonucleotide
ggagagaacaacagagaggacaacagcttgctacaccctgctaaccagcatggag

SEQ ID NO: 420095 - DNA, 60 bp, Artificial
  Synthetic oligonucleotide
ggagagaacaacagcctgttacaccctatgagccaacatggagtagatgaccccgagaaa

SEQ ID NO: 420096 - DNA, 58 bp, Artificial
  Synthetic oligonucleotide
ggagagaaggctaatgtgctaattggacaaggagacgtggtgttagtaatgaaacgga

SEQ ID NO: 420097 - DNA, 60 bp, Artificial
  Synthetic oligonucleotide
ggagagaagtccgcggtaccgactgcgacctctcatcgagtgactgcaatgtcaaaagtt

SEQ ID NO: 420098 - DNA, 55 bp, Artificial
  Synthetic oligonucleotide
ggagagaataactgcctattacaccctatatgccaacatggagcggaggatcctg

SEQ ID NO: 420099 - DNA, 55 bp, Artificial
  Synthetic oligonucleotide
ggagagaatgcgggatactggcttcagcaggcattggcacgctgtgggaaggaac

SEQ ID NO: 420100 - DNA, 59 bp, Artificial
  Synthetic oligonucleotide
ggagagaatggaacgggctgagccagcggcagagggggtaggagcagtatcgcgggacc

SEQ ID NO: 420101 - DNA, 60 bp, Artificial
  Synthetic oligonucleotide
ggagagacaaagccagcgctatacgagagaaggatgagtttaatcctggccattgccttg

SEQ ID NO: 420102 - DNA, 55 bp, Artificial
  Synthetic oligonucleotide
ggagagacatacgaatgcacttctgtggtgcgggcaactgctacgcctataggct

SEQ ID NO: 420103 - DNA, 57 bp, Artificial
  Synthetic oligonucleotide
ggagagaccgaagcgaggaggaaagcaaagaaagcaacggggctagcgagtggatgt

SEQ ID NO: 420104 - DNA, 54 bp, Artificial
  Synthetic oligonucleotide
ggagagaccggaccctaccgacgtcttccagaataaggcaaacgtgtgttgggc

SEQ ID NO: 420105 - DNA, 55 bp, Artificial
  Synthetic oligonucleotide
ggagagacgcttggagagaaatggaaaagccgactgaacgcactggggaaaagtg

SEQ ID NO: 420106 - DNA, 51 bp, Artificial
  Synthetic oligonucleotide
ggagagacgtatcctgttgtaaatattgtaagatgtaatccacaccctata

SEQ ID NO: 420107 - DNA, 59 bp, Artificial
  Synthetic oligonucleotide
ggagagacgtccagcgctggtattctgcccccactcgtggtcccgcggctaattgccgc

SEQ ID NO: 420108 - DNA, 57 bp, Artificial
  Synthetic oligonucleotide
ggagagactaaggagaatgggcttaataacgcagattgaattggggacactcaaaac

SEQ ID NO: 420109 - DNA, 55 bp, Artificial
  Synthetic oligonucleotide
ggagagagagtgttgcccgaaagcccgagtgatccgagtttgcagccgagcgtag

SEQ ID NO: 420110 - DNA, 55 bp, Artificial
  Synthetic oligonucleotide
ggagagagctacatttccgagaagaccaaaggggagatttctcagcccggggcgg

SEQ ID NO: 420111 - DNA, 58 bp, Artificial
  Synthetic oligonucleotide
ggagagaggacattgatagagcacccttgagagaagttcgagtaggccgtgccattcc

SEQ ID NO: 420112 - DNA, 55 bp, Artificial
  Synthetic oligonucleotide
ggagagaggagtggcataccaaattaaaacaaatgctgattacggcgcagggtga

SEQ ID NO: 420113 - DNA, 55 bp, Artificial
  Synthetic oligonucleotide
ggagagaggctgcaggctgccttatctaggcagtcctgtgctagggcttttgccc

SEQ ID NO: 420114 - DNA, 55 bp, Artificial
  Synthetic oligonucleotide
ggagagagggaattgcgtaatagatggtattggaaactgaaacgagacactttac

SEQ ID NO: 420115 - DNA, 55 bp, Artificial
  Synthetic oligonucleotide
ggagagagtccgagattgtctccttttacgcctcttacgacaagactgtcgccag

SEQ ID NO: 420116 - DNA, 55 bp, Artificial
  Synthetic oligonucleotide
ggagagatagttagccccaggtgtgattatcccgcaagacacagccaggtaggat

SEQ ID NO: 420117 - DNA, 59 bp, Artificial
  Synthetic oligonucleotide
ggagagatcgagtggaaaggcagagtactcccagatgtattcaggggtaggaccgctta

SEQ ID NO: 420118 - DNA, 60 bp, Artificial
  Synthetic oligonucleotide
ggagagattacattggtgagtcaaatcaatgagttgccatcgcgcgtatcaaccgtggag

SEQ ID NO: 420119 - DNA, 60 bp, Artificial
  Synthetic oligonucleotide
ggagagcaacagtatcagcagacccactagcatccctattggagatgtgtcacagtacac

SEQ ID NO: 420120 - DNA, 55 bp, Artificial
  Synthetic oligonucleotide
ggagagcacgctcagatcaccatcgagaaagaaaagttggatatgctctcgggat

SEQ ID NO: 420121 - DNA, 55 bp, Artificial
  Synthetic oligonucleotide
ggagagcactccggccgaaggatcgaggtatccagaaggaggaatcctcacggag

SEQ ID NO: 420122 - DNA, 55 bp, Artificial
  Synthetic oligonucleotide
ggagagcagaatgcgcaagacgcagtatcctgacatcccgtatcattccgcgggg

SEQ ID NO: 420123 - DNA, 55 bp, Artificial
  Synthetic oligonucleotide
ggagagcagcctgcagattcatcatccatgtttggagagtcttttgagctgctag

SEQ ID NO: 420124 - DNA, 59 bp, Artificial
  Synthetic oligonucleotide
ggagagccaatgctcgacgtaggttgtggttgaaccggactacgatgtggtatatcctg

SEQ ID NO: 420125 - DNA, 55 bp, Artificial
  Synthetic oligonucleotide
ggagagccactctagggcagagagtgctaccccagtgtgaataccctgaaggaca

SEQ ID NO: 420126 - DNA, 60 bp, Artificial
  Synthetic oligonucleotide
ggagagccagatactggaaaatcatactttgtgtactcattaatagaatttatgcaaggc

SEQ ID NO: 420127 - DNA, 55 bp, Artificial
  Synthetic oligonucleotide
ggagagccatcaaggaaggagacctcagtgcatcaggaggatgcaattattgcgg

SEQ ID NO: 420128 - DNA, 60 bp, Artificial
  Synthetic oligonucleotide
ggagagcctatctattctgagggcgctcctagaactaatcgaccgctttatattgcgtct

SEQ ID NO: 420129 - DNA, 55 bp, Artificial
  Synthetic oligonucleotide
ggagagcgagtactaccccaggaggtatcaatcacacgtcttgctggctgcggga

SEQ ID NO: 420130 - DNA, 55 bp, Artificial
  Synthetic oligonucleotide
ggagagcgcgagagtgaggctgtcggctgtgggttgtcggctgttggccgttggc

SEQ ID NO: 420131 - DNA, 55 bp, Artificial
  Synthetic oligonucleotide
ggagagcgctgtaacctggatgacagggatagatcggagcttagcccactgctgc

SEQ ID NO: 420132 - DNA, 55 bp, Artificial
  Synthetic oligonucleotide
ggagagcgtcttcactggactaactcacatagatgcccactttctatcacagacc

SEQ ID NO: 420133 - DNA, 55 bp, Artificial
  Synthetic oligonucleotide
ggagagctccctcttccttacagcatggagagagttagccgacgagcgatagatg

SEQ ID NO: 420134 - DNA, 60 bp, Artificial
  Synthetic oligonucleotide
ggagagctcgcgggtcaaaagcatcaaacgtcacgtagcctatttgcatgtatagttggc

SEQ ID NO: 420135 - DNA, 57 bp, Artificial
  Synthetic oligonucleotide
ggagagctggcatatactactatgtagacgggagttgtaccccttcgggtatggttc

SEQ ID NO: 420136 - DNA, 60 bp, Artificial
  Synthetic oligonucleotide
ggagagcttaccgacatgcggtcggagagctccctgagacccttgagaccataatgctct

SEQ ID NO: 420137 - DNA, 55 bp, Artificial
  Synthetic oligonucleotide
ggagaggacaggctgacctaccaatggcatcaagaagggagcacgatagggaaag

SEQ ID NO: 420138 - DNA, 55 bp, Artificial
  Synthetic oligonucleotide
ggagaggacccagatgatcccttggtgtggaaaccatcccctgacctcctgcctt

SEQ ID NO: 420139 - DNA, 55 bp, Artificial
  Synthetic oligonucleotide
ggagaggacgctcatgtactagtcacaagggagccctatttgtcctgcgattccc

SEQ ID NO: 420140 - DNA, 56 bp, Artificial
  Synthetic oligonucleotide
ggagaggagcgagaggtttcggaactcgactccctatcaactcagacacgttcccc

SEQ ID NO: 420141 - DNA, 55 bp, Artificial
  Synthetic oligonucleotide
ggagaggagtggtacaccgctgctaaaacaaaacttcgtgagatgcaaaccttcg

SEQ ID NO: 420142 - DNA, 55 bp, Artificial
  Synthetic oligonucleotide
ggagaggataaaccaattgtcgaaacacgtagatgattctgtggttgacatctgg

SEQ ID NO: 420143 - DNA, 55 bp, Artificial
  Synthetic oligonucleotide
ggagaggatggtcttcaactaccgttctctcaatgacaatacacataaagatcag

SEQ ID NO: 420144 - DNA, 59 bp, Artificial
  Synthetic oligonucleotide
ggagaggcaaattactctactcgaacgagcaggtgaggcactttcgactgccgttcaaa

SEQ ID NO: 420145 - DNA, 55 bp, Artificial
  Synthetic oligonucleotide
ggagaggccctccacagagggttgttccaatccctcgatatacagggttcatggc

SEQ ID NO: 420146 - DNA, 55 bp, Artificial
  Synthetic oligonucleotide
ggagaggcgtcaacaaacaaacagcgatgaagcatctcttgagtttcaagaagga

SEQ ID NO: 420147 - DNA, 55 bp, Artificial
  Synthetic oligonucleotide
ggagaggctccctgtataggcgagcagccgactgaacatccagaattgcggacgc

SEQ ID NO: 420148 - DNA, 60 bp, Artificial
  Synthetic oligonucleotide
ggagaggggacaggacggtactcgtcatgtgcaaggatacgtcgagatgaagagacgaag

SEQ ID NO: 420149 - DNA, 55 bp, Artificial
  Synthetic oligonucleotide
ggagaggggctgcacgttgccatgctcggtgtggacgcgagatagtgctatcgca

SEQ ID NO: 420150 - DNA, 55 bp, Artificial
  Synthetic oligonucleotide
ggagaggggggcacgaaccccgtccccagagacgactgcccagaggcctaagaga

SEQ ID NO: 420151 - DNA, 55 bp, Artificial
  Synthetic oligonucleotide
ggagaggtgaaatcttgcacttggcccgagacacacactctttggggtgacggtg

SEQ ID NO: 420152 - DNA, 55 bp, Artificial
  Synthetic oligonucleotide
ggagaggtgcttcacatcctgtaaaatcagttcaacatcctggtacaaaagcaat

SEQ ID NO: 420153 - DNA, 58 bp, Artificial
  Synthetic oligonucleotide
ggagaggtgtatatcaggaggggccaaagaggtagcgggcaacccgacactagtgcag

SEQ ID NO: 420154 - DNA, 55 bp, Artificial
  Synthetic oligonucleotide
ggagaggttctggcatggaagtttgattcacaactagcctacagatatgaggctt

SEQ ID NO: 420155 - DNA, 60 bp, Artificial
  Synthetic oligonucleotide
ggagagtaccttgcctggtgttaggagaatgctactgcatagactgctttgccttatggt

SEQ ID NO: 420156 - DNA, 55 bp, Artificial
  Synthetic oligonucleotide
ggagagtatactctgctctaagtaatgatgccataatgacatgggacgaattgta

SEQ ID NO: 420157 - DNA, 55 bp, Artificial
  Synthetic oligonucleotide
ggagagtatatcaaagaatgcaatgtcaatttatagagcaatcgaggaaggtgcc

SEQ ID NO: 420158 - DNA, 55 bp, Artificial
  Synthetic oligonucleotide
ggagagtatgttctgcgaggcaaaggctggtcagactttagcttgtttccatcat

SEQ ID NO: 420159 - DNA, 57 bp, Artificial
  Synthetic oligonucleotide
ggagagtcagttaaacaggcagttcttctcaacgtgttaggtacaggtgaagagtta

SEQ ID NO: 420160 - DNA, 55 bp, Artificial
  Synthetic oligonucleotide
ggagagtcgtgcagatatcaaatgccaacactatattcggcgtttcattgaggtt

SEQ ID NO: 420161 - DNA, 58 bp, Artificial
  Synthetic oligonucleotide
ggagagtctcttcggaccaagtcaactatgttgaactcggccgtctatgagacttttc

SEQ ID NO: 420162 - DNA, 55 bp, Artificial
  Synthetic oligonucleotide
ggagagtctgcctcctatctttgacatcgtgtgtggtgagtacgcgaatcgcgtg

SEQ ID NO: 420163 - DNA, 55 bp, Artificial
  Synthetic oligonucleotide
ggagagtcttcgtcaagtgctgaggttgaagaacataggacgattcgggtccttg

SEQ ID NO: 420164 - DNA, 55 bp, Artificial
  Synthetic oligonucleotide
ggagagtggaggaatcagcaaaataagcactggcttcacttatgggtcttccatc

SEQ ID NO: 420165 - DNA, 55 bp, Artificial
  Synthetic oligonucleotide
ggagagttatccagttagtgttcgagttggtcacatgtgcagattctttgacagt

SEQ ID NO: 420166 - DNA, 54 bp, Artificial
  Synthetic oligonucleotide
ggagagttcagcgagaagattcctctcactcccacgcaaaagaagaatgccaag

SEQ ID NO: 420167 - DNA, 56 bp, Artificial
  Synthetic oligonucleotide
ggagagttccctggaaactaccttggcgacctatgggtccgccttgttgctgacaa

SEQ ID NO: 420168 - DNA, 60 bp, Artificial
  Synthetic oligonucleotide
ggagagttctgggcaaggtctgaagatgcctcgctaaacctattcttcgaagtggcagaa

SEQ ID NO: 420169 - DNA, 55 bp, Artificial
  Synthetic oligonucleotide
ggagagttgaagtccaccaatcagtctctcgaggcccgggtcgctgtggtccctg

SEQ ID NO: 420170 - DNA, 60 bp, Artificial
  Synthetic oligonucleotide
ggagagttggatgagacagtggaggtgcggaaatccatctgcgtgttcctctctggcgac

SEQ ID NO: 420171 - DNA, 54 bp, Artificial
  Synthetic oligonucleotide
ggagagtttataggaagtggatataaccgcaggcgacgggactaaccaatcccc

SEQ ID NO: 420172 - DNA, 54 bp, Artificial
  Synthetic oligonucleotide
ggagataaaccctcttccgactttgaagttggggagtgttctatggaacagttc

SEQ ID NO: 420173 - DNA, 59 bp, Artificial
  Synthetic oligonucleotide
ggagataacaccaaatggaatgaaaatcagaaccctaggatgttcctggcaatgataac

SEQ ID NO: 420174 - DNA, 54 bp, Artificial
  Synthetic oligonucleotide
ggagataacggattaatcctccgttgtggaggaacacctagttcacgaaaatgg

SEQ ID NO: 420175 - DNA, 59 bp, Artificial
  Synthetic oligonucleotide
ggagataagcatacgcgacatggtccaattgcgccgtaagtgtgagatgtttacatact

SEQ ID NO: 420176 - DNA, 60 bp, Artificial
  Synthetic oligonucleotide
ggagatacccatcacagttacgatagctccaatgtgcagtgagttcaacgggctacgcaa

SEQ ID NO: 420177 - DNA, 55 bp, Artificial
  Synthetic oligonucleotide
ggagatacgggagcattaagctgttcgcacaagcattgaatcaactctttggtct

SEQ ID NO: 420178 - DNA, 55 bp, Artificial
  Synthetic oligonucleotide
ggagatacgtggacaggagttgaaattctaataagaatgctgcaacaactactgt

SEQ ID NO: 420179 - DNA, 55 bp, Artificial
  Synthetic oligonucleotide
ggagatacttggacaggagttgaagctctaataagaacattacaacagctactgt

SEQ ID NO: 420180 - DNA, 57 bp, Artificial
  Synthetic oligonucleotide
ggagatagctcgtagtcatctgcctagccatcagcagacgcataatatgattgtgcc

SEQ ID NO: 420181 - DNA, 55 bp, Artificial
  Synthetic oligonucleotide
ggagatataacccagtacccgtgcggggatatgactagctccaataatccgagaa

SEQ ID NO: 420182 - DNA, 52 bp, Artificial
  Synthetic oligonucleotide
ggagatataacgaagatcgttatgttcgcaagactggaaacgtcactgagac

SEQ ID NO: 420183 - DNA, 60 bp, Artificial
  Synthetic oligonucleotide
ggagatataagacaagcacattgtaacatcagtagaacaaactggactagcgtgctaaga

SEQ ID NO: 420184 - DNA, 57 bp, Artificial
  Synthetic oligonucleotide
ggagatataagacaagcacattgtaacctcagtaaagcaaagtgggaaaccacttta

SEQ ID NO: 420185 - DNA, 57 bp, Artificial
  Synthetic oligonucleotide
ggagatataagacaagcacattgtaaccttagtgggacactatggaataaaacttta

SEQ ID NO: 420186 - DNA, 58 bp, Artificial
  Synthetic oligonucleotide
ggagatataagacgagcacactgtaaccttagtagacaagattggaataacactttaa

SEQ ID NO: 420187 - DNA, 50 bp, Artificial
  Synthetic oligonucleotide
ggagatatatactatatatttggttattatgacgatatgcacaaaattaa

SEQ ID NO: 420188 - DNA, 52 bp, Artificial
  Synthetic oligonucleotide
ggagatattaggaattgcaattaatagatataatggactaactctacgtgga

SEQ ID NO: 420189 - DNA, 60 bp, Artificial
  Synthetic oligonucleotide
ggagatcaaaattacgacttcatgtttcaggcaggcatcttgtatagtcaaatgacaact

SEQ ID NO: 420190 - DNA, 60 bp, Artificial
  Synthetic oligonucleotide
ggagatcaacggtcctgagtcagtgctcgtcaacacatatcagtggatcattagaaattg

SEQ ID NO: 420191 - DNA, 60 bp, Artificial
  Synthetic oligonucleotide
ggagatcaatggcatacggcgtcctaagcacctctatgtgtcaatgcccactgcacagtc

SEQ ID NO: 420192 - DNA, 55 bp, Artificial
  Synthetic oligonucleotide
ggagatcaccctattgtgatgcccactaatggttactttaggtttgaagcttggg

SEQ ID NO: 420193 - DNA, 53 bp, Artificial
  Synthetic oligonucleotide
ggagatcagtctgtcctacacgctcacctcatggcgttagaggaacaaaatca

SEQ ID NO: 420194 - DNA, 55 bp, Artificial
  Synthetic oligonucleotide
ggagatcattgagctcttaaaagggcttgatcttcgccttcagactgtagaaggg

SEQ ID NO: 420195 - DNA, 60 bp, Artificial
  Synthetic oligonucleotide
ggagatccagtgctttcctcaggttgtggttgaacctgatttgtatgtgatacactctgg

SEQ ID NO: 420196 - DNA, 52 bp, Artificial
  Synthetic oligonucleotide
ggagatcccacagactttgtagcgtggtgctatgcaagttgtaatgctaatg

SEQ ID NO: 420197 - DNA, 58 bp, Artificial
  Synthetic oligonucleotide
ggagatcctgtacagaaccccccgcgtaccttgtatagagctcatttcaagtctactc

SEQ ID NO: 420198 - DNA, 60 bp, Artificial
  Synthetic oligonucleotide
ggagatcgacgttacatgctattgggaatgtgattacgagcctgtgctgcttgttcgtaa

SEQ ID NO: 420199 - DNA, 56 bp, Artificial
  Synthetic oligonucleotide
ggagatcgactttcctgggataacttcctacaggatttcaaacaggcggtcctctc

SEQ ID NO: 420200 - DNA, 55 bp, Artificial
  Synthetic oligonucleotide
ggagatcgattacccatcccggctagatcaacagtatggcccactttcgttccgt

SEQ ID NO: 420201 - DNA, 59 bp, Artificial
  Synthetic oligonucleotide
ggagatcgctgaggtggactcggtcgttcccgtcaataacacctctacgcacatggagg

SEQ ID NO: 420202 - DNA, 60 bp, Artificial
  Synthetic oligonucleotide
ggagatcggttggacgtgcccctcttcttacgaaatgcttgaacgcagcgacgggcagca

SEQ ID NO: 420203 - DNA, 55 bp, Artificial
  Synthetic oligonucleotide
ggagatcgtgtggtatgatttgtcgttgaccaatttcggcctggtgcgttcgcag

SEQ ID NO: 420204 - DNA, 55 bp, Artificial
  Synthetic oligonucleotide
ggagatctcagagaagttcgggttggcagggctattcccagatatgccaccacag

SEQ ID NO: 420205 - DNA, 60 bp, Artificial
  Synthetic oligonucleotide
ggagatctctcgacgcaggactcggcttgctgaagtgcactcggcaagaggcgagagcgg

SEQ ID NO: 420206 - DNA, 50 bp, Artificial
  Synthetic oligonucleotide
ggagatctgaactttatgaatagagcaaaccaacgattgaaccccatgca

SEQ ID NO: 420207 - DNA, 55 bp, Artificial
  Synthetic oligonucleotide
ggagatctggcataacatgacatgggtagaatgggaaagagaaattagcaattac

SEQ ID NO: 420208 - DNA, 55 bp, Artificial
  Synthetic oligonucleotide
ggagatctggttacggtcttcacgcttatgaatatcgagacacgtgtggctggag

SEQ ID NO: 420209 - DNA, 60 bp, Artificial
  Synthetic oligonucleotide
ggagatctgtgggacaatggcgtcttcaagcattatattgatgcaggagacttgtttatc

SEQ ID NO: 420210 - DNA, 60 bp, Artificial
  Synthetic oligonucleotide
ggagatctgttccaccattgaagagctcagacggcaaaaacagtgaatttagcttgtcct

SEQ ID NO: 420211 - DNA, 55 bp, Artificial
  Synthetic oligonucleotide
ggagatcttctactctaacaaaacgtaaaggatggtgtttagattgttgtcagca

SEQ ID NO: 420212 - DNA, 55 bp, Artificial
  Synthetic oligonucleotide
ggagatgaacagccacgctgcctaccgaagaagggtagctcttgcagatgccgcc

SEQ ID NO: 420213 - DNA, 55 bp, Artificial
  Synthetic oligonucleotide
ggagatgaatgtagagttggtgggcaagaaacccacaagaggccaatacaagaaa

SEQ ID NO: 420214 - DNA, 60 bp, Artificial
  Synthetic oligonucleotide
ggagatgacgttattgcatcttacccacacaaaattgatgctggcctcctagcccaagca

SEQ ID NO: 420215 - DNA, 60 bp, Artificial
  Synthetic oligonucleotide
ggagatgactgggttgaagatgccaagcagatgattatcctgtgccttacaagggggaat

SEQ ID NO: 420216 - DNA, 60 bp, Artificial
  Synthetic oligonucleotide
ggagatgaggcgttgtcttctccaatccctccaacaaattgaaagcatgattgaggccga

SEQ ID NO: 420217 - DNA, 52 bp, Artificial
  Synthetic oligonucleotide
ggagatgatagccatatcgaatcagtttcttcgagagctatcagcgctgctg

SEQ ID NO: 420218 - DNA, 60 bp, Artificial
  Synthetic oligonucleotide
ggagatgatccctgaaaggaatgagcaaggtcgaactctttggagcaaagcaaatgacgc

SEQ ID NO: 420219 - DNA, 55 bp, Artificial
  Synthetic oligonucleotide
ggagatgcctacttttccatacccctatatgaggattttagacagtatactgcat

SEQ ID NO: 420220 - DNA, 55 bp, Artificial
  Synthetic oligonucleotide
ggagatgctgaaatggcagtttgatagatcactaggcagcacccatgttgctctg

SEQ ID NO: 420221 - DNA, 51 bp, Artificial
  Synthetic oligonucleotide
ggagatgctgatcctaaggttgatccgactactggagaagaatctcaagag

SEQ ID NO: 420222 - DNA, 55 bp, Artificial
  Synthetic oligonucleotide
ggagatgcttatttctcctgcccgctggatgaaagcttcaggaagtacacagcat

SEQ ID NO: 420223 - DNA, 55 bp, Artificial
  Synthetic oligonucleotide
ggagatggacctccggacagctctgtatagacttcttagcaagcaggcagctctc

SEQ ID NO: 420224 - DNA, 55 bp, Artificial
  Synthetic oligonucleotide
ggagatggatgggtgcagcatcgtttgttaatacatactcggtgcgtttgctgtg

SEQ ID NO: 420225 - DNA, 60 bp, Artificial
  Synthetic oligonucleotide
ggagatggcgtgatgcacaccacatgcccctgcggagcagagctagcaggccacatcaag

SEQ ID NO: 420226 - DNA, 60 bp, Artificial
  Synthetic oligonucleotide
ggagatgggaaatgttcatgagtacgatactgcagtgttgtacggacaatttggctctgg

SEQ ID NO: 420227 - DNA, 59 bp, Artificial
  Synthetic oligonucleotide
ggagatgggccttcacaacctattgagggtatgaactaccatatgtttgcagtaggagg

SEQ ID NO: 420228 - DNA, 60 bp, Artificial
  Synthetic oligonucleotide
ggagatgggtcaagcgcccagtccatacaatgtcaaggtcgaatgcatagggtggtcaag

SEQ ID NO: 420229 - DNA, 55 bp, Artificial
  Synthetic oligonucleotide
ggagatgggtggttctagggcttaacaaagtagtaaggatgtattgcccagttag

SEQ ID NO: 420230 - DNA, 59 bp, Artificial
  Synthetic oligonucleotide
ggagatgtcccccactcagaacgctcgctcaaagcttgtatatgtgtggtcccccttta

SEQ ID NO: 420231 - DNA, 60 bp, Artificial
  Synthetic oligonucleotide
ggagatgtcgttgttttggacatagcacgtgtggaaaacgatattaatgatgcctttgat

SEQ ID NO: 420232 - DNA, 60 bp, Artificial
  Synthetic oligonucleotide
ggagatgtgccacagcacacagataggcgggatcagaatggtagacatccttaaacagaa

SEQ ID NO: 420233 - DNA, 60 bp, Artificial
  Synthetic oligonucleotide
ggagatgtgccggcaagtgaaggaagcggtgggatcttgcagcttcacaggctttagtgg

SEQ ID NO: 420234 - DNA, 55 bp, Artificial
  Synthetic oligonucleotide
ggagatgtgccgtcgagtgatggaggcggtcgggacatgtggtttcacagggttc

SEQ ID NO: 420235 - DNA, 55 bp, Artificial
  Synthetic oligonucleotide
ggagatgtgctatcgagtgattcaggtccgttgttatcagtgttcgcgttacaag

SEQ ID NO: 420236 - DNA, 60 bp, Artificial
  Synthetic oligonucleotide
ggagatgtggttccccattctcgtgtagttcacgagctatcttgatgaacttcttgttag

SEQ ID NO: 420237 - DNA, 55 bp, Artificial
  Synthetic oligonucleotide
ggagatgttaggtttctgcgtctagtgtggtcagctcctacgcttgacgggttgg

SEQ ID NO: 420238 - DNA, 58 bp, Artificial
  Synthetic oligonucleotide
ggagattaacggtccggagtcggtgctagttaacacctatcaatggatcatcaggaat

SEQ ID NO: 420239 - DNA, 55 bp, Artificial
  Synthetic oligonucleotide
ggagattacctttccttgaaggagacaattgatcaagttactttccaatctgcta

SEQ ID NO: 420240 - DNA, 60 bp, Artificial
  Synthetic oligonucleotide
ggagattactcccgagattcgctctgtcacagacgctatggcccgcttggtcatgaatct

SEQ ID NO: 420241 - DNA, 55 bp, Artificial
  Synthetic oligonucleotide
ggagattattatgtaatggatattatacaaggcggtcagggaggtacggcgtccg

SEQ ID NO: 420242 - DNA, 55 bp, Artificial
  Synthetic oligonucleotide
ggagattcaaagggaaagcgaaggtctatttccaaaacgaccagattcaaggata

SEQ ID NO: 420243 - DNA, 58 bp, Artificial
  Synthetic oligonucleotide
ggagattcactcgtgtttggtggtataatgtggacaagttggaacaagtccggcctga

SEQ ID NO: 420244 - DNA, 55 bp, Artificial
  Synthetic oligonucleotide
ggagattcagccttgtggatagcagaaaactgtatggctaccctagttgtcttgc

SEQ ID NO: 420245 - DNA, 54 bp, Artificial
  Synthetic oligonucleotide
ggagattccaaacccaaagggtaagggtcctatgggcttgatcatgcctgagtt

SEQ ID NO: 420246 - DNA, 55 bp, Artificial
  Synthetic oligonucleotide
ggagattccagccatgatcgcaactgaggcagcatttatgtgtttcgcatacggt

SEQ ID NO: 420247 - DNA, 55 bp, Artificial
  Synthetic oligonucleotide
ggagattcgcgaatgcggagcttaccgtattcaagacgggacggatgttttgagt

SEQ ID NO: 420248 - DNA, 56 bp, Artificial
  Synthetic oligonucleotide
ggagattctagatgtcggacatatggttggtaagtttccaactacgctcgaagaac

SEQ ID NO: 420249 - DNA, 55 bp, Artificial
  Synthetic oligonucleotide
ggagattctcaatgggactcttatcaatcaagcttccatccctcaattgtaaatc

SEQ ID NO: 420250 - DNA, 55 bp, Artificial
  Synthetic oligonucleotide
ggagattctgaagaaagttggtatgaggcttggtacttggcttcccagaggggtc

SEQ ID NO: 420251 - DNA, 51 bp, Artificial
  Synthetic oligonucleotide
ggagattctttcgtaatgctgcgagtcggaaagagcgctaattcggagtat

SEQ ID NO: 420252 - DNA, 55 bp, Artificial
  Synthetic oligonucleotide
ggagattgacccagaacgttttgaagatctcatggggtatgggcttctagataca

SEQ ID NO: 420253 - DNA, 55 bp, Artificial
  Synthetic oligonucleotide
ggagattgagctgtgggaaagggtcagaagaaaatattttacatgagtggggaag

SEQ ID NO: 420254 - DNA, 55 bp, Artificial
  Synthetic oligonucleotide
ggagattgcagaggtggattcagtagtcccagttaacaatgtgaatgagaacgtc

SEQ ID NO: 420255 - DNA, 60 bp, Artificial
  Synthetic oligonucleotide
ggagattgcccagcgggagagttccccatgcatagtatgatgctcaggagatgggagagg

SEQ ID NO: 420256 - DNA, 58 bp, Artificial
  Synthetic oligonucleotide
ggagattggacggtcgttgtgtacgagttgatgggaaatcgtacttacaactgcagac

SEQ ID NO: 420257 - DNA, 50 bp, Artificial
  Synthetic oligonucleotide
ggagattggcgaatgtctttctctcatcgcttgcgcgcaattcttgggag

SEQ ID NO: 420258 - DNA, 55 bp, Artificial
  Synthetic oligonucleotide
ggagattgttattgggtaatgacggatggtcctgcgaacaatcaggctagttaca

SEQ ID NO: 420259 - DNA, 55 bp, Artificial
  Synthetic oligonucleotide
ggagatttaataataggaaaagtgcctcttctttagtaagggagcacttgggata

SEQ ID NO: 420260 - DNA, 57 bp, Artificial
  Synthetic oligonucleotide
ggagatttaatcgacaatacagatcaggctcagggaaattccctggaattgttccac

SEQ ID NO: 420261 - DNA, 55 bp, Artificial
  Synthetic oligonucleotide
ggagatttacgtcatgggagcagaagagagaattgttcagtcagtcgtagagtgc

SEQ ID NO: 420262 - DNA, 57 bp, Artificial
  Synthetic oligonucleotide
ggagatttataaatacgtatctaagttgtttttaatacacgatgaagagcaatggac

SEQ ID NO: 420263 - DNA, 55 bp, Artificial
  Synthetic oligonucleotide
ggagatttatggatgcactgggcttgcttgtgtatgcttactcagcctcccactc

SEQ ID NO: 420264 - DNA, 55 bp, Artificial
  Synthetic oligonucleotide
ggagatttattggcgttagaacctagatgcaagggtgacctcgctgtagcaagac

SEQ ID NO: 420265 - DNA, 60 bp, Artificial
  Synthetic oligonucleotide
ggagatttgacagtagcctagcacggagacatgtagcccgagaactgcacccagagtact

SEQ ID NO: 420266 - DNA, 60 bp, Artificial
  Synthetic oligonucleotide
ggagatttgagggaatgaaagtcgttttatacatggcaagatatggacatatggttagtg

SEQ ID NO: 420267 - DNA, 58 bp, Artificial
  Synthetic oligonucleotide
ggagcaaaccaacaattatatagttaacaatcttgctgacataaatcgtaatacgttc

SEQ ID NO: 420268 - DNA, 60 bp, Artificial
  Synthetic oligonucleotide
ggagcaaatagaggcgagcgtgtgaaggacgcgaaagagttagtgtggatggatttatct

SEQ ID NO: 420269 - DNA, 55 bp, Artificial
  Synthetic oligonucleotide
ggagcaacacttggcctacttaatgctacctagataaacacttaggcacagtaag

SEQ ID NO: 420270 - DNA, 51 bp, Artificial
  Synthetic oligonucleotide
ggagcaaccctatccctaatctacctgcaccaccaagtcagggcaatcccg

SEQ ID NO: 420271 - DNA, 60 bp, Artificial
  Synthetic oligonucleotide
ggagcaacggagcctacagatcaaggcggataccagtggcagaccgcagcaaatgcctca

SEQ ID NO: 420272 - DNA, 57 bp, Artificial
  Synthetic oligonucleotide
ggagcaagaataggtgcgatcaagtggatttctccttaactaaaggtattaatgtta

SEQ ID NO: 420273 - DNA, 60 bp, Artificial
  Synthetic oligonucleotide
ggagcaagacaaaggatgctggatcggacagagtaatggtgtctcccctagctgtaactt

SEQ ID NO: 420274 - DNA, 55 bp, Artificial
  Synthetic oligonucleotide
ggagcaagctatggcattcgtagctcttattcttatgattttcgatagcgaaaag

SEQ ID NO: 420275 - DNA, 55 bp, Artificial
  Synthetic oligonucleotide
ggagcaataaatacaacgttgccctttcacaatatccacccactgaccattggtg

SEQ ID NO: 420276 - DNA, 60 bp, Artificial
  Synthetic oligonucleotide
ggagcaataacaccagatatgtatgaacttgggtcaccgaccatcacaggcgcatttttg

SEQ ID NO: 420277 - DNA, 60 bp, Artificial
  Synthetic oligonucleotide
ggagcaatacctagcaatgccgaacttcccagcacgagtggtgccagacaaggactcgta

SEQ ID NO: 420278 - DNA, 55 bp, Artificial
  Synthetic oligonucleotide
ggagcaatcaccagtgaggaaaagcaaatccctgatggagaatggcgcgacgggt

SEQ ID NO: 420279 - DNA, 60 bp, Artificial
  Synthetic oligonucleotide
ggagcaatccggcccagtaaaagtcgacacagaaccacagctataatagccaactctgga

SEQ ID NO: 420280 - DNA, 55 bp, Artificial
  Synthetic oligonucleotide
ggagcaatgaaatgttcagatgaggtggtgatcacagccctgacaagagctagga

SEQ ID NO: 420281 - DNA, 55 bp, Artificial
  Synthetic oligonucleotide
ggagcaatgatacagagccagagaaattcagacctggaggaggagatatgaggga

SEQ ID NO: 420282 - DNA, 55 bp, Artificial
  Synthetic oligonucleotide
ggagcaatggagtcctggaaagtgagatgataatccccaagatatatggaggacc

SEQ ID NO: 420283 - DNA, 55 bp, Artificial
  Synthetic oligonucleotide
ggagcacaaatagacactcctttctcagcctattattgggcttggagcgctggtg

SEQ ID NO: 420284 - DNA, 55 bp, Artificial
  Synthetic oligonucleotide
ggagcacaagtgattatactcatgagaatctgagtgtgttgcatagtgctagagc

SEQ ID NO: 420285 - DNA, 58 bp, Artificial
  Synthetic oligonucleotide
ggagcacaagtgtctactacgaggacagggtcacatgagaatggcaacatagcgacag

SEQ ID NO: 420286 - DNA, 58 bp, Artificial
  Synthetic oligonucleotide
ggagcacagataaccggacatgtcaaaaatggttccatgaggatcgttgggcctaaaa

SEQ ID NO: 420287 - DNA, 58 bp, Artificial
  Synthetic oligonucleotide
ggagcacagggacctgcgggtggtgttaagtgcacacacggggcaagatgggggcacg

SEQ ID NO: 420288 - DNA, 54 bp, Artificial
  Synthetic oligonucleotide
ggagcacatacgcactacaaagcgaaagttaaatcttgcatcccgtaagccttt

SEQ ID NO: 420289 - DNA, 54 bp, Artificial
  Synthetic oligonucleotide
ggagcacatcgcccacgagactcagaaaaggatatccctagatgccaatcggag

SEQ ID NO: 420290 - DNA, 60 bp, Artificial
  Synthetic oligonucleotide
ggagcacatgagtgccccattctaatgtgaacttggaagatgatattgactgtggcctac

SEQ ID NO: 420291 - DNA, 55 bp, Artificial
  Synthetic oligonucleotide
ggagcaccaaacaatgggaagtatgttatggcagcacagttatatgttctcctgc

SEQ ID NO: 420292 - DNA, 59 bp, Artificial
  Synthetic oligonucleotide
ggagcaccaccttgccgcatcagaggagaccacaacgccactagtgatctattgtgccc

SEQ ID NO: 420293 - DNA, 60 bp, Artificial
  Synthetic oligonucleotide
ggagcaccaccttgccgcattaggaaggatttcaacagcactctcgatctattgtgccct

SEQ ID NO: 420294 - DNA, 60 bp, Artificial
  Synthetic oligonucleotide
ggagcaccagcactaaattcaccaaacatagaggcatgtggatatagtgacagagttgaa

SEQ ID NO: 420295 - DNA, 53 bp, Artificial
  Synthetic oligonucleotide
ggagcacccgcgtaacagggggaacgacagcctacaacgtcaggggccttacg

SEQ ID NO: 420296 - DNA, 60 bp, Artificial
  Synthetic oligonucleotide
ggagcaccgagtattacctcgagttggctggcaggtgcgaagcagaatttgagcaggacg

SEQ ID NO: 420297 - DNA, 55 bp, Artificial
  Synthetic oligonucleotide
ggagcactagaggacattgatagtgtggaaaccttattatgccaactatggcctt

SEQ ID NO: 420298 - DNA, 55 bp, Artificial
  Synthetic oligonucleotide
ggagcactatgtgaacagatagggtttggattgagactgtacgatgtgaacggtg

SEQ ID NO: 420299 - DNA, 55 bp, Artificial
  Synthetic oligonucleotide
ggagcactattatcgagtgctccctcccagatttggtcctcctaggttgaggtca

SEQ ID NO: 420300 - DNA, 59 bp, Artificial
  Synthetic oligonucleotide
ggagcactcacaagcagtaatacatcgcataccaatgctgattgtgcctggctggaagc

SEQ ID NO: 420301 - DNA, 55 bp, Artificial
  Synthetic oligonucleotide
ggagcacttacaagcagcaacacagcacagactaatgctgattgtgcctggttgc

SEQ ID NO: 420302 - DNA, 55 bp, Artificial
  Synthetic oligonucleotide
ggagcagaaacagaaagataaactgaagattcgaaaactcgccttaaagccccgc

SEQ ID NO: 420303 - DNA, 55 bp, Artificial
  Synthetic oligonucleotide
ggagcagacttctatgtcatcaatggatcagacgagggaagattcctcgatacgg

SEQ ID NO: 420304 - DNA, 55 bp, Artificial
  Synthetic oligonucleotide
ggagcagagcgtacacagcagatactaaagaactcaggtagtgaggtgcaggcag

SEQ ID NO: 420305 - DNA, 55 bp, Artificial
  Synthetic oligonucleotide
ggagcagatgacacaattatacaagtaggagaaatagaattggaaggagtacccc

SEQ ID NO: 420306 - DNA, 60 bp, Artificial
  Synthetic oligonucleotide
ggagcagatggccgagcgtccatggcacgtgagaaatgatctaattgcagcgctgaggga

SEQ ID NO: 420307 - DNA, 55 bp, Artificial
  Synthetic oligonucleotide
ggagcagatgtacaccccaggaggtgaagtgagaaacgatgatattgaccaaagt

SEQ ID NO: 420308 - DNA, 60 bp, Artificial
  Synthetic oligonucleotide
ggagcagatgtacactccaggaggagaagtgagaaacgatgatgtagaccagagcttgat

SEQ ID NO: 420309 - DNA, 55 bp, Artificial
  Synthetic oligonucleotide
ggagcagatgttaatggaagacgtgtccttggtgtgccatcagtgtgctgcacag

SEQ ID NO: 420310 - DNA, 55 bp, Artificial
  Synthetic oligonucleotide
ggagcagcaacccaccaaaccagttgcaatctcagttaatgagctggtgaggaaa

SEQ ID NO: 420311 - DNA, 60 bp, Artificial
  Synthetic oligonucleotide
ggagcagcagggagcactatgggcgcagcgtcaataacgctgacggtacaggcccggaaa

SEQ ID NO: 420312 - DNA, 60 bp, Artificial
  Synthetic oligonucleotide
ggagcagcatctctttttgtggcgtgaatagtgatactgtagattggtcttggccagacg

SEQ ID NO: 420313 - DNA, 60 bp, Artificial
  Synthetic oligonucleotide
ggagcagcattggcagggttttccagaagaccaggaaaggcatagagaggctgacagcac

SEQ ID NO: 420314 - DNA, 56 bp, Artificial
  Synthetic oligonucleotide
ggagcagcgggaacgttgcaggctgtgccagagactgcaacgagcccttgacctcc

SEQ ID NO: 420315 - DNA, 58 bp, Artificial
  Synthetic oligonucleotide
ggagcagctctgaaccactatatgttcccacacttgatgattacaggtctgcagaggt

SEQ ID NO: 420316 - DNA, 60 bp, Artificial
  Synthetic oligonucleotide
ggagcaggacataatatctttaccagagtacatcagacgcattaagctgagtataccaga

SEQ ID NO: 420317 - DNA, 55 bp, Artificial
  Synthetic oligonucleotide
ggagcaggatcaatagacaatttacaccttagagcatggcctcaggaccaaaact

SEQ ID NO: 420318 - DNA, 55 bp, Artificial
  Synthetic oligonucleotide
ggagcaggattcacagaaacaatctccaataaggctaaggaagtgcaagacatgt

SEQ ID NO: 420319 - DNA, 59 bp, Artificial
  Synthetic oligonucleotide
ggagcaggcggttgcaaaccagcaactggcttgtcgtaacgcgaaagtctgtggcggaa

SEQ ID NO: 420320 - DNA, 53 bp, Artificial
  Synthetic oligonucleotide
ggagcagggaaacgtacgtgctcgggacaccgaggatggacgaggccgtgtcg

SEQ ID NO: 420321 - DNA, 55 bp, Artificial
  Synthetic oligonucleotide
ggagcagggccagaattcaatcttaatcttccttattctgtagtattcaaagggc

SEQ ID NO: 420322 - DNA, 55 bp, Artificial
  Synthetic oligonucleotide
ggagcaggggtcagatttccactgacttttgggtggtgcgtcacgctagtaccag

SEQ ID NO: 420323 - DNA, 52 bp, Artificial
  Synthetic oligonucleotide
ggagcaggggtggctccatttttggggggggttcttctacgaagtctagtac

SEQ ID NO: 420324 - DNA, 60 bp, Artificial
  Synthetic oligonucleotide
ggagcaggtggttgcaatccagcaactagcctgtcgtaacgcgcaagtctgtggcggaac

SEQ ID NO: 420325 - DNA, 60 bp, Artificial
  Synthetic oligonucleotide
ggagcagtagaggttaagatgggcccagcagtcttgagtaaatcagatcctaggcttgaa

SEQ ID NO: 420326 - DNA, 55 bp, Artificial
  Synthetic oligonucleotide
ggagcagtctgacccacagacatggggttgttgaagaattctgctgctctcgtag

SEQ ID NO: 420327 - DNA, 55 bp, Artificial
  Synthetic oligonucleotide
ggagcagtgaccctatactggtcgctcgcagaaacggaggcgcgtcttgaaaccc

SEQ ID NO: 420328 - DNA, 53 bp, Artificial
  Synthetic oligonucleotide
ggagcatactatgatcctaagttacctctgcaggcagcagtacagaagcaggg

SEQ ID NO: 420329 - DNA, 60 bp, Artificial
  Synthetic oligonucleotide
ggagcatatctcatggatctggatcctattagacttgggccttggaccagtttcctctgc

SEQ ID NO: 420330 - DNA, 57 bp, Artificial
  Synthetic oligonucleotide
ggagcatatgggaaaagtaggcttaataaggaggcttacaataaggatctattccag

SEQ ID NO: 420331 - DNA, 60 bp, Artificial
  Synthetic oligonucleotide
ggagcatcgtcaaatgctagtgatgagagtatgatcgagacgcgatgtgttcttaattca

SEQ ID NO: 420332 - DNA, 55 bp, Artificial
  Synthetic oligonucleotide
ggagcatgagatggctgacccacaatagtaattcctacccttttcagaacgctca

SEQ ID NO: 420333 - DNA, 55 bp, Artificial
  Synthetic oligonucleotide
ggagcatgagatggttgactcaaaaggacaacgcttaccctattcaagacgccca

SEQ ID NO: 420334 - DNA, 60 bp, Artificial
  Synthetic oligonucleotide
ggagcatggatgatacgcacagtattattcagtttctacaacgccccgtactcattgacc

SEQ ID NO: 420335 - DNA, 60 bp, Artificial
  Synthetic oligonucleotide
ggagcatgttcgattattaggttccgttcttggagatgatcaggtagcaggggcgttctg

SEQ ID NO: 420336 - DNA, 55 bp, Artificial
  Synthetic oligonucleotide
ggagcattagcccttgtaaaaggcttgaatgttcgaaataagaaaatcaatgcgg

SEQ ID NO: 420337 - DNA, 55 bp, Artificial
  Synthetic oligonucleotide
ggagcattgatagtagcaataatcttagcaatagttgtgtggatctgggcatata

SEQ ID NO: 420338 - DNA, 55 bp, Artificial
  Synthetic oligonucleotide
ggagcattgggcctctagagaggtgagcggcgctggggttgaagggactagtctc

SEQ ID NO: 420339 - DNA, 55 bp, Artificial
  Synthetic oligonucleotide
ggagcatttaccaacctaccacatgtgctaatgaatttggctgagaccacccagg

SEQ ID NO: 420340 - DNA, 55 bp, Artificial
  Synthetic oligonucleotide
ggagccaaccagctgacagccagagggagccctggctgcatgccactggagttat

SEQ ID NO: 420341 - DNA, 57 bp, Artificial
  Synthetic oligonucleotide
ggagccaaccgtacatattgaagaactacccaaatttcaatggaaatgatattagac

SEQ ID NO: 420342 - DNA, 55 bp, Artificial
  Synthetic oligonucleotide
ggagccaagaccgcgtatcgagtcaacctaaaactggatcaggcggacgtcgttg

SEQ ID NO: 420343 - DNA, 55 bp, Artificial
  Synthetic oligonucleotide
ggagccaagagaatgcccagtggagtggctcactgacttactacctctccattcg

SEQ ID NO: 420344 - DNA, 55 bp, Artificial
  Synthetic oligonucleotide
ggagccaagctatgggctggaagtagctggttcagactccctctcacatatgtcg

SEQ ID NO: 420345 - DNA, 60 bp, Artificial
  Synthetic oligonucleotide
ggagccacacaatgagtggacactagagcttttagaggagcttaagggtgaagctgttag

SEQ ID NO: 420346 - DNA, 54 bp, Artificial
  Synthetic oligonucleotide
ggagccacagaaatccaaatgtcgtcaggaaacttactcttcactggacatctc

SEQ ID NO: 420347 - DNA, 55 bp, Artificial
  Synthetic oligonucleotide
ggagccaccccgcaaatgggctttccgctgaatacaacgatgcgcgctaacccgt

SEQ ID NO: 420348 - DNA, 56 bp, Artificial
  Synthetic oligonucleotide
ggagccacccctcaggatttaaacaccatgctaaatacaatagggggacatcaggc

SEQ ID NO: 420349 - DNA, 55 bp, Artificial
  Synthetic oligonucleotide
ggagccacggacaaaatcagtggcccctctcatgcccccagtatgtctacggtgc

SEQ ID NO: 420350 - DNA, 55 bp, Artificial
  Synthetic oligonucleotide
ggagccacggtcatagatcccataacaggattttacaacactcctgtgcttgtag

SEQ ID NO: 420351 - DNA, 51 bp, Artificial
  Synthetic oligonucleotide
ggagccacgtaactagtgatggactctggttctgggacaatggtgaaagga

SEQ ID NO: 420352 - DNA, 57 bp, Artificial
  Synthetic oligonucleotide
ggagccactttacgtgcctccgcgataccttggtcctacggaaggaagaagcagcat

SEQ ID NO: 420353 - DNA, 55 bp, Artificial
  Synthetic oligonucleotide
ggagccagctagtgaacccaccattggagacatgatagagttttatgaaggccat

SEQ ID NO: 420354 - DNA, 59 bp, Artificial
  Synthetic oligonucleotide
ggagccataataggaaatataagacaagcacattgtaacattagttgggaagactggaa

SEQ ID NO: 420355 - DNA, 55 bp, Artificial
  Synthetic oligonucleotide
ggagccatcagctatgaaggtagaactaagaggagtaaacggtacctccaaagtc

SEQ ID NO: 420356 - DNA, 60 bp, Artificial
  Synthetic oligonucleotide
ggagccatcttcaagtcaaatttgccaatcgagaactgtgatgccacatgccagactatt

SEQ ID NO: 420357 - DNA, 55 bp, Artificial
  Synthetic oligonucleotide
ggagccatgggatccgtggagtacccgggccatccctttctccacactccttccc

SEQ ID NO: 420358 - DNA, 60 bp, Artificial
  Synthetic oligonucleotide
ggagccatttgactggtcaatcggtactcaacaaacttggctatgcaatcggtgattggt

SEQ ID NO: 420359 - DNA, 59 bp, Artificial
  Synthetic oligonucleotide
ggagcccaccaaacagtgactcacccaacagtaacgacccctgcagcactaaactgcag

SEQ ID NO: 420360 - DNA, 55 bp, Artificial
  Synthetic oligonucleotide
ggagcccaccacagtagaattatgcttgacattttcagacaagacatattgcact

SEQ ID NO: 420361 - DNA, 60 bp, Artificial
  Synthetic oligonucleotide
ggagcccatcgtgctccactgcttcgagaacatcccgagtgacttcagcgacatggagga

SEQ ID NO: 420362 - DNA, 55 bp, Artificial
  Synthetic oligonucleotide
ggagcccatgttagagtcacgaataatctacaatcctccatcttccagcagagtg

SEQ ID NO: 420363 - DNA, 53 bp, Artificial
  Synthetic oligonucleotide
ggagcccccaatgaggcgtgaaccgcagtatgcgacgtggctgcgtcagtacc

SEQ ID NO: 420364 - DNA, 56 bp, Artificial
  Synthetic oligonucleotide
ggagccccctgtgggccagaagcttgtatttacccaagcggctaaagctgctaacc

SEQ ID NO: 420365 - DNA, 54 bp, Artificial
  Synthetic oligonucleotide
ggagccccgatcctgttggcaggtttggtcaaggtcgcctccacgttcttccgg

SEQ ID NO: 420366 - DNA, 59 bp, Artificial
  Synthetic oligonucleotide
ggagcccgacagcataatccaatgttgtttgggtcgtaatgagcaattccgggatggga

SEQ ID NO: 420367 - DNA, 54 bp, Artificial
  Synthetic oligonucleotide
ggagcccgtcaacggagtccttttcaacggaattattaagggccctgatggcca

SEQ ID NO: 420368 - DNA, 57 bp, Artificial
  Synthetic oligonucleotide
ggagcccttttcgcacactaatgagctgccctataggggttgctccttcccctagta

SEQ ID NO: 420369 - DNA, 55 bp, Artificial
  Synthetic oligonucleotide
ggagccgacagatgaactacagcaagccattccgagccaagtaccccggcaagtg

SEQ ID NO: 420370 - DNA, 54 bp, Artificial
  Synthetic oligonucleotide
ggagccgacccgtggttccgacgaacagaatagagactactgttcgaaggaacg

SEQ ID NO: 420371 - DNA, 55 bp, Artificial
  Synthetic oligonucleotide
ggagccgactaacgatccgggtaatacgttctacgcctctcgttatcaacttcgc

SEQ ID NO: 420372 - DNA, 55 bp, Artificial
  Synthetic oligonucleotide
ggagccgatctgagtccaaccgcattttgtcactttagatataagtgacccggtc

SEQ ID NO: 420373 - DNA, 57 bp, Artificial
  Synthetic oligonucleotide
ggagccgatctgggaactaccttactcgacggtctgtctgttgtcaagtcggtgttc

SEQ ID NO: 420374 - DNA, 57 bp, Artificial
  Synthetic oligonucleotide
ggagccgatggacgagtaaccgcctggtatggggacactggccggatcctgggaagc

SEQ ID NO: 420375 - DNA, 55 bp, Artificial
  Synthetic oligonucleotide
ggagccgccatattcattgacagtgcggtggctggaccctactgggcagatgtca

SEQ ID NO: 420376 - DNA, 55 bp, Artificial
  Synthetic oligonucleotide
ggagccggctcagtggcttaggcttcctgagaccgtccgttacatcgaggcgtta

SEQ ID NO: 420377 - DNA, 55 bp, Artificial
  Synthetic oligonucleotide
ggagccggtttggagctattaaacggggagcttcaggttgatgctggccagagct

SEQ ID NO: 420378 - DNA, 53 bp, Artificial
  Synthetic oligonucleotide
ggagccgtataaaattatgttatccgaccgacacccaatcgcctcaactatat

SEQ ID NO: 420379 - DNA, 55 bp, Artificial
  Synthetic oligonucleotide
ggagccgtgaagtccttggaagggctaggggtccaacgtagagatgcatatctta

SEQ ID NO: 420380 - DNA, 55 bp, Artificial
  Synthetic oligonucleotide
ggagccgtgccatctggtacatgtggttggggagccggtatctggaatttgaggc

SEQ ID NO: 420381 - DNA, 60 bp, Artificial
  Synthetic oligonucleotide
ggagccgtttcaatcggctatctatgacggtagcaagtacatccctatggatcagattga

SEQ ID NO: 420382 - DNA, 60 bp, Artificial
  Synthetic oligonucleotide
ggagcctacattgaaaaggtcggaaacatgcagattcttgattcattgccccacattgat

SEQ ID NO: 420383 - DNA, 52 bp, Artificial
  Synthetic oligonucleotide
ggagcctacggggtgaaaggattctcgtttaagtacggcaaaggtgtttgga

SEQ ID NO: 420384 - DNA, 55 bp, Artificial
  Synthetic oligonucleotide
ggagcctagttatcatacccatatgtgaactcaaatgtgatactactgctgcaac

SEQ ID NO: 420385 - DNA, 55 bp, Artificial
  Synthetic oligonucleotide
ggagcctatcaggcgcttaacctcaccaatcccgacaagacccaagaatgttggc

SEQ ID NO: 420386 - DNA, 55 bp, Artificial
  Synthetic oligonucleotide
ggagcctcccgcaatattggagtcgggaactaaagaatagtgctattagcttgct

SEQ ID NO: 420387 - DNA, 55 bp, Artificial
  Synthetic oligonucleotide
ggagcctcgaaatcattattgagattcgatgacgagccacgccaaatctttgtcg

SEQ ID NO: 420388 - DNA, 60 bp, Artificial
  Synthetic oligonucleotide
ggagcctcgcgattggtataaatgtgagtgtgatgtgtcggcattgtatcggagaattaa

SEQ ID NO: 420389 - DNA, 60 bp, Artificial
  Synthetic oligonucleotide
ggagcctctgcgagcgtctaactgcgcttatgggcacatccctatctcgattgatatccc

SEQ ID NO: 420390 - DNA, 54 bp, Artificial
  Synthetic oligonucleotide
ggagcctgagggtttaggcgaagttgagggtttgaccgttcgagcggaaggcaa

SEQ ID NO: 420391 - DNA, 60 bp, Artificial
  Synthetic oligonucleotide
ggagcctgcaagagagcaaatgtgaatgatttctttaacagactaaattggctggtaaag

SEQ ID NO: 420392 - DNA, 55 bp, Artificial
  Synthetic oligonucleotide
ggagcctggcagtagagcaaggaagatggccgagagcgatgctgcgagggcctta

SEQ ID NO: 420393 - DNA, 55 bp, Artificial
  Synthetic oligonucleotide
ggagcctggggttcaggtgttggattcaatttagcttgccaagttagtctgacag

SEQ ID NO: 420394 - DNA, 55 bp, Artificial
  Synthetic oligonucleotide
ggagcctgtaaactcaaactgtgcggagttcccggacttagacttatggacggaa

SEQ ID NO: 420395 - DNA, 60 bp, Artificial
  Synthetic oligonucleotide
ggagcctgtaggaggagcaagtggagtgactctcttgctttcgaggatcacgcagccccc

SEQ ID NO: 420396 - DNA, 60 bp, Artificial
  Synthetic oligonucleotide
ggagccttcactgacaaagctaggcagttttataatctgcgttatcatggactgggattt

SEQ ID NO: 420397 - DNA, 55 bp, Artificial
  Synthetic oligonucleotide
ggagccttcattttaaggatcataaaaggctttgttgacacaaacaagagatggc

SEQ ID NO: 420398 - DNA, 55 bp, Artificial
  Synthetic oligonucleotide
ggagccttctacagtattggagccaagaactaaagaagagtgctgttagcttgct

SEQ ID NO: 420399 - DNA, 55 bp, Artificial
  Synthetic oligonucleotide
ggagccttggggtacaatccagtgctaacaaggtcgtaacgagcaattccgggac

SEQ ID NO: 420400 - DNA, 55 bp, Artificial
  Synthetic oligonucleotide
ggagcctttcttagtaatgatggctgttacatctccaactgttttagttgctatg

SEQ ID NO: 420401 - DNA, 54 bp, Artificial
  Synthetic oligonucleotide
ggagcgaagaacaaacggaatcttatatgcgtagtatttgccctattacgatgg

SEQ ID NO: 420402 - DNA, 55 bp, Artificial
  Synthetic oligonucleotide
ggagcgaagtgattgtgtttatagaatcttacagaaattgagatcactggttggc

SEQ ID NO: 420403 - DNA, 55 bp, Artificial
  Synthetic oligonucleotide
ggagcgacattgcattgtagaggtcgattgcatctaggattgtccagttaggttg

SEQ ID NO: 420404 - DNA, 57 bp, Artificial
  Synthetic oligonucleotide
ggagcgaccacgtggtacttcaacccagtgattcttagaccgaataatgttgaagta

SEQ ID NO: 420405 - DNA, 55 bp, Artificial
  Synthetic oligonucleotide
ggagcgaccccacttgttcccataacggtcagcattgcgccattatgcgccgagt

SEQ ID NO: 420406 - DNA, 59 bp, Artificial
  Synthetic oligonucleotide
ggagcgacggaacttatgacatgctgttcaaagaccaaaaaataccgtgcatggtcaat

SEQ ID NO: 420407 - DNA, 53 bp, Artificial
  Synthetic oligonucleotide
ggagcgacgtgaaaagttttttgctctcgtgtgtttaatcgggttaagtctcc

SEQ ID NO: 420408 - DNA, 59 bp, Artificial
  Synthetic oligonucleotide
ggagcgagaggtttcggaactcgactccttgtcagctcagacacgttcccccatcacta

SEQ ID NO: 420409 - DNA, 60 bp, Artificial
  Synthetic oligonucleotide
ggagcgagtgctcacaatccagtgagtggcttgtcgtaacgcgcaagtctgtggcggaac

SEQ ID NO: 420410 - DNA, 60 bp, Artificial
  Synthetic oligonucleotide
ggagcgatatgttgactacatgccaactctgaaccgcttcagagcagtggagacatggtc

SEQ ID NO: 420411 - DNA, 57 bp, Artificial
  Synthetic oligonucleotide
ggagcgatgactaccccaagcaggggtctccttacggaggcagttttagcactacaa

SEQ ID NO: 420412 - DNA, 54 bp, Artificial
  Synthetic oligonucleotide
ggagcgatgagtggacggacctgtccgagacaacccaggtcaggcgctccggtc

SEQ ID NO: 420413 - DNA, 55 bp, Artificial
  Synthetic oligonucleotide
ggagcgcaacgactcaagttcagaaatgcacgcgatgcaaaggttggtagagtcg

SEQ ID NO: 420414 - DNA, 59 bp, Artificial
  Synthetic oligonucleotide
ggagcgcagatcactggacatgtcaaaaacggttctatgaggatcgttgggcccaaaac

SEQ ID NO: 420415 - DNA, 58 bp, Artificial
  Synthetic oligonucleotide
ggagcgcagcgaaacgacaaaccgaagcttgacgaaggagactgaaaaactcatacac

SEQ ID NO: 420416 - DNA, 55 bp, Artificial
  Synthetic oligonucleotide
ggagcgcatggaatcaattccagacacctgtagccataggatttgacatgtcacg

SEQ ID NO: 420417 - DNA, 56 bp, Artificial
  Synthetic oligonucleotide
ggagcgccagttaagggtggttcccataagggcccagctgccctttccactggaga

SEQ ID NO: 420418 - DNA, 55 bp, Artificial
  Synthetic oligonucleotide
ggagcgcccgccctggcaccgacttaatcacacttgcaacgtcccacttgtctgg

SEQ ID NO: 420419 - DNA, 55 bp, Artificial
  Synthetic oligonucleotide
ggagcgcgaggtggtgaatatgtatgaacaaattccatcagaactccggtcccta

SEQ ID NO: 420420 - DNA, 50 bp, Artificial
  Synthetic oligonucleotide
ggagcgctcggttgtgctgccaactggatcctgcgcgggacgtcgtttgt

SEQ ID NO: 420421 - DNA, 58 bp, Artificial
  Synthetic oligonucleotide
ggagcgctgtagaaatgttgtgttgtcaagccgttgtcaaatcttcaaacgggttaca

SEQ ID NO: 420422 - DNA, 59 bp, Artificial
  Synthetic oligonucleotide
ggagcgcttcgttcagcactcccccagtgtagatcaggtcgatgagtcaccgcattccc

SEQ ID NO: 420423 - DNA, 60 bp, Artificial
  Synthetic oligonucleotide
ggagcggcagtatcagcctggggtcaaaagaaggcaaatgaggcaaaccagcgtatagcg

SEQ ID NO: 420424 - DNA, 55 bp, Artificial
  Synthetic oligonucleotide
ggagcggcgcacagctggcatggtcaacgaacctgttacaactggcacgcgaacc

SEQ ID NO: 420425 - DNA, 60 bp, Artificial
  Synthetic oligonucleotide
ggagcgggatcaataacaaacttatttcacgatgcatggccaggagaccaaaactggcca

SEQ ID NO: 420426 - DNA, 60 bp, Artificial
  Synthetic oligonucleotide
ggagcgggcccatgggaaaatcattgagcagattagatggattaagttgaatgcgactgc

SEQ ID NO: 420427 - DNA, 55 bp, Artificial
  Synthetic oligonucleotide
ggagcgggccctttctgctgttgcaccctatcaagattttatttcagttaagttc

SEQ ID NO: 420428 - DNA, 57 bp, Artificial
  Synthetic oligonucleotide
ggagcgggcctcccgctccgagtggtccgcggcgtatcgagtttggagtcatccgga

SEQ ID NO: 420429 - DNA, 54 bp, Artificial
  Synthetic oligonucleotide
ggagcggttgcgtccgagttttttttgtttggcaccgcttgcgtttggcaccgc

SEQ ID NO: 420430 - DNA, 59 bp, Artificial
  Synthetic oligonucleotide
ggagcgtacatgtccaaggcacatggtgtcgaccctaacatcagaactggggtaaggac

SEQ ID NO: 420431 - DNA, 55 bp, Artificial
  Synthetic oligonucleotide
ggagcgtagtgcgagccttcggttttaggcccgatacctccgttctgaccgtggc

SEQ ID NO: 420432 - DNA, 55 bp, Artificial
  Synthetic oligonucleotide
ggagcgtatagcagatcaaaatgggataagactgccgcaatgagtgctcgtttgc

SEQ ID NO: 420433 - DNA, 55 bp, Artificial
  Synthetic oligonucleotide
ggagcgtatgttaaagatccagtacctggtatacatcgccgtgtcggatcgttag

SEQ ID NO: 420434 - DNA, 56 bp, Artificial
  Synthetic oligonucleotide
ggagcgtcccggtcggacgttgcttgactctgcccgcattttcaaccttgcgtagg

SEQ ID NO: 420435 - DNA, 55 bp, Artificial
  Synthetic oligonucleotide
ggagcgtgagcgattccaatttctcaacggtcctgataccgttattgaaagaatc

SEQ ID NO: 420436 - DNA, 56 bp, Artificial
  Synthetic oligonucleotide
ggagcgtggaaaactgtttcgcacaagtggaagccggatttggacagtccgaggga

SEQ ID NO: 420437 - DNA, 60 bp, Artificial
  Synthetic oligonucleotide
ggagcgtggactggcacttatgtgtatgaccatctcaccccccttactgattgggcctgt

SEQ ID NO: 420438 - DNA, 55 bp, Artificial
  Synthetic oligonucleotide
ggagcgtgggccgtaagactaaggggtgaattgttaactgactctgaacttgtta

SEQ ID NO: 420439 - DNA, 55 bp, Artificial
  Synthetic oligonucleotide
ggagcgttccccatcaacgcgtacactacgggcccctgcactccttccccggcgc

SEQ ID NO: 420440 - DNA, 60 bp, Artificial
  Synthetic oligonucleotide
ggagcgttgcgagccacgcagactgtatgcacctgattcagatggtaagcatacgggaag

SEQ ID NO: 420441 - DNA, 57 bp, Artificial
  Synthetic oligonucleotide
ggagctaacaccatgtacgcaattgatgcacccccagaactttaaaacactcgaaac

SEQ ID NO: 420442 - DNA, 55 bp, Artificial
  Synthetic oligonucleotide
ggagctaataaaaaaggacaaggtctacctgtcatgggtaccagcgcacaagggg

SEQ ID NO: 420443 - DNA, 55 bp, Artificial
  Synthetic oligonucleotide
ggagctaattagagggaggcccaaagaaagcagtgtgctgtggacttcaaatagc

SEQ ID NO: 420444 - DNA, 55 bp, Artificial
  Synthetic oligonucleotide
ggagctaccagccgatcctaattggacagtggatcaggctgcaatagcatgtgcc

SEQ ID NO: 420445 - DNA, 55 bp, Artificial
  Synthetic oligonucleotide
ggagctactgttctcttcgcagcttttgttcaaagtatgctccagtagtgtggaa

SEQ ID NO: 420446 - DNA, 55 bp, Artificial
  Synthetic oligonucleotide
ggagctagacgagtacatccaccaacactccaattgacggtatgaagcgggagcg

SEQ ID NO: 420447 - DNA, 55 bp, Artificial
  Synthetic oligonucleotide
ggagctagactgctacttgaattgttggcgcgcgttaagactgatccaggtgctg

SEQ ID NO: 420448 - DNA, 55 bp, Artificial
  Synthetic oligonucleotide
ggagctaggcgctgacattcgtgcggtcaaggtgtcagttcattggacatctcag

SEQ ID NO: 420449 - DNA, 55 bp, Artificial
  Synthetic oligonucleotide
ggagctagggtacattattatcaggacctaagccctataggccccacggaagaca

SEQ ID NO: 420450 - DNA, 60 bp, Artificial
  Synthetic oligonucleotide
ggagctataaatacaacattgccattccataacatccacccactgaccattggtgagtgc

SEQ ID NO: 420451 - DNA, 52 bp, Artificial
  Synthetic oligonucleotide
ggagctattccgtcgggttgggtggccgtagcttaacggtcggcgtcccagt

SEQ ID NO: 420452 - DNA, 55 bp, Artificial
  Synthetic oligonucleotide
ggagctattcgataacaatgtgagactcgagaacgatccattagaatcgagtatt

SEQ ID NO: 420453 - DNA, 55 bp, Artificial
  Synthetic oligonucleotide
ggagctattcgcacttgagtcaagaattcttggatgagattctgtcgtcggtctc

SEQ ID NO: 420454 - DNA, 57 bp, Artificial
  Synthetic oligonucleotide
ggagctcaaattactggccatgtcaaaaatgggactatgagattgcacggtccacgg

SEQ ID NO: 420455 - DNA, 52 bp, Artificial
  Synthetic oligonucleotide
ggagctcaagaactagatgatgaatgtaccatgctcacactttttggacctt

SEQ ID NO: 420456 - DNA, 60 bp, Artificial
  Synthetic oligonucleotide
ggagctcagatgcattatttagggctatgacgtacctgtgcaactcaagaatggagccca

SEQ ID NO: 420457 - DNA, 58 bp, Artificial
  Synthetic oligonucleotide
ggagctcatagagcttcgataacccgacaaacggtcttcgggtccgactgtagatgta

SEQ ID NO: 420458 - DNA, 53 bp, Artificial
  Synthetic oligonucleotide
ggagctccaaatctgttacgacttaagttcatgaaggaaataggattaatgtt

SEQ ID NO: 420459 - DNA, 60 bp, Artificial
  Synthetic oligonucleotide
ggagctcctagatctcagggacaacggagtgacctgtctactgctgtgagtaccttgttg

SEQ ID NO: 420460 - DNA, 57 bp, Artificial
  Synthetic oligonucleotide
ggagctcctccgcttccccactaaggaggcactggcagaggtcccctacaaggccga

SEQ ID NO: 420461 - DNA, 55 bp, Artificial
  Synthetic oligonucleotide
ggagctcgacacagcaaataatagagtgcaggtggcagatcgttttggcatgcgc

SEQ ID NO: 420462 - DNA, 57 bp, Artificial
  Synthetic oligonucleotide
ggagctcgactgaagaggcgtttccgattgttgtttgtagtggacggcgtttgagtg

SEQ ID NO: 420463 - DNA, 51 bp, Artificial
  Synthetic oligonucleotide
ggagctcggctcttaagacgcgagtctgccgacgctcccggccgaataaaa

SEQ ID NO: 420464 - DNA, 55 bp, Artificial
  Synthetic oligonucleotide
ggagctctcaatcagaatccaactccttctcccagccccattctgaaccagtcgg

SEQ ID NO: 420465 - DNA, 55 bp, Artificial
  Synthetic oligonucleotide
ggagctctcagttatgaaggctgatatgagacacttgtcattgatgcaaaggcgc

SEQ ID NO: 420466 - DNA, 56 bp, Artificial
  Synthetic oligonucleotide
ggagctctccgtacccgcagaaattctgcggaagtctcggagattcaccccggccc

SEQ ID NO: 420467 - DNA, 59 bp, Artificial
  Synthetic oligonucleotide
ggagctctctaccaaggaaagaaacaagattacttcagcaactacacaagtgaggataa

SEQ ID NO: 420468 - DNA, 55 bp, Artificial
  Synthetic oligonucleotide
ggagctctctatagccctttggctgtcggtagctacgctgccagcgtcctggggt

SEQ ID NO: 420469 - DNA, 55 bp, Artificial
  Synthetic oligonucleotide
ggagctcttcaacaaactctagacaggtgcgcccttatgaatccaccgtctgccc

SEQ ID NO: 420470 - DNA, 55 bp, Artificial
  Synthetic oligonucleotide
ggagctcttccctccctccgcgttctttcttcgattcggaccggctcatctcgac

SEQ ID NO: 420471 - DNA, 56 bp, Artificial
  Synthetic oligonucleotide
ggagctcttctcatgaagttatgaaacagatactagatagatttgtcccttacatg

SEQ ID NO: 420472 - DNA, 53 bp, Artificial
  Synthetic oligonucleotide
ggagctgaaacaggaccttttgatatcttcttggattaagtgcataacagcct

SEQ ID NO: 420473 - DNA, 55 bp, Artificial
  Synthetic oligonucleotide
ggagctgaagccatatgtgggcctcatttccattttagctaacttaattcggtag

SEQ ID NO: 420474 - DNA, 60 bp, Artificial
  Synthetic oligonucleotide
ggagctgacacgttcatcgtcggcactcactctgcaggaggcaacggagttggatactgc

SEQ ID NO: 420475 - DNA, 60 bp, Artificial
  Synthetic oligonucleotide
ggagctgactcaccacctgagaaacaaatcgtcacacccatcgttgacgcggccgtgtta

SEQ ID NO: 420476 - DNA, 60 bp, Artificial
  Synthetic oligonucleotide
ggagctgcatgttggtgggctagcatagatcacaccacaggggtaccatacaaccctcaa

SEQ ID NO: 420477 - DNA, 59 bp, Artificial
  Synthetic oligonucleotide
ggagctgcgacattgggaccattcctgttacggacccactgtggaacagacaacaggac

SEQ ID NO: 420478 - DNA, 60 bp, Artificial
  Synthetic oligonucleotide
ggagctgctgacacgtgtgcccgcaaaagtcgattatgacctttttgtcaacaattgctg

SEQ ID NO: 420479 - DNA, 55 bp, Artificial
  Synthetic oligonucleotide
ggagctggacgcagtagtgttatattgttcgcaaatagtgatgttgagagcggcg

SEQ ID NO: 420480 - DNA, 59 bp, Artificial
  Synthetic oligonucleotide
ggagctggacttagctccctgaatgttcggatggaaatgtattgacctggttggggaca

SEQ ID NO: 420481 - DNA, 55 bp, Artificial
  Synthetic oligonucleotide
ggagctggagtgaacgtcgattacattgccagaccaactgaaggatttatatctc

SEQ ID NO: 420482 - DNA, 55 bp, Artificial
  Synthetic oligonucleotide
ggagctggagtgtaagaacctaactagtaagcagagagaggacctgttcaacgca

SEQ ID NO: 420483 - DNA, 55 bp, Artificial
  Synthetic oligonucleotide
ggagctgtatgccactaccgcaagtggcacataacttggggttttacttttcccc

SEQ ID NO: 420484 - DNA, 55 bp, Artificial
  Synthetic oligonucleotide
ggagctgtggtcaagataggcagagacgctcagcattattgcacaatgaacgggt

SEQ ID NO: 420485 - DNA, 55 bp, Artificial
  Synthetic oligonucleotide
ggagcttaaattcaggaaggcacgagatgatcgaactaagtttgaagtaactggg

SEQ ID NO: 420486 - DNA, 60 bp, Artificial
  Synthetic oligonucleotide
ggagcttaagcaggaagctgttaggcatttccctaggccatggctccacagcttagggca

SEQ ID NO: 420487 - DNA, 55 bp, Artificial
  Synthetic oligonucleotide
ggagcttacttgctcctgggactgaacgtctcatgattcaactaagaaactgcgc

SEQ ID NO: 420488 - DNA, 55 bp, Artificial
  Synthetic oligonucleotide
ggagcttagtcattatacccatttgccggcttaatagcatgggtggtgaaccaac

SEQ ID NO: 420489 - DNA, 56 bp, Artificial
  Synthetic oligonucleotide
ggagcttcaagcctaatattgggccaaggccgctcgtaaggggacaacaggggaga

SEQ ID NO: 420490 - DNA, 52 bp, Artificial
  Synthetic oligonucleotide
ggagcttccctcgctaccgctcgggacaaatataaccccccttctaacaacc

SEQ ID NO: 420491 - DNA, 55 bp, Artificial
  Synthetic oligonucleotide
ggagcttcgtgcatcattaatatatcaattatctccgtcatgtcttcctgcctga

SEQ ID NO: 420492 - DNA, 55 bp, Artificial
  Synthetic oligonucleotide
ggagcttctcttcctgaaacgatataagttatcggatattatggaagatttgagg

SEQ ID NO: 420493 - DNA, 55 bp, Artificial
  Synthetic oligonucleotide
ggagcttgacagttccctagcacgagtgcaccaagcccgagtgctgcatccggag

SEQ ID NO: 420494 - DNA, 54 bp, Artificial
  Synthetic oligonucleotide
ggagcttgctataaaatgggtggaaagtggtcaaaacgtagtacagctggatgg

SEQ ID NO: 420495 - DNA, 60 bp, Artificial
  Synthetic oligonucleotide
ggagctttctccctcaatatattgagggccgcagctttggaccctgaattgattgcctcg

SEQ ID NO: 420496 - DNA, 55 bp, Artificial
  Synthetic oligonucleotide
ggagctttgcagagaagctgcataccagagatccctaaagaatttggacttctgc

SEQ ID NO: 420497 - DNA, 55 bp, Artificial
  Synthetic oligonucleotide
ggagctttgctaaatgacaagcactccaatgggacagtcaaagacagaagccctc

SEQ ID NO: 420498 - DNA, 55 bp, Artificial
  Synthetic oligonucleotide
ggagcttttcacatatgttagatttgactctgagtataccattctagcaactgcc

SEQ ID NO: 420499 - DNA, 51 bp, Artificial
  Synthetic oligonucleotide
ggaggaaaaagacgatgagctactgtgtaaaatagatgatgagcgatacaa

SEQ ID NO: 420500 - DNA, 55 bp, Artificial
  Synthetic oligonucleotide
ggaggaaaattgctatgtaagcatggagttatcggcatagtcactgcaggtggag

SEQ ID NO: 420501 - DNA, 55 bp, Artificial
  Synthetic oligonucleotide
ggaggaaaattgttatgcaaacatggtgttattggaatggtaacagcaggtgggg

SEQ ID NO: 420502 - DNA, 58 bp, Artificial
  Synthetic oligonucleotide
ggaggaaagagtctgcatggaagatagcttgcccaaccaaatcttctacgggcgtaag

SEQ ID NO: 420503 - DNA, 53 bp, Artificial
  Synthetic oligonucleotide
ggaggaaagcaaagaaagcaacggggctagcaagtgggtgttccgccccccga

SEQ ID NO: 420504 - DNA, 53 bp, Artificial
  Synthetic oligonucleotide
ggaggaaagcaaagaaagcaacggggctagccgtcaggtgttcctccccccga

SEQ ID NO: 420505 - DNA, 53 bp, Artificial
  Synthetic oligonucleotide
ggaggaaagtaaagagagcagcggggctagtcggtgggtgttccgccccccga

SEQ ID NO: 420506 - DNA, 57 bp, Artificial
  Synthetic oligonucleotide
ggaggaaatgacaacgagaccacaaagttgtcagcgtcgggaccgtctctcaggccc

SEQ ID NO: 420507 - DNA, 56 bp, Artificial
  Synthetic oligonucleotide
ggaggaaatgctgaaaccggagtgccagtaacaggcgggtcgtgtggtcacaaaaa

SEQ ID NO: 420508 - DNA, 53 bp, Artificial
  Synthetic oligonucleotide
ggaggaacaaatacctggaagaacatccccatgcggggaaggacccgaagaaa

SEQ ID NO: 420509 - DNA, 54 bp, Artificial
  Synthetic oligonucleotide
ggaggaacaagtattggttataacattatgacgaaagacaatttcccggtaatg

SEQ ID NO: 420510 - DNA, 55 bp, Artificial
  Synthetic oligonucleotide
ggaggaacattcgttgagttctcacgaagcaacgcagctactgtggctagcgaaa

SEQ ID NO: 420511 - DNA, 55 bp, Artificial
  Synthetic oligonucleotide
ggaggaacccatggttccggcactttgaagaagatccgttcgagattagaacgga

SEQ ID NO: 420512 - DNA, 55 bp, Artificial
  Synthetic oligonucleotide
ggaggaacgcgagggcaagtattccattgaagaatacctccgcgaccgagaccgc

SEQ ID NO: 420513 - DNA, 55 bp, Artificial
  Synthetic oligonucleotide
ggaggaacttcttcagctagtagtactaacacgtttaagagtatatctggcccgg

SEQ ID NO: 420514 - DNA, 55 bp, Artificial
  Synthetic oligonucleotide
ggaggaagaagtgggatttccagtgaagccacagagaccgctttgtagccctacc

SEQ ID NO: 420515 - DNA, 59 bp, Artificial
  Synthetic oligonucleotide
ggaggaagaggacggttgtcctatcagagtctaccgtgtcttctgctttggccgagctc

SEQ ID NO: 420516 - DNA, 59 bp, Artificial
  Synthetic oligonucleotide
ggaggaagaggacggttgtcctgacagaatccaccgtgtcctctgctttggcggagctc

SEQ ID NO: 420517 - DNA, 55 bp, Artificial
  Synthetic oligonucleotide
ggaggaagatccagagtgctttctccgaaactgaagacgtcacgccactggttgg

SEQ ID NO: 420518 - DNA, 60 bp, Artificial
  Synthetic oligonucleotide
ggaggaagatcttgtggaatcccagtgctcttctctccctgtagttgaccctcagttgga

SEQ ID NO: 420519 - DNA, 55 bp, Artificial
  Synthetic oligonucleotide
ggaggaagtacttacgggcaatctccaaacattgaagataagagtgcacgaaggg

SEQ ID NO: 420520 - DNA, 60 bp, Artificial
  Synthetic oligonucleotide
ggaggaagtctatgaagactgtcgaggaaattcacgatggcaccgactatttgctctgca

SEQ ID NO: 420521 - DNA, 55 bp, Artificial
  Synthetic oligonucleotide
ggaggaagtgggttcagtagttctgtatttggtggaaatgcgttgattgtaacaa

SEQ ID NO: 420522 - DNA, 55 bp, Artificial
  Synthetic oligonucleotide
ggaggaatcacacttttggaatcagcaccatcttgctcttattgtaaatactccc

SEQ ID NO: 420523 - DNA, 57 bp, Artificial
  Synthetic oligonucleotide
ggaggaatcctcacggagaaaagtagacaaatcacctccagaggaccccttcagcga

SEQ ID NO: 420524 - DNA, 55 bp, Artificial
  Synthetic oligonucleotide
ggaggaatcctgatgatgctggttagcgtggctgggagagtagatgggcttgagc

SEQ ID NO: 420525 - DNA, 55 bp, Artificial
  Synthetic oligonucleotide
ggaggaatggagtagcttaatgtctatggcgtcgccccagtctatattcccgtcc

SEQ ID NO: 420526 - DNA, 54 bp, Artificial
  Synthetic oligonucleotide
ggaggaatgtgatagcccaccggttctttaactacatgctagatggaatcaaac

SEQ ID NO: 420527 - DNA, 55 bp, Artificial
  Synthetic oligonucleotide
ggaggaattagaacagctagaccagatagtctttgacaaagctcgtattgagctg

SEQ ID NO: 420528 - DNA, 52 bp, Artificial
  Synthetic oligonucleotide
ggaggaattggtaatttacctgttaggaattggacttttgattttggtctat

SEQ ID NO: 420529 - DNA, 55 bp, Artificial
  Synthetic oligonucleotide
ggaggacaacaaggcagcaatacagaatgggagttgcactcttcacaggacaaat

SEQ ID NO: 420530 - DNA, 60 bp, Artificial
  Synthetic oligonucleotide
ggaggacacaccggatgaaccacaagcggcttatgcgggcatgcctcaacttggtaagaa

SEQ ID NO: 420531 - DNA, 54 bp, Artificial
  Synthetic oligonucleotide
ggaggacaccaggatagcattgtcatccacaatatatcctcgcatgagggttga

SEQ ID NO: 420532 - DNA, 56 bp, Artificial
  Synthetic oligonucleotide
ggaggacacggcacagaaagatttaaaaccaacatcggagaccccagcacaatacc

SEQ ID NO: 420533 - DNA, 55 bp, Artificial
  Synthetic oligonucleotide
ggaggacagccatgccaagtgtcgatcgatggggtaaacatcttaactaacgtgg

SEQ ID NO: 420534 - DNA, 60 bp, Artificial
  Synthetic oligonucleotide
ggaggacagcctgttctgggagggcgtggtggaacgtctctctgacagtatctctcgcct

SEQ ID NO: 420535 - DNA, 55 bp, Artificial
  Synthetic oligonucleotide
ggaggacatccagatgttggctgtgagcccactctcttcggagcaagagcccgtg

SEQ ID NO: 420536 - DNA, 55 bp, Artificial
  Synthetic oligonucleotide
ggaggacatggaggagccgcatacttccacacttacgacaccctaacctggctcc

SEQ ID NO: 420537 - DNA, 56 bp, Artificial
  Synthetic oligonucleotide
ggaggacattgttgatagatgtaagcaatttgtggggccccttacagtaaacgaaa

SEQ ID NO: 420538 - DNA, 55 bp, Artificial
  Synthetic oligonucleotide
ggaggaccaagagatcgatggcgaagaattcgaggagggtgactgggttgtccgg

SEQ ID NO: 420539 - DNA, 55 bp, Artificial
  Synthetic oligonucleotide
ggaggaccaatcttagggctgctgtccccgcctggggctcctctagtacaccttc

SEQ ID NO: 420540 - DNA, 58 bp, Artificial
  Synthetic oligonucleotide
ggaggaccaggacatgaggagcctatacctatgtcaacatacgggtggaatctagtgc

SEQ ID NO: 420541 - DNA, 59 bp, Artificial
  Synthetic oligonucleotide
ggaggaccatcacttaatgaaccagacattacaaacccagcaaaccaagaccaatatga

SEQ ID NO: 420542 - DNA, 55 bp, Artificial
  Synthetic oligonucleotide
ggaggacccggccacaaagcaagagttctggctgaggcaatgagccaggtaggcc

SEQ ID NO: 420543 - DNA, 55 bp, Artificial
  Synthetic oligonucleotide
ggaggacccggccataaggcaagagtgttggctgaggcaatgagccaagtaggca

SEQ ID NO: 420544 - DNA, 56 bp, Artificial
  Synthetic oligonucleotide
ggaggaccctgtgcccgcgcagtccgaagtggtggtcaccgaggttcctgtaaaca

SEQ ID NO: 420545 - DNA, 54 bp, Artificial
  Synthetic oligonucleotide
ggaggaccggctctgttacggagggccatggaagttgcaacggaagtggaacgg

SEQ ID NO: 420546 - DNA, 58 bp, Artificial
  Synthetic oligonucleotide
ggaggacggaagtgtaattctgcttagtcatagttatataacacacttatgaatatgc

SEQ ID NO: 420547 - DNA, 55 bp, Artificial
  Synthetic oligonucleotide
ggaggacggagacggagaagtattaaagtgggtgtttgacagtcgcctagcactg

SEQ ID NO: 420548 - DNA, 54 bp, Artificial
  Synthetic oligonucleotide
ggaggactaggctacaaatgggcagagatctcttttagaccagcgaattatcaa

SEQ ID NO: 420549 - DNA, 60 bp, Artificial
  Synthetic oligonucleotide
ggaggactgccctctgggtgctctggcacgacaatctttaacaccattatgaacaacatt

SEQ ID NO: 420550 - DNA, 55 bp, Artificial
  Synthetic oligonucleotide
ggaggacttatttacgatctcatgattttggtgcatgtgttgtttatccgaatca

SEQ ID NO: 420551 - DNA, 55 bp, Artificial
  Synthetic oligonucleotide
ggaggagaactcctattaaatcaacttgccggcagaatgataccaaaagggactc

SEQ ID NO: 420552 - DNA, 55 bp, Artificial
  Synthetic oligonucleotide
ggaggagaatctcagttatagcgcaatcaagtctccaacaaggtacaacggcctg

SEQ ID NO: 420553 - DNA, 55 bp, Artificial
  Synthetic oligonucleotide
ggaggagaattgtatcttgaccattacaaacttcggtccctgcaaacgcacgtct

SEQ ID NO: 420554 - DNA, 56 bp, Artificial
  Synthetic oligonucleotide
ggaggagaatttttctactgcaatacaacaggactgtttaatcatagtggggtaaa

SEQ ID NO: 420555 - DNA, 55 bp, Artificial
  Synthetic oligonucleotide
ggaggagactgcacccagcagcccgattctacacaggacaagcgaccatccgtgg

SEQ ID NO: 420556 - DNA, 60 bp, Artificial
  Synthetic oligonucleotide
ggaggagagcaacagctatattaaggaaagcaaccagaaggctgatccagctgatagtga

SEQ ID NO: 420557 - DNA, 60 bp, Artificial
  Synthetic oligonucleotide
ggaggagatggttaagcatggcgtaagaccatcgcatattgcgcggatggttccattggc

SEQ ID NO: 420558 - DNA, 55 bp, Artificial
  Synthetic oligonucleotide
ggaggagatgttgctaccaggtgtgtaccacccccccgaccctcgtcaggactag

SEQ ID NO: 420559 - DNA, 60 bp, Artificial
  Synthetic oligonucleotide
ggaggagcataccagatggtggttgctggagttaatcgtgggtacgcaagtagtgctgag

SEQ ID NO: 420560 - DNA, 55 bp, Artificial
  Synthetic oligonucleotide
ggaggagcatgataacatatgccacaaacaacccaatgtagaatccaacatggtg

SEQ ID NO: 420561 - DNA, 55 bp, Artificial
  Synthetic oligonucleotide
ggaggagccatttggtcaatgtaccccaattgaccgctcttggcatttggtgcct

SEQ ID NO: 420562 - DNA, 55 bp, Artificial
  Synthetic oligonucleotide
ggaggagcccgtcaatattgaggctgaacctccttttggggaaagcaacatagtg

SEQ ID NO: 420563 - DNA, 55 bp, Artificial
  Synthetic oligonucleotide
ggaggagcgagttccaattaagagaaacctcatcaagcagagagtccgacttggg

SEQ ID NO: 420564 - DNA, 60 bp, Artificial
  Synthetic oligonucleotide
ggaggagcggcagaaccaggatattggagtgaatatcttgatcaggccgatattgagacg

SEQ ID NO: 420565 - DNA, 55 bp, Artificial
  Synthetic oligonucleotide
ggaggagcttatgagtcaagctgttagacactttcctacaatatggctccaaagc

SEQ ID NO: 420566 - DNA, 56 bp, Artificial
  Synthetic oligonucleotide
ggaggaggcttgcagacaaatccgtaccgaacttaagaacgtagaacatgttaaca

SEQ ID NO: 420567 - DNA, 59 bp, Artificial
  Synthetic oligonucleotide
ggaggagggatcgccagttgctccagtgtcaatgttcgatcacaggcgagctgcgtcac

SEQ ID NO: 420568 - DNA, 56 bp, Artificial
  Synthetic oligonucleotide
ggaggagtactcctatctagtttacgaaaagaaagtcattcaccttgcatacaatt

SEQ ID NO: 420569 - DNA, 55 bp, Artificial
  Synthetic oligonucleotide
ggaggagtcaagttttattgaagctggtgtgccaggtcctacctccatagtgcct

SEQ ID NO: 420570 - DNA, 55 bp, Artificial
  Synthetic oligonucleotide
ggaggagtcagatttgccggccttggtgcccggaatgtaccctggagtgaaattc

SEQ ID NO: 420571 - DNA, 59 bp, Artificial
  Synthetic oligonucleotide
ggaggagtcggggagcgggggcatccattgatgttgagcactattgatgtttaattaac

SEQ ID NO: 420572 - DNA, 60 bp, Artificial
  Synthetic oligonucleotide
ggaggagtcttcaggtatgacactgacgaagatgagacctgtagggggttgaattatgga

SEQ ID NO: 420573 - DNA, 60 bp, Artificial
  Synthetic oligonucleotide
ggaggagtggacaaatgtggacatccaaccagcacgatcctgggggacgtatgtgctgat

SEQ ID NO: 420574 - DNA, 60 bp, Artificial
  Synthetic oligonucleotide
ggaggagtgttcttgttatgtggacatcgatgtgtactgcatatgtagggacaattggaa

SEQ ID NO: 420575 - DNA, 60 bp, Artificial
  Synthetic oligonucleotide
ggaggagttcagaaggtctctttgtgatgttgctgtttcgttgaacaattgtgcgtatta

SEQ ID NO: 420576 - DNA, 54 bp, Artificial
  Synthetic oligonucleotide
ggaggagtttatcactgccgggctccccctgtcgtggtgtgtgaatcttccgga

SEQ ID NO: 420577 - DNA, 55 bp, Artificial
  Synthetic oligonucleotide
ggaggataatgaaagagaagtgctgatatggagatttgacagtagcctagcacgg

SEQ ID NO: 420578 - DNA, 55 bp, Artificial
  Synthetic oligonucleotide
ggaggataccaggaatggctataacaggcatctcatccacgattagtcaccctcg

SEQ ID NO: 420579 - DNA, 55 bp, Artificial
  Synthetic oligonucleotide
ggaggatatgttcataagcagactcgaaagacaaacaatctgtggctgaagtccc

SEQ ID NO: 420580 - DNA, 53 bp, Artificial
  Synthetic oligonucleotide
ggaggatattagattatggataatgaccttaattaacccagaaaagaacccct

SEQ ID NO: 420581 - DNA, 55 bp, Artificial
  Synthetic oligonucleotide
ggaggatattgaaacgaccattgttactgaggtactcattgacgaggagagcagt

SEQ ID NO: 420582 - DNA, 50 bp, Artificial
  Synthetic oligonucleotide
ggaggatatttgccttgtgcgtgatttctttgaggtggagcctgagggca

SEQ ID NO: 420583 - DNA, 55 bp, Artificial
  Synthetic oligonucleotide
ggaggatcaatgggccctgatagggaccaaaagtagtcttgcaagtaagggagta

SEQ ID NO: 420584 - DNA, 55 bp, Artificial
  Synthetic oligonucleotide
ggaggatcgtatgcaggttcgggagtgaatatcgaagccacgaagtaccgggaca

SEQ ID NO: 420585 - DNA, 55 bp, Artificial
  Synthetic oligonucleotide
ggaggatctggcgccaagcgaataatggggaggatgcaactgctggccttaccca

SEQ ID NO: 420586 - DNA, 55 bp, Artificial
  Synthetic oligonucleotide
ggaggatgcagacagagaagtactaaagtggaagtttgacagtcaactagcacgc

SEQ ID NO: 420587 - DNA, 55 bp, Artificial
  Synthetic oligonucleotide
ggaggatggactggaatgatagatgggtggtatggctatcatcatgaaaattctc

SEQ ID NO: 420588 - DNA, 55 bp, Artificial
  Synthetic oligonucleotide
ggaggatgggcctccggattattctcctggctaggggggacatggacaggaattt

SEQ ID NO: 420589 - DNA, 55 bp, Artificial
  Synthetic oligonucleotide
ggaggatggggttatcctacgagaaaccatcatctcttaatatagtacgatgccg

SEQ ID NO: 420590 - DNA, 55 bp, Artificial
  Synthetic oligonucleotide
ggaggatgggtcctgccagtatgctttggttacgagaataccatagtggagctgg

SEQ ID NO: 420591 - DNA, 56 bp, Artificial
  Synthetic oligonucleotide
ggaggattacttccttggtattttggaagaatgctacagaacagtccacggaggaa

SEQ ID NO: 420592 - DNA, 55 bp, Artificial
  Synthetic oligonucleotide
ggaggattctttccacagatttgtcctcactgttatgctcgcaaccatttgcgtt

SEQ ID NO: 420593 - DNA, 60 bp, Artificial
  Synthetic oligonucleotide
ggaggattggccatggcagcaacagacatggggaaattatgcttcaccccaacagaagca

SEQ ID NO: 420594 - DNA, 55 bp, Artificial
  Synthetic oligonucleotide
ggaggattggtgcaatacccattgatctagcgaaagggacatccggcagccccat

SEQ ID NO: 420595 - DNA, 54 bp, Artificial
  Synthetic oligonucleotide
ggaggattttgagagtactcgggacactgctgaaacctggtgcgtgtcaacgtc

SEQ ID NO: 420596 - DNA, 54 bp, Artificial
  Synthetic oligonucleotide
ggaggcaaactaccaaggataataaaggaacccggattcgatttaaggatgata

SEQ ID NO: 420597 - DNA, 55 bp, Artificial
  Synthetic oligonucleotide
ggaggcaaatcacaaggtcactaaggttgacgggagaacgatgaaagttggcaac

SEQ ID NO: 420598 - DNA, 60 bp, Artificial
  Synthetic oligonucleotide
ggaggcaaccaaattttgcgcacccatatacgagtgtgcctgggttagctccactggcat

SEQ ID NO: 420599 - DNA, 60 bp, Artificial
  Synthetic oligonucleotide
ggaggcaaccggagatgtagagatcggcagaggtattgtggaagacagacgcgatcaaca

SEQ ID NO: 420600 - DNA, 55 bp, Artificial
  Synthetic oligonucleotide
ggaggcaagattacacttccacccagagttccttttccgtctctggaacgcatgc

SEQ ID NO: 420601 - DNA, 57 bp, Artificial
  Synthetic oligonucleotide
ggaggcaatcggacatctacttaagggagtagcgaaggtgaatggcgatagacgggt

SEQ ID NO: 420602 - DNA, 54 bp, Artificial
  Synthetic oligonucleotide
ggaggcaatctcacttattgagggaatcaatcacacacaccatgtgtatcgtaa

SEQ ID NO: 420603 - DNA, 55 bp, Artificial
  Synthetic oligonucleotide
ggaggcaattgctacagaaggaaacaaatacggtctaaccatcacaccggctgac

SEQ ID NO: 420604 - DNA, 55 bp, Artificial
  Synthetic oligonucleotide
ggaggcacctcgataaactccgcactttctggaaaatagttaggtggttccttgc

SEQ ID NO: 420605 - DNA, 57 bp, Artificial
  Synthetic oligonucleotide
ggaggcagacgaagtaggctttccagtcaaacctcaggtgccgttaagaccaatgac

SEQ ID NO: 420606 - DNA, 55 bp, Artificial
  Synthetic oligonucleotide
ggaggcagatacgacatctctgctcggtcattacttggaagccagtacaagcgat

SEQ ID NO: 420607 - DNA, 55 bp, Artificial
  Synthetic oligonucleotide
ggaggcagatgcccactacaagtcaattaggcaatggactgagataatcccttca

SEQ ID NO: 420608 - DNA, 55 bp, Artificial
  Synthetic oligonucleotide
ggaggcagccttggagaaccttgtagtactcaatgcggcgtctttggccgggacg

SEQ ID NO: 420609 - DNA, 55 bp, Artificial
  Synthetic oligonucleotide
ggaggcagccttggagaatcttgtattacttaatgcagcgtctctggccggaacg

SEQ ID NO: 420610 - DNA, 60 bp, Artificial
  Synthetic oligonucleotide
ggaggcagggaagtatgagaatcacacagagaatgctttgcttctgtatatggcatgtac

SEQ ID NO: 420611 - DNA, 55 bp, Artificial
  Synthetic oligonucleotide
ggaggcagtactggttatgtccctttgcctgaaggacctgcacctggtgttcgcg

SEQ ID NO: 420612 - DNA, 58 bp, Artificial
  Synthetic oligonucleotide
ggaggcagtggataatttccatcttggggatgatatggatccagaattgagaacacta

SEQ ID NO: 420613 - DNA, 60 bp, Artificial
  Synthetic oligonucleotide
ggaggcataaattacatgttcgtgaatgatcttacgttgcattttgtagaccctatgctt

SEQ ID NO: 420614 - DNA, 55 bp, Artificial
  Synthetic oligonucleotide
ggaggcatccaactaaggacgttgcatatttcacattaccaacagagatgcagtg

SEQ ID NO: 420615 - DNA, 55 bp, Artificial
  Synthetic oligonucleotide
ggaggcatgtgacagggtccgaacgcgtgataatgcatggggcgacacatacccc

SEQ ID NO: 420616 - DNA, 55 bp, Artificial
  Synthetic oligonucleotide
ggaggcattctgaatgtagctcttgactcctctggttatccatttccagcaggcc

SEQ ID NO: 420617 - DNA, 55 bp, Artificial
  Synthetic oligonucleotide
ggaggccaagaagggcacctccgagctgagcgaggacttcggtgtcggcgcaaaa

SEQ ID NO: 420618 - DNA, 60 bp, Artificial
  Synthetic oligonucleotide
ggaggccaagtatatagagaaatcatctccatacttctgctccaaattcatagttgagtt

SEQ ID NO: 420619 - DNA, 54 bp, Artificial
  Synthetic oligonucleotide
ggaggccacacggtttctccttagacacccctctttctctaatctcacggaacc

SEQ ID NO: 420620 - DNA, 55 bp, Artificial
  Synthetic oligonucleotide
ggaggccacgaccgcctacggttgtaggatgaacccggcaaagcagtcaatcggg

SEQ ID NO: 420621 - DNA, 55 bp, Artificial
  Synthetic oligonucleotide
ggaggccagacaagggaggctctcttagacacaggagcagacgatacagtattag

SEQ ID NO: 420622 - DNA, 55 bp, Artificial
  Synthetic oligonucleotide
ggaggccaggaaattttcttcagaacaggccagagccaacagccccgcccgcgga

SEQ ID NO: 420623 - DNA, 55 bp, Artificial
  Synthetic oligonucleotide
ggaggccatagatctgcacactagtgccgggtacccctatagcgccttgggtgtc

SEQ ID NO: 420624 - DNA, 55 bp, Artificial
  Synthetic oligonucleotide
ggaggccatataccctgtcaggtcaaattcaacaattgctagaggtggcaacagc

SEQ ID NO: 420625 - DNA, 57 bp, Artificial
  Synthetic oligonucleotide
ggaggcccaaacttatacaatatccgaaatctccacattccggaagtctgcttgaaa

SEQ ID NO: 420626 - DNA, 54 bp, Artificial
  Synthetic oligonucleotide
ggaggccccttacccaaggaccgggcgaccgccatgttgggcacggacgtcatc

SEQ ID NO: 420627 - DNA, 51 bp, Artificial
  Synthetic oligonucleotide
ggaggcccgtcgacttagccttctcgtaaatgtcgagaagttccatttcac

SEQ ID NO: 420628 - DNA, 55 bp, Artificial
  Synthetic oligonucleotide
ggaggccctaactgtccccgtggagaaacttctagagcaagtcaagaagaatcct

SEQ ID NO: 420629 - DNA, 55 bp, Artificial
  Synthetic oligonucleotide
ggaggccctgtactccatcatccaaattgcaggggccgcatttgtcaccacgcgc

SEQ ID NO: 420630 - DNA, 55 bp, Artificial
  Synthetic oligonucleotide
ggaggccgccccttcaatgagtgaggtagctcttgttaggtacatcaatccagac

SEQ ID NO: 420631 - DNA, 55 bp, Artificial
  Synthetic oligonucleotide
ggaggccgcgtttaggacggtctttcctcagcgcaagtgcgtgtatccccacggt

SEQ ID NO: 420632 - DNA, 55 bp, Artificial
  Synthetic oligonucleotide
ggaggcctattgtcccgactcttcgggactcgagcatgctcctcccctgtgtcga

SEQ ID NO: 420633 - DNA, 60 bp, Artificial
  Synthetic oligonucleotide
ggaggcctcacatggatggacttactacgagccctcatcatgttgggggacactatgtct

SEQ ID NO: 420634 - DNA, 55 bp, Artificial
  Synthetic oligonucleotide
ggaggcctgaagcctctgcccctaacatcttgagaaactctgactataacctgaa

SEQ ID NO: 420635 - DNA, 55 bp, Artificial
  Synthetic oligonucleotide
ggaggccttaatcactttccttgatcatgtgaggcctgaggtgatgctggcgtcc

SEQ ID NO: 420636 - DNA, 54 bp, Artificial
  Synthetic oligonucleotide
ggaggccttaattaaggcttccaacgagtttgaagacgaattatacgcctgggc

SEQ ID NO: 420637 - DNA, 60 bp, Artificial
  Synthetic oligonucleotide
ggaggcgacaggcaggacgtttcgagaagtttatcgtgaattcttctcattggctctaca

SEQ ID NO: 420638 - DNA, 55 bp, Artificial
  Synthetic oligonucleotide
ggaggcgaggttgggagacacttgattgcatctcttgcccagataattggtgaca

SEQ ID NO: 420639 - DNA, 60 bp, Artificial
  Synthetic oligonucleotide
ggaggcgatacaagagattgcggggatgaccgcagatgtgttagaggcggcatcggagga

SEQ ID NO: 420640 - DNA, 59 bp, Artificial
  Synthetic oligonucleotide
ggaggcgatctggagggtatctcactaacagctcccctcacaaaccagaccctcctaga

SEQ ID NO: 420641 - DNA, 55 bp, Artificial
  Synthetic oligonucleotide
ggaggcgcgcatcgtactcgacactatcgtggaactcgtatgcacccgcgatttc

SEQ ID NO: 420642 - DNA, 58 bp, Artificial
  Synthetic oligonucleotide
ggaggcggaagacaaatctatatgggttcattgtaaaagggagatctcatttgaggaa

SEQ ID NO: 420643 - DNA, 55 bp, Artificial
  Synthetic oligonucleotide
ggaggcgggattcatatatctgaaggactcaagcggctaatgccagaatactgcg

SEQ ID NO: 420644 - DNA, 55 bp, Artificial
  Synthetic oligonucleotide
ggaggcgtattgaaattttcgcgaatgcccagggtaattcggttcaaactcaagc

SEQ ID NO: 420645 - DNA, 57 bp, Artificial
  Synthetic oligonucleotide
ggaggcgtgtgtaaacgcgccaatactctttgagttgataccagaggcaaaattccg

SEQ ID NO: 420646 - DNA, 55 bp, Artificial
  Synthetic oligonucleotide
ggaggcgttttactcattgtaaactcgtgcgtatgaatgtacttgtgcacacctc

SEQ ID NO: 420647 - DNA, 54 bp, Artificial
  Synthetic oligonucleotide
ggaggctacttcagatgacattttatcgaggcttgttgttgaacagagcactca

SEQ ID NO: 420648 - DNA, 60 bp, Artificial
  Synthetic oligonucleotide
ggaggctacttccggcctagtaatgctctgcattcatggctcccctgtcaattcttatac

SEQ ID NO: 420649 - DNA, 58 bp, Artificial
  Synthetic oligonucleotide
ggaggctagaaggagagagatgggtgcgagagcgtcagtattaagcgggggaaaatta

SEQ ID NO: 420650 - DNA, 57 bp, Artificial
  Synthetic oligonucleotide
ggaggctagtactgatggtagattgtgcgcttatagagtagagacatttgaagaaat

SEQ ID NO: 420651 - DNA, 57 bp, Artificial
  Synthetic oligonucleotide
ggaggctatcaacaaggacgggtgcccaaaacccaaagatgatgaggagtttgtcat

SEQ ID NO: 420652 - DNA, 55 bp, Artificial
  Synthetic oligonucleotide
ggaggctattattgctagttatgaacagagacctatgacttggaatgcgcgcacc

SEQ ID NO: 420653 - DNA, 55 bp, Artificial
  Synthetic oligonucleotide
ggaggctattggcataaacagtatgtcattagctcaatatatgcaagttgtgccc

SEQ ID NO: 420654 - DNA, 55 bp, Artificial
  Synthetic oligonucleotide
ggaggctccgccatcgcggggtcattcaggatcaccatcaagtgccaaactcaga

SEQ ID NO: 420655 - DNA, 56 bp, Artificial
  Synthetic oligonucleotide
ggaggctgaacatcaatggtccaacccgaaccaaactggaacctagcgtgttccac

SEQ ID NO: 420656 - DNA, 60 bp, Artificial
  Synthetic oligonucleotide
ggaggctgatctcaaggaaatacgacatccaaagctccacactaccggccggtctctatg

SEQ ID NO: 420657 - DNA, 60 bp, Artificial
  Synthetic oligonucleotide
ggaggctgcaaaccatggaagctgtacgcatggggtagcagactagtggttagaggagac

SEQ ID NO: 420658 - DNA, 55 bp, Artificial
  Synthetic oligonucleotide
ggaggctggcccctgtcctgtggagagccccatgcaaagtgaatcaagcaatgag

SEQ ID NO: 420659 - DNA, 51 bp, Artificial
  Synthetic oligonucleotide
ggaggctggctgggtcccggttccttctatggagctccaaacagcgtggac

SEQ ID NO: 420660 - DNA, 60 bp, Artificial
  Synthetic oligonucleotide
ggaggctgttgggcttgttcacttggactctaagtgattctgaaggaaatgatatgcctg

SEQ ID NO: 420661 - DNA, 56 bp, Artificial
  Synthetic oligonucleotide
ggaggcttaataggtttgagaataattttgtgtgtgctctctgtagtaaaaagagt

SEQ ID NO: 420662 - DNA, 60 bp, Artificial
  Synthetic oligonucleotide
ggaggcttgataggcttaagaatagtttttgctgtgctttctatagcaaatagatgcagg

SEQ ID NO: 420663 - DNA, 55 bp, Artificial
  Synthetic oligonucleotide
ggaggcttgatccgcaaagcctcacgcaacgttgccctccgtggcttcaccggta

SEQ ID NO: 420664 - DNA, 60 bp, Artificial
  Synthetic oligonucleotide
ggaggcttgcaggcacattcacttggactctgtcagactcatcgggggtggagaatccgg

SEQ ID NO: 420665 - DNA, 60 bp, Artificial
  Synthetic oligonucleotide
ggaggctttaatgcaattgtcgcggcaacaatttccaacaatgccagttgactataagag

SEQ ID NO: 420666 - DNA, 60 bp, Artificial
  Synthetic oligonucleotide
ggagggaaatagcttctggaccagccactacatgcctgtgtgtctcagttctaggaggtg

SEQ ID NO: 420667 - DNA, 57 bp, Artificial
  Synthetic oligonucleotide
ggagggaaccgagttacacgcgcattgcaacgggctgtcattgacaaaacgaagacc

SEQ ID NO: 420668 - DNA, 55 bp, Artificial
  Synthetic oligonucleotide
ggagggaatctccacctggattggttcaaactgtgggggcgtccaagattacgtg

SEQ ID NO: 420669 - DNA, 55 bp, Artificial
  Synthetic oligonucleotide
ggagggaatgttagaacaactgatggcaaacccgtgggatcagtatcagcaatgg

SEQ ID NO: 420670 - DNA, 55 bp, Artificial
  Synthetic oligonucleotide
ggagggacaagaatttcttcgagacgccaggccttttgtaatctggccccttggc

SEQ ID NO: 420671 - DNA, 49 bp, Artificial
  Synthetic oligonucleotide
ggagggaccgaaaacggttcaaccgaaaacggttgtatataaaccagcc

SEQ ID NO: 420672 - DNA, 60 bp, Artificial
  Synthetic oligonucleotide
ggagggactagatcgttgcttggattggccgcgctaattggactggcgagttcattgcaa

SEQ ID NO: 420673 - DNA, 53 bp, Artificial
  Synthetic oligonucleotide
ggagggagaggaagtaccaagagttcgtttgtatctaaggttattcctcttct

SEQ ID NO: 420674 - DNA, 59 bp, Artificial
  Synthetic oligonucleotide
ggagggagcggttggctccgttggcaccgagatgcgagttggtaggggcttccagcaga

SEQ ID NO: 420675 - DNA, 60 bp, Artificial
  Synthetic oligonucleotide
ggagggatagaaggactgtgccttaagctctggactatgatctctattagcatcattcac

SEQ ID NO: 420676 - DNA, 54 bp, Artificial
  Synthetic oligonucleotide
ggagggatcagatacatcccacaacctaacaaccccacctgcaacccccctttg

SEQ ID NO: 420677 - DNA, 55 bp, Artificial
  Synthetic oligonucleotide
ggagggatggctttgcagctatgctattgagatcttattttacagaggcacaggg

SEQ ID NO: 420678 - DNA, 55 bp, Artificial
  Synthetic oligonucleotide
ggagggcaactgttttatggccgccctcaggtgtctgagaacggtgagccctctg

SEQ ID NO: 420679 - DNA, 55 bp, Artificial
  Synthetic oligonucleotide
ggagggcaagcaggaattcacggaggcattgacttagctccaaaagcaggtacta

SEQ ID NO: 420680 - DNA, 58 bp, Artificial
  Synthetic oligonucleotide
ggagggcaccacgttagcagataaaatattgcaatggtcaagccttggtatatttttg

SEQ ID NO: 420681 - DNA, 55 bp, Artificial
  Synthetic oligonucleotide
ggagggcatccagtctcccgaggcactgcaaaattgcgatggctggtcgaacggc

SEQ ID NO: 420682 - DNA, 56 bp, Artificial
  Synthetic oligonucleotide
ggagggcctatgccggaacactgggaggaggcctggttagaagctaccaaaggctg

SEQ ID NO: 420683 - DNA, 52 bp, Artificial
  Synthetic oligonucleotide
ggagggcgaatagcccgctgacacgtggggcgcactcgcggaatttaatgtt

SEQ ID NO: 420684 - DNA, 50 bp, Artificial
  Synthetic oligonucleotide
ggagggcgattcccctatcttacatcaagggggggagacacttgatcttc

SEQ ID NO: 420685 - DNA, 55 bp, Artificial
  Synthetic oligonucleotide
ggagggcggagcctagaatgagtttcaaaagtgaagcgctgatcacgtggattgg

SEQ ID NO: 420686 - DNA, 55 bp, Artificial
  Synthetic oligonucleotide
ggagggcttggaagcactgatccgacaggaaaggctgcatattgggcaagtcagg

SEQ ID NO: 420687 - DNA, 55 bp, Artificial
  Synthetic oligonucleotide
ggaggggaaaatcattcatattagccaattgtcaggaagtgctcagcatgtcgag

SEQ ID NO: 420688 - DNA, 55 bp, Artificial
  Synthetic oligonucleotide
ggaggggaaatccgagtgcaaattcaagatggaaacattcatgcgccatctgtcc

SEQ ID NO: 420689 - DNA, 55 bp, Artificial
  Synthetic oligonucleotide
ggaggggaaccacacatagcgcatcattttgcgggtcaccatattcttcggagca

SEQ ID NO: 420690 - DNA, 55 bp, Artificial
  Synthetic oligonucleotide
ggaggggaattatggcagacacatggttaagtcctcttgctgtttcttatcaagc

SEQ ID NO: 420691 - DNA, 50 bp, Artificial
  Synthetic oligonucleotide
ggaggggaatttttctactgtaatacaacaccgctgtttaataatagtaa

SEQ ID NO: 420692 - DNA, 52 bp, Artificial
  Synthetic oligonucleotide
ggaggggaatttttctactgtaatacaacagggctatttaatgatagtatgc

SEQ ID NO: 420693 - DNA, 60 bp, Artificial
  Synthetic oligonucleotide
ggaggggataccgctatatgatgcgatcaaatgcatgaaaacattcttcggctggaaaga

SEQ ID NO: 420694 - DNA, 55 bp, Artificial
  Synthetic oligonucleotide
ggaggggattagatctactgttcctaaaagaaggaggattatgtgctgccctaaa

SEQ ID NO: 420695 - DNA, 55 bp, Artificial
  Synthetic oligonucleotide
ggaggggcatatagttcattctatgacgggtggtcccactttaaccaacaaggtc

SEQ ID NO: 420696 - DNA, 55 bp, Artificial
  Synthetic oligonucleotide
ggaggggctctggcactgcaagggaccttgacaatctcagatggttccctctccc

SEQ ID NO: 420697 - DNA, 54 bp, Artificial
  Synthetic oligonucleotide
ggaggggtagcggtcgttgtcaaccaggggatccaccttctctacggtatgtaa

SEQ ID NO: 420698 - DNA, 60 bp, Artificial
  Synthetic oligonucleotide
ggaggggtgctcctctttctcgccacaagcgtccatgcagactcgggatgtgcgatagac

SEQ ID NO: 420699 - DNA, 55 bp, Artificial
  Synthetic oligonucleotide
ggaggggttgagaagaggagaaacaaccaaacacgcagtgtcgagaggaacggcc

SEQ ID NO: 420700 - DNA, 50 bp, Artificial
  Synthetic oligonucleotide
ggagggtaaaatagagggctttcccgaggccgggaatttcttgggtcgcc

SEQ ID NO: 420701 - DNA, 55 bp, Artificial
  Synthetic oligonucleotide
ggagggtaccatggtgatatggagatgcgactaaccttcgccgtgtctaagtttc

SEQ ID NO: 420702 - DNA, 55 bp, Artificial
  Synthetic oligonucleotide
ggagggtaggtaccactacgctacgctacgcagcagccttagctacgccggagct

SEQ ID NO: 420703 - DNA, 55 bp, Artificial
  Synthetic oligonucleotide
ggagggtcacttttcaggctttcgaaggtggaaggtggttagctgctcgactgac

SEQ ID NO: 420704 - DNA, 54 bp, Artificial
  Synthetic oligonucleotide
ggagggtccctctgaaagtaaggcaggagtttgaggacgtggctggttacttcc

SEQ ID NO: 420705 - DNA, 55 bp, Artificial
  Synthetic oligonucleotide
ggagggtcgagaactcttcagcatctctgtgagatggcaattcggtctaagcaag

SEQ ID NO: 420706 - DNA, 59 bp, Artificial
  Synthetic oligonucleotide
ggagggtcggcgagcaaggttatgataatgaagcgtttgaaggatcggatgttgatccc

SEQ ID NO: 420707 - DNA, 53 bp, Artificial
  Synthetic oligonucleotide
ggagggtcggcggtcattccatcgcccgaaaccccggttagtaagcctgctaa

SEQ ID NO: 420708 - DNA, 59 bp, Artificial
  Synthetic oligonucleotide
ggagggtctcaatcatctgtggaatctcctgttatactggggcggggagataaagagta

SEQ ID NO: 420709 - DNA, 55 bp, Artificial
  Synthetic oligonucleotide
ggagggtgaacacaagcaactggcggctacaataatgcagaaggcataccacgcc

SEQ ID NO: 420710 - DNA, 55 bp, Artificial
  Synthetic oligonucleotide
ggagggtgaggtccagatcgtctcaaccgccacccagaccttcctggcaacatgc

SEQ ID NO: 420711 - DNA, 59 bp, Artificial
  Synthetic oligonucleotide
ggagggtgaggtccagattgtgtcaaccgctgcccaaactttcctggcaacgtgtatca

SEQ ID NO: 420712 - DNA, 56 bp, Artificial
  Synthetic oligonucleotide
ggagggtgggtgctgccgggacatagatacttgggtccgttcaacccaatagagaa

SEQ ID NO: 420713 - DNA, 56 bp, Artificial
  Synthetic oligonucleotide
ggagggttcacctccagaggaccccttcagcgaacagaagagctccctcctcctcc

SEQ ID NO: 420714 - DNA, 55 bp, Artificial
  Synthetic oligonucleotide
ggagggttgtcgtatgagtggggatataaacacttcgttggggaactatctgttg

SEQ ID NO: 420715 - DNA, 57 bp, Artificial
  Synthetic oligonucleotide
ggagggtttaagatggtattagcattcgataaagatgtatttggattacctatagcg

SEQ ID NO: 420716 - DNA, 60 bp, Artificial
  Synthetic oligonucleotide
ggagggtttggggagtggtttaccctcagaagctgcatataagcagccgctctgcgcttg

SEQ ID NO: 420717 - DNA, 58 bp, Artificial
  Synthetic oligonucleotide
ggaggtaacggttcacatggtttcgctgcagccttaaagcggtcgtacttcactcaga

SEQ ID NO: 420718 - DNA, 55 bp, Artificial
  Synthetic oligonucleotide
ggaggtaaggagttcaacgggtcaggaagtgctagtttcgtacaatctgaggacg

SEQ ID NO: 420719 - DNA, 60 bp, Artificial
  Synthetic oligonucleotide
ggaggtaatacgagcatccgcagtcgaggtctatgcgcttacgtctgactggcttagtct

SEQ ID NO: 420720 - DNA, 56 bp, Artificial
  Synthetic oligonucleotide
ggaggtacagctaggtatcccacatccggggggtttgaagcaaaagcaatctgtta

SEQ ID NO: 420721 - DNA, 53 bp, Artificial
  Synthetic oligonucleotide
ggaggtacagttaggtatcccacacccagggggtttaaagcagaagaaatctg

SEQ ID NO: 420722 - DNA, 49 bp, Artificial
  Synthetic oligonucleotide
ggaggtaccgaaaacggtcgaccgggaagggtacatataaaagcaaacc

SEQ ID NO: 420723 - DNA, 55 bp, Artificial
  Synthetic oligonucleotide
ggaggtactactactctcagtggtagtgctttccgattttgctccagagacagct

SEQ ID NO: 420724 - DNA, 55 bp, Artificial
  Synthetic oligonucleotide
ggaggtactacttatctcctagagcgtgagctcttaaaatgtaacatcatgacct

SEQ ID NO: 420725 - DNA, 53 bp, Artificial
  Synthetic oligonucleotide
ggaggtagagtttctgaaacggaaacctggatacttcccagagtcaacattta

SEQ ID NO: 420726 - DNA, 58 bp, Artificial
  Synthetic oligonucleotide
ggaggtaggcaagcaccaattcatgtaacacgcacctacggtgaccagaaattcgaaa

SEQ ID NO: 420727 - DNA, 60 bp, Artificial
  Synthetic oligonucleotide
ggaggtaggtttgtgcttgcattactatcagaccatcaggacctcaagtgggctagattc

SEQ ID NO: 420728 - DNA, 60 bp, Artificial
  Synthetic oligonucleotide
ggaggtagtctccctctcattgcttcagttgagagcttcgaaatgattagcgttgtacta

SEQ ID NO: 420729 - DNA, 55 bp, Artificial
  Synthetic oligonucleotide
ggaggtatacatagaagggccacccggttatatggtgaacataggtactatgtcg

SEQ ID NO: 420730 - DNA, 56 bp, Artificial
  Synthetic oligonucleotide
ggaggtatacccaagcgggatgcttgggtaaacaggcccatgtacaggaagcccag

SEQ ID NO: 420731 - DNA, 55 bp, Artificial
  Synthetic oligonucleotide
ggaggtatagacattcttagtgctttgagtgaagttgattcaggtatgtggaggg

SEQ ID NO: 420732 - DNA, 60 bp, Artificial
  Synthetic oligonucleotide
ggaggtatcaattaatacgtctgatccagcgtatacgcttaatcaatctgagttgggtac

SEQ ID NO: 420733 - DNA, 55 bp, Artificial
  Synthetic oligonucleotide
ggaggtatcggcgaccggttctgtaccggcagaacagggtgtcaagggattggga

SEQ ID NO: 420734 - DNA, 54 bp, Artificial
  Synthetic oligonucleotide
ggaggtatgtctcagtcagttctaatcatcaaactcgccctaactcgtttgcgg

SEQ ID NO: 420735 - DNA, 55 bp, Artificial
  Synthetic oligonucleotide
ggaggtattagatggagtggtaataacgagtatcgtacaggttatgtacacgtta

SEQ ID NO: 420736 - DNA, 56 bp, Artificial
  Synthetic oligonucleotide
ggaggtcaatcttttataccctgtagggtagctgtttatcagcgcaacttattccg

SEQ ID NO: 420737 - DNA, 52 bp, Artificial
  Synthetic oligonucleotide
ggaggtcaatgatcttatggcgtctgggacgcatcccctacctccttccgca

SEQ ID NO: 420738 - DNA, 57 bp, Artificial
  Synthetic oligonucleotide
ggaggtcacattgaagagtgctcttgctaccccaacttgggtaaagtggagtgcgtt

SEQ ID NO: 420739 - DNA, 60 bp, Artificial
  Synthetic oligonucleotide
ggaggtcagtatgcaagcaaggagcaagcaatagtcaagaggttcatgaagattaacaac

SEQ ID NO: 420740 - DNA, 55 bp, Artificial
  Synthetic oligonucleotide
ggaggtcagtgaaacacagggaactgagagactgacaataacttattcatcgtcg

SEQ ID NO: 420741 - DNA, 55 bp, Artificial
  Synthetic oligonucleotide
ggaggtcatatgggacaatgcccctcagcttgtagtgacaagtcctatgactcgg

SEQ ID NO: 420742 - DNA, 55 bp, Artificial
  Synthetic oligonucleotide
ggaggtccaaatgtactagatataacggcagatccaactaccgcaccacaaactg

SEQ ID NO: 420743 - DNA, 60 bp, Artificial
  Synthetic oligonucleotide
ggaggtccacattacaccctatgggaaatgtgaattgggcttgatcttgttgctcatcac

SEQ ID NO: 420744 - DNA, 51 bp, Artificial
  Synthetic oligonucleotide
ggaggtcccactgtctggcgccgtcccagtttgctagcgggtctgtctcca

SEQ ID NO: 420745 - DNA, 58 bp, Artificial
  Synthetic oligonucleotide
ggaggtccccttctattgccaattcctcccactgagtaggtatgctactgggagacac

SEQ ID NO: 420746 - DNA, 60 bp, Artificial
  Synthetic oligonucleotide
ggaggtccgacgccaaacgtgcagcccgaatgttcatccgagaagtattcagctcgatcg

SEQ ID NO: 420747 - DNA, 60 bp, Artificial
  Synthetic oligonucleotide
ggaggtcgctcgaggaaaaaatacagaatgcagagcatactgtacaaaagaggatactcg

SEQ ID NO: 420748 - DNA, 59 bp, Artificial
  Synthetic oligonucleotide
ggaggtcggccattacattgggggttggggggtcactcagagcagtccatgcaaactgc

SEQ ID NO: 420749 - DNA, 55 bp, Artificial
  Synthetic oligonucleotide
ggaggtcgtgaatcctcggacagtgataattttggaccatcttggcaacagacgt

SEQ ID NO: 420750 - DNA, 54 bp, Artificial
  Synthetic oligonucleotide
ggaggtctaatgttctcctttgaatacagttcactagcgagataggaacaccat

SEQ ID NO: 420751 - DNA, 55 bp, Artificial
  Synthetic oligonucleotide
ggaggtctctcaagaaaaatcgacgggaacgaggatacaaaagtcccagcgagag

SEQ ID NO: 420752 - DNA, 52 bp, Artificial
  Synthetic oligonucleotide
ggaggtctgcatgaacagcgacacccttctcggcatcgctgccattggagcg

SEQ ID NO: 420753 - DNA, 56 bp, Artificial
  Synthetic oligonucleotide
ggaggtcttaacggcctcaatttgcgacacgcgcggcagtacgaacacggaggtgg

SEQ ID NO: 420754 - DNA, 55 bp, Artificial
  Synthetic oligonucleotide
ggaggtcttgctcagtaactgctgcagggaaaggaggttggcttggatgttctat

SEQ ID NO: 420755 - DNA, 56 bp, Artificial
  Synthetic oligonucleotide
ggaggtgaaaccatgtctagagccagttttgcgtaccgcggcagaaccgccaaggg

SEQ ID NO: 420756 - DNA, 60 bp, Artificial
  Synthetic oligonucleotide
ggaggtgacaatcatgtagctttcatagatcttagagactttcaagttgctgaggagcaa

SEQ ID NO: 420757 - DNA, 60 bp, Artificial
  Synthetic oligonucleotide
ggaggtgacggacttcggtgactgggtgggcaataatttacaggatcaggcagcaagaga

SEQ ID NO: 420758 - DNA, 55 bp, Artificial
  Synthetic oligonucleotide
ggaggtgagagtagaccactcagagtgaagggtttgctaatatcattaggagtgt

SEQ ID NO: 420759 - DNA, 58 bp, Artificial
  Synthetic oligonucleotide
ggaggtgagtgaaaccaccgtagtctaggggcaattcgggcggctgcagtctagcgga

SEQ ID NO: 420760 - DNA, 52 bp, Artificial
  Synthetic oligonucleotide
ggaggtgattcccaccctcctgaacacgctttccacgcaaggccccaagctg

SEQ ID NO: 420761 - DNA, 55 bp, Artificial
  Synthetic oligonucleotide
ggaggtgcaactggatacgtccccttaagtgaagggcctgtaagagtgggtagta

SEQ ID NO: 420762 - DNA, 55 bp, Artificial
  Synthetic oligonucleotide
ggaggtgcactcctgccctttgctatatacagcttttcttctaagtggtggatgg

SEQ ID NO: 420763 - DNA, 50 bp, Artificial
  Synthetic oligonucleotide
ggaggtgccagtttatggcaaaatattccccatagaggaggttgcatctg

SEQ ID NO: 420764 - DNA, 60 bp, Artificial
  Synthetic oligonucleotide
ggaggtgccgcgatcctacataacgaatttgatcatgaacatagcattgtgcttaccaca

SEQ ID NO: 420765 - DNA, 55 bp, Artificial
  Synthetic oligonucleotide
ggaggtgcctaactgacttgtctgccttttatcgccgaaccatgcctatagaatc

SEQ ID NO: 420766 - DNA, 55 bp, Artificial
  Synthetic oligonucleotide
ggaggtgcggaaatccatctgcgtgttcctctctggcgactcgtatgtacgttgg

SEQ ID NO: 420767 - DNA, 55 bp, Artificial
  Synthetic oligonucleotide
ggaggtgcggtcgtgggaagagtggaccaatatcgacatccaacctgcacgttct

SEQ ID NO: 420768 - DNA, 55 bp, Artificial
  Synthetic oligonucleotide
ggaggtgctgtttcattgcatttcgctggtgttacattatctacgcaatttacag

SEQ ID NO: 420769 - DNA, 53 bp, Artificial
  Synthetic oligonucleotide
ggaggtggaacaacccgtagacatattcgagcgcattgagttttgtcaaaccc

SEQ ID NO: 420770 - DNA, 56 bp, Artificial
  Synthetic oligonucleotide
ggaggtggagatgccatgccgacccgaagaggaaagaaggactcggacgcgaaccc

SEQ ID NO: 420771 - DNA, 55 bp, Artificial
  Synthetic oligonucleotide
ggaggtggattgtggatggttattcaacacctgcggtcaaagatttccgaacccg

SEQ ID NO: 420772 - DNA, 55 bp, Artificial
  Synthetic oligonucleotide
ggaggtggccttatccaacactggagagatccccttctatggcaaggctatcccc

SEQ ID NO: 420773 - DNA, 60 bp, Artificial
  Synthetic oligonucleotide
ggaggtggcgagcaggccacacacagatccgtgcgattagtgagcggattcttaacactt

SEQ ID NO: 420774 - DNA, 54 bp, Artificial
  Synthetic oligonucleotide
ggaggtggctagtagtggccagttttgtgtggccatgttttgccttgaggaatg

SEQ ID NO: 420775 - DNA, 55 bp, Artificial
  Synthetic oligonucleotide
ggaggtgggaacgatcctacctgctatattagccatgaagcaaagcctgtcttcg

SEQ ID NO: 420776 - DNA, 57 bp, Artificial
  Synthetic oligonucleotide
ggaggtggtactgtttacgtgtatctcagaaaagtagacgccgacggtattgacaga

SEQ ID NO: 420777 - DNA, 51 bp, Artificial
  Synthetic oligonucleotide
ggaggtggtataactcatagggtaggtaaacgtttttgtgttaagtctgtt

SEQ ID NO: 420778 - DNA, 55 bp, Artificial
  Synthetic oligonucleotide
ggaggtggtgaatgaattcagtaggccgtagaaataaccgcaggagaaatggccc

SEQ ID NO: 420779 - DNA, 55 bp, Artificial
  Synthetic oligonucleotide
ggaggtggtgctgaaatattgcaagccactaatgtcgttacacttagcctctgga

SEQ ID NO: 420780 - DNA, 55 bp, Artificial
  Synthetic oligonucleotide
ggaggtggtggacctaatgctatcatggaaggtctaagaggtatggcacctgagt

SEQ ID NO: 420781 - DNA, 55 bp, Artificial
  Synthetic oligonucleotide
ggaggtggttccagtatgcgcatggttggcccattggcatgggagaatgtcgagg

SEQ ID NO: 420782 - DNA, 50 bp, Artificial
  Synthetic oligonucleotide
ggaggtgtattaagaaccgttcgagttaagtttttcgattcgcggccccc

SEQ ID NO: 420783 - DNA, 52 bp, Artificial
  Synthetic oligonucleotide
ggaggtgtattacgtacctgaaacagaagggtagattactccaaaccgttgt

SEQ ID NO: 420784 - DNA, 55 bp, Artificial
  Synthetic oligonucleotide
ggaggtgtccccaccaacatgaaaagaaggcgttggaccaaccgccccatgtgga

SEQ ID NO: 420785 - DNA, 55 bp, Artificial
  Synthetic oligonucleotide
ggaggtgtctccgttagaagtttctccgttagaattgcactgaagtcaaggacag

SEQ ID NO: 420786 - DNA, 60 bp, Artificial
  Synthetic oligonucleotide
ggaggtgtggtttgggcggagttggggagtggctaaccctcagatgctgcatataagcag

SEQ ID NO: 420787 - DNA, 55 bp, Artificial
  Synthetic oligonucleotide
ggaggtgtgtgttgtaagacagtacggctatgtgtgtatagcacgcacacaggca

SEQ ID NO: 420788 - DNA, 55 bp, Artificial
  Synthetic oligonucleotide
ggaggtgtgttactcatcgaaccaactcgtccgttagctcaaaacgtatacaagc

SEQ ID NO: 420789 - DNA, 52 bp, Artificial
  Synthetic oligonucleotide
ggaggtgttgtaactcagtgtgtcgttgaaagaagtgcagctcacgttttcg

SEQ ID NO: 420790 - DNA, 55 bp, Artificial
  Synthetic oligonucleotide
ggaggtgtttagagatgagcgtatatgaccgttgcgtgtacctagacgccgatca

SEQ ID NO: 420791 - DNA, 55 bp, Artificial
  Synthetic oligonucleotide
ggaggttcaggatggtacaaattaccttctctgtaacaacacctctaaggtgtct

SEQ ID NO: 420792 - DNA, 55 bp, Artificial
  Synthetic oligonucleotide
ggaggttccaatgagggcagcacggacaccacgtccacacacaccaacaacactc

SEQ ID NO: 420793 - DNA, 55 bp, Artificial
  Synthetic oligonucleotide
ggaggttccatacgtgggctgcacacccaacactaccacctgtgtgcactcaccc

SEQ ID NO: 420794 - DNA, 55 bp, Artificial
  Synthetic oligonucleotide
ggaggttccatgcaacggtgaccggagggcaatatgcagctaaggagtctgctat

SEQ ID NO: 420795 - DNA, 55 bp, Artificial
  Synthetic oligonucleotide
ggaggttcctcaatgtggtaagacagttttctgacaatgcaggtattacgcctgc

SEQ ID NO: 420796 - DNA, 58 bp, Artificial
  Synthetic oligonucleotide
ggaggttcctggtctccgcgtgattacacgccgcagactcaaggcacctacacgaacg

SEQ ID NO: 420797 - DNA, 55 bp, Artificial
  Synthetic oligonucleotide
ggaggttcttcgcaagaggtggacggccagattgaccattcctgcggttttgggg

SEQ ID NO: 420798 - DNA, 55 bp, Artificial
  Synthetic oligonucleotide
ggaggttgacaaacgagcgtgagagtgttattctcactgccaatgccaaaccaag

SEQ ID NO: 420799 - DNA, 55 bp, Artificial
  Synthetic oligonucleotide
ggaggttgactccgtcaaggagttaaaacctctcacagcccaggagctggtagcc

SEQ ID NO: 420800 - DNA, 60 bp, Artificial
  Synthetic oligonucleotide
ggaggttgccagtcaggctaggcagatggtgcaggcaatgaggaccattgggactcatcc

SEQ ID NO: 420801 - DNA, 59 bp, Artificial
  Synthetic oligonucleotide
ggaggttggactctgcttctgaagagtccagttctgtttctttcgacgatggcttacaa

SEQ ID NO: 420802 - DNA, 51 bp, Artificial
  Synthetic oligonucleotide
ggaggttggctaggcacattgagtctagtatggaggttattcgtggtgatt

SEQ ID NO: 420803 - DNA, 57 bp, Artificial
  Synthetic oligonucleotide
ggaggttgggacgggtgcgcaagaaagtactcgtaatgacgttgcttggtatgctcg

SEQ ID NO: 420804 - DNA, 55 bp, Artificial
  Synthetic oligonucleotide
ggaggttgtgagcatgaagtcaataccgttcatgaggcacaaggatgtaccttcc

SEQ ID NO: 420805 - DNA, 55 bp, Artificial
  Synthetic oligonucleotide
ggaggtttagcactatacgactccctaacaggcgaccctcgttatggtgacgccg

SEQ ID NO: 420806 - DNA, 56 bp, Artificial
  Synthetic oligonucleotide
ggaggtttagtgcggcccattgatttctttgccttaacggcgagttcagtggctgg

SEQ ID NO: 420807 - DNA, 50 bp, Artificial
  Synthetic oligonucleotide
ggaggtttattgagtgccctagatggaccacaaggattagcacatggtgt

SEQ ID NO: 420808 - DNA, 55 bp, Artificial
  Synthetic oligonucleotide
ggaggtttcaggcgacagttacaggaggacagtatgcttgtaaggaacaagttcc

SEQ ID NO: 420809 - DNA, 55 bp, Artificial
  Synthetic oligonucleotide
ggaggtttcctggtttatgaccatgttacaaggacagcatgccgcatagcagacc

SEQ ID NO: 420810 - DNA, 58 bp, Artificial
  Synthetic oligonucleotide
ggaggtttgacctatgcgagcttttagtgcccttgataaggagagcaagaccttcgtc

SEQ ID NO: 420811 - DNA, 51 bp, Artificial
  Synthetic oligonucleotide
ggaggtttgtgcatgacctacgagctacaaatgctcttacaaagcccattc

SEQ ID NO: 420812 - DNA, 55 bp, Artificial
  Synthetic oligonucleotide
ggagtaaactgcaacgcacttcattccaactacgcaatggctctcacctaccgaa

SEQ ID NO: 420813 - DNA, 60 bp, Artificial
  Synthetic oligonucleotide
ggagtaaagagtctcaaactggcagtcggtttaaggaatgtacctgctgtatcagataga

SEQ ID NO: 420814 - DNA, 59 bp, Artificial
  Synthetic oligonucleotide
ggagtaaatatatgggtctataggggtatatgtgtgcaattataaaggtcgataggata

SEQ ID NO: 420815 - DNA, 55 bp, Artificial
  Synthetic oligonucleotide
ggagtaacagatctctagacgagatttggagtaacatgacctggatgcagtggga

SEQ ID NO: 420816 - DNA, 56 bp, Artificial
  Synthetic oligonucleotide
ggagtaagaaagtgcccaacactgaaccgtacatgttcaagacctatgaaaaggcg

SEQ ID NO: 420817 - DNA, 59 bp, Artificial
  Synthetic oligonucleotide
ggagtaagaccatagcgatggggggagatgctaggagttagaggagaccgaagcgagga

SEQ ID NO: 420818 - DNA, 55 bp, Artificial
  Synthetic oligonucleotide
ggagtaagacgaatgatgcagggtctgacagggtgatggtatcacctctagctgt

SEQ ID NO: 420819 - DNA, 57 bp, Artificial
  Synthetic oligonucleotide
ggagtaagcaacgtatgaaaagcgtatactctagtataggaggtagattacgtagtg

SEQ ID NO: 420820 - DNA, 53 bp, Artificial
  Synthetic oligonucleotide
ggagtaagttttatggaattagttagaccatttaaaagtgataaaacaagctg

SEQ ID NO: 420821 - DNA, 53 bp, Artificial
  Synthetic oligonucleotide
ggagtaatccaacgttaatactacgttaagtattggtgcttccagggctaaac

SEQ ID NO: 420822 - DNA, 58 bp, Artificial
  Synthetic oligonucleotide
ggagtaatccgtacccctgcttacgaggaacgatcattgcgtgtgagatggaactagg

SEQ ID NO: 420823 - DNA, 60 bp, Artificial
  Synthetic oligonucleotide
ggagtaatgtcacatttgctacaaatagcaaatcatctatccgttatggtttggatgcta

SEQ ID NO: 420824 - DNA, 60 bp, Artificial
  Synthetic oligonucleotide
ggagtacaagaattaataagaatcctgcagagagctatctttactcactatcgacatggt

SEQ ID NO: 420825 - DNA, 59 bp, Artificial
  Synthetic oligonucleotide
ggagtacaaggagaggaccagagtcttcaacgaaatcacggacttctccagtgacctgc

SEQ ID NO: 420826 - DNA, 60 bp, Artificial
  Synthetic oligonucleotide
ggagtacaatactattagatcacgtttcctcacgcacgaggtctttgacttaacatctga

SEQ ID NO: 420827 - DNA, 55 bp, Artificial
  Synthetic oligonucleotide
ggagtacacgataaatgagctgtctatcttacataaggtcgttcggaactggtca

SEQ ID NO: 420828 - DNA, 55 bp, Artificial
  Synthetic oligonucleotide
ggagtacactcactttgatcctgagtttaaatccactgttgaaccccaccggagc

SEQ ID NO: 420829 - DNA, 55 bp, Artificial
  Synthetic oligonucleotide
ggagtaccagtctgggtagatgccaaagttgatttgttctgtacagccaactcat

SEQ ID NO: 420830 - DNA, 60 bp, Artificial
  Synthetic oligonucleotide
ggagtaccatgctccttgggatgttgatgatatataatgttacaggacagttgtgggtca

SEQ ID NO: 420831 - DNA, 60 bp, Artificial
  Synthetic oligonucleotide
ggagtacccactgactcactactcagccatgcccttgccctggtcaacgcatgcttcgac

SEQ ID NO: 420832 - DNA, 60 bp, Artificial
  Synthetic oligonucleotide
ggagtaccccagtagccattgtaagctgagtattccacatacactttagacctgtcagtg

SEQ ID NO: 420833 - DNA, 60 bp, Artificial
  Synthetic oligonucleotide
ggagtacccccttagctttaatggatcttctaatgttctctacatcggcatacctgatca

SEQ ID NO: 420834 - DNA, 55 bp, Artificial
  Synthetic oligonucleotide
ggagtacccgtcaggcaggaggccgtccaggggaaagatggttgcggcttatgac

SEQ ID NO: 420835 - DNA, 55 bp, Artificial
  Synthetic oligonucleotide
ggagtacctacagcggaaccagtacaggatgctaaagccccgggcaatacccgaa

SEQ ID NO: 420836 - DNA, 54 bp, Artificial
  Synthetic oligonucleotide
ggagtacgtggaggtcacgcgggtgggggatttccactatgtaacgggcatgac

SEQ ID NO: 420837 - DNA, 55 bp, Artificial
  Synthetic oligonucleotide
ggagtactacaaagattgctgacaaaggacttgtgctggggactttccacagggg

SEQ ID NO: 420838 - DNA, 57 bp, Artificial
  Synthetic oligonucleotide
ggagtactacggttgcgtgttgaaggagggggcttgatcacgcattcgaatagtaaa

SEQ ID NO: 420839 - DNA, 57 bp, Artificial
  Synthetic oligonucleotide
ggagtactatttatatccgataatatgatacacgatgtaatcacagtgctgaagagg

SEQ ID NO: 420840 - DNA, 55 bp, Artificial
  Synthetic oligonucleotide
ggagtactccgactggaattcaaacctccgaattattgccagatgaggccggccc

SEQ ID NO: 420841 - DNA, 55 bp, Artificial
  Synthetic oligonucleotide
ggagtactgtcttcgacttcttgatcactcgtgatattgaagagaggttcctcga

SEQ ID NO: 420842 - DNA, 55 bp, Artificial
  Synthetic oligonucleotide
ggagtacttcaaataaggacttccgggtgccatgactcagaactgctgacagagg

SEQ ID NO: 420843 - DNA, 60 bp, Artificial
  Synthetic oligonucleotide
ggagtagaccatgagattgccgactggtcatggcacgatggagctattcttccttttgac

SEQ ID NO: 420844 - DNA, 55 bp, Artificial
  Synthetic oligonucleotide
ggagtagatgtatagccctaaaccatgacgtgcaattgctttaactagtccacgc

SEQ ID NO: 420845 - DNA, 55 bp, Artificial
  Synthetic oligonucleotide
ggagtagcaaaaggaagtaggactatctggtacatgtggttgggaagtcgctttc

SEQ ID NO: 420846 - DNA, 58 bp, Artificial
  Synthetic oligonucleotide
ggagtagcctttcaggcgcaggactacacatggttaacaaagagaatcgatgggaact

SEQ ID NO: 420847 - DNA, 52 bp, Artificial
  Synthetic oligonucleotide
ggagtagctgacgatgattggcgaacttgaagcgcactggcccgatgttgta

SEQ ID NO: 420848 - DNA, 60 bp, Artificial
  Synthetic oligonucleotide
ggagtaggcgacgtgtttaggtgtgacgatgtgggatctccgtgcagtgccgacgcttac

SEQ ID NO: 420849 - DNA, 59 bp, Artificial
  Synthetic oligonucleotide
ggagtaggtcctacatcaagttgaaacgtctccgtgtcaaaggcactgtgaagattgaa

SEQ ID NO: 420850 - DNA, 53 bp, Artificial
  Synthetic oligonucleotide
ggagtagtacactattattacggtaattttgtacgccagttttgcctccctcc

SEQ ID NO: 420851 - DNA, 60 bp, Artificial
  Synthetic oligonucleotide
ggagtagtccttaaacggatctgcagtgctagtagccatggtagcgtcgtcgtaatcgac

SEQ ID NO: 420852 - DNA, 57 bp, Artificial
  Synthetic oligonucleotide
ggagtagtgaactcaaagctgtttctaccggccagtctggctggacctaggtcaacc

SEQ ID NO: 420853 - DNA, 60 bp, Artificial
  Synthetic oligonucleotide
ggagtagtgcttgtaaaagagggcctgccaatggctttttcagtagactgaattggctga

SEQ ID NO: 420854 - DNA, 60 bp, Artificial
  Synthetic oligonucleotide
ggagtataaaacttgtgtgggtgatttgactgttgtgatagccaaagcattggacgagtc

SEQ ID NO: 420855 - DNA, 57 bp, Artificial
  Synthetic oligonucleotide
ggagtataatctactttttaagaattgtcaagactacgctcacggtctctattacta

SEQ ID NO: 420856 - DNA, 58 bp, Artificial
  Synthetic oligonucleotide
ggagtataatgcaaataactttaagagctttgtatgacgaatacgaacattatagaaa

SEQ ID NO: 420857 - DNA, 52 bp, Artificial
  Synthetic oligonucleotide
ggagtatataggacgatgtacttacgatactttcaacggattcgcttctggc

SEQ ID NO: 420858 - DNA, 60 bp, Artificial
  Synthetic oligonucleotide
ggagtatatcctggtgggccgaagcacctcagcccctaagttatgcatcagtaccggcca

SEQ ID NO: 420859 - DNA, 60 bp, Artificial
  Synthetic oligonucleotide
ggagtatcgacaggaacagcagagtgctgtggatgttgacgatggtcattttgtcaacat

SEQ ID NO: 420860 - DNA, 55 bp, Artificial
  Synthetic oligonucleotide
ggagtatcgacgtatgggaggaacccgtacaagtgtattcccagttggtggatta

SEQ ID NO: 420861 - DNA, 54 bp, Artificial
  Synthetic oligonucleotide
ggagtatctaccataacgggagccgtatcttctgcgagaggagtaccatgatgt

SEQ ID NO: 420862 - DNA, 60 bp, Artificial
  Synthetic oligonucleotide
ggagtatgaagtgcctaggttccacacatggaccatgttgagggagtactattttatgca

SEQ ID NO: 420863 - DNA, 60 bp, Artificial
  Synthetic oligonucleotide
ggagtatgacgctgttgcaactacacactcctggattcccaagaggaaccgctctatact

SEQ ID NO: 420864 - DNA, 60 bp, Artificial
  Synthetic oligonucleotide
ggagtatgagatggctgacacacaaaagcaattcttaccctgttcaagacgcccaatata

SEQ ID NO: 420865 - DNA, 60 bp, Artificial
  Synthetic oligonucleotide
ggagtatgaggtggctgactcacaagaacagtgcttaccctgttcaggacgcccaataca

SEQ ID NO: 420866 - DNA, 60 bp, Artificial
  Synthetic oligonucleotide
ggagtatgatctgtaaataacactgaggaaattcccgaatgctatgacgtcatcgcgtcg

SEQ ID NO: 420867 - DNA, 52 bp, Artificial
  Synthetic oligonucleotide
ggagtatggcctcactatctcacagcacaggatgccaccgcaatagacaaac

SEQ ID NO: 420868 - DNA, 58 bp, Artificial
  Synthetic oligonucleotide
ggagtatggcttcgctgaccaagtgtttgaggacactgtgatgccagctatcgacaac

SEQ ID NO: 420869 - DNA, 55 bp, Artificial
  Synthetic oligonucleotide
ggagtatggtaactgtgatgtctcatgtcagaccccagtgggtactatcaatacc

SEQ ID NO: 420870 - DNA, 60 bp, Artificial
  Synthetic oligonucleotide
ggagtatgttcaacgacattcattgtagcaattacttcccaataagctcttgtgtctgtc

SEQ ID NO: 420871 - DNA, 57 bp, Artificial
  Synthetic oligonucleotide
ggagtattctctcaatcggcttgtaacgagcccgacttcgagtttaacgacatattg

SEQ ID NO: 420872 - DNA, 58 bp, Artificial
  Synthetic oligonucleotide
ggagtattggagtacaatttatactaaaacctcagatagcgcttggagacacttggcg

SEQ ID NO: 420873 - DNA, 55 bp, Artificial
  Synthetic oligonucleotide
ggagtattgggatacagctaggccctgtgtctcagatagcccagagaaaggctcc

SEQ ID NO: 420874 - DNA, 60 bp, Artificial
  Synthetic oligonucleotide
ggagtatttacacgttgttgaggtgtgtgccgtgggctgtgggagagcatggagagctcg

SEQ ID NO: 420875 - DNA, 54 bp, Artificial
  Synthetic oligonucleotide
ggagtatttggatgggttttccgcagttatgttgtccgcgggcgtgaaaggtag

SEQ ID NO: 420876 - DNA, 58 bp, Artificial
  Synthetic oligonucleotide
ggagtcaaaggattctcatacctagatggaggtaatacttggctagggagaacaataa

SEQ ID NO: 420877 - DNA, 55 bp, Artificial
  Synthetic oligonucleotide
ggagtcaacggagtcactgaagtaaacgaggtgacatcagcgggaaagctatggg

SEQ ID NO: 420878 - DNA, 59 bp, Artificial
  Synthetic oligonucleotide
ggagtcaatgctgtagcatactaccggggtctcgacgtgtccgtcataccaacaagcgg

SEQ ID NO: 420879 - DNA, 60 bp, Artificial
  Synthetic oligonucleotide
ggagtcaattagaactgagtgatcctgaagacgaggcagacaatggaggcactcaacgat

SEQ ID NO: 420880 - DNA, 57 bp, Artificial
  Synthetic oligonucleotide
ggagtcaatttaccaatgttgtgacttggcccccgaagccagacaggctataaggtc

SEQ ID NO: 420881 - DNA, 56 bp, Artificial
  Synthetic oligonucleotide
ggagtcacaccttacagtgtgcaacaactgtgccgcactcttggaaatctgtccaa

SEQ ID NO: 420882 - DNA, 60 bp, Artificial
  Synthetic oligonucleotide
ggagtcacactatagttatgacagatgctagacaaaataatttctaccggacaatacaac

SEQ ID NO: 420883 - DNA, 55 bp, Artificial
  Synthetic oligonucleotide
ggagtcacactggatatagatgtcgtagtggattttggagtgaaggtcgttgctg

SEQ ID NO: 420884 - DNA, 55 bp, Artificial
  Synthetic oligonucleotide
ggagtcacagtcccaagtccagtggaagtgttttcaacgataagagaatcatggc

SEQ ID NO: 420885 - DNA, 60 bp, Artificial
  Synthetic oligonucleotide
ggagtcacatactcaatcactccgctggacttgccagccataatccaaagactccatggc

SEQ ID NO: 420886 - DNA, 55 bp, Artificial
  Synthetic oligonucleotide
ggagtcacattggatattgaagttgtcgtggatttcggtacaaaggttgttcctt

SEQ ID NO: 420887 - DNA, 55 bp, Artificial
  Synthetic oligonucleotide
ggagtcactggatctcaacaacagatggccaatgcggtttaccattagtcgatat

SEQ ID NO: 420888 - DNA, 57 bp, Artificial
  Synthetic oligonucleotide
ggagtcagatcaatggataacttcctttacatggaatggaaaatcttatgtttggac

SEQ ID NO: 420889 - DNA, 55 bp, Artificial
  Synthetic oligonucleotide
ggagtcagctttatagacctaacagaaccatgggtagaaggttggggaaatgctt

SEQ ID NO: 420890 - DNA, 55 bp, Artificial
  Synthetic oligonucleotide
ggagtcagttataacgaactcaccagacaattcaaaagtaataagacatgctgca

SEQ ID NO: 420891 - DNA, 60 bp, Artificial
  Synthetic oligonucleotide
ggagtcagttgatctcatttttaaccaggatattgcagacttagcccaagcagctccaaa

SEQ ID NO: 420892 - DNA, 55 bp, Artificial
  Synthetic oligonucleotide
ggagtcatagtgctgtctgaggaggcaaaattgtgttcagatgcccacatcatgg

SEQ ID NO: 420893 - DNA, 55 bp, Artificial
  Synthetic oligonucleotide
ggagtcatggttcaggcggattcaggatgtgtgattaattggaagggtagagaac

SEQ ID NO: 420894 - DNA, 55 bp, Artificial
  Synthetic oligonucleotide
ggagtccaaattgcttcaaacgaaaacatggaaacaatggactctagcactctcg

SEQ ID NO: 420895 - DNA, 60 bp, Artificial
  Synthetic oligonucleotide
ggagtccagatctgatcaacgcatgactaaagatgttgctgaagactcgtctagatcact

SEQ ID NO: 420896 - DNA, 55 bp, Artificial
  Synthetic oligonucleotide
ggagtcccacacccttcacatatgacccactccgagccaaggcttttggttcaga

SEQ ID NO: 420897 - DNA, 55 bp, Artificial
  Synthetic oligonucleotide
ggagtccccgtgactcgtataatggctcaatctacggatgatgccatctctttgt

SEQ ID NO: 420898 - DNA, 54 bp, Artificial
  Synthetic oligonucleotide
ggagtcccctggaacaaccctcggatttcaggcccgaagggagaacgagcagcg

SEQ ID NO: 420899 - DNA, 55 bp, Artificial
  Synthetic oligonucleotide
ggagtccccttcctttcatgccaacgtgggtacaagggcatctggcggggagacg

SEQ ID NO: 420900 - DNA, 54 bp, Artificial
  Synthetic oligonucleotide
ggagtcccctttatctcatgtcaacgcgggtacaagggggtctggcggggagac

SEQ ID NO: 420901 - DNA, 54 bp, Artificial
  Synthetic oligonucleotide
ggagtccctttatatgtcttaacccaatcgtcgtagtagtccgcaaaaatagga

SEQ ID NO: 420902 - DNA, 57 bp, Artificial
  Synthetic oligonucleotide
ggagtccgcgaaatgagttaaacgcaatttttgatgtccgccttcattcagcgcctt

SEQ ID NO: 420903 - DNA, 53 bp, Artificial
  Synthetic oligonucleotide
ggagtccgcgaaatgagttaaccgcaaattttgaagtccgcctacgtttggtc

SEQ ID NO: 420904 - DNA, 55 bp, Artificial
  Synthetic oligonucleotide
ggagtccgtatggtcctcgtgtaacaccatatgttaatcgtaagaccgcggttaa

SEQ ID NO: 420905 - DNA, 55 bp, Artificial
  Synthetic oligonucleotide
ggagtccgttgccttcagtaacataaggaaaccttataattgccaacacactttg

SEQ ID NO: 420906 - DNA, 55 bp, Artificial
  Synthetic oligonucleotide
ggagtcctatttgcgcacacatggacccaagtatgacaagtttaacgaactgtca

SEQ ID NO: 420907 - DNA, 60 bp, Artificial
  Synthetic oligonucleotide
ggagtcctcaggctcaaggcataacaacaaaggtgctagcagttcctcctcccgcgtcca

SEQ ID NO: 420908 - DNA, 55 bp, Artificial
  Synthetic oligonucleotide
ggagtcctcttctattattcttgcaagaaagacacgtgagtgtttatcctccgtg

SEQ ID NO: 420909 - DNA, 55 bp, Artificial
  Synthetic oligonucleotide
ggagtcctgaagttcgatgtagagtattgaactccttgttaacaggacatggagg

SEQ ID NO: 420910 - DNA, 60 bp, Artificial
  Synthetic oligonucleotide
ggagtcctgcttgaattgtttttgatcagtgggttctctgtagaaatgtatgtactggcc

SEQ ID NO: 420911 - DNA, 55 bp, Artificial
  Synthetic oligonucleotide
ggagtcctggaattcagcaagttcgaagcattcacatcaaatggatggggtgctg

SEQ ID NO: 420912 - DNA, 55 bp, Artificial
  Synthetic oligonucleotide
ggagtccttagaccttcaagaaggacttgaagtggtatccgtcgggatggatgag

SEQ ID NO: 420913 - DNA, 55 bp, Artificial
  Synthetic oligonucleotide
ggagtcgaggaagatgaatttcgcattatgtattgtccagtgtttgagagctgcg

SEQ ID NO: 420914 - DNA, 60 bp, Artificial
  Synthetic oligonucleotide
ggagtcgcaacagggacatcagatgttgaatgtcttcttaggaagacaaccgtgttgagg

SEQ ID NO: 420915 - DNA, 55 bp, Artificial
  Synthetic oligonucleotide
ggagtcgcactcaccttaatccaaagcgacccaggcactggacagtgcttacccg

SEQ ID NO: 420916 - DNA, 55 bp, Artificial
  Synthetic oligonucleotide
ggagtcgcgacttgtcccgcaagacgaacctaccgatatgggtgccgaactctgc

SEQ ID NO: 420917 - DNA, 60 bp, Artificial
  Synthetic oligonucleotide
ggagtcgctgttttattgacccagagcgacaaatcgaggaggaggagagatatcgcgcag

SEQ ID NO: 420918 - DNA, 60 bp, Artificial
  Synthetic oligonucleotide
ggagtcggaatgtgtttgtatcaatggaacttgcacagtagtaatgactgatggaagtgc

SEQ ID NO: 420919 - DNA, 55 bp, Artificial
  Synthetic oligonucleotide
ggagtcgtctgcaagtcgctggaggaggaaccgatcgtcttacactgcttcgaag

SEQ ID NO: 420920 - DNA, 55 bp, Artificial
  Synthetic oligonucleotide
ggagtcgtgactacggtgattgatgatagttcataccccaaggatggtggcagcg

SEQ ID NO: 420921 - DNA, 54 bp, Artificial
  Synthetic oligonucleotide
ggagtcgttggattttgttctcgggccttactacgatctgcggctactattttt

SEQ ID NO: 420922 - DNA, 58 bp, Artificial
  Synthetic oligonucleotide
ggagtcgttttgggaatctgttttgacgcttatcgcagaatacctgtcaatcgggata

SEQ ID NO: 420923 - DNA, 57 bp, Artificial
  Synthetic oligonucleotide
ggagtctagaaaaggtgcagatgcagtaagcagtagtcagtttcttctaaagttttt

SEQ ID NO: 420924 - DNA, 55 bp, Artificial
  Synthetic oligonucleotide
ggagtctagagcacaaggagtggacactattgctagatgttcatgcaagaccggg

SEQ ID NO: 420925 - DNA, 60 bp, Artificial
  Synthetic oligonucleotide
ggagtctatcggcgtctctgctgttacggtgagatcattcatgggcaagcaggcagatac

SEQ ID NO: 420926 - DNA, 56 bp, Artificial
  Synthetic oligonucleotide
ggagtctcttttgtgatcaaatgacaaaggtaagatacattcagcatgaacttaaa

SEQ ID NO: 420927 - DNA, 60 bp, Artificial
  Synthetic oligonucleotide
ggagtctgaagcaatgtatgtagtaaccagttgtgggctgatacaaagcaagctcaacag

SEQ ID NO: 420928 - DNA, 55 bp, Artificial
  Synthetic oligonucleotide
ggagtctgagaccaaagtaattgtgctcgactcctttgaccccatcatccccgag

SEQ ID NO: 420929 - DNA, 60 bp, Artificial
  Synthetic oligonucleotide
ggagtctgatccacgtgcaacgcaactagccatttcttacgttcgctataatggagacag

SEQ ID NO: 420930 - DNA, 55 bp, Artificial
  Synthetic oligonucleotide
ggagtctgatggcccagtcaaatgggaattctttacggaccatggacaggtattc

SEQ ID NO: 420931 - DNA, 51 bp, Artificial
  Synthetic oligonucleotide
ggagtctgccaaccccttctgtggggagagtactctttacacccgtacctg

SEQ ID NO: 420932 - DNA, 53 bp, Artificial
  Synthetic oligonucleotide
ggagtctgcggacgactgcgcctaaccggaacagagggctcctcctgactact

SEQ ID NO: 420933 - DNA, 58 bp, Artificial
  Synthetic oligonucleotide
ggagtcttccacaccatgtggcacgttacaaaaggagccgcactgaggagcggtgagg

SEQ ID NO: 420934 - DNA, 58 bp, Artificial
  Synthetic oligonucleotide
ggagtcttcgagctctcggacgaaaaggcaacgaacccgatcgtgccttcatttgaca

SEQ ID NO: 420935 - DNA, 58 bp, Artificial
  Synthetic oligonucleotide
ggagtcttgacagcgggaagaatgtcggagcttggcgtttgctttggggcaattccag

SEQ ID NO: 420936 - DNA, 55 bp, Artificial
  Synthetic oligonucleotide
ggagtcttgactggcatttcagagacgcaccacctacagacaatgcagggtgcgc

SEQ ID NO: 420937 - DNA, 55 bp, Artificial
  Synthetic oligonucleotide
ggagtcttgagcctctatataaggagctcatatgtatgaagtaagggacatcgag

SEQ ID NO: 420938 - DNA, 55 bp, Artificial
  Synthetic oligonucleotide
ggagtcttgcggtggtgcacgcatctgggctttaggtcgcaacgtgatccgagca

SEQ ID NO: 420939 - DNA, 56 bp, Artificial
  Synthetic oligonucleotide
ggagtctttaacccaacccttgacattgttgtggatcttatgagtttcctatccca

SEQ ID NO: 420940 - DNA, 55 bp, Artificial
  Synthetic oligonucleotide
ggagtgaaacccaaagaggtaaaaatgacaggattaaggcattggtattcgtgta

SEQ ID NO: 420941 - DNA, 54 bp, Artificial
  Synthetic oligonucleotide
ggagtgaacggaaggttgttccgaactccaagtatgcttctggtcgtattcccc

SEQ ID NO: 420942 - DNA, 55 bp, Artificial
  Synthetic oligonucleotide
ggagtgaagagttttacgctagcctctatgaaaagtccactgtcttgcaagctgc

SEQ ID NO: 420943 - DNA, 59 bp, Artificial
  Synthetic oligonucleotide
ggagtgaagcataatgagcataatcagtaacagaaaagtagatatgaatgaaacgcaag

SEQ ID NO: 420944 - DNA, 60 bp, Artificial
  Synthetic oligonucleotide
ggagtgaagcgtgattatgaggtcacagatgatgagatgagcattattatgaacggtctt

SEQ ID NO: 420945 - DNA, 55 bp, Artificial
  Synthetic oligonucleotide
ggagtgaagggatttggattcagacaaggcaatagtgtatgggcagggagaacag

SEQ ID NO: 420946 - DNA, 57 bp, Artificial
  Synthetic oligonucleotide
ggagtgaagggatttggtttcaaagccggcaacgatgtatggttgggcaggacagtg

SEQ ID NO: 420947 - DNA, 60 bp, Artificial
  Synthetic oligonucleotide
ggagtgaagtggttcttcagcaatgctcaacataacgtgagattcttaaccaatcaggct

SEQ ID NO: 420948 - DNA, 60 bp, Artificial
  Synthetic oligonucleotide
ggagtgaatgatgtgcacaacaaataagatgtgactaagggagtgagttgtgcagtaagg

SEQ ID NO: 420949 - DNA, 55 bp, Artificial
  Synthetic oligonucleotide
ggagtgacacagcataaccgtgctgcatttatcaacatgctcaacattgagactg

SEQ ID NO: 420950 - DNA, 57 bp, Artificial
  Synthetic oligonucleotide
ggagtgacattgttcttcctatcaggaaggggcctagggaaaacatctattggccta

SEQ ID NO: 420951 - DNA, 55 bp, Artificial
  Synthetic oligonucleotide
ggagtgaccggaaacggtcatgaccgaaaacggtgtatataaagctgaacacagc

SEQ ID NO: 420952 - DNA, 60 bp, Artificial
  Synthetic oligonucleotide
ggagtgaccgtattgagcagtggctaagtgaaccttgtaagctactcccagatacagcag

SEQ ID NO: 420953 - DNA, 54 bp, Artificial
  Synthetic oligonucleotide
ggagtgactctaattgtctccagcatgttgccaccgtcaagtatagaggcacca

SEQ ID NO: 420954 - DNA, 60 bp, Artificial
  Synthetic oligonucleotide
ggagtgagagccattcgccacactgaccatgggtcagatagtgacaatgttcgaggctct

SEQ ID NO: 420955 - DNA, 55 bp, Artificial
  Synthetic oligonucleotide
ggagtgagggtacattggctactcacaatgatttaaattcatggatactaagacc

SEQ ID NO: 420956 - DNA, 60 bp, Artificial
  Synthetic oligonucleotide
ggagtgatgcctcttgagcatgctacggcaatgatatttgacaaaatcaaggcaagtatg

SEQ ID NO: 420957 - DNA, 55 bp, Artificial
  Synthetic oligonucleotide
ggagtgatggcattgtctattatgaagcgatgtggtcatccaacatgtaatgtat

SEQ ID NO: 420958 - DNA, 50 bp, Artificial
  Synthetic oligonucleotide
ggagtgatgtagacctaaagcaataatggagccatgacgtaagggcttac

SEQ ID NO: 420959 - DNA, 55 bp, Artificial
  Synthetic oligonucleotide
ggagtgattggaataataacagcaggtggggaagggcatgtggcattcatcgatc

SEQ ID NO: 420960 - DNA, 50 bp, Artificial
  Synthetic oligonucleotide
ggagtgatttaggcatcatatagattgctagataaacattattgtaaaga

SEQ ID NO: 420961 - DNA, 56 bp, Artificial
  Synthetic oligonucleotide
ggagtgcaatctttttcaccacaagtctctttttacatctggttgggttcccaaca

SEQ ID NO: 420962 - DNA, 50 bp, Artificial
  Synthetic oligonucleotide
ggagtgcaatctttttcaccacaagtctgtttctacacctagttggattc

SEQ ID NO: 420963 - DNA, 55 bp, Artificial
  Synthetic oligonucleotide
ggagtgcattccgcaaacctgttgcagtcggattcgatatgaaacggttcgacca

SEQ ID NO: 420964 - DNA, 60 bp, Artificial
  Synthetic oligonucleotide
ggagtgccaaaaattactacaggctcgaggacacaccaatagtcctctaggagatatgct

SEQ ID NO: 420965 - DNA, 60 bp, Artificial
  Synthetic oligonucleotide
ggagtgccatcggtagaatctattgcgtgcagtgtgccgtaagcccgaggtgcaattact

SEQ ID NO: 420966 - DNA, 55 bp, Artificial
  Synthetic oligonucleotide
ggagtgcccttttgtcatctacatgtaccctgtgtgttctgtgggatacccttag

SEQ ID NO: 420967 - DNA, 55 bp, Artificial
  Synthetic oligonucleotide
ggagtgcctaaccccgtacgcgttagccccgaatgcagtcatcccgacgtccttg

SEQ ID NO: 420968 - DNA, 60 bp, Artificial
  Synthetic oligonucleotide
ggagtgccttctgtatcatagagaggtactcttgctttgaggtggagtgttcgatgatat

SEQ ID NO: 420969 - DNA, 55 bp, Artificial
  Synthetic oligonucleotide
ggagtgcgggttcagcgacagggtgcgctctatcacgctaggcaattctaccata

SEQ ID NO: 420970 - DNA, 52 bp, Artificial
  Synthetic oligonucleotide
ggagtgctacagcctcctgttccgggagcacgcacgcaaccagtcacgcagc

SEQ ID NO: 420971 - DNA, 59 bp, Artificial
  Synthetic oligonucleotide
ggagtgctatgaaagactttcatggcaaagagcccttgactaccctggtcaagaccgcc

SEQ ID NO: 420972 - DNA, 54 bp, Artificial
  Synthetic oligonucleotide
ggagtgctggatcgcggtcccagttttaagccctactcgggtaccgcgtacaat

SEQ ID NO: 420973 - DNA, 51 bp, Artificial
  Synthetic oligonucleotide
ggagtgctggcggtctactgcctggtctccttgatcgcgcgaggggcaggt

SEQ ID NO: 420974 - DNA, 55 bp, Artificial
  Synthetic oligonucleotide
ggagtgctgttaaacgcaatgattttaagcgtggttacagacaagtgggcaagac

SEQ ID NO: 420975 - DNA, 55 bp, Artificial
  Synthetic oligonucleotide
ggagtgcttgtgggagggtggtttgtgtataagcatttctcccgcagagaggaag

SEQ ID NO: 420976 - DNA, 50 bp, Artificial
  Synthetic oligonucleotide
ggagtggaaaatgactctacagctgccatgcaagatagtgcaaactctga

SEQ ID NO: 420977 - DNA, 54 bp, Artificial
  Synthetic oligonucleotide
ggagtggaacagtcctttggagtaccgtacaacccacaaagtcagggagtagta

SEQ ID NO: 420978 - DNA, 55 bp, Artificial
  Synthetic oligonucleotide
ggagtggaaccagagaattacacaaccatcagatttgtggatccactgaccggct

SEQ ID NO: 420979 - DNA, 60 bp, Artificial
  Synthetic oligonucleotide
ggagtggaacgccttatatgtgtttagggttagtacattttgcgcatgcattcgaatgtg

SEQ ID NO: 420980 - DNA, 53 bp, Artificial
  Synthetic oligonucleotide
ggagtggaactctctagggattggaggcaaaagaaccggaaccttacccagta

SEQ ID NO: 420981 - DNA, 55 bp, Artificial
  Synthetic oligonucleotide
ggagtggaagaaggttccattggaaaggtctgcaggactttattagcaaagtcgg

SEQ ID NO: 420982 - DNA, 55 bp, Artificial
  Synthetic oligonucleotide
ggagtggaagaaggttccattgggaaggtctgtaggacattgttggcaaagtcgg

SEQ ID NO: 420983 - DNA, 55 bp, Artificial
  Synthetic oligonucleotide
ggagtggaagaatctcgctgatggaggagttggatccattaagaagggtgccctg

SEQ ID NO: 420984 - DNA, 55 bp, Artificial
  Synthetic oligonucleotide
ggagtggaagtcgttaatgcaactgaaacggtggaacgaacaaatgtccccagga

SEQ ID NO: 420985 - DNA, 58 bp, Artificial
  Synthetic oligonucleotide
ggagtggacataccctcgtttatcttgccagggctcaacctttcagaaagcgctccta

SEQ ID NO: 420986 - DNA, 60 bp, Artificial
  Synthetic oligonucleotide
ggagtggacgaatattctagcactgaaagagtggtcgtgagcattgatcgtttcttaagg

SEQ ID NO: 420987 - DNA, 55 bp, Artificial
  Synthetic oligonucleotide
ggagtggagataatgactcgcccaaattttctcacgaacgacgcgcaatcgagtg

SEQ ID NO: 420988 - DNA, 55 bp, Artificial
  Synthetic oligonucleotide
ggagtggaggtagctagatactccaatgatgtggttacaacgttggttggaccta

SEQ ID NO: 420989 - DNA, 55 bp, Artificial
  Synthetic oligonucleotide
ggagtggcaacgaagcaaggagccaaaggccatacaaagcgcaattatagcagca

SEQ ID NO: 420990 - DNA, 60 bp, Artificial
  Synthetic oligonucleotide
ggagtggccaagggaagtcgagccatctggtacatgtggctgggaagccgctttctggag

SEQ ID NO: 420991 - DNA, 55 bp, Artificial
  Synthetic oligonucleotide
ggagtggctctaaagagaagctgctggatgatcacactccttattctgctgactg

SEQ ID NO: 420992 - DNA, 55 bp, Artificial
  Synthetic oligonucleotide
ggagtgggaccatcggcactacatgaacgggagcgacagcgtcctgatcatcacc

SEQ ID NO: 420993 - DNA, 53 bp, Artificial
  Synthetic oligonucleotide
ggagtgggagcatttggaccagggttcacccctccacacggaggtgttttggg

SEQ ID NO: 420994 - DNA, 58 bp, Artificial
  Synthetic oligonucleotide
ggagtgggagcgttggtagtagcaataatcttagtaatagttgtgtggaccatagtat

SEQ ID NO: 420995 - DNA, 55 bp, Artificial
  Synthetic oligonucleotide
ggagtgggaggaggacttgcagtatctgggagcctgtgctctgaccccgccgtta

SEQ ID NO: 420996 - DNA, 58 bp, Artificial
  Synthetic oligonucleotide
ggagtgggattgattggtgagtgtcgagcttttctagattccataactagtaccttaa

SEQ ID NO: 420997 - DNA, 55 bp, Artificial
  Synthetic oligonucleotide
ggagtggggaataataccaggatggctgatgtatacagatggcccagggactcgg

SEQ ID NO: 420998 - DNA, 57 bp, Artificial
  Synthetic oligonucleotide
ggagtgggtatacagtgcatgtgcagtgtaatgctactaaatttcatcaaggcacac

SEQ ID NO: 420999 - DNA, 55 bp, Artificial
  Synthetic oligonucleotide
ggagtgggttacaggaaccgcctttccactctgaagtgaacccgacaccagatag

SEQ ID NO: 421000 - DNA, 51 bp, Artificial
  Synthetic oligonucleotide
ggagtggtacactattatcccggtaattttgtacgccagttttataacccc

SEQ ID NO: 421001 - DNA, 55 bp, Artificial
  Synthetic oligonucleotide
ggagtggtcattaccgcctaccacaaagatcgtggccttggtcatcgcacgattg

SEQ ID NO: 421002 - DNA, 55 bp, Artificial
  Synthetic oligonucleotide
ggagtggtctccgtatgggaggcctcaagactcgccttatcactcgaattgcaac

SEQ ID NO: 421003 - DNA, 60 bp, Artificial
  Synthetic oligonucleotide
ggagtggtctgggcgggacttgggagtggtcaaccctcagatgctgcatataagcagctg

SEQ ID NO: 421004 - DNA, 59 bp, Artificial
  Synthetic oligonucleotide
ggagtggtgatcggtagatccgtctggcgtggaagttttgacagcgaacctgtgtccta

SEQ ID NO: 421005 - DNA, 60 bp, Artificial
  Synthetic oligonucleotide
ggagtggtggaaacattaatccacagagggcctccgcaggccaaatcagtgtgcaaccta

SEQ ID NO: 421006 - DNA, 55 bp, Artificial
  Synthetic oligonucleotide
ggagtggtggtcgagtatcaacctgaaggatcagtcgactacaagagaggagtgg

SEQ ID NO: 421007 - DNA, 55 bp, Artificial
  Synthetic oligonucleotide
ggagtggttcagccgtcattgatccattaagattgttggactcaagtagaactgg

SEQ ID NO: 421008 - DNA, 50 bp, Artificial
  Synthetic oligonucleotide
ggagtggttctgcggtataaagctcagtcggttatttcggaattctcgac

SEQ ID NO: 421009 - DNA, 54 bp, Artificial
  Synthetic oligonucleotide
ggagtggtttgaagaatttcggctaaaggctcaagaattgatattggtaaattt

SEQ ID NO: 421010 - DNA, 55 bp, Artificial
  Synthetic oligonucleotide
ggagtgtacaaaccagatgtcatgtatactatcctatctgaggacccgtacgcgc

SEQ ID NO: 421011 - DNA, 55 bp, Artificial
  Synthetic oligonucleotide
ggagtgtacgccatgcggcagacaaagcgctagagaataacgcgtatatctttac

SEQ ID NO: 421012 - DNA, 55 bp, Artificial
  Synthetic oligonucleotide
ggagtgtactttagaggcacctacgtgtgttctggttggataatgaccgtagctc

SEQ ID NO: 421013 - DNA, 52 bp, Artificial
  Synthetic oligonucleotide
ggagtgtatattatacaattaggcaactagttcatgatctcatgttccctct

SEQ ID NO: 421014 - DNA, 55 bp, Artificial
  Synthetic oligonucleotide
ggagtgtatgatcacgtctgtgtcgttcctacacatgctcaacccagcgagagtg

SEQ ID NO: 421015 - DNA, 55 bp, Artificial
  Synthetic oligonucleotide
ggagtgtatgtaatagggtttacactgcctattattttgaaggccctttacatgc

SEQ ID NO: 421016 - DNA, 54 bp, Artificial
  Synthetic oligonucleotide
ggagtgtccgacgacgggattaaacaaacgggcgaggctaagacggatgcgcta

SEQ ID NO: 421017 - DNA, 55 bp, Artificial
  Synthetic oligonucleotide
ggagtgtccgctcgtcaagcctcgcgcaatctgcgtgacaacgtgcccgttatag

SEQ ID NO: 421018 - DNA, 59 bp, Artificial
  Synthetic oligonucleotide
ggagtgtcgatctggatggaagctccgaatcggtttctcggtatgaagtcaccgagggc

SEQ ID NO: 421019 - DNA, 55 bp, Artificial
  Synthetic oligonucleotide
ggagtgtcgccagagtgcagcgatgaaacgggtattggcggtatatggagttaaa

SEQ ID NO: 421020 - DNA, 59 bp, Artificial
  Synthetic oligonucleotide
ggagtgtctggaaaattatgcaattgaggtttcttatgcctacagtttaagtgagaggc

SEQ ID NO: 421021 - DNA, 53 bp, Artificial
  Synthetic oligonucleotide
ggagtgtgataaagctgcttcagtgttaaaacgaaagtatgctaaaagcccaa

SEQ ID NO: 421022 - DNA, 55 bp, Artificial
  Synthetic oligonucleotide
ggagtgtgattcaaagcgcaccatatatttcaggagagtgattgttgtgtaggtc

SEQ ID NO: 421023 - DNA, 60 bp, Artificial
  Synthetic oligonucleotide
ggagtgtgccgatcggaagagccttgttgctccctgagtactctacactgtaccgccgat

SEQ ID NO: 421024 - DNA, 60 bp, Artificial
  Synthetic oligonucleotide
ggagtgtgcggggtcagatccgtcactagattggaacaccagatgtgggaatctgtgcgg

SEQ ID NO: 421025 - DNA, 55 bp, Artificial
  Synthetic oligonucleotide
ggagtgtgcgtctcagtgttccatctctcgagacacctgaagatacattcgctcc

SEQ ID NO: 421026 - DNA, 58 bp, Artificial
  Synthetic oligonucleotide
ggagtgtgtttgcagagacaactggactggaactaacaggccggtattggtaatatcc

SEQ ID NO: 421027 - DNA, 55 bp, Artificial
  Synthetic oligonucleotide
ggagtgttcctagaaaggcgcgggtcggtaccagacagcgtgaggaacgggagtg

SEQ ID NO: 421028 - DNA, 55 bp, Artificial
  Synthetic oligonucleotide
ggagtgttcctgttaccctcgatatcctgacgtaagatgtatctgcagagacaac

SEQ ID NO: 421029 - DNA, 60 bp, Artificial
  Synthetic oligonucleotide
ggagtgttcctgttatcctgatgctggcgaggtgatgtgtgtatgcagagacaattggca

SEQ ID NO: 421030 - DNA, 55 bp, Artificial
  Synthetic oligonucleotide
ggagtgttctgaccttcccatcattatcttgtgttaacgcgtggggatgggcacc

SEQ ID NO: 421031 - DNA, 56 bp, Artificial
  Synthetic oligonucleotide
ggagttaaactcgtccagatccggaaggttagccaacatttgtgaagtcccagtgc

SEQ ID NO: 421032 - DNA, 58 bp, Artificial
  Synthetic oligonucleotide
ggagttaagggttttggattcagacaaggcaacgatgtatggatgggaagaaccatca

SEQ ID NO: 421033 - DNA, 57 bp, Artificial
  Synthetic oligonucleotide
ggagttaagtcgggctcagtccctgaacgcccaattggaggcggatgtcaaatcggc

SEQ ID NO: 421034 - DNA, 55 bp, Artificial
  Synthetic oligonucleotide
ggagttaataagagggaggccacaggaaactagagtatggtggacatcaaacagt

SEQ ID NO: 421035 - DNA, 55 bp, Artificial
  Synthetic oligonucleotide
ggagttaatacgtacagctaacatagctccataccccttacacatggctcacctc

SEQ ID NO: 421036 - DNA, 60 bp, Artificial
  Synthetic oligonucleotide
ggagttaatcagacgtacgctcgagaccgtgtgtgcaggcaataatatatacgtactgac

SEQ ID NO: 421037 - DNA, 57 bp, Artificial
  Synthetic oligonucleotide
ggagttacaggatttttatatccccgagcttgtgttccttacccattcatggtgata

SEQ ID NO: 421038 - DNA, 55 bp, Artificial
  Synthetic oligonucleotide
ggagttacctccactgctttgcatttgtggtctgtgcattggtgtaagcacaatg

SEQ ID NO: 421039 - DNA, 49 bp, Artificial
  Synthetic oligonucleotide
ggagttacgaaaacccggacgtcgaaaaactgtcgtgggttgaccccga

SEQ ID NO: 421040 - DNA, 59 bp, Artificial
  Synthetic oligonucleotide
ggagttactttatccacacaattcactgacttcgtatcattgaattcactgcgatttag

SEQ ID NO: 421041 - DNA, 55 bp, Artificial
  Synthetic oligonucleotide
ggagttagaggaggccgaagcgaggaggaaagcaaagaaagcaacggggctagcc

SEQ ID NO: 421042 - DNA, 55 bp, Artificial
  Synthetic oligonucleotide
ggagttagcgtgggctatcataggtatggtaggggcatctatacggccagacgct

SEQ ID NO: 421043 - DNA, 58 bp, Artificial
  Synthetic oligonucleotide
ggagttatataatggaagaaggttatcatatacaagatgttctaaataaccaagtagc

SEQ ID NO: 421044 - DNA, 55 bp, Artificial
  Synthetic oligonucleotide
ggagttatcaatttctacgacagtctaaaggagtgttcaacgtagtttgcatatc

SEQ ID NO: 421045 - DNA, 57 bp, Artificial
  Synthetic oligonucleotide
ggagttatgaggtattccccatttcgattgagcacctttataaggtctactcttatc

SEQ ID NO: 421046 - DNA, 54 bp, Artificial
  Synthetic oligonucleotide
ggagttatggaaagcgcgtgcctcctttatgaggcttgtgtgccgcaacaatta

SEQ ID NO: 421047 - DNA, 55 bp, Artificial
  Synthetic oligonucleotide
ggagttatggagatgactccggacaccaaccaaaccgagcagccgtgcccttcgc

SEQ ID NO: 421048 - DNA, 53 bp, Artificial
  Synthetic oligonucleotide
ggagttattaagtttgacgtaagtttacacttcgccataccattagtaactag

SEQ ID NO: 421049 - DNA, 60 bp, Artificial
  Synthetic oligonucleotide
ggagttatttggaccttattctgctgcatatgcgaatatccacctcttggattctcaaaa

SEQ ID NO: 421050 - DNA, 55 bp, Artificial
  Synthetic oligonucleotide
ggagttcaattacatatagagattgaagagcaaggaattggtgcagatgtccatc

SEQ ID NO: 421051 - DNA, 55 bp, Artificial
  Synthetic oligonucleotide
ggagttcacaatgctaggggttcatgataatgtagctatcctgccaactcacgcc

SEQ ID NO: 421052 - DNA, 59 bp, Artificial
  Synthetic oligonucleotide
ggagttcaccagcaagaggatcattataacgagcaataaggcccccgagacctggtaca

SEQ ID NO: 421053 - DNA, 55 bp, Artificial
  Synthetic oligonucleotide
ggagttcacgtttgcagaccagtgtacgatattaaagacgcccaccgtagagtcg

SEQ ID NO: 421054 - DNA, 55 bp, Artificial
  Synthetic oligonucleotide
ggagttcagattgcttcaaatgagaacgtggaggcaatggactccagcactcttg

SEQ ID NO: 421055 - DNA, 55 bp, Artificial
  Synthetic oligonucleotide
ggagttcagttgaacacaagggcaacaagatcttagtttcaggcagatcagagtc

SEQ ID NO: 421056 - DNA, 59 bp, Artificial
  Synthetic oligonucleotide
ggagttccatcttcgtgaagctccctgcacaccctgatgaatagcttatttgttggggt

SEQ ID NO: 421057 - DNA, 55 bp, Artificial
  Synthetic oligonucleotide
ggagttccatgcgtaggtacttgcgtgactacaattatcagcttgacatgtggga

SEQ ID NO: 421058 - DNA, 55 bp, Artificial
  Synthetic oligonucleotide
ggagttcccctccttgctattgggtgttactcacaagtcaaccctataaccctca

SEQ ID NO: 421059 - DNA, 55 bp, Artificial
  Synthetic oligonucleotide
ggagttccctaaccgcagctatgtacagaggttcatatttggccaagagagtgcg

SEQ ID NO: 421060 - DNA, 55 bp, Artificial
  Synthetic oligonucleotide
ggagttccctctgatgtaattaattcctgggccggagatattctaagaactcagg

SEQ ID NO: 421061 - DNA, 56 bp, Artificial
  Synthetic oligonucleotide
ggagttcgagcatttgctctttgggtattgggcattttggataagtaaggaagatg

SEQ ID NO: 421062 - DNA, 50 bp, Artificial
  Synthetic oligonucleotide
ggagttcgcgattatgtcgtccaagctctaccgatgcggaaaccaaagcc

SEQ ID NO: 421063 - DNA, 55 bp, Artificial
  Synthetic oligonucleotide
ggagttctgtgacatgttgaggctatttgactacaacaaagcaagtattgccaag

SEQ ID NO: 421064 - DNA, 56 bp, Artificial
  Synthetic oligonucleotide
ggagttcttgatcttaaggtaatgtgggatttggaaggcgagtttggaaagagctc

SEQ ID NO: 421065 - DNA, 52 bp, Artificial
  Synthetic oligonucleotide
ggagttctttaactccgtcaacgagtcgattaagaccgagtaaattaaatgt

SEQ ID NO: 421066 - DNA, 55 bp, Artificial
  Synthetic oligonucleotide
ggagttctttggtgaacccctaaccagcatagctatccacagggctggtgagttc

SEQ ID NO: 421067 - DNA, 57 bp, Artificial
  Synthetic oligonucleotide
ggagttcttttcttcgtctagaaactccgtatatgaagacgttggtcctggattgca

SEQ ID NO: 421068 - DNA, 55 bp, Artificial
  Synthetic oligonucleotide
ggagttgaaccagagaactatagcatgataaggttcgttgatcctttaactggcc

SEQ ID NO: 421069 - DNA, 60 bp, Artificial
  Synthetic oligonucleotide
ggagttgaacccattgacaacataatgggaatgatcgggatattacctgacatgacccca

SEQ ID NO: 421070 - DNA, 51 bp, Artificial
  Synthetic oligonucleotide
ggagttgaatcgtgtgcgtaccgtagattcgtatctcatgcacgattgtgg

SEQ ID NO: 421071 - DNA, 60 bp, Artificial
  Synthetic oligonucleotide
ggagttgacaattagagtttggtctgagctaaatattggaactggcacctctgcttacac

SEQ ID NO: 421072 - DNA, 55 bp, Artificial
  Synthetic oligonucleotide
ggagttgactaggggcgacatgaaagtctgcagatatcgttgattatccggccag

SEQ ID NO: 421073 - DNA, 50 bp, Artificial
  Synthetic oligonucleotide
ggagttgagaccagatggaatttcccatgagtgtacaagaggggtctcag

SEQ ID NO: 421074 - DNA, 55 bp, Artificial
  Synthetic oligonucleotide
ggagttgaggtgggtcgtggccagcctctgggtgtagggatatccggtcaccctt

SEQ ID NO: 421075 - DNA, 57 bp, Artificial
  Synthetic oligonucleotide
ggagttgagtacctcttgcgggtatccgtacaacaagttgggtatgggcactagcaa

SEQ ID NO: 421076 - DNA, 55 bp, Artificial
  Synthetic oligonucleotide
ggagttgataagaggaaggccgcaggagactaacgtatggtggacctcaaacagt

SEQ ID NO: 421077 - DNA, 55 bp, Artificial
  Synthetic oligonucleotide
ggagttgatggacttgaacccctagacataacaaccagtgcaggttatccatatg

SEQ ID NO: 421078 - DNA, 59 bp, Artificial
  Synthetic oligonucleotide
ggagttgcactcttcacaggtcaaatattgaaaggccagattatagtggattttaccaa

SEQ ID NO: 421079 - DNA, 54 bp, Artificial
  Synthetic oligonucleotide
ggagttgcgagcaaaggagaaggtggacctaaacaaaacgcgaacctttacagc

SEQ ID NO: 421080 - DNA, 59 bp, Artificial
  Synthetic oligonucleotide
ggagttgcggattgtccatggaatgggaccttcgcctttggagtcgcctgtgacgatgg

SEQ ID NO: 421081 - DNA, 60 bp, Artificial
  Synthetic oligonucleotide
ggagttgcgtgaatcagtcgattggttgatgaggcttggactaaggaagagaatcgagtt

SEQ ID NO: 421082 - DNA, 60 bp, Artificial
  Synthetic oligonucleotide
ggagttgctcatcactgtggtttccaattagcgcaaccaattcgcctaggatccactgtg

SEQ ID NO: 421083 - DNA, 56 bp, Artificial
  Synthetic oligonucleotide
ggagttggaactcgagttctcagataaatacgtaaaggcaatggtgcctgatcaaa

SEQ ID NO: 421084 - DNA, 55 bp, Artificial
  Synthetic oligonucleotide
ggagttggaggatgctttgttagcgtctaacacctctgtgtacaatccacatgca

SEQ ID NO: 421085 - DNA, 59 bp, Artificial
  Synthetic oligonucleotide
ggagttgggacaatggtgatggaactcatcagaatgataaaaagaggggtcaatgaccg

SEQ ID NO: 421086 - DNA, 55 bp, Artificial
  Synthetic oligonucleotide
ggagttgggtatggttctttcattattaccaatgggcacttattcagaaggaaca

SEQ ID NO: 421087 - DNA, 55 bp, Artificial
  Synthetic oligonucleotide
ggagttgggtttagatatctcttctccagatgttatgaagaaagtggcacctatg

SEQ ID NO: 421088 - DNA, 54 bp, Artificial
  Synthetic oligonucleotide
ggagttgggtttctacccaagctcctgttgggcgtagccttggcttggttgggc

SEQ ID NO: 421089 - DNA, 60 bp, Artificial
  Synthetic oligonucleotide
ggagttggtgacgccagctcgagattttggtcactttgggctgtctcattattcgagagc

SEQ ID NO: 421090 - DNA, 59 bp, Artificial
  Synthetic oligonucleotide
ggagttgtatgtaacagacctttgtaagagtctggttagttctgtgctctcaaaggatg

SEQ ID NO: 421091 - DNA, 55 bp, Artificial
  Synthetic oligonucleotide
ggagttgtcaatggaaatagtgcgtctcacgcaaaatcacacaagcactccaatg

SEQ ID NO: 421092 - DNA, 60 bp, Artificial
  Synthetic oligonucleotide
ggagttgtgcctaaattatatctaagtgagattagaggtgggagtcgtagtatgtctcta

SEQ ID NO: 421093 - DNA, 60 bp, Artificial
  Synthetic oligonucleotide
ggagttgttctgaaagaaatggttgatgtggaggctattggaaggcatccaggatggaaa

SEQ ID NO: 421094 - DNA, 52 bp, Artificial
  Synthetic oligonucleotide
ggagtttaaaactggcaattgggctaagaaacgtcccacaagttcaaaatcg

SEQ ID NO: 421095 - DNA, 55 bp, Artificial
  Synthetic oligonucleotide
ggagtttaaaatgctatcaatcgcgattctgtttctgctcatagcagagggctcc

SEQ ID NO: 421096 - DNA, 53 bp, Artificial
  Synthetic oligonucleotide
ggagtttaaggattatcggaacttcttacaggcactttggccggagaccgacg

SEQ ID NO: 421097 - DNA, 60 bp, Artificial
  Synthetic oligonucleotide
ggagtttaatttactggaccagcgaataatatggcagaattggtatgcattcacgtcttc

SEQ ID NO: 421098 - DNA, 60 bp, Artificial
  Synthetic oligonucleotide
ggagtttacacgagcgaacgcagcacatgtagcgaatgagatagcccacggcccacacaa

SEQ ID NO: 421099 - DNA, 55 bp, Artificial
  Synthetic oligonucleotide
ggagtttactggttgttgacaatcccagaagatgaatttgaaccacacctcccac

SEQ ID NO: 421100 - DNA, 54 bp, Artificial
  Synthetic oligonucleotide
ggagtttaggccttacacagccttctcagttcctagtgtaaataacctagggcc

SEQ ID NO: 421101 - DNA, 55 bp, Artificial
  Synthetic oligonucleotide
ggagtttagttttatctattgggcccattaatgtgaaactgagctgtccctttct

SEQ ID NO: 421102 - DNA, 55 bp, Artificial
  Synthetic oligonucleotide
ggagtttatgtgatagggcttacacttcctatcatccttaaagccttatacatgc

SEQ ID NO: 421103 - DNA, 55 bp, Artificial
  Synthetic oligonucleotide
ggagtttcaactagactacttgagattgaaattgactcttgggtgcaggcttggg

SEQ ID NO: 421104 - DNA, 55 bp, Artificial
  Synthetic oligonucleotide
ggagtttcagaaattcattgttgggagcttatacggctggcgtagaggtcaatac

SEQ ID NO: 421105 - DNA, 58 bp, Artificial
  Synthetic oligonucleotide
ggagtttccgtctgtggaagacccggaagcctcagtactggaagcgcaatcgcactac

SEQ ID NO: 421106 - DNA, 59 bp, Artificial
  Synthetic oligonucleotide
ggagtttcgtagattggcattgaagtccattccttggttgaacaccacagatctaccaa

SEQ ID NO: 421107 - DNA, 55 bp, Artificial
  Synthetic oligonucleotide
ggagtttcgtccgtgaccacccggttggcagtcgacagacgcttccggaccacta

SEQ ID NO: 421108 - DNA, 58 bp, Artificial
  Synthetic oligonucleotide
ggagtttcgttttttcaccgccaggtggctaccagcggtggcgctctcgcgcaagcga

SEQ ID NO: 421109 - DNA, 58 bp, Artificial
  Synthetic oligonucleotide
ggagtttctccctgattatttgcaacgcagcttctttagaacctgcgtttaatgcctc

SEQ ID NO: 421110 - DNA, 52 bp, Artificial
  Synthetic oligonucleotide
ggagtttgaagccatctcgttataacagtttgttaagacgtccgtgggtaag

SEQ ID NO: 421111 - DNA, 55 bp, Artificial
  Synthetic oligonucleotide
ggagtttgagaggaagatacgcagcgtgagcgctggacgcgcgctgtacatcccc

SEQ ID NO: 421112 - DNA, 58 bp, Artificial
  Synthetic oligonucleotide
ggagtttgctgcttgcaacagggatgaggaatgtaccggaagtagtgcagggaagggg

SEQ ID NO: 421113 - DNA, 55 bp, Artificial
  Synthetic oligonucleotide
ggagtttggaatcactgtgtagagttaccagcagagcctgattggacaggcgaac

SEQ ID NO: 421114 - DNA, 55 bp, Artificial
  Synthetic oligonucleotide
ggagtttggaggtcagcacggtcgtcttcattggcatgttgtgcatatggtgcgg

SEQ ID NO: 421115 - DNA, 60 bp, Artificial
  Synthetic oligonucleotide
ggagtttggcggggagacggcatcatgcataccacctgcccatgtggagcacagatcacc

SEQ ID NO: 421116 - DNA, 55 bp, Artificial
  Synthetic oligonucleotide
ggagtttggtgcatttactaatctaccacatgtgttaatgaacttggcagagaca

SEQ ID NO: 421117 - DNA, 55 bp, Artificial
  Synthetic oligonucleotide
ggagtttggtgcccgttggctctgccagctgcaccatagctgcactcggttcttc

SEQ ID NO: 421118 - DNA, 56 bp, Artificial
  Synthetic oligonucleotide
ggagttttaacagataaacccgttatagagcaaataatggatatgatggttaacca

SEQ ID NO: 421119 - DNA, 55 bp, Artificial
  Synthetic oligonucleotide
ggagttttccaagaaaacgtgttccacacaatgtggcatgtcaccaggggagctg

SEQ ID NO: 421120 - DNA, 55 bp, Artificial
  Synthetic oligonucleotide
ggagttttccggattatggcaagaggactgttagggaaataccaggctggagtgg

SEQ ID NO: 421121 - DNA, 55 bp, Artificial
  Synthetic oligonucleotide
ggagttttcgatcagttatactgcgtcggccttatccgtgcatagcttggcgggg

SEQ ID NO: 421122 - DNA, 55 bp, Artificial
  Synthetic oligonucleotide
ggagttttcggtcagaatgcacagtttcactacctgtacaggtcagggttctgca

SEQ ID NO: 421123 - DNA, 55 bp, Artificial
  Synthetic oligonucleotide
ggagttttcgttaatctctgcgaggatactagtgctataccacaccagagcgctc

SEQ ID NO: 421124 - DNA, 59 bp, Artificial
  Synthetic oligonucleotide
ggagttttctctcaccgatccaagactcgagccacacaaatgggagaagtactgtgttc

SEQ ID NO: 421125 - DNA, 60 bp, Artificial
  Synthetic oligonucleotide
ggagttttgccgttgcaatgtcaacccaatgcaccaggatgcatttgactcaaagtgcag

SEQ ID NO: 421126 - DNA, 53 bp, Artificial
  Synthetic oligonucleotide
ggagttttggaacggtctggcaacactattcggatcagggagcatgttctgat

SEQ ID NO: 421127 - DNA, 55 bp, Artificial
  Synthetic oligonucleotide
ggagtttttccggctgggtatcaggcttgttttcatggcttggagggacctggac

SEQ ID NO: 421128 - DNA, 50 bp, Artificial
  Synthetic oligonucleotide
ggataaaaaaacgtaatacctgatttcttgtaattgtcccaaaaaattaa

SEQ ID NO: 421129 - DNA, 52 bp, Artificial
  Synthetic oligonucleotide
ggataaaaacctcacgcctcagacccgcgttacctctccgaacactgtccgc

SEQ ID NO: 421130 - DNA, 58 bp, Artificial
  Synthetic oligonucleotide
ggataaaagacactggaacaaacaacacagttatcataagaaatatgacgactcgtgg

SEQ ID NO: 421131 - DNA, 60 bp, Artificial
  Synthetic oligonucleotide
ggataaaccaattgtcgaaacatgtagatgattctgtggttgacatctggtcatataatg

SEQ ID NO: 421132 - DNA, 59 bp, Artificial
  Synthetic oligonucleotide
ggataaaccgtattacttagtaacatgggctaactcatctatagaaatgcttatgtcag

SEQ ID NO: 421133 - DNA, 55 bp, Artificial
  Synthetic oligonucleotide
ggataaacctacggctcagaatatgactttcgtttgaatgcgattctggtcgatc

SEQ ID NO: 421134 - DNA, 55 bp, Artificial
  Synthetic oligonucleotide
ggataaacggcggagaaatgtggtcgatgtcatgtcagcaatcttccagggccct

SEQ ID NO: 421135 - DNA, 55 bp, Artificial
  Synthetic oligonucleotide
ggataaagaagccacggcagaggatcaacccacacagccagacgttgcaacgtgc

SEQ ID NO: 421136 - DNA, 55 bp, Artificial
  Synthetic oligonucleotide
ggataaagataacttagacacagtattgcttgatggtgaatcccaatggggaata

SEQ ID NO: 421137 - DNA, 55 bp, Artificial
  Synthetic oligonucleotide
ggataaagcgcgagaaattaaaccggagttggagggagcagtatgaaacagcagc

SEQ ID NO: 421138 - DNA, 55 bp, Artificial
  Synthetic oligonucleotide
ggataaagctcgctatggccctttggccaaaccggagaggtctccatgcccaaag

SEQ ID NO: 421139 - DNA, 55 bp, Artificial
  Synthetic oligonucleotide
ggataaatggaaccatgcaggaggttaatggcacaaactcaggcaatatcacact

SEQ ID NO: 421140 - DNA, 60 bp, Artificial
  Synthetic oligonucleotide
ggataaatggacagtacaacctataatactgccagacaaagacagctggactgtcaatga

SEQ ID NO: 421141 - DNA, 50 bp, Artificial
  Synthetic oligonucleotide
ggataaattccatggtatgagcattgttaagaaatttgggaaaagcgacc

SEQ ID NO: 421142 - DNA, 55 bp, Artificial
  Synthetic oligonucleotide
ggataacaaggcgttcaccgttgaaagtggtgaatgcataataacacttccagac

SEQ ID NO: 421143 - DNA, 55 bp, Artificial
  Synthetic oligonucleotide
ggataaccaagaattttcttagacaccctaatagaatgtctaaggaccagattaa

SEQ ID NO: 421144 - DNA, 60 bp, Artificial
  Synthetic oligonucleotide
ggataacgagccaagcggatatgcacaaacagattgtgtgttggaagcaatggctttcct

SEQ ID NO: 421145 - DNA, 55 bp, Artificial
  Synthetic oligonucleotide
ggataacgcgtatattggtgatgccgtcacttgcgttaagccggtcaggttaggt

SEQ ID NO: 421146 - DNA, 58 bp, Artificial
  Synthetic oligonucleotide
ggataactactggcaagtaacatggatcccagactgggactttgtatctaccccacca

SEQ ID NO: 421147 - DNA, 53 bp, Artificial
  Synthetic oligonucleotide
ggataactcaggtgtacctttggacatagtggcttctacctgtaagtggcccg

SEQ ID NO: 421148 - DNA, 60 bp, Artificial
  Synthetic oligonucleotide
ggataacttccaccttggagatgacatggatcctgagttgagaacattggcacaaagctt

SEQ ID NO: 421149 - DNA, 55 bp, Artificial
  Synthetic oligonucleotide
ggataacttcggcaagctatgtccgaacctcgaacgtattgatgttcacttggca

SEQ ID NO: 421150 - DNA, 52 bp, Artificial
  Synthetic oligonucleotide
ggataagcacagcttgtagaggagattctcataagggttcctattgcccggc

SEQ ID NO: 421151 - DNA, 55 bp, Artificial
  Synthetic oligonucleotide
ggataagcagcatggggtagtgcgtaatgatgtgaatcttgggatgggactaaca

SEQ ID NO: 421152 - DNA, 57 bp, Artificial
  Synthetic oligonucleotide
ggataagcccaggtgatctgatggaccatgtcaaacgcacttggactgcccctcaga

SEQ ID NO: 421153 - DNA, 50 bp, Artificial
  Synthetic oligonucleotide
ggataagcggcacatcagtaaggaacatcaatcccgcattaggtaattca

SEQ ID NO: 421154 - DNA, 55 bp, Artificial
  Synthetic oligonucleotide
ggataagcgttgctataggatctatagggccctctgccgtgatgaagtacgctgc

SEQ ID NO: 421155 - DNA, 55 bp, Artificial
  Synthetic oligonucleotide
ggataagcttgaacccgagtccaagtctatgtgactggataggcggaaagtgagc

SEQ ID NO: 421156 - DNA, 53 bp, Artificial
  Synthetic oligonucleotide
ggataaggaaactccctaccctccattttttcataactcattgtgggttggac

SEQ ID NO: 421157 - DNA, 57 bp, Artificial
  Synthetic oligonucleotide
ggataaggcgaaatactcatcggcccacgcctgcatttcgtccggaacgttagtgaa

SEQ ID NO: 421158 - DNA, 55 bp, Artificial
  Synthetic oligonucleotide
ggataagggaaaagcatctgtggagccacctgctgaacgaagtcaatcagaaaag

SEQ ID NO: 421159 - DNA, 55 bp, Artificial
  Synthetic oligonucleotide
ggataaggtcacatcaataataccatggctcagagacagccctcaagacactctc

SEQ ID NO: 421160 - DNA, 55 bp, Artificial
  Synthetic oligonucleotide
ggataagtacatgagttgggtgatcaacacgcggcagatggtgcagctacgacgt

SEQ ID NO: 421161 - DNA, 54 bp, Artificial
  Synthetic oligonucleotide
ggataagtacccaaccataaattattttgcaacaccaagtgggtctctggtttc

SEQ ID NO: 421162 - DNA, 60 bp, Artificial
  Synthetic oligonucleotide
ggataagtatgtgtgccagtgcagaagactacataaccttaatatcagatccctatgggt

SEQ ID NO: 421163 - DNA, 53 bp, Artificial
  Synthetic oligonucleotide
ggataagtctggagacccgaacgcatcatgcgctctgtgctatatgaaacaga

SEQ ID NO: 421164 - DNA, 59 bp, Artificial
  Synthetic oligonucleotide
ggataagtttacattgggtagactgaacaaagctttgcagtcaaagtcggtagcagata

SEQ ID NO: 421165 - DNA, 55 bp, Artificial
  Synthetic oligonucleotide
ggataatacaggtcatcacatgtcaccgctatgggacaaagaaagtccaactgtg

SEQ ID NO: 421166 - DNA, 60 bp, Artificial
  Synthetic oligonucleotide
ggataatacctgctgaatgtaaggtagaaagagatttgaatatagctaacactataataa

SEQ ID NO: 421167 - DNA, 55 bp, Artificial
  Synthetic oligonucleotide
ggataatacgactacagacataacgtccagcgaaagttcgattaacgcgtcaacc

SEQ ID NO: 421168 - DNA, 55 bp, Artificial
  Synthetic oligonucleotide
ggataatactaacaaacccgcatatggacaatcccgatactttgcagccgttagg

SEQ ID NO: 421169 - DNA, 55 bp, Artificial
  Synthetic oligonucleotide
ggataatagagcatgaaccattcgtgctagtgttagccatgcagtcaccagctgt

SEQ ID NO: 421170 - DNA, 55 bp, Artificial
  Synthetic oligonucleotide
ggataatcacccatctttgtacataatgctcagagaaccatctcttagaggagag

SEQ ID NO: 421171 - DNA, 56 bp, Artificial
  Synthetic oligonucleotide
ggataatcagctattcgttactgtagttgacaataccagagctaccaattacacat

SEQ ID NO: 421172 - DNA, 52 bp, Artificial
  Synthetic oligonucleotide
ggataatccacgccctaatgataggacaggcagttgtggtccagtatcttct

SEQ ID NO: 421173 - DNA, 60 bp, Artificial
  Synthetic oligonucleotide
ggataatccggcagtcctcgcagccgtggcgaggcgggaacaatgggcaatcaagcttca

SEQ ID NO: 421174 - DNA, 55 bp, Artificial
  Synthetic oligonucleotide
ggataatctgaattacaggcacgataactattgtaaagccttggattgcgaaggg

SEQ ID NO: 421175 - DNA, 60 bp, Artificial
  Synthetic oligonucleotide
ggataatctgggcatagactcctttacacacattgacttcccagatgattggactgagcg

SEQ ID NO: 421176 - DNA, 60 bp, Artificial
  Synthetic oligonucleotide
ggataatcttgttatacatgcttgagtggggaaaagagatggtagatcactttcatcttg

SEQ ID NO: 421177 - DNA, 55 bp, Artificial
  Synthetic oligonucleotide
ggataatgaagaagcggaactttcttttgatttatggaaaagaagaaaatatgga

SEQ ID NO: 421178 - DNA, 55 bp, Artificial
  Synthetic oligonucleotide
ggataatgcaagggaactgggtaatggttgtttcgagttctaccacaaatgtgac

SEQ ID NO: 421179 - DNA, 55 bp, Artificial
  Synthetic oligonucleotide
ggataatggataaggaggagtccatggcataggaggagttgtaaataggcgctcg

SEQ ID NO: 421180 - DNA, 57 bp, Artificial
  Synthetic oligonucleotide
ggatacaaaattctggcgtgcgcggaattctcgttggatgacccagttaagtacaaa

SEQ ID NO: 421181 - DNA, 55 bp, Artificial
  Synthetic oligonucleotide
ggatacaaacactacgacttgcaatcctgcaggccgaccctactccggctgacct

SEQ ID NO: 421182 - DNA, 60 bp, Artificial
  Synthetic oligonucleotide
ggatacaaacacttgttgtatgagatgatccgtaagcaacagcacgacgtcattaatgaa

SEQ ID NO: 421183 - DNA, 57 bp, Artificial
  Synthetic oligonucleotide
ggatacaataacgacctcaaactatatactagcaaggtcagtagtaccagatttaaa

SEQ ID NO: 421184 - DNA, 55 bp, Artificial
  Synthetic oligonucleotide
ggatacaataccatcacgatttcgctgcttggtaatagtaatggatgtcggggtc

SEQ ID NO: 421185 - DNA, 54 bp, Artificial
  Synthetic oligonucleotide
ggatacaatacctggcaggcctgtcaacattgcctggcaaccccgctattgctt

SEQ ID NO: 421186 - DNA, 57 bp, Artificial
  Synthetic oligonucleotide
ggatacaatacttggcgggcctgtcaacgctgcctggtaaccccgccattgcttcgt

SEQ ID NO: 421187 - DNA, 60 bp, Artificial
  Synthetic oligonucleotide
ggatacacagccatggaaatctggccattacgtcgtcattgaaagatcgttactacattc

SEQ ID NO: 421188 - DNA, 55 bp, Artificial
  Synthetic oligonucleotide
ggatacacaggtactcatgctgctactgctttagtcaaccagtttaaaggtactt

SEQ ID NO: 421189 - DNA, 60 bp, Artificial
  Synthetic oligonucleotide
ggatacacagtcatggtaacctcagcgtaacacccgcgttgaaagatcgatactacattc

SEQ ID NO: 421190 - DNA, 59 bp, Artificial
  Synthetic oligonucleotide
ggatacaccatatacgaattcaacaatgagtgaaacgtttctaacttccacattatgct

SEQ ID NO: 421191 - DNA, 51 bp, Artificial
  Synthetic oligonucleotide
ggatacaccatatgtgaactcaacgatgagtgaaacgttcttaacttccac

SEQ ID NO: 421192 - DNA, 55 bp, Artificial
  Synthetic oligonucleotide
ggatacacggagaaaggtttggttgacataccccaaacagttgcgactgaggcag

SEQ ID NO: 421193 - DNA, 55 bp, Artificial
  Synthetic oligonucleotide
ggatacactgagctataacggtaacctacgcatctttaagagtccggaatgtgac

SEQ ID NO: 421194 - DNA, 57 bp, Artificial
  Synthetic oligonucleotide
ggatacagtacttagcaggcctatccaccctgcctggaaaccccgcgatagcatcac

SEQ ID NO: 421195 - DNA, 60 bp, Artificial
  Synthetic oligonucleotide
ggatacagttgaaataaccccggaggctgtaagtatgtcagcatgccccatctgagggat

SEQ ID NO: 421196 - DNA, 58 bp, Artificial
  Synthetic oligonucleotide
ggatacataagttggtggatcccttagataaccttacagcttttttgtgcgatataga

SEQ ID NO: 421197 - DNA, 56 bp, Artificial
  Synthetic oligonucleotide
ggatacataggtctaaataaggcgccaactcttcacgatgtttcgaaaaattggta

SEQ ID NO: 421198 - DNA, 60 bp, Artificial
  Synthetic oligonucleotide
ggatacatatgcagtgggattttcggagacaatccacgccctaatgataagacaggcagt

SEQ ID NO: 421199 - DNA, 55 bp, Artificial
  Synthetic oligonucleotide
ggatacattaatggttgatctacagggatcgacaacgttttccaacaagcgtttc

SEQ ID NO: 421200 - DNA, 55 bp, Artificial
  Synthetic oligonucleotide
ggatacattaatggttgatcttgaagggacgacgtcgctctctaacaggcgtttc

SEQ ID NO: 421201 - DNA, 60 bp, Artificial
  Synthetic oligonucleotide
ggatacattacttggagcgaaagtttgtgtggatgacttcaacaatcaattctatagtct

SEQ ID NO: 421202 - DNA, 60 bp, Artificial
  Synthetic oligonucleotide
ggataccaaacaattttacgctagagtgctgttagcgtcagttatgcaaaggataccaga

SEQ ID NO: 421203 - DNA, 57 bp, Artificial
  Synthetic oligonucleotide
ggataccagaatgggactttgtgtcaacacctcccttagtcagattagtcttcaacc

SEQ ID NO: 421204 - DNA, 55 bp, Artificial
  Synthetic oligonucleotide
ggataccagactactccgcgttctacggagtttatatgggtaagctcttttgtca

SEQ ID NO: 421205 - DNA, 55 bp, Artificial
  Synthetic oligonucleotide
ggataccatcaaggattagtacacagaatgatctgattagagttgaaccaattgg

SEQ ID NO: 421206 - DNA, 60 bp, Artificial
  Synthetic oligonucleotide
ggataccatgccaataattccacagaaaaggtcgacacaattctagagcggaatgtcact

SEQ ID NO: 421207 - DNA, 55 bp, Artificial
  Synthetic oligonucleotide
ggataccatgtataccgtttcccggcctaatggtttctgggagaatctcaaacga

SEQ ID NO: 421208 - DNA, 54 bp, Artificial
  Synthetic oligonucleotide
ggataccattccttcgaagcccggcatggggttaacacttaaaagtcaggcgag

SEQ ID NO: 421209 - DNA, 51 bp, Artificial
  Synthetic oligonucleotide
ggatacccaccgagagagataccaccaataagagatcttgactgctccgag

SEQ ID NO: 421210 - DNA, 55 bp, Artificial
  Synthetic oligonucleotide
ggatacccagatgtgtgccctatttgcacagccgttgacgctactcccggctttg

SEQ ID NO: 421211 - DNA, 60 bp, Artificial
  Synthetic oligonucleotide
ggataccccgtgtggcatgtctttaggtacctagatatgatggaatataagacaagcagg

SEQ ID NO: 421212 - DNA, 55 bp, Artificial
  Synthetic oligonucleotide
ggataccgaattgctccggtacccggtcgtcagcggctaggcctcgatcctgtac

SEQ ID NO: 421213 - DNA, 55 bp, Artificial
  Synthetic oligonucleotide
ggataccgagagcatcactcggctctacatactcgattacccgaggactcagagg

SEQ ID NO: 421214 - DNA, 60 bp, Artificial
  Synthetic oligonucleotide
ggataccgcaagaacagcaagctatggcccatttcgaaccggctaggagacaatgcagag

SEQ ID NO: 421215 - DNA, 55 bp, Artificial
  Synthetic oligonucleotide
ggataccgccgcatgtggtgacatcatcaacggcttgcccgtctctgcccgtagg

SEQ ID NO: 421216 - DNA, 58 bp, Artificial
  Synthetic oligonucleotide
ggataccgttgtacttcaacgacacgcgtgcaacccaacgtgccatcaggaccaagta

SEQ ID NO: 421217 - DNA, 55 bp, Artificial
  Synthetic oligonucleotide
ggatacctgctgaccacggtttctagaaagcccattagtccaaaaccatttgcac

SEQ ID NO: 421218 - DNA, 57 bp, Artificial
  Synthetic oligonucleotide
ggatacctgggtactcagaacaagtgaaaggaccatggaagtactcgcccatccgag

SEQ ID NO: 421219 - DNA, 55 bp, Artificial
  Synthetic oligonucleotide
ggatacgaatcttcggatccacctagactgactgtgacaggttgtggtactccag

SEQ ID NO: 421220 - DNA, 55 bp, Artificial
  Synthetic oligonucleotide
ggatacgacaatgaatccacctacgtatccaccagcaaggatcgatcaagccggt

SEQ ID NO: 421221 - DNA, 55 bp, Artificial
  Synthetic oligonucleotide
ggatacgacaatgtttgacgtgggagggtctactacgctctctaataggcgattc

SEQ ID NO: 421222 - DNA, 55 bp, Artificial
  Synthetic oligonucleotide
ggatacgagcaactgggcacaaggtgtgaccactagggatgtaattagcggcact

SEQ ID NO: 421223 - DNA, 55 bp, Artificial
  Synthetic oligonucleotide
ggatacgaggtcgaagaatcgttgatttgtgcagttgtatttcccctcgaactgg

SEQ ID NO: 421224 - DNA, 60 bp, Artificial
  Synthetic oligonucleotide
ggatacgatcaacagagtgtggttatcatggatgatattatgcaaaatccaagtggggag

SEQ ID NO: 421225 - DNA, 57 bp, Artificial
  Synthetic oligonucleotide
ggatacgatgggtctgaccctctgggagtcacgaattaacgtggctactaggggtga

SEQ ID NO: 421226 - DNA, 55 bp, Artificial
  Synthetic oligonucleotide
ggatacgcaacgggaggtaagaaaagccaaggatgagctttactctcgtgttgcg

SEQ ID NO: 421227 - DNA, 55 bp, Artificial
  Synthetic oligonucleotide
ggatacgcccttttgcggcttttgtatggcggcccacgggtcgtggatagcgacc

SEQ ID NO: 421228 - DNA, 55 bp, Artificial
  Synthetic oligonucleotide
ggatacgcgatttgggcctgtcatcgaagttctcgttatatttactctgactcag

SEQ ID NO: 421229 - DNA, 60 bp, Artificial
  Synthetic oligonucleotide
ggatacgcgccggatgaaagcgacctgaggatcagtcgcaccaaccgctgtagcagcctc

SEQ ID NO: 421230 - DNA, 55 bp, Artificial
  Synthetic oligonucleotide
ggatacggaagaagccaatcgaccaccctatttacaacatctgggatcaagcagt

SEQ ID NO: 421231 - DNA, 55 bp, Artificial
  Synthetic oligonucleotide
ggatacggcgtgcgaatattcaaccccaagggaatcctctccaaaattgcgtcta

SEQ ID NO: 421232 - DNA, 60 bp, Artificial
  Synthetic oligonucleotide
ggatacggggtgtgtaggatcgtacacatctgattctgaaatcaaagagccatctaacag

SEQ ID NO: 421233 - DNA, 54 bp, Artificial
  Synthetic oligonucleotide
ggatacgtccccttaagtgaagggcctgtaagagtgggtagtacacccactgta

SEQ ID NO: 421234 - DNA, 55 bp, Artificial
  Synthetic oligonucleotide
ggatacgtgtaaagacatcttagatcgagtcaggaggttttggggaagtgacaca

SEQ ID NO: 421235 - DNA, 51 bp, Artificial
  Synthetic oligonucleotide
ggatacgtgtttggaaacgatgaacttatgactaagctgctcaatgtttag

SEQ ID NO: 421236 - DNA, 55 bp, Artificial
  Synthetic oligonucleotide
ggatacgttgtgcacagggagcaatccttgagtcctaccacactgaccctggatg

SEQ ID NO: 421237 - DNA, 55 bp, Artificial
  Synthetic oligonucleotide
ggatacgtttactctgtcagaccccgcatacatcggcctacccaccagtggggcg

SEQ ID NO: 421238 - DNA, 60 bp, Artificial
  Synthetic oligonucleotide
ggatactaaacctactgacccgactgggattgagcctgatgaccatctcaaggaacgatc

SEQ ID NO: 421239 - DNA, 55 bp, Artificial
  Synthetic oligonucleotide
ggatactaccatcatggccaagaacgaagtcttctgcgttcaggccgagaagggg

SEQ ID NO: 421240 - DNA, 55 bp, Artificial
  Synthetic oligonucleotide
ggatactacgcttgacctagctccattatttaacgttccgaaatgcggaatagca

SEQ ID NO: 421241 - DNA, 60 bp, Artificial
  Synthetic oligonucleotide
ggatactagtggatcatgcaagtcaaactatgcatgtgatagattcttttggttccttaa

SEQ ID NO: 421242 - DNA, 60 bp, Artificial
  Synthetic oligonucleotide
ggatactatattagcgatgtatatgcctgcgaatcatctgaacgagctaatgcactggct

SEQ ID NO: 421243 - DNA, 57 bp, Artificial
  Synthetic oligonucleotide
ggatactattaacaagagatggtggtaataacacagaagggaacgagaccttcagac

SEQ ID NO: 421244 - DNA, 55 bp, Artificial
  Synthetic oligonucleotide
ggatactattggcgattgggttccaccaacagaactcaaccaaacttatacccaa

SEQ ID NO: 421245 - DNA, 60 bp, Artificial
  Synthetic oligonucleotide
ggatactcaacagattgagtacctagttcacaagcttaggcctacactgaaagatgcgtg

SEQ ID NO: 421246 - DNA, 60 bp, Artificial
  Synthetic oligonucleotide
ggatactcaaccgtcatcaagtggcgttgctgcagtggagtcagtggatgctgggttctt

SEQ ID NO: 421247 - DNA, 58 bp, Artificial
  Synthetic oligonucleotide
ggatactctccacacgaactcaatcgggtggcagcctgcctcagaaaacttggggtac

SEQ ID NO: 421248 - DNA, 55 bp, Artificial
  Synthetic oligonucleotide
ggatactgctgcctatagagaagcggcgtgttctcagttagctaaagctatggaa

SEQ ID NO: 421249 - DNA, 55 bp, Artificial
  Synthetic oligonucleotide
ggatacttactgctgttgttagccagatttcaggttgcaaaatgtagggtaactg

SEQ ID NO: 421250 - DNA, 55 bp, Artificial
  Synthetic oligonucleotide
ggatacttcccagattggcagaactatactccagggccagggattagatacccac

SEQ ID NO: 421251 - DNA, 55 bp, Artificial
  Synthetic oligonucleotide
ggatacttgggatcctccacctccatgtcgacccagctgttccatgcttgggaga

SEQ ID NO: 421252 - DNA, 55 bp, Artificial
  Synthetic oligonucleotide
ggatacttttctgtcggaaattcaacactttgatgaagacactactccgcgcaac

SEQ ID NO: 421253 - DNA, 55 bp, Artificial
  Synthetic oligonucleotide
ggatagaaacttgccatcaacggctagatatataaggccgaatttgcttcaggac

SEQ ID NO: 421254 - DNA, 55 bp, Artificial
  Synthetic oligonucleotide
ggatagaacttgacgagataggggaggatgtcgccccgatcgaacatattgcaag

SEQ ID NO: 421255 - DNA, 60 bp, Artificial
  Synthetic oligonucleotide
ggatagaacttgatgaaataggagaagatgttgccccgattgaacacattgcaagtatga

SEQ ID NO: 421256 - DNA, 55 bp, Artificial
  Synthetic oligonucleotide
ggatagaagcgatttgatcaaaggaacaagcgggttggcactggacataccaggt

SEQ ID NO: 421257 - DNA, 55 bp, Artificial
  Synthetic oligonucleotide
ggatagaccctttcagattgcttcaaaacagtcaagtatacagcctaatcagacc

SEQ ID NO: 421258 - DNA, 55 bp, Artificial
  Synthetic oligonucleotide
ggatagagaaatcagtaactacacagacataatatacagaatgcttgaggactcg

SEQ ID NO: 421259 - DNA, 55 bp, Artificial
  Synthetic oligonucleotide
ggatagagcatcataagatgccgaccggcgcattcacgacgcgctgggttgcagc

SEQ ID NO: 421260 - DNA, 60 bp, Artificial
  Synthetic oligonucleotide
ggatagagtggacgatggctatttggaaagaatccgtcttcccttctggaatctgaatga

SEQ ID NO: 421261 - DNA, 55 bp, Artificial
  Synthetic oligonucleotide
ggatagatgacccggagaaagaagtattagtgtggaagtttgacagccacctagc

SEQ ID NO: 421262 - DNA, 58 bp, Artificial
  Synthetic oligonucleotide
ggatagatgcctcgaatttccgagacttcgttaagggtcaagattcttatgctattcc

SEQ ID NO: 421263 - DNA, 52 bp, Artificial
  Synthetic oligonucleotide
ggatagatgcgaagttatcggtcttggtcttcacatcagacaaagaggtttg

SEQ ID NO: 421264 - DNA, 55 bp, Artificial
  Synthetic oligonucleotide
ggatagatggaacaattcccagaagaccaagggccgcagagggaaccatacaatg

SEQ ID NO: 421265 - DNA, 60 bp, Artificial
  Synthetic oligonucleotide
ggatagattacatccaatccatgcagggcctatagcaccaggccaaataagagaaccaag

SEQ ID NO: 421266 - DNA, 60 bp, Artificial
  Synthetic oligonucleotide
ggatagattcaattcatgcttagttcaacattacaccaaggcggctactcttggtctaca

SEQ ID NO: 421267 - DNA, 55 bp, Artificial
  Synthetic oligonucleotide
ggatagattccatctgagacatagcagcagctaccttgcgtctaccatcctcagt

SEQ ID NO: 421268 - DNA, 54 bp, Artificial
  Synthetic oligonucleotide
ggatagattgcacccagtccatgcggggcctattgcaccaaaccaaatgagaga

SEQ ID NO: 421269 - DNA, 55 bp, Artificial
  Synthetic oligonucleotide
ggatagcaacaaacttgaggaccagatcacgcattggcacctattgcgtgtagaa

SEQ ID NO: 421270 - DNA, 55 bp, Artificial
  Synthetic oligonucleotide
ggatagcaatgggcacagattgtacagttaaagtatgcccactaaatactcagac

SEQ ID NO: 421271 - DNA, 55 bp, Artificial
  Synthetic oligonucleotide
ggatagcaccgcgaggacgttataatcatgtaccctatccagagtgtaatagtcg

SEQ ID NO: 421272 - DNA, 60 bp, Artificial
  Synthetic oligonucleotide
ggatagcagctataatgatagagccaagcactatctcagtgacgaaaaactacacattgt

SEQ ID NO: 421273 - DNA, 60 bp, Artificial
  Synthetic oligonucleotide
ggatagcagtggaactgtcgcgagtggccatgagattgacacggctattattataggggg

SEQ ID NO: 421274 - DNA, 56 bp, Artificial
  Synthetic oligonucleotide
ggatagcatagccaaggggaagaaaagtctgttaaattctacgaacttagagacaa

SEQ ID NO: 421275 - DNA, 55 bp, Artificial
  Synthetic oligonucleotide
ggatagcatatgccttgacaaacagtgctataagtcttcaatacaaacacctaga

SEQ ID NO: 421276 - DNA, 55 bp, Artificial
  Synthetic oligonucleotide
ggatagccaagagtgctagtgccatagaaggagttatgcccactaatactccaga

SEQ ID NO: 421277 - DNA, 60 bp, Artificial
  Synthetic oligonucleotide
ggatagccagcttgatactacaaattggaaacataatctcaatatggattagccactcaa

SEQ ID NO: 421278 - DNA, 55 bp, Artificial
  Synthetic oligonucleotide
ggatagccatgtgagcaatctgggcatgattagggatctcaggtcacttgttggc

SEQ ID NO: 421279 - DNA, 60 bp, Artificial
  Synthetic oligonucleotide
ggatagcccagattggggacaatccgtttctgataaggcatcaaagcacaacctgcagtg

SEQ ID NO: 421280 - DNA, 55 bp, Artificial
  Synthetic oligonucleotide
ggatagcgacagccaagctgtacacgaaggtctcaacaccatggttaagtgccac

SEQ ID NO: 421281 - DNA, 55 bp, Artificial
  Synthetic oligonucleotide
ggatagcgatcaatagatataatgggttaaccttacgaggagtaacgatgcgccc

SEQ ID NO: 421282 - DNA, 55 bp, Artificial
  Synthetic oligonucleotide
ggatagcgatttgttgtgagctcctttagagggagggctcactttatctattgct

SEQ ID NO: 421283 - DNA, 56 bp, Artificial
  Synthetic oligonucleotide
ggatagcggggacttatttataaccgagtttacttcttacaaattgagcaagctga

SEQ ID NO: 421284 - DNA, 55 bp, Artificial
  Synthetic oligonucleotide
ggatagcgtcacagagtatcagggtaacctgagctacactcaaggcgctaacggg

SEQ ID NO: 421285 - DNA, 55 bp, Artificial
  Synthetic oligonucleotide
ggatagctaacgcaaacttgacacatctactcagtcaacatgtaacgaatacgac

SEQ ID NO: 421286 - DNA, 60 bp, Artificial
  Synthetic oligonucleotide
ggataggaccaggacaagcagtctatgcaacaaaggccatcataggagacataagaaaag

SEQ ID NO: 421287 - DNA, 55 bp, Artificial
  Synthetic oligonucleotide
ggataggacccataaccttttctgtaatgtccgtgcacagatatggtgtctggac

SEQ ID NO: 421288 - DNA, 55 bp, Artificial
  Synthetic oligonucleotide
ggataggacgtcgccctgacggaatgcaaatagatcacattgatggaaataggcg

SEQ ID NO: 421289 - DNA, 60 bp, Artificial
  Synthetic oligonucleotide
ggataggatgcttaactacagacaccaattcatttgaaataatagctaatgcggagaaat

SEQ ID NO: 421290 - DNA, 55 bp, Artificial
  Synthetic oligonucleotide
ggataggctgaccaacctcatagaaacgctcaacaaagacatgcacaactccaac

SEQ ID NO: 421291 - DNA, 60 bp, Artificial
  Synthetic oligonucleotide
ggatagggcacgcactgcactactcggagagagtattgagaagaagccactcacatcagc

SEQ ID NO: 421292 - DNA, 50 bp, Artificial
  Synthetic oligonucleotide
ggatagggggggtttgtgtacgggggcccgcccggtaattcaggctagcc

SEQ ID NO: 421293 - DNA, 58 bp, Artificial
  Synthetic oligonucleotide
ggatagggtacatccactacaggcagggcctctcccaccaggccaaataagagaccca

SEQ ID NO: 421294 - DNA, 60 bp, Artificial
  Synthetic oligonucleotide
ggataggtgactcccgaagcgatcaatcaagggtgaaccaacagtctcttgatctggtta

SEQ ID NO: 421295 - DNA, 55 bp, Artificial
  Synthetic oligonucleotide
ggataggtgccaatgctgcatccaatctcttccccgaggacacgtggaacgggga

SEQ ID NO: 421296 - DNA, 60 bp, Artificial
  Synthetic oligonucleotide
ggataggttgcatccagtgcatgccgggcctcccgtcccaggccagatgagagaaccaag

SEQ ID NO: 421297 - DNA, 56 bp, Artificial
  Synthetic oligonucleotide
ggatagtactgcagggagcaacactgatggaagtgacgccatcatactcctatgcc

SEQ ID NO: 421298 - DNA, 55 bp, Artificial
  Synthetic oligonucleotide
ggatagtatctagatctgcattctgcgtgttagttggtaaagacggtggtccgga

SEQ ID NO: 421299 - DNA, 56 bp, Artificial
  Synthetic oligonucleotide
ggatagtatcttcaccgtcggtgcccggaaagggatatccactgaatgttttgctg

SEQ ID NO: 421300 - DNA, 56 bp, Artificial
  Synthetic oligonucleotide
ggatagtcccaaacactgtaaggcaataaatgactacaatgttggaaagacttttg

SEQ ID NO: 421301 - DNA, 60 bp, Artificial
  Synthetic oligonucleotide
ggatagtggcaagaacccagcatatctcatgaaatcgaaaattcccattcgactaagctt

SEQ ID NO: 421302 - DNA, 60 bp, Artificial
  Synthetic oligonucleotide
ggatagtgtctctggtgtcagcccatctgcatggacaagagttggctggtgtagtcccat

SEQ ID NO: 421303 - DNA, 53 bp, Artificial
  Synthetic oligonucleotide
ggatagtttcacctttactcgaataactgggggacagtcagttcaatgcaaac

SEQ ID NO: 421304 - DNA, 55 bp, Artificial
  Synthetic oligonucleotide
ggatagtttgacggcaaagttgcggacattgcgcgcgtaggtactactgcgttta

SEQ ID NO: 421305 - DNA, 56 bp, Artificial
  Synthetic oligonucleotide
ggatagttttaacttcccgagcatcttacagaaatgaactccattcactacgttcg

SEQ ID NO: 421306 - DNA, 56 bp, Artificial
  Synthetic oligonucleotide
ggatataagacaggcacattgtactgtcaatagaacagcctggaacgaagctttaa

SEQ ID NO: 421307 - DNA, 55 bp, Artificial
  Synthetic oligonucleotide
ggatataagacgagcacactgtaatgtcagtggaacagactggaataaagcctta

SEQ ID NO: 421308 - DNA, 55 bp, Artificial
  Synthetic oligonucleotide
ggatataatctctttcgtcttaaagattctcagtggcaccataaggcgctacctg

SEQ ID NO: 421309 - DNA, 60 bp, Artificial
  Synthetic oligonucleotide
ggatataatgagcatggtttaggtccgaagcacgcagatgaaacgtacattgttgataaa

SEQ ID NO: 421310 - DNA, 55 bp, Artificial
  Synthetic oligonucleotide
ggatataatgcatgccacctccattgtctccgccaagaacgcatgcaaactgcag

SEQ ID NO: 421311 - DNA, 60 bp, Artificial
  Synthetic oligonucleotide
ggatatacaatggaatcttcggtgacagcgagttggctcttgcacttgaacaccaaatat

SEQ ID NO: 421312 - DNA, 55 bp, Artificial
  Synthetic oligonucleotide
ggatatacagtaagcttcaggggtatatagaggcagtgcaactacaagaattaag

SEQ ID NO: 421313 - DNA, 55 bp, Artificial
  Synthetic oligonucleotide
ggatatacagttcatgtgcagtgtaatgctagtaaattccatcagggtaccttgt

SEQ ID NO: 421314 - DNA, 55 bp, Artificial
  Synthetic oligonucleotide
ggatatacgtatcctcccaagctattctagtgatgcgtcgctatgatgggacacc

SEQ ID NO: 421315 - DNA, 55 bp, Artificial
  Synthetic oligonucleotide
ggatatactgcttacctgcaggctggaacaatgccatctcaacagggtcagtggc

SEQ ID NO: 421316 - DNA, 60 bp, Artificial
  Synthetic oligonucleotide
ggatatagactgtgtgattgactttggactcaaggttgtggcagttctagacacagataa

SEQ ID NO: 421317 - DNA, 58 bp, Artificial
  Synthetic oligonucleotide
ggatatagaggagaaaacgcacgagatttttcttacagaccacaggagaagtacgtca

SEQ ID NO: 421318 - DNA, 51 bp, Artificial
  Synthetic oligonucleotide
ggatatagcacacaagtagaccccggactagccgaccaactaattcatata

SEQ ID NO: 421319 - DNA, 60 bp, Artificial
  Synthetic oligonucleotide
ggatataggaatagctatatgcctggaagtatatagctataagcattactagtaaagact

SEQ ID NO: 421320 - DNA, 60 bp, Artificial
  Synthetic oligonucleotide
ggatatatacagcacatgcaaaatatcaggcacatgtccccctgacattattcccaaagt

SEQ ID NO: 421321 - DNA, 58 bp, Artificial
  Synthetic oligonucleotide
ggatatatagacctacctggttactatgaaacaattcatccttgcaacgtcttttgtg

SEQ ID NO: 421322 - DNA, 60 bp, Artificial
  Synthetic oligonucleotide
ggatatatatgcagtggtgtaaatagtgacactgtgggtcttggccagacggtgctgagt

SEQ ID NO: 421323 - DNA, 58 bp, Artificial
  Synthetic oligonucleotide
ggatatatgacaccggagtaggaaatgcagtatatgttgtaatgttaaaacaagagac

SEQ ID NO: 421324 - DNA, 60 bp, Artificial
  Synthetic oligonucleotide
ggatatatgacgttaaacagtactctgatttaaaatttgagacatgggatccgctagata

SEQ ID NO: 421325 - DNA, 60 bp, Artificial
  Synthetic oligonucleotide
ggatatatgcaaagcagcaatgggactgagaatcagttcatccttcagttttggcggatt

SEQ ID NO: 421326 - DNA, 60 bp, Artificial
  Synthetic oligonucleotide
ggatatatgcttggatatttgcaaaggttgtgtctatttagagaaaatgcgtttcataca

SEQ ID NO: 421327 - DNA, 56 bp, Artificial
  Synthetic oligonucleotide
ggatatattcaacgtagtagaaaacgtgataagagtggtaggttaaatggttatga

SEQ ID NO: 421328 - DNA, 55 bp, Artificial
  Synthetic oligonucleotide
ggatatcaaaagggtggtgctaaggacgctagacaaaatgtttctatggatccta

SEQ ID NO: 421329 - DNA, 54 bp, Artificial
  Synthetic oligonucleotide
ggatatcaaacaaacaactcgactgaaacggtaaacacactaattgaacaaaac

SEQ ID NO: 421330 - DNA, 56 bp, Artificial
  Synthetic oligonucleotide
ggatatcaataatggcaaagctgaagctggatggtaatatcctcaccgtaatggac

SEQ ID NO: 421331 - DNA, 59 bp, Artificial
  Synthetic oligonucleotide
ggatatcaatgcttctagagccttagcaaatatatatgatctgcctgatgatttctttc

SEQ ID NO: 421332 - DNA, 56 bp, Artificial
  Synthetic oligonucleotide
ggatatcaatgggagaatcatgtacggttaaagtatgtcccttaaatacgcaaact

SEQ ID NO: 421333 - DNA, 56 bp, Artificial
  Synthetic oligonucleotide
ggatatcacacaagttacggagtaagaacgccaatataataactaaccctgagaat

SEQ ID NO: 421334 - DNA, 60 bp, Artificial
  Synthetic oligonucleotide
ggatatcaccagtcagcttccctctgacatggtgatctacgttatgaatgggtcgcccga

SEQ ID NO: 421335 - DNA, 55 bp, Artificial
  Synthetic oligonucleotide
ggatatcacccgcatcagagcataatggtttacccagaaaggttgccccgctcat

SEQ ID NO: 421336 - DNA, 55 bp, Artificial
  Synthetic oligonucleotide
ggatatcatcacagcaatgaccagggatccgggtatgcagcagataaagaatcca

SEQ ID NO: 421337 - DNA, 54 bp, Artificial
  Synthetic oligonucleotide
ggatatcccgttcacattcttaccttgactcagtaggcaagacactctacagat

SEQ ID NO: 421338 - DNA, 55 bp, Artificial
  Synthetic oligonucleotide
ggatatcgaagggaagatgaagcggtgcggggtgcaactgctcgaagattaccgc

SEQ ID NO: 421339 - DNA, 60 bp, Artificial
  Synthetic oligonucleotide
ggatatcgatgggacaatcttgtaccataaaagtgtgtccattgaatacacagactttag

SEQ ID NO: 421340 - DNA, 55 bp, Artificial
  Synthetic oligonucleotide
ggatatcgttatgcgaggctttatcaccgctaataccattctgaacgtaattgag

SEQ ID NO: 421341 - DNA, 55 bp, Artificial
  Synthetic oligonucleotide
ggatatctaagatgtctgcggacgtggtaccctgggcccacggtgatctatccga

SEQ ID NO: 421342 - DNA, 55 bp, Artificial
  Synthetic oligonucleotide
ggatatctaagcaataactcttcagacacagtggacacactaacagagaatggag

SEQ ID NO: 421343 - DNA, 60 bp, Artificial
  Synthetic oligonucleotide
ggatatctacttaagggtgagagccatggcagaataattcaaaatgaggacatccccatt

SEQ ID NO: 421344 - DNA, 58 bp, Artificial
  Synthetic oligonucleotide
ggatatctctagccggatccccgactctcttgtttctgtgagattgttcgcgtgcctg

SEQ ID NO: 421345 - DNA, 55 bp, Artificial
  Synthetic oligonucleotide
ggatatgaatacaaagacggttgcgaatgcgaaattcaaagattggcttatgaag

SEQ ID NO: 421346 - DNA, 55 bp, Artificial
  Synthetic oligonucleotide
ggatatgacctaatatgtcctcaggatgtaagtattggagcaggggaggttaaga

SEQ ID NO: 421347 - DNA, 60 bp, Artificial
  Synthetic oligonucleotide
ggatatgacgtctgcggtagtatgggcgggcgtatcttcgtctaacctggaatatagcgc

SEQ ID NO: 421348 - DNA, 58 bp, Artificial
  Synthetic oligonucleotide
ggatatgagagggtcttggtcgaaagagaatctaagccaggggttgaaaggacgcaga

SEQ ID NO: 421349 - DNA, 60 bp, Artificial
  Synthetic oligonucleotide
ggatatgaggaattcacaatggttgggcgaagagcaacagccattctaatgaaagcaacc

SEQ ID NO: 421350 - DNA, 60 bp, Artificial
  Synthetic oligonucleotide
ggatatgagtgacataggcttgggagctatggatcatagactgctgcaggtcagtaaggc

SEQ ID NO: 421351 - DNA, 60 bp, Artificial
  Synthetic oligonucleotide
ggatatgcacaaacagactgtgttcttgaggcaatggctttccttgaagagtcccaccca

SEQ ID NO: 421352 - DNA, 55 bp, Artificial
  Synthetic oligonucleotide
ggatatgcaccgcggctactgggatggattaccgtggtaatggtactaatcgggg

SEQ ID NO: 421353 - DNA, 59 bp, Artificial
  Synthetic oligonucleotide
ggatatgccgtcaagagacctgattgggcaggaggggctatataaggagggaactagga

SEQ ID NO: 421354 - DNA, 58 bp, Artificial
  Synthetic oligonucleotide
ggatatgcgttgtaggggagatggaccccaagactcgattagagtcagaccgtaccac

SEQ ID NO: 421355 - DNA, 55 bp, Artificial
  Synthetic oligonucleotide
ggatatggaaaggcctataggtcaagttttgttgatggctggtgtaccaaatgat

SEQ ID NO: 421356 - DNA, 55 bp, Artificial
  Synthetic oligonucleotide
ggatatggaattcatgaatattaaggcatgtaagggagctaatctaaggtgccgg

SEQ ID NO: 421357 - DNA, 56 bp, Artificial
  Synthetic oligonucleotide
ggatatggacttagcaattgaagcacttgagttccactatttcttatctgatagac

SEQ ID NO: 421358 - DNA, 55 bp, Artificial
  Synthetic oligonucleotide
ggatatggccgatcgtttcttcccgatgcgcgacgggacttacaccctgtcgtcc

SEQ ID NO: 421359 - DNA, 55 bp, Artificial
  Synthetic oligonucleotide
ggatatggggctctttggtcagaacatgtatcatcattctatgggaagaacaggg

SEQ ID NO: 421360 - DNA, 52 bp, Artificial
  Synthetic oligonucleotide
ggatatgtaaggaagaaattttttgcatttactaagaaacgctttggaaggg

SEQ ID NO: 421361 - DNA, 56 bp, Artificial
  Synthetic oligonucleotide
ggatatgtctgagttggctgatctaatattgaatgagtggctatgtaacccaatgg

SEQ ID NO: 421362 - DNA, 60 bp, Artificial
  Synthetic oligonucleotide
ggatatgtgaggaagatattcttcgcattcactctaaaagctccgcttctaggcatgctt

SEQ ID NO: 421363 - DNA, 52 bp, Artificial
  Synthetic oligonucleotide
ggatatgttacccagggacattgaatgaattggaagagttgaaagcactcat

SEQ ID NO: 421364 - DNA, 56 bp, Artificial
  Synthetic oligonucleotide
ggatatgttactgacagaggtagacagaggattatttctttaactgaaacaacaaa

SEQ ID NO: 421365 - DNA, 60 bp, Artificial
  Synthetic oligonucleotide
ggatattaacacttcctctggtaactgttatataatgtgtgcatccgtacacaattattg

SEQ ID NO: 421366 - DNA, 55 bp, Artificial
  Synthetic oligonucleotide
ggatattaagcttcgtgggattcggtcgcagtaatgaccttagtaacgctctgcg

SEQ ID NO: 421367 - DNA, 60 bp, Artificial
  Synthetic oligonucleotide
ggatattacatctgtatcgttggaggaaattcagcacccatatatgtaccaacacttgat

SEQ ID NO: 421368 - DNA, 60 bp, Artificial
  Synthetic oligonucleotide
ggatattattagtgagagatggtggtgataatagtacgaccagcgaaaccttcagacctg

SEQ ID NO: 421369 - DNA, 57 bp, Artificial
  Synthetic oligonucleotide
ggatattccaaagaagtaccacttgttagtatggctctcactccttggtttcctcaa

SEQ ID NO: 421370 - DNA, 55 bp, Artificial
  Synthetic oligonucleotide
ggatattccactacaacttgtttcaagcagactaccactgcaagactatactgcc

SEQ ID NO: 421371 - DNA, 58 bp, Artificial
  Synthetic oligonucleotide
ggatattcccaatctgaatctgatggctgccaattttaattattggagaggatccatt

SEQ ID NO: 421372 - DNA, 51 bp, Artificial
  Synthetic oligonucleotide
ggatattgaaggatccattgctctctctaataggcgttttaattgttgggc

SEQ ID NO: 421373 - DNA, 55 bp, Artificial
  Synthetic oligonucleotide
ggatattgacgtagacctactgatggcaagacatgactacttcgggagagagttg

SEQ ID NO: 421374 - DNA, 60 bp, Artificial
  Synthetic oligonucleotide
ggatattgctactccacactcagtgtgggtgtttgcatgtgcaccagatcgttgtccacc

SEQ ID NO: 421375 - DNA, 60 bp, Artificial
  Synthetic oligonucleotide
ggatatttcacagtgtataacaggcccagagatgtcaatgcttgaaccacactgttcatc

SEQ ID NO: 421376 - DNA, 55 bp, Artificial
  Synthetic oligonucleotide
ggatatttctgctacaagacccatatcaaggatcaactgcggaacaagatcaggc

SEQ ID NO: 421377 - DNA, 53 bp, Artificial
  Synthetic oligonucleotide
ggatcaaaaagttttacgcagacaggaacccgggaactacgtacagagtgacc

SEQ ID NO: 421378 - DNA, 60 bp, Artificial
  Synthetic oligonucleotide
ggatcaaaacaggaatttgtcacctttcatgaggggagctcacaacatatcgtttgtcac

SEQ ID NO: 421379 - DNA, 59 bp, Artificial
  Synthetic oligonucleotide
ggatcaaaatccttgacttcatgtagtgaggtctcagctaaaatggggcccattaactc

SEQ ID NO: 421380 - DNA, 60 bp, Artificial
  Synthetic oligonucleotide
ggatcaaaattggtatggtggtgcaagaaataatccgccagaggtcgctcaaacaatata

SEQ ID NO: 421381 - DNA, 55 bp, Artificial
  Synthetic oligonucleotide
ggatcaaatccttggtacgcaaaatcattaacccagctttcaatggtgctgacgt

SEQ ID NO: 421382 - DNA, 54 bp, Artificial
  Synthetic oligonucleotide
ggatcaaattacccggttgccaaagggtcgtataacaatacaaatggggagcaa

SEQ ID NO: 421383 - DNA, 60 bp, Artificial
  Synthetic oligonucleotide
ggatcaacactaatagaagcttccacagtgtccatagaaacacaataggagactgcccta

SEQ ID NO: 421384 - DNA, 60 bp, Artificial
  Synthetic oligonucleotide
ggatcaacactcgactgagttgatcctagcaggtatgtcaaatttgtacgcattgtcgct

SEQ ID NO: 421385 - DNA, 59 bp, Artificial
  Synthetic oligonucleotide
ggatcaacatccacacaaccgccatcaaagggttctttgcggtgcgaaaatgtgcctgg

SEQ ID NO: 421386 - DNA, 55 bp, Artificial
  Synthetic oligonucleotide
ggatcaacatggcttagagacatctgggactgggtgtgtactgtcctgtcagact

SEQ ID NO: 421387 - DNA, 56 bp, Artificial
  Synthetic oligonucleotide
ggatcaacgagctttatccgctttctcagtccttacctccttggggtctcagaagt

SEQ ID NO: 421388 - DNA, 54 bp, Artificial
  Synthetic oligonucleotide
ggatcaagaggaattgtcaacgatggttgatatggggcatattaggcttttggg

SEQ ID NO: 421389 - DNA, 56 bp, Artificial
  Synthetic oligonucleotide
ggatcaagataaattttataactcaattgtttacggaattgcgccacctccacaat

SEQ ID NO: 421390 - DNA, 56 bp, Artificial
  Synthetic oligonucleotide
ggatcaagatcacgaaaacaatgagtcttaagatcgtacattttagcgcacgtggc

SEQ ID NO: 421391 - DNA, 60 bp, Artificial
  Synthetic oligonucleotide
ggatcaagcagggaggatgaactattactggacactagtagagcctggagacacaataac

SEQ ID NO: 421392 - DNA, 50 bp, Artificial
  Synthetic oligonucleotide
ggatcaaggacttatcaaattgaagatgacggttctaagtcagcaatatc

SEQ ID NO: 421393 - DNA, 55 bp, Artificial
  Synthetic oligonucleotide
ggatcaaggctatagacgccatgaagtactcaacaggacagttccagcacagcag

SEQ ID NO: 421394 - DNA, 58 bp, Artificial
  Synthetic oligonucleotide
ggatcaaggctggatcattcctgaaacccccaccaacgtagagcggcaccttaataga

SEQ ID NO: 421395 - DNA, 60 bp, Artificial
  Synthetic oligonucleotide
ggatcaagtaccagctgcgcatccgtggttcttccaccgcggcaatagcccgccaactgg

SEQ ID NO: 421396 - DNA, 55 bp, Artificial
  Synthetic oligonucleotide
ggatcaagtccggtaatccatccatactccacataaatgcttatctttacgctgc

SEQ ID NO: 421397 - DNA, 55 bp, Artificial
  Synthetic oligonucleotide
ggatcaagtgctccaattcatttgggtcaaattgatatcacaaaggctctggtcc

SEQ ID NO: 421398 - DNA, 60 bp, Artificial
  Synthetic oligonucleotide
ggatcaatagcaggtaggtcgaatgagaacgtcgcccaatagggtccacgtccatcgaga

SEQ ID NO: 421399 - DNA, 59 bp, Artificial
  Synthetic oligonucleotide
ggatcaatgataggaatttctggagaggcgaaaatggacggagaacgagaatcgcttac

SEQ ID NO: 421400 - DNA, 60 bp, Artificial
  Synthetic oligonucleotide
ggatcaatgccgttgcatattaccggggtcttgacgtgtccatcataccaactagcggag

SEQ ID NO: 421401 - DNA, 58 bp, Artificial
  Synthetic oligonucleotide
ggatcaatggccagaggcaaaccaggtaggagcgggagcattcgggccaaggttcacc

SEQ ID NO: 421402 - DNA, 55 bp, Artificial
  Synthetic oligonucleotide
ggatcaatggctgaagctcttgcagcttggagttgctggttataaggagatggac

SEQ ID NO: 421403 - DNA, 55 bp, Artificial
  Synthetic oligonucleotide
ggatcaatgtgcactcctgtttcagttgagcccataataactctgctgtcatggc

SEQ ID NO: 421404 - DNA, 55 bp, Artificial
  Synthetic oligonucleotide
ggatcaattcctaaagccatgtgtaaagttgaccccactctgtgttactatgagc

SEQ ID NO: 421405 - DNA, 60 bp, Artificial
  Synthetic oligonucleotide
ggatcacacccagatgcctagtccactacgcttacaggctttggcattacccttgcactg

SEQ ID NO: 421406 - DNA, 55 bp, Artificial
  Synthetic oligonucleotide
ggatcacatgcggagtcgactaggagcagaaaatgtctatctgacctttctcagt

SEQ ID NO: 421407 - DNA, 52 bp, Artificial
  Synthetic oligonucleotide
ggatcaccaatggtagatattgaacttggcgagcattgtgcctcacggtttg

SEQ ID NO: 421408 - DNA, 60 bp, Artificial
  Synthetic oligonucleotide
ggatcaccatccaatataacttgacattgcgtagttcaggtgaggctgtcaatgagtgta

SEQ ID NO: 421409 - DNA, 54 bp, Artificial
  Synthetic oligonucleotide
ggatcaccgtcttcaaattcaacccatacgttagcccctaaatatggaacccta

SEQ ID NO: 421410 - DNA, 60 bp, Artificial
  Synthetic oligonucleotide
ggatcacgagaaagcggtcaaccagccactcaaggctgtgtattatgacgaaacaccaat

SEQ ID NO: 421411 - DNA, 54 bp, Artificial
  Synthetic oligonucleotide
ggatcacgagccttttagggtgcgtatcactaattccggaatacctaccaaaaa

SEQ ID NO: 421412 - DNA, 58 bp, Artificial
  Synthetic oligonucleotide
ggatcacgcccaggtgtctagtccattattcttacaggctttggcattacccttgtac

SEQ ID NO: 421413 - DNA, 55 bp, Artificial
  Synthetic oligonucleotide
ggatcacgcttgcaaaaggctccagaagtacgaggcagcgaggaggcctaagacc

SEQ ID NO: 421414 - DNA, 59 bp, Artificial
  Synthetic oligonucleotide
ggatcacggcatgggatggacaggcggcgttaaacgttcataatccgacggcagcgaac

SEQ ID NO: 421415 - DNA, 57 bp, Artificial
  Synthetic oligonucleotide
ggatcacgtcgggttagttattcgttgcatggattgtttggagaactggattctttc

SEQ ID NO: 421416 - DNA, 55 bp, Artificial
  Synthetic oligonucleotide
ggatcactatgcagggcaactggctactctagacatcagcacggaaccaatgagg

SEQ ID NO: 421417 - DNA, 57 bp, Artificial
  Synthetic oligonucleotide
ggatcactcactgagtgttgtatactgttattacggtaactttatacgccagtttta

SEQ ID NO: 421418 - DNA, 55 bp, Artificial
  Synthetic oligonucleotide
ggatcactgagtacgtagggaaaactgtctggtttgtgcccagcgtgcgcatggg

SEQ ID NO: 421419 - DNA, 56 bp, Artificial
  Synthetic oligonucleotide
ggatcactttagttggtagggcagccttaatgacgacaggtactacacccgtagtc

SEQ ID NO: 421420 - DNA, 56 bp, Artificial
  Synthetic oligonucleotide
ggatcagaagaacttagatcactgtttaatacagtagcagtcctctattgtgtgca

SEQ ID NO: 421421 - DNA, 60 bp, Artificial
  Synthetic oligonucleotide
ggatcagaagttcctaatgctgcgattgtcaacatattactatggcatatccacaagatg

SEQ ID NO: 421422 - DNA, 60 bp, Artificial
  Synthetic oligonucleotide
ggatcagaattcaaagattgttagtaagctggcagtttatggagatgcagatctaagtaa

SEQ ID NO: 421423 - DNA, 54 bp, Artificial
  Synthetic oligonucleotide
ggatcagaccttaccaaaaatatattacgtaggaagtggttatggaacgatacg

SEQ ID NO: 421424 - DNA, 58 bp, Artificial
  Synthetic oligonucleotide
ggatcagatattcctattaaacagcatagaaaggtggtattagagcttagacaaatgc

SEQ ID NO: 421425 - DNA, 60 bp, Artificial
  Synthetic oligonucleotide
ggatcagatgatgctatttccaagctcggacgtcgaccaagtactaaagttcgtcaattc

SEQ ID NO: 421426 - DNA, 58 bp, Artificial
  Synthetic oligonucleotide
ggatcagatgggaagagtatatcctatggaaattcccgggatcccctcacgtccagcc

SEQ ID NO: 421427 - DNA, 59 bp, Artificial
  Synthetic oligonucleotide
ggatcagatgtggaagtgcctcatacggctgaagcctacgttacacgggccaacacccc

SEQ ID NO: 421428 - DNA, 60 bp, Artificial
  Synthetic oligonucleotide
ggatcagattcaaggatgacagctcatatgaggatgtcaatggaatcagaaagcccaaac

SEQ ID NO: 421429 - DNA, 60 bp, Artificial
  Synthetic oligonucleotide
ggatcagattgagctatatgcttgtatgtatgctcaatgaaatatagcatcattttagtc

SEQ ID NO: 421430 - DNA, 55 bp, Artificial
  Synthetic oligonucleotide
ggatcagatttacccctgacagaacatagaagaagggtagaaatgcttagagaac

SEQ ID NO: 421431 - DNA, 55 bp, Artificial
  Synthetic oligonucleotide
ggatcagcaacacaagttaccgaagaacagtgaaagacgactttactgagggtgg

SEQ ID NO: 421432 - DNA, 55 bp, Artificial
  Synthetic oligonucleotide
ggatcagcataagggacataaggtctagaacttccatcatggactactgttgtct

SEQ ID NO: 421433 - DNA, 55 bp, Artificial
  Synthetic oligonucleotide
ggatcagcatcatctatggtgaacggagttgtcagactgttgacaaaaccttggg

SEQ ID NO: 421434 - DNA, 60 bp, Artificial
  Synthetic oligonucleotide
ggatcagccagacatattgaggaatgctcctgttatggacacagtcaaaaggtgacctgt

SEQ ID NO: 421435 - DNA, 55 bp, Artificial
  Synthetic oligonucleotide
ggatcagccattcaattcaaactggaagtcaaaaccatactggaacttgcaacca

SEQ ID NO: 421436 - DNA, 60 bp, Artificial
  Synthetic oligonucleotide
ggatcagcgacgacgctttcgttgctttgtatcatggcaggaggaacacaatctatcaga

SEQ ID NO: 421437 - DNA, 60 bp, Artificial
  Synthetic oligonucleotide
ggatcagcgccatcatattggatacatgatgttaaacagtactctgacttaaaatttgag

SEQ ID NO: 421438 - DNA, 55 bp, Artificial
  Synthetic oligonucleotide
ggatcagcgtattattgtgcttttcatggtggactggggtaaggaagcagttgac

SEQ ID NO: 421439 - DNA, 60 bp, Artificial
  Synthetic oligonucleotide
ggatcagctagtgggtctagctctgcagcatcacaatcacaagcaggtggcacttccaca

SEQ ID NO: 421440 - DNA, 55 bp, Artificial
  Synthetic oligonucleotide
ggatcagctcccacttcttcagaaggactaggaaagacaactacacagaaagcgg

SEQ ID NO: 421441 - DNA, 55 bp, Artificial
  Synthetic oligonucleotide
ggatcagctgctgtcatccagcaaatacacgattcaacgtagtacaggagataat

SEQ ID NO: 421442 - DNA, 60 bp, Artificial
  Synthetic oligonucleotide
ggatcagcttgaacaggcccttgattgcgagatctacggagcctgctactccatagaacc

SEQ ID NO: 421443 - DNA, 60 bp, Artificial
  Synthetic oligonucleotide
ggatcaggaagcactcctggagatggggcaccatgctccttgggttgtggatgatggtga

SEQ ID NO: 421444 - DNA, 55 bp, Artificial
  Synthetic oligonucleotide
ggatcaggaatcatcaactcaaatgcaccaatggatgaatgtgatgcgaagtgcc

SEQ ID NO: 421445 - DNA, 59 bp, Artificial
  Synthetic oligonucleotide
ggatcaggactgacctaggggatcttataaggattgaacctaatgatgggaccagttca

SEQ ID NO: 421446 - DNA, 55 bp, Artificial
  Synthetic oligonucleotide
ggatcaggcacaactaaattcatggggatgtgctttcagacaggtctgtcacacg

SEQ ID NO: 421447 - DNA, 55 bp, Artificial
  Synthetic oligonucleotide
ggatcaggcagggaccaatttggagatcaccataatcacactcaaaagaaacgag

SEQ ID NO: 421448 - DNA, 54 bp, Artificial
  Synthetic oligonucleotide
ggatcaggcggtgagaccaaacagcaagtggacggcctacaccactggcaatgc

SEQ ID NO: 421449 - DNA, 55 bp, Artificial
  Synthetic oligonucleotide
ggatcagggaatagcatctcgctagcaccccatatatgcgagggtctccaaaggg

SEQ ID NO: 421450 - DNA, 55 bp, Artificial
  Synthetic oligonucleotide
ggatcaggtatcataacatcggatgcaccaatccatgactgtaatgcgacttgtc

SEQ ID NO: 421451 - DNA, 55 bp, Artificial
  Synthetic oligonucleotide
ggatcaggtgcgggagagccggaatccggggaatgctgaaattgaagatctcatc

SEQ ID NO: 421452 - DNA, 59 bp, Artificial
  Synthetic oligonucleotide
ggatcaggttcagagatgactcttcctttgaagaagtcaatggcattagaaaacccaaa

SEQ ID NO: 421453 - DNA, 55 bp, Artificial
  Synthetic oligonucleotide
ggatcaggtttaaagatgactcatccttcgaagaggtcaatggaatccggaaacc

SEQ ID NO: 421454 - DNA, 55 bp, Artificial
  Synthetic oligonucleotide
ggatcagtcagtcacactacagaatggtgcagcatgacccgtacaccagtgctgg

SEQ ID NO: 421455 - DNA, 60 bp, Artificial
  Synthetic oligonucleotide
ggatcagtctattttgagtaaaatcaccagtgatgattatgtgaatgcgatacttcacac

SEQ ID NO: 421456 - DNA, 60 bp, Artificial
  Synthetic oligonucleotide
ggatcagtgcactacatggtgaagctcaaagaacatgataaggttggactcatgtcatat

SEQ ID NO: 421457 - DNA, 60 bp, Artificial
  Synthetic oligonucleotide
ggatcagttcatcctttagctttggaggcttcactttcaaaagaacaagtggatcatctg

SEQ ID NO: 421458 - DNA, 55 bp, Artificial
  Synthetic oligonucleotide
ggatcagtttattgactcttccaatacacagagttggaagcaccgattcaaggtt

SEQ ID NO: 421459 - DNA, 55 bp, Artificial
  Synthetic oligonucleotide
ggatcagtttcctttagggcgtcgctttttgtcacaaagaggcgtgggctgtaaa

SEQ ID NO: 421460 - DNA, 55 bp, Artificial
  Synthetic oligonucleotide
ggatcatagacctctgtacgtcaatacgggttaagcatcctggaggagtactcct

SEQ ID NO: 421461 - DNA, 52 bp, Artificial
  Synthetic oligonucleotide
ggatcatattgtacaaaagctcaaacaatgttttagaaaactacctgttaac

SEQ ID NO: 421462 - DNA, 60 bp, Artificial
  Synthetic oligonucleotide
ggatcatcatgtactgtgaaagtgtgtccactgaatacacaaacgttaggaataggttgt

SEQ ID NO: 421463 - DNA, 55 bp, Artificial
  Synthetic oligonucleotide
ggatcatccacggaatcagactgcacgggtgttggcattttacatccctagtggg

SEQ ID NO: 421464 - DNA, 60 bp, Artificial
  Synthetic oligonucleotide
ggatcatccggcggacccgtgctctgctctaggggacacgccgtgggcttattcagagcg

SEQ ID NO: 421465 - DNA, 60 bp, Artificial
  Synthetic oligonucleotide
ggatcatccggtggacccgtgctctgccctaggggacatgccgtgggcctgttcagagca

SEQ ID NO: 421466 - DNA, 55 bp, Artificial
  Synthetic oligonucleotide
ggatcatctatccgcagtgccgcctcacaatttctgtcggttcccctgtctcact

SEQ ID NO: 421467 - DNA, 56 bp, Artificial
  Synthetic oligonucleotide
ggatcatctatttagacccctcattggggggagtgtctgggatgtcccttggaagg

SEQ ID NO: 421468 - DNA, 55 bp, Artificial
  Synthetic oligonucleotide
ggatcatgactcgtggattacttggtagttaccaagcaggagcaggcgtgatggt

SEQ ID NO: 421469 - DNA, 58 bp, Artificial
  Synthetic oligonucleotide
ggatcatgtattgaagtgcgcgttaccggctgagagttcaatgacaggtgaacaattg

SEQ ID NO: 421470 - DNA, 60 bp, Artificial
  Synthetic oligonucleotide
ggatcatttccatctcggtgatgatatggatccagagcttagaggtcttgcacaggcact

SEQ ID NO: 421471 - DNA, 53 bp, Artificial
  Synthetic oligonucleotide
ggatcatttttggtatttatggtactgaagggcttctgttaaaccaaccttag

SEQ ID NO: 421472 - DNA, 58 bp, Artificial
  Synthetic oligonucleotide
ggatccaaaccctgatttttagcagttgctcttttacctagaattgtgtcaattgtga

SEQ ID NO: 421473 - DNA, 55 bp, Artificial
  Synthetic oligonucleotide
ggatccaaagaacactcaagaccacgttcgatcgttgtgcttattggcttggcat

SEQ ID NO: 421474 - DNA, 58 bp, Artificial
  Synthetic oligonucleotide
ggatccaaagttcggattcgtaccatacagcctgaactttggactgggccgcatgccc

SEQ ID NO: 421475 - DNA, 55 bp, Artificial
  Synthetic oligonucleotide
ggatccaaatatggcaccacagtagtcaatcgcatgggtgcactgtgtatgaggg

SEQ ID NO: 421476 - DNA, 57 bp, Artificial
  Synthetic oligonucleotide
ggatccaactactacaccacaaactgaacgtatgatgcgagtaaattggaagaaagg

SEQ ID NO: 421477 - DNA, 55 bp, Artificial
  Synthetic oligonucleotide
ggatccaaggtgagccaggacaaggaaaatctttcttgacccacaccctctccag

SEQ ID NO: 421478 - DNA, 59 bp, Artificial
  Synthetic oligonucleotide
ggatccaagtgataagctcagtggtttatttgttctgactatcttattagacagaaaac

SEQ ID NO: 421479 - DNA, 60 bp, Artificial
  Synthetic oligonucleotide
ggatccaatgcggacatggcgaaagttgcacatgtccgcgcgcgttggtgttcctgtcga

SEQ ID NO: 421480 - DNA, 60 bp, Artificial
  Synthetic oligonucleotide
ggatccacaaacatgtgggatccattactgcacgaatttccagaaagcgttcatggtcta

SEQ ID NO: 421481 - DNA, 55 bp, Artificial
  Synthetic oligonucleotide
ggatccacatcatcaatgacgttgtaccaagcgtcgttgttatacaccttggggc

SEQ ID NO: 421482 - DNA, 60 bp, Artificial
  Synthetic oligonucleotide
ggatccaccaacatgtgggatccattattgcacgaatttccacgtagcgttcatggtctg

SEQ ID NO: 421483 - DNA, 55 bp, Artificial
  Synthetic oligonucleotide
ggatccaccattctgggtcagccactgaacagaccaaactttatgggagtggagc

SEQ ID NO: 421484 - DNA, 58 bp, Artificial
  Synthetic oligonucleotide
ggatccacgcttcacacgtcaagagggcccccagtcaagatgaagaaacccacgaaga

SEQ ID NO: 421485 - DNA, 53 bp, Artificial
  Synthetic oligonucleotide
ggatccactgttgttgaaagacaccgctccccgttcgcacgtcgctctggtct

SEQ ID NO: 421486 - DNA, 55 bp, Artificial
  Synthetic oligonucleotide
ggatccacttgtaaacgagttccctgaaaccgtacatggtctacggtgcatgctc

SEQ ID NO: 421487 - DNA, 60 bp, Artificial
  Synthetic oligonucleotide
ggatccagaacctatcaaattgaagatgacggctcgaaatcagccatatctcggctaata

SEQ ID NO: 421488 - DNA, 60 bp, Artificial
  Synthetic oligonucleotide
ggatccagccggttctggtgctgtttagccacaatgccgcagattggttcgctgtgctca

SEQ ID NO: 421489 - DNA, 59 bp, Artificial
  Synthetic oligonucleotide
ggatccagcgattctaacttcattgtcatcaaatttaaatgcagttatgttctggttag

SEQ ID NO: 421490 - DNA, 55 bp, Artificial
  Synthetic oligonucleotide
ggatccagtagaccctaatttagagccctggaatcatccggggagtcagcctgaa

SEQ ID NO: 421491 - DNA, 52 bp, Artificial
  Synthetic oligonucleotide
ggatccagtgcatggggtgtactatgacccagaaaaggaattaatagcagaa

SEQ ID NO: 421492 - DNA, 55 bp, Artificial
  Synthetic oligonucleotide
ggatccatcacagtttactgaaccaatggtaagcctaacatctgctgcgacagga

SEQ ID NO: 421493 - DNA, 60 bp, Artificial
  Synthetic oligonucleotide
ggatccatgacaactgttgtgtggtacctacgcatgctgaatgcggagagactgtggaca

SEQ ID NO: 421494 - DNA, 50 bp, Artificial
  Synthetic oligonucleotide
ggatccattaatcaacgagtttcccgaaaccctgcacgggtttcgctgta

SEQ ID NO: 421495 - DNA, 58 bp, Artificial
  Synthetic oligonucleotide
ggatccattgcttaatgagtttcctgaaaccgttcacggttttaggtgcatgttagca

SEQ ID NO: 421496 - DNA, 57 bp, Artificial
  Synthetic oligonucleotide
ggatcccaaattacattcaatgtattataaaggtaacagtttatgggagaccataga

SEQ ID NO: 421497 - DNA, 55 bp, Artificial
  Synthetic oligonucleotide
ggatcccaagaaggaaggtgtagcagaagttacgacaaagaacccaaggagggca

SEQ ID NO: 421498 - DNA, 51 bp, Artificial
  Synthetic oligonucleotide
ggatcccaggatgtgttctctgatgcaaggttcaactcttccgaggagatc

SEQ ID NO: 421499 - DNA, 60 bp, Artificial
  Synthetic oligonucleotide
ggatcccaggctagcggacactgtgcatgcagattatgacccatgtctctcgggtctcac

SEQ ID NO: 421500 - DNA, 55 bp, Artificial
  Synthetic oligonucleotide
ggatcccagtgacttatttgtccacactaaggaagccatttaccgcaatgcacac

SEQ ID NO: 421501 - DNA, 55 bp, Artificial
  Synthetic oligonucleotide
ggatcccatcagaagacacctggtttgacggactgaactataacggagagtctga

SEQ ID NO: 421502 - DNA, 60 bp, Artificial
  Synthetic oligonucleotide
ggatcccgaatgaattcaacaaggcatgtgaattaactgattcaagctggatagagcttg

SEQ ID NO: 421503 - DNA, 56 bp, Artificial
  Synthetic oligonucleotide
ggatcccgacctcaatttgcgacacgcgcggcggtgtgtacccctgggagggtcga

SEQ ID NO: 421504 - DNA, 60 bp, Artificial
  Synthetic oligonucleotide
ggatcccggctggcacattcaaggtgcaatatgggctccaaaccttctaccaggatccca

SEQ ID NO: 421505 - DNA, 53 bp, Artificial
  Synthetic oligonucleotide
ggatccctaccagtaaagccttaactagaggaaatacactattagaaacaacg

SEQ ID NO: 421506 - DNA, 58 bp, Artificial
  Synthetic oligonucleotide
ggatccctcctcatgggaattggagttcgacatcaaaattgaaggacctaatgctggt

SEQ ID NO: 421507 - DNA, 55 bp, Artificial
  Synthetic oligonucleotide
ggatccctggagttgctgtacagcatgcgagatagcatgcagaaaccataccggt

SEQ ID NO: 421508 - DNA, 55 bp, Artificial
  Synthetic oligonucleotide
ggatccctggtcaggaccctcaccggggctgccaccttttcagatgaaccagttt

SEQ ID NO: 421509 - DNA, 55 bp, Artificial
  Synthetic oligonucleotide
ggatccgaacctactgctcgacaggtggaagatcgcggaaagagatggtagcctc

SEQ ID NO: 421510 - DNA, 58 bp, Artificial
  Synthetic oligonucleotide
ggatccgacgaacagaaccaagcatactgttcgaagacaggcatattttttgaagagg

SEQ ID NO: 421511 - DNA, 59 bp, Artificial
  Synthetic oligonucleotide
ggatccgatgagacaaccttcgtcgataccacgacattcgttccggtgaatgcggcttg

SEQ ID NO: 421512 - DNA, 60 bp, Artificial
  Synthetic oligonucleotide
ggatccgctgaactttggccagatcttcactatgtacgacaatgagcccactactgctaa

SEQ ID NO: 421513 - DNA, 60 bp, Artificial
  Synthetic oligonucleotide
ggatccgtatcattggggttggttgtattcaatgttctattgcatgtcgtgagcatcata

SEQ ID NO: 421514 - DNA, 53 bp, Artificial
  Synthetic oligonucleotide
ggatccgtctgacgtcctagtttttgtcccgtacgatcaagaaccgctcaacg

SEQ ID NO: 421515 - DNA, 57 bp, Artificial
  Synthetic oligonucleotide
ggatccgttggcaagccctagccggcttgctaagttccttagagagaacggctacaa

SEQ ID NO: 421516 - DNA, 55 bp, Artificial
  Synthetic oligonucleotide
ggatccgttgtgtatccattttaaattacggcaatttaacgtttacggctgatga

SEQ ID NO: 421517 - DNA, 60 bp, Artificial
  Synthetic oligonucleotide
ggatcctaacaagggccgcattgacgggctcatagcttatgataactcaagtgaaggatg

SEQ ID NO: 421518 - DNA, 51 bp, Artificial
  Synthetic oligonucleotide
ggatcctaatgaagagaggggaaacccaggagtgaaaggatgggcctttga

SEQ ID NO: 421519 - DNA, 59 bp, Artificial
  Synthetic oligonucleotide
ggatcctacgtcacttacctggatcttttactgaatgatgagctagacgattacacgta

SEQ ID NO: 421520 - DNA, 55 bp, Artificial
  Synthetic oligonucleotide
ggatcctagaaaatccatggatggaagacaaaactccagtggaatcatgggagga

SEQ ID NO: 421521 - DNA, 55 bp, Artificial
  Synthetic oligonucleotide
ggatcctccttgggttatcccattgaaacaaatggaggaaatacaatttcaatgt

SEQ ID NO: 421522 - DNA, 55 bp, Artificial
  Synthetic oligonucleotide
ggatcctcggagctgactgaaatcagaggaaagacgtcctcaggggcagacagag

SEQ ID NO: 421523 - DNA, 60 bp, Artificial
  Synthetic oligonucleotide
ggatcctctaaagcttgggtacacttttgagagcatcgcgcagctacttgacatcacact

SEQ ID NO: 421524 - DNA, 55 bp, Artificial
  Synthetic oligonucleotide
ggatcctctattcagagccaatacacacaatccagactgggacttcaaccccaac

SEQ ID NO: 421525 - DNA, 55 bp, Artificial
  Synthetic oligonucleotide
ggatcctctggttcgtgaagaagtgactagactgatattagctttaacgggagac

SEQ ID NO: 421526 - DNA, 60 bp, Artificial
  Synthetic oligonucleotide
ggatcctgaactcagggaacttgcccagacccttgtggacatcaaggtcagggagatctc

SEQ ID NO: 421527 - DNA, 58 bp, Artificial
  Synthetic oligonucleotide
ggatcctgaacttagaggtcttgcccaggcactgattgaccaaaaggtgaaagagatt

SEQ ID NO: 421528 - DNA, 55 bp, Artificial
  Synthetic oligonucleotide
ggatcctgagttgcgaacactggcacagagtttgattgatgttaaagtgaaggag

SEQ ID NO: 421529 - DNA, 55 bp, Artificial
  Synthetic oligonucleotide
ggatcctgccatgatgatttatgactctggtcatatacccttcctcaacgttgat

SEQ ID NO: 421530 - DNA, 60 bp, Artificial
  Synthetic oligonucleotide
ggatcctgcttacgcatgctacattcaaggcgaaaacgtgcagccccttctgatatttac

SEQ ID NO: 421531 - DNA, 60 bp, Artificial
  Synthetic oligonucleotide
ggatccttatttagatagtgatcatactctagatgctgaggctctaacttatttatcaaa

SEQ ID NO: 421532 - DNA, 55 bp, Artificial
  Synthetic oligonucleotide
ggatccttcagcaatggcgttccgcagtctgctgagtgtttatcaccaagcatgc

SEQ ID NO: 421533 - DNA, 60 bp, Artificial
  Synthetic oligonucleotide
ggatccttcaggatgtaagatcgcaccttgtcggtgctcttggcgctctgaatattgggg

SEQ ID NO: 421534 - DNA, 55 bp, Artificial
  Synthetic oligonucleotide
ggatcctttgggaaagcactaagagtaatattcaccaaatgtttgatgcactatg

SEQ ID NO: 421535 - DNA, 57 bp, Artificial
  Synthetic oligonucleotide
ggatcgaaagataaaccgttgcgcttgttaagccgttatcaaaatatactgcgtgaa

SEQ ID NO: 421536 - DNA, 59 bp, Artificial
  Synthetic oligonucleotide
ggatcgaagcagtaagtgaaagcttgcggtaccttaatacatatcagtaagatcgaaaa

SEQ ID NO: 421537 - DNA, 53 bp, Artificial
  Synthetic oligonucleotide
ggatcgacgaaggtgggaagacagctccctagttacgaccccgacaaggacgg

SEQ ID NO: 421538 - DNA, 58 bp, Artificial
  Synthetic oligonucleotide
ggatcgacgagcgtataccggcgaacattaatcagtttggcgcctttatcgaggaagc

SEQ ID NO: 421539 - DNA, 60 bp, Artificial
  Synthetic oligonucleotide
ggatcgacgtcatcaatgacgttgaaccacgcatcgtttgaatacacttttgggctaaga

SEQ ID NO: 421540 - DNA, 60 bp, Artificial
  Synthetic oligonucleotide
ggatcgatccggtcctgtgtggaacggagctagggtcaccactagtgctcgatgactgtt

SEQ ID NO: 421541 - DNA, 58 bp, Artificial
  Synthetic oligonucleotide
ggatcgatcttgacctgaataacggggtcgattactcaaccattggatcatcattaat

SEQ ID NO: 421542 - DNA, 60 bp, Artificial
  Synthetic oligonucleotide
ggatcgatgataaaaagatacatccgagggtgatgatgaggttcaaggtcccacgatcac

SEQ ID NO: 421543 - DNA, 60 bp, Artificial
  Synthetic oligonucleotide
ggatcgatggatactacgtatgcaaattcaacgcagagtgaatcattcttaacgtcaact

SEQ ID NO: 421544 - DNA, 59 bp, Artificial
  Synthetic oligonucleotide
ggatcgatttaggagatcttttggaaggcggcttgttgacattatgtgttgaacattat

SEQ ID NO: 421545 - DNA, 55 bp, Artificial
  Synthetic oligonucleotide
ggatcgcaaccatcgtacgcgtcgggtgaacatttatacattgtgtcctcacatc

SEQ ID NO: 421546 - DNA, 52 bp, Artificial
  Synthetic oligonucleotide
ggatcgcagagagaaaacctacgagtacgggtctgcgggagaggtcctcaag

SEQ ID NO: 421547 - DNA, 58 bp, Artificial
  Synthetic oligonucleotide
ggatcgcagggttcgtaggttgtgtggggatggagacaggtattttgttgagatggac

SEQ ID NO: 421548 - DNA, 56 bp, Artificial
  Synthetic oligonucleotide
ggatcgcatacctttggctacttcagaaggcttccctcatgtcatgtcacgagaac

SEQ ID NO: 421549 - DNA, 60 bp, Artificial
  Synthetic oligonucleotide
ggatcgcatgtgactgttgtatatgataaggattctaataatgcaatggaatacgctgta

SEQ ID NO: 421550 - DNA, 54 bp, Artificial
  Synthetic oligonucleotide
ggatcgcccacggaagttatcggtttggagataacttccccgatcgaagatagt

SEQ ID NO: 421551 - DNA, 60 bp, Artificial
  Synthetic oligonucleotide
ggatcgcccatgctagctttctgtcaaggactatcttacgcgttctatatcacgaagcca

SEQ ID NO: 421552 - DNA, 55 bp, Artificial
  Synthetic oligonucleotide
ggatcgcgaaattcgtgtgtcccgtacggtcttcgatccggcgacgtacaagggc

SEQ ID NO: 421553 - DNA, 60 bp, Artificial
  Synthetic oligonucleotide
ggatcgcgcaatcttcgcttgcgacacccgttcttacttcgcgttctcgtggatactcaa

SEQ ID NO: 421554 - DNA, 60 bp, Artificial
  Synthetic oligonucleotide
ggatcgcgcgggtcaagtgtatatggtgcatatacatccgcaggcacgtaataaagcgag

SEQ ID NO: 421555 - DNA, 55 bp, Artificial
  Synthetic oligonucleotide
ggatcgcttcgtgtgttgattgaactacttaggagggagtgttctgaatacttcc

SEQ ID NO: 421556 - DNA, 59 bp, Artificial
  Synthetic oligonucleotide
ggatcggaactgacagggtcatgccgccatgcgaacggggcggagttacccgagcctga

SEQ ID NO: 421557 - DNA, 55 bp, Artificial
  Synthetic oligonucleotide
ggatcggaaggcctgcgatcgctctttaacaccttagcggtcctttggtgtgtcc

SEQ ID NO: 421558 - DNA, 55 bp, Artificial
  Synthetic oligonucleotide
ggatcggaagtattacgacggaatgttgcttgatgtgtaggttggtgatgagggt

SEQ ID NO: 421559 - DNA, 59 bp, Artificial
  Synthetic oligonucleotide
ggatcggagaaccgttccaggaacgcgtctagccaatcacagtcgcaaggtaagctgag

SEQ ID NO: 421560 - DNA, 55 bp, Artificial
  Synthetic oligonucleotide
ggatcggatgtgtttcgtggcacctccgacccttctcatctcatactggctctcg

SEQ ID NO: 421561 - DNA, 55 bp, Artificial
  Synthetic oligonucleotide
ggatcggcaacgcggtttgcagagtgttcggttgtatatgttgatggacgtgctt

SEQ ID NO: 421562 - DNA, 56 bp, Artificial
  Synthetic oligonucleotide
ggatcggcacccacacgttcgcggccgacaggacgtacacggctactagctgccag

SEQ ID NO: 421563 - DNA, 58 bp, Artificial
  Synthetic oligonucleotide
ggatcggcctagcttgatgcgcgccccaaaagagatgcaagtcccgttggttctttct

SEQ ID NO: 421564 - DNA, 58 bp, Artificial
  Synthetic oligonucleotide
ggatcggctgggaagagtagatcctatgggaatccccggtctcctcttgtgtccagcc

SEQ ID NO: 421565 - DNA, 60 bp, Artificial
  Synthetic oligonucleotide
ggatcgggtatgccagtatcgttcctgattctgatcgacctccacaagtattatggcaat

SEQ ID NO: 421566 - DNA, 60 bp, Artificial
  Synthetic oligonucleotide
ggatcggtaattctcttgttacgctgggcatactaagtctctattatgacgtgaggcatt

SEQ ID NO: 421567 - DNA, 60 bp, Artificial
  Synthetic oligonucleotide
ggatcggtcaccgtgccacatcccaatatcgaggaggtggctctgtccaacattggagag

SEQ ID NO: 421568 - DNA, 57 bp, Artificial
  Synthetic oligonucleotide
ggatcggtgaagactattccacgccctgtgatggtacatggcttagggccatttggg

SEQ ID NO: 421569 - DNA, 55 bp, Artificial
  Synthetic oligonucleotide
ggatcgtaccggttgcgtgtgcacacggttatggcggtttggtaaccactgaccc

SEQ ID NO: 421570 - DNA, 58 bp, Artificial
  Synthetic oligonucleotide
ggatcgtacgggaatagggtaatcatttctcataagatgtcaagattgtcaaatgggg

SEQ ID NO: 421571 - DNA, 55 bp, Artificial
  Synthetic oligonucleotide
ggatcgtactaactgttatttaacaagctagatcattgatagtctagcaagtggc

SEQ ID NO: 421572 - DNA, 55 bp, Artificial
  Synthetic oligonucleotide
ggatcgtagcactcaagtgaaatactcaggtacatcccttgtccgagtggcgagg

SEQ ID NO: 421573 - DNA, 55 bp, Artificial
  Synthetic oligonucleotide
ggatcgtatattaaatttggcagagggattgctaaataacacgattggtggtaac

SEQ ID NO: 421574 - DNA, 55 bp, Artificial
  Synthetic oligonucleotide
ggatcgtcagacaatctgagggatcagttgacacaagaatggcccgcgagctagg

SEQ ID NO: 421575 - DNA, 57 bp, Artificial
  Synthetic oligonucleotide
ggatcgtcagtcaagaaagaagaagaagtgcttacgggcaaccttcaaacactgaaa

SEQ ID NO: 421576 - DNA, 60 bp, Artificial
  Synthetic oligonucleotide
ggatcgtcatttcgtggtgcctttgcctcttgagttggtctttttatagctgtctctatg

SEQ ID NO: 421577 - DNA, 60 bp, Artificial
  Synthetic oligonucleotide
ggatcgtctacagttgcttaccaccttctctgacgatgtgctcggtggtggatcccccgc

SEQ ID NO: 421578 - DNA, 55 bp, Artificial
  Synthetic oligonucleotide
ggatcgtctctatgcaataaggcatgacattgttgatcagatgataaagcatgac

SEQ ID NO: 421579 - DNA, 55 bp, Artificial
  Synthetic oligonucleotide
ggatcgtgagtatctgctgcgtgtgcggggcggggagttcaccaaggaggatgtc

SEQ ID NO: 421580 - DNA, 55 bp, Artificial
  Synthetic oligonucleotide
ggatcgtgtggaagtttatgcggatgaaggaaccatagtggaaaattttggcagt

SEQ ID NO: 421581 - DNA, 55 bp, Artificial
  Synthetic oligonucleotide
ggatcgttgagactctttccttctgaacgcgtgttaaccacgaactctacattca

SEQ ID NO: 421582 - DNA, 58 bp, Artificial
  Synthetic oligonucleotide
ggatctaaactccctctaagatgtgtactggggtgggttgctctggctaactctaaga

SEQ ID NO: 421583 - DNA, 55 bp, Artificial
  Synthetic oligonucleotide
ggatctaaatgtgatcgatacataccgggcttttagcactgcattgaacagatcg

SEQ ID NO: 421584 - DNA, 60 bp, Artificial
  Synthetic oligonucleotide
ggatctaaattcctagctcctgatggtgatacagttagttataactgtggtcaaccaatg

SEQ ID NO: 421585 - DNA, 55 bp, Artificial
  Synthetic oligonucleotide
ggatctacaacgacgtctgtatgataattgctataggttaactagtgttgaagag

SEQ ID NO: 421586 - DNA, 60 bp, Artificial
  Synthetic oligonucleotide
ggatctacagaatgtatagaagccctgatgtccctaagggatgtgagggtccatgtaagg

SEQ ID NO: 421587 - DNA, 60 bp, Artificial
  Synthetic oligonucleotide
ggatctacctatcatgggtaccagcacacaaagggataggaggaaatgagcaagtaggta

SEQ ID NO: 421588 - DNA, 60 bp, Artificial
  Synthetic oligonucleotide
ggatctacgatgagatgggtacggaagcgttcactagactacggccttgtgatgtatgga

SEQ ID NO: 421589 - DNA, 55 bp, Artificial
  Synthetic oligonucleotide
ggatctagcaatagcaattgtcggaatcctaacaatgagagagggaatcatgggg

SEQ ID NO: 421590 - DNA, 57 bp, Artificial
  Synthetic oligonucleotide
ggatctagccgactcgttgatctctgagtttatgcagggctgtgacgagttcacggt

SEQ ID NO: 421591 - DNA, 60 bp, Artificial
  Synthetic oligonucleotide
ggatctaggaggtgatcttatagcgcattgtttgcgtacttgagtggcctagggtaatga

SEQ ID NO: 421592 - DNA, 54 bp, Artificial
  Synthetic oligonucleotide
ggatctattatgacgggatgttaatctcacaatccctgaagagtatagctaggt

SEQ ID NO: 421593 - DNA, 59 bp, Artificial
  Synthetic oligonucleotide
ggatctcaaggtcttatgattgtttgtcctagaaagtttctagccaaggattggagtga

SEQ ID NO: 421594 - DNA, 55 bp, Artificial
  Synthetic oligonucleotide
ggatctcacacatctgtgtcacttcataagaggaaagattgtcaatgacagtgta

SEQ ID NO: 421595 - DNA, 55 bp, Artificial
  Synthetic oligonucleotide
ggatctcacactggtgatagtacacttgtcaacccacaggcagataatgtaacaa

SEQ ID NO: 421596 - DNA, 60 bp, Artificial
  Synthetic oligonucleotide
ggatctcagcttaggcttaaccagctcaacaagttgttcatcaaagtccaaccagcatac

SEQ ID NO: 421597 - DNA, 60 bp, Artificial
  Synthetic oligonucleotide
ggatctcatctttctggcacggtctgcactcattctgaggggatcagtggctcataagtc

SEQ ID NO: 421598 - DNA, 55 bp, Artificial
  Synthetic oligonucleotide
ggatctcatgccgggtacgccagttgcgtcaagttattcgacggcactttagccc

SEQ ID NO: 421599 - DNA, 55 bp, Artificial
  Synthetic oligonucleotide
ggatctccaggatactgcagagaattagagaagtcgtcagactaggagcagccta

SEQ ID NO: 421600 - DNA, 60 bp, Artificial
  Synthetic oligonucleotide
ggatctcctagataccgcctcagctctatatcgggaagcactagagtctcctgaacattg

SEQ ID NO: 421601 - DNA, 57 bp, Artificial
  Synthetic oligonucleotide
ggatctcctgggcattacccggacgagttcataccgaacttcgacgcgattagcgag

SEQ ID NO: 421602 - DNA, 60 bp, Artificial
  Synthetic oligonucleotide
ggatctcgaggacctggctttagagccttggagcacaccaaatactcctgttgcgggcac

SEQ ID NO: 421603 - DNA, 60 bp, Artificial
  Synthetic oligonucleotide
ggatctcgaggtcgagtcatgtaagggtgtgtatgctaacataagcaagaacgccctgtt

SEQ ID NO: 421604 - DNA, 55 bp, Artificial
  Synthetic oligonucleotide
ggatctcgtgcaaatctctaaggagatctactattgccagcacgaatgggaggag

SEQ ID NO: 421605 - DNA, 60 bp, Artificial
  Synthetic oligonucleotide
ggatctcttaatcccctcagacaagaattgaggctacaagtatcaactgtctcgatgtcg

SEQ ID NO: 421606 - DNA, 55 bp, Artificial
  Synthetic oligonucleotide
ggatctgaaaggatcgaaaggaattgcaacgttgtacagttcgaaagagccaggg

SEQ ID NO: 421607 - DNA, 59 bp, Artificial
  Synthetic oligonucleotide
ggatctgaatgggaattggtacgattttggagacttcgtacaggtagcaccaggctgcg

SEQ ID NO: 421608 - DNA, 55 bp, Artificial
  Synthetic oligonucleotide
ggatctgactattttcgctacccgtcttacggcagcgcgtgagttacagctcgtg

SEQ ID NO: 421609 - DNA, 51 bp, Artificial
  Synthetic oligonucleotide
ggatctgagacatcccagattctaaccacaccgttcccagcacctctctgc

SEQ ID NO: 421610 - DNA, 55 bp, Artificial
  Synthetic oligonucleotide
ggatctgagcctaagctgatagtgattaagggaacattagtttacatgggtgtct

SEQ ID NO: 421611 - DNA, 60 bp, Artificial
  Synthetic oligonucleotide
ggatctgcaatactgccaccctttgattgtatacaaataccttcaggacagggctcctcc

SEQ ID NO: 421612 - DNA, 60 bp, Artificial
  Synthetic oligonucleotide
ggatctgcaatagaaaattatggcatatttgttcattcgtcactctaaagcctccggcaa

SEQ ID NO: 421613 - DNA, 57 bp, Artificial
  Synthetic oligonucleotide
ggatctgcccctaaggttgaaggagtgttctcactcgtcgtggttatggatcgtaaa

SEQ ID NO: 421614 - DNA, 55 bp, Artificial
  Synthetic oligonucleotide
ggatctgccggtggtccgtgacattcctcagttcatcactgacgtgttctcgccg

SEQ ID NO: 421615 - DNA, 60 bp, Artificial
  Synthetic oligonucleotide
ggatctgcgcgttagcgcggaagatggtcggaggccattacgtgcagatggccgtcatca

SEQ ID NO: 421616 - DNA, 55 bp, Artificial
  Synthetic oligonucleotide
ggatctgcgtggaaacgctcagagaattgtttatgacgatgaactgcagatgcac

SEQ ID NO: 421617 - DNA, 60 bp, Artificial
  Synthetic oligonucleotide
ggatctgctatcaggtctctaaggcgtgctgtcccgttgaatgagaccggtttaacactg

SEQ ID NO: 421618 - DNA, 55 bp, Artificial
  Synthetic oligonucleotide
ggatctgcttagtactgtggatggtctgacagatcagcaaaaggaaaacattgtg

SEQ ID NO: 421619 - DNA, 55 bp, Artificial
  Synthetic oligonucleotide
ggatctggcagacggtccattacatatacagtgccgagattcagtacaccacgtg

SEQ ID NO: 421620 - DNA, 59 bp, Artificial
  Synthetic oligonucleotide
ggatctggtctaccgatgagtgtgtaatgaacctcccgccgctattcgatagcggtttg

SEQ ID NO: 421621 - DNA, 55 bp, Artificial
  Synthetic oligonucleotide
ggatctgtattgttattagaaccaacaaggccattagcggagaacgtgttcaagc

SEQ ID NO: 421622 - DNA, 55 bp, Artificial
  Synthetic oligonucleotide
ggatctgtcaaccgcttcaaaggggcgtggacagaataccccgactccgtgatgt

SEQ ID NO: 421623 - DNA, 60 bp, Artificial
  Synthetic oligonucleotide
ggatctgtctgaacaaactatcccctacactccatcattgtcagatacccgtgatccaca

SEQ ID NO: 421624 - DNA, 57 bp, Artificial
  Synthetic oligonucleotide
ggatctgtgatcgctatcctttaagggttgagtacaagggtggtatgacccagttcg

SEQ ID NO: 421625 - DNA, 60 bp, Artificial
  Synthetic oligonucleotide
ggatctgtgatgttgcatccagcaggggttacattatcaacacagttcacagactacgtg

SEQ ID NO: 421626 - DNA, 55 bp, Artificial
  Synthetic oligonucleotide
ggatctgttaaagcatgcctgactgagaaacaggaaaatccatcgcactctttcc

SEQ ID NO: 421627 - DNA, 60 bp, Artificial
  Synthetic oligonucleotide
ggatctgttatggttcaagcatcgtggaatgaacgaacaccatctcatggttaaaaatgt

SEQ ID NO: 421628 - DNA, 55 bp, Artificial
  Synthetic oligonucleotide
ggatcttaaactatgctagaacctatatcccaaatataggaacccttctagcccc

SEQ ID NO: 421629 - DNA, 59 bp, Artificial
  Synthetic oligonucleotide
ggatcttacacgaatgccttgagtcttactcgattgagtgttcatatgcatataacatg

SEQ ID NO: 421630 - DNA, 55 bp, Artificial
  Synthetic oligonucleotide
ggatcttacagaacgtttgtcctctgatcttgacagatatcctttgggtcgcaga

SEQ ID NO: 421631 - DNA, 60 bp, Artificial
  Synthetic oligonucleotide
ggatcttaccgtgatatcagaattctagatggcaatggcgcaatcctatttctaatgtgg

SEQ ID NO: 421632 - DNA, 60 bp, Artificial
  Synthetic oligonucleotide
ggatcttactggctgctagcattgacgtgacagtagcggcagtattaactatactgttgc

SEQ ID NO: 421633 - DNA, 60 bp, Artificial
  Synthetic oligonucleotide
ggatcttatggatttcctttgccatatcatgctttttgctttgtgttgttctgctggggt

SEQ ID NO: 421634 - DNA, 55 bp, Artificial
  Synthetic oligonucleotide
ggatcttcaatataagctcacctacttgtttaatcaatcgtgtacagagattccg

SEQ ID NO: 421635 - DNA, 60 bp, Artificial
  Synthetic oligonucleotide
ggatcttcaccgccggagctctgaatgggatatctacagaatgtttcgctgtcgacagtt

SEQ ID NO: 421636 - DNA, 58 bp, Artificial
  Synthetic oligonucleotide
ggatcttcaccgttggtgctctgaacggaatgtcaacggaatgtttcgccgtcgacag

SEQ ID NO: 421637 - DNA, 55 bp, Artificial
  Synthetic oligonucleotide
ggatcttcatcttctagcttctcttttgaactcaataggcctctatctgagaccg

SEQ ID NO: 421638 - DNA, 55 bp, Artificial
  Synthetic oligonucleotide
ggatcttctaatactgtgggggatcaaccatcctattgatgcagcagaacaaacc

SEQ ID NO: 421639 - DNA, 60 bp, Artificial
  Synthetic oligonucleotide
ggatcttgaagactctcgtgaacacggaacatgcctatgagaacaaacgccacactgttg

SEQ ID NO: 421640 - DNA, 55 bp, Artificial
  Synthetic oligonucleotide
ggatcttgaaggatcgaccatgatatctaataggcgttataactgttgggcctcg

SEQ ID NO: 421641 - DNA, 60 bp, Artificial
  Synthetic oligonucleotide
ggatcttgagaaaccctggatatgccttggtggcagctgtcattggatggatgctcggaa

SEQ ID NO: 421642 - DNA, 58 bp, Artificial
  Synthetic oligonucleotide
ggatcttgctgaagagattgttcgcaaggttatgggcggtataagggtctcctttgct

SEQ ID NO: 421643 - DNA, 55 bp, Artificial
  Synthetic oligonucleotide
ggatcttgtgtcaaacaatgtatccacatgggcgtttaccagagggagttattgc

SEQ ID NO: 421644 - DNA, 56 bp, Artificial
  Synthetic oligonucleotide
ggatctttaacataagttccccaacatgccttgtcaataaagtgcagaaattccgg

SEQ ID NO: 421645 - DNA, 55 bp, Artificial
  Synthetic oligonucleotide
ggatctttaccctcctccacatttaatagcaaggtagcaaaattagtatgaccca

SEQ ID NO: 421646 - DNA, 55 bp, Artificial
  Synthetic oligonucleotide
ggatctttacggtacctttcagatgcctgctctcttcctgctgtgtacttggcta

SEQ ID NO: 421647 - DNA, 53 bp, Artificial
  Synthetic oligonucleotide
ggatctttaggcgcttcttttgatgtagatgctgcgatagaatttggtgcaca

SEQ ID NO: 421648 - DNA, 55 bp, Artificial
  Synthetic oligonucleotide
ggatctttcgctggcgaattttgggtgttcgcgctgctatgatcgatgttggcca

SEQ ID NO: 421649 - DNA, 55 bp, Artificial
  Synthetic oligonucleotide
ggatgaaactgggtgtgctatattgtgatgaatgtttcatgatacatagcggtca

SEQ ID NO: 421650 - DNA, 52 bp, Artificial
  Synthetic oligonucleotide
ggatgaaagatcggatatcaaactagggaatgtcaaaagaccaactaaggcc

SEQ ID NO: 421651 - DNA, 54 bp, Artificial
  Synthetic oligonucleotide
ggatgaaaggaactttgaagttctatgttgtggcacgagctagctctgattaca

SEQ ID NO: 421652 - DNA, 56 bp, Artificial
  Synthetic oligonucleotide
ggatgaaatggttagagaatcacaaagaaatggaattgcaccacaatcagattcac

SEQ ID NO: 421653 - DNA, 60 bp, Artificial
  Synthetic oligonucleotide
ggatgaactcaaggctcactgtgtcacactccctgtcagagttggtatgaacatgaatga

SEQ ID NO: 421654 - DNA, 55 bp, Artificial
  Synthetic oligonucleotide
ggatgaagactaccagggtaggctgtgcaatcctctgaacccgtttgtcagccat

SEQ ID NO: 421655 - DNA, 60 bp, Artificial
  Synthetic oligonucleotide
ggatgaagatatgtggagtggagatgtgaaccagcttctcatgaactatttcgggcacac

SEQ ID NO: 421656 - DNA, 60 bp, Artificial
  Synthetic oligonucleotide
ggatgaagatcaagagcttagtgttcgtgctgcttcaccctacctttttcataatttcac

SEQ ID NO: 421657 - DNA, 59 bp, Artificial
  Synthetic oligonucleotide
ggatgaagctcgttctctatttcggagtccgcatctgaatgcccggttcctattgtact

SEQ ID NO: 421658 - DNA, 55 bp, Artificial
  Synthetic oligonucleotide
ggatgaagcttggatgaatgaagtagtcaatgccgttgtatccaatgtgcatttg

SEQ ID NO: 421659 - DNA, 60 bp, Artificial
  Synthetic oligonucleotide
ggatgaagtccaagggcaacgcaactggcttctacatacaggagttgcatgtcacagatt

SEQ ID NO: 421660 - DNA, 55 bp, Artificial
  Synthetic oligonucleotide
ggatgaagttacacctgaggaaccattgaggcatgagagcccacctaggacacat

SEQ ID NO: 421661 - DNA, 54 bp, Artificial
  Synthetic oligonucleotide
ggatgaagtttcgcacgttggaatttaattcgctttcgattcaagaatgatgat

SEQ ID NO: 421662 - DNA, 58 bp, Artificial
  Synthetic oligonucleotide
ggatgaagtttctcaagtaggaatctaattcgttatctgtttgaaggtgggtatggca

SEQ ID NO: 421663 - DNA, 57 bp, Artificial
  Synthetic oligonucleotide
ggatgaagtttctcaggtaggaatttaattcgttatcgatttgaagatgggtatagc

SEQ ID NO: 421664 - DNA, 54 bp, Artificial
  Synthetic oligonucleotide
ggatgaatagcaccgggttcaccaagacgtgcgggggccccccgtgtaacatcg

SEQ ID NO: 421665 - DNA, 60 bp, Artificial
  Synthetic oligonucleotide
ggatgaatgactcaatcacaacctccttgggctgtcctctcaggcttttattgatggtcc

SEQ ID NO: 421666 - DNA, 55 bp, Artificial
  Synthetic oligonucleotide
ggatgaatgttccaatgcagtttggtggaggtgatcctgtagtgctatataggtc

SEQ ID NO: 421667 - DNA, 55 bp, Artificial
  Synthetic oligonucleotide
ggatgaattcggaatacccatttatctttcgagtagcgtaccacacgacttactc

SEQ ID NO: 421668 - DNA, 60 bp, Artificial
  Synthetic oligonucleotide
ggatgacaaatatgacgcatattgggaatttgttatccaatctcttatttatgcgcccat

SEQ ID NO: 421669 - DNA, 52 bp, Artificial
  Synthetic oligonucleotide
ggatgacaacataagagtgcctttttacgtcaaagatcttcctgagaccttg

SEQ ID NO: 421670 - DNA, 50 bp, Artificial
  Synthetic oligonucleotide
ggatgacaactccccaggcacaaggaggggtaccagtaggagacatttat

SEQ ID NO: 421671 - DNA, 55 bp, Artificial
  Synthetic oligonucleotide
ggatgacaactgggcaaggtttagagacgaaacggatcatgtatgtacgcccaat

SEQ ID NO: 421672 - DNA, 53 bp, Artificial
  Synthetic oligonucleotide
ggatgacaaggtattacagagttacatcaaaatgaaatgcaccctaggatgca

SEQ ID NO: 421673 - DNA, 55 bp, Artificial
  Synthetic oligonucleotide
ggatgacaagtggtttcgttcagtacttggattacgctggcaacgcaatcaacga

SEQ ID NO: 421674 - DNA, 58 bp, Artificial
  Synthetic oligonucleotide
ggatgacacgcctgtacactgtcgacattagttaagttgcaattacacgtctgttgcc

SEQ ID NO: 421675 - DNA, 55 bp, Artificial
  Synthetic oligonucleotide
ggatgacactgaaaacaccccattacttgctgcagcagacgccgatagacgggac

SEQ ID NO: 421676 - DNA, 55 bp, Artificial
  Synthetic oligonucleotide
ggatgacagaaaccttgttggtccagaatgcgaacccagattgtaagactatctt

SEQ ID NO: 421677 - DNA, 60 bp, Artificial
  Synthetic oligonucleotide
ggatgacattcgggacttttatgaagacaagcaattgactattgactttgacatcactgg

SEQ ID NO: 421678 - DNA, 57 bp, Artificial
  Synthetic oligonucleotide
ggatgacattgataaaatcccaactaatgctcttgagattaaaaagacgttcaagcc

SEQ ID NO: 421679 - DNA, 60 bp, Artificial
  Synthetic oligonucleotide
ggatgaccaagctgccactctgcatgaagagttcgctctaatcttatctgagtctgagga

SEQ ID NO: 421680 - DNA, 55 bp, Artificial
  Synthetic oligonucleotide
ggatgaccaccaccctaatgattcagaatgctaacccagattgtagaataattct

SEQ ID NO: 421681 - DNA, 55 bp, Artificial
  Synthetic oligonucleotide
ggatgaccatagcaagtaccccttttattggaccctcccaggaggactcactccc

SEQ ID NO: 421682 - DNA, 55 bp, Artificial
  Synthetic oligonucleotide
ggatgacctactcatagggtcagacagagaaataggggaacataggaggctggtc

SEQ ID NO: 421683 - DNA, 55 bp, Artificial
  Synthetic oligonucleotide
ggatgacctagcacataacgctgctgagctggacaagatacagatgatgataccc

SEQ ID NO: 421684 - DNA, 57 bp, Artificial
  Synthetic oligonucleotide
ggatgacctatttagaagatccaagaatacagttccattatgacaaaactctacctg

SEQ ID NO: 421685 - DNA, 58 bp, Artificial
  Synthetic oligonucleotide
ggatgacctctgaaagtagatgaccgtggaaagtcacgtagtgccccaataagcacgt

SEQ ID NO: 421686 - DNA, 60 bp, Artificial
  Synthetic oligonucleotide
ggatgacgaagataagattatgaaaccagcagaaaataatctagtatctagagtttgcga

SEQ ID NO: 421687 - DNA, 55 bp, Artificial
  Synthetic oligonucleotide
ggatgacgacatcactgccaatagcgaggctgtcaaatcgtgtgttcagagacaa

SEQ ID NO: 421688 - DNA, 51 bp, Artificial
  Synthetic oligonucleotide
ggatgactagttcggctgggccttcttatttggtgggggttttacgttttg

SEQ ID NO: 421689 - DNA, 60 bp, Artificial
  Synthetic oligonucleotide
ggatgactatgtcccccgcgtggttgccatgtacaaagatgtgtttggcatgtgggtcaa

SEQ ID NO: 421690 - DNA, 55 bp, Artificial
  Synthetic oligonucleotide
ggatgactcatgcatggaggaccggaatgggataaaacaacacaagtacctttac

SEQ ID NO: 421691 - DNA, 57 bp, Artificial
  Synthetic oligonucleotide
ggatgactgattctaaaacggttgctaaattagatgaagacgtgaataaacttagga

SEQ ID NO: 421692 - DNA, 60 bp, Artificial
  Synthetic oligonucleotide
ggatgactgtgtggtgaagcctctagatgagaggtttagcacatcccttctcttcctgaa

SEQ ID NO: 421693 - DNA, 60 bp, Artificial
  Synthetic oligonucleotide
ggatgacttccaattgattccaatgataagcaaatgcagaacaaaagaagggagacgaaa

SEQ ID NO: 421694 - DNA, 60 bp, Artificial
  Synthetic oligonucleotide
ggatgacttcctcctctgtcacccaaacgctcgtcaccttcacgcaattagcaacgctgt

SEQ ID NO: 421695 - DNA, 60 bp, Artificial
  Synthetic oligonucleotide
ggatgacttgctattaagcctagcgccggagtatgaacacatcttggacactctgaccga

SEQ ID NO: 421696 - DNA, 55 bp, Artificial
  Synthetic oligonucleotide
ggatgactttgacttctcagatattgacttatttggaccagctcattataaggag

SEQ ID NO: 421697 - DNA, 60 bp, Artificial
  Synthetic oligonucleotide
ggatgagaatgggttagttgagataagcgaagttacaatcattacatgtgagaatggttc

SEQ ID NO: 421698 - DNA, 55 bp, Artificial
  Synthetic oligonucleotide
ggatgagaatgtgcagatgaggagtcccatcttcgtgaagctctctacaaaccct

SEQ ID NO: 421699 - DNA, 57 bp, Artificial
  Synthetic oligonucleotide
ggatgagactgctagagacggatttggaggattcttctcaagaggagtggaaaacag

SEQ ID NO: 421700 - DNA, 60 bp, Artificial
  Synthetic oligonucleotide
ggatgagagaactgatcctgtacgacaaggaagagatcaggaggatttggcgtcaagcga

SEQ ID NO: 421701 - DNA, 60 bp, Artificial
  Synthetic oligonucleotide
ggatgagagcgttgggcctaatcttaagaacgtgctagagatggtcgactgccctgagtt

SEQ ID NO: 421702 - DNA, 55 bp, Artificial
  Synthetic oligonucleotide
ggatgagaggctaaggataactaaggtgagtgtaagctgtggttgggaagacgtg

SEQ ID NO: 421703 - DNA, 55 bp, Artificial
  Synthetic oligonucleotide
ggatgagatcaagtaaagatgcaggctatcccatgatcaatgcaccctcaaagac

SEQ ID NO: 421704 - DNA, 56 bp, Artificial
  Synthetic oligonucleotide
ggatgagattctgtcgtcggtctcacccatggcgaaatccatggtaagcatgatgg

SEQ ID NO: 421705 - DNA, 59 bp, Artificial
  Synthetic oligonucleotide
ggatgagcacgcttatcacgatatgtatggttttactaagaaagctagactttctaacg

SEQ ID NO: 421706 - DNA, 60 bp, Artificial
  Synthetic oligonucleotide
ggatgagcctcccaaaccttggagagatactatacaattagtgggtagtgagctctcaag

SEQ ID NO: 421707 - DNA, 55 bp, Artificial
  Synthetic oligonucleotide
ggatgagccttcctgacactgagaaatcttcagattacgatgcttgggcacaagc

SEQ ID NO: 421708 - DNA, 55 bp, Artificial
  Synthetic oligonucleotide
ggatgagctcaaggcccattgcgtaacactccctgtcagggttgggatgaacatg

SEQ ID NO: 421709 - DNA, 55 bp, Artificial
  Synthetic oligonucleotide
ggatgagcttctaagtctccaagagcccgtgataatgataagtccgcaactctcc

SEQ ID NO: 421710 - DNA, 54 bp, Artificial
  Synthetic oligonucleotide
ggatgaggacgtggagatgagggctcccatcttcgtgtagttcacgacaaattc

SEQ ID NO: 421711 - DNA, 60 bp, Artificial
  Synthetic oligonucleotide
ggatgagggtctttgcacttcatttcttgcttctgacactatctcaattgctgggctgca

SEQ ID NO: 421712 - DNA, 55 bp, Artificial
  Synthetic oligonucleotide
ggatgagtacacagaatggtggcaattaccatcatcgcaaggcacaacaggggcg

SEQ ID NO: 421713 - DNA, 55 bp, Artificial
  Synthetic oligonucleotide
ggatgagtattcctgccgatgagactcagttgtttaggacccatagtgcagttgg

SEQ ID NO: 421714 - DNA, 60 bp, Artificial
  Synthetic oligonucleotide
ggatgagtcatgagtcgctaactggtgccctcgccatgagactcactgacgatgacttga

SEQ ID NO: 421715 - DNA, 55 bp, Artificial
  Synthetic oligonucleotide
ggatgagtcttgtatcaggcgttccatcagtgcagagggaacaggcaaaccacgg

SEQ ID NO: 421716 - DNA, 55 bp, Artificial
  Synthetic oligonucleotide
ggatgagtgatggcgcagcgccaaaagccaacggttctgaagccagcggccagga

SEQ ID NO: 421717 - DNA, 59 bp, Artificial
  Synthetic oligonucleotide
ggatgagtgatgtatatgtcaataatagtcagctaataagcttaagtgaccttcaagac

SEQ ID NO: 421718 - DNA, 55 bp, Artificial
  Synthetic oligonucleotide
ggatgagtggaggaaaccatgccaacaatcacagtattagtcgcaccggaagttg

SEQ ID NO: 421719 - DNA, 55 bp, Artificial
  Synthetic oligonucleotide
ggatgagtgttcgtgactataagcggcagggttgcaatctggatcttgatgagag

SEQ ID NO: 421720 - DNA, 55 bp, Artificial
  Synthetic oligonucleotide
ggatgagtttgccaaaagctcaagtgaggttgtcattgacactactcctgaggac

SEQ ID NO: 421721 - DNA, 55 bp, Artificial
  Synthetic oligonucleotide
ggatgataaccatcgtggttattcccaccgaacggtttccctggacagacactaa

SEQ ID NO: 421722 - DNA, 60 bp, Artificial
  Synthetic oligonucleotide
ggatgatacagaaagtgctcatgcagctacagctgttattacgcaggatgttagggataa

SEQ ID NO: 421723 - DNA, 56 bp, Artificial
  Synthetic oligonucleotide
ggatgatacagagagacaagtgttagtatggaagtttgacagtcgcctggcactaa

SEQ ID NO: 421724 - DNA, 55 bp, Artificial
  Synthetic oligonucleotide
ggatgataggattgtacaaggtaagggatcacgttatatgtctgcaagtgtatac

SEQ ID NO: 421725 - DNA, 60 bp, Artificial
  Synthetic oligonucleotide
ggatgatatagcacatggaaagtatactccaggtgttattcctccagtgaacgtagataa

SEQ ID NO: 421726 - DNA, 55 bp, Artificial
  Synthetic oligonucleotide
ggatgatatgcgccaagcctttcttacgtccggcaaaatacaaggtttacgatct

SEQ ID NO: 421727 - DNA, 53 bp, Artificial
  Synthetic oligonucleotide
ggatgatattaacaagagatggtggtactaatgagaccatcgaggtggagacc

SEQ ID NO: 421728 - DNA, 60 bp, Artificial
  Synthetic oligonucleotide
ggatgatattgtgcaccgacccagttttcaccaggattggggctatgtttgaacaggatc

SEQ ID NO: 421729 - DNA, 50 bp, Artificial
  Synthetic oligonucleotide
ggatgatccctacgcacaacacgcgcctggccggagacctcgtgacgtgg

SEQ ID NO: 421730 - DNA, 58 bp, Artificial
  Synthetic oligonucleotide
ggatgatcctctcccctggcaagcacttccgcagtaacaggaggggggtcttcctcga

SEQ ID NO: 421731 - DNA, 58 bp, Artificial
  Synthetic oligonucleotide
ggatgatcgtaattctaaggatgttttctatgacaggtatcaaacgaatttaaatcga

SEQ ID NO: 421732 - DNA, 60 bp, Artificial
  Synthetic oligonucleotide
ggatgatcgttcgagcgatcacatttcccacaacttctaccgttgccatgccagtcttag

SEQ ID NO: 421733 - DNA, 55 bp, Artificial
  Synthetic oligonucleotide
ggatgatgagacttaccgccttgatggtggattgccctcaggatgctcgggtaca

SEQ ID NO: 421734 - DNA, 55 bp, Artificial
  Synthetic oligonucleotide
ggatgatgatttagctccctggaaatttggatggaattgggtggagctgttgggg

SEQ ID NO: 421735 - DNA, 55 bp, Artificial
  Synthetic oligonucleotide
ggatgatgcacacacttgagacccttgactataaagagtgtgaatggcccctgac

SEQ ID NO: 421736 - DNA, 55 bp, Artificial
  Synthetic oligonucleotide
ggatgatgctaaagctagatgggcagagatcaatacgctgacgggctatttgcag

SEQ ID NO: 421737 - DNA, 60 bp, Artificial
  Synthetic oligonucleotide
ggatgatggaaagtgccagaccagaagatgtgtctttccaggggcggggagtcttcgagc

SEQ ID NO: 421738 - DNA, 60 bp, Artificial
  Synthetic oligonucleotide
ggatgatgggtcaattacctatacatgttacatgaaattggaatcagcagaagcaattgg

SEQ ID NO: 421739 - DNA, 58 bp, Artificial
  Synthetic oligonucleotide
ggatgatggtcgaggtgccttatttagggtgaggagcctcggtggcagccccaccaaa

SEQ ID NO: 421740 - DNA, 59 bp, Artificial
  Synthetic oligonucleotide
ggatgattaagtgtttcaactgtggcaaagaaggacacctagccagaaattgcagggcc

SEQ ID NO: 421741 - DNA, 55 bp, Artificial
  Synthetic oligonucleotide
ggatgattcacatcggcaacggtatgtacctgtcaaatacccacactgcccgctc

SEQ ID NO: 421742 - DNA, 55 bp, Artificial
  Synthetic oligonucleotide
ggatgattctacgacaacagacatcaaacacatgcgctgaattgttgctcgcacg

SEQ ID NO: 421743 - DNA, 59 bp, Artificial
  Synthetic oligonucleotide
ggatgattgaacaagctccatttagctccctagcgcaagaagggaaagctccttacata

SEQ ID NO: 421744 - DNA, 60 bp, Artificial
  Synthetic oligonucleotide
ggatgattgcatatggagacgatgtaatcgcatcttacccctggcctatcgatgcttcct

SEQ ID NO: 421745 - DNA, 60 bp, Artificial
  Synthetic oligonucleotide
ggatgattgcattgagaatgtagattgcacagattattgttcccttaacctgatcaactc

SEQ ID NO: 421746 - DNA, 59 bp, Artificial
  Synthetic oligonucleotide
ggatgattgggactaccagtgtctgttaagtccacagtggtgttgtcccaagctctccc

SEQ ID NO: 421747 - DNA, 58 bp, Artificial
  Synthetic oligonucleotide
ggatgattgttgagagtactcaagcaaggaaaatagtatattcctaaacctctcgtta

SEQ ID NO: 421748 - DNA, 57 bp, Artificial
  Synthetic oligonucleotide
ggatgatttccaattaatcccaatgataagcaagtgtaggacgaaagaagggaggcg

SEQ ID NO: 421749 - DNA, 55 bp, Artificial
  Synthetic oligonucleotide
ggatgatttgattagctcggaagcaattcgatacaatccaaaggtgtatgcatac

SEQ ID NO: 421750 - DNA, 60 bp, Artificial
  Synthetic oligonucleotide
ggatgattttcaattgatcccaatgataagcaaatgcagaaccaaggaagggcggaggaa

SEQ ID NO: 421751 - DNA, 56 bp, Artificial
  Synthetic oligonucleotide
ggatgcaaaatgtatgccctgcaccaagggactaccatcaggaacaaacattcaaa

SEQ ID NO: 421752 - DNA, 59 bp, Artificial
  Synthetic oligonucleotide
ggatgcaaaggtgctgtttcaaaactggggagtcgaacccattgacaatgtcatgggaa

SEQ ID NO: 421753 - DNA, 60 bp, Artificial
  Synthetic oligonucleotide
ggatgcaaatattggatgtttgactttaagatgttcagtgaggataagccatatggggcc

SEQ ID NO: 421754 - DNA, 60 bp, Artificial
  Synthetic oligonucleotide
ggatgcaaatccacaaccgcggtcttgctagatgccctgatggggaaatcaggtacacgg

SEQ ID NO: 421755 - DNA, 55 bp, Artificial
  Synthetic oligonucleotide
ggatgcaaatttgccccaggtgtgctaaatatgagtgtggtaagaagtgtgaacc

SEQ ID NO: 421756 - DNA, 60 bp, Artificial
  Synthetic oligonucleotide
ggatgcaagggacgatcaattagaaaataccgtactgcacatcgcagtggtgcaacggga

SEQ ID NO: 421757 - DNA, 55 bp, Artificial
  Synthetic oligonucleotide
ggatgcaattttctgcaatccttagctggaggagtcagattggaaggtagaacag

SEQ ID NO: 421758 - DNA, 55 bp, Artificial
  Synthetic oligonucleotide
ggatgcacgagcggagagcctatattggctttattcttcaatctggagaaacccc

SEQ ID NO: 421759 - DNA, 60 bp, Artificial
  Synthetic oligonucleotide
ggatgcactctccgcactcgggggaccccagactgtacaggcgttgtccgtgcttctctc

SEQ ID NO: 421760 - DNA, 57 bp, Artificial
  Synthetic oligonucleotide
ggatgcactgaggaaactggctgatggtgacgagtatgaaaacgctatggccgagat

SEQ ID NO: 421761 - DNA, 55 bp, Artificial
  Synthetic oligonucleotide
ggatgcagaaagagggaagctgaagcggagagcaattgcaacccctgggatgcaa

SEQ ID NO: 421762 - DNA, 56 bp, Artificial
  Synthetic oligonucleotide
ggatgcagaacaaatagaacgagtacaaattgagaccctaactgaaggaaacgtta

SEQ ID NO: 421763 - DNA, 60 bp, Artificial
  Synthetic oligonucleotide
ggatgcagatccagtagagtctcagtcaactttggaaatagctggattagttaggaaaaa

SEQ ID NO: 421764 - DNA, 60 bp, Artificial
  Synthetic oligonucleotide
ggatgcaggaaatgacccagaagacattgactgttggtgtgacaaacaacccatgtacgt

SEQ ID NO: 421765 - DNA, 55 bp, Artificial
  Synthetic oligonucleotide
ggatgcaggagttgtagagcctgtttatggacctaacttgtccaatcaagacaag

SEQ ID NO: 421766 - DNA, 55 bp, Artificial
  Synthetic oligonucleotide
ggatgcagtggaagtttccgtttgattaagtccgcaagtttgttaagaggtggag

SEQ ID NO: 421767 - DNA, 54 bp, Artificial
  Synthetic oligonucleotide
ggatgcagtgggagaaagaaattgaccagtacacaaacacaatatacaccttaa

SEQ ID NO: 421768 - DNA, 55 bp, Artificial
  Synthetic oligonucleotide
ggatgcataattaccagcttgaccggccgggacaaaaaccaggtagagggtgagg

SEQ ID NO: 421769 - DNA, 60 bp, Artificial
  Synthetic oligonucleotide
ggatgcatcagagctcttggatacttatcagatagagcatccatagctctaccggttaca

SEQ ID NO: 421770 - DNA, 55 bp, Artificial
  Synthetic oligonucleotide
ggatgcatcgcgttctctatatctgagcccgcctctgatgggcttaagcctacag

SEQ ID NO: 421771 - DNA, 58 bp, Artificial
  Synthetic oligonucleotide
ggatgcattatacaatcccacagtgttatatgcatgtcagtgattattataatccacc

SEQ ID NO: 421772 - DNA, 58 bp, Artificial
  Synthetic oligonucleotide
ggatgcatttgaattgaggaaagggagaactctgaagagagggaccaaagagagggat

SEQ ID NO: 421773 - DNA, 55 bp, Artificial
  Synthetic oligonucleotide
ggatgccaactgtatccacgttatgcagaagttccacacatttcacgtaagcaag

SEQ ID NO: 421774 - DNA, 55 bp, Artificial
  Synthetic oligonucleotide
ggatgccaagggctaaccaagccgaaagttcaaatagtgttggaccacaacaccc

SEQ ID NO: 421775 - DNA, 60 bp, Artificial
  Synthetic oligonucleotide
ggatgccaggggtgcgagctctgccggtacacgcgcgtcactaacgatcgcgcctatgtc

SEQ ID NO: 421776 - DNA, 60 bp, Artificial
  Synthetic oligonucleotide
ggatgcccaagattagagctgcttttcagtggttcgagaatatcaaagaggtcgtgaaga

SEQ ID NO: 421777 - DNA, 55 bp, Artificial
  Synthetic oligonucleotide
ggatgccccatggcgtttaatggcggggacctccaaggtttcccgctctgctaat

SEQ ID NO: 421778 - DNA, 55 bp, Artificial
  Synthetic oligonucleotide
ggatgccccggttactccgagaccggattgcgggcattccgaatcgtgtacggac

SEQ ID NO: 421779 - DNA, 54 bp, Artificial
  Synthetic oligonucleotide
ggatgccccgtggcgttctatggcgggaacctccaaggttagtcgaaacgccaa

SEQ ID NO: 421780 - DNA, 53 bp, Artificial
  Synthetic oligonucleotide
ggatgcccgaaagtgtcaccgaccggctgagtggccgctacgagttcgtgttt

SEQ ID NO: 421781 - DNA, 52 bp, Artificial
  Synthetic oligonucleotide
ggatgccctatatgccacggcatgaaagatacggatagcttcgctggacttc

SEQ ID NO: 421782 - DNA, 55 bp, Artificial
  Synthetic oligonucleotide
ggatgcctaggtgtgtttggcttatcaatatcactagcttcaaaaccaaccggaa

SEQ ID NO: 421783 - DNA, 58 bp, Artificial
  Synthetic oligonucleotide
ggatgcctatgctcgggttcgcaactacctcttatcgataataattcggtacctgcgg

SEQ ID NO: 421784 - DNA, 55 bp, Artificial
  Synthetic oligonucleotide
ggatgccttggcccatgtcaagtacagacattatatgacttgggatttcatcttg

SEQ ID NO: 421785 - DNA, 54 bp, Artificial
  Synthetic oligonucleotide
ggatgcgaagagtttggttgcctggctgtaagtgatgggtgcgtgttcgggtca

SEQ ID NO: 421786 - DNA, 55 bp, Artificial
  Synthetic oligonucleotide
ggatgcgaagttttatcgtaccgacacagacacggtttaccataccgcgacgaac

SEQ ID NO: 421787 - DNA, 55 bp, Artificial
  Synthetic oligonucleotide
ggatgcgacgcttattcagcagatcactactactttgatagtgtggacggagttg

SEQ ID NO: 421788 - DNA, 58 bp, Artificial
  Synthetic oligonucleotide
ggatgcgagaaaattcttagcgtactctttccactagttcctacagggtcagagaatc

SEQ ID NO: 421789 - DNA, 55 bp, Artificial
  Synthetic oligonucleotide
ggatgcgcgcggataacgccatctctgccagacctctcgttccccaagtaaccag

SEQ ID NO: 421790 - DNA, 54 bp, Artificial
  Synthetic oligonucleotide
ggatgcggtgacttacgtaccttgatgcagtttaaaaaacgttcaccaggacgg

SEQ ID NO: 421791 - DNA, 57 bp, Artificial
  Synthetic oligonucleotide
ggatgcgtacaagggggagagggtcgttctgtgggacgactatggaatgagcaatcc

SEQ ID NO: 421792 - DNA, 55 bp, Artificial
  Synthetic oligonucleotide
ggatgcgtcactgttacacaccaccggaattaacgcctgatgaagatgatgacct

SEQ ID NO: 421793 - DNA, 55 bp, Artificial
  Synthetic oligonucleotide
ggatgcgtcagactcaattagtagtatttcaacgcagactgctactattagtagg

SEQ ID NO: 421794 - DNA, 59 bp, Artificial
  Synthetic oligonucleotide
ggatgcgtgcactaagtgtctacatctatagtcgtttgtggttcaagtttttgtgttag

SEQ ID NO: 421795 - DNA, 55 bp, Artificial
  Synthetic oligonucleotide
ggatgcgtgggtccttgtaaggtacaggattatgaattcaagatggatgtcccac

SEQ ID NO: 421796 - DNA, 60 bp, Artificial
  Synthetic oligonucleotide
ggatgctacagtatcttcactcaccatgtactggacaactaacagaatgttatattatgc

SEQ ID NO: 421797 - DNA, 60 bp, Artificial
  Synthetic oligonucleotide
ggatgctactgtctccaagtctgtaggcttaatagcctcacagcccatcgtctacacacg

SEQ ID NO: 421798 - DNA, 60 bp, Artificial
  Synthetic oligonucleotide
ggatgctagccgctttgaccaacacgtgtcagagcaggcgcttaagtgggaacacgggat

SEQ ID NO: 421799 - DNA, 60 bp, Artificial
  Synthetic oligonucleotide
ggatgctaggtgtgtacgcacgctcgactaactacactacaccagtcggacagttggtag

SEQ ID NO: 421800 - DNA, 53 bp, Artificial
  Synthetic oligonucleotide
ggatgctatccccccgtttccggagtattctgaccctttcgggtcagagacgg

SEQ ID NO: 421801 - DNA, 57 bp, Artificial
  Synthetic oligonucleotide
ggatgctcgtggtggtactcgttatgttgaatttacgttaaatcattttggtgtaca

SEQ ID NO: 421802 - DNA, 55 bp, Artificial
  Synthetic oligonucleotide
ggatgctgaagtcattgctagagcagctcaaacacttcatatgaacagtgtatca

SEQ ID NO: 421803 - DNA, 60 bp, Artificial
  Synthetic oligonucleotide
ggatgctgagagtaattggagtctcgaggacttcgtttgtcaagtgaattgaggtaagtg

SEQ ID NO: 421804 - DNA, 53 bp, Artificial
  Synthetic oligonucleotide
ggatgctgattccccggggtctaatacagtcgtccctaacctgtttagttccc

SEQ ID NO: 421805 - DNA, 50 bp, Artificial
  Synthetic oligonucleotide
ggatgctgtcaaccctttgtttggctgctacagtatcaacagcctgctgg

SEQ ID NO: 421806 - DNA, 58 bp, Artificial
  Synthetic oligonucleotide
ggatgcttatttcgagtgaattaaagtgttttggaaatactgccatagctaagtgtaa

SEQ ID NO: 421807 - DNA, 55 bp, Artificial
  Synthetic oligonucleotide
ggatgcttgtgaggaggtctatcttaacccgaagggtaagtactcctgcaaggcg

SEQ ID NO: 421808 - DNA, 50 bp, Artificial
  Synthetic oligonucleotide
ggatggaaactaacgtatgtcggatataatggaagtgatacgagggggca

SEQ ID NO: 421809 - DNA, 55 bp, Artificial
  Synthetic oligonucleotide
ggatggaaagaggggaatgatacctgttccttacgtcgagaagtgtagaccttcc

SEQ ID NO: 421810 - DNA, 55 bp, Artificial
  Synthetic oligonucleotide
ggatggaaaggaaagagaggacacagaagagagcactcgatttacagaaagggcg

SEQ ID NO: 421811 - DNA, 60 bp, Artificial
  Synthetic oligonucleotide
ggatggaaatgtgctgacctggttggggatgtgaggtcgaagaatcgtggatttttgcat

SEQ ID NO: 421812 - DNA, 55 bp, Artificial
  Synthetic oligonucleotide
ggatggaacagggtgttttgaaatattccacaaatgtgatgatcaatgcatggag

SEQ ID NO: 421813 - DNA, 55 bp, Artificial
  Synthetic oligonucleotide
ggatggaacattgtcaccatgaagagtggggtggatgtgttctataggccttctg

SEQ ID NO: 421814 - DNA, 54 bp, Artificial
  Synthetic oligonucleotide
ggatggaacgagtaccaccgcggtaaatgctggacgcctttacgttacgtacac

SEQ ID NO: 421815 - DNA, 55 bp, Artificial
  Synthetic oligonucleotide
ggatggaatgatgaggtgtctatgaaagtggagcccattgacggtgtggtgctgg

SEQ ID NO: 421816 - DNA, 55 bp, Artificial
  Synthetic oligonucleotide
ggatggaatggctatggagctcaccctgtggctataaatatcgtcatgactgaag

SEQ ID NO: 421817 - DNA, 58 bp, Artificial
  Synthetic oligonucleotide
ggatggaattgggaggagttatgtggatgatgtaggtcgaaatgtcgtgggtttttga

SEQ ID NO: 421818 - DNA, 55 bp, Artificial
  Synthetic oligonucleotide
ggatggacaagagtataggcgtcgatgcttacatggtagaggtgtgtgtctctcc

SEQ ID NO: 421819 - DNA, 59 bp, Artificial
  Synthetic oligonucleotide
ggatggacacagcatgagacaactggaggttcaaaggcctgcgcagtgtcaggtaaacc

SEQ ID NO: 421820 - DNA, 55 bp, Artificial
  Synthetic oligonucleotide
ggatggacattccagcaattccgcgactctcgttgtaccactaaaccgaggtcag

SEQ ID NO: 421821 - DNA, 60 bp, Artificial
  Synthetic oligonucleotide
ggatggacgagaatatcaagctcaagaaccacacgaacagttgcatgttctggctagtca

SEQ ID NO: 421822 - DNA, 55 bp, Artificial
  Synthetic oligonucleotide
ggatggacgtatcagaaggaactgtgatgaatgaggccgtgaatgctgtcgcagc

SEQ ID NO: 421823 - DNA, 59 bp, Artificial
  Synthetic oligonucleotide
ggatggactagaggggactttcatcacatgatcgttaaccaacccagtgacagactcaa

SEQ ID NO: 421824 - DNA, 60 bp, Artificial
  Synthetic oligonucleotide
ggatggagagtgtggtatacctatggtatcaactaatgatggcgccatagtaggtataca

SEQ ID NO: 421825 - DNA, 56 bp, Artificial
  Synthetic oligonucleotide
ggatggaggacccggggaaagaagtgttagtatggaagtttgacagcaccctagca

SEQ ID NO: 421826 - DNA, 58 bp, Artificial
  Synthetic oligonucleotide
ggatggagttacaacattgacgccactcacttctggtaccgtgactatcaaggggact

SEQ ID NO: 421827 - DNA, 55 bp, Artificial
  Synthetic oligonucleotide
ggatggatatagaccatgataaggatggctacacaaaggtccaggtcaaaatgcc

SEQ ID NO: 421828 - DNA, 60 bp, Artificial
  Synthetic oligonucleotide
ggatggatccagcagtaagaatggttgcgggtgttgtaggccatctacttttcacagcgg

SEQ ID NO: 421829 - DNA, 55 bp, Artificial
  Synthetic oligonucleotide
ggatggatgataacatcaagctgaagaaccacactaacagcgttatgttctggct

SEQ ID NO: 421830 - DNA, 51 bp, Artificial
  Synthetic oligonucleotide
ggatggatgcacaatagtatatgttggatcagctccaggaacacatattaa

SEQ ID NO: 421831 - DNA, 55 bp, Artificial
  Synthetic oligonucleotide
ggatggatgggcgctacttggttatctcgggctaatggatcccttaggttcggag

SEQ ID NO: 421832 - DNA, 55 bp, Artificial
  Synthetic oligonucleotide
ggatggattctcctcctatagatcctctttcacgtggcgagatcacgctcgccag

SEQ ID NO: 421833 - DNA, 55 bp, Artificial
  Synthetic oligonucleotide
ggatggatttctatcccctgaaaatttgggctgtttggaagctattatatctctg

SEQ ID NO: 421834 - DNA, 54 bp, Artificial
  Synthetic oligonucleotide
ggatggcaaaactatacacatgggccaggagtaaggtatcccaaaacctttggg

SEQ ID NO: 421835 - DNA, 56 bp, Artificial
  Synthetic oligonucleotide
ggatggcaaaactatacatatgggccagggataaggtatccaaggacctttgggtg

SEQ ID NO: 421836 - DNA, 60 bp, Artificial
  Synthetic oligonucleotide
ggatggcaccaatacccatatcatggcgactgaggcgtctaattacgcccagtatcgggt

SEQ ID NO: 421837 - DNA, 52 bp, Artificial
  Synthetic oligonucleotide
ggatggcagtcgacgtcacgaacagccgttcaatcgatactctcgtaaatct

SEQ ID NO: 421838 - DNA, 53 bp, Artificial
  Synthetic oligonucleotide
ggatggcatatcccgatcacgcgaacgcgattgttgacaatggggacatgcgt

SEQ ID NO: 421839 - DNA, 60 bp, Artificial
  Synthetic oligonucleotide
ggatggccccatcatcttcgagagacactccagatacaagtatcactatgatgctgacta

SEQ ID NO: 421840 - DNA, 52 bp, Artificial
  Synthetic oligonucleotide
ggatggccgtgatttgattttggtttcgcctacagatggaagcgatctagcg

SEQ ID NO: 421841 - DNA, 51 bp, Artificial
  Synthetic oligonucleotide
ggatggcctaccccccccggaacgcgctcgctcactccgtgcacttgcgga

SEQ ID NO: 421842 - DNA, 55 bp, Artificial
  Synthetic oligonucleotide
ggatggccttgggtaacgcgtattacgacaaaatactatcactccacacaggtga

SEQ ID NO: 421843 - DNA, 60 bp, Artificial
  Synthetic oligonucleotide
ggatggcggcaataattattgaaccaaacttatcagcagagcagcgtacatacaggatat

SEQ ID NO: 421844 - DNA, 55 bp, Artificial
  Synthetic oligonucleotide
ggatggctagctgtggcaaacacttgggcaaacgttccatgctcaccgtttaatg

SEQ ID NO: 421845 - DNA, 54 bp, Artificial
  Synthetic oligonucleotide
ggatggcttctgtccccccgcggctcacggcctagttggggccctacagacccc

SEQ ID NO: 421846 - DNA, 55 bp, Artificial
  Synthetic oligonucleotide
ggatggcttggggtgggagttacattgcacttgactcaggtcgaggaaactggga

SEQ ID NO: 421847 - DNA, 57 bp, Artificial
  Synthetic oligonucleotide
ggatggcttgtcactctgcagcatttgaggatttaagagtgtcaagtttcatcagag

SEQ ID NO: 421848 - DNA, 59 bp, Artificial
  Synthetic oligonucleotide
ggatgggaagcaggtatggtgggattagtaataaaggcattctcatgccctgaacaaaa

SEQ ID NO: 421849 - DNA, 55 bp, Artificial
  Synthetic oligonucleotide
ggatgggaagccatgaggtcaatggaacatggatggtacacacacttgagaccct

SEQ ID NO: 421850 - DNA, 60 bp, Artificial
  Synthetic oligonucleotide
ggatgggaattgtgcaaccgtatatgcggaatgattttgaccggaacgagatgcccgatc

SEQ ID NO: 421851 - DNA, 55 bp, Artificial
  Synthetic oligonucleotide
ggatgggactgtaatgcccaatgtcctgtcctatgccgctcagacctcacgcggg

SEQ ID NO: 421852 - DNA, 55 bp, Artificial
  Synthetic oligonucleotide
ggatgggagaaccatgaagaatggtaaaacagagatcgaaagcaagggcagcaga

SEQ ID NO: 421853 - DNA, 59 bp, Artificial
  Synthetic oligonucleotide
ggatgggagaactagccaatgaaggcctatttgccttttacgtgcagtggattgaccta

SEQ ID NO: 421854 - DNA, 55 bp, Artificial
  Synthetic oligonucleotide
ggatgggagacaggctcatgagcttagaacatcgtttccagttacaatgtgactg

SEQ ID NO: 421855 - DNA, 55 bp, Artificial
  Synthetic oligonucleotide
ggatgggaggagtgggcgatcctgaagttgaagttggctatctgccttttgagtc

SEQ ID NO: 421856 - DNA, 55 bp, Artificial
  Synthetic oligonucleotide
ggatgggattttatattgcatcccagttatatgtggcgtaagcgccgtaaacctg

SEQ ID NO: 421857 - DNA, 57 bp, Artificial
  Synthetic oligonucleotide
ggatgggcacacccggcccactgaacgcgggagtcctactgcgggaggcgtcaattc

SEQ ID NO: 421858 - DNA, 56 bp, Artificial
  Synthetic oligonucleotide
ggatgggcaccaagcaatataacagacaaagatagctcacaaaacccaggatcagg

SEQ ID NO: 421859 - DNA, 59 bp, Artificial
  Synthetic oligonucleotide
ggatgggcaggttatcgttgctgtacgggatcaggaaaggcccatagaaagacacgtca

SEQ ID NO: 421860 - DNA, 55 bp, Artificial
  Synthetic oligonucleotide
ggatgggcattgtgggcttccactagtcgcacaagaagatggtgccatcgtggga

SEQ ID NO: 421861 - DNA, 55 bp, Artificial
  Synthetic oligonucleotide
ggatgggccctcaacgcctaatgttccttgtgttgtggaagctcgctcggggagc

SEQ ID NO: 421862 - DNA, 60 bp, Artificial
  Synthetic oligonucleotide
ggatgggccttcgattattatggatataggtctgaaaggccgcgcagcggaatcggccac

SEQ ID NO: 421863 - DNA, 57 bp, Artificial
  Synthetic oligonucleotide
ggatgggcgtaggtgtagggaacctcactatctacccgcaccagtggataaatttgc

SEQ ID NO: 421864 - DNA, 55 bp, Artificial
  Synthetic oligonucleotide
ggatggggacaccatgccgggcctatttgcctacaaagccgccaccaaagctggc

SEQ ID NO: 421865 - DNA, 60 bp, Artificial
  Synthetic oligonucleotide
ggatggggagaacaatcagcaaagattcacgctcaggttacgagactttcaaagtcattg

SEQ ID NO: 421866 - DNA, 55 bp, Artificial
  Synthetic oligonucleotide
ggatggggatggacctttctcatgaggttaatgttacccctcaggcgcgcctgtc

SEQ ID NO: 421867 - DNA, 52 bp, Artificial
  Synthetic oligonucleotide
ggatgggggtgttgccgtaaaccgctaggcgttggggtgtcatcccctcctc

SEQ ID NO: 421868 - DNA, 60 bp, Artificial
  Synthetic oligonucleotide
ggatggggtacggctgcacagatacgctccggcgtgcaaacctctcctgcgggatgaggt

SEQ ID NO: 421869 - DNA, 60 bp, Artificial
  Synthetic oligonucleotide
ggatggggtgctgtgaattcgggagcaggagtgactgctgcatgcaaattcggaagctcc

SEQ ID NO: 421870 - DNA, 58 bp, Artificial
  Synthetic oligonucleotide
ggatgggtcgtggcgcaccactcctggagtcgcaaaggtgagtcgccgtttgaattac

SEQ ID NO: 421871 - DNA, 60 bp, Artificial
  Synthetic oligonucleotide
ggatgggtctgacacattactgacattgtacaattcgaccaatcaaaattcacgatagaa

SEQ ID NO: 421872 - DNA, 55 bp, Artificial
  Synthetic oligonucleotide
ggatgggtgatcgttttgcttgcgattctttggatagtatagccagagatataca

SEQ ID NO: 421873 - DNA, 55 bp, Artificial
  Synthetic oligonucleotide
ggatgggttatgagctacacccagacaaatggactgtacaacctattaagctacc

SEQ ID NO: 421874 - DNA, 59 bp, Artificial
  Synthetic oligonucleotide
ggatgggtttataaacatcactatgatagcattcatccaaaagtaagttcggaagtaca

SEQ ID NO: 421875 - DNA, 51 bp, Artificial
  Synthetic oligonucleotide
ggatggtaacttgacaaagggtgaggaaggtatagcatacgctacagcatg

SEQ ID NO: 421876 - DNA, 60 bp, Artificial
  Synthetic oligonucleotide
ggatggtaagatgatgctggctattaaggagcagaggcaccgacggttgttgacactgtc

SEQ ID NO: 421877 - DNA, 60 bp, Artificial
  Synthetic oligonucleotide
ggatggtaatgatatatcagtagatgtaaagcatagagccttagtacaaataaaatgccc

SEQ ID NO: 421878 - DNA, 58 bp, Artificial
  Synthetic oligonucleotide
ggatggtaatgtgttgacctgcatctggaatggaggtcgaagaacctttggttcctcg

SEQ ID NO: 421879 - DNA, 60 bp, Artificial
  Synthetic oligonucleotide
ggatggtaattcaccggcggctcaagctgtcccagtggatttcactcgcaattgggcgcc

SEQ ID NO: 421880 - DNA, 60 bp, Artificial
  Synthetic oligonucleotide
ggatggtaccgatcgatgtcaaagtacctctcgtcacgagtagtgacgggtttgatgcac

SEQ ID NO: 421881 - DNA, 60 bp, Artificial
  Synthetic oligonucleotide
ggatggtactcgataccgttaatttgcgtgacgcatcacgcctcagaagctgggtgggta

SEQ ID NO: 421882 - DNA, 49 bp, Artificial
  Synthetic oligonucleotide
ggatggtactggaagttcccggacgtgttaactgaaaccggggtttttg

SEQ ID NO: 421883 - DNA, 60 bp, Artificial
  Synthetic oligonucleotide
ggatggtcacaaggtcagatgtttattgatgacatacattataatggaaatgttgaaacg

SEQ ID NO: 421884 - DNA, 60 bp, Artificial
  Synthetic oligonucleotide
ggatggtcagaaagacctagtgagacatcattgtctgaagtcagaattggaagagctatc

SEQ ID NO: 421885 - DNA, 60 bp, Artificial
  Synthetic oligonucleotide
ggatggtcgagcacaagttgccacgatggagtcggcagaatgactatttgtatacagggg

SEQ ID NO: 421886 - DNA, 56 bp, Artificial
  Synthetic oligonucleotide
ggatggtcttgctccttctggggttgtatgaaagattggttttttgacaaattgcc

SEQ ID NO: 421887 - DNA, 58 bp, Artificial
  Synthetic oligonucleotide
ggatggtgcttcaagctagtaccagttgacccagggggagtagaagaagccagtgagg

SEQ ID NO: 421888 - DNA, 55 bp, Artificial
  Synthetic oligonucleotide
ggatggtggctaatggttacgtaactgacagatgctcacctatattcgggaacgc

SEQ ID NO: 421889 - DNA, 53 bp, Artificial
  Synthetic oligonucleotide
ggatggtgggacctcttcaatgggaaagtgtggaggaaccgggccaaaccttc

SEQ ID NO: 421890 - DNA, 60 bp, Artificial
  Synthetic oligonucleotide
ggatggtggtggaaattaccagatgcattaaagagtatgggcatattcggtgagaatatg

SEQ ID NO: 421891 - DNA, 55 bp, Artificial
  Synthetic oligonucleotide
ggatggtgtcatgggcgacagtatacctgaggctgaatttgagggtgttaagcac

SEQ ID NO: 421892 - DNA, 60 bp, Artificial
  Synthetic oligonucleotide
ggatggtgtgtgtatcgtcgaaagggtttactcattcacgctcctgatgagcaatactca

SEQ ID NO: 421893 - DNA, 59 bp, Artificial
  Synthetic oligonucleotide
ggatggtgttcatgttacaaatattcacatgtaacgtgtgcttttattcgtggtattcc

SEQ ID NO: 421894 - DNA, 60 bp, Artificial
  Synthetic oligonucleotide
ggatggttctcccctgtgtgctctcgtggacgtacatcagtctcaggtagaatggtgcag

SEQ ID NO: 421895 - DNA, 56 bp, Artificial
  Synthetic oligonucleotide
ggatggttgacatccttaggcaaaatccaactgaagaacaggctgtggatatatgc

SEQ ID NO: 421896 - DNA, 55 bp, Artificial
  Synthetic oligonucleotide
ggatggttgctccactttatggcattgagggaacaaagactcccgtctctccagg

SEQ ID NO: 421897 - DNA, 60 bp, Artificial
  Synthetic oligonucleotide
ggatggttgtatagacatcactatgattgtccacacccaaaaataagttcagaagtacat

SEQ ID NO: 421898 - DNA, 52 bp, Artificial
  Synthetic oligonucleotide
ggatggttttaagaagcaccacgtcttttggtccggcttgttgaactcgcag

SEQ ID NO: 421899 - DNA, 55 bp, Artificial
  Synthetic oligonucleotide
ggatggttttgcttatacaagcttaagtaagttccagcaataccgttgtgaagat

SEQ ID NO: 421900 - DNA, 54 bp, Artificial
  Synthetic oligonucleotide
ggatggttttgttaagggagagtactgtcttttaatagatgggagtcccctcca

SEQ ID NO: 421901 - DNA, 57 bp, Artificial
  Synthetic oligonucleotide
ggatgtaaaactacggacgtggatacatttgagattgttgcgtcgtctgaaaaattg

SEQ ID NO: 421902 - DNA, 55 bp, Artificial
  Synthetic oligonucleotide
ggatgtaaagaattggatgacagaaaccttgttggtccaaaatgcgaatccagac

SEQ ID NO: 421903 - DNA, 55 bp, Artificial
  Synthetic oligonucleotide
ggatgtaacgaaatgcctaaagactggagttcaactcgcgcgaccaacgatttag

SEQ ID NO: 421904 - DNA, 55 bp, Artificial
  Synthetic oligonucleotide
ggatgtaactcggagtccgtttccgtgtgaggcctacctattgtgcttcgggaag

SEQ ID NO: 421905 - DNA, 55 bp, Artificial
  Synthetic oligonucleotide
ggatgtaatgccaacacgcattttgacatctactaaagtacgtaacgcaatcttg

SEQ ID NO: 421906 - DNA, 55 bp, Artificial
  Synthetic oligonucleotide
ggatgtaattagtcctggtccaattggcacatgggtcaacggtgtatctatttgg

SEQ ID NO: 421907 - DNA, 53 bp, Artificial
  Synthetic oligonucleotide
ggatgtaattcattaagattcaaccagttaatgtcagcaagagtgcccaaatc

SEQ ID NO: 421908 - DNA, 56 bp, Artificial
  Synthetic oligonucleotide
ggatgtacagaagtccggatgtcccaaggggatgagagggtccctgtaaggtacag

SEQ ID NO: 421909 - DNA, 57 bp, Artificial
  Synthetic oligonucleotide
ggatgtaccagtccacgattgtaacacgacttgtcaaacacccaaaggtgctataaa

SEQ ID NO: 421910 - DNA, 56 bp, Artificial
  Synthetic oligonucleotide
ggatgtacgacctgccatattactgtcgcccaaggtaatgtggtaaggcgttaggg

SEQ ID NO: 421911 - DNA, 55 bp, Artificial
  Synthetic oligonucleotide
ggatgtacgaggcagatgcaaagatcgagagagagagtgtctctgagttgctcgc

SEQ ID NO: 421912 - DNA, 55 bp, Artificial
  Synthetic oligonucleotide
ggatgtacgcattgcaccaaggaacaaccattagaaacaagcactcaaacggaac

SEQ ID NO: 421913 - DNA, 50 bp, Artificial
  Synthetic oligonucleotide
ggatgtacgccagcaagtacagagacgtatgaagtactatcaaatgacac

SEQ ID NO: 421914 - DNA, 60 bp, Artificial
  Synthetic oligonucleotide
ggatgtagcaacctacttaggggatacaaaagtcttagcagatgcatctaatgtatttgg

SEQ ID NO: 421915 - DNA, 50 bp, Artificial
  Synthetic oligonucleotide
ggatgtagtgaatggttttcgttagaagcagagtgttctgattctagttt

SEQ ID NO: 421916 - DNA, 55 bp, Artificial
  Synthetic oligonucleotide
ggatgtagtttccactttctggttggaaaatggccagttccacaggatcatttgg

SEQ ID NO: 421917 - DNA, 60 bp, Artificial
  Synthetic oligonucleotide
ggatgtataacgactcgaggacactgtacatgacgccaagacatcaagagctgttgctag

SEQ ID NO: 421918 - DNA, 60 bp, Artificial
  Synthetic oligonucleotide
ggatgtatagaaagatcacatacattttgtcatactggacatccctggaataaatcgtgg

SEQ ID NO: 421919 - DNA, 55 bp, Artificial
  Synthetic oligonucleotide
ggatgtatagccctaccagtattctagacataaagcaagggccaaaggaaccctt

SEQ ID NO: 421920 - DNA, 55 bp, Artificial
  Synthetic oligonucleotide
ggatgtatattatcggctgcagactgttgcgcagttaggtgttgatttcaacact

SEQ ID NO: 421921 - DNA, 60 bp, Artificial
  Synthetic oligonucleotide
ggatgtattcagcatgcaaccacaccgagctgataccatcatgtgtgacatcggagaaag

SEQ ID NO: 421922 - DNA, 55 bp, Artificial
  Synthetic oligonucleotide
ggatgtattgcgctatctaagtccgagtccgcatctaaatgagatacaccgattg

SEQ ID NO: 421923 - DNA, 55 bp, Artificial
  Synthetic oligonucleotide
ggatgtcaatcctgcgtctcctgattgctctcttcttcgcctcccgatgctggac

SEQ ID NO: 421924 - DNA, 55 bp, Artificial
  Synthetic oligonucleotide
ggatgtcaatttagtggcgtttattacttgcagtcagatcctattcattcgggtg

SEQ ID NO: 421925 - DNA, 53 bp, Artificial
  Synthetic oligonucleotide
ggatgtcacgtacttcgacttagaaatatgtcgaagacaaagtccttaaagct

SEQ ID NO: 421926 - DNA, 57 bp, Artificial
  Synthetic oligonucleotide
ggatgtcagactacgaatactggaacgtttgaagaggtcgcaacggctgaaaaactg

SEQ ID NO: 421927 - DNA, 55 bp, Artificial
  Synthetic oligonucleotide
ggatgtcagcagcggactacaggaaagtggggcaacgattggacattgaggacca

SEQ ID NO: 421928 - DNA, 60 bp, Artificial
  Synthetic oligonucleotide
ggatgtcagcgagagtgtcacagaggatgcgcattccctccgaactccagacggagctcc

SEQ ID NO: 421929 - DNA, 55 bp, Artificial
  Synthetic oligonucleotide
ggatgtcatcatagcagaataggcattattcgacagaggagagcaaggaatggag

SEQ ID NO: 421930 - DNA, 55 bp, Artificial
  Synthetic oligonucleotide
ggatgtcccactcgcacgtcagataaaggcatacagaggaccgattccaggtgag

SEQ ID NO: 421931 - DNA, 55 bp, Artificial
  Synthetic oligonucleotide
ggatgtcccgatgcataaaatcccgtgagggtgggcttgctagggaggccgacac

SEQ ID NO: 421932 - DNA, 60 bp, Artificial
  Synthetic oligonucleotide
ggatgtcctcagacagctccctgacggagtgacgttgtttgaggaaaacgacaagcaaga

SEQ ID NO: 421933 - DNA, 58 bp, Artificial
  Synthetic oligonucleotide
ggatgtcgtcgattacgttgtacttggcgtttacgtcatatgtcgtgaaatcaactag

SEQ ID NO: 421934 - DNA, 57 bp, Artificial
  Synthetic oligonucleotide
ggatgtctaacgactgatccaaatacgtttgaaacagttgcgacgactgaaaaactg

SEQ ID NO: 421935 - DNA, 60 bp, Artificial
  Synthetic oligonucleotide
ggatgtctacatacgtttgacgacttatttggagcgaggatccatagtcacggcaatttg

SEQ ID NO: 421936 - DNA, 58 bp, Artificial
  Synthetic oligonucleotide
ggatgtctactcgatccaaggtctacaagactccctttatgcacgaagctccagtctc

SEQ ID NO: 421937 - DNA, 55 bp, Artificial
  Synthetic oligonucleotide
ggatgtctcggaactttccaacacagcgtccccatggtagtcgaatttgcgtcgg

SEQ ID NO: 421938 - DNA, 55 bp, Artificial
  Synthetic oligonucleotide
ggatgtctgacaaaaggcccatgtgtggataaagtggagatatgcaatgacatcc

SEQ ID NO: 421939 - DNA, 60 bp, Artificial
  Synthetic oligonucleotide
ggatgtctgatacgatgtctaaggcatctacttatgtatcatttgatcttgattatgttg

SEQ ID NO: 421940 - DNA, 60 bp, Artificial
  Synthetic oligonucleotide
ggatgtcttcatagagcgacccactgctgtggacacttgttatccatttgatgtgccaga

SEQ ID NO: 421941 - DNA, 60 bp, Artificial
  Synthetic oligonucleotide
ggatgtcttgggatggctgtgacctagactactactgcaatatgggggactggccttctt

SEQ ID NO: 421942 - DNA, 60 bp, Artificial
  Synthetic oligonucleotide
ggatgtctttacaatgccaatgggctttcaagaaaatcacaagcattcagtgcagcacac

SEQ ID NO: 421943 - DNA, 56 bp, Artificial
  Synthetic oligonucleotide
ggatgtgaaagtgactcccggaaccaaacatactgaagaacggccgaaggtgcagg

SEQ ID NO: 421944 - DNA, 53 bp, Artificial
  Synthetic oligonucleotide
ggatgtgaagaatttggttgcctagctgtaagtgatgggtgtgtatttgggtc

SEQ ID NO: 421945 - DNA, 55 bp, Artificial
  Synthetic oligonucleotide
ggatgtgaaggcccatgtaaggtccagtcctttgagtccagacatgatatccagc

SEQ ID NO: 421946 - DNA, 58 bp, Artificial
  Synthetic oligonucleotide
ggatgtgaatatggatggttcgtctcctaaattagaaggagttttctctattgttata

SEQ ID NO: 421947 - DNA, 60 bp, Artificial
  Synthetic oligonucleotide
ggatgtgacgtcttcggtagtatgggcgggcataccttcgcctaatctgaaatgtagcgc

SEQ ID NO: 421948 - DNA, 60 bp, Artificial
  Synthetic oligonucleotide
ggatgtgcaaggaggaggaaagattgtagcccaagctggaaacccagttatggattatga

SEQ ID NO: 421949 - DNA, 55 bp, Artificial
  Synthetic oligonucleotide
ggatgtgcacagtggtgcgaatatgcagttggctaatcagggtcagcaaacgtcg

SEQ ID NO: 421950 - DNA, 60 bp, Artificial
  Synthetic oligonucleotide
ggatgtgccacgtagcttcatagcaaatttagttatgaatattgcaacgtgtctgccaac

SEQ ID NO: 421951 - DNA, 59 bp, Artificial
  Synthetic oligonucleotide
ggatgtggaatatcctcgttgttgtgtagattgggtcctctacgttgtacatcttgaaa

SEQ ID NO: 421952 - DNA, 55 bp, Artificial
  Synthetic oligonucleotide
ggatgtggacgtcggtgggaaaatgtataaagttagaaccacgtcaaaatctgca

SEQ ID NO: 421953 - DNA, 55 bp, Artificial
  Synthetic oligonucleotide
ggatgtggagacatcccaaggcgccggtgattcgggcctgtggatgcagattatg

SEQ ID NO: 421954 - DNA, 60 bp, Artificial
  Synthetic oligonucleotide
ggatgtggagacatcccaaggcgcctgtgattaggccatgtggatgcaggctatgtaacc

SEQ ID NO: 421955 - DNA, 57 bp, Artificial
  Synthetic oligonucleotide
ggatgtgggagatgcatatttttcagtccctttagacaaagactttagaaggtatac

SEQ ID NO: 421956 - DNA, 55 bp, Artificial
  Synthetic oligonucleotide
ggatgtgggattgcaatcaacagtttccttagtcgtcccttgggttagtgctagc

SEQ ID NO: 421957 - DNA, 55 bp, Artificial
  Synthetic oligonucleotide
ggatgtgggcttacaatccactatttcaatggttgttccttgggttagcgctagc

SEQ ID NO: 421958 - DNA, 54 bp, Artificial
  Synthetic oligonucleotide
ggatgtggtcaaactattgtacaatgagcaatttgctgtccagggtctgttgag

SEQ ID NO: 421959 - DNA, 55 bp, Artificial
  Synthetic oligonucleotide
ggatgtgtcatgcttccaaatgggtcactacttgtgatttccgctggtacggacc

SEQ ID NO: 421960 - DNA, 56 bp, Artificial
  Synthetic oligonucleotide
ggatgtgtcccttgcgtccgtgagggtaacgtctcgcggtgttgggtggcggtgac

SEQ ID NO: 421961 - DNA, 55 bp, Artificial
  Synthetic oligonucleotide
ggatgtgtggtctagccccaagttgttcataagaagatgaaagtctcctcttccg

SEQ ID NO: 421962 - DNA, 60 bp, Artificial
  Synthetic oligonucleotide
ggatgtgttagaggcaacctatgccatggtacagcatgtggctagaggcgtgcgcatctt

SEQ ID NO: 421963 - DNA, 57 bp, Artificial
  Synthetic oligonucleotide
ggatgtgttctatgacaagtttcgaactgaaccaaaccgatacaaagctctatttcg

SEQ ID NO: 421964 - DNA, 55 bp, Artificial
  Synthetic oligonucleotide
ggatgtgttggtccttgtaaggtccaggattacgagtttaagatggatgtcccac

SEQ ID NO: 421965 - DNA, 55 bp, Artificial
  Synthetic oligonucleotide
ggatgtgtttagaagaatgtattggagcacctccctttcggttgcctctgacata

SEQ ID NO: 421966 - DNA, 59 bp, Artificial
  Synthetic oligonucleotide
ggatgttaacctgatcttaagctcgacgttgacaggatgcttatgttcgggttcacaat

SEQ ID NO: 421967 - DNA, 57 bp, Artificial
  Synthetic oligonucleotide
ggatgttaatagcttttacgaactgtgatcaaaggaagggctttctatccagtgtac

SEQ ID NO: 421968 - DNA, 55 bp, Artificial
  Synthetic oligonucleotide
ggatgttaattgcaccaactcaaataggtagggtggcggagggcacgaacacgac

SEQ ID NO: 421969 - DNA, 57 bp, Artificial
  Synthetic oligonucleotide
ggatgttacgaatgttatatgttcatcgactgggtcacattttattaaaccatcgtt

SEQ ID NO: 421970 - DNA, 56 bp, Artificial
  Synthetic oligonucleotide
ggatgttacgcgtggagtcggtttgacccatcgtataggtaagcgtttttgtgtca

SEQ ID NO: 421971 - DNA, 58 bp, Artificial
  Synthetic oligonucleotide
ggatgttactttcacctactgtagctggagtaatagtagagggaacgaataatacaga

SEQ ID NO: 421972 - DNA, 55 bp, Artificial
  Synthetic oligonucleotide
ggatgttatcaactattcgattttaattctccagacttagaaaaacttatacgaa

SEQ ID NO: 421973 - DNA, 55 bp, Artificial
  Synthetic oligonucleotide
ggatgttccatacctagggaaaagggaagatcagtggtgtggatccctgataggc

SEQ ID NO: 421974 - DNA, 58 bp, Artificial
  Synthetic oligonucleotide
ggatgttgaccgtgaatcgtgtaacggcgtctatgctaacataagcaagaacgccctt

SEQ ID NO: 421975 - DNA, 51 bp, Artificial
  Synthetic oligonucleotide
ggatgttgccagttaaaacaagtgagataatcccccgggtttttgtagcag

SEQ ID NO: 421976 - DNA, 51 bp, Artificial
  Synthetic oligonucleotide
ggatgttggactattcattgtgtcaggagacgtggagcaaggttcatagcg

SEQ ID NO: 421977 - DNA, 50 bp, Artificial
  Synthetic oligonucleotide
ggatgttggcttgcagtcaactatatccatggtagtgccctgggttagtg

SEQ ID NO: 421978 - DNA, 60 bp, Artificial
  Synthetic oligonucleotide
ggatgttgggactggcattgttcgtgctcagttggatttgactactcttatgtgtgatgt

SEQ ID NO: 421979 - DNA, 55 bp, Artificial
  Synthetic oligonucleotide
ggatgttgggtctgttttccctgataagctggattctatatttgatataccgtcc

SEQ ID NO: 421980 - DNA, 55 bp, Artificial
  Synthetic oligonucleotide
ggatgttggtcagacgtcaagggaaggtgctgagcattatgccttcggccaggga

SEQ ID NO: 421981 - DNA, 52 bp, Artificial
  Synthetic oligonucleotide
ggatgttgttttgcaatccagttgaggatcagtacacggctaggaacgatat

SEQ ID NO: 421982 - DNA, 56 bp, Artificial
  Synthetic oligonucleotide
ggatgtttcagaaaaaactgctgataagtttcgttctttgtctggtggatccttaa

SEQ ID NO: 421983 - DNA, 55 bp, Artificial
  Synthetic oligonucleotide
ggatgtttgtgagatttcatcctattcctagagtcaagccattcttcggagtggc

SEQ ID NO: 421984 - DNA, 57 bp, Artificial
  Synthetic oligonucleotide
ggattaaacatccagaatggtgggcttcaatttagatttaatactagtcagtttcaa

SEQ ID NO: 421985 - DNA, 58 bp, Artificial
  Synthetic oligonucleotide
ggattaacgatcggaatttctggagaggtgaaaatggaagaagaccaaggattgcata

SEQ ID NO: 421986 - DNA, 59 bp, Artificial
  Synthetic oligonucleotide
ggattaacggagctatctatataaacacagacgatttagtaattaatatagacgcagcg

SEQ ID NO: 421987 - DNA, 55 bp, Artificial
  Synthetic oligonucleotide
ggattaacggggattggacaacaccgtgtgccacaagttggttgagggacgtgtg

SEQ ID NO: 421988 - DNA, 57 bp, Artificial
  Synthetic oligonucleotide
ggattaagaaccgctatattaaatagaaccactctgccaaatatgttaccaccaata

SEQ ID NO: 421989 - DNA, 51 bp, Artificial
  Synthetic oligonucleotide
ggattaagccagtggtatcaactccactactgttaaatggtagtctagccg

SEQ ID NO: 421990 - DNA, 55 bp, Artificial
  Synthetic oligonucleotide
ggattaagcccacaggctagaagtaaactgatggagctagcaggacctgaggaag

SEQ ID NO: 421991 - DNA, 58 bp, Artificial
  Synthetic oligonucleotide
ggattaaggaatatcccgtctattcaatctaggggcctgttcggagccattgctggct

SEQ ID NO: 421992 - DNA, 57 bp, Artificial
  Synthetic oligonucleotide
ggattaaggtaaagcaactgtgtaaactcctcaggggagctaaagcactgacagacg

SEQ ID NO: 421993 - DNA, 58 bp, Artificial
  Synthetic oligonucleotide
ggattaaggttgagatagacacattacatgatttgtcctgtaaatttcttccacttta

SEQ ID NO: 421994 - DNA, 55 bp, Artificial
  Synthetic oligonucleotide
ggattaatatttgatggagttcccttaacatggaaagacattgctagtgtccaag

SEQ ID NO: 421995 - DNA, 55 bp, Artificial
  Synthetic oligonucleotide
ggattaatgaacagtttgaagatagccttgcgaatcttggacctctcgcccgagg

SEQ ID NO: 421996 - DNA, 60 bp, Artificial
  Synthetic oligonucleotide
ggattaattttgcatggtattgttcaggcagtaaagatatatttgcaatcgcgtgttgaa

SEQ ID NO: 421997 - DNA, 50 bp, Artificial
  Synthetic oligonucleotide
ggattacaaaagtactcaagcagctatagatcaaataaccgggaaattga

SEQ ID NO: 421998 - DNA, 53 bp, Artificial
  Synthetic oligonucleotide
ggattacaacaacacaacgggcagagatgttttagtactttgggggattcacc

SEQ ID NO: 421999 - DNA, 55 bp, Artificial
  Synthetic oligonucleotide
ggattacaagaaaggtgcatttgaccctgataaccgcaagctggtccttctcgta

SEQ ID NO: 422000 - DNA, 60 bp, Artificial
  Synthetic oligonucleotide
ggattacaatctgagtataatcctatgactatatctatggcacaggttgacacaaaattg

SEQ ID NO: 422001 - DNA, 56 bp, Artificial
  Synthetic oligonucleotide
ggattacaattactgttaatacattcttggactgttgtcctaaccagctcgtttaa

SEQ ID NO: 422002 - DNA, 53 bp, Artificial
  Synthetic oligonucleotide
ggattacacccaggtgcttggttcactacccgtataggctgtggcattatcct

SEQ ID NO: 422003 - DNA, 54 bp, Artificial
  Synthetic oligonucleotide
ggattacactgcagaaaacatacagaagctcgagaaagtgaggagtcagttgaa

SEQ ID NO: 422004 - DNA, 55 bp, Artificial
  Synthetic oligonucleotide
ggattacaggggttcagaaaattcaatgcagtaaacctgtgatattctctggcac

SEQ ID NO: 422005 - DNA, 55 bp, Artificial
  Synthetic oligonucleotide
ggattacattgagaagtgcatcgctgccctggagcacggccgctccttgcctaaa

SEQ ID NO: 422006 - DNA, 55 bp, Artificial
  Synthetic oligonucleotide
ggattaccctgcccgcgcccatacttttgatgacttctgcccagagtgccgcccc

SEQ ID NO: 422007 - DNA, 51 bp, Artificial
  Synthetic oligonucleotide
ggattaccgtactgaccccatctcgggtaaaagggtcggcaccccgaaaga

SEQ ID NO: 422008 - DNA, 53 bp, Artificial
  Synthetic oligonucleotide
ggattacctcccggaggcctaggtcaaattatgcgtcgttgtttcgctccccg

SEQ ID NO: 422009 - DNA, 59 bp, Artificial
  Synthetic oligonucleotide
ggattacgagtccgctctactaagaatggaatgaatattcaagtaggaagtggttcagc

SEQ ID NO: 422010 - DNA, 50 bp, Artificial
  Synthetic oligonucleotide
ggattacggctagaactgtggtcgctcagccttatgacccaaaccaagcc

SEQ ID NO: 422011 - DNA, 60 bp, Artificial
  Synthetic oligonucleotide
ggattacgggcggtgacccgttgactgcagaactgaagtatagcaacgagtctgtcaagc

SEQ ID NO: 422012 - DNA, 55 bp, Artificial
  Synthetic oligonucleotide
ggattacgtaatacagatgcttcctaccagaaaacctaaaccgggagctttgatg

SEQ ID NO: 422013 - DNA, 50 bp, Artificial
  Synthetic oligonucleotide
ggattactctagccggatccccgactctcttatttctcgtgagttagttc

SEQ ID NO: 422014 - DNA, 60 bp, Artificial
  Synthetic oligonucleotide
ggattactgttctaatcatgtaccttgggagagtgtgttcatgtcatgtgatctagacaa

SEQ ID NO: 422015 - DNA, 55 bp, Artificial
  Synthetic oligonucleotide
ggattacttaacaacacgttacatgagaggatgatcttggactcggtaggatgag

SEQ ID NO: 422016 - DNA, 55 bp, Artificial
  Synthetic oligonucleotide
ggattacttccagtcttcctatccgtgtccaacggaaggatggttctctaaggac

SEQ ID NO: 422017 - DNA, 55 bp, Artificial
  Synthetic oligonucleotide
ggattagagtacatggaaagaattccaatggcgacgtctgagggttttccacaca

SEQ ID NO: 422018 - DNA, 55 bp, Artificial
  Synthetic oligonucleotide
ggattagagtgtttggaacacgatttacaatacatacatggcgtctgggaaactt

SEQ ID NO: 422019 - DNA, 60 bp, Artificial
  Synthetic oligonucleotide
ggattagagttagcttatgccattcaactttgtcctttatgctaagataacattcctcag

SEQ ID NO: 422020 - DNA, 55 bp, Artificial
  Synthetic oligonucleotide
ggattagattccgatgttgcagcttcggcgttcgaaattattatcgattgggtat

SEQ ID NO: 422021 - DNA, 58 bp, Artificial
  Synthetic oligonucleotide
ggattagcaacacagcataccggcgaactgtgaaggacgactttaccgaaggtggata

SEQ ID NO: 422022 - DNA, 58 bp, Artificial
  Synthetic oligonucleotide
ggattagcaataagaccttgatcagacttatagaggaagtgcagttgtctacttatga

SEQ ID NO: 422023 - DNA, 55 bp, Artificial
  Synthetic oligonucleotide
ggattaggtgttgatatccctctttcccatctagaaacaagaccttttccagcgc

SEQ ID NO: 422024 - DNA, 52 bp, Artificial
  Synthetic oligonucleotide
ggattagtaagatttatttacccaagtactaatcttcaagaactaaggttac

SEQ ID NO: 422025 - DNA, 59 bp, Artificial
  Synthetic oligonucleotide
ggattagtaccacacttatacagttgcaacttacaaagcttttggatgattctattgag

SEQ ID NO: 422026 - DNA, 60 bp, Artificial
  Synthetic oligonucleotide
ggattagtgaaagcgtgaccgggcctgttgtcattcggacagattgtgttacgggctgca

SEQ ID NO: 422027 - DNA, 55 bp, Artificial
  Synthetic oligonucleotide
ggattagtgaattgttggccatccttagcgtgcaaggagcggttatcggtcagga

SEQ ID NO: 422028 - DNA, 55 bp, Artificial
  Synthetic oligonucleotide
ggattagtgctagtcactacagaaataccacaccagataagtactcctcagcagg

SEQ ID NO: 422029 - DNA, 60 bp, Artificial
  Synthetic oligonucleotide
ggattagtgtcactttgacgcgccagctggcaggattagtgtttacctgattcggttggc

SEQ ID NO: 422030 - DNA, 55 bp, Artificial
  Synthetic oligonucleotide
ggattataagccagaacaggtcgatctttcaaacaccagagccacgagggagcag

SEQ ID NO: 422031 - DNA, 55 bp, Artificial
  Synthetic oligonucleotide
ggattataccagtcagacattggagtcggtgtagggctggggagaatcaaccatg

SEQ ID NO: 422032 - DNA, 55 bp, Artificial
  Synthetic oligonucleotide
ggattataccctgctcaaatcaaagctagacagatggttagtccagtcatgagtg

SEQ ID NO: 422033 - DNA, 60 bp, Artificial
  Synthetic oligonucleotide
ggattatagaaacatgcaaagagttcgtcatacagcggaaagagcagcaaggagaatctt

SEQ ID NO: 422034 - DNA, 59 bp, Artificial
  Synthetic oligonucleotide
ggattatcagaaactgggagactgtgaagatccagtggtcccaagaccctacaatgtta

SEQ ID NO: 422035 - DNA, 57 bp, Artificial
  Synthetic oligonucleotide
ggattatcctttctccctggaatagcttccggagttttaggatatcttggtgcacaa

SEQ ID NO: 422036 - DNA, 54 bp, Artificial
  Synthetic oligonucleotide
ggattatcgctaattgggacgaaataacgaccctacttataactgaatgtaaac

SEQ ID NO: 422037 - DNA, 55 bp, Artificial
  Synthetic oligonucleotide
ggattatctatgtcatatacaaactgttttgcacactgcagggaccatactcagg

SEQ ID NO: 422038 - DNA, 56 bp, Artificial
  Synthetic oligonucleotide
ggattatctgagaaatcggggagagaataaggccccagaagacttccaccctgacc

SEQ ID NO: 422039 - DNA, 56 bp, Artificial
  Synthetic oligonucleotide
ggattatggaactgggttttacaaacctgtgatggcttcgaagaccctcgaggcta

SEQ ID NO: 422040 - DNA, 55 bp, Artificial
  Synthetic oligonucleotide
ggattattattccacaggtgtagttactatatggtaccaaaccaacttcgtagtc

SEQ ID NO: 422041 - DNA, 60 bp, Artificial
  Synthetic oligonucleotide
ggattattgcagcaatgtaattatacttattcctatgagtgaacgaattagtgaatacca

SEQ ID NO: 422042 - DNA, 58 bp, Artificial
  Synthetic oligonucleotide
ggattattgggccttgcaggacaacatcgtcattagggtcagtccggaaggtgcgaaa

SEQ ID NO: 422043 - DNA, 55 bp, Artificial
  Synthetic oligonucleotide
ggattatttgcatgaaaagcgtaactatgtacgatcgatatacgaggcgagatac

SEQ ID NO: 422044 - DNA, 57 bp, Artificial
  Synthetic oligonucleotide
ggattatttggggcaaactgacggaattgaacatacaaggtaagttgacatacataa

SEQ ID NO: 422045 - DNA, 60 bp, Artificial
  Synthetic oligonucleotide
ggattcaaacaatgagttctatatgctaccaccagcacaaagcaagcagggagcaatgtt

SEQ ID NO: 422046 - DNA, 60 bp, Artificial
  Synthetic oligonucleotide
ggattcaaagtgagttcaacaaagcttgtgaattgactgactctagttggatagaactcg

SEQ ID NO: 422047 - DNA, 56 bp, Artificial
  Synthetic oligonucleotide
ggattcaacgatgacgcttcggacacaccaccaaccaccaaggttggattttacga

SEQ ID NO: 422048 - DNA, 55 bp, Artificial
  Synthetic oligonucleotide
ggattcaacgtggcagggaggagaggtcaaaagtggcaaagtctcgcagacgttg

SEQ ID NO: 422049 - DNA, 55 bp, Artificial
  Synthetic oligonucleotide
ggattcaaggcgctagaaattcagagggataggagtggaacaatgatcatgccca

SEQ ID NO: 422050 - DNA, 58 bp, Artificial
  Synthetic oligonucleotide
ggattcaagtagtttatgaaaagacatattgtgtgtcaggacaattaattgaagggaa

SEQ ID NO: 422051 - DNA, 52 bp, Artificial
  Synthetic oligonucleotide
ggattcaatatctgcgttcagagatactcagcaagtttagcgcgcaccctct

SEQ ID NO: 422052 - DNA, 55 bp, Artificial
  Synthetic oligonucleotide
ggattcacacattgtagcccgaccatctcaaccacccgtccactggccaatagca

SEQ ID NO: 422053 - DNA, 60 bp, Artificial
  Synthetic oligonucleotide
ggattcaccaaaccctgtttgattagcatagctgcattgcacacaatgtcccctaagcga

SEQ ID NO: 422054 - DNA, 55 bp, Artificial
  Synthetic oligonucleotide
ggattcacccgtctatgtcatttagacagtttactaggttaactaactcaccaga

SEQ ID NO: 422055 - DNA, 56 bp, Artificial
  Synthetic oligonucleotide
ggattcacctgagtgatctatcatacaagcatgctatattaaaagagtctcagtac

SEQ ID NO: 422056 - DNA, 60 bp, Artificial
  Synthetic oligonucleotide
ggattcacgagaaccagtacggttcggagtttatgatggcccacaatacagccatatcca

SEQ ID NO: 422057 - DNA, 52 bp, Artificial
  Synthetic oligonucleotide
ggattcacgcttgggttacgaaaccttcaaagttgtcggtggttggtccaaa

SEQ ID NO: 422058 - DNA, 51 bp, Artificial
  Synthetic oligonucleotide
ggattcagatgacgcaaccccctctactgtcacccattcaaatgttgtgga

SEQ ID NO: 422059 - DNA, 55 bp, Artificial
  Synthetic oligonucleotide
ggattcatagtttctcgttgtgacaccgtgttgccattagcgagattaacgttca

SEQ ID NO: 422060 - DNA, 60 bp, Artificial
  Synthetic oligonucleotide
ggattcatatcgtagccgtaagtcaataatctgctatgatctttcatgcaatagtacatt

SEQ ID NO: 422061 - DNA, 50 bp, Artificial
  Synthetic oligonucleotide
ggattcatattttacgattacaaaattagattattccaaccataaattgc

SEQ ID NO: 422062 - DNA, 60 bp, Artificial
  Synthetic oligonucleotide
ggattcatcatgtgggcctgccaaaaaggcaacattaggtgcaacatttgcatttgagtg

SEQ ID NO: 422063 - DNA, 60 bp, Artificial
  Synthetic oligonucleotide
ggattcatgctccggggtagtgttgtaaatcacccagtcataacaaggtcgcagtgcatg

SEQ ID NO: 422064 - DNA, 60 bp, Artificial
  Synthetic oligonucleotide
ggattcatggcggtcattgctccctctctcggcgggtcgttcccgcctgacaagagagac

SEQ ID NO: 422065 - DNA, 58 bp, Artificial
  Synthetic oligonucleotide
ggattcatgtaagggtgtttatgataacataaacaagaatgccctgttagtatattac

SEQ ID NO: 422066 - DNA, 55 bp, Artificial
  Synthetic oligonucleotide
ggattcatgtagatgagccagatgagctcacagtacatgtaaagagcagtgatcc

SEQ ID NO: 422067 - DNA, 55 bp, Artificial
  Synthetic oligonucleotide
ggattcattaactgagattccatctagaagataaggccgcgcagcggcactgacc

SEQ ID NO: 422068 - DNA, 60 bp, Artificial
  Synthetic oligonucleotide
ggattcatttatccgcattattatgtcttgaatactgactataatccaacaactgtgact

SEQ ID NO: 422069 - DNA, 54 bp, Artificial
  Synthetic oligonucleotide
ggattccactaaaccgtacaaaccattgacggttatgcaaggtgcgggtaaaga

SEQ ID NO: 422070 - DNA, 55 bp, Artificial
  Synthetic oligonucleotide
ggattccactaatgaggtgaacactgagaatgctcaaaacagtgctggtgaggtg

SEQ ID NO: 422071 - DNA, 54 bp, Artificial
  Synthetic oligonucleotide
ggattccccaacgtttcattaaggttagctggtgaagaggcgaatcttagtaaa

SEQ ID NO: 422072 - DNA, 56 bp, Artificial
  Synthetic oligonucleotide
ggattccctaaaatacccccgcttttatgtgtaataggcgcgtcggagtgcgctga

SEQ ID NO: 422073 - DNA, 56 bp, Artificial
  Synthetic oligonucleotide
ggattccctttaactgtcatttgtaattccattttcaatgaaatactcgtgaggta

SEQ ID NO: 422074 - DNA, 56 bp, Artificial
  Synthetic oligonucleotide
ggattccgtatgtcgaacggatgtgcgcggagagtaaagttcaaacaaaattgacg

SEQ ID NO: 422075 - DNA, 55 bp, Artificial
  Synthetic oligonucleotide
ggattcctccactagcctgaaaattgaatcgaatgtcaggaattatgtgcaccgg

SEQ ID NO: 422076 - DNA, 55 bp, Artificial
  Synthetic oligonucleotide
ggattcctgtgttcaagtatggacttctgctcagggctataatttaactagtggt

SEQ ID NO: 422077 - DNA, 60 bp, Artificial
  Synthetic oligonucleotide
ggattcgaggcttacggagtagagatgttcatttttccagctttcaatggtctcatggca

SEQ ID NO: 422078 - DNA, 59 bp, Artificial
  Synthetic oligonucleotide
ggattcgatatcccagttgacacaaaagccaatcaaataggtgagggtatatcgagtaa

SEQ ID NO: 422079 - DNA, 60 bp, Artificial
  Synthetic oligonucleotide
ggattcgattcaaggatgatagttccttcgaggatgtcaatggcatccggaagccaaaac

SEQ ID NO: 422080 - DNA, 55 bp, Artificial
  Synthetic oligonucleotide
ggattcgcaagaccccttgccccaagatagagccgctattagcagttatgctcac

SEQ ID NO: 422081 - DNA, 60 bp, Artificial
  Synthetic oligonucleotide
ggattcgccgtgatggttatatggtgacatctggcactattggcactcggcaggaacttg

SEQ ID NO: 422082 - DNA, 55 bp, Artificial
  Synthetic oligonucleotide
ggattcgcgttcaggttatgagactttcagggtcatcggtggttggaacacggct

SEQ ID NO: 422083 - DNA, 50 bp, Artificial
  Synthetic oligonucleotide
ggattcgctttaaggatgacagctcattcgaggatgtaaatggaatccgg

SEQ ID NO: 422084 - DNA, 55 bp, Artificial
  Synthetic oligonucleotide
ggattcggtatcctcaactgacctttggtgaacctccagttttgtaataggtgag

SEQ ID NO: 422085 - DNA, 60 bp, Artificial
  Synthetic oligonucleotide
ggattcggtgtcagtgaacctactgacacttcctcatcagagtatgttcccaagaattcc

SEQ ID NO: 422086 - DNA, 58 bp, Artificial
  Synthetic oligonucleotide
ggattcgtagtcggaaaagtcacagataccattcgcggcgagagagtctccttcgccg

SEQ ID NO: 422087 - DNA, 54 bp, Artificial
  Synthetic oligonucleotide
ggattcgtataatggaattgcgggatgtttttccctggtacgtgataagggtcg

SEQ ID NO: 422088 - DNA, 56 bp, Artificial
  Synthetic oligonucleotide
ggattcgtatatcaaagacgttttatggatgaaagaacgtaattcaaacactcgaa

SEQ ID NO: 422089 - DNA, 57 bp, Artificial
  Synthetic oligonucleotide
ggattcgtcttgacgagaggaaatcaatgaaccttatcacgggcgtgttaatccaac

SEQ ID NO: 422090 - DNA, 55 bp, Artificial
  Synthetic oligonucleotide
ggattcgttcggctccagaaacttctcagtaacgacgtgtgcctaaagcgaggtg

SEQ ID NO: 422091 - DNA, 57 bp, Artificial
  Synthetic oligonucleotide
ggattctaatcctaactcacccagatttttatctgaagcagcccttacgtctcttaa

SEQ ID NO: 422092 - DNA, 55 bp, Artificial
  Synthetic oligonucleotide
ggattctagcattggagtgacatatttcgtgtgggagaaagagaagctagtgcag

SEQ ID NO: 422093 - DNA, 60 bp, Artificial
  Synthetic oligonucleotide
ggattctcatacctggatggggttaacacttggctagggaggacaataagcacagcttca

SEQ ID NO: 422094 - DNA, 51 bp, Artificial
  Synthetic oligonucleotide
ggattctctaacaccgctatgtgatcaatccattccatacagagcatcgag

SEQ ID NO: 422095 - DNA, 60 bp, Artificial
  Synthetic oligonucleotide
ggattctgacctgaccgccgtaacctccaagctcaatgctctgattaacgcactcaaagc

SEQ ID NO: 422096 - DNA, 60 bp, Artificial
  Synthetic oligonucleotide
ggattctgctgtatgttgtacagcagttgaatcaagatgagcactctcacataataggtc

SEQ ID NO: 422097 - DNA, 57 bp, Artificial
  Synthetic oligonucleotide
ggattctggagtcccgtcacgccaagtacaagcatggtgaggtacgcccccgcgaaa

SEQ ID NO: 422098 - DNA, 60 bp, Artificial
  Synthetic oligonucleotide
ggattcttaaaactctcatcaacacggaacacgcctacgagaacaagcgcatcactgttg

SEQ ID NO: 422099 - DNA, 56 bp, Artificial
  Synthetic oligonucleotide
ggattcttatggaggagcgtctgtgtgtctctattgtagggcacacatagcacatc

SEQ ID NO: 422100 - DNA, 58 bp, Artificial
  Synthetic oligonucleotide
ggattcttcaggagtagagaacccgggtggttactgtttgaccagatggatgattctc

SEQ ID NO: 422101 - DNA, 57 bp, Artificial
  Synthetic oligonucleotide
ggattcttcatttgttcaatgtattgagtagacgaccatccttgacgaagcgtaatg

SEQ ID NO: 422102 - DNA, 55 bp, Artificial
  Synthetic oligonucleotide
ggattcttgcgactctggctctcacgacccggtatcgcggacagtctctcgtcgg

SEQ ID NO: 422103 - DNA, 60 bp, Artificial
  Synthetic oligonucleotide
ggattcttgggagccgcaggaagcactatgggcgcagcatcaataacgctgacggtacag

SEQ ID NO: 422104 - DNA, 55 bp, Artificial
  Synthetic oligonucleotide
ggattcttgtctcttatctgggacgacctccgcaacctgatagtgtggagctacc

SEQ ID NO: 422105 - DNA, 55 bp, Artificial
  Synthetic oligonucleotide
ggattcttgtgtataagaccagttactaaattgatggctcctgataccgtgtctg

SEQ ID NO: 422106 - DNA, 60 bp, Artificial
  Synthetic oligonucleotide
ggattcttttcgtgcttagctatgctaaggccactccagtacgctaagcgtgagcgtttg

SEQ ID NO: 422107 - DNA, 60 bp, Artificial
  Synthetic oligonucleotide
ggattgaacacatcagttctgagagcagtgctacccagagacatggtgtttagaacatca

SEQ ID NO: 422108 - DNA, 55 bp, Artificial
  Synthetic oligonucleotide
ggattgaacctatcccaaactggatcctcaaagaccctcgcatgttcagaggtca

SEQ ID NO: 422109 - DNA, 58 bp, Artificial
  Synthetic oligonucleotide
ggattgaagaatgttaggtaaaatactgtcaatactttgataaggagatttgctgaaa

SEQ ID NO: 422110 - DNA, 60 bp, Artificial
  Synthetic oligonucleotide
ggattgaagattttctggcagctgaatgcccatttttgcccaagcctaaagctccatctg

SEQ ID NO: 422111 - DNA, 55 bp, Artificial
  Synthetic oligonucleotide
ggattgaaggtggaccttattatccaagcaggtaccaagttggtgtcatgaaagg

SEQ ID NO: 422112 - DNA, 55 bp, Artificial
  Synthetic oligonucleotide
ggattgaatccatggaggaagaacaaaagctgaagaatgacctccatgctcatac

SEQ ID NO: 422113 - DNA, 58 bp, Artificial
  Synthetic oligonucleotide
ggattgaatgtccctgggtcacaagacctaacatcttttttacgtcagatagtgcgta

SEQ ID NO: 422114 - DNA, 50 bp, Artificial
  Synthetic oligonucleotide
ggattgacacgaaagatgggcattgtggtttaccattagttgctcgagat

SEQ ID NO: 422115 - DNA, 60 bp, Artificial
  Synthetic oligonucleotide
ggattgacatcatctatgacgttatactccacttgattggagtatactttggaattgaaa

SEQ ID NO: 422116 - DNA, 60 bp, Artificial
  Synthetic oligonucleotide
ggattgaccactacagtcagctccgattctgggtctgcctccgcgttcccgattgcgtct

SEQ ID NO: 422117 - DNA, 55 bp, Artificial
  Synthetic oligonucleotide
ggattgacggtggaacaaccggtactattgggttatggaactccggcaatgtata

SEQ ID NO: 422118 - DNA, 57 bp, Artificial
  Synthetic oligonucleotide
ggattgactcgttttaggcataccttcggagcttgtagagcccccataacttgacaa

SEQ ID NO: 422119 - DNA, 53 bp, Artificial
  Synthetic oligonucleotide
ggattgagggactacaacccaatagcatcaagcatctgcaaacttactaatga

SEQ ID NO: 422120 - DNA, 60 bp, Artificial
  Synthetic oligonucleotide
ggattgagttgaccttgaccaatgaatctgttgctaattactctaatatgtcagccataa

SEQ ID NO: 422121 - DNA, 54 bp, Artificial
  Synthetic oligonucleotide
ggattgatacagagatgtaattatcaatattcatttggttgcgaataactattt

SEQ ID NO: 422122 - DNA, 55 bp, Artificial
  Synthetic oligonucleotide
ggattgcaaagatgttagcgatctaaggcaatatgacagtgatgaaccaggacct

SEQ ID NO: 422123 - DNA, 55 bp, Artificial
  Synthetic oligonucleotide
ggattgcaaatccagcagtatatccagtcataaactcgacagattacggttcgtg

SEQ ID NO: 422124 - DNA, 55 bp, Artificial
  Synthetic oligonucleotide
ggattgcaaggacattggcgatctaaaacagtatgatagtgatgagccagaacct

SEQ ID NO: 422125 - DNA, 55 bp, Artificial
  Synthetic oligonucleotide
ggattgcaattaataggtacaatggtttaacgaatcattcggtatcgatgaggcc

SEQ ID NO: 422126 - DNA, 56 bp, Artificial
  Synthetic oligonucleotide
ggattgcacaagaagattgtcggaatgccccctttaatttgaacgggctttccata

SEQ ID NO: 422127 - DNA, 60 bp, Artificial
  Synthetic oligonucleotide
ggattgcacacatttagaaggcaaagtcataatagttgctgtccatgtggcaagtggatt

SEQ ID NO: 422128 - DNA, 55 bp, Artificial
  Synthetic oligonucleotide
ggattgcagagcacgattgatgggaccccaccttcaatcagccttggcttgccgt

SEQ ID NO: 422129 - DNA, 52 bp, Artificial
  Synthetic oligonucleotide
ggattgcagcgcctgtgagaaccgagccgctgggggcagtgaattgccgctt

SEQ ID NO: 422130 - DNA, 56 bp, Artificial
  Synthetic oligonucleotide
ggattgcataagaagatggtgggaatcccacctttaatttgaatgggctttccgta

SEQ ID NO: 422131 - DNA, 57 bp, Artificial
  Synthetic oligonucleotide
ggattgccacaaaattaggcctgtccgtcacacctcaagagtgtgaacgggcaaccc

SEQ ID NO: 422132 - DNA, 55 bp, Artificial
  Synthetic oligonucleotide
ggattgccagcgcgtgtatcaacattggaatcggcgaagatcgattcagttttgc

SEQ ID NO: 422133 - DNA, 55 bp, Artificial
  Synthetic oligonucleotide
ggattgcgggctataaataagacgcagggaaatggcattgacaacagagcgggtg

SEQ ID NO: 422134 - DNA, 57 bp, Artificial
  Synthetic oligonucleotide
ggattgctaggtacaactttgttaaatttggacgctaattatgttgaaactgctaga

SEQ ID NO: 422135 - DNA, 60 bp, Artificial
  Synthetic oligonucleotide
ggattgctagtgagacccacatcccaacaacattcaactacgggatgatttacacacagg

SEQ ID NO: 422136 - DNA, 55 bp, Artificial
  Synthetic oligonucleotide
ggattgctcctttgaaatcctgtgcactcacacctattggaattacctcattgtt

SEQ ID NO: 422137 - DNA, 55 bp, Artificial
  Synthetic oligonucleotide
ggattgctcgtagtaatcgacgtaccaagtgaagcgtaccctagtcatatcgcgg

SEQ ID NO: 422138 - DNA, 60 bp, Artificial
  Synthetic oligonucleotide
ggattgctgaacggccaaggaccaatgaaattggttatggcgttcatagctttcctcaga

SEQ ID NO: 422139 - DNA, 55 bp, Artificial
  Synthetic oligonucleotide
ggattgctgcctcccttggtgacgagacctcagtcggcatcataccacgcgccga

SEQ ID NO: 422140 - DNA, 57 bp, Artificial
  Synthetic oligonucleotide
ggattggaagtctgacccctctcagggtggaggaatcaaaataactcatttcacaac

SEQ ID NO: 422141 - DNA, 60 bp, Artificial
  Synthetic oligonucleotide
ggattggatgattagtgcttctgctctaacaaatgggcgctgctacatggtgcctgttta

SEQ ID NO: 422142 - DNA, 55 bp, Artificial
  Synthetic oligonucleotide
ggattggattttccgttgattatcaacggagaacaggagatgccaatacgtattt

SEQ ID NO: 422143 - DNA, 55 bp, Artificial
  Synthetic oligonucleotide
ggattggctaagtacactgggaatgaccaggaattgttacaagccgcaaccaaac

SEQ ID NO: 422144 - DNA, 55 bp, Artificial
  Synthetic oligonucleotide
ggattggcttctgtcacaccctgggccataatcccagcagcggtcgggtattggt

SEQ ID NO: 422145 - DNA, 51 bp, Artificial
  Synthetic oligonucleotide
ggattgggactttattaccctggtgcccgtatagtctttgctgcatgttcg

SEQ ID NO: 422146 - DNA, 55 bp, Artificial
  Synthetic oligonucleotide
ggattgggagtggccgcagctggggtaggtactggaaccgctgccttaatccaga

SEQ ID NO: 422147 - DNA, 55 bp, Artificial
  Synthetic oligonucleotide
ggattgggatcacttagaggaattcaggagatccctttgtgatgttgctgtttcg

SEQ ID NO: 422148 - DNA, 55 bp, Artificial
  Synthetic oligonucleotide
ggattgggatcatttggaggagttcagaagatccctctgtgatgttgctgagtcg

SEQ ID NO: 422149 - DNA, 60 bp, Artificial
  Synthetic oligonucleotide
ggattgggcggaatcacaactcaagacctgtactcatggatgcgattggaagaagatatc

SEQ ID NO: 422150 - DNA, 60 bp, Artificial
  Synthetic oligonucleotide
ggattgggtccgaaaggtgcgaacttcgacagagtggatatggacatatctgagttccat

SEQ ID NO: 422151 - DNA, 60 bp, Artificial
  Synthetic oligonucleotide
ggattggtacccctgaggagtctgaaccagccttgcttctgcagcctaatacccatacaa

SEQ ID NO: 422152 - DNA, 55 bp, Artificial
  Synthetic oligonucleotide
ggattggtagcatcactactgaacaatttactgatgatcacagcaagaatcgtgg

SEQ ID NO: 422153 - DNA, 59 bp, Artificial
  Synthetic oligonucleotide
ggattggtctgaaaagcgcattcatccgaaaacagcgcaacggtttaagataccacaga

SEQ ID NO: 422154 - DNA, 58 bp, Artificial
  Synthetic oligonucleotide
ggattggttcaaaactcatattccaattatgggcctagaggccgtcagggctcagtgg

SEQ ID NO: 422155 - DNA, 60 bp, Artificial
  Synthetic oligonucleotide
ggattggttccaaaggagatgtatttgtcataagagagccattcatctcatgttcccact

SEQ ID NO: 422156 - DNA, 54 bp, Artificial
  Synthetic oligonucleotide
ggattgtaaacaaacccaattgtgtttggtgggttgtaaacctgccattggcga

SEQ ID NO: 422157 - DNA, 59 bp, Artificial
  Synthetic oligonucleotide
ggattgtaagattgctcctttaatggtggcatacatgttggaaagggaactggtccgca

SEQ ID NO: 422158 - DNA, 60 bp, Artificial
  Synthetic oligonucleotide
ggattgtacaaggtaagggatcacgttatatgtctgcaagtgtatacagatcacgcctga

SEQ ID NO: 422159 - DNA, 57 bp, Artificial
  Synthetic oligonucleotide
ggattgtacggattaccagccacaaatccgaataatgctaaagattttcacgaaata

SEQ ID NO: 422160 - DNA, 57 bp, Artificial
  Synthetic oligonucleotide
ggattgtactgagagacaggctaattttttggagaagatccggcctccctctatggg

SEQ ID NO: 422161 - DNA, 58 bp, Artificial
  Synthetic oligonucleotide
ggattgtagaattgatacaaggactttatagagctatccgcaacatacctagaagaat

SEQ ID NO: 422162 - DNA, 52 bp, Artificial
  Synthetic oligonucleotide
ggattgtagacttaagttcgggaagatttttcgaccttatgaatttaaggaa

SEQ ID NO: 422163 - DNA, 55 bp, Artificial
  Synthetic oligonucleotide
ggattgtatgaaaaagtaccccatcaactattagccccccacccaaatgacacta

SEQ ID NO: 422164 - DNA, 60 bp, Artificial
  Synthetic oligonucleotide
ggattgtccggcaggaaatctacgcacagtgtgtgtcaagggctagatcattactttggg

SEQ ID NO: 422165 - DNA, 60 bp, Artificial
  Synthetic oligonucleotide
ggattgtcgatgggcctctccagattctgtgtacactctcaaggtcggtactttcaatac

SEQ ID NO: 422166 - DNA, 55 bp, Artificial
  Synthetic oligonucleotide
ggattgtgggtgtacctttcgtgcttcgcttcgtttcgacagtgtgtcggaaggt

SEQ ID NO: 422167 - DNA, 58 bp, Artificial
  Synthetic oligonucleotide
ggattgtggttgggtgactctatctactgtccacgtcatgtgttaggtaagtttagtg

SEQ ID NO: 422168 - DNA, 58 bp, Artificial
  Synthetic oligonucleotide
ggattgtgtaatcgaacgatgctcggcacaatcaaagattatcctgacgcatcgattc

SEQ ID NO: 422169 - DNA, 60 bp, Artificial
  Synthetic oligonucleotide
ggattgtgttacccaggcagtttcaatgattatgaagaactgaagcatctcatcagcagc

SEQ ID NO: 422170 - DNA, 59 bp, Artificial
  Synthetic oligonucleotide
ggattgttatcctgacaattcactagtctgtagatacgacacacgaaacttgagtgtgt

SEQ ID NO: 422171 - DNA, 55 bp, Artificial
  Synthetic oligonucleotide
ggattgttgggggacttttaagacccagatgcgccctaccaggggatctagatcc

SEQ ID NO: 422172 - DNA, 55 bp, Artificial
  Synthetic oligonucleotide
ggattgtttatgaatgcctatggtgcagggcaagtaatgctacggtggggagtct

SEQ ID NO: 422173 - DNA, 58 bp, Artificial
  Synthetic oligonucleotide
ggattgtttccagttaagaaggcacaaggcttcaacatgggtgttatctgggataatc

SEQ ID NO: 422174 - DNA, 51 bp, Artificial
  Synthetic oligonucleotide
ggattgtttgagatttacgacggtcgaggctcagtaatccaggcgcctctg

SEQ ID NO: 422175 - DNA, 59 bp, Artificial
  Synthetic oligonucleotide
ggatttaaatggaacacgtatatcttgtattatccatacatatttcgtcatccattacg

SEQ ID NO: 422176 - DNA, 57 bp, Artificial
  Synthetic oligonucleotide
ggatttaaccagacagtataaaagtagtaagacatgctgtagagattgggtagttac

SEQ ID NO: 422177 - DNA, 55 bp, Artificial
  Synthetic oligonucleotide
ggatttaactagatgttttaagagtgacagcacagcaggagaggattgggtgtgt

SEQ ID NO: 422178 - DNA, 55 bp, Artificial
  Synthetic oligonucleotide
ggatttaatcacagtcacagccaccctggctttgatcgggtgcagtgctagtcca

SEQ ID NO: 422179 - DNA, 55 bp, Artificial
  Synthetic oligonucleotide
ggatttacaaatgcactgtttacgtggaccactgaaaattccaaagggcaccctg

SEQ ID NO: 422180 - DNA, 59 bp, Artificial
  Synthetic oligonucleotide
ggatttacaattagaggcattaacaattcagtcagaaacacaattcttaacaggcataa

SEQ ID NO: 422181 - DNA, 54 bp, Artificial
  Synthetic oligonucleotide
ggatttacgctcaggttatgaaacctttaaagtcattggtggttggttcacacc

SEQ ID NO: 422182 - DNA, 57 bp, Artificial
  Synthetic oligonucleotide
ggatttactctaacaaaagtctccaacaagatgagagtctttcccatcaggttgtaa

SEQ ID NO: 422183 - DNA, 55 bp, Artificial
  Synthetic oligonucleotide
ggatttagagcatgactcatgtaacggtgtttatgcgaatataagcaagaacgcc

SEQ ID NO: 422184 - DNA, 57 bp, Artificial
  Synthetic oligonucleotide
ggatttagctccctggatgttggggtgaaagtgattcgaccttgtgggtgatacaag

SEQ ID NO: 422185 - DNA, 60 bp, Artificial
  Synthetic oligonucleotide
ggatttagctctctggatattggggtgaaagtgagccgaccttgatggtgatacaaggtc

SEQ ID NO: 422186 - DNA, 55 bp, Artificial
  Synthetic oligonucleotide
ggatttagcttaatagactttaaagagccatggctagagggttatggaaatgcct

SEQ ID NO: 422187 - DNA, 58 bp, Artificial
  Synthetic oligonucleotide
ggatttagtccatacgaacaaacatgcttaccagaagacataactagatggtatccaa

SEQ ID NO: 422188 - DNA, 55 bp, Artificial
  Synthetic oligonucleotide
ggatttatgctagaatccatgaggtggacggagaaggacactggtccactattgc

SEQ ID NO: 422189 - DNA, 55 bp, Artificial
  Synthetic oligonucleotide
ggatttattatgacggcctgttagtctcacaatcactaaagagcatcgccagatg

SEQ ID NO: 422190 - DNA, 55 bp, Artificial
  Synthetic oligonucleotide
ggatttattcaagtacacaagccctatagttgttggagtgcttaatacgagcatc

SEQ ID NO: 422191 - DNA, 60 bp, Artificial
  Synthetic oligonucleotide
ggatttattcccgaaagagcagcatacagcgcaagcattatcatctcaatatcagttctt

SEQ ID NO: 422192 - DNA, 55 bp, Artificial
  Synthetic oligonucleotide
ggatttcaaaacaatgccgcaccaagggttttggctgtatcagcgtattacgggg

SEQ ID NO: 422193 - DNA, 55 bp, Artificial
  Synthetic oligonucleotide
ggatttcaccaagtagcaatggcggaggagtctataccatggaccgctttctggg

SEQ ID NO: 422194 - DNA, 55 bp, Artificial
  Synthetic oligonucleotide
ggatttcacgaaaatggtgcgggatcagataatgccaaagttaggtcagtggcca

SEQ ID NO: 422195 - DNA, 57 bp, Artificial
  Synthetic oligonucleotide
ggatttcacgtacaacgtagggttgtccttacgcgttgcgcgcaaggtcagacagga

SEQ ID NO: 422196 - DNA, 59 bp, Artificial
  Synthetic oligonucleotide
ggatttccactacgtgacgggcatgaccactgacaacctaaagtgcccatgtcaggttc

SEQ ID NO: 422197 - DNA, 56 bp, Artificial
  Synthetic oligonucleotide
ggatttcccgaacacctgcttcgtggttacgagttcataatagatgttggaaccaa

SEQ ID NO: 422198 - DNA, 56 bp, Artificial
  Synthetic oligonucleotide
ggatttcgataagaaacttgtttcgcgcatacaaattcgagttaatcctttgccga

SEQ ID NO: 422199 - DNA, 55 bp, Artificial
  Synthetic oligonucleotide
ggatttcgatcgtgctaggctagcattgcagggcgcaagcataacaagggagtca

SEQ ID NO: 422200 - DNA, 60 bp, Artificial
  Synthetic oligonucleotide
ggatttcgtaagacgtacaaacttcaacgagatagagtgtattacatgcttggtgatgct

SEQ ID NO: 422201 - DNA, 55 bp, Artificial
  Synthetic oligonucleotide
ggatttctatccgcaatcccaatttcagttgcgggcatttacttagtctacctca

SEQ ID NO: 422202 - DNA, 55 bp, Artificial
  Synthetic oligonucleotide
ggatttctctgcggttagattcgtagatccactcacaggggcaacactagacgat

SEQ ID NO: 422203 - DNA, 55 bp, Artificial
  Synthetic oligonucleotide
ggatttctgccgatatggagactgactggagatgagagtctaaatgatctatggc

SEQ ID NO: 422204 - DNA, 60 bp, Artificial
  Synthetic oligonucleotide
ggatttctgtggactgtttagctgaagacatcttcagcttgccttgcatcctacagaaat

SEQ ID NO: 422205 - DNA, 51 bp, Artificial
  Synthetic oligonucleotide
ggatttcttcaaatacaacaaacccgtcactgttaatcaattggaccacga

SEQ ID NO: 422206 - DNA, 58 bp, Artificial
  Synthetic oligonucleotide
ggatttcttccaacttctggtatgtatgccatcgccactaaagagacgttaagtgtaa

SEQ ID NO: 422207 - DNA, 59 bp, Artificial
  Synthetic oligonucleotide
ggatttcttgaagtaggtgaagagtctactgacagtaagacggcgtacctgagacgtgc

SEQ ID NO: 422208 - DNA, 59 bp, Artificial
  Synthetic oligonucleotide
ggatttgaaccaccgcctatctgtgaggcgtgtgacatgatcatgtaccagtgcccatg

SEQ ID NO: 422209 - DNA, 55 bp, Artificial
  Synthetic oligonucleotide
ggatttgaaccacctggatattgatgagcctacaggacagactgcagactggcta

SEQ ID NO: 422210 - DNA, 55 bp, Artificial
  Synthetic oligonucleotide
ggatttgaagaatcatgagtttatgttacacccacagagtacgactcatgatcca

SEQ ID NO: 422211 - DNA, 60 bp, Artificial
  Synthetic oligonucleotide
ggatttgacatcagatgagctctttgctccctggacatttccatggaaaacctgtgtgct

SEQ ID NO: 422212 - DNA, 56 bp, Artificial
  Synthetic oligonucleotide
ggatttgacctaagcattgacttggttcactatgaagacctcacagctcattggca

SEQ ID NO: 422213 - DNA, 60 bp, Artificial
  Synthetic oligonucleotide
ggatttgagaaacaatcttgacgactcaactttgtacatctctgaaaatggtgactcctg

SEQ ID NO: 422214 - DNA, 56 bp, Artificial
  Synthetic oligonucleotide
ggatttgagagaccgcttgcaggttttacacaagttcactggtacggttacaggtg

SEQ ID NO: 422215 - DNA, 60 bp, Artificial
  Synthetic oligonucleotide
ggatttgatctccgttattagggctaagaattatgtccaagcgaccagcagatataatca

SEQ ID NO: 422216 - DNA, 55 bp, Artificial
  Synthetic oligonucleotide
ggatttgcacctttctccaaggacaattcaattcgactctctgcaggtggggcca

SEQ ID NO: 422217 - DNA, 58 bp, Artificial
  Synthetic oligonucleotide
ggatttgcagaacccggggactgcggtgggatactgaggtgcactcatggggtaattg

SEQ ID NO: 422218 - DNA, 60 bp, Artificial
  Synthetic oligonucleotide
ggatttgcagccatgttactcaggtcatacttcacagaagtgcaaggtcagataaccact

SEQ ID NO: 422219 - DNA, 60 bp, Artificial
  Synthetic oligonucleotide
ggatttgcagctatgctattaagatcatactttacagaggcacaaggtcaaatagttacc

SEQ ID NO: 422220 - DNA, 55 bp, Artificial
  Synthetic oligonucleotide
ggatttgcatcgtttgttccaaaggttctttggatgcatcttattttagaacctt

SEQ ID NO: 422221 - DNA, 55 bp, Artificial
  Synthetic oligonucleotide
ggatttgccaatcggcatgtcttccaacaagcactagatgagatcttaccacacc

SEQ ID NO: 422222 - DNA, 55 bp, Artificial
  Synthetic oligonucleotide
ggatttgcccctttttccaaggacaactcaattcgactttctgctggtggggaca

SEQ ID NO: 422223 - DNA, 60 bp, Artificial
  Synthetic oligonucleotide
ggatttgctaactgggaatccatatatgaacaattggccgcgcagcggaactggcaggac

SEQ ID NO: 422224 - DNA, 58 bp, Artificial
  Synthetic oligonucleotide
ggatttggaattttcacgacaaacatatggctgaaattgcgcgactcctacacccaaa

SEQ ID NO: 422225 - DNA, 55 bp, Artificial
  Synthetic oligonucleotide
ggatttggcgtcaagcaaataatggagaagatgcaaccgctggtctaacccacat

SEQ ID NO: 422226 - DNA, 55 bp, Artificial
  Synthetic oligonucleotide
ggatttggcgtcaagcaaataatggagacgacgcaactgctggtctcactcacct

SEQ ID NO: 422227 - DNA, 54 bp, Artificial
  Synthetic oligonucleotide
ggatttgggaggaaaacgatcgaaaaaaccagggatgatgtttcattgataaaa

SEQ ID NO: 422228 - DNA, 54 bp, Artificial
  Synthetic oligonucleotide
ggatttgtaaggaacaacggggcggctattgtcggaaaggtcgtcgatgttgga

SEQ ID NO: 422229 - DNA, 55 bp, Artificial
  Synthetic oligonucleotide
ggatttgtatgcgtgcaatatgagagacgttgtgttactgtgtgccccttttcgc

SEQ ID NO: 422230 - DNA, 57 bp, Artificial
  Synthetic oligonucleotide
ggatttgtccgtcgcaaaacgaacagctctaattacattgtttatgcctatggcccc

SEQ ID NO: 422231 - DNA, 55 bp, Artificial
  Synthetic oligonucleotide
ggatttgtcgtatttcctgacctcggtacaacgttatcacaaagactagaagcga

SEQ ID NO: 422232 - DNA, 50 bp, Artificial
  Synthetic oligonucleotide
ggatttgtgcctacaccagataacccagtgcatgatatatataggtacat

SEQ ID NO: 422233 - DNA, 55 bp, Artificial
  Synthetic oligonucleotide
ggatttgttgagagtgcgttccatctgttccaggctctagtatccgtccccgcgc

SEQ ID NO: 422234 - DNA, 55 bp, Artificial
  Synthetic oligonucleotide
ggattttaaacacgacattgcacgaggaacgcaagttagcgaagcaggatgctgc

SEQ ID NO: 422235 - DNA, 56 bp, Artificial
  Synthetic oligonucleotide
ggattttaatgaggttagtatgtcttttagacatgttgagtggtggttaacaatgt

SEQ ID NO: 422236 - DNA, 49 bp, Artificial
  Synthetic oligonucleotide
ggattttaccaatcctttttcggaaggtggtggggagtctacctaccct

SEQ ID NO: 422237 - DNA, 59 bp, Artificial
  Synthetic oligonucleotide
ggattttacccagccggaaagagagaatttgtggacagtttcttcatgcatcactccaa

SEQ ID NO: 422238 - DNA, 60 bp, Artificial
  Synthetic oligonucleotide
ggattttagattcgtagcaggattcacatcgggcttcctggcagctataccactttgcgc

SEQ ID NO: 422239 - DNA, 60 bp, Artificial
  Synthetic oligonucleotide
ggattttcaggatcactatggattgggtggagaaactgtgtacagtagaaatccttgtga

SEQ ID NO: 422240 - DNA, 55 bp, Artificial
  Synthetic oligonucleotide
ggattttcatgattatctcagcggtgtcttcgaagcggatgctcgtattgaggca

SEQ ID NO: 422241 - DNA, 58 bp, Artificial
  Synthetic oligonucleotide
ggattttcggagacaatccgcgccctaaggatggaacaggcagttgtagtccagtgtc

SEQ ID NO: 422242 - DNA, 55 bp, Artificial
  Synthetic oligonucleotide
ggattttcggtgtgctgatggaagctcggattcacctagtgcatgtgttgaggac

SEQ ID NO: 422243 - DNA, 56 bp, Artificial
  Synthetic oligonucleotide
ggattttgtagcccatgtttctcctggttggaccgtgatgggcctatatttaggcc

SEQ ID NO: 422244 - DNA, 55 bp, Artificial
  Synthetic oligonucleotide
ggatttttacgacagggttctacctggaaattctacaatggattcacacttcgac

SEQ ID NO: 422245 - DNA, 59 bp, Artificial
  Synthetic oligonucleotide
ggatttttgatcttaagactaatggtgaattttgctgctttcgcagcacgaaaattcta

SEQ ID NO: 422246 - DNA, 58 bp, Artificial
  Synthetic oligonucleotide
ggattttttaaagagactacacatttttgatgtggctagagtcccagatgaccaaatg

SEQ ID NO: 422247 - DNA, 60 bp, Artificial
  Synthetic oligonucleotide
ggcaaaaaacgcctgaaattactgtgaatcataggtcgggatatcaccatggacacagaa

SEQ ID NO: 422248 - DNA, 60 bp, Artificial
  Synthetic oligonucleotide
ggcaaaaatctgctagataatgtcgggacaaaagctgcaggatggaaccgcaataaagcg

SEQ ID NO: 422249 - DNA, 57 bp, Artificial
  Synthetic oligonucleotide
ggcaaaacctcgccatggcttatcctaacgacgtcagaaacgtttgggatgtgtaca

SEQ ID NO: 422250 - DNA, 58 bp, Artificial
  Synthetic oligonucleotide
ggcaaaactacacaccgggaccagggatcagatatccactgacctttggatggtgtta

SEQ ID NO: 422251 - DNA, 55 bp, Artificial
  Synthetic oligonucleotide
ggcaaaactcgctgtatcgaggcttgttcagtggattttgtggtggcttatagag

SEQ ID NO: 422252 - DNA, 60 bp, Artificial
  Synthetic oligonucleotide
ggcaaaagacgatctcgcaatgtgcggattgcagccaacaccgtcaacgtcacacctaaa

SEQ ID NO: 422253 - DNA, 55 bp, Artificial
  Synthetic oligonucleotide
ggcaaaagacgctattctcacacaccaacccggtgactcctaaggagagcggcgc

SEQ ID NO: 422254 - DNA, 60 bp, Artificial
  Synthetic oligonucleotide
ggcaaaagatgatgctcatgagcaaatctggacaccatggagcttagtagatgctaatgc

SEQ ID NO: 422255 - DNA, 60 bp, Artificial
  Synthetic oligonucleotide
ggcaaaaggagattactggacagttatccggacagtggatatggcaatacacaagtggag

SEQ ID NO: 422256 - DNA, 60 bp, Artificial
  Synthetic oligonucleotide
ggcaaaaggtaacaagcctctgccgccaaatgatatggggatgtatcctgctaggataat

SEQ ID NO: 422257 - DNA, 55 bp, Artificial
  Synthetic oligonucleotide
ggcaaaaggtcacttccctgagtgggacaatatgacatggcaacagtggagtgag

SEQ ID NO: 422258 - DNA, 55 bp, Artificial
  Synthetic oligonucleotide
ggcaaaagtccattctatgatctgaatagatcagaaattgccgggattataaggg

SEQ ID NO: 422259 - DNA, 55 bp, Artificial
  Synthetic oligonucleotide
ggcaaaagttagaggacgtactagagcacatgaaggtggatcctagcgtacagcc

SEQ ID NO: 422260 - DNA, 54 bp, Artificial
  Synthetic oligonucleotide
ggcaaaatccggatggaaaagatcttagcatgttttgccaaatggtttccacca

SEQ ID NO: 422261 - DNA, 55 bp, Artificial
  Synthetic oligonucleotide
ggcaaaattggtatgcgtttacgtcctcgatgaaacaaggtaatactctcgatac

SEQ ID NO: 422262 - DNA, 52 bp, Artificial
  Synthetic oligonucleotide
ggcaaacaaaacacggggggaccttcagcggccaagaaaccgagggtcgatc

SEQ ID NO: 422263 - DNA, 55 bp, Artificial
  Synthetic oligonucleotide
ggcaaacaagtagtgtcggatattgattatgttccactcaaatctgctacgtgta

SEQ ID NO: 422264 - DNA, 54 bp, Artificial
  Synthetic oligonucleotide
ggcaaacaagtgctacgcctactcccgcccggaaccagtgtgcatcctactcaa

SEQ ID NO: 422265 - DNA, 55 bp, Artificial
  Synthetic oligonucleotide
ggcaaacacatcaatgataaacgccacatagacgaagccctgccatgtgctgacg

SEQ ID NO: 422266 - DNA, 54 bp, Artificial
  Synthetic oligonucleotide
ggcaaacaccactctgttttgtgcatcagatgctaaagcatataagacagaggc

SEQ ID NO: 422267 - DNA, 58 bp, Artificial
  Synthetic oligonucleotide
ggcaaacacggttacgcgaggtgtcgagtctgtggaaaagttgctgagagaatcttta

SEQ ID NO: 422268 - DNA, 55 bp, Artificial
  Synthetic oligonucleotide
ggcaaacatgcaatacgagtgatcaagctactgcgggaactgggagcagatctgg

SEQ ID NO: 422269 - DNA, 52 bp, Artificial
  Synthetic oligonucleotide
ggcaaaccatcagtgaaccaccctccagtgaggaatggtggttcaccagatc

SEQ ID NO: 422270 - DNA, 55 bp, Artificial
  Synthetic oligonucleotide
ggcaaacctagacacaagcaaacacgggtggaacaaccaaaccttgcagtgggcg

SEQ ID NO: 422271 - DNA, 59 bp, Artificial
  Synthetic oligonucleotide
ggcaaacctcagacagacggaaaggaagtgacatcaacttttgcctcatcttactgtgg

SEQ ID NO: 422272 - DNA, 51 bp, Artificial
  Synthetic oligonucleotide
ggcaaaccttcattttaattgtggaggagaatttttttattgtaacacctc

SEQ ID NO: 422273 - DNA, 55 bp, Artificial
  Synthetic oligonucleotide
ggcaaactccttcctttcctgatattcatttgcaggaagacattgttgatagatg

SEQ ID NO: 422274 - DNA, 60 bp, Artificial
  Synthetic oligonucleotide
ggcaaactgacggaattgaacatacagagtgagctcgcatacataagatatctttacttc

SEQ ID NO: 422275 - DNA, 55 bp, Artificial
  Synthetic oligonucleotide
ggcaaactgttattacaacagcggggtaacagcggagggtagagccggacagagg

SEQ ID NO: 422276 - DNA, 57 bp, Artificial
  Synthetic oligonucleotide
ggcaaacttgctctttgataagggttagttcgtttagacatgcgtcttggcgttcta

SEQ ID NO: 422277 - DNA, 60 bp, Artificial
  Synthetic oligonucleotide
ggcaaagaagacaagagatatggaccagcattgagcatcaacgaattgagcaatcttgcg

SEQ ID NO: 422278 - DNA, 55 bp, Artificial
  Synthetic oligonucleotide
ggcaaagactccagttcaatgtcaatttgaaaagattgtggcatttatggcactg

SEQ ID NO: 422279 - DNA, 60 bp, Artificial
  Synthetic oligonucleotide
ggcaaagagactgagctgaaagaactagcacaaggggacatcgaaagatgtgctgaggct

SEQ ID NO: 422280 - DNA, 55 bp, Artificial
  Synthetic oligonucleotide
ggcaaagatagagatgtggatgctggctcaagaggaaaggtagtacctcgcctgc

SEQ ID NO: 422281 - DNA, 55 bp, Artificial
  Synthetic oligonucleotide
ggcaaagatattcacctatgtcgtttcagaccctcttcccagccccgaggggacc

SEQ ID NO: 422282 - DNA, 58 bp, Artificial
  Synthetic oligonucleotide
ggcaaagatcctctcacggggaataccattttccacgagctcgcctacgtcggatcac

SEQ ID NO: 422283 - DNA, 59 bp, Artificial
  Synthetic oligonucleotide
ggcaaagattcatctggaaacagtggaatgggctctcaagtttcgagagaaggaggaaa

SEQ ID NO: 422284 - DNA, 58 bp, Artificial
  Synthetic oligonucleotide
ggcaaagccttaagcttggttgacagacgtacaaatgttaggttcagcatagaccagt

SEQ ID NO: 422285 - DNA, 55 bp, Artificial
  Synthetic oligonucleotide
ggcaaagctgttgccgtgaaggacaaagatgtcgatttaggtactgctgggactc

SEQ ID NO: 422286 - DNA, 58 bp, Artificial
  Synthetic oligonucleotide
ggcaaaggaacaaaagttgggcttggagttaaacagcacaaatttcatatgatgtatg

SEQ ID NO: 422287 - DNA, 55 bp, Artificial
  Synthetic oligonucleotide
ggcaaaggaattttgagcgacactgtaggcgcgtaattaagaaaggaaggctagc

SEQ ID NO: 422288 - DNA, 60 bp, Artificial
  Synthetic oligonucleotide
ggcaaaggcccagctgcttgaattctccaaccttgcaatagacccatcaacaacagaagc

SEQ ID NO: 422289 - DNA, 55 bp, Artificial
  Synthetic oligonucleotide
ggcaaagggagttggcaattgggtcactcattgtgccgttggattttgagcgtgc

SEQ ID NO: 422290 - DNA, 55 bp, Artificial
  Synthetic oligonucleotide
ggcaaagggtcattctgggtccattggatttcaacacaggatggggattgtggtt

SEQ ID NO: 422291 - DNA, 59 bp, Artificial
  Synthetic oligonucleotide
ggcaaagtggtacacgttaaggaggtaaccgcacagaatgctgagtccctgtcatggcc

SEQ ID NO: 422292 - DNA, 54 bp, Artificial
  Synthetic oligonucleotide
ggcaaagtgtgtaccacgagagcaattcagaagcctacatctctaccctctccg

SEQ ID NO: 422293 - DNA, 55 bp, Artificial
  Synthetic oligonucleotide
ggcaaataatgacctagatactctggatcagattggccaacatcaccctttcggg

SEQ ID NO: 422294 - DNA, 59 bp, Artificial
  Synthetic oligonucleotide
ggcaaatacgtaaataagatataggactccggcagagtccctcaacttctgtcatatat

SEQ ID NO: 422295 - DNA, 60 bp, Artificial
  Synthetic oligonucleotide
ggcaaatactctcaactaacatgcctagcgggatagcggctaggggcgcgccaatgccgg

SEQ ID NO: 422296 - DNA, 57 bp, Artificial
  Synthetic oligonucleotide
ggcaaatcatagttgacagtgataatttgtctgggtattctggtatattctctgttg

SEQ ID NO: 422297 - DNA, 58 bp, Artificial
  Synthetic oligonucleotide
ggcaaatctgagctggccaagctattcgctggctattacctgacgcgatatcccaagc

SEQ ID NO: 422298 - DNA, 60 bp, Artificial
  Synthetic oligonucleotide
ggcaaatgatcggctgtgcctggacttcattcgtcatggatcttgcgaggtcggatatcg

SEQ ID NO: 422299 - DNA, 55 bp, Artificial
  Synthetic oligonucleotide
ggcaaatgattactacccagcccgataccaatctcacatgttaatcggtcatggc

SEQ ID NO: 422300 - DNA, 55 bp, Artificial
  Synthetic oligonucleotide
ggcaaatgctgccgatcttaccaagaaattgactgaaatctgttgtgaatctgga

SEQ ID NO: 422301 - DNA, 55 bp, Artificial
  Synthetic oligonucleotide
ggcaaatgcttactaatcccagagtacagcgttttgcgtcgacgctggcttgacc

SEQ ID NO: 422302 - DNA, 55 bp, Artificial
  Synthetic oligonucleotide
ggcaaatggaggttcattcatgacctaagagccaccaacgccatcgctaccaccc

SEQ ID NO: 422303 - DNA, 60 bp, Artificial
  Synthetic oligonucleotide
ggcaaatggcacgacgactgatattgcggggcagttcatcataaaaattgagcttcactt

SEQ ID NO: 422304 - DNA, 60 bp, Artificial
  Synthetic oligonucleotide
ggcaaatgttgtgagaaaaatgatgactaattcacaagacacagagctttctttcacaat

SEQ ID NO: 422305 - DNA, 55 bp, Artificial
  Synthetic oligonucleotide
ggcaaattcagcaaagaaacaaaccctatcacaatctgttaacccatttgtgacc

SEQ ID NO: 422306 - DNA, 60 bp, Artificial
  Synthetic oligonucleotide
ggcaaattgaaaaggcgtgcaattgcaacaccagggatgcagatcagagggtttgtgtac

SEQ ID NO: 422307 - DNA, 55 bp, Artificial
  Synthetic oligonucleotide
ggcaaattgattggtcgaccagtactcaaagcagtttgattgggtgtgctaatca

SEQ ID NO: 422308 - DNA, 60 bp, Artificial
  Synthetic oligonucleotide
ggcaaattgcctgaacttgacgtagtatgtgacttctacttcatagtttaatgcgtctgg

SEQ ID NO: 422309 - DNA, 55 bp, Artificial
  Synthetic oligonucleotide
ggcaaatttgagtatcctgaattgactggcgaggagatttctaccatcgatctcc

SEQ ID NO: 422310 - DNA, 60 bp, Artificial
  Synthetic oligonucleotide
ggcaacaacatcagccctccaggctcattttaaagtgtgtaaattgacatcaaggtttca

SEQ ID NO: 422311 - DNA, 57 bp, Artificial
  Synthetic oligonucleotide
ggcaacaaccggacaagaagaactgtttctaccagaggaacaggttcgagcgagaca

SEQ ID NO: 422312 - DNA, 55 bp, Artificial
  Synthetic oligonucleotide
ggcaacaagatagatctttcatatatcaagaatcatttgaggagctagcctcagc

SEQ ID NO: 422313 - DNA, 60 bp, Artificial
  Synthetic oligonucleotide
ggcaacacactgaagacatatttagcctcaaagatgttatttcgggatctgctcatgtcg

SEQ ID NO: 422314 - DNA, 57 bp, Artificial
  Synthetic oligonucleotide
ggcaacaccgtcagttattaaggggatcgcacaacaagcggtcggcgctgtacaggc

SEQ ID NO: 422315 - DNA, 60 bp, Artificial
  Synthetic oligonucleotide
ggcaacagctagctcgctgcttggcacaagaacctatgtcacagacgaacggacaccact

SEQ ID NO: 422316 - DNA, 60 bp, Artificial
  Synthetic oligonucleotide
ggcaacaggaatgcgaaatgtaccagagaagcaaaccaggggcctattcggtgcaatagc

SEQ ID NO: 422317 - DNA, 55 bp, Artificial
  Synthetic oligonucleotide
ggcaacaggattgagaaatgtcccatccattcaatccagagggctatttggggca

SEQ ID NO: 422318 - DNA, 55 bp, Artificial
  Synthetic oligonucleotide
ggcaacagggatgcggaatataccagaaagacaaactagaggcatattcggtgca

SEQ ID NO: 422319 - DNA, 55 bp, Artificial
  Synthetic oligonucleotide
ggcaacagtcaatgctccatatatcgttcgccatgctctcgcagtcctcttcctg

SEQ ID NO: 422320 - DNA, 55 bp, Artificial
  Synthetic oligonucleotide
ggcaacataatcatgtttgcccctacactgtgggtgagggcgatactgttgaccc

SEQ ID NO: 422321 - DNA, 55 bp, Artificial
  Synthetic oligonucleotide
ggcaacataggttggggtgcacgtagtgtgagtctcgtaattatagctagagggt

SEQ ID NO: 422322 - DNA, 58 bp, Artificial
  Synthetic oligonucleotide
ggcaacatgcatcaacggggtatgctggactgtctaccacggggccggaacaaggacc

SEQ ID NO: 422323 - DNA, 60 bp, Artificial
  Synthetic oligonucleotide
ggcaacattcaaaggatgctggatgtacactagttgaacatattgagtcaccatcatcaa

SEQ ID NO: 422324 - DNA, 55 bp, Artificial
  Synthetic oligonucleotide
ggcaacattcgccatgaacgttgggccctcaatggtagtggactcaacctgcctg

SEQ ID NO: 422325 - DNA, 58 bp, Artificial
  Synthetic oligonucleotide
ggcaaccaaactacagaaggagatgtaacatagtaggctacattcccgtactaatatg

SEQ ID NO: 422326 - DNA, 60 bp, Artificial
  Synthetic oligonucleotide
ggcaaccagacattgtaaagaggtgctacatagtgggctacattcctgccataatatgtg

SEQ ID NO: 422327 - DNA, 56 bp, Artificial
  Synthetic oligonucleotide
ggcaaccagtgggctagccacatgggtatgacgcacccaccctctgcattcttgta

SEQ ID NO: 422328 - DNA, 56 bp, Artificial
  Synthetic oligonucleotide
ggcaacccgataaaatagcatggggttctttaagcttggttgccaatcagccaggt

SEQ ID NO: 422329 - DNA, 58 bp, Artificial
  Synthetic oligonucleotide
ggcaacccttcctgtgatctgctactgggagggaaagaatggtcttacattgtcgaaa

SEQ ID NO: 422330 - DNA, 55 bp, Artificial
  Synthetic oligonucleotide
ggcaacccttgagccgcaaggtctcaaggacttcaatgacggtgcactcgccatg

SEQ ID NO: 422331 - DNA, 58 bp, Artificial
  Synthetic oligonucleotide
ggcaaccgatacgcgtgttctctggggcaaacggcgtaacgcaagaatctggtgctgg

SEQ ID NO: 422332 - DNA, 60 bp, Artificial
  Synthetic oligonucleotide
ggcaaccgcgcagtgtgggattccaccactggcgagaaagtgcatactggcacggggacc

SEQ ID NO: 422333 - DNA, 60 bp, Artificial
  Synthetic oligonucleotide
ggcaaccggcacgaatggtactaacacagtgcagtcaattgtgacaaatgccggcatggg

SEQ ID NO: 422334 - DNA, 55 bp, Artificial
  Synthetic oligonucleotide
ggcaacctccagcccaccaccaacacttcaggtgcacagactgtcgccaagtcca

SEQ ID NO: 422335 - DNA, 58 bp, Artificial
  Synthetic oligonucleotide
ggcaacctccatcgactccgcacccgaatcgccggccaacagacagctttcttccacc

SEQ ID NO: 422336 - DNA, 55 bp, Artificial
  Synthetic oligonucleotide
ggcaacctccttcttttcttgacattcatttgcgggaggacattgttgatagatg

SEQ ID NO: 422337 - DNA, 55 bp, Artificial
  Synthetic oligonucleotide
ggcaacctggtaggcgtgtctggcctacttcagagattatacaagaccaatgtcc

SEQ ID NO: 422338 - DNA, 55 bp, Artificial
  Synthetic oligonucleotide
ggcaaccttaagaagattcgagtcgactcgctacagccagagtccattgttcgcg

SEQ ID NO: 422339 - DNA, 55 bp, Artificial
  Synthetic oligonucleotide
ggcaacgaagcacgggcaagagccttcaatcgacacggcttcctacgaaccatga

SEQ ID NO: 422340 - DNA, 60 bp, Artificial
  Synthetic oligonucleotide
ggcaacgacatggcttaatcgactgttgactaccctcccgagatccaatgtcatcccaga

SEQ ID NO: 422341 - DNA, 59 bp, Artificial
  Synthetic oligonucleotide
ggcaacgactactgtcaacactacaaacttaacccaacacccatcagcgccaactatgc

SEQ ID NO: 422342 - DNA, 53 bp, Artificial
  Synthetic oligonucleotide
ggcaacgagaagtcttcttcaccaaacctcgaacccctggacgcacctaccgt

SEQ ID NO: 422343 - DNA, 50 bp, Artificial
  Synthetic oligonucleotide
ggcaacgcctggggaagaaggtgtggaacgggtgggttgggtttccaggg

SEQ ID NO: 422344 - DNA, 55 bp, Artificial
  Synthetic oligonucleotide
ggcaacgcggcccaacatatcgttgacatggcgctgtatgtggttgtacgtaaac

SEQ ID NO: 422345 - DNA, 55 bp, Artificial
  Synthetic oligonucleotide
ggcaacgctacaccacaccgtggttacgtgtcaagcccgagttctacgcacgggg

SEQ ID NO: 422346 - DNA, 57 bp, Artificial
  Synthetic oligonucleotide
ggcaacggctcttaagatagagccctcaaccggagttcgaagcatggcttctaactt

SEQ ID NO: 422347 - DNA, 54 bp, Artificial
  Synthetic oligonucleotide
ggcaacggctggcccgcaggaacggtatcagcaacccgttatttgttcccggtg

SEQ ID NO: 422348 - DNA, 56 bp, Artificial
  Synthetic oligonucleotide
ggcaacggtataactcaccgcgtcggtaagcgtttctgcgttaagtctgtgtacat

SEQ ID NO: 422349 - DNA, 53 bp, Artificial
  Synthetic oligonucleotide
ggcaacggtcacgaactatgtgaatgcgtttgccatcatgtgtgccactactg

SEQ ID NO: 422350 - DNA, 55 bp, Artificial
  Synthetic oligonucleotide
ggcaacggttcgtcctgattggcgcgtacccggaactacatttattaatggtgcc

SEQ ID NO: 422351 - DNA, 60 bp, Artificial
  Synthetic oligonucleotide
ggcaacgtcatcaattggaccaaggattcaataaccgacatttggacttatcaagcagag

SEQ ID NO: 422352 - DNA, 55 bp, Artificial
  Synthetic oligonucleotide
ggcaacgtcatttacatgcctccggtgagtctggtatacccagtaactgccgagc

SEQ ID NO: 422353 - DNA, 55 bp, Artificial
  Synthetic oligonucleotide
ggcaacgtgcgataactggtgcggtggaaggcatgatcacatccgcaacgacggg

SEQ ID NO: 422354 - DNA, 52 bp, Artificial
  Synthetic oligonucleotide
ggcaactaacgtaatgaaaagatttaagaagtcaagcttagcgaactcagtt

SEQ ID NO: 422355 - DNA, 55 bp, Artificial
  Synthetic oligonucleotide
ggcaactacgtgatcgtaccgaaaccaacagactacgtcgaggcagatgcctcac

SEQ ID NO: 422356 - DNA, 60 bp, Artificial
  Synthetic oligonucleotide
ggcaactactgctccttgtgcagtgatggacattacaggagtgcaatcaaccttgaggtt

SEQ ID NO: 422357 - DNA, 60 bp, Artificial
  Synthetic oligonucleotide
ggcaactattgatcaggcattgaatggaaaatttggttcagcagcaagaaatagaaattg

SEQ ID NO: 422358 - DNA, 55 bp, Artificial
  Synthetic oligonucleotide
ggcaactattgtggtttcatctttcttgcattacttttggaagagacactgtcct

SEQ ID NO: 422359 - DNA, 59 bp, Artificial
  Synthetic oligonucleotide
ggcaactctatcaagccaactggcgccagtcgcacagcaatcaccactctcgggaaatt

SEQ ID NO: 422360 - DNA, 50 bp, Artificial
  Synthetic oligonucleotide
ggcaactggaaagggttaattaacccaattcctattaccggaaatggtgt

SEQ ID NO: 422361 - DNA, 56 bp, Artificial
  Synthetic oligonucleotide
ggcaactggcagataggattgcaaccggaaagaaccttggaaaggaacaggaccca

SEQ ID NO: 422362 - DNA, 50 bp, Artificial
  Synthetic oligonucleotide
ggcaactgggacttttgcgtattggtatatgcgaagagaagcagcttcag

SEQ ID NO: 422363 - DNA, 55 bp, Artificial
  Synthetic oligonucleotide
ggcaactgggtcaggaaatagatggcgtgccgtgtactcgaagtctttgagacgg

SEQ ID NO: 422364 - DNA, 60 bp, Artificial
  Synthetic oligonucleotide
ggcaactggtggctggctcattccgtgactacaggacagacgggctacatccccagtaac

SEQ ID NO: 422365 - DNA, 57 bp, Artificial
  Synthetic oligonucleotide
ggcaactgtgtaaactcctcagaggagccaaagcgctaactgatatagtaacactaa

SEQ ID NO: 422366 - DNA, 57 bp, Artificial
  Synthetic oligonucleotide
ggcaacttagtgcaggatgtatccgacctcactcgtgaattttttaaacaagcgtac

SEQ ID NO: 422367 - DNA, 58 bp, Artificial
  Synthetic oligonucleotide
ggcaacttctaatgtggcagccacctacccagaatggaacccaactcgaacggcactg

SEQ ID NO: 422368 - DNA, 55 bp, Artificial
  Synthetic oligonucleotide
ggcaacttcttatccgccctatttattgctatcaactgatgcgtacaccaacgag

SEQ ID NO: 422369 - DNA, 53 bp, Artificial
  Synthetic oligonucleotide
ggcaacttgccgcgacggatcgtattcatgaccgatacgtttaacttccggag

SEQ ID NO: 422370 - DNA, 54 bp, Artificial
  Synthetic oligonucleotide
ggcaagaaaaatggactaggaagtttagggtatatagcctcaacaggagataag

SEQ ID NO: 422371 - DNA, 60 bp, Artificial
  Synthetic oligonucleotide
ggcaagaaataatccgccagaggttgctcaaacaatataccacgaatatcaccctgatat

SEQ ID NO: 422372 - DNA, 52 bp, Artificial
  Synthetic oligonucleotide
ggcaagaacctcggatttagtaaccgactctatgtcatcacttggacttagt

SEQ ID NO: 422373 - DNA, 55 bp, Artificial
  Synthetic oligonucleotide
ggcaagaagtatcatgagggtcgccatgctgaggacaagcgtagagacgtcaccg

SEQ ID NO: 422374 - DNA, 55 bp, Artificial
  Synthetic oligonucleotide
ggcaagacacggcaaatgctgtcaaatgcatctgctaattaatgcatctttcaca

SEQ ID NO: 422375 - DNA, 51 bp, Artificial
  Synthetic oligonucleotide
ggcaagacacgtgtaatagaggctagtagtatcaatgacacaattatcttt

SEQ ID NO: 422376 - DNA, 60 bp, Artificial
  Synthetic oligonucleotide
ggcaagacagagacagatccgtaagattagtgagcggattcttagctctgttgtgggacg

SEQ ID NO: 422377 - DNA, 55 bp, Artificial
  Synthetic oligonucleotide
ggcaagacgaggcggaattaggtggaagtacttgcactttggcgcccgtttcgga

SEQ ID NO: 422378 - DNA, 60 bp, Artificial
  Synthetic oligonucleotide
ggcaagactgccacctcatcaatggtgcattggggagtccaggctgtgaccgtttgcagg

SEQ ID NO: 422379 - DNA, 54 bp, Artificial
  Synthetic oligonucleotide
ggcaagacttctcacaagacccgggaaagtttactgagcccgtgaaggacctta

SEQ ID NO: 422380 - DNA, 53 bp, Artificial
  Synthetic oligonucleotide
ggcaagagagcttgggttcccgtaagggcgcctattgcagctggtggaagttt

SEQ ID NO: 422381 - DNA, 55 bp, Artificial
  Synthetic oligonucleotide
ggcaagagcaggctcattgaagcatcaagtctgaatgactcagtaaacatgagga

SEQ ID NO: 422382 - DNA, 55 bp, Artificial
  Synthetic oligonucleotide
ggcaagagcgttctcgttcggaatctcacctgagacctccttcgcctcgaggtcc

SEQ ID NO: 422383 - DNA, 55 bp, Artificial
  Synthetic oligonucleotide
ggcaagataccctggattttgttgccgggaagggaagaagattggatattagagt

SEQ ID NO: 422384 - DNA, 52 bp, Artificial
  Synthetic oligonucleotide
ggcaagatgtgataagcatgatgttgacgtccacaggagttgaagcaacgac

SEQ ID NO: 422385 - DNA, 55 bp, Artificial
  Synthetic oligonucleotide
ggcaagcagacggagtccctgtcaatgtgactcctcaccataacgcgttgcgtgc

SEQ ID NO: 422386 - DNA, 55 bp, Artificial
  Synthetic oligonucleotide
ggcaagcagatggcctattacgcatctacacacagataatggtgccaactttact

SEQ ID NO: 422387 - DNA, 56 bp, Artificial
  Synthetic oligonucleotide
ggcaagcagggaactagaacgattcgcagttaaccctggcctgttagaaacgtcag

SEQ ID NO: 422388 - DNA, 58 bp, Artificial
  Synthetic oligonucleotide
ggcaagcagggagctagaacaattcgcagttaaccctggcctgttagaaacatcgaag

SEQ ID NO: 422389 - DNA, 60 bp, Artificial
  Synthetic oligonucleotide
ggcaagcagggagctagaacgattcgcagttaatcctttagaaacatcagaaggctgtag

SEQ ID NO: 422390 - DNA, 60 bp, Artificial
  Synthetic oligonucleotide
ggcaagcagggagctagaacgattcgcgcttaatcctggcttgttagaaacatcagaggg

SEQ ID NO: 422391 - DNA, 55 bp, Artificial
  Synthetic oligonucleotide
ggcaagcagtaatcaggcacgtctagtcaaagactgttccacaatggtaaagcat

SEQ ID NO: 422392 - DNA, 57 bp, Artificial
  Synthetic oligonucleotide
ggcaagcagtttgttggtggttggtccaaccgtctgcacaaagtattggaaggtgag

SEQ ID NO: 422393 - DNA, 55 bp, Artificial
  Synthetic oligonucleotide
ggcaagctagatcacaaaggactctcatacatgcatgggactcagcaggtgtatt

SEQ ID NO: 422394 - DNA, 55 bp, Artificial
  Synthetic oligonucleotide
ggcaagctcatctgccagccaattgtcagctccgtcgttgaaggccacttgccag

SEQ ID NO: 422395 - DNA, 55 bp, Artificial
  Synthetic oligonucleotide
ggcaagctctttggtgtactaagccagagagaccatgataatgcctgcaggagtc

SEQ ID NO: 422396 - DNA, 55 bp, Artificial
  Synthetic oligonucleotide
ggcaagcttaaggacacggtaagcgtcccagaaggaaccactgcgttctacccaa

SEQ ID NO: 422397 - DNA, 55 bp, Artificial
  Synthetic oligonucleotide
ggcaagctttaagtctgcttcaaagcgcataactggaaatgaaaacgtgacaagg

SEQ ID NO: 422398 - DNA, 55 bp, Artificial
  Synthetic oligonucleotide
ggcaaggaccatatcctgacgactacacaataaaagatgttcccctatggctagc

SEQ ID NO: 422399 - DNA, 60 bp, Artificial
  Synthetic oligonucleotide
ggcaaggacgtgtacaaacagtttgagcaaaagatacgcagtgtgagcgctggtcgcgca

SEQ ID NO: 422400 - DNA, 55 bp, Artificial
  Synthetic oligonucleotide
ggcaaggacgttgcacaagaagagggaaaacgcgacaaggaagtaaacgctggaa

SEQ ID NO: 422401 - DNA, 55 bp, Artificial
  Synthetic oligonucleotide
ggcaaggagtagatactagtagcggagtttcgagtgcttgcccctacaatggtag

SEQ ID NO: 422402 - DNA, 55 bp, Artificial
  Synthetic oligonucleotide
ggcaaggagtcagaaagggagacctagaagtatcactcttttggcatgcgtgcca

SEQ ID NO: 422403 - DNA, 55 bp, Artificial
  Synthetic oligonucleotide
ggcaaggatgctatgttagtggccttccctgtgactgttaatagctttaagaaca

SEQ ID NO: 422404 - DNA, 59 bp, Artificial
  Synthetic oligonucleotide
ggcaaggatgtttctcagtcagtttctccaagtcagacaggtttgggtatttcactgta

SEQ ID NO: 422405 - DNA, 54 bp, Artificial
  Synthetic oligonucleotide
ggcaaggccccattaattcaaactcggtgtctgttcctttaagtctcaacttat

SEQ ID NO: 422406 - DNA, 55 bp, Artificial
  Synthetic oligonucleotide
ggcaaggccctgaatattaactgtccatcagataaactgccctttgagcttggat

SEQ ID NO: 422407 - DNA, 51 bp, Artificial
  Synthetic oligonucleotide
ggcaaggggtacatcccgcattcgtggcgccaagtaccggacgcacgtacc

SEQ ID NO: 422408 - DNA, 53 bp, Artificial
  Synthetic oligonucleotide
ggcaaggggtggaactgtaggggaagaaattcctccaaatggaagtcctagcc

SEQ ID NO: 422409 - DNA, 57 bp, Artificial
  Synthetic oligonucleotide
ggcaagggtggcgactccttgcgcctatcacggcctactcccaacagacgcggggcc

SEQ ID NO: 422410 - DNA, 55 bp, Artificial
  Synthetic oligonucleotide
ggcaaggtcctctgtgtgtctgatgttacgcgtggtagtgggcttacccatcgtg

SEQ ID NO: 422411 - DNA, 55 bp, Artificial
  Synthetic oligonucleotide
ggcaaggtgacaggtggacagtatgccagcaacgagcaggctatagtcaagcggt

SEQ ID NO: 422412 - DNA, 55 bp, Artificial
  Synthetic oligonucleotide
ggcaaggtgatgtgtgtgtcggacgtgacacgcggcaatggtatcacccatcgtg

SEQ ID NO: 422413 - DNA, 60 bp, Artificial
  Synthetic oligonucleotide
ggcaaggtgattgggatgcatgttggagggaacggttcacatgggttcgcagcagccctg

SEQ ID NO: 422414 - DNA, 58 bp, Artificial
  Synthetic oligonucleotide
ggcaaggttaaagctccacttcgcccaacactggcgagcctatcttttggctctcacc

SEQ ID NO: 422415 - DNA, 54 bp, Artificial
  Synthetic oligonucleotide
ggcaaggtttatattatggagtgtttagaacttgttaaagccaaattgccttcg

SEQ ID NO: 422416 - DNA, 60 bp, Artificial
  Synthetic oligonucleotide
ggcaaggtttctgtgctgctctgaagagaggatacttttgcagtgaacagggtgagatcc

SEQ ID NO: 422417 - DNA, 55 bp, Artificial
  Synthetic oligonucleotide
ggcaagtaacctggataccagattgggactttgtgtcaacacctcccttagtcag

SEQ ID NO: 422418 - DNA, 60 bp, Artificial
  Synthetic oligonucleotide
ggcaagtacatcatggccttcaatccaccttggggggacatcaacaaatcaggccgttca

SEQ ID NO: 422419 - DNA, 60 bp, Artificial
  Synthetic oligonucleotide
ggcaagtacgagaatcacacggagaacgctctactattgtatatggcatgtactcatgct

SEQ ID NO: 422420 - DNA, 60 bp, Artificial
  Synthetic oligonucleotide
ggcaagtagaggccgatgactgctggctgcctcttctgacgtccgcgggcaaccaagacc

SEQ ID NO: 422421 - DNA, 60 bp, Artificial
  Synthetic oligonucleotide
ggcaagtatgcaatatggtcgcacagaggtgcagattgctattgcaccagggaggcgctt

SEQ ID NO: 422422 - DNA, 54 bp, Artificial
  Synthetic oligonucleotide
ggcaagtctctcagttgtagtccaccgtttaggattctccgggtaactaactgg

SEQ ID NO: 422423 - DNA, 60 bp, Artificial
  Synthetic oligonucleotide
ggcaagtgacctctctagatttgatcttacaagcttctctaggagagggttgccaaatgt

SEQ ID NO: 422424 - DNA, 60 bp, Artificial
  Synthetic oligonucleotide
ggcaagtgcaagctgattatatgacagcaacacgagaggttgatttcacggtaccggatg

SEQ ID NO: 422425 - DNA, 59 bp, Artificial
  Synthetic oligonucleotide
ggcaagtgcaggcaaactttgactcacagtagtttggcacaaccacttttgttattggc

SEQ ID NO: 422426 - DNA, 57 bp, Artificial
  Synthetic oligonucleotide
ggcaagtggctcaggaaacctagagacgtccccattatagaatctaacagtgtctaa

SEQ ID NO: 422427 - DNA, 55 bp, Artificial
  Synthetic oligonucleotide
ggcaagtgggatacccttacgctccgcactgtccgtgggcaggtgcatatcgctc

SEQ ID NO: 422428 - DNA, 55 bp, Artificial
  Synthetic oligonucleotide
ggcaagtggtagtaatgaattgcatcgcacccgtaaattggaagcattgctatcg

SEQ ID NO: 422429 - DNA, 55 bp, Artificial
  Synthetic oligonucleotide
ggcaagtgtaacactttgtgtgatgctcactaccacctaaacgacgaaagaacgg

SEQ ID NO: 422430 - DNA, 60 bp, Artificial
  Synthetic oligonucleotide
ggcaagtgtcttcactaataggattcaggtgatttatgagaagactcattgtgtcacagg

SEQ ID NO: 422431 - DNA, 60 bp, Artificial
  Synthetic oligonucleotide
ggcaagtgtttgagtatcagccaaaaaggagcaggccacattaaggtgagcagagggaaa

SEQ ID NO: 422432 - DNA, 55 bp, Artificial
  Synthetic oligonucleotide
ggcaagttcgatgtgaacgtgccgaaggtgcgtgctaagcgtggtgagtcggatg

SEQ ID NO: 422433 - DNA, 57 bp, Artificial
  Synthetic oligonucleotide
ggcaagttgttattgatggagtgttaaatcaaacacttaacgacaacattaggaatg

SEQ ID NO: 422434 - DNA, 60 bp, Artificial
  Synthetic oligonucleotide
ggcaataacagattgtctgagattatgcagtgggatctccatacctttgtaaagactgac

SEQ ID NO: 422435 - DNA, 55 bp, Artificial
  Synthetic oligonucleotide
ggcaataacagtgggcaaccatcaactgtggtggacaatactttaatggttgttc

SEQ ID NO: 422436 - DNA, 60 bp, Artificial
  Synthetic oligonucleotide
ggcaataagagcagttataccacctacgactactcctgtacctcagggatatctcatcca

SEQ ID NO: 422437 - DNA, 53 bp, Artificial
  Synthetic oligonucleotide
ggcaataatcgtggctatggtgttttcacaggaagattgtatgataaaggcag

SEQ ID NO: 422438 - DNA, 57 bp, Artificial
  Synthetic oligonucleotide
ggcaataattttagttgaacctggtgttactcagacgactagagagtataatgtgtt

SEQ ID NO: 422439 - DNA, 58 bp, Artificial
  Synthetic oligonucleotide
ggcaatacaagggatcatgtaaatctcgttttaaatagagacgtctcatttcaggatt

SEQ ID NO: 422440 - DNA, 55 bp, Artificial
  Synthetic oligonucleotide
ggcaatacataccccacatctggtcaagctctggtatgagctggtgtcagaaccc

SEQ ID NO: 422441 - DNA, 55 bp, Artificial
  Synthetic oligonucleotide
ggcaatacgattacaagataacacagggcaacctttacaggttcctggatatggc

SEQ ID NO: 422442 - DNA, 51 bp, Artificial
  Synthetic oligonucleotide
ggcaatacgttaaccatctttaaaggtagagatgtttctagaactatcgag

SEQ ID NO: 422443 - DNA, 54 bp, Artificial
  Synthetic oligonucleotide
ggcaatactttccgaaagaatggttaagtagtttaagtctagtcacatccaaac

SEQ ID NO: 422444 - DNA, 55 bp, Artificial
  Synthetic oligonucleotide
ggcaatagcagataagttagataatcagagaccctatacccttccacccgatccc

SEQ ID NO: 422445 - DNA, 55 bp, Artificial
  Synthetic oligonucleotide
ggcaatagccatcctcaggggcccgtgtaacaccctcaagtgctgcaggtaccgc

SEQ ID NO: 422446 - DNA, 60 bp, Artificial
  Synthetic oligonucleotide
ggcaataggtctcctagcattcagcattactgcattcatcatcgctagtttcaattcaag

SEQ ID NO: 422447 - DNA, 50 bp, Artificial
  Synthetic oligonucleotide
ggcaatagtaggactgatagtagcgttaattgtagcaatagttgtctgga

SEQ ID NO: 422448 - DNA, 55 bp, Artificial
  Synthetic oligonucleotide
ggcaatagtggctgctgcaggggcaagtctgggagtcgcaaatgcgattcagcag

SEQ ID NO: 422449 - DNA, 55 bp, Artificial
  Synthetic oligonucleotide
ggcaatagtggtgaccaaaagtatgttgatttaccaaaaggggattcggagatgt

SEQ ID NO: 422450 - DNA, 59 bp, Artificial
  Synthetic oligonucleotide
ggcaatagttaagaggtgcaacattaagggcggacttccaataattatatgcggagagc

SEQ ID NO: 422451 - DNA, 55 bp, Artificial
  Synthetic oligonucleotide
ggcaatattcgtgctacgcatccacagtggagaaggaaaccgggaaaagcattgc

SEQ ID NO: 422452 - DNA, 55 bp, Artificial
  Synthetic oligonucleotide
ggcaatcacctgattttccagccaataagatagcattattcctgaaatcgcaatg

SEQ ID NO: 422453 - DNA, 55 bp, Artificial
  Synthetic oligonucleotide
ggcaatcaggaactaatgcatctatattctggcaacatggtcaaccctaccctcg

SEQ ID NO: 422454 - DNA, 55 bp, Artificial
  Synthetic oligonucleotide
ggcaatcaggaactaatgcttcagtattctggcaacatggacaaccataccctag

SEQ ID NO: 422455 - DNA, 55 bp, Artificial
  Synthetic oligonucleotide
ggcaatcagtcccagtgttgggtgcaggcctccccgactttggcagtgccgaaca

SEQ ID NO: 422456 - DNA, 60 bp, Artificial
  Synthetic oligonucleotide
ggcaatcagttatttgttaccgtggttgataccactcgtagcactaatatgacattatgc

SEQ ID NO: 422457 - DNA, 60 bp, Artificial
  Synthetic oligonucleotide
ggcaatcatggatgaagcccattggacggatccacacagcatagccgctcggggtcacct

SEQ ID NO: 422458 - DNA, 53 bp, Artificial
  Synthetic oligonucleotide
ggcaatccacgttcagtgtaatgcaaccaaattccaccagggtacgctcctcg

SEQ ID NO: 422459 - DNA, 59 bp, Artificial
  Synthetic oligonucleotide
ggcaatcctcacaaaaaggctgagcaaggcatttccagggttgacagcaattttactaa

SEQ ID NO: 422460 - DNA, 60 bp, Artificial
  Synthetic oligonucleotide
ggcaatcctcatggctggccacatgaaatcgtacgccattactaccacctctatcccttc

SEQ ID NO: 422461 - DNA, 60 bp, Artificial
  Synthetic oligonucleotide
ggcaatcctgcaaccgaccaatcagatggaatgatgacacctgaacgtagtataaggttg

SEQ ID NO: 422462 - DNA, 55 bp, Artificial
  Synthetic oligonucleotide
ggcaatcctgcttgtcaagtgactccacatatgaaaattgctgtagcacactatg

SEQ ID NO: 422463 - DNA, 55 bp, Artificial
  Synthetic oligonucleotide
ggcaatccttgaatggcaacgcagtgcagaacctcaggcaattcagagtgcaatc

SEQ ID NO: 422464 - DNA, 55 bp, Artificial
  Synthetic oligonucleotide
ggcaatcgaggtgatcaggggttgccaacacgagtgcagtgtcgtttattgtgag

SEQ ID NO: 422465 - DNA, 55 bp, Artificial
  Synthetic oligonucleotide
ggcaatcggaagagactacaagggagctatcttatgcttcagagaaggacaaggg

SEQ ID NO: 422466 - DNA, 59 bp, Artificial
  Synthetic oligonucleotide
ggcaatcggtgtacactctaattctatggcaatcggtgtaacggggtgcaatatatagg

SEQ ID NO: 422467 - DNA, 51 bp, Artificial
  Synthetic oligonucleotide
ggcaatctcataccatgctggaatagtcgtagctcctaatatatggctcgg

SEQ ID NO: 422468 - DNA, 55 bp, Artificial
  Synthetic oligonucleotide
ggcaatctcgtctccgatagcagcacttgaaactacagtatcaaccgaataccac

SEQ ID NO: 422469 - DNA, 60 bp, Artificial
  Synthetic oligonucleotide
ggcaatctggaacaaatgcatcaatcttctggcaacatggtcaaacataccccagatttt

SEQ ID NO: 422470 - DNA, 60 bp, Artificial
  Synthetic oligonucleotide
ggcaatcttgagaactgtatagataattacgccatagaatgttcatatgcctataagtta

SEQ ID NO: 422471 - DNA, 60 bp, Artificial
  Synthetic oligonucleotide
ggcaatgaaagcagaatgcgtatgtaacaaaatgatgctctgagtacaggcttgcgtgct

SEQ ID NO: 422472 - DNA, 60 bp, Artificial
  Synthetic oligonucleotide
ggcaatgacagacactacagcctttgggcagcagagagtgttcaaggacaaagtcgacac

SEQ ID NO: 422473 - DNA, 57 bp, Artificial
  Synthetic oligonucleotide
ggcaatgagactcgttattataatgggaacttttctgattggtgtgcttcaaaaggg

SEQ ID NO: 422474 - DNA, 55 bp, Artificial
  Synthetic oligonucleotide
ggcaatgagagcgaaggagatacagaggaattgtcaaaagtggtggatatggggc

SEQ ID NO: 422475 - DNA, 55 bp, Artificial
  Synthetic oligonucleotide
ggcaatgagagtgatggggatcaagaggaattatcagcacttgtggaaagagggc

SEQ ID NO: 422476 - DNA, 60 bp, Artificial
  Synthetic oligonucleotide
ggcaatgagtcggagttcaacaatgcttacctcatattctcaggtcagctaccttctaac

SEQ ID NO: 422477 - DNA, 55 bp, Artificial
  Synthetic oligonucleotide
ggcaatgatatgggtgtgattttgaataccctttatcacggtcctgctactcgtg

SEQ ID NO: 422478 - DNA, 55 bp, Artificial
  Synthetic oligonucleotide
ggcaatgcgtgaatctcgtaaacagcttgagcctagcagctacgagcggcaaaga

SEQ ID NO: 422479 - DNA, 58 bp, Artificial
  Synthetic oligonucleotide
ggcaatgcgtttcattacataaccatgatcttcccgctttagtgtctttccaaccgac

SEQ ID NO: 422480 - DNA, 60 bp, Artificial
  Synthetic oligonucleotide
ggcaatgctgagcgatggcagtacattaacttataccccgtatatcctacagtcagaagt

SEQ ID NO: 422481 - DNA, 55 bp, Artificial
  Synthetic oligonucleotide
ggcaatggactggccagctagagtatcaagcaccgaaccttacatggagggttcc

SEQ ID NO: 422482 - DNA, 57 bp, Artificial
  Synthetic oligonucleotide
ggcaatgggggggcagcacaacctccatcaaaactgtttgtgaccctaaggacaatc

SEQ ID NO: 422483 - DNA, 50 bp, Artificial
  Synthetic oligonucleotide
ggcaatgggttcttccctcccatactccctcccccccgacccaaagtact

SEQ ID NO: 422484 - DNA, 55 bp, Artificial
  Synthetic oligonucleotide
ggcaatggtgtttggataggaagaactaaaagtatcagttccagaagcggatttg

SEQ ID NO: 422485 - DNA, 52 bp, Artificial
  Synthetic oligonucleotide
ggcaatgtacgggtagaacggtcagagaggccgtccctcaatcgggagccgg

SEQ ID NO: 422486 - DNA, 57 bp, Artificial
  Synthetic oligonucleotide
ggcaatgtcaagtaactggtaattgtccacctgatgttgttaataaagtcgaaggaa

SEQ ID NO: 422487 - DNA, 59 bp, Artificial
  Synthetic oligonucleotide
ggcaatgtccaaaagatcacgatcactgaactccgctgcgttttattatagagtttagg

SEQ ID NO: 422488 - DNA, 59 bp, Artificial
  Synthetic oligonucleotide
ggcaatgtctcgttgaatttaattcaacatctttgtcacattgggaatagagaataaat

SEQ ID NO: 422489 - DNA, 58 bp, Artificial
  Synthetic oligonucleotide
ggcaatgttggttaatgtaaatgaggatgaggccaaagacttcacgaagatggtaagg

SEQ ID NO: 422490 - DNA, 55 bp, Artificial
  Synthetic oligonucleotide
ggcaattaatgggactcccctgctggatggtattgacatgaatcagtctccaggc

SEQ ID NO: 422491 - DNA, 54 bp, Artificial
  Synthetic oligonucleotide
ggcaattatgtaaactcctaaggggggccaaagcgctaacagaagtagtacaac

SEQ ID NO: 422492 - DNA, 55 bp, Artificial
  Synthetic oligonucleotide
ggcaattatgtaaactcctcaggggagcaagagcattaacagacatagtaccgct

SEQ ID NO: 422493 - DNA, 55 bp, Artificial
  Synthetic oligonucleotide
ggcaattccaaaccgacttctgtaaaaggcccctattcacatgggcagcaggact

SEQ ID NO: 422494 - DNA, 58 bp, Artificial
  Synthetic oligonucleotide
ggcaattccatatatttctgtttcgccactacattaattctaaaagccagcaatgaag

SEQ ID NO: 422495 - DNA, 60 bp, Artificial
  Synthetic oligonucleotide
ggcaattccttggtcttgtgtcccgttgtgtcgctgtggaatcgggctgctagctcaaga

SEQ ID NO: 422496 - DNA, 55 bp, Artificial
  Synthetic oligonucleotide
ggcaattcgatgacgtatatagatcctgaggttgaaggttttatggaatttgaga

SEQ ID NO: 422497 - DNA, 53 bp, Artificial
  Synthetic oligonucleotide
ggcaattgagcgcgtcatacaaatccttaagagtgtcggcatgcaacaatgcg

SEQ ID NO: 422498 - DNA, 55 bp, Artificial
  Synthetic oligonucleotide
ggcaattgatagccgcaaacatcagctgtcatgagaatgtcctgggtgaatctgg

SEQ ID NO: 422499 - DNA, 60 bp, Artificial
  Synthetic oligonucleotide
ggcaattgccctcatcacaagggacaacaggagcgttgttcgttatgccaagacaagtgg

SEQ ID NO: 422500 - DNA, 60 bp, Artificial
  Synthetic oligonucleotide
ggcaattggattggacagagacaaagtggtacgcatcagcatcctacctgaaactggaac

SEQ ID NO: 422501 - DNA, 58 bp, Artificial
  Synthetic oligonucleotide
ggcaattggcatcgaagcagactgtaccgaattcaccagagccgtaaatttgatcact

SEQ ID NO: 422502 - DNA, 55 bp, Artificial
  Synthetic oligonucleotide
ggcaattgtacagtgaggcaagcacgcacaatgcaaaattttgaactatcaccat

SEQ ID NO: 422503 - DNA, 60 bp, Artificial
  Synthetic oligonucleotide
ggcaattgtgtgctgtgatgtctaagctaaaagcggttcgtgctatatgcttcggtgatt

SEQ ID NO: 422504 - DNA, 55 bp, Artificial
  Synthetic oligonucleotide
ggcaatttcaacctaattctaaaactgttaccaacaatttctgaactacagaaga

SEQ ID NO: 422505 - DNA, 55 bp, Artificial
  Synthetic oligonucleotide
ggcaatttcattgcgcggatgagcaaggaataactgattacattcacatgctggg

SEQ ID NO: 422506 - DNA, 53 bp, Artificial
  Synthetic oligonucleotide
ggcaattttccaatcttctacaggaacaaaattcaaattgggtacttcgaccg

SEQ ID NO: 422507 - DNA, 56 bp, Artificial
  Synthetic oligonucleotide
ggcacaaaaggatctggagaacgcgcgaacgagaatgctaacagaggagatggaaa

SEQ ID NO: 422508 - DNA, 55 bp, Artificial
  Synthetic oligonucleotide
ggcacaaaatggccgccaacttcttccgggtcaaaggtcactgctacgtcatagg

SEQ ID NO: 422509 - DNA, 54 bp, Artificial
  Synthetic oligonucleotide
ggcacaaacctaatcctatgcctgagagtgtgagagatagatgcactaaggcac

SEQ ID NO: 422510 - DNA, 55 bp, Artificial
  Synthetic oligonucleotide
ggcacaaagaccccgagcatccataccgaacctggacctaccacggaagctacga

SEQ ID NO: 422511 - DNA, 58 bp, Artificial
  Synthetic oligonucleotide
ggcacaaagagcagggctggttagacgttgggtaccacttcatcatccgtcgtgacgg

SEQ ID NO: 422512 - DNA, 55 bp, Artificial
  Synthetic oligonucleotide
ggcacaaatacgcctacaacaagggtggtggaattgcttaagtgtaagaacttgc

SEQ ID NO: 422513 - DNA, 60 bp, Artificial
  Synthetic oligonucleotide
ggcacaaatgtgacaatgaatgcatcaaatcggttaaaaatggtacatatgactatccaa

SEQ ID NO: 422514 - DNA, 60 bp, Artificial
  Synthetic oligonucleotide
ggcacaaattgtcgtcaaaatgcttgcatacctacgacgtgaatggcagtcttatgggga

SEQ ID NO: 422515 - DNA, 55 bp, Artificial
  Synthetic oligonucleotide
ggcacaacaaatagcatcatcaatcgtttggactgtaggatggggtccgctaacg

SEQ ID NO: 422516 - DNA, 60 bp, Artificial
  Synthetic oligonucleotide
ggcacaacactcagagggagacatgcgaatgggactatacatgataggagcccgttcaga

SEQ ID NO: 422517 - DNA, 55 bp, Artificial
  Synthetic oligonucleotide
ggcacaacccaaaatacgacaactccgagcgtagctcaaaacattacgctaaaag

SEQ ID NO: 422518 - DNA, 50 bp, Artificial
  Synthetic oligonucleotide
ggcacaacccccgctactgtcgttacccccgccactggacgtagatcaga

SEQ ID NO: 422519 - DNA, 60 bp, Artificial
  Synthetic oligonucleotide
ggcacaagactatagccagctctttcaaaggagcgtatgcttctagagcaagtggaacac

SEQ ID NO: 422520 - DNA, 55 bp, Artificial
  Synthetic oligonucleotide
ggcacaagatgtgcgatgacgtgaactccgagcccatccaacctgaagagcaacc

SEQ ID NO: 422521 - DNA, 55 bp, Artificial
  Synthetic oligonucleotide
ggcacaagccaggtcatgcactgcgaataggtcacacagagaaggggttaagcga

SEQ ID NO: 422522 - DNA, 53 bp, Artificial
  Synthetic oligonucleotide
ggcacaaggggttttggaacccttactgctgaagcctccaacatgattacaaa

SEQ ID NO: 422523 - DNA, 52 bp, Artificial
  Synthetic oligonucleotide
ggcacaataatggtatttgttgggctaaccaattgtttgtgactgtggtgga

SEQ ID NO: 422524 - DNA, 55 bp, Artificial
  Synthetic oligonucleotide
ggcacaatacacgatagaacccctcatcgaacccttttgatgaatgagttaggtg

SEQ ID NO: 422525 - DNA, 53 bp, Artificial
  Synthetic oligonucleotide
ggcacaatactagtgtggtcgaatacgtgccgtattggaatgaaggcactttc

SEQ ID NO: 422526 - DNA, 60 bp, Artificial
  Synthetic oligonucleotide
ggcacaatatggactcctttcagttcttcgagtggctattgagggacattgaaaggaatc

SEQ ID NO: 422527 - DNA, 60 bp, Artificial
  Synthetic oligonucleotide
ggcacaatcgatgtgttggtagaatgagcagccacagtttaggtctattctcttgcgacg

SEQ ID NO: 422528 - DNA, 55 bp, Artificial
  Synthetic oligonucleotide
ggcacaatcgtctaagggactatctgatgtgatgtggcgctgcaccagtctaggg

SEQ ID NO: 422529 - DNA, 55 bp, Artificial
  Synthetic oligonucleotide
ggcacaatgccgaataagaaggcaacacaacatctaaataacgttatgcagggac

SEQ ID NO: 422530 - DNA, 55 bp, Artificial
  Synthetic oligonucleotide
ggcacacaagagaccaagattcataataagaacgccaaagaacgtcacagacaag

SEQ ID NO: 422531 - DNA, 58 bp, Artificial
  Synthetic oligonucleotide
ggcacacacaacattgacactggcccaatcgacaagttctggaggaactcggtcgaag

SEQ ID NO: 422532 - DNA, 60 bp, Artificial
  Synthetic oligonucleotide
ggcacacacaacattggacgacacccaatcgacgagttccgcaggaactctgtcgaagga

SEQ ID NO: 422533 - DNA, 60 bp, Artificial
  Synthetic oligonucleotide
ggcacacacgtgatctgggactttggtctacaatcatcagtcactttagtaataccttgg

SEQ ID NO: 422534 - DNA, 55 bp, Artificial
  Synthetic oligonucleotide
ggcacacagtagggcacgtagacgtaaacgtgcatctgctacccaattatatcaa

SEQ ID NO: 422535 - DNA, 60 bp, Artificial
  Synthetic oligonucleotide
ggcacacattgagggaaccaagtaccacctgaagagtggccatgtgacctgcgaagtggg

SEQ ID NO: 422536 - DNA, 60 bp, Artificial
  Synthetic oligonucleotide
ggcacaccaacgagactgtcatctacaaggtggcactggactaccacttcattgctaccg

SEQ ID NO: 422537 - DNA, 55 bp, Artificial
  Synthetic oligonucleotide
ggcacaccatcttcagggtcctttgtaggtcaagacgtacaatttgagctacctg

SEQ ID NO: 422538 - DNA, 55 bp, Artificial
  Synthetic oligonucleotide
ggcacacccgcaaatctcattcagaggggcgttaaatcttctgttggtagagcac

SEQ ID NO: 422539 - DNA, 60 bp, Artificial
  Synthetic oligonucleotide
ggcacaccctgttgatggtgctgatggatattatcagataaatgttgagaaattcgggtt

SEQ ID NO: 422540 - DNA, 60 bp, Artificial
  Synthetic oligonucleotide
ggcacaccgagaggattgatgagttcactgataacctccggggacgccaggcagcatggt

SEQ ID NO: 422541 - DNA, 54 bp, Artificial
  Synthetic oligonucleotide
ggcacacctcaagccatgtaagagatatggttgtcttctgcagtgacacaaaag

SEQ ID NO: 422542 - DNA, 52 bp, Artificial
  Synthetic oligonucleotide
ggcacacctcgcaagttactccaagtgacactatgcagacaagacatgtgaa

SEQ ID NO: 422543 - DNA, 60 bp, Artificial
  Synthetic oligonucleotide
ggcacacgagaagatatgatggttcaacgaccagattgtaaagttagtatagtgacggag

SEQ ID NO: 422544 - DNA, 60 bp, Artificial
  Synthetic oligonucleotide
ggcacacggtgagccatactatagctccaaacctgacaaggatttcaattttggaagcac

SEQ ID NO: 422545 - DNA, 55 bp, Artificial
  Synthetic oligonucleotide
ggcacacgtcgattgcacaaaaggttccgacgcgaccaattccagcattgccgtg

SEQ ID NO: 422546 - DNA, 60 bp, Artificial
  Synthetic oligonucleotide
ggcacacgttattgtcgctggctatagctcattggggcagagtcaaaccggacaaagact

SEQ ID NO: 422547 - DNA, 60 bp, Artificial
  Synthetic oligonucleotide
ggcacactgattatgatccttttaaagcaggcattctcaaatacaaggatcctatgggtg

SEQ ID NO: 422548 - DNA, 55 bp, Artificial
  Synthetic oligonucleotide
ggcacactgcaacagatgtcaatcgtaacatgcaccacctacttggtgtgagtgg

SEQ ID NO: 422549 - DNA, 55 bp, Artificial
  Synthetic oligonucleotide
ggcacacttatcgataaagaagcagtggtgaacattcttagttggcacattcaca

SEQ ID NO: 422550 - DNA, 59 bp, Artificial
  Synthetic oligonucleotide
ggcacagaagactcggaatttgcatctatatggcgtatccaaaggtgtcaaccgttaag

SEQ ID NO: 422551 - DNA, 60 bp, Artificial
  Synthetic oligonucleotide
ggcacagaagcatgcatctgtggaaatcatcactaagaaatccacaagattggactatat

SEQ ID NO: 422552 - DNA, 55 bp, Artificial
  Synthetic oligonucleotide
ggcacagacgaacggcgtagagcgtactgccggtgttctgacaccccttgggatg

SEQ ID NO: 422553 - DNA, 55 bp, Artificial
  Synthetic oligonucleotide
ggcacagactatttgtatactttcaactcacaacgacgatcacacacgttacgac

SEQ ID NO: 422554 - DNA, 60 bp, Artificial
  Synthetic oligonucleotide
ggcacagactcgtgtgagcctagtgtcctagatttcgccgcagcatgaccaacaactcgg

SEQ ID NO: 422555 - DNA, 55 bp, Artificial
  Synthetic oligonucleotide
ggcacagatggtatgtgccatgatgggatccaaaagatctcaaaacgcaatcgcc

SEQ ID NO: 422556 - DNA, 52 bp, Artificial
  Synthetic oligonucleotide
ggcacagcaatggtggatcggacaaaagaaacctccttacactacccgctgt

SEQ ID NO: 422557 - DNA, 55 bp, Artificial
  Synthetic oligonucleotide
ggcacagcacagctgtacgcaggtgacgactgtgctttcgactttgctcccgagg

SEQ ID NO: 422558 - DNA, 60 bp, Artificial
  Synthetic oligonucleotide
ggcacagcttagtgcacgattactcaggcaagagcatgcaaccgttcgtgtattgaaaaa

SEQ ID NO: 422559 - DNA, 55 bp, Artificial
  Synthetic oligonucleotide
ggcacaggaacaggctaggaggataccagacgtatggaaagcattacaggaggcc

SEQ ID NO: 422560 - DNA, 55 bp, Artificial
  Synthetic oligonucleotide
ggcacaggacaggcagcagaccttaaaagcactcaagccgccattgaccagatca

SEQ ID NO: 422561 - DNA, 60 bp, Artificial
  Synthetic oligonucleotide
ggcacaggagctttacaagaactcgtctgcacttcgtgcacagggtgcacagattgacac

SEQ ID NO: 422562 - DNA, 60 bp, Artificial
  Synthetic oligonucleotide
ggcacaggatttcaaattcatcacacatgctggatggaggctatatccaagattgttgcg

SEQ ID NO: 422563 - DNA, 52 bp, Artificial
  Synthetic oligonucleotide
ggcacaggggttcctaaaggaaaggtggcttcctcaaagaccactaacaaaa

SEQ ID NO: 422564 - DNA, 55 bp, Artificial
  Synthetic oligonucleotide
ggcacaggtgtcaatgcggacgtaacaagcatcgcagacaacatccttgtctacg

SEQ ID NO: 422565 - DNA, 55 bp, Artificial
  Synthetic oligonucleotide
ggcacagtctggtcaagtacctgaagcatagaacaaaagagttgcaacaggtctc

SEQ ID NO: 422566 - DNA, 59 bp, Artificial
  Synthetic oligonucleotide
ggcacagtttggagtgaccataacagatggtattgacaaaacaagtcccacactggaat

SEQ ID NO: 422567 - DNA, 60 bp, Artificial
  Synthetic oligonucleotide
ggcacatacaccggtcatactcaagtatattgggctccgtggacgatcatgtatccatgc

SEQ ID NO: 422568 - DNA, 53 bp, Artificial
  Synthetic oligonucleotide
ggcacatattatgttcttaaccgtgtttatttaaatactaccttgttatttac

SEQ ID NO: 422569 - DNA, 60 bp, Artificial
  Synthetic oligonucleotide
ggcacatcacgtggacattttgcatcgaacatgagctcattggattcgtctcggcgagag

SEQ ID NO: 422570 - DNA, 60 bp, Artificial
  Synthetic oligonucleotide
ggcacatcagctccgcctctccaggtagtgtcctgctcgtcctatatgacaggaggttgc

SEQ ID NO: 422571 - DNA, 55 bp, Artificial
  Synthetic oligonucleotide
ggcacatcctatcaaaggacaacgcaataaggataggagaggacgcccatatact

SEQ ID NO: 422572 - DNA, 55 bp, Artificial
  Synthetic oligonucleotide
ggcacatctaaatcctacgtacggtcgttgtagcaggtgtgtctcccatgtgacc

SEQ ID NO: 422573 - DNA, 60 bp, Artificial
  Synthetic oligonucleotide
ggcacatctggattccgtggcgtctcctgaaacgaggtgcatgcccaagacccggagaca

SEQ ID NO: 422574 - DNA, 55 bp, Artificial
  Synthetic oligonucleotide
ggcacatgaatgggtcaagcactggaagtataatactagtgccatcagttggggc

SEQ ID NO: 422575 - DNA, 55 bp, Artificial
  Synthetic oligonucleotide
ggcacatgcgagtctcccacctaattgatgaaatggtctctcgtcgcatttaccg

SEQ ID NO: 422576 - DNA, 55 bp, Artificial
  Synthetic oligonucleotide
ggcacatgggcgccacatgagtggcagatgacgcgcagaaaggccacacactcct

SEQ ID NO: 422577 - DNA, 60 bp, Artificial
  Synthetic oligonucleotide
ggcacatgtgcagttgtgatgaccgatgggtcagccagtagtcaggcctacacgaaagta

SEQ ID NO: 422578 - DNA, 56 bp, Artificial
  Synthetic oligonucleotide
ggcacatgtttggtccgttcaagattttgactaaagaagggaaggattgtgtaatc

SEQ ID NO: 422579 - DNA, 55 bp, Artificial
  Synthetic oligonucleotide
ggcacattaatagcacggccttgaactgcaatgaaagcctcgacaccggctggct

SEQ ID NO: 422580 - DNA, 60 bp, Artificial
  Synthetic oligonucleotide
ggcacattcttgcgctttatgcgtgagtgcgtcgaatttgccatctataagcgctgggtt

SEQ ID NO: 422581 - DNA, 55 bp, Artificial
  Synthetic oligonucleotide
ggcacatttaaccaactccccgatattgcggcgtcgtacgaaaaatacaaattca

SEQ ID NO: 422582 - DNA, 55 bp, Artificial
  Synthetic oligonucleotide
ggcacattttcaagatactacgatcacacgagcttataatctgacgaattccatc

SEQ ID NO: 422583 - DNA, 60 bp, Artificial
  Synthetic oligonucleotide
ggcaccaaaatgcagagggaacaggaacggctgcagatctcaagtcgactcaggcagcca

SEQ ID NO: 422584 - DNA, 55 bp, Artificial
  Synthetic oligonucleotide
ggcaccaaaccttatctcatacaagcccatgatagaccaattggagtgcacaacg

SEQ ID NO: 422585 - DNA, 59 bp, Artificial
  Synthetic oligonucleotide
ggcaccaaacgatcttatgaacagatggaaactggtggagaacgccaaaatactactga

SEQ ID NO: 422586 - DNA, 55 bp, Artificial
  Synthetic oligonucleotide
ggcaccaacggaagtgcagagaaggcctgtgccgcatgtccaagctagggcaata

SEQ ID NO: 422587 - DNA, 55 bp, Artificial
  Synthetic oligonucleotide
ggcaccaagatatgctttcgcactgaatagaggttctgaatccggtatcatcact

SEQ ID NO: 422588 - DNA, 55 bp, Artificial
  Synthetic oligonucleotide
ggcaccaatttcaccagtgccgcggttaaggcagcctgtcagcaggcaggtatcc

SEQ ID NO: 422589 - DNA, 55 bp, Artificial
  Synthetic oligonucleotide
ggcaccacagtggttaaccggatggggacgctttgtgtcagaattgttacaggca

SEQ ID NO: 422590 - DNA, 55 bp, Artificial
  Synthetic oligonucleotide
ggcaccacatcaaccgttataactttgtccatagctccacagggtgtaaggtaag

SEQ ID NO: 422591 - DNA, 55 bp, Artificial
  Synthetic oligonucleotide
ggcaccactcatgatagaattcctcatagaacccttttaatgagtgagttaggtg

SEQ ID NO: 422592 - DNA, 57 bp, Artificial
  Synthetic oligonucleotide
ggcaccacttacccggcttgcactgccttacacggcaccacaccgtgttttggctac

SEQ ID NO: 422593 - DNA, 55 bp, Artificial
  Synthetic oligonucleotide
ggcaccagaagcgttctcctcctgagaccctagtgctcagctctcggtcctgagc

SEQ ID NO: 422594 - DNA, 51 bp, Artificial
  Synthetic oligonucleotide
ggcaccagaatttcaccttaatgataatcccgttcgctccactggaggtcc

SEQ ID NO: 422595 - DNA, 55 bp, Artificial
  Synthetic oligonucleotide
ggcaccagagaaagtagactttgatgattgcaaagatgttggtgatcttaaacag

SEQ ID NO: 422596 - DNA, 55 bp, Artificial
  Synthetic oligonucleotide
ggcaccagagaacgcacgttgacgtgttgttgcctgtgggcgtttaaaagccaca

SEQ ID NO: 422597 - DNA, 60 bp, Artificial
  Synthetic oligonucleotide
ggcaccagagtctcgagcctcccgtcaactgcaaggactaggagctgggttgaggatcaa

SEQ ID NO: 422598 - DNA, 55 bp, Artificial
  Synthetic oligonucleotide
ggcaccagcacatgcaactcctgttgaagttgtgaacctgccaccaacgcgctct

SEQ ID NO: 422599 - DNA, 60 bp, Artificial
  Synthetic oligonucleotide
ggcaccagcgaggggtagagccgacgggccgcagcccactgtgctgcgagccattcggac

SEQ ID NO: 422600 - DNA, 52 bp, Artificial
  Synthetic oligonucleotide
ggcaccaggaaaaggctcagacccagaagtagcatacatgtggactaactgc

SEQ ID NO: 422601 - DNA, 55 bp, Artificial
  Synthetic oligonucleotide
ggcaccaggcaatcttcagcccaccaccaacacttcaggtgcacaaactgtcgcc

SEQ ID NO: 422602 - DNA, 60 bp, Artificial
  Synthetic oligonucleotide
ggcaccagtgtccaagaaagcgagcaaagatgtcttaccttgctataatagcaggtagta

SEQ ID NO: 422603 - DNA, 55 bp, Artificial
  Synthetic oligonucleotide
ggcaccatggagatagatctcagcgccggatcccaaattgtttatattgccccaa

SEQ ID NO: 422604 - DNA, 55 bp, Artificial
  Synthetic oligonucleotide
ggcaccattacgaagggtgatgttaccactgcgaattggcgaaagggccaaccag

SEQ ID NO: 422605 - DNA, 55 bp, Artificial
  Synthetic oligonucleotide
ggcaccattgatgaaagcattgcacgaagaggacctgagagtcgagtcgttgccg

SEQ ID NO: 422606 - DNA, 55 bp, Artificial
  Synthetic oligonucleotide
ggcacccataattagagccacccctcaatacaagtgcaactataacagtaactac

SEQ ID NO: 422607 - DNA, 60 bp, Artificial
  Synthetic oligonucleotide
ggcacccataccagatagcaggactcattttgcatggcagtcagggactaatgcatcaat

SEQ ID NO: 422608 - DNA, 51 bp, Artificial
  Synthetic oligonucleotide
ggcacccccccccaccttcctcaacattgattcactggcccaaaccatgaa

SEQ ID NO: 422609 - DNA, 60 bp, Artificial
  Synthetic oligonucleotide
ggcacccgctttgctattggcgggcccctcctcagccacacgtatgagctccgcgctgac

SEQ ID NO: 422610 - DNA, 56 bp, Artificial
  Synthetic oligonucleotide
ggcaccctattgtttcgatgtgcagttagagaccgtggattttaactatgatggct

SEQ ID NO: 422611 - DNA, 55 bp, Artificial
  Synthetic oligonucleotide
ggcaccgaagcggacgtcgtatttgtctagtctgctttcgagtccttctggggcg

SEQ ID NO: 422612 - DNA, 58 bp, Artificial
  Synthetic oligonucleotide
ggcaccgagaatgttcttcctgaacgcactttatgcgttaacaccactcagtttacta

SEQ ID NO: 422613 - DNA, 57 bp, Artificial
  Synthetic oligonucleotide
ggcaccgatatatcggtgcctcggagagagaaataaatcccggattccaaaaatgcc

SEQ ID NO: 422614 - DNA, 54 bp, Artificial
  Synthetic oligonucleotide
ggcaccgattggggactctctaaaactctaaagcaattggggactggggtccta

SEQ ID NO: 422615 - DNA, 55 bp, Artificial
  Synthetic oligonucleotide
ggcaccgcgataactcgatctcagaagataactttacctggcgcatctctatcag

SEQ ID NO: 422616 - DNA, 59 bp, Artificial
  Synthetic oligonucleotide
ggcaccgctgtaattactgagcttggctaccaggtatccaaggatataaataacacgtc

SEQ ID NO: 422617 - DNA, 54 bp, Artificial
  Synthetic oligonucleotide
ggcaccggacaaaggtgggacgtggtaattaacaatgaacatatttgccctccc

SEQ ID NO: 422618 - DNA, 57 bp, Artificial
  Synthetic oligonucleotide
ggcaccggagccattcactccaatgaacccgctcaggtggtctggtggaaacccact

SEQ ID NO: 422619 - DNA, 55 bp, Artificial
  Synthetic oligonucleotide
ggcaccggcatgtcgcatgcaacgatacgtgccatcactgcaagactctcgtgtg

SEQ ID NO: 422620 - DNA, 60 bp, Artificial
  Synthetic oligonucleotide
ggcaccgtaaatcagactgtcgaggcgtatgtgaacggtgaccatgccgtaacgattgcc

SEQ ID NO: 422621 - DNA, 54 bp, Artificial
  Synthetic oligonucleotide
ggcaccgtcgaaaggtgccactgggtcttgtgtttggtctgtagtagttttaaa

SEQ ID NO: 422622 - DNA, 58 bp, Artificial
  Synthetic oligonucleotide
ggcacctaaacgcaacaaaggaggtaggaagacccgcatgtccgatgagacggtgcga

SEQ ID NO: 422623 - DNA, 55 bp, Artificial
  Synthetic oligonucleotide
ggcacctacatctttaacactgacccacttaaacttactcacacatggcaaacca

SEQ ID NO: 422624 - DNA, 60 bp, Artificial
  Synthetic oligonucleotide
ggcacctatcttcatctgtcacaatcattgaggctatccgctacttgtctaactcaagac

SEQ ID NO: 422625 - DNA, 51 bp, Artificial
  Synthetic oligonucleotide
ggcacctatgaaccagcctacttgggggggagggacccccgcgtggaaaac

SEQ ID NO: 422626 - DNA, 55 bp, Artificial
  Synthetic oligonucleotide
ggcacctatgtctacaaccatctcactccccttagggactgggcgcacaacagcc

SEQ ID NO: 422627 - DNA, 55 bp, Artificial
  Synthetic oligonucleotide
ggcacctatgtgtatgaccatcttgccccactgtcagactgggctgctgacggcc

SEQ ID NO: 422628 - DNA, 52 bp, Artificial
  Synthetic oligonucleotide
ggcacctcagaccccccctccacccgaaacgcttgcgcgtttcggaccttcg

SEQ ID NO: 422629 - DNA, 60 bp, Artificial
  Synthetic oligonucleotide
ggcacctcagacccccgctcgtgctgacacgctcgcgcgtgtcagaccacttcgggctcg

SEQ ID NO: 422630 - DNA, 55 bp, Artificial
  Synthetic oligonucleotide
ggcacctcatcatcttacatagcaactatcttatcagagaagaggaatgaccaac

SEQ ID NO: 422631 - DNA, 60 bp, Artificial
  Synthetic oligonucleotide
ggcacctcccagatatatacgccattcgtcgcttgagctgcagtgatgggttccccggtg

SEQ ID NO: 422632 - DNA, 60 bp, Artificial
  Synthetic oligonucleotide
ggcacctccggtttgagtgtcgttttcaatgggctgttgcgtggcttgcaccatgtatct

SEQ ID NO: 422633 - DNA, 55 bp, Artificial
  Synthetic oligonucleotide
ggcacctccgtgacgtgcatagccgggaaggggcgtgatcacacggtcccatata

SEQ ID NO: 422634 - DNA, 59 bp, Artificial
  Synthetic oligonucleotide
ggcacctccttatgccaaatctaaatcgtggaggatcccaggctttctggtctcaaaca

SEQ ID NO: 422635 - DNA, 55 bp, Artificial
  Synthetic oligonucleotide
ggcacctcgcggggggtaagtacgtccagatggcgctattagcccttggtaggtg

SEQ ID NO: 422636 - DNA, 55 bp, Artificial
  Synthetic oligonucleotide
ggcacctgaagatccgtgcttgtcccgcagctctaaatctagataattttgtccg

SEQ ID NO: 422637 - DNA, 60 bp, Artificial
  Synthetic oligonucleotide
ggcacctgattgtagcagcaagaacaaggtccgcagtcaacaaattagtgacgctgaccc

SEQ ID NO: 422638 - DNA, 60 bp, Artificial
  Synthetic oligonucleotide
ggcacctgcatacacaactttttgtctcatgaccatctttaatgggtgatgagttgtcaa

SEQ ID NO: 422639 - DNA, 58 bp, Artificial
  Synthetic oligonucleotide
ggcacctgcatctaacaccgatattacgagcgtgacggcgttttctagaccgtgcccg

SEQ ID NO: 422640 - DNA, 55 bp, Artificial
  Synthetic oligonucleotide
ggcacctgccgtcttgctgattcccttttcatggataatcaagctggcatgctgg

SEQ ID NO: 422641 - DNA, 55 bp, Artificial
  Synthetic oligonucleotide
ggcacctgtaagagtaaccaacgtcgaaagttcgtcatttgattgttcgtctatt

SEQ ID NO: 422642 - DNA, 55 bp, Artificial
  Synthetic oligonucleotide
ggcaccttcacctggacattgtcggactcttcagggacagagaatccaggtggtt

SEQ ID NO: 422643 - DNA, 60 bp, Artificial
  Synthetic oligonucleotide
ggcaccttgctccttgggatattgatgatctgtaatgctaaagaacaatcatgggtcaca

SEQ ID NO: 422644 - DNA, 59 bp, Artificial
  Synthetic oligonucleotide
ggcacgaaaccggactggtacactccggttaagacttgcactcatcgtcaatatcagaa

SEQ ID NO: 422645 - DNA, 55 bp, Artificial
  Synthetic oligonucleotide
ggcacgaacttgagcaaggagatgtacaatagatgtattaccgcagagtctcgcg

SEQ ID NO: 422646 - DNA, 60 bp, Artificial
  Synthetic oligonucleotide
ggcacgaagacaacgtgctgggggcactgtgtgaacagatagggtttggattgagactgt

SEQ ID NO: 422647 - DNA, 51 bp, Artificial
  Synthetic oligonucleotide
ggcacgaccctcggggactacgtcagtaagaccgccactggcaccgagtca

SEQ ID NO: 422648 - DNA, 55 bp, Artificial
  Synthetic oligonucleotide
ggcacgactgtgatcagggctgaaggaaaggacgcagcaactcaggtgcgcgtgg

SEQ ID NO: 422649 - DNA, 55 bp, Artificial
  Synthetic oligonucleotide
ggcacgagaattttattacccaaccgaaataaacaccaatgccgttcgagtatga

SEQ ID NO: 422650 - DNA, 53 bp, Artificial
  Synthetic oligonucleotide
ggcacgagcactgaattgattggtaatctgcaggcaatatacagtagattaag

SEQ ID NO: 422651 - DNA, 55 bp, Artificial
  Synthetic oligonucleotide
ggcacgagcccatgctagagaacacggttacaagccaccgaagtcttccacctcc

SEQ ID NO: 422652 - DNA, 55 bp, Artificial
  Synthetic oligonucleotide
ggcacgagcgcaatatggaacgcgctttcattggttcttcgtctacttttcttgg

SEQ ID NO: 422653 - DNA, 55 bp, Artificial
  Synthetic oligonucleotide
ggcacgagctactctcttctgcaatgctctgcttgggaagtgtcccgaacgacgg

SEQ ID NO: 422654 - DNA, 55 bp, Artificial
  Synthetic oligonucleotide
ggcacgaggtttctgggtattcattcccaaattcgtggggttctggaacattggc

SEQ ID NO: 422655 - DNA, 55 bp, Artificial
  Synthetic oligonucleotide
ggcacgagtccactggctggtctaatccgaacatatgtgtccgagcttgaggcac

SEQ ID NO: 422656 - DNA, 55 bp, Artificial
  Synthetic oligonucleotide
ggcacgatacgcttgcacccggtggacccctacgcttgcacccggcactatgtaa

SEQ ID NO: 422657 - DNA, 55 bp, Artificial
  Synthetic oligonucleotide
ggcacgatggtcgtttgacccagctacagttgcgaaagtgattcagaggccatcc

SEQ ID NO: 422658 - DNA, 57 bp, Artificial
  Synthetic oligonucleotide
ggcacgcaactgaaggagcagtcctgcgaaacggagaaggaagactagatccgtatg

SEQ ID NO: 422659 - DNA, 60 bp, Artificial
  Synthetic oligonucleotide
ggcacgcaccgacctcgctttatcatcaagcgatgaaaggggtcaggacagtatactgga

SEQ ID NO: 422660 - DNA, 55 bp, Artificial
  Synthetic oligonucleotide
ggcacgcagtgttgcagaatcgagcagccatcgatttcttactcctggcgcaggg

SEQ ID NO: 422661 - DNA, 60 bp, Artificial
  Synthetic oligonucleotide
ggcacgcctcagcaaatactcacaggcgagtcatgggatactgcaaggcttagagttgat

SEQ ID NO: 422662 - DNA, 59 bp, Artificial
  Synthetic oligonucleotide
ggcacgccttatagaacaagtcttgggcatgcaccatattaatgtttgttctaacttta

SEQ ID NO: 422663 - DNA, 60 bp, Artificial
  Synthetic oligonucleotide
ggcacgcgctgacaatcctgactctctactcgaggtcttacccgtcttggtctcagctga

SEQ ID NO: 422664 - DNA, 60 bp, Artificial
  Synthetic oligonucleotide
ggcacgctactattcgcccgaagtctggcaagggtgtcctgatagtatgtgtgacttcaa

SEQ ID NO: 422665 - DNA, 54 bp, Artificial
  Synthetic oligonucleotide
ggcacgctcttcacccgtgttgactcggaaaactaaccgggtcatccggatccc

SEQ ID NO: 422666 - DNA, 58 bp, Artificial
  Synthetic oligonucleotide
ggcacgctgtaaatgacgccttcaagaccgcatttgacatcgacggtgccttactcga

SEQ ID NO: 422667 - DNA, 55 bp, Artificial
  Synthetic oligonucleotide
ggcacgctgtgctgcggccaatcgagataatgatagagactgatactgcgcggtc

SEQ ID NO: 422668 - DNA, 60 bp, Artificial
  Synthetic oligonucleotide
ggcacgcttaatgcctgaagtgcagatggatcttaaaacagacttaacgaggagtcgagg

SEQ ID NO: 422669 - DNA, 55 bp, Artificial
  Synthetic oligonucleotide
ggcacgcttcggcgataaatcctttgtcttcaccactatgccgatcgacagcagt

SEQ ID NO: 422670 - DNA, 58 bp, Artificial
  Synthetic oligonucleotide
ggcacggaatggtacgctgatagaagaaacgctagtttagcggtaagagattggtgtc

SEQ ID NO: 422671 - DNA, 54 bp, Artificial
  Synthetic oligonucleotide
ggcacggacaccgaacggaggtaagcgagtgaaacccgttgtgactgtttacac

SEQ ID NO: 422672 - DNA, 60 bp, Artificial
  Synthetic oligonucleotide
ggcacggataggccaccaggtggtgccacctatgtcagttacaaaggccaaagcctgtca

SEQ ID NO: 422673 - DNA, 56 bp, Artificial
  Synthetic oligonucleotide
ggcacggcaacgagtacgagcgcgtaagaccatggggctaagttccgaacagtact

SEQ ID NO: 422674 - DNA, 55 bp, Artificial
  Synthetic oligonucleotide
ggcacggcataacgctcacatgcgcccgtgtcgctgtcgtggataacgcgtcatc

SEQ ID NO: 422675 - DNA, 55 bp, Artificial
  Synthetic oligonucleotide
ggcacggggtgcgtatatgggtcttgccaagatgtcattagggaggaagcaacag

SEQ ID NO: 422676 - DNA, 59 bp, Artificial
  Synthetic oligonucleotide
ggcacgggttgaagtccgcgggctgatattcgcggcggagaatatagctcaggaattcc

SEQ ID NO: 422677 - DNA, 55 bp, Artificial
  Synthetic oligonucleotide
ggcacggtactttccccatcaatgcaaccacaaccggccctagcgtacccattcc

SEQ ID NO: 422678 - DNA, 60 bp, Artificial
  Synthetic oligonucleotide
ggcacggtcagcacttattctaaggggatcagttgcacataagtcttgcctgcctgcttg

SEQ ID NO: 422679 - DNA, 60 bp, Artificial
  Synthetic oligonucleotide
ggcacggttcaatcacgataccaccgtctcgccgtgaaatctggtcttgtaatcgccatg

SEQ ID NO: 422680 - DNA, 55 bp, Artificial
  Synthetic oligonucleotide
ggcacgtacgtttatgaccatcttacgccactccagcactgggcccactcgggcc

SEQ ID NO: 422681 - DNA, 55 bp, Artificial
  Synthetic oligonucleotide
ggcacgtagacaaatgacacctaccatggttacaaaacttcctacattcgtcagg

SEQ ID NO: 422682 - DNA, 55 bp, Artificial
  Synthetic oligonucleotide
ggcacgtagacttaggaggaatctacgctacatcctatcagtttgcactggccaa

SEQ ID NO: 422683 - DNA, 55 bp, Artificial
  Synthetic oligonucleotide
ggcacgtatatgatccaatagcgccagaatcttcagatccaaacgttatagttca

SEQ ID NO: 422684 - DNA, 55 bp, Artificial
  Synthetic oligonucleotide
ggcacgtatgactacccaaaataccaagacgagagcaaacttaataggcaggaga

SEQ ID NO: 422685 - DNA, 55 bp, Artificial
  Synthetic oligonucleotide
ggcacgtcacacgtggtgctgttctaatgcacaaagggaagaggattgaaccatc

SEQ ID NO: 422686 - DNA, 52 bp, Artificial
  Synthetic oligonucleotide
ggcacgtcccttcctttcaactttgtacgttccaccgcccacttgcaccccc

SEQ ID NO: 422687 - DNA, 60 bp, Artificial
  Synthetic oligonucleotide
ggcacgtcgcaggcatattcagagccgcggtgtgtacccgtggagtggctaaagcggtgg

SEQ ID NO: 422688 - DNA, 53 bp, Artificial
  Synthetic oligonucleotide
ggcacgtcggtctggttggagtccgcgacgtatcgaaacacgtccatctcctg

SEQ ID NO: 422689 - DNA, 60 bp, Artificial
  Synthetic oligonucleotide
ggcacgtgagtggtgagagcccattgccaataactagcactgtgcgggtgtacttcaaac

SEQ ID NO: 422690 - DNA, 52 bp, Artificial
  Synthetic oligonucleotide
ggcacgtgcatgtcaaggacggtcggtacatggcgtgtcccgaacacttgta

SEQ ID NO: 422691 - DNA, 57 bp, Artificial
  Synthetic oligonucleotide
ggcacgtggatcgactttcgaaattggacggaaggcttttcgctaagcaagattctg

SEQ ID NO: 422692 - DNA, 55 bp, Artificial
  Synthetic oligonucleotide
ggcacgtggggcaaacggcgggatctgattgggccacgtcacgttcgcaccaatt

SEQ ID NO: 422693 - DNA, 58 bp, Artificial
  Synthetic oligonucleotide
ggcacgtgtcaaccttaggacccagtgtgacactgacggcgcacacgagcacgggagg

SEQ ID NO: 422694 - DNA, 55 bp, Artificial
  Synthetic oligonucleotide
ggcacgttaatctgtttgtggaatatcgctattattgccactcaagttttaggtt

SEQ ID NO: 422695 - DNA, 55 bp, Artificial
  Synthetic oligonucleotide
ggcacgttacctctccggtcttactactcaattccaccaatcggatcattagccg

SEQ ID NO: 422696 - DNA, 54 bp, Artificial
  Synthetic oligonucleotide
ggcacgttagtgaacgaggagagttgaaacggagggacccatggttccggagcc

SEQ ID NO: 422697 - DNA, 57 bp, Artificial
  Synthetic oligonucleotide
ggcacgttcacttgcatacatgttgggagacacgagcgtaaactataatgtacaaac

SEQ ID NO: 422698 - DNA, 55 bp, Artificial
  Synthetic oligonucleotide
ggcacgttcgacataaccatccggtcgactaccgagaacggtgctttttgggcga

SEQ ID NO: 422699 - DNA, 55 bp, Artificial
  Synthetic oligonucleotide
ggcacgttcggcttagccacgtaaccttctgcgatattatcagtgccaactcgaa

SEQ ID NO: 422700 - DNA, 60 bp, Artificial
  Synthetic oligonucleotide
ggcacgttttgttcttacttgcgtgcataattgcatgcgtttgtggcgaacgatactgtg

SEQ ID NO: 422701 - DNA, 55 bp, Artificial
  Synthetic oligonucleotide
ggcactaaagtttggcgttaagatattaggcgagaaaatcgatatttccctcttc

SEQ ID NO: 422702 - DNA, 58 bp, Artificial
  Synthetic oligonucleotide
ggcactaacagcattaatagctccaaagaaggcaaggccacccttgcctagtgttaca

SEQ ID NO: 422703 - DNA, 55 bp, Artificial
  Synthetic oligonucleotide
ggcactaacgatccgtggtgcactaacccgtttgccgtccctgtctacgggcctg

SEQ ID NO: 422704 - DNA, 55 bp, Artificial
  Synthetic oligonucleotide
ggcactaagaaaatcaattactgcggtccaaaggagagtttcccgactcctggtg

SEQ ID NO: 422705 - DNA, 59 bp, Artificial
  Synthetic oligonucleotide
ggcactacaccagcaatggtagcacattcctattctatggatgacctcagttcagagta

SEQ ID NO: 422706 - DNA, 55 bp, Artificial
  Synthetic oligonucleotide
ggcactacccaccaagacagtgtggtgtagtctccgcgagctctgtgtgtggccc

SEQ ID NO: 422707 - DNA, 59 bp, Artificial
  Synthetic oligonucleotide
ggcactacccacctcgaccatgcggtattgtgcccgcgtcacaggtgtgtggtccggtg

SEQ ID NO: 422708 - DNA, 58 bp, Artificial
  Synthetic oligonucleotide
ggcactacccagttagcattgaagggccaggtctagtggaagtccaggagagtgagta

SEQ ID NO: 422709 - DNA, 57 bp, Artificial
  Synthetic oligonucleotide
ggcactaccctccaagaccttgtggtattgtgtctgcacaaaccgtctgtggcccgg

SEQ ID NO: 422710 - DNA, 56 bp, Artificial
  Synthetic oligonucleotide
ggcactacgcacccaaaccgtgtagtgttgtgcccgcgtcgcaggtgtgtggacca

SEQ ID NO: 422711 - DNA, 55 bp, Artificial
  Synthetic oligonucleotide
ggcactacgcacctagaccttgtagtgttgtcccggcatcaagtgtctgcggccc

SEQ ID NO: 422712 - DNA, 56 bp, Artificial
  Synthetic oligonucleotide
ggcactacgcgcctaaaccgtgtggtattgtacccgcgtcgcaggtgtgtggtccg

SEQ ID NO: 422713 - DNA, 55 bp, Artificial
  Synthetic oligonucleotide
ggcactactcagccggtatgcttctttccaggcgtaggacggtgcataactgtca

SEQ ID NO: 422714 - DNA, 55 bp, Artificial
  Synthetic oligonucleotide
ggcactactcttcaacatgggttcgagctttatgttcccacagtgccctacagcg

SEQ ID NO: 422715 - DNA, 52 bp, Artificial
  Synthetic oligonucleotide
ggcactactgagatgctctcaagagctttgaagaaagtgccagttgatgagt

SEQ ID NO: 422716 - DNA, 55 bp, Artificial
  Synthetic oligonucleotide
ggcactactggccacccgctgtttaacaaactgggagacactgagaatccgaaca

SEQ ID NO: 422717 - DNA, 55 bp, Artificial
  Synthetic oligonucleotide
ggcactagagagagtggctggctcgaagttggaagtgactttgtgagcatagtcc

SEQ ID NO: 422718 - DNA, 55 bp, Artificial
  Synthetic oligonucleotide
ggcactatacatgttgattggtggaagtaaggtggtatgatcatgccttattagg

SEQ ID NO: 422719 - DNA, 60 bp, Artificial
  Synthetic oligonucleotide
ggcactatcccccaaggccttgcggcattgtgccagcacaaaacgtgtgtggcccagtgt

SEQ ID NO: 422720 - DNA, 54 bp, Artificial
  Synthetic oligonucleotide
ggcactatggaacctgagaactatctagcttggctagctagagatatagttcga

SEQ ID NO: 422721 - DNA, 55 bp, Artificial
  Synthetic oligonucleotide
ggcactatggctgaggaagttcgcatgcagagtttggacgatctcaatgatattg

SEQ ID NO: 422722 - DNA, 60 bp, Artificial
  Synthetic oligonucleotide
ggcactattacgtgaccacggttctcaatgcgcgtctataagaatcatggtataccgtat

SEQ ID NO: 422723 - DNA, 59 bp, Artificial
  Synthetic oligonucleotide
ggcactattatcgcaagaaattttgatacaattcgtctatcattccaattaatgcgtcc

SEQ ID NO: 422724 - DNA, 55 bp, Artificial
  Synthetic oligonucleotide
ggcactcacaacagggaagggtacttcaacaagcttatgcatgtgccaagttagc

SEQ ID NO: 422725 - DNA, 55 bp, Artificial
  Synthetic oligonucleotide
ggcactcacgagcgcagaagaatcatatagacggtcaagcttggatgaggtcaca

SEQ ID NO: 422726 - DNA, 60 bp, Artificial
  Synthetic oligonucleotide
ggcactcacgcaaccatgaagatccaaggtcgcactgttgggggccaaatgggtatgctc

SEQ ID NO: 422727 - DNA, 60 bp, Artificial
  Synthetic oligonucleotide
ggcactcaggcaagctattctgtgttggggtgagttgatgaatctagccacctgggtggg

SEQ ID NO: 422728 - DNA, 60 bp, Artificial
  Synthetic oligonucleotide
ggcactcatccaacaggccaacggcgatatcactacggcggtgaacaacaataccaacgc

SEQ ID NO: 422729 - DNA, 59 bp, Artificial
  Synthetic oligonucleotide
ggcactcatggaatggctaaagacaagaccgatcttgtcacctctgactaaaggaattt

SEQ ID NO: 422730 - DNA, 55 bp, Artificial
  Synthetic oligonucleotide
ggcactccatcacgagtcaattgtgggtgaccaaacattttcacaggatcattca

SEQ ID NO: 422731 - DNA, 58 bp, Artificial
  Synthetic oligonucleotide
ggcactcccttagccatccgagtggacgtctgtcctccttcggatgcccaggtcggac

SEQ ID NO: 422732 - DNA, 60 bp, Artificial
  Synthetic oligonucleotide
ggcactccgaatgtcttcggttcagcgaatttgttcacgccacctgaggtactgctgtta

SEQ ID NO: 422733 - DNA, 55 bp, Artificial
  Synthetic oligonucleotide
ggcactccgtcgggcccttaattggtgttgatggggtttgcatcaaaagaatcct

SEQ ID NO: 422734 - DNA, 55 bp, Artificial
  Synthetic oligonucleotide
ggcactcgcctccatgtctcacccgcacatgttgacgattttgaagagtgctcac

SEQ ID NO: 422735 - DNA, 56 bp, Artificial
  Synthetic oligonucleotide
ggcactcggtggacaagctaactgagaatccatatatgaaaatatggcccgcgcag

SEQ ID NO: 422736 - DNA, 55 bp, Artificial
  Synthetic oligonucleotide
ggcactcgtaagttggccataggttcattaatagtgccactcaatttggacagag

SEQ ID NO: 422737 - DNA, 55 bp, Artificial
  Synthetic oligonucleotide
ggcactcgtccgtgtcgtcctggcactcgagcctgctgtacattttcgaagtgga

SEQ ID NO: 422738 - DNA, 55 bp, Artificial
  Synthetic oligonucleotide
ggcactcgtgagagggaacgccccgttcgaagtgaaggagggcgtgtacaggata

SEQ ID NO: 422739 - DNA, 55 bp, Artificial
  Synthetic oligonucleotide
ggcactcgttcgatgatcttactgcttccctcgtggctttagggaaaatcctgcc

SEQ ID NO: 422740 - DNA, 54 bp, Artificial
  Synthetic oligonucleotide
ggcactctcaaaaacagcaagtgtagggggtgatacacctgagtggatcaccag

SEQ ID NO: 422741 - DNA, 60 bp, Artificial
  Synthetic oligonucleotide
ggcactctgaaattttatattgttgctcgtgccagttctgattacatgagttacagaaga

SEQ ID NO: 422742 - DNA, 53 bp, Artificial
  Synthetic oligonucleotide
ggcactctgagacaactgtagaacgttgcgctaagagatatacagattacatt

SEQ ID NO: 422743 - DNA, 51 bp, Artificial
  Synthetic oligonucleotide
ggcactctgttgacggacttgttccctagtattgccacactttaacttatt

SEQ ID NO: 422744 - DNA, 60 bp, Artificial
  Synthetic oligonucleotide
ggcactgaacagacttgtaaaagtgttgacagcaatgattgtctggtcactacttcagtt

SEQ ID NO: 422745 - DNA, 55 bp, Artificial
  Synthetic oligonucleotide
ggcactgaaggcactttaatagtgcaaacatctaattatccccatctgatatgcc

SEQ ID NO: 422746 - DNA, 60 bp, Artificial
  Synthetic oligonucleotide
ggcactgaatggaaaatttggttcagcagcaagaaacagaaattggatggctgatactag

SEQ ID NO: 422747 - DNA, 60 bp, Artificial
  Synthetic oligonucleotide
ggcactgacaactctgtcgtcctctctcggaagtacacctccttcccatggctgctaggt

SEQ ID NO: 422748 - DNA, 55 bp, Artificial
  Synthetic oligonucleotide
ggcactgaccttacaaccggaggttcacctatcttcggatcggctggtcttggcg

SEQ ID NO: 422749 - DNA, 55 bp, Artificial
  Synthetic oligonucleotide
ggcactgacgatatcgccttaatgtcggtggtcatcaatgataatcagaccgggc

SEQ ID NO: 422750 - DNA, 55 bp, Artificial
  Synthetic oligonucleotide
ggcactgagggcctagaggcattagatttgaccacaagtgcagggtacccttatg

SEQ ID NO: 422751 - DNA, 60 bp, Artificial
  Synthetic oligonucleotide
ggcactgataagcacataactcgaacactattaaaacgtatcttgtagacatcagtcgat

SEQ ID NO: 422752 - DNA, 55 bp, Artificial
  Synthetic oligonucleotide
ggcactgatggcttagaggctctagacttgagtactagtgctgggtacccttatg

SEQ ID NO: 422753 - DNA, 59 bp, Artificial
  Synthetic oligonucleotide
ggcactgcattaatcatctcccacgatgcctagagtcaagctgaatattaacataagcc

SEQ ID NO: 422754 - DNA, 60 bp, Artificial
  Synthetic oligonucleotide
ggcactgcctggtggctgttacgccagcactttgaagacggaatcttcgagctgcaactc

SEQ ID NO: 422755 - DNA, 55 bp, Artificial
  Synthetic oligonucleotide
ggcactgccttcgacgcccggtggaacaagcacccgttccagaagcggggcacgt

SEQ ID NO: 422756 - DNA, 58 bp, Artificial
  Synthetic oligonucleotide
ggcactggaacttggtttcaacaacactctcgtaactgctgaccttgacggaaatgaa

SEQ ID NO: 422757 - DNA, 58 bp, Artificial
  Synthetic oligonucleotide
ggcactggagaccccctcgaccccctgatggcgaccgtgggctgcgcctgttcgcgcg

SEQ ID NO: 422758 - DNA, 55 bp, Artificial
  Synthetic oligonucleotide
ggcactgggcctcctcaaaggcaccacataaacatgccattgtaactgtaacata

SEQ ID NO: 422759 - DNA, 55 bp, Artificial
  Synthetic oligonucleotide
ggcactgggcttaccaccggtcattcatccacctctgcggacaattcgttgggaa

SEQ ID NO: 422760 - DNA, 55 bp, Artificial
  Synthetic oligonucleotide
ggcactgtaataccatatggagaggtcaacctcagtggtaacccaacatgtcggc

SEQ ID NO: 422761 - DNA, 60 bp, Artificial
  Synthetic oligonucleotide
ggcactgtacatgttaacaacaagaggcaggcagacttcaaaggacaacaaagggatgag

SEQ ID NO: 422762 - DNA, 59 bp, Artificial
  Synthetic oligonucleotide
ggcactgtacgccttagtcgtgttggccagcgtgcgtcattacgcacccgtagtggtaa

SEQ ID NO: 422763 - DNA, 55 bp, Artificial
  Synthetic oligonucleotide
ggcactgtgtaaagagcatgtgggagagagatcttatggttgttgagtcacgtgc

SEQ ID NO: 422764 - DNA, 55 bp, Artificial
  Synthetic oligonucleotide
ggcactgtgtgtccgaatcctttccacgttgttaactcggctcctattggcctca

SEQ ID NO: 422765 - DNA, 58 bp, Artificial
  Synthetic oligonucleotide
ggcactgttattgatccagtaacaaagaagaccatacacggcaaagaaagaatggtct

SEQ ID NO: 422766 - DNA, 55 bp, Artificial
  Synthetic oligonucleotide
ggcacttacgcttttcggtctaacaacggcgctactgttccagctattagcgtgg

SEQ ID NO: 422767 - DNA, 55 bp, Artificial
  Synthetic oligonucleotide
ggcacttcaccggatgtaaatggaacatgggtgatgatggacggagacgagcaag

SEQ ID NO: 422768 - DNA, 55 bp, Artificial
  Synthetic oligonucleotide
ggcacttcaccggatgtgaacggcacttgggtaatgatggatggagatgagcaag

SEQ ID NO: 422769 - DNA, 55 bp, Artificial
  Synthetic oligonucleotide
ggcacttcagcgtatgaatctggatcgccaggcgttaaataaccaagtagagcag

SEQ ID NO: 422770 - DNA, 55 bp, Artificial
  Synthetic oligonucleotide
ggcacttccactagcatcattactactggtgatggatatcgttggaaatacatgt

SEQ ID NO: 422771 - DNA, 59 bp, Artificial
  Synthetic oligonucleotide
ggcacttccagtaagaattttcggacgatccatggatcgttggattcctctcaataagc

SEQ ID NO: 422772 - DNA, 55 bp, Artificial
  Synthetic oligonucleotide
ggcacttcgatttgatataacgacgattaggcaatacattggtagaatggcagcg

SEQ ID NO: 422773 - DNA, 58 bp, Artificial
  Synthetic oligonucleotide
ggcacttcgttcagtggcgacaacggtggcgtcaagacctatggaatgaaggaccgta

SEQ ID NO: 422774 - DNA, 55 bp, Artificial
  Synthetic oligonucleotide
ggcacttggagtaccaatagcactgggaatcatacagagaatgacactataagtc

SEQ ID NO: 422775 - DNA, 55 bp, Artificial
  Synthetic oligonucleotide
ggcacttgtggattccaatatatataatgccgagtcagaacggcttgtttggaag

SEQ ID NO: 422776 - DNA, 55 bp, Artificial
  Synthetic oligonucleotide
ggcacttgtgtacttcatctacaacaggtcaaatacctaatgtgcagccagggaa

SEQ ID NO: 422777 - DNA, 57 bp, Artificial
  Synthetic oligonucleotide
ggcactttactttattttagatctggccaatgatgaaacacgtgttgggtcatttta

SEQ ID NO: 422778 - DNA, 60 bp, Artificial
  Synthetic oligonucleotide
ggcactttagaaataactctgattgtgaaagatgtaattactgggatgatgtgtaccgta

SEQ ID NO: 422779 - DNA, 55 bp, Artificial
  Synthetic oligonucleotide
ggcactttccctatcgccacagagcggataccgcagtcgcgcccgctgtttcaga

SEQ ID NO: 422780 - DNA, 60 bp, Artificial
  Synthetic oligonucleotide
ggcagaaaagtatgggagcaccaaacaatgggaagtatgttatggcagcacagttatatg

SEQ ID NO: 422781 - DNA, 58 bp, Artificial
  Synthetic oligonucleotide
ggcagaaaattatttctctaactgaaacaacaaatcagaaggctgagttacaagcaat

SEQ ID NO: 422782 - DNA, 55 bp, Artificial
  Synthetic oligonucleotide
ggcagaaacgggagctcccaaactctatgtaaccgggtgcgccttcgaaatccgc

SEQ ID NO: 422783 - DNA, 54 bp, Artificial
  Synthetic oligonucleotide
ggcagaaagaattcttgaaccaccttctgagtccattgatcaacttgctcagga

SEQ ID NO: 422784 - DNA, 57 bp, Artificial
  Synthetic oligonucleotide
ggcagaaagatggacaatacactaaaagggataagctagtttataaagtgtatagag

SEQ ID NO: 422785 - DNA, 52 bp, Artificial
  Synthetic oligonucleotide
ggcagaaattctaaaacgacgtgggggagccattaaaattgtcgttttggta

SEQ ID NO: 422786 - DNA, 55 bp, Artificial
  Synthetic oligonucleotide
ggcagaacagttaatccttttctttcctgcactgtgtttgtctgtacttgctgca

SEQ ID NO: 422787 - DNA, 58 bp, Artificial
  Synthetic oligonucleotide
ggcagaactggtatgcgtttacatcttccatgaaacagggtaatactcttgatgtatg

SEQ ID NO: 422788 - DNA, 55 bp, Artificial
  Synthetic oligonucleotide
ggcagaacttctctttacgagccttaatgaaagcgataatgatattaggctgcgg

SEQ ID NO: 422789 - DNA, 56 bp, Artificial
  Synthetic oligonucleotide
ggcagaagaaatacaccaagactgcttactggtgggatggtcttcaatcttctgat

SEQ ID NO: 422790 - DNA, 55 bp, Artificial
  Synthetic oligonucleotide
ggcagaagacctcctaaaaggggtgagagaaagctacaagactgccctggctctg

SEQ ID NO: 422791 - DNA, 55 bp, Artificial
  Synthetic oligonucleotide
ggcagaagccatagaccactatgcaggccagctaatgacacttgatatagatacc

SEQ ID NO: 422792 - DNA, 55 bp, Artificial
  Synthetic oligonucleotide
ggcagaagcggagcttggtactcaaagggtaatgtcgattatacctacagcgggg

SEQ ID NO: 422793 - DNA, 56 bp, Artificial
  Synthetic oligonucleotide
ggcagaagttgacgatcttcacgatacttaaacgttattatccaatagaacgaatt

SEQ ID NO: 422794 - DNA, 53 bp, Artificial
  Synthetic oligonucleotide
ggcagaatgagaccaggggatacgcggggggaagctgatctcgattagctagg

SEQ ID NO: 422795 - DNA, 55 bp, Artificial
  Synthetic oligonucleotide
ggcagaatgataaggacaggagttttgcgctcaagtcatcgtgggtcgtcacagg

SEQ ID NO: 422796 - DNA, 58 bp, Artificial
  Synthetic oligonucleotide
ggcagaatggaagggtgcacgttgatggaaccctgcttggcaccaccccaatctccgg

SEQ ID NO: 422797 - DNA, 58 bp, Artificial
  Synthetic oligonucleotide
ggcagaatgggccaagaacatctggggatcagtagagaaagtcaggaagatgatcgga

SEQ ID NO: 422798 - DNA, 57 bp, Artificial
  Synthetic oligonucleotide
ggcagaattacacaccagggccagggattagatacccactaacatttgggtggtgct

SEQ ID NO: 422799 - DNA, 55 bp, Artificial
  Synthetic oligonucleotide
ggcagaattcaaaagacaacttgccgatctggtgtcaagtcaaaagatgggtgag

SEQ ID NO: 422800 - DNA, 55 bp, Artificial
  Synthetic oligonucleotide
ggcagaattgcgtgtgggaggattacaatagagacctattagttagcaccaccac

SEQ ID NO: 422801 - DNA, 51 bp, Artificial
  Synthetic oligonucleotide
ggcagaattggggatcattactacacgacaagctgctacaccggagccgaa

SEQ ID NO: 422802 - DNA, 58 bp, Artificial
  Synthetic oligonucleotide
ggcagaattggtatgcattcacatcttcaatgaaacaaggcaatactcttgacgtatg

SEQ ID NO: 422803 - DNA, 51 bp, Artificial
  Synthetic oligonucleotide
ggcagacacacgtgtacaggcttggattcccgacggcatgcctaatggccg

SEQ ID NO: 422804 - DNA, 60 bp, Artificial
  Synthetic oligonucleotide
ggcagacagaatatgcgtaggttatctgagcaccaattcatcagaaagggtcgacacgct

SEQ ID NO: 422805 - DNA, 55 bp, Artificial
  Synthetic oligonucleotide
ggcagacagtcagtttaaattaacagaaatggtgcagtgggcgtatgataatgac

SEQ ID NO: 422806 - DNA, 60 bp, Artificial
  Synthetic oligonucleotide
ggcagaccacaatacagtgacactccagctggatatgtaagggttagccgtgtgggacag

SEQ ID NO: 422807 - DNA, 52 bp, Artificial
  Synthetic oligonucleotide
ggcagaccggcccttggtctacccccatcgagttcgagctctggcatccgcc

SEQ ID NO: 422808 - DNA, 60 bp, Artificial
  Synthetic oligonucleotide
ggcagacctccttgtatgttttgggagataagttcaaatgtgcagcaaacattataggcc

SEQ ID NO: 422809 - DNA, 60 bp, Artificial
  Synthetic oligonucleotide
ggcagacctgtggtaggcgcaacaatccctcacccactggagatgtgcggagacttgcac

SEQ ID NO: 422810 - DNA, 60 bp, Artificial
  Synthetic oligonucleotide
ggcagacgcagaatccgtatgcgtaagggatatggtgatgcgctgagaaattacgccttt

SEQ ID NO: 422811 - DNA, 60 bp, Artificial
  Synthetic oligonucleotide
ggcagacgcagagggcgacgaaagagatacagacaggctctagtagtgaggcaatggcaa

SEQ ID NO: 422812 - DNA, 55 bp, Artificial
  Synthetic oligonucleotide
ggcagacgcgatttgggtttaaaggtcggcgatctattcattacgcagtacacca

SEQ ID NO: 422813 - DNA, 55 bp, Artificial
  Synthetic oligonucleotide
ggcagacgtagagagggtttccgatccttaaaatcgggccgcgacacacggcttg

SEQ ID NO: 422814 - DNA, 60 bp, Artificial
  Synthetic oligonucleotide
ggcagactaacaatccaatgccgaattttgactgctatgatggattaaccttgaaagagc

SEQ ID NO: 422815 - DNA, 53 bp, Artificial
  Synthetic oligonucleotide
ggcagactctacccacacgagggggtacggccccggtacacctagcgcgtacg

SEQ ID NO: 422816 - DNA, 60 bp, Artificial
  Synthetic oligonucleotide
ggcagactgtcaccagactttccaggactatacgatgacatagtatacaatcccaccaca

SEQ ID NO: 422817 - DNA, 57 bp, Artificial
  Synthetic oligonucleotide
ggcagactgtctatcaacttgccgaagaacaaaacgacgttatattaaaggagatgc

SEQ ID NO: 422818 - DNA, 59 bp, Artificial
  Synthetic oligonucleotide
ggcagagaacagagaaattttaagggaacctgtacatggagtctattatgacccagaga

SEQ ID NO: 422819 - DNA, 59 bp, Artificial
  Synthetic oligonucleotide
ggcagagaacgttttagtggttccgtgtgacaacacgtggaggtatatgaatgatacca

SEQ ID NO: 422820 - DNA, 55 bp, Artificial
  Synthetic oligonucleotide
ggcagagaagtaacgctgagtttgagcagaatttagaaaatgctcagtggtttgc

SEQ ID NO: 422821 - DNA, 60 bp, Artificial
  Synthetic oligonucleotide
ggcagagagtaggccgagcaatgtatgcccctcccattgcaggagtaataaagtgtacat

SEQ ID NO: 422822 - DNA, 55 bp, Artificial
  Synthetic oligonucleotide
ggcagagagtagtacaaccaatgtataaccctcccatagaaggattaataatatg

SEQ ID NO: 422823 - DNA, 60 bp, Artificial
  Synthetic oligonucleotide
ggcagagatggccgatgattctgacgtcgccgtgacgatgaaagaagcgagcccccccgt

SEQ ID NO: 422824 - DNA, 59 bp, Artificial
  Synthetic oligonucleotide
ggcagagcacctagaggccaacctgggctacccattcttctagtgtgcaaaggtacggc

SEQ ID NO: 422825 - DNA, 55 bp, Artificial
  Synthetic oligonucleotide
ggcagagcaggggtttcttagagtggctcatacatatgacactgaagacaatagg

SEQ ID NO: 422826 - DNA, 52 bp, Artificial
  Synthetic oligonucleotide
ggcagagccaaccgagttacatgttggggtaactttttccggcgttagtaaa

SEQ ID NO: 422827 - DNA, 55 bp, Artificial
  Synthetic oligonucleotide
ggcagagccaagggaagccgagcaatctggtatatgtggctaggagcgcggtttc

SEQ ID NO: 422828 - DNA, 60 bp, Artificial
  Synthetic oligonucleotide
ggcagagcccacagcgatgcttaaccagtgcgtgtctgcgttgtcgcaatcgtaccaaac

SEQ ID NO: 422829 - DNA, 51 bp, Artificial
  Synthetic oligonucleotide
ggcagaggagttgacccctggtcgattccgcaccatagtatgcggtttatt

SEQ ID NO: 422830 - DNA, 57 bp, Artificial
  Synthetic oligonucleotide
ggcagagggaatcggtaattcgaagtccggtgagaatggccgaggagaacccatctc

SEQ ID NO: 422831 - DNA, 55 bp, Artificial
  Synthetic oligonucleotide
ggcagagggatgccgtgccttagtagagagaccagcacactactgtactacacac

SEQ ID NO: 422832 - DNA, 60 bp, Artificial
  Synthetic oligonucleotide
ggcagagggtaggaagagcagtgtatgcccctgccatagcaggaaacataacatgtaatt

SEQ ID NO: 422833 - DNA, 55 bp, Artificial
  Synthetic oligonucleotide
ggcagagtaccatggtacagcagcttggaacttataatccaatctggatggttcg

SEQ ID NO: 422834 - DNA, 51 bp, Artificial
  Synthetic oligonucleotide
ggcagagtggattaagcatagaggagagaagtgtaatgatggggactggaa

SEQ ID NO: 422835 - DNA, 55 bp, Artificial
  Synthetic oligonucleotide
ggcagagttcaagaggcagcttgcagatgtcatctcacgtcagaagatggatgag

SEQ ID NO: 422836 - DNA, 55 bp, Artificial
  Synthetic oligonucleotide
ggcagagttttagtggcatgtgaatactccggtgcagttagagatgcattcatta

SEQ ID NO: 422837 - DNA, 55 bp, Artificial
  Synthetic oligonucleotide
ggcagataagagaataatggagatgatccctgagaggaatgagcaaggacaaacc

SEQ ID NO: 422838 - DNA, 58 bp, Artificial
  Synthetic oligonucleotide
ggcagataagaggataatggaaatgattcccgagagaaatgaacaagggcaaaccctc

SEQ ID NO: 422839 - DNA, 60 bp, Artificial
  Synthetic oligonucleotide
ggcagatatatcagtcattaatgagaaagactggaatcaaggtaattcaattaaagaagg

SEQ ID NO: 422840 - DNA, 52 bp, Artificial
  Synthetic oligonucleotide
ggcagatatcaccggattgacagtgcttacccgatactcggcgatctggtga

SEQ ID NO: 422841 - DNA, 59 bp, Artificial
  Synthetic oligonucleotide
ggcagatattggctatggcaatttaaattttaaggccttacaacaaaacagatctgatg

SEQ ID NO: 422842 - DNA, 60 bp, Artificial
  Synthetic oligonucleotide
ggcagatcaactaattcatatacactattttgattgctttgcagactctgccataagaaa

SEQ ID NO: 422843 - DNA, 55 bp, Artificial
  Synthetic oligonucleotide
ggcagatcaataatagaggcctagcccggtgtccggatggggagattagatacag

SEQ ID NO: 422844 - DNA, 56 bp, Artificial
  Synthetic oligonucleotide
ggcagatcaataccaggccccttacgatcccgggtcctccgactacgcctggcgga

SEQ ID NO: 422845 - DNA, 55 bp, Artificial
  Synthetic oligonucleotide
ggcagatcagatgatccactttaagtattttgattgttggacctctaggtgtatc

SEQ ID NO: 422846 - DNA, 55 bp, Artificial
  Synthetic oligonucleotide
ggcagatccattcgattagtcagcggattcttaccacttgcctgggacgacctcc

SEQ ID NO: 422847 - DNA, 60 bp, Artificial
  Synthetic oligonucleotide
ggcagatcgcaaacatttgttcagatgagacataccattgcaggaaacaaggaatggcag

SEQ ID NO: 422848 - DNA, 58 bp, Artificial
  Synthetic oligonucleotide
ggcagatcgttgtttgggttaaggctacatttggtgtgccaaccatctgtgattttta

SEQ ID NO: 422849 - DNA, 55 bp, Artificial
  Synthetic oligonucleotide
ggcagatctcactaaaggtactgataagtttaatgtttctggaaattcgtggctg

SEQ ID NO: 422850 - DNA, 59 bp, Artificial
  Synthetic oligonucleotide
ggcagatctgagtccacaactggaagctgttaggatttctcctcgcaaacctccaaaaa

SEQ ID NO: 422851 - DNA, 55 bp, Artificial
  Synthetic oligonucleotide
ggcagatctgccagataagggtaagccatttgattctagatttgtgttatgtagt

SEQ ID NO: 422852 - DNA, 59 bp, Artificial
  Synthetic oligonucleotide
ggcagatcttgactatcgtatttacggctaggatggatttgactggtaccgccttgggc

SEQ ID NO: 422853 - DNA, 59 bp, Artificial
  Synthetic oligonucleotide
ggcagatcttgtgctttgtatggcctaagtggacctgatatttataaaggggtttatca

SEQ ID NO: 422854 - DNA, 54 bp, Artificial
  Synthetic oligonucleotide
ggcagatgattgggcagaggaggttcgaaaacaagatgaggacgctgcgcgccg

SEQ ID NO: 422855 - DNA, 55 bp, Artificial
  Synthetic oligonucleotide
ggcagatgcacaaggtgacaacaggatatacacatcagtgaaaccgacacagttg

SEQ ID NO: 422856 - DNA, 55 bp, Artificial
  Synthetic oligonucleotide
ggcagatggtgcaggcaatgaggacaattggaactcatcctaactctagtgctgg

SEQ ID NO: 422857 - DNA, 55 bp, Artificial
  Synthetic oligonucleotide
ggcagatggtgcaggtaatgaggacaattgggactcaccctagctccagtacagg

SEQ ID NO: 422858 - DNA, 60 bp, Artificial
  Synthetic oligonucleotide
ggcagattacactcttgacgaggaaagcagagcaagaatcaagactagactattcaccat

SEQ ID NO: 422859 - DNA, 58 bp, Artificial
  Synthetic oligonucleotide
ggcagatttatgacgtgaattctgttgctaattccgtggttaataagctcttaacaac

SEQ ID NO: 422860 - DNA, 53 bp, Artificial
  Synthetic oligonucleotide
ggcagattttacatgagcttgacttacgttaactcataagcttggaatgcatc

SEQ ID NO: 422861 - DNA, 55 bp, Artificial
  Synthetic oligonucleotide
ggcagcaaatattagaggacatgtcagctttattcttgcaagccaatagaccctg

SEQ ID NO: 422862 - DNA, 55 bp, Artificial
  Synthetic oligonucleotide
ggcagcaatcctggcatacaccatagggacgacacatttccagagagccctgatt

SEQ ID NO: 422863 - DNA, 55 bp, Artificial
  Synthetic oligonucleotide
ggcagcaatgagaggatatctagcgccggaagtggtaccgttcccgtacaaccag

SEQ ID NO: 422864 - DNA, 54 bp, Artificial
  Synthetic oligonucleotide
ggcagcacacctcagcccttggctacataagaaacatcccttacagcttaaaga

SEQ ID NO: 422865 - DNA, 60 bp, Artificial
  Synthetic oligonucleotide
ggcagcactagacacagcagttgaaaccttgaggttgtcatttatgaccccaagtgtctt

SEQ ID NO: 422866 - DNA, 55 bp, Artificial
  Synthetic oligonucleotide
ggcagcactgatgtcgaattggctgggtcgatagatccatagttcgagttttcgt

SEQ ID NO: 422867 - DNA, 54 bp, Artificial
  Synthetic oligonucleotide
ggcagcagaagagcgacggtaacggtaagtttcaaccgggtgcggtcaaaacaa

SEQ ID NO: 422868 - DNA, 55 bp, Artificial
  Synthetic oligonucleotide
ggcagcagacttacttggagaaagggaatcctattttattcccgattgccgagac

SEQ ID NO: 422869 - DNA, 55 bp, Artificial
  Synthetic oligonucleotide
ggcagcagatcaaagcgacactttattgtggcaacaaacatcattgaaaatggtg

SEQ ID NO: 422870 - DNA, 55 bp, Artificial
  Synthetic oligonucleotide
ggcagcagccaccctggatagagtgatgccatttctcccgggtctgccttccacg

SEQ ID NO: 422871 - DNA, 55 bp, Artificial
  Synthetic oligonucleotide
ggcagcagccatgtgtttcagagtaaagaaaacattagggctgtacttagggata

SEQ ID NO: 422872 - DNA, 55 bp, Artificial
  Synthetic oligonucleotide
ggcagcagtaacccgggaggaagaggagacccattgtctagtgcacccagcacag

SEQ ID NO: 422873 - DNA, 55 bp, Artificial
  Synthetic oligonucleotide
ggcagcagtggaaataactgttactggttctaacgcagctcaagtctggtcaact

SEQ ID NO: 422874 - DNA, 60 bp, Artificial
  Synthetic oligonucleotide
ggcagcatagagcaaaaatagagaaattaagggaacatctgttgaagtggggattgacca

SEQ ID NO: 422875 - DNA, 60 bp, Artificial
  Synthetic oligonucleotide
ggcagcatccaacattgccatgagctggagctccactgacatcaaaggtgagaaggtcat

SEQ ID NO: 422876 - DNA, 60 bp, Artificial
  Synthetic oligonucleotide
ggcagcatggccagacttatcctagattttcattacccttccttagtatagcatcagcat

SEQ ID NO: 422877 - DNA, 55 bp, Artificial
  Synthetic oligonucleotide
ggcagcattcactgggaacacagagggaagaacatcagacatgagaaccgaaatc

SEQ ID NO: 422878 - DNA, 60 bp, Artificial
  Synthetic oligonucleotide
ggcagcatttcaacaaggtgatccacttggatgcctcttggtaaatcccttgaccaatta

SEQ ID NO: 422879 - DNA, 55 bp, Artificial
  Synthetic oligonucleotide
ggcagccacctacccagaatggaacccaactcgaacggcactggttcgagtccgt

SEQ ID NO: 422880 - DNA, 58 bp, Artificial
  Synthetic oligonucleotide
ggcagccacgccctatctcgcggcatttctgaggttggtccgggaagagaagacgaaa

SEQ ID NO: 422881 - DNA, 60 bp, Artificial
  Synthetic oligonucleotide
ggcagccactcaggctgctgtcttgtacgcctgagcagctgccatgacagctgctgacgg

SEQ ID NO: 422882 - DNA, 55 bp, Artificial
  Synthetic oligonucleotide
ggcagccaggtttatgaaaccgaagcgggtattccttcaggatgtgcattgacag

SEQ ID NO: 422883 - DNA, 55 bp, Artificial
  Synthetic oligonucleotide
ggcagccatcatgtacgcatacgtccaataccgaaagcctcaatgcacggtcacc

SEQ ID NO: 422884 - DNA, 55 bp, Artificial
  Synthetic oligonucleotide
ggcagccattagcgatgtcattgatatcctcaagaagggaggaatggaccagtgc

SEQ ID NO: 422885 - DNA, 56 bp, Artificial
  Synthetic oligonucleotide
ggcagccattgcagttctgacaaaagatgctggtaagctcactatgggacagccat

SEQ ID NO: 422886 - DNA, 60 bp, Artificial
  Synthetic oligonucleotide
ggcagcccaactacagacgcagatgcaacatagtgggctacatgcctctacttatatgtg

SEQ ID NO: 422887 - DNA, 58 bp, Artificial
  Synthetic oligonucleotide
ggcagcccaggcgactcgctaaccctatcaaagtacacgctgagcggcaattgggggg

SEQ ID NO: 422888 - DNA, 59 bp, Artificial
  Synthetic oligonucleotide
ggcagcccattcagatgttcgtgaatctctagccaggtttatccctactattggacccg

SEQ ID NO: 422889 - DNA, 55 bp, Artificial
  Synthetic oligonucleotide
ggcagccctcctgttataatctctgtcactatggaagagtctgctgagccctggc

SEQ ID NO: 422890 - DNA, 51 bp, Artificial
  Synthetic oligonucleotide
ggcagccgggatagtatacgtcaacgatgtacctgtagatgggtatattgt

SEQ ID NO: 422891 - DNA, 55 bp, Artificial
  Synthetic oligonucleotide
ggcagcctagcagtaggagatataataatcagatctcaaaatatctcagacaatg

SEQ ID NO: 422892 - DNA, 55 bp, Artificial
  Synthetic oligonucleotide
ggcagcctgtaattcagccatttgattatcaatgtccaatacacggaaatctacc

SEQ ID NO: 422893 - DNA, 55 bp, Artificial
  Synthetic oligonucleotide
ggcagccttaagaatcccttccatgttctttgtggtgaccctgatggtctccagc

SEQ ID NO: 422894 - DNA, 55 bp, Artificial
  Synthetic oligonucleotide
ggcagccttctttggatatgcagagttctgctccaaaagcacaggagacacagcc

SEQ ID NO: 422895 - DNA, 55 bp, Artificial
  Synthetic oligonucleotide
ggcagccttggagaaccttatattactcaatgtggcgtctctggccgggacgcac

SEQ ID NO: 422896 - DNA, 55 bp, Artificial
  Synthetic oligonucleotide
ggcagcgaggaggcctaagaccttggaaaagtgggatgagcaccgtgatatgagc

SEQ ID NO: 422897 - DNA, 60 bp, Artificial
  Synthetic oligonucleotide
ggcagcgagtaggaaaagcaatgtatgcccctcccatccaaggagtaatagaatgtagat

SEQ ID NO: 422898 - DNA, 60 bp, Artificial
  Synthetic oligonucleotide
ggcagcgcaactatagatggcattatacaaggcagtgtgcattcagcgttgacgggcgag

SEQ ID NO: 422899 - DNA, 57 bp, Artificial
  Synthetic oligonucleotide
ggcagcgcctaacaaatgaatataagcgctttaaacctagaaaaatgcatgtaaaaa

SEQ ID NO: 422900 - DNA, 55 bp, Artificial
  Synthetic oligonucleotide
ggcagcgcgcggatcatagaatggaatccagcaggaccattaagacctttagctg

SEQ ID NO: 422901 - DNA, 55 bp, Artificial
  Synthetic oligonucleotide
ggcagcggaacccagtcactcgggagcttcaggtctcgccagtgtgtgaaccctt

SEQ ID NO: 422902 - DNA, 55 bp, Artificial
  Synthetic oligonucleotide
ggcagcgggatcttcattacagataacgtacacacatggacagaacaatataagt

SEQ ID NO: 422903 - DNA, 60 bp, Artificial
  Synthetic oligonucleotide
ggcagcgtcacaaggactgccggtgctcaacacaccagggagcaaccaattcctaacatc

SEQ ID NO: 422904 - DNA, 58 bp, Artificial
  Synthetic oligonucleotide
ggcagcgtccgccgtgttaagagagctaaatttggagtggtctactccagtggcggga

SEQ ID NO: 422905 - DNA, 55 bp, Artificial
  Synthetic oligonucleotide
ggcagcgtcgccggagggagaggatcttgtgcaggttcagtctgatccgcctgtt

SEQ ID NO: 422906 - DNA, 55 bp, Artificial
  Synthetic oligonucleotide
ggcagcgttgggcgacacagcctgggactttggctccattggaggggtcttcaac

SEQ ID NO: 422907 - DNA, 60 bp, Artificial
  Synthetic oligonucleotide
ggcagctaaagtgacgacagcgttgactacctcgtttaagactacagtggcggcatctct

SEQ ID NO: 422908 - DNA, 60 bp, Artificial
  Synthetic oligonucleotide
ggcagctaacacaggaagtagcagccaagtcagccaaaattaccctatagtgcaaaatct

SEQ ID NO: 422909 - DNA, 55 bp, Artificial
  Synthetic oligonucleotide
ggcagctaacagggaaactaagttagggaaagcaggatatgtcactaacagaggg

SEQ ID NO: 422910 - DNA, 55 bp, Artificial
  Synthetic oligonucleotide
ggcagctacagcagcttatggtggacgcggtggccattgtgtgtcctggttgtgc

SEQ ID NO: 422911 - DNA, 60 bp, Artificial
  Synthetic oligonucleotide
ggcagctaccaggctggagccggagtgatggtagagggagtgttccacacactatggcac

SEQ ID NO: 422912 - DNA, 56 bp, Artificial
  Synthetic oligonucleotide
ggcagctactaattcatgtattcagaatgtatccgaattagcactataatcacctc

SEQ ID NO: 422913 - DNA, 50 bp, Artificial
  Synthetic oligonucleotide
ggcagctcaagttggccaccggacttagaaatgtacctgccatatcaaac

SEQ ID NO: 422914 - DNA, 60 bp, Artificial
  Synthetic oligonucleotide
ggcagctcacaccactcacttatccacttggagtgcccaatgattcccacatcctcactc

SEQ ID NO: 422915 - DNA, 56 bp, Artificial
  Synthetic oligonucleotide
ggcagctcggttaaggttaggcacttggcagggagtaaacacttgggcagctcggt

SEQ ID NO: 422916 - DNA, 55 bp, Artificial
  Synthetic oligonucleotide
ggcagctctaactctatctaccctcagaccggacatcaataggctcaaggcactg

SEQ ID NO: 422917 - DNA, 60 bp, Artificial
  Synthetic oligonucleotide
ggcagctctagcagcggccaactccgccctggcgaatgctgtggtggttcggcccttctt

SEQ ID NO: 422918 - DNA, 55 bp, Artificial
  Synthetic oligonucleotide
ggcagctgagactctagataatgtgatggtatctctaccaggattcccttctcta

SEQ ID NO: 422919 - DNA, 52 bp, Artificial
  Synthetic oligonucleotide
ggcagctggtgttgaagtgttggcttgtacatcagctgtcccttcttatgtt

SEQ ID NO: 422920 - DNA, 55 bp, Artificial
  Synthetic oligonucleotide
ggcagcttactgcctagcgaccggctgcgtttccatcattggccgcctacacctg

SEQ ID NO: 422921 - DNA, 55 bp, Artificial
  Synthetic oligonucleotide
ggcagcttcatcaacccacaaggagagagaggtgcagggtatgcagtggtaaccc

SEQ ID NO: 422922 - DNA, 55 bp, Artificial
  Synthetic oligonucleotide
ggcagctttgttgttctgtttaccaagttctctggcaatcattgccgtcgttcgt

SEQ ID NO: 422923 - DNA, 60 bp, Artificial
  Synthetic oligonucleotide
ggcaggaacagacctatgctcgccatttcatgagtaggggaggtactccgggtgaggctg

SEQ ID NO: 422924 - DNA, 55 bp, Artificial
  Synthetic oligonucleotide
ggcaggaacagacctttctattcccagggaaatttggtctcgcctctctgaacgc

SEQ ID NO: 422925 - DNA, 55 bp, Artificial
  Synthetic oligonucleotide
ggcaggaaccagccatagatctaggcgacacgattgaggacgcattcgatctact

SEQ ID NO: 422926 - DNA, 55 bp, Artificial
  Synthetic oligonucleotide
ggcaggaactgttaatcagttaatacagttcgcctctaatgacctacaaggggag

SEQ ID NO: 422927 - DNA, 55 bp, Artificial
  Synthetic oligonucleotide
ggcaggaagaagcgaaggggacgaagacactcgcttgcttcaagcagtacgcata

SEQ ID NO: 422928 - DNA, 55 bp, Artificial
  Synthetic oligonucleotide
ggcaggaagaagcggagacagcgacgaacagcttctccaggcagtcagactcatc

SEQ ID NO: 422929 - DNA, 55 bp, Artificial
  Synthetic oligonucleotide
ggcaggaagaagcggagacagcgacgaagatctcctaggcacagtccggctcatc

SEQ ID NO: 422930 - DNA, 55 bp, Artificial
  Synthetic oligonucleotide
ggcaggaagaagcggagaccccgacgcagaactcctcagagtcgtcaggatcatc

SEQ ID NO: 422931 - DNA, 55 bp, Artificial
  Synthetic oligonucleotide
ggcaggaagaagcggagtcagcgacgcagagctcatccaagcagtgaagatcatc

SEQ ID NO: 422932 - DNA, 55 bp, Artificial
  Synthetic oligonucleotide
ggcaggaagagttgttggaaacgccaacaaacttggaacactcaactttcctcta

SEQ ID NO: 422933 - DNA, 59 bp, Artificial
  Synthetic oligonucleotide
ggcaggaatacgcaataccagttggaccagtatttccaccaggcatgaattggactgat

SEQ ID NO: 422934 - DNA, 55 bp, Artificial
  Synthetic oligonucleotide
ggcaggaattcatggaatatcgaaaggatggtattatagaggtcgacagagcccc

SEQ ID NO: 422935 - DNA, 55 bp, Artificial
  Synthetic oligonucleotide
ggcaggacaatgaaacatggttgcctagagattgtcacgaagggaactagtgcaa

SEQ ID NO: 422936 - DNA, 55 bp, Artificial
  Synthetic oligonucleotide
ggcaggaccgacctcaacagggacatacatggctgctatacatgagcggctctcg

SEQ ID NO: 422937 - DNA, 58 bp, Artificial
  Synthetic oligonucleotide
ggcaggagaaaattggttcagactcccgatcacatatgttggaccaatgtacatggga

SEQ ID NO: 422938 - DNA, 58 bp, Artificial
  Synthetic oligonucleotide
ggcaggaggaagctccggaaataggctgaatgtaactctaaacggaatgatcttcgtg

SEQ ID NO: 422939 - DNA, 55 bp, Artificial
  Synthetic oligonucleotide
ggcaggaggaggaccatataccaacaggcggttgattccctttctgtgagatctg

SEQ ID NO: 422940 - DNA, 51 bp, Artificial
  Synthetic oligonucleotide
ggcaggaggctgcgacgtgattggcaagttgcctgattggctgactcgcct

SEQ ID NO: 422941 - DNA, 58 bp, Artificial
  Synthetic oligonucleotide
ggcaggagtgacgggatgatcgcgtactcaaacgcggattccgactattggaacgttg

SEQ ID NO: 422942 - DNA, 55 bp, Artificial
  Synthetic oligonucleotide
ggcaggagtttcctggtcccttcaataaggtatcctgagtcaacaactaagggga

SEQ ID NO: 422943 - DNA, 57 bp, Artificial
  Synthetic oligonucleotide
ggcaggatactaagcataactagtcgctgttactttagtggttgggtatactctttc

SEQ ID NO: 422944 - DNA, 55 bp, Artificial
  Synthetic oligonucleotide
ggcaggatgtgtacagggagtttgaaaggaaaatacgcagtgttagcgctggacg

SEQ ID NO: 422945 - DNA, 55 bp, Artificial
  Synthetic oligonucleotide
ggcaggattagaagggtttctacagagagtaaaatcaaagaataaggctccaaaa

SEQ ID NO: 422946 - DNA, 55 bp, Artificial
  Synthetic oligonucleotide
ggcaggattagagcgctagagctatgcaatatcctttccacgattgggcgtaaga

SEQ ID NO: 422947 - DNA, 59 bp, Artificial
  Synthetic oligonucleotide
ggcaggcagagagctagaacgctacgcagttaatcccggccttttagaaacatcagagg

SEQ ID NO: 422948 - DNA, 55 bp, Artificial
  Synthetic oligonucleotide
ggcaggcatgatgctggttgacactttccactcgcgcccagagaatgccatcaga

SEQ ID NO: 422949 - DNA, 60 bp, Artificial
  Synthetic oligonucleotide
ggcaggccaaaagagagtagtgtgttgtggacatccaatagtatagtagcactctgtgga

SEQ ID NO: 422950 - DNA, 55 bp, Artificial
  Synthetic oligonucleotide
ggcaggccataccacccgcagctttacgtccctcttttcccgtggggcatctcag

SEQ ID NO: 422951 - DNA, 55 bp, Artificial
  Synthetic oligonucleotide
ggcaggcgatattcaagccgtttcacagtcgtgtgagcgcaatacactcgtgatg

SEQ ID NO: 422952 - DNA, 57 bp, Artificial
  Synthetic oligonucleotide
ggcaggcgtgactccagaaaccttcccgacggtgtcacagttcctcttcgagctagg

SEQ ID NO: 422953 - DNA, 57 bp, Artificial
  Synthetic oligonucleotide
ggcaggctacgagagtgttcgcgaacgacgggacgtatttcgcttcggtggcggcac

SEQ ID NO: 422954 - DNA, 60 bp, Artificial
  Synthetic oligonucleotide
ggcaggctatgtgccattgtccactcgtcctcccactagtagtattaccacgtccactat

SEQ ID NO: 422955 - DNA, 55 bp, Artificial
  Synthetic oligonucleotide
ggcaggcttaacctatattgaacaagagttgcataagttcttcctaaagggtgag

SEQ ID NO: 422956 - DNA, 54 bp, Artificial
  Synthetic oligonucleotide
ggcagggaaattcgcatacatacggcaaaaaacaaaggcgttattaagaaagta

SEQ ID NO: 422957 - DNA, 55 bp, Artificial
  Synthetic oligonucleotide
ggcagggacaccaacgataactgtggcgaggtccaagtactgtccacagccacgc

SEQ ID NO: 422958 - DNA, 54 bp, Artificial
  Synthetic oligonucleotide
ggcagggacacctatccccggggtcatttacgaaccatcttacccacgatggat

SEQ ID NO: 422959 - DNA, 55 bp, Artificial
  Synthetic oligonucleotide
ggcagggagacggtatcgtgcacaccacttgcccatgtggagcgcaaatcactgg

SEQ ID NO: 422960 - DNA, 60 bp, Artificial
  Synthetic oligonucleotide
ggcagggagtaggaacagcaatgtatgctcctcccattgaaggactaatccaatgtagat

SEQ ID NO: 422961 - DNA, 60 bp, Artificial
  Synthetic oligonucleotide
ggcagggagtatagactaataaactgcaatgcttcaaccattacacaggcttgtccaaag

SEQ ID NO: 422962 - DNA, 55 bp, Artificial
  Synthetic oligonucleotide
ggcagggattctgtgccgcccttaagcggggttactttacaactgagcagggtga

SEQ ID NO: 422963 - DNA, 55 bp, Artificial
  Synthetic oligonucleotide
ggcagggattgaacagacctttggggtaccttataatccacagagccaaggggta

SEQ ID NO: 422964 - DNA, 55 bp, Artificial
  Synthetic oligonucleotide
ggcagggccactccgagttggtctacatccttacgggtctcacacactgcacgaa

SEQ ID NO: 422965 - DNA, 55 bp, Artificial
  Synthetic oligonucleotide
ggcagggcgcaaatagacccatcatagaaatcgatatgaacacattggagcacac

SEQ ID NO: 422966 - DNA, 55 bp, Artificial
  Synthetic oligonucleotide
ggcagggctagtgtttcattctcagaggtacaatacaaggctgagacaagcttgg

SEQ ID NO: 422967 - DNA, 60 bp, Artificial
  Synthetic oligonucleotide
ggcagggctggcgcgtatatcttttcgtctgacactggcccgggtcacctacagcagagg

SEQ ID NO: 422968 - DNA, 55 bp, Artificial
  Synthetic oligonucleotide
ggcaggggagctattgcagggaggtgggtgcaagatcgcaacttttgcagactgg

SEQ ID NO: 422969 - DNA, 53 bp, Artificial
  Synthetic oligonucleotide
ggcaggggggcttattattaccccccctgcccgggacgggacatttgcatcta

SEQ ID NO: 422970 - DNA, 59 bp, Artificial
  Synthetic oligonucleotide
ggcagggggtaggacgagcaatgtatgcccctcccattgcaggaaacataacatgtacc

SEQ ID NO: 422971 - DNA, 58 bp, Artificial
  Synthetic oligonucleotide
ggcaggggtgcgagtacgcggacatcggccaggcacccattgggaagttgatttcacg

SEQ ID NO: 422972 - DNA, 55 bp, Artificial
  Synthetic oligonucleotide
ggcaggggtggggccaaataacacataaggttaacatctcgggcccctctgacga

SEQ ID NO: 422973 - DNA, 55 bp, Artificial
  Synthetic oligonucleotide
ggcaggggtgttccctttacatcctcaattaccaccatgtacttatcaatagcac

SEQ ID NO: 422974 - DNA, 59 bp, Artificial
  Synthetic oligonucleotide
ggcagggtactccagcggagtcctccagcaacttgagtgctatatgctggaggattgga

SEQ ID NO: 422975 - DNA, 56 bp, Artificial
  Synthetic oligonucleotide
ggcagggtcagggacgtggcgcgggggtgtggagtgcaattagtgctctacgctac

SEQ ID NO: 422976 - DNA, 55 bp, Artificial
  Synthetic oligonucleotide
ggcagggtctaccgatgtggaactattcttaccccacacaacgaacccattgtcc

SEQ ID NO: 422977 - DNA, 55 bp, Artificial
  Synthetic oligonucleotide
ggcagggttactcacccctctcgttgcagacccttatcccagcccagagggaacc

SEQ ID NO: 422978 - DNA, 55 bp, Artificial
  Synthetic oligonucleotide
ggcagggttagtatttcactctcagaaatataataccaggttaaaacaagcgtgg

SEQ ID NO: 422979 - DNA, 52 bp, Artificial
  Synthetic oligonucleotide
ggcagggttattctcccctctcgttacagacccttttcccaacaactcggga

SEQ ID NO: 422980 - DNA, 55 bp, Artificial
  Synthetic oligonucleotide
ggcagggttcttggtgtctttattgtcaatggcttatgccaatccagagctctac

SEQ ID NO: 422981 - DNA, 60 bp, Artificial
  Synthetic oligonucleotide
ggcaggtaccttttcccattgattacgtctttgcatgataattggcttgatgcgtgaaca

SEQ ID NO: 422982 - DNA, 53 bp, Artificial
  Synthetic oligonucleotide
ggcaggtacgttttcccataaattacgtcttagcatcgtaattggtttactcc

SEQ ID NO: 422983 - DNA, 58 bp, Artificial
  Synthetic oligonucleotide
ggcaggtactaacccccgctgatgggtggaagcatgtccgtctttcgaagcgatccgc

SEQ ID NO: 422984 - DNA, 55 bp, Artificial
  Synthetic oligonucleotide
ggcaggtactgccctgttgcttcaccaccctaccggctctgtccaccggtctgat

SEQ ID NO: 422985 - DNA, 58 bp, Artificial
  Synthetic oligonucleotide
ggcaggtaggctatgattgtcttcttgcgcaggagtatgctcagggtggtaagctagg

SEQ ID NO: 422986 - DNA, 55 bp, Artificial
  Synthetic oligonucleotide
ggcaggtcaaggtgcttttgttgtatcatcgggtgtgacggtgggagttctcatc

SEQ ID NO: 422987 - DNA, 55 bp, Artificial
  Synthetic oligonucleotide
ggcaggtcagacgcttgcgtgtttccagcattcagtgctttgtagatttgcaccc

SEQ ID NO: 422988 - DNA, 60 bp, Artificial
  Synthetic oligonucleotide
ggcaggtcatacgcttactcatcacaaaacacaagtgtggagcacatactgttgttgtca

SEQ ID NO: 422989 - DNA, 60 bp, Artificial
  Synthetic oligonucleotide
ggcaggtccctctagatttcaagtgtcagacccgaggtgcaagtctcttctggccgcttg

SEQ ID NO: 422990 - DNA, 56 bp, Artificial
  Synthetic oligonucleotide
ggcaggtcctgtggtatgtacggccttaagggacctgacatttacaagggagtcta

SEQ ID NO: 422991 - DNA, 59 bp, Artificial
  Synthetic oligonucleotide
ggcaggtgagagaggcaatcgcaaccctgcaatatgggtccggtagctactcaggccag

SEQ ID NO: 422992 - DNA, 55 bp, Artificial
  Synthetic oligonucleotide
ggcaggtgccacatatatctcacctttcgtgggtcgtatgaatgacaactcattc

SEQ ID NO: 422993 - DNA, 55 bp, Artificial
  Synthetic oligonucleotide
ggcaggtgctgaatctggttctgcctatagccctctatcgcttgtccccaatatc

SEQ ID NO: 422994 - DNA, 60 bp, Artificial
  Synthetic oligonucleotide
ggcaggtggagccatgctcaacgatattgcgtgcataacttcttatcttcataggaacat

SEQ ID NO: 422995 - DNA, 55 bp, Artificial
  Synthetic oligonucleotide
ggcaggtggagccatttggtattcgctacagtctttatggtgtgtgtctggggac

SEQ ID NO: 422996 - DNA, 60 bp, Artificial
  Synthetic oligonucleotide
ggcaggtggggcgatttggtattcgctgcaatctttgtggtgcatgtcaggagatgcctc

SEQ ID NO: 422997 - DNA, 55 bp, Artificial
  Synthetic oligonucleotide
ggcaggtgtggttgctcaagctgtaagagatttgccagtagcacatgaagacggg

SEQ ID NO: 422998 - DNA, 55 bp, Artificial
  Synthetic oligonucleotide
ggcaggtgtgtcacacgacggtcctttggaagtataataacactcccgactggga

SEQ ID NO: 422999 - DNA, 55 bp, Artificial
  Synthetic oligonucleotide
ggcaggttcaatgctcgtggctgtagtgggttaccagaagaaattacgttgtcac

SEQ ID NO: 423000 - DNA, 55 bp, Artificial
  Synthetic oligonucleotide
ggcaggttgcccaaagggagggaacctatatttcctttggccactcatacaccca

SEQ ID NO: 423001 - DNA, 55 bp, Artificial
  Synthetic oligonucleotide
ggcaggttttgggatagcactgtttctagcagggtggaaggcttgtgtttggata

SEQ ID NO: 423002 - DNA, 55 bp, Artificial
  Synthetic oligonucleotide
ggcagtaaaggcttgggttctgccctcgccacagttatcgtctcatgaccctagc

SEQ ID NO: 423003 - DNA, 54 bp, Artificial
  Synthetic oligonucleotide
ggcagtaacaacaaggtctctattgggcgtcgggtatgcgtaaaccagcttcat

SEQ ID NO: 423004 - DNA, 55 bp, Artificial
  Synthetic oligonucleotide
ggcagtaagaacaaagctccgactcactccaatagcagccgctggccagctggac

SEQ ID NO: 423005 - DNA, 60 bp, Artificial
  Synthetic oligonucleotide
ggcagtaaggaccaaactcagactcactccaatcccggctgcgtccaagctggacttgtc

SEQ ID NO: 423006 - DNA, 55 bp, Artificial
  Synthetic oligonucleotide
ggcagtaagtatgcaaagaaagggaagaccaagggcacaactgtcggtatgggaa

SEQ ID NO: 423007 - DNA, 60 bp, Artificial
  Synthetic oligonucleotide
ggcagtacaaccccgataatgtttgctggggtagcttgcaactacatgctagtgggccac

SEQ ID NO: 423008 - DNA, 55 bp, Artificial
  Synthetic oligonucleotide
ggcagtactttggtgggaagaatgcagcatgacagaagaacacgtagaatcagca

SEQ ID NO: 423009 - DNA, 52 bp, Artificial
  Synthetic oligonucleotide
ggcagtagacaccccatgggttgagaaggagtcagctctttccattgattac

SEQ ID NO: 423010 - DNA, 55 bp, Artificial
  Synthetic oligonucleotide
ggcagtagaccggtaggatacaaatagtaccgcactgcgcgacttagaggacccg

SEQ ID NO: 423011 - DNA, 60 bp, Artificial
  Synthetic oligonucleotide
ggcagtagtgcataccaagcacggctccttcatgccagagtgtatgggtcagtctctttg

SEQ ID NO: 423012 - DNA, 55 bp, Artificial
  Synthetic oligonucleotide
ggcagtagttaacttatgcactggatatattcctacatgtacactaggttgtact

SEQ ID NO: 423013 - DNA, 60 bp, Artificial
  Synthetic oligonucleotide
ggcagtatgaggatgcaacaggactaatgacccataggaaaacctataattgcttggtac

SEQ ID NO: 423014 - DNA, 60 bp, Artificial
  Synthetic oligonucleotide
ggcagtatgtaacaatgtgtaatagggactggttgtcacttgcgtgtctgaaacttcgaa

SEQ ID NO: 423015 - DNA, 55 bp, Artificial
  Synthetic oligonucleotide
ggcagtcaacgattttatgtcagtggtcaacccgggattagcttggatgcaattt

SEQ ID NO: 423016 - DNA, 60 bp, Artificial
  Synthetic oligonucleotide
ggcagtcaagggtgtacattatagaatcagatggtgccagtgtacaaatcaaagaagaca

SEQ ID NO: 423017 - DNA, 60 bp, Artificial
  Synthetic oligonucleotide
ggcagtcacaacctagggacgaagatgagctccgaatctatgaagaacaagcatcgcaac

SEQ ID NO: 423018 - DNA, 55 bp, Artificial
  Synthetic oligonucleotide
ggcagtcacccacaactggggtcctgcacacaatggcacgctcgttgcgatccca

SEQ ID NO: 423019 - DNA, 60 bp, Artificial
  Synthetic oligonucleotide
ggcagtcagacctctggtggtgttaaccttatgctggactatgacaacttcaacagccag

SEQ ID NO: 423020 - DNA, 55 bp, Artificial
  Synthetic oligonucleotide
ggcagtcagccaccaatccttccatctttgttaggatggctgacccaccagccca

SEQ ID NO: 423021 - DNA, 60 bp, Artificial
  Synthetic oligonucleotide
ggcagtcaggcagacagcctactcccatctcgccacctctaagagacagtcatcctcagg

SEQ ID NO: 423022 - DNA, 55 bp, Artificial
  Synthetic oligonucleotide
ggcagtcattattaagtgaagggagacgccaaatagggcatgcctcgagagacct

SEQ ID NO: 423023 - DNA, 57 bp, Artificial
  Synthetic oligonucleotide
ggcagtccacaatactgggccagctctgcaggtactacacccagtggtcaggttcat

SEQ ID NO: 423024 - DNA, 50 bp, Artificial
  Synthetic oligonucleotide
ggcagtcccattagcgttgaggggcacaaatgccatgggtccgttccacg

SEQ ID NO: 423025 - DNA, 60 bp, Artificial
  Synthetic oligonucleotide
ggcagtccgaggcgatctaaatttcgtgaacagagcgaaccaacgactgaaccccatgca

SEQ ID NO: 423026 - DNA, 55 bp, Artificial
  Synthetic oligonucleotide
ggcagtccgaggtgatctgaactttgttaatagagcgaaccagcggttgaaccct

SEQ ID NO: 423027 - DNA, 53 bp, Artificial
  Synthetic oligonucleotide
ggcagtccgtatgtaagtcctgttgcaaacagcgaaccctgtgtagaaaagga

SEQ ID NO: 423028 - DNA, 60 bp, Artificial
  Synthetic oligonucleotide
ggcagtcggcctgaggaatgtacctgctgcatcaaatagagggctatttggtgccatagc

SEQ ID NO: 423029 - DNA, 55 bp, Artificial
  Synthetic oligonucleotide
ggcagtcggtttaaggaatgtacctgctgtatcagatagagggctgtttggtgct

SEQ ID NO: 423030 - DNA, 60 bp, Artificial
  Synthetic oligonucleotide
ggcagtcgtcgaacctacgatgactgatgagattatgatggtagtacgtgtcgaaaaagg

SEQ ID NO: 423031 - DNA, 60 bp, Artificial
  Synthetic oligonucleotide
ggcagtcgttacactcgagtgacgctcagtgcgtaatcgtatcacagtattaagtatgtc

SEQ ID NO: 423032 - DNA, 59 bp, Artificial
  Synthetic oligonucleotide
ggcagtctaccgggtcattcttctcgaccgtgcaatcaccaatgaccaagcaacgctgc

SEQ ID NO: 423033 - DNA, 55 bp, Artificial
  Synthetic oligonucleotide
ggcagtctgagcatgaagctcaagaatcatcacgggctcggtcaggtcctctgtg

SEQ ID NO: 423034 - DNA, 55 bp, Artificial
  Synthetic oligonucleotide
ggcagtctgccccagatattgggagaaagttagagagattagaagacttaaggag

SEQ ID NO: 423035 - DNA, 55 bp, Artificial
  Synthetic oligonucleotide
ggcagtgaactcatatgacaaaatcctagcggaggaagatacgcaaatgaggcgt

SEQ ID NO: 423036 - DNA, 60 bp, Artificial
  Synthetic oligonucleotide
ggcagtgagaaaggaacacgcgattgtgtggtttccgaatctgcgagggattctacacca

SEQ ID NO: 423037 - DNA, 55 bp, Artificial
  Synthetic oligonucleotide
ggcagtgcaaagacgatagtagagcagaccccaagaatggctaaaaccaaccctt

SEQ ID NO: 423038 - DNA, 55 bp, Artificial
  Synthetic oligonucleotide
ggcagtgccatgtcccgtcctggtgtgtctctctgactactagtatgtatgctgg

SEQ ID NO: 423039 - DNA, 60 bp, Artificial
  Synthetic oligonucleotide
ggcagtgctgcttagtcccgaactacacttgaaagtgcctcaactcaaatctctggttca

SEQ ID NO: 423040 - DNA, 55 bp, Artificial
  Synthetic oligonucleotide
ggcagtggaaggctcggatctgcccagagcagttcacggtcccgtcatcctggat

SEQ ID NO: 423041 - DNA, 55 bp, Artificial
  Synthetic oligonucleotide
ggcagtggacatagcactcaattagcttgatgtctgatgtctgaaagttacacct

SEQ ID NO: 423042 - DNA, 55 bp, Artificial
  Synthetic oligonucleotide
ggcagtggatgggctattgataatatccaggcaacgaaccctatagaacaagccc

SEQ ID NO: 423043 - DNA, 58 bp, Artificial
  Synthetic oligonucleotide
ggcagtgggcataagcgcgttgggactcaaaaagaagtccacacagccataaagaaac

SEQ ID NO: 423044 - DNA, 56 bp, Artificial
  Synthetic oligonucleotide
ggcagtgtaaaactaaccgagaaggcaaaagagctcaacaaaattgttgaagacga

SEQ ID NO: 423045 - DNA, 51 bp, Artificial
  Synthetic oligonucleotide
ggcagtgtacaatatcaaacaggtcgttaagaaactcggtacatacaccga

SEQ ID NO: 423046 - DNA, 60 bp, Artificial
  Synthetic oligonucleotide
ggcagtgtactccggatgagagctcgctcaataagtctctatgaattggagtatggagta

SEQ ID NO: 423047 - DNA, 55 bp, Artificial
  Synthetic oligonucleotide
ggcagtgtctacggaacagacactgattgcaacaaacgcatatccggagttcgag

SEQ ID NO: 423048 - DNA, 55 bp, Artificial
  Synthetic oligonucleotide
ggcagtgtgggcgttggaacttacgaaattggaagaaatcaaagtacaggattat

SEQ ID NO: 423049 - DNA, 59 bp, Artificial
  Synthetic oligonucleotide
ggcagtgttggtccaaattttaactagtatgacggcaactgtgttgtcaccgtctctga

SEQ ID NO: 423050 - DNA, 55 bp, Artificial
  Synthetic oligonucleotide
ggcagtgttgttgtcaacccgtcactcaatggaatcctggatccaaaacaagaag

SEQ ID NO: 423051 - DNA, 57 bp, Artificial
  Synthetic oligonucleotide
ggcagttaacgctgaccgcaccgtgccgttcctcggtgtgaacgatcccaacgtcgc

SEQ ID NO: 423052 - DNA, 55 bp, Artificial
  Synthetic oligonucleotide
ggcagttaagttttccccgatggttgctaccctcgctcaacgcgacgctgggccc

SEQ ID NO: 423053 - DNA, 60 bp, Artificial
  Synthetic oligonucleotide
ggcagttattgacggtgtattgaatcaggtattgaacgacaatattagaaatggtcatgt

SEQ ID NO: 423054 - DNA, 55 bp, Artificial
  Synthetic oligonucleotide
ggcagttcaccatcaaaacaccagcgacatgagcaaattcctcaagcttaagggc

SEQ ID NO: 423055 - DNA, 55 bp, Artificial
  Synthetic oligonucleotide
ggcagttcagaaactacaacacaacctctggaagcatctatggagcttgcggctc

SEQ ID NO: 423056 - DNA, 55 bp, Artificial
  Synthetic oligonucleotide
ggcagttcatactcgtggcgttggaagtgacgttaatgtccgtaccgtggtacgt

SEQ ID NO: 423057 - DNA, 55 bp, Artificial
  Synthetic oligonucleotide
ggcagttgatatggatgtaatagctacacccacacttcaggtcaattcgagatcg

SEQ ID NO: 423058 - DNA, 55 bp, Artificial
  Synthetic oligonucleotide
ggcagttggaggaagttactggtcttgagctgcacgagggtggaccacccgccct

SEQ ID NO: 423059 - DNA, 60 bp, Artificial
  Synthetic oligonucleotide
ggcagttggcagatttggttgcagctcaaaaattggctgcaaaaccagttgatccaacag

SEQ ID NO: 423060 - DNA, 55 bp, Artificial
  Synthetic oligonucleotide
ggcagttggtggaccgacgcatacggttcgatcacggtcaaggtgacgcacgggt

SEQ ID NO: 423061 - DNA, 60 bp, Artificial
  Synthetic oligonucleotide
ggcagttgtaccaatcaaaatgacgttgagtatatgtataagttagctaaagacatttgc

SEQ ID NO: 423062 - DNA, 56 bp, Artificial
  Synthetic oligonucleotide
ggcagttgtggtccagtgtcttccaatggggcatatggagtaaaggggttttcatt

SEQ ID NO: 423063 - DNA, 60 bp, Artificial
  Synthetic oligonucleotide
ggcagtttcggtgttcgctgttggatatcagggtcacttcactgcacttagcggcggtga

SEQ ID NO: 423064 - DNA, 55 bp, Artificial
  Synthetic oligonucleotide
ggcagtttgactccatgctggcctataactacaaggccttcactctgtacccaga

SEQ ID NO: 423065 - DNA, 55 bp, Artificial
  Synthetic oligonucleotide
ggcagtttgcctgattagctggttgacatggacgcaacgagagctaactgctcgt

SEQ ID NO: 423066 - DNA, 60 bp, Artificial
  Synthetic oligonucleotide
ggcagtttggcaagcagctagtggtaaagtgtaccttccaccatctacacctgttgccag

SEQ ID NO: 423067 - DNA, 51 bp, Artificial
  Synthetic oligonucleotide
ggcagttttaccggtaggaaccggtaaatcttccacaatagttctaactta

SEQ ID NO: 423068 - DNA, 57 bp, Artificial
  Synthetic oligonucleotide
ggcagttttgtaataagaaggtgtctccaaatgagtttgggagtgtctccaattgag

SEQ ID NO: 423069 - DNA, 55 bp, Artificial
  Synthetic oligonucleotide
ggcataaaactaaccctgatgcagcttgcaaatgactgcatctcgcgtccagata

SEQ ID NO: 423070 - DNA, 52 bp, Artificial
  Synthetic oligonucleotide
ggcataaccaaatgtttgtgacctgcgttgacaccacccgaaatacaatctt

SEQ ID NO: 423071 - DNA, 55 bp, Artificial
  Synthetic oligonucleotide
ggcataaccaccgaatttccgctctgaagttgtgccctaaccataccattgtccg

SEQ ID NO: 423072 - DNA, 60 bp, Artificial
  Synthetic oligonucleotide
ggcataaccagagtgccgtactttgtgcgcgctcagggcctcattcgtgtgtgcatgttg

SEQ ID NO: 423073 - DNA, 55 bp, Artificial
  Synthetic oligonucleotide
ggcataagagaggttaagacctcaagccaggaattatacagggcactaaaagcca

SEQ ID NO: 423074 - DNA, 60 bp, Artificial
  Synthetic oligonucleotide
ggcataagtatgacacattcaacatgaacttaaattttgcactcaataacaccttttcac

SEQ ID NO: 423075 - DNA, 55 bp, Artificial
  Synthetic oligonucleotide
ggcataataacagacactatcaagagttggaggaataggaaactgagaactcaag

SEQ ID NO: 423076 - DNA, 50 bp, Artificial
  Synthetic oligonucleotide
ggcataatctatgaggcatctaacggaactggagtcgttaaggatagtgt

SEQ ID NO: 423077 - DNA, 56 bp, Artificial
  Synthetic oligonucleotide
ggcataattgtaatttggtaaagtgtgctttaattcaaaatcctcacgctccaaaa

SEQ ID NO: 423078 - DNA, 55 bp, Artificial
  Synthetic oligonucleotide
ggcatacacaacgcaagctaccggaatcatgagacaattaatgacacttaggcta

SEQ ID NO: 423079 - DNA, 55 bp, Artificial
  Synthetic oligonucleotide
ggcatacacacaaaccgcgtcatccgccgctctcctggacactgtccgtggtaac

SEQ ID NO: 423080 - DNA, 55 bp, Artificial
  Synthetic oligonucleotide
ggcatacacacagacagctaccacatctgctttgcttgacaccgtccgaggtaac

SEQ ID NO: 423081 - DNA, 55 bp, Artificial
  Synthetic oligonucleotide
ggcatacaccatccacctaccgacacagaacagacagacttgtacaagaaggccg

SEQ ID NO: 423082 - DNA, 55 bp, Artificial
  Synthetic oligonucleotide
ggcatacagaagccaggacccattcctgagggcaacttcgcaatcctcgatgagt

SEQ ID NO: 423083 - DNA, 60 bp, Artificial
  Synthetic oligonucleotide
ggcatacagcaagcgcaaagccgcgcggagtgagtgagcggatcagctttgttcgcttag

SEQ ID NO: 423084 - DNA, 60 bp, Artificial
  Synthetic oligonucleotide
ggcatacagttgactatccgcttagaggtcactaacatgccggttgtggcagtgggccca

SEQ ID NO: 423085 - DNA, 59 bp, Artificial
  Synthetic oligonucleotide
ggcatacataacaatgcgtaatgtcacggagagatatatgcctaggtggggagcactta

SEQ ID NO: 423086 - DNA, 60 bp, Artificial
  Synthetic oligonucleotide
ggcatacatcaccaaagatattggcaagaaattataagataccattgactgtagcaaaac

SEQ ID NO: 423087 - DNA, 55 bp, Artificial
  Synthetic oligonucleotide
ggcataccccctcgtcaacttggtaaagaaccgccttcgtaaggagacaatatca

SEQ ID NO: 423088 - DNA, 60 bp, Artificial
  Synthetic oligonucleotide
ggcatacccgcgtggaagaatgcatccattcccctcttttgtgcaaccagaaatagagat

SEQ ID NO: 423089 - DNA, 57 bp, Artificial
  Synthetic oligonucleotide
ggcataccgtggtggtccgggcaaatgggaccgcgattttgcgaactagcaattaca

SEQ ID NO: 423090 - DNA, 55 bp, Artificial
  Synthetic oligonucleotide
ggcatacggcgtcctaagcacctctatgtgtcaatgcctactgcacagtccacta

SEQ ID NO: 423091 - DNA, 55 bp, Artificial
  Synthetic oligonucleotide
ggcatacgttctctcagtggcttctgtatggctctgtaacggtcgaaaggatggg

SEQ ID NO: 423092 - DNA, 55 bp, Artificial
  Synthetic oligonucleotide
ggcatactcaactggtgatatggaacgtgtggctatggctgctatgacttctggc

SEQ ID NO: 423093 - DNA, 60 bp, Artificial
  Synthetic oligonucleotide
ggcatagaacctttaggaaacctatgtacagatcatacaccatcctggctaagagctact

SEQ ID NO: 423094 - DNA, 55 bp, Artificial
  Synthetic oligonucleotide
ggcataggaggcccatactgctcatactcagacacatggtacaaaggcacagcat

SEQ ID NO: 423095 - DNA, 56 bp, Artificial
  Synthetic oligonucleotide
ggcatagggacaaatctttctgtccccaatcccctgggattcttccccgaccatca

SEQ ID NO: 423096 - DNA, 59 bp, Artificial
  Synthetic oligonucleotide
ggcataggttcattacaaactataatgcaacgagcagacttaatagcgcaatgacactc

SEQ ID NO: 423097 - DNA, 55 bp, Artificial
  Synthetic oligonucleotide
ggcatagtacaacagcagagcaatctgctgagggctatagaggctcaacagcaca

SEQ ID NO: 423098 - DNA, 55 bp, Artificial
  Synthetic oligonucleotide
ggcatagtgccaaactgattgttcaggagagaagagtctttgacgtcccagaccc

SEQ ID NO: 423099 - DNA, 55 bp, Artificial
  Synthetic oligonucleotide
ggcatagtggcaactgatgcgaacaaaggagaggaagttaaagcttatacgacgt

SEQ ID NO: 423100 - DNA, 55 bp, Artificial
  Synthetic oligonucleotide
ggcatagtgtccactggtggcaacggtcttgtcggttttgccaacgtgagggatc

SEQ ID NO: 423101 - DNA, 55 bp, Artificial
  Synthetic oligonucleotide
ggcatagtgttggggccacccttgaggcgctattccagggtccaccgatatatag

SEQ ID NO: 423102 - DNA, 56 bp, Artificial
  Synthetic oligonucleotide
ggcatagttcaaactattagaagtggctatacaacaactactcctagtgaaaacac

SEQ ID NO: 423103 - DNA, 52 bp, Artificial
  Synthetic oligonucleotide
ggcatagttcctgcacggactgtgtgtggcccggtgtactgcttcactccca

SEQ ID NO: 423104 - DNA, 52 bp, Artificial
  Synthetic oligonucleotide
ggcatatacagttcaaatgccaagtctattgctgaaattcgtgtttcctttg

SEQ ID NO: 423105 - DNA, 55 bp, Artificial
  Synthetic oligonucleotide
ggcatataggtcatctagtaagggacataacagaaagtttaattgcccattcagg

SEQ ID NO: 423106 - DNA, 52 bp, Artificial
  Synthetic oligonucleotide
ggcatatcgcaaggttgccactgactatgggcccgacaatactgatttccac

SEQ ID NO: 423107 - DNA, 60 bp, Artificial
  Synthetic oligonucleotide
ggcatatcgcggtcgcgtgcgcacagggtctaagccaatcactgtcatgacatatggcta

SEQ ID NO: 423108 - DNA, 53 bp, Artificial
  Synthetic oligonucleotide
ggcatatctcctggggacgtgggaagatcagttcagacagttagtggacgaaa

SEQ ID NO: 423109 - DNA, 55 bp, Artificial
  Synthetic oligonucleotide
ggcatatgaacaccgttttcggttaccgtgcactttaaagcaagtgcagacaacc

SEQ ID NO: 423110 - DNA, 55 bp, Artificial
  Synthetic oligonucleotide
ggcatatgagtcgttaaccgtttggcagcctcctctagcacttcgaccgtcgacc

SEQ ID NO: 423111 - DNA, 55 bp, Artificial
  Synthetic oligonucleotide
ggcatatggttcggtgagcgctaccctggcgcacttattggacttccgacgggcg

SEQ ID NO: 423112 - DNA, 60 bp, Artificial
  Synthetic oligonucleotide
ggcatatgtctagcaaatagcaatagcattgtgaataggaatatactgctataggcatag

SEQ ID NO: 423113 - DNA, 60 bp, Artificial
  Synthetic oligonucleotide
ggcatattaacatttaatgactttccaccacaaagatcaagtagtgctgctgctagagtg

SEQ ID NO: 423114 - DNA, 55 bp, Artificial
  Synthetic oligonucleotide
ggcatattgccgtttcctgttgtatgattcaggtatgtacactgccttaccctgt

SEQ ID NO: 423115 - DNA, 55 bp, Artificial
  Synthetic oligonucleotide
ggcatcaaagcacgacttgcagtgggtggtcgggctccccgctctaccacaaagg

SEQ ID NO: 423116 - DNA, 55 bp, Artificial
  Synthetic oligonucleotide
ggcatcaagttataccagcgaccaaacaaacctctaacacttataggcaataagc

SEQ ID NO: 423117 - DNA, 55 bp, Artificial
  Synthetic oligonucleotide
ggcatcaatgattccattttcaaatatggccagttggcacggaatattgcgtcta

SEQ ID NO: 423118 - DNA, 60 bp, Artificial
  Synthetic oligonucleotide
ggcatcaccatcccacatgatatagacctcggtgactcccgtgtggttatccaggactat

SEQ ID NO: 423119 - DNA, 58 bp, Artificial
  Synthetic oligonucleotide
ggcatcacgcatattagcgaacaacttacgagtacacggtttaccgtagatatcgaaa

SEQ ID NO: 423120 - DNA, 55 bp, Artificial
  Synthetic oligonucleotide
ggcatcactagaggataaaggtaaatctttcaccagccaatacgtgcttgctagc

SEQ ID NO: 423121 - DNA, 56 bp, Artificial
  Synthetic oligonucleotide
ggcatcacttagggaaattgtcaggactatatcaaatgaagggatgtacatttaac

SEQ ID NO: 423122 - DNA, 55 bp, Artificial
  Synthetic oligonucleotide
ggcatcagacttagctgaacgtgaattgactagggatacgcacaaggccattgtg

SEQ ID NO: 423123 - DNA, 55 bp, Artificial
  Synthetic oligonucleotide
ggcatcagatcaacctccagcacatcaacgtgtatatctcccagtacaggctgcg

SEQ ID NO: 423124 - DNA, 50 bp, Artificial
  Synthetic oligonucleotide
ggcatcagcgtcggtttgggtatcgccggcctagtattggtgggcgtcat

SEQ ID NO: 423125 - DNA, 60 bp, Artificial
  Synthetic oligonucleotide
ggcatcagctggtcattcgggcgcggatcaacccttagtaattgagccatggatccaggg

SEQ ID NO: 423126 - DNA, 55 bp, Artificial
  Synthetic oligonucleotide
ggcatcaggaaagcgctgtttctagatggggtagataaggcacaagaagaacatg

SEQ ID NO: 423127 - DNA, 55 bp, Artificial
  Synthetic oligonucleotide
ggcatcaggagaccaaaacatctatatgtatccatgcctactgcccagtccacca

SEQ ID NO: 423128 - DNA, 57 bp, Artificial
  Synthetic oligonucleotide
ggcatcaggccttggaagtccaggacagggtaaagcggacggtcttttgaacgatga

SEQ ID NO: 423129 - DNA, 55 bp, Artificial
  Synthetic oligonucleotide
ggcatcatgctccttgggatgttgatgacctgtagtgctgcagaagatttgtggg

SEQ ID NO: 423130 - DNA, 60 bp, Artificial
  Synthetic oligonucleotide
ggcatcatgggcgctcaggtatctagacagaatgttggcacacactcaacgcaaaactca

SEQ ID NO: 423131 - DNA, 55 bp, Artificial
  Synthetic oligonucleotide
ggcatcattttaaatgggcttttggtgtggtgcattgaaaatggaacatcgggag

SEQ ID NO: 423132 - DNA, 53 bp, Artificial
  Synthetic oligonucleotide
ggcatccagcaaagtggctaggatttgagctacacccagacacatggaaattt

SEQ ID NO: 423133 - DNA, 55 bp, Artificial
  Synthetic oligonucleotide
ggcatccatgtcggaggcaatggtagacagggcttttcagcacaattaaggaagc

SEQ ID NO: 423134 - DNA, 59 bp, Artificial
  Synthetic oligonucleotide
ggcatcccaatataatctgtggaagctatccagactccatgtcagacttataccccttg

SEQ ID NO: 423135 - DNA, 55 bp, Artificial
  Synthetic oligonucleotide
ggcatcccgagggagaatgtatgtgggatcatctgattttaatcaattggaccca

SEQ ID NO: 423136 - DNA, 60 bp, Artificial
  Synthetic oligonucleotide
ggcatcccgatggtccatgcattttaccaatgcttgctgcgtaatactagcgacgtgcgt

SEQ ID NO: 423137 - DNA, 52 bp, Artificial
  Synthetic oligonucleotide
ggcatccctaaacttgattcggcggaggagtgcattaacaccgcattcccga

SEQ ID NO: 423138 - DNA, 55 bp, Artificial
  Synthetic oligonucleotide
ggcatccgctccgttgcgagttgaagtgcgagagtcggtagtgactttgtacccg

SEQ ID NO: 423139 - DNA, 57 bp, Artificial
  Synthetic oligonucleotide
ggcatccggctgctagagattacctgcttatataaaagcgcagtttcctcaataatc

SEQ ID NO: 423140 - DNA, 55 bp, Artificial
  Synthetic oligonucleotide
ggcatcgaccccccaaagtcttatgcctatttgagctttcaggcttgataagtaa

SEQ ID NO: 423141 - DNA, 55 bp, Artificial
  Synthetic oligonucleotide
ggcatcgatgtcgtacattttgaagatttggccgctcactggcatgcgctaggtg

SEQ ID NO: 423142 - DNA, 60 bp, Artificial
  Synthetic oligonucleotide
ggcatcgcacatttcttcacatcttgtgtcccaatggtacttacacctccgcctaattac

SEQ ID NO: 423143 - DNA, 60 bp, Artificial
  Synthetic oligonucleotide
ggcatcgctcacatcgtagttatgttccagggtgaggtcatcataggacatctttacgaa

SEQ ID NO: 423144 - DNA, 60 bp, Artificial
  Synthetic oligonucleotide
ggcatcggtttaggtactatgcttaagggcgctggtgtgtttgctgtcgtatcagcaggt

SEQ ID NO: 423145 - DNA, 55 bp, Artificial
  Synthetic oligonucleotide
ggcatcgtgccagattggcaggattacacctcgggaccaggacctagatacccaa

SEQ ID NO: 423146 - DNA, 60 bp, Artificial
  Synthetic oligonucleotide
ggcatctaatgaggttgatgtcacagttatgggtagcttattgcaattggattttcaaaa

SEQ ID NO: 423147 - DNA, 60 bp, Artificial
  Synthetic oligonucleotide
ggcatctacaatgtgatgacctgtggaatcatcggtttgataacatttttgttcttgtgt

SEQ ID NO: 423148 - DNA, 55 bp, Artificial
  Synthetic oligonucleotide
ggcatctagggcacttagtgagggatgtgactgagagcatgatcgctcatgcagg

SEQ ID NO: 423149 - DNA, 60 bp, Artificial
  Synthetic oligonucleotide
ggcatctatagatttgtggcaccgggagagaggccctctggcatgttcgactcatccgtc

SEQ ID NO: 423150 - DNA, 55 bp, Artificial
  Synthetic oligonucleotide
ggcatctcctatggcaggaagaaccggaagcaccgacgaggaactcctcaaggca

SEQ ID NO: 423151 - DNA, 59 bp, Artificial
  Synthetic oligonucleotide
ggcatctgcaccccatcttgagagggtcacagggttcaaccaaatagactcggacaaag

SEQ ID NO: 423152 - DNA, 55 bp, Artificial
  Synthetic oligonucleotide
ggcatctggatttccgacaattcttcactgctcttgaacgacgtgagattcaacg

SEQ ID NO: 423153 - DNA, 60 bp, Artificial
  Synthetic oligonucleotide
ggcatctgggtcagggagcctccatagaatggaggcagggaaggtatgtgacacaaatag

SEQ ID NO: 423154 - DNA, 60 bp, Artificial
  Synthetic oligonucleotide
ggcatcttcaaccaccataccaggtgatctcatagagactaggtatgtaatcaactcaaa

SEQ ID NO: 423155 - DNA, 60 bp, Artificial
  Synthetic oligonucleotide
ggcatcttcagtaagtagatcagtttcagttaggtcaattggcggtaatgcaacatcgcg

SEQ ID NO: 423156 - DNA, 60 bp, Artificial
  Synthetic oligonucleotide
ggcatcttcagttagtagatcagtttcagttaggtcaattagtagtaatataacatcgcg

SEQ ID NO: 423157 - DNA, 60 bp, Artificial
  Synthetic oligonucleotide
ggcatcttccctgattggcataattacacaccagggccagggatcaggttcccactgacc

SEQ ID NO: 423158 - DNA, 55 bp, Artificial
  Synthetic oligonucleotide
ggcatcttctcggatcctgatcgacgtcctccgggaacgtcccttgcggacgttt

SEQ ID NO: 423159 - DNA, 56 bp, Artificial
  Synthetic oligonucleotide
ggcatgaaagcgaagttgtgcacatacattatggatgtcgagagctcacgtgtcct

SEQ ID NO: 423160 - DNA, 55 bp, Artificial
  Synthetic oligonucleotide
ggcatgaacccatttgttttgcaggtgatgacatgtgtgctttggcggacctcaa

SEQ ID NO: 423161 - DNA, 55 bp, Artificial
  Synthetic oligonucleotide
ggcatgaacgagggatactaccctctagaggacgcctacacaggtaatctcgagg

SEQ ID NO: 423162 - DNA, 55 bp, Artificial
  Synthetic oligonucleotide
ggcatgaagacgttgttcatgcagtacgtcaacggtattggttcgatctcttcgg

SEQ ID NO: 423163 - DNA, 58 bp, Artificial
  Synthetic oligonucleotide
ggcatgacaattatgcctaccattatatgttttgtgaatcactgaacctttttaacct

SEQ ID NO: 423164 - DNA, 51 bp, Artificial
  Synthetic oligonucleotide
ggcatgacatttttggagagctgatctcccggcacctgagaataaagccca

SEQ ID NO: 423165 - DNA, 57 bp, Artificial
  Synthetic oligonucleotide
ggcatgactaccacaaaattcaccctaagaatactctttgacgagtaccaaagacac

SEQ ID NO: 423166 - DNA, 60 bp, Artificial
  Synthetic oligonucleotide
ggcatgagagcggatgcacctttagctaaggcctcgactatcacgggatttggacgtggg

SEQ ID NO: 423167 - DNA, 55 bp, Artificial
  Synthetic oligonucleotide
ggcatgagcaggttactaatacccatcagcgtgcaaagtgatctagatcagcaaa

SEQ ID NO: 423168 - DNA, 60 bp, Artificial
  Synthetic oligonucleotide
ggcatgaggaattacaatggcatagcttctgtggtttgccatttgaagaacacgtcaggg

SEQ ID NO: 423169 - DNA, 55 bp, Artificial
  Synthetic oligonucleotide
ggcatgagtcgacacatggcacaactagccaaactaaggttgtccacaatgatat

SEQ ID NO: 423170 - DNA, 55 bp, Artificial
  Synthetic oligonucleotide
ggcatgagtgggtcaccagttaccaatgttgatgggcgcgttattggtgttcatc

SEQ ID NO: 423171 - DNA, 54 bp, Artificial
  Synthetic oligonucleotide
ggcatgatactcgcactgatgcggaatctgagaccacgaaactgcataagcagg

SEQ ID NO: 423172 - DNA, 55 bp, Artificial
  Synthetic oligonucleotide
ggcatgatagatgggtggtacggataccatcatgagaattcgcagggatcgggct

SEQ ID NO: 423173 - DNA, 59 bp, Artificial
  Synthetic oligonucleotide
ggcatgatgacttgattcacaagctgaatgaacttttggtgaggtctggcatgaaagtg

SEQ ID NO: 423174 - DNA, 55 bp, Artificial
  Synthetic oligonucleotide
ggcatgatgcagttccagttgcgattgcaactatcattttcctggttcatttagg

SEQ ID NO: 423175 - DNA, 55 bp, Artificial
  Synthetic oligonucleotide
ggcatgatgctccttgggatattaatgacatgtagtgttgcagaagagcggtggg

SEQ ID NO: 423176 - DNA, 55 bp, Artificial
  Synthetic oligonucleotide
ggcatgatggtcctctcgggtcaaagctcaggtacatgtcaagtgggtagcaggg

SEQ ID NO: 423177 - DNA, 55 bp, Artificial
  Synthetic oligonucleotide
ggcatgcaagaggaggcgatacaggagatcgcggggatgaccgcagatgtgttag

SEQ ID NO: 423178 - DNA, 55 bp, Artificial
  Synthetic oligonucleotide
ggcatgcacccccctatataagggatcatattgtagatcttaacaatgtagatga

SEQ ID NO: 423179 - DNA, 55 bp, Artificial
  Synthetic oligonucleotide
ggcatgcaggaggaatggaagtgcagatagtactggctgggaatgcgttcacagc

SEQ ID NO: 423180 - DNA, 60 bp, Artificial
  Synthetic oligonucleotide
ggcatgcccggtaatccaacggacttaaccgtcgtggcaacatatgggcatgagcgtgat

SEQ ID NO: 423181 - DNA, 55 bp, Artificial
  Synthetic oligonucleotide
ggcatgccgacctatcgtttattcgtatacttcaatggagttgagcagttaaacg

SEQ ID NO: 423182 - DNA, 50 bp, Artificial
  Synthetic oligonucleotide
ggcatgccggaccaagtacccgctactttgaccgcgagcagtctcttcgg

SEQ ID NO: 423183 - DNA, 55 bp, Artificial
  Synthetic oligonucleotide
ggcatgccgtggccggcaccgctagaagtcccgtgttgaagtctttctggaattc

SEQ ID NO: 423184 - DNA, 54 bp, Artificial
  Synthetic oligonucleotide
ggcatgccttacattatcagcagccccattcttcaagttctttgggaacttgat

SEQ ID NO: 423185 - DNA, 60 bp, Artificial
  Synthetic oligonucleotide
ggcatgcgactgtgacaggtggtcagtatgcaagtaaggagcaagctctggtgaagaagt

SEQ ID NO: 423186 - DNA, 52 bp, Artificial
  Synthetic oligonucleotide
ggcatgcgctcgaagggaaatatagcgagcgcaaggcccttccagcaagaag

SEQ ID NO: 423187 - DNA, 60 bp, Artificial
  Synthetic oligonucleotide
ggcatgcgctgcatgagttgggtgttacgcacaggcaacagttgccacccttctattccc

SEQ ID NO: 423188 - DNA, 52 bp, Artificial
  Synthetic oligonucleotide
ggcatgcggtctacgcccccgcaatgaaatatgaggctgtcaaagacggcgg

SEQ ID NO: 423189 - DNA, 55 bp, Artificial
  Synthetic oligonucleotide
ggcatgctaaaactcgttgatccaggtaatctaatgtcacagaccgtgatatgga

SEQ ID NO: 423190 - DNA, 58 bp, Artificial
  Synthetic oligonucleotide
ggcatgctcctcattacgtgttagggatattcataggagtaggtttagtccagtttac

SEQ ID NO: 423191 - DNA, 55 bp, Artificial
  Synthetic oligonucleotide
ggcatgctgagaatcggaaaagatcaatctgaacgtatcacacggttgtatcgcg

SEQ ID NO: 423192 - DNA, 55 bp, Artificial
  Synthetic oligonucleotide
ggcatgctgaggagcaaccctctacctctggtactggaaagtactacagagcacc

SEQ ID NO: 423193 - DNA, 55 bp, Artificial
  Synthetic oligonucleotide
ggcatgcttgagacttcatgcggaagtaatgcggatttggaactatcgagcaaga

SEQ ID NO: 423194 - DNA, 60 bp, Artificial
  Synthetic oligonucleotide
ggcatgctttaggcgccgcgcaaatggttgttggacgcacgttccaagaggcgtatcgag

SEQ ID NO: 423195 - DNA, 55 bp, Artificial
  Synthetic oligonucleotide
ggcatggaaaaggaacaagactactaaaagaactacgcctaataatgccaagaag

SEQ ID NO: 423196 - DNA, 54 bp, Artificial
  Synthetic oligonucleotide
ggcatggaaacacaacccaaatctgatctcgtggtgtggactcaacttagttga

SEQ ID NO: 423197 - DNA, 58 bp, Artificial
  Synthetic oligonucleotide
ggcatggaagtaaatcagcacggacttactttaagagtaggctcgggtttgcaaatgc

SEQ ID NO: 423198 - DNA, 55 bp, Artificial
  Synthetic oligonucleotide
ggcatggacagtggtaaatagtatctgcaacaccacaggagtcgaaaagcccaaa

SEQ ID NO: 423199 - DNA, 55 bp, Artificial
  Synthetic oligonucleotide
ggcatggacttagtgagatactttggctgtgtagtatacctctacccgcttaaag

SEQ ID NO: 423200 - DNA, 55 bp, Artificial
  Synthetic oligonucleotide
ggcatggatcgatgccctcattcccttcatcggatggtgctgcaacaatggcacc

SEQ ID NO: 423201 - DNA, 55 bp, Artificial
  Synthetic oligonucleotide
ggcatggcgattgatgtgtgccacggcgccattgcgtagcacggacacatcgagg

SEQ ID NO: 423202 - DNA, 59 bp, Artificial
  Synthetic oligonucleotide
ggcatggcggagcctatcagtaattgcaagacgagttggaagttggtcgaggacctccc

SEQ ID NO: 423203 - DNA, 55 bp, Artificial
  Synthetic oligonucleotide
ggcatggctttgcttcgcccggcgattgtggtggtatcctcaggtgtcaacatgg

SEQ ID NO: 423204 - DNA, 55 bp, Artificial
  Synthetic oligonucleotide
ggcatgggcagtaatagcaattatgttataccaacctgttgcagccgaaaatata

SEQ ID NO: 423205 - DNA, 58 bp, Artificial
  Synthetic oligonucleotide
ggcatgggcccacagcagtaaaggctaagtaaattggtcacagttatcatttcgggtc

SEQ ID NO: 423206 - DNA, 60 bp, Artificial
  Synthetic oligonucleotide
ggcatgggctccccgcagtaaagattgggtcaactgatcacagttagcatctcgcgtcgc

SEQ ID NO: 423207 - DNA, 52 bp, Artificial
  Synthetic oligonucleotide
ggcatgggggggaaagggtgacgaactggcccccttcctccgtggattgttc

SEQ ID NO: 423208 - DNA, 55 bp, Artificial
  Synthetic oligonucleotide
ggcatgggtattgatacgacgaactttcaaacgcagcttaacgcgcaattggcgc

SEQ ID NO: 423209 - DNA, 56 bp, Artificial
  Synthetic oligonucleotide
ggcatgggtgcctgtgtagcgatgaatttatttttccaacccgggccatttacgta

SEQ ID NO: 423210 - DNA, 55 bp, Artificial
  Synthetic oligonucleotide
ggcatgggtggcgaagaacatcagagtgccactgactgaaccccagaaagcgggt

SEQ ID NO: 423211 - DNA, 55 bp, Artificial
  Synthetic oligonucleotide
ggcatgggtgtgtacaggataccggatcgtgcaagtacacgtgtgtcgcaaacgg

SEQ ID NO: 423212 - DNA, 55 bp, Artificial
  Synthetic oligonucleotide
ggcatggtaaagattttagagcctgttaggttgataaaaagctgggtatccaagg

SEQ ID NO: 423213 - DNA, 50 bp, Artificial
  Synthetic oligonucleotide
ggcatggtattcgaacgaatgatgtgtaccagcgaagcgctcaatcagac

SEQ ID NO: 423214 - DNA, 55 bp, Artificial
  Synthetic oligonucleotide
ggcatggtgaagaacccatgcgtggatggagatctggtcaaccccttcgatgggg

SEQ ID NO: 423215 - DNA, 55 bp, Artificial
  Synthetic oligonucleotide
ggcatggtgaggtgtcgggtgctccatcgctcattaaaactgtgctgggccaccc

SEQ ID NO: 423216 - DNA, 60 bp, Artificial
  Synthetic oligonucleotide
ggcatggtgtggtacttcattaatactcccattctgatgccagatggccggatgttccgg

SEQ ID NO: 423217 - DNA, 58 bp, Artificial
  Synthetic oligonucleotide
ggcatggttactattcctattgggggctctcgtaaacttgtatgaatggggtgctatg

SEQ ID NO: 423218 - DNA, 60 bp, Artificial
  Synthetic oligonucleotide
ggcatggttactcactacatctggtctactgaatacaatgatggttcacttttcgccacc

SEQ ID NO: 423219 - DNA, 60 bp, Artificial
  Synthetic oligonucleotide
ggcatgtacactgcactctcaagggccacgacggaaggggggctctgcaacacgatgccg

SEQ ID NO: 423220 - DNA, 55 bp, Artificial
  Synthetic oligonucleotide
ggcatgtactcatgcatctaatcctgtgtatgctaccttgaaaattcgggtctat

SEQ ID NO: 423221 - DNA, 55 bp, Artificial
  Synthetic oligonucleotide
ggcatgtactcatgcctctaaccccgtgtatgcgacattgaaaatacggatctat

SEQ ID NO: 423222 - DNA, 58 bp, Artificial
  Synthetic oligonucleotide
ggcatgtactcatgcctctaaccccgtgtatgctactttgaaagttaggagttacttc

SEQ ID NO: 423223 - DNA, 55 bp, Artificial
  Synthetic oligonucleotide
ggcatgtactcatgcctctaatcctgtgtacgctacgcttaagattcgtatttac

SEQ ID NO: 423224 - DNA, 59 bp, Artificial
  Synthetic oligonucleotide
ggcatgtacttcgattcgagattggttctagctagtagtaattttctggctgctaaccc

SEQ ID NO: 423225 - DNA, 60 bp, Artificial
  Synthetic oligonucleotide
ggcatgtcaatgaacgaggatggccctttcatcttcgcgaggcatgccaacttcaggtac

SEQ ID NO: 423226 - DNA, 60 bp, Artificial
  Synthetic oligonucleotide
ggcatgtcaccaggggagctgtactcatgtatcaagggaagagactggaaccgagttggg

SEQ ID NO: 423227 - DNA, 55 bp, Artificial
  Synthetic oligonucleotide
ggcatgtcctaataacatgatgggcacgttttcagtgcggactgtagggacctcc

SEQ ID NO: 423228 - DNA, 56 bp, Artificial
  Synthetic oligonucleotide
ggcatgtcctgttaatcattaaccagaatggactttggacttaataagttacgtat

SEQ ID NO: 423229 - DNA, 57 bp, Artificial
  Synthetic oligonucleotide
ggcatgtcgtaacaattacggaactagcttcgaactttccttgtgtcaactgggaca

SEQ ID NO: 423230 - DNA, 56 bp, Artificial
  Synthetic oligonucleotide
ggcatgtcgtacaaacgaagagcttggaaaaaccgtcctatgtacacgaagccacg

SEQ ID NO: 423231 - DNA, 60 bp, Artificial
  Synthetic oligonucleotide
ggcatgtgaaggtatgcatcataggtactgtttcaaagttctcacaaggtgacaccctag

SEQ ID NO: 423232 - DNA, 54 bp, Artificial
  Synthetic oligonucleotide
ggcatgtgacaagaggagcggctcttagtgtggagggggccgtttcgggaccat

SEQ ID NO: 423233 - DNA, 53 bp, Artificial
  Synthetic oligonucleotide
ggcatgtggaataggatgtcgttgaacaatagtctgccgacgcgaggcatgaa

SEQ ID NO: 423234 - DNA, 60 bp, Artificial
  Synthetic oligonucleotide
ggcatgtggcatttatagatcttaggcattttcaatgtgctgaagagcaaggcataacag

SEQ ID NO: 423235 - DNA, 55 bp, Artificial
  Synthetic oligonucleotide
ggcatgtggcgggcctaccaaggctggagtagctctagctctatcctggaattcc

SEQ ID NO: 423236 - DNA, 58 bp, Artificial
  Synthetic oligonucleotide
ggcatgtggggtaaaatactcaaggtgtgcgggggcattacaaccataaccgctgcca

SEQ ID NO: 423237 - DNA, 60 bp, Artificial
  Synthetic oligonucleotide
ggcatgtgtatgatcctgacaagtttcagatgtttgacaacagtgaaataggtctttatt

SEQ ID NO: 423238 - DNA, 60 bp, Artificial
  Synthetic oligonucleotide
ggcatgtgtcagggacgcatcagtatcacgttacgcggcatcttagcacgcccttagcaa

SEQ ID NO: 423239 - DNA, 60 bp, Artificial
  Synthetic oligonucleotide
ggcatgtgttacgatgaatatgcaacacgttcagactttaacgacggagaaattacagct

SEQ ID NO: 423240 - DNA, 55 bp, Artificial
  Synthetic oligonucleotide
ggcatgtgttcagaaccacattagataagtacttaagtctgtcagaggcggagag

SEQ ID NO: 423241 - DNA, 55 bp, Artificial
  Synthetic oligonucleotide
ggcatgttaaggtctgtataattggtacagtatctaaattctctcagggtgatac

SEQ ID NO: 423242 - DNA, 60 bp, Artificial
  Synthetic oligonucleotide
ggcatgttatggatggccgatgtcccactccaatggatcgcgtcggccatagtcctggaa

SEQ ID NO: 423243 - DNA, 55 bp, Artificial
  Synthetic oligonucleotide
ggcatgttgactaaatttgagtaccgattgactcgctctggcaactctctctggt

SEQ ID NO: 423244 - DNA, 60 bp, Artificial
  Synthetic oligonucleotide
ggcatgttgagaagattggaagtggtcctcagagcataaaagtggatgaattgcggaagg

SEQ ID NO: 423245 - DNA, 55 bp, Artificial
  Synthetic oligonucleotide
ggcatgttgttttcattagcaactattactaagcccgcctgtacaatgaattcga

SEQ ID NO: 423246 - DNA, 55 bp, Artificial
  Synthetic oligonucleotide
ggcattaaacactccaattgcgtttacccttcctactgatgcaattgatggcgac

SEQ ID NO: 423247 - DNA, 60 bp, Artificial
  Synthetic oligonucleotide
ggcattaaacagctacaggctcgcctgacagcgcttgagaagttcataaaggaccaagcc

SEQ ID NO: 423248 - DNA, 60 bp, Artificial
  Synthetic oligonucleotide
ggcattaaacagctccaagcaagagtcctggctgtggaaagatacctaaaggatcaacag

SEQ ID NO: 423249 - DNA, 55 bp, Artificial
  Synthetic oligonucleotide
ggcattaacacagccaggacatacttatgacataatgacagtgccagctaattgc

SEQ ID NO: 423250 - DNA, 55 bp, Artificial
  Synthetic oligonucleotide
ggcattaacattgtatatgaatttgcccatgttatttggtggtggtgatcccaac

SEQ ID NO: 423251 - DNA, 60 bp, Artificial
  Synthetic oligonucleotide
ggcattaagacatctagcccgagagaaacatccggagttctacaaagactgctgacaccg

SEQ ID NO: 423252 - DNA, 56 bp, Artificial
  Synthetic oligonucleotide
ggcattaagcctacaaagcatactcccataatatacaagtatgatctcaatccatg

SEQ ID NO: 423253 - DNA, 55 bp, Artificial
  Synthetic oligonucleotide
ggcattaaggagtggttcactaatctttggaaaggtacgacaagcgggttatcta

SEQ ID NO: 423254 - DNA, 55 bp, Artificial
  Synthetic oligonucleotide
ggcattaatgccactaatgacactgttggtgaccccagaatgacaaactgctctt

SEQ ID NO: 423255 - DNA, 60 bp, Artificial
  Synthetic oligonucleotide
ggcattacaaacgcgtactcacatttttatgacggatatgccactgtaccactcaagaca

SEQ ID NO: 423256 - DNA, 60 bp, Artificial
  Synthetic oligonucleotide
ggcattacacagaagtgcagcctgacgggggtagagttcaacgtgacatccaccctgacc

SEQ ID NO: 423257 - DNA, 60 bp, Artificial
  Synthetic oligonucleotide
ggcattacagaaagaaaagggcgctgtcactgcttgctgtgcgaacaacacagaaggctc

SEQ ID NO: 423258 - DNA, 55 bp, Artificial
  Synthetic oligonucleotide
ggcattacatgggagaatgtcccaaatatgtgaagaaggctagcctgcgacttgc

SEQ ID NO: 423259 - DNA, 54 bp, Artificial
  Synthetic oligonucleotide
ggcattacccatcgggttggtaaacgtttctgcgttaagtccgtgtatatatta

SEQ ID NO: 423260 - DNA, 55 bp, Artificial
  Synthetic oligonucleotide
ggcattaccgtccactatcgcaatgagtcatctgcgttcggccgggtccttgcct

SEQ ID NO: 423261 - DNA, 60 bp, Artificial
  Synthetic oligonucleotide
ggcattacgaattgatgtcagatggtgttcttccccagagtaacacgaaagtgcagactc

SEQ ID NO: 423262 - DNA, 60 bp, Artificial
  Synthetic oligonucleotide
ggcattacggtataattggggactgtgtcagtattgtacataggtactgtgtgtgtacta

SEQ ID NO: 423263 - DNA, 54 bp, Artificial
  Synthetic oligonucleotide
ggcattacgtctacatatggatcctagtgtgatccccgagtcctccctctacgt

SEQ ID NO: 423264 - DNA, 53 bp, Artificial
  Synthetic oligonucleotide
ggcattactaatcatcaggttaatcagggtttacctggaaatagaatgtagac

SEQ ID NO: 423265 - DNA, 60 bp, Artificial
  Synthetic oligonucleotide
ggcattactggcataccagaaagccgccctcaactggagaaaggatgtcggcttctccat

SEQ ID NO: 423266 - DNA, 57 bp, Artificial
  Synthetic oligonucleotide
ggcattagacgacccaagcacctttatgtatccatgccgacagcacagtctaccatg

SEQ ID NO: 423267 - DNA, 56 bp, Artificial
  Synthetic oligonucleotide
ggcattagcaaccggtaaactgctactggcatactccccacctggtgcatcggtgc

SEQ ID NO: 423268 - DNA, 60 bp, Artificial
  Synthetic oligonucleotide
ggcattagccaacactatagaggtcttcagatcaaatggtctaacagctaatgaatcagg

SEQ ID NO: 423269 - DNA, 55 bp, Artificial
  Synthetic oligonucleotide
ggcattagctggcaactccatcgtatttggaggtgaaagtgtccaggtgggtgag

SEQ ID NO: 423270 - DNA, 55 bp, Artificial
  Synthetic oligonucleotide
ggcattagttggctgacaattggtatttccggaccagacaacggagcagtggctg

SEQ ID NO: 423271 - DNA, 55 bp, Artificial
  Synthetic oligonucleotide
ggcattagttggttaacaattggtatttccggcccagacaatggggcggtggctg

SEQ ID NO: 423272 - DNA, 55 bp, Artificial
  Synthetic oligonucleotide
ggcattatccacccagaccatgtggcattgttcctgctcaaaccgtatgtggccc

SEQ ID NO: 423273 - DNA, 59 bp, Artificial
  Synthetic oligonucleotide
ggcattatcgtaatttggacaatagattcaaaatcctcacgctccaaaaagcggccatc

SEQ ID NO: 423274 - DNA, 60 bp, Artificial
  Synthetic oligonucleotide
ggcattatgctccccaaagctcttaatcagcctgtacaacaatggttctctagagttggc

SEQ ID NO: 423275 - DNA, 55 bp, Artificial
  Synthetic oligonucleotide
ggcattatggaggattccctgccccatgtctaaaattgagctgatgtgagagggc

SEQ ID NO: 423276 - DNA, 58 bp, Artificial
  Synthetic oligonucleotide
ggcattatttacatactctctggaaggcagggattctatataagagggaaactacacg

SEQ ID NO: 423277 - DNA, 60 bp, Artificial
  Synthetic oligonucleotide
ggcattcacagggaacactgaaggcagaacatctgacatgaggactgagatcataagaat

SEQ ID NO: 423278 - DNA, 55 bp, Artificial
  Synthetic oligonucleotide
ggcattcaggggagcaagaatataacaaatttgtggaaggaattagaagcacaga

SEQ ID NO: 423279 - DNA, 55 bp, Artificial
  Synthetic oligonucleotide
ggcattcatgcacgagggatttagacagtccataatgctcgaaactaagtcccac

SEQ ID NO: 423280 - DNA, 55 bp, Artificial
  Synthetic oligonucleotide
ggcattccctgtgaagcacacaagtcctgaatttatccaaatggcgatcgatgag

SEQ ID NO: 423281 - DNA, 55 bp, Artificial
  Synthetic oligonucleotide
ggcattcgactgtgacgggaggaacatacgcgtcgaaggaacaagcattagttaa

SEQ ID NO: 423282 - DNA, 60 bp, Artificial
  Synthetic oligonucleotide
ggcattcgaggctttaaagcgcagctagataaacgcaattgtaaatagccacatctataa

SEQ ID NO: 423283 - DNA, 60 bp, Artificial
  Synthetic oligonucleotide
ggcattcgatgggcctcatacaagtatgcagagaagattcgtgccatgttgccaccagac

SEQ ID NO: 423284 - DNA, 54 bp, Artificial
  Synthetic oligonucleotide
ggcattctgctatatgtgattcaacagttaaatcaagaggaacattctcatata

SEQ ID NO: 423285 - DNA, 55 bp, Artificial
  Synthetic oligonucleotide
ggcattgaaaatttgtcaaggtgaagacgtaaaactgaccattcggcccacgcgc

SEQ ID NO: 423286 - DNA, 55 bp, Artificial
  Synthetic oligonucleotide
ggcattgaaagcattagtagaaccaagaagagtaaagccacccctgcctagtgtt

SEQ ID NO: 423287 - DNA, 54 bp, Artificial
  Synthetic oligonucleotide
ggcattgcaaaccatgctgtttagtatggtccgtaagctagacaaccaagctct

SEQ ID NO: 423288 - DNA, 60 bp, Artificial
  Synthetic oligonucleotide
ggcattgcaaagaattttcagagctattatccacatacctacaagaataagacagggatt

SEQ ID NO: 423289 - DNA, 55 bp, Artificial
  Synthetic oligonucleotide
ggcattgcaactgttgttgacacaaggctataacccactaatggttgggcacgcc

SEQ ID NO: 423290 - DNA, 59 bp, Artificial
  Synthetic oligonucleotide
ggcattgcacaggcctgccttaacaactaagcaaggtgctgttcgggttagtcgtatag

SEQ ID NO: 423291 - DNA, 55 bp, Artificial
  Synthetic oligonucleotide
ggcattgcagtacccttacacgtaccagggtttgctcttgactcacaagagcgga

SEQ ID NO: 423292 - DNA, 60 bp, Artificial
  Synthetic oligonucleotide
ggcattggactcatgggcaagtctgtggaattggtttgacatatcaaactggctgtggta

SEQ ID NO: 423293 - DNA, 55 bp, Artificial
  Synthetic oligonucleotide
ggcattgggctgtttgagccattgacataggcatttgggacaatataatcaaccc

SEQ ID NO: 423294 - DNA, 60 bp, Artificial
  Synthetic oligonucleotide
ggcattggtatgatgcaaggttgaacctaaaaacttcatttcactgctacggtgcctgca

SEQ ID NO: 423295 - DNA, 59 bp, Artificial
  Synthetic oligonucleotide
ggcattggtttcacctcctcacttctttagcaaatgaaagacgcatagcaccactaggt

SEQ ID NO: 423296 - DNA, 55 bp, Artificial
  Synthetic oligonucleotide
ggcattgtccgctaatcaaccagaaaccaccataattagagtaggtgatgtagtt

SEQ ID NO: 423297 - DNA, 57 bp, Artificial
  Synthetic oligonucleotide
ggcattgtggtattatagagcctatccatggtccttcacttgatgctcaaaacttac

SEQ ID NO: 423298 - DNA, 60 bp, Artificial
  Synthetic oligonucleotide
ggcattgtttacggatacgatctttatactaaaatagagcagacggcattagatcaggaa

SEQ ID NO: 423299 - DNA, 55 bp, Artificial
  Synthetic oligonucleotide
ggcatttaaacgaaatcgtttaggcagtggcatatttgtaataagagaggtgtac

SEQ ID NO: 423300 - DNA, 60 bp, Artificial
  Synthetic oligonucleotide
ggcatttaaaggcatcttaaccatataggagtgacgcacctatatgactagatgttcact

SEQ ID NO: 423301 - DNA, 51 bp, Artificial
  Synthetic oligonucleotide
ggcatttaaccccagagaaaggatggttagaaacctatgcaacaggaatag

SEQ ID NO: 423302 - DNA, 59 bp, Artificial
  Synthetic oligonucleotide
ggcatttacacgggggtgcttatgcggtagttaatatttctagcgaatctaataatgca

SEQ ID NO: 423303 - DNA, 60 bp, Artificial
  Synthetic oligonucleotide
ggcatttagagaacttggtgctaagaagagagaatcatcaggacgtgctattccattcaa

SEQ ID NO: 423304 - DNA, 55 bp, Artificial
  Synthetic oligonucleotide
ggcatttagttagggatattactgagagcttgattgcacattctggattgaggag

SEQ ID NO: 423305 - DNA, 58 bp, Artificial
  Synthetic oligonucleotide
ggcatttatacagaaagagttattacgaggcatattgaattggggacattcaaaactc

SEQ ID NO: 423306 - DNA, 60 bp, Artificial
  Synthetic oligonucleotide
ggcatttataggtatgtatctactggtgaacgagcctcagggatgtttgacagtgtagtg

SEQ ID NO: 423307 - DNA, 55 bp, Artificial
  Synthetic oligonucleotide
ggcatttatgatcgtgtgtgtgttgtacctacacattcacatccaggtcaagaag

SEQ ID NO: 423308 - DNA, 50 bp, Artificial
  Synthetic oligonucleotide
ggcatttcaaaacctaaatcatgcgatgttagtgagagtttgtcggcaag

SEQ ID NO: 423309 - DNA, 60 bp, Artificial
  Synthetic oligonucleotide
ggcatttgaagttcagttgatggaacatatgttgattccagaagggataatcaatgatta

SEQ ID NO: 423310 - DNA, 55 bp, Artificial
  Synthetic oligonucleotide
ggcatttgagcggttcacgatagaacaggaacttcaagacaggggtgaggagggt

SEQ ID NO: 423311 - DNA, 50 bp, Artificial
  Synthetic oligonucleotide
ggcatttgagtatgcctatttacatccagagaagagcatggatgaactta

SEQ ID NO: 423312 - DNA, 55 bp, Artificial
  Synthetic oligonucleotide
ggcatttgcactatcctatgtattgatgactgaaagttacgaagagcccgaaact

SEQ ID NO: 423313 - DNA, 60 bp, Artificial
  Synthetic oligonucleotide
ggcatttggcctagtatgcgcaacctgtgaacagattgccgattcccagcatcgatctca

SEQ ID NO: 423314 - DNA, 55 bp, Artificial
  Synthetic oligonucleotide
ggcattttaactactcgaccgattgagttatcgaagcgaccggtatagcagtcag

SEQ ID NO: 423315 - DNA, 56 bp, Artificial
  Synthetic oligonucleotide
ggcattttctgctacttagacgaaatctatttaacaatcgtgtaatattatttagt

SEQ ID NO: 423316 - DNA, 59 bp, Artificial
  Synthetic oligonucleotide
ggcattttgctgacgtatgcaatgggtgctctcaaaactctacggaatggggggctttg

SEQ ID NO: 423317 - DNA, 58 bp, Artificial
  Synthetic oligonucleotide
ggcattttggaggttctatgcctcaatggcagatgcaggcaatggtggacactttgtg

SEQ ID NO: 423318 - DNA, 60 bp, Artificial
  Synthetic oligonucleotide
ggcatttttcgccaatgcttaatcagtgatgggagacgattactgtattccgaatttctc

SEQ ID NO: 423319 - DNA, 56 bp, Artificial
  Synthetic oligonucleotide
ggcatttttgacaccgtcgttctatgtgaggcatacgacactggttgcgcatggta

SEQ ID NO: 423320 - DNA, 52 bp, Artificial
  Synthetic oligonucleotide
ggcattttttgcaatgtcgtaccctggaaacgttcactcactgagggacctg

SEQ ID NO: 423321 - DNA, 55 bp, Artificial
  Synthetic oligonucleotide
ggccaaaacgctccagatggggtgtggcccctcgggaacagcccaatacttccag

SEQ ID NO: 423322 - DNA, 55 bp, Artificial
  Synthetic oligonucleotide
ggccaaaagagccaagaccgccttcatacacgatgaggtccactactggagtctg

SEQ ID NO: 423323 - DNA, 55 bp, Artificial
  Synthetic oligonucleotide
ggccaaaagtagcgatcactgcaatgtagcaagcgatcgtacacgcgtctagaat

SEQ ID NO: 423324 - DNA, 55 bp, Artificial
  Synthetic oligonucleotide
ggccaaaatatgtactaccactacctaggtaggtccgggtacaccgtgcatgtac

SEQ ID NO: 423325 - DNA, 55 bp, Artificial
  Synthetic oligonucleotide
ggccaaaattccactcgcatgatgcctttagacggtttatgctggcgcgcggccc

SEQ ID NO: 423326 - DNA, 56 bp, Artificial
  Synthetic oligonucleotide
ggccaaacaaagaaagcggccaatgtatcccggaggaatgataacactaagacgaa

SEQ ID NO: 423327 - DNA, 58 bp, Artificial
  Synthetic oligonucleotide
ggccaaacacatccggtcttgagactagggttatgcaggcagagcggttcttcaaaac

SEQ ID NO: 423328 - DNA, 55 bp, Artificial
  Synthetic oligonucleotide
ggccaaacacctccggtctcgagaccagagttgctcaggcggaacggtttttcaa

SEQ ID NO: 423329 - DNA, 55 bp, Artificial
  Synthetic oligonucleotide
ggccaaaccttggcatgtttccaacacattgttctatttaggtttggccctatgc

SEQ ID NO: 423330 - DNA, 59 bp, Artificial
  Synthetic oligonucleotide
ggccaaactatacactagcaatgtctccaagtttgaaaggatcatccgtctttatggtg

SEQ ID NO: 423331 - DNA, 60 bp, Artificial
  Synthetic oligonucleotide
ggccaaactcggagaccctgccactcaggaatggctctctcgcatgtgggatagggttga

SEQ ID NO: 423332 - DNA, 50 bp, Artificial
  Synthetic oligonucleotide
ggccaaactgtcgaggagtttgcgatgccgtgtatagcggcggtccgtct

SEQ ID NO: 423333 - DNA, 55 bp, Artificial
  Synthetic oligonucleotide
ggccaaacttgcctggccggaaaaaggattacatgacagaccaaggggagccaat

SEQ ID NO: 423334 - DNA, 55 bp, Artificial
  Synthetic oligonucleotide
ggccaaagacagaccgacaattgacgtgaagatggtcaccatgggagcaagcaat

SEQ ID NO: 423335 - DNA, 55 bp, Artificial
  Synthetic oligonucleotide
ggccaaagaggaactattaaaacacgcagtggcttgcaaataggtggccatgtgc

SEQ ID NO: 423336 - DNA, 51 bp, Artificial
  Synthetic oligonucleotide
ggccaaaggaaccctttagagactatgtagatcggttctttaaaactttaa

SEQ ID NO: 423337 - DNA, 55 bp, Artificial
  Synthetic oligonucleotide
ggccaaaggatctgggacactgtggacttctaggaaccctagtaggacctcccca

SEQ ID NO: 423338 - DNA, 55 bp, Artificial
  Synthetic oligonucleotide
ggccaaagtgcgcgaggtttaccaatcattcactgactccaccacaaagactctt

SEQ ID NO: 423339 - DNA, 53 bp, Artificial
  Synthetic oligonucleotide
ggccaaataagagcttatttggcgatcctacaacgcgagatgtcatgaacgaa

SEQ ID NO: 423340 - DNA, 60 bp, Artificial
  Synthetic oligonucleotide
ggccaaataatgttactgatactttgcacatcacagattctcttaatgcggaccacatgg

SEQ ID NO: 423341 - DNA, 52 bp, Artificial
  Synthetic oligonucleotide
ggccaaatcaatgtcattggaactaattcaaaaggctgcggaaatgtgcagg

SEQ ID NO: 423342 - DNA, 53 bp, Artificial
  Synthetic oligonucleotide
ggccaaatgcccagaaagacaggtgggttttttaggctttggcccatggggaa

SEQ ID NO: 423343 - DNA, 55 bp, Artificial
  Synthetic oligonucleotide
ggccaaatgggtatgctcctgacagggtccaatgccaagagtatggacctgggca

SEQ ID NO: 423344 - DNA, 58 bp, Artificial
  Synthetic oligonucleotide
ggccaaatgtttgggttcagcttaccattgagacaagtcttatttaacgcattgccaa

SEQ ID NO: 423345 - DNA, 55 bp, Artificial
  Synthetic oligonucleotide
ggccaacactatagaagtgttcagatcaaacggcctcatggcaaatgaatctgga

SEQ ID NO: 423346 - DNA, 55 bp, Artificial
  Synthetic oligonucleotide
ggccaacagacttgggacaatgtgggctcctaggaaccctaataggacctcccca

SEQ ID NO: 423347 - DNA, 55 bp, Artificial
  Synthetic oligonucleotide
ggccaacagatacactagggcctctttgcaaaggtatgctgacactttgtccaat

SEQ ID NO: 423348 - DNA, 55 bp, Artificial
  Synthetic oligonucleotide
ggccaacaggatcagtctattttaaagagtactcaaatatcgttgatttttccgt

SEQ ID NO: 423349 - DNA, 57 bp, Artificial
  Synthetic oligonucleotide
ggccaacaggcccatgtaccggaagcccagattatatcgtctgttcaggagccctga

SEQ ID NO: 423350 - DNA, 60 bp, Artificial
  Synthetic oligonucleotide
ggccaacagtgtcaactcaactgctattaaatggcagtctagcaaaagaagaagtaataa

SEQ ID NO: 423351 - DNA, 55 bp, Artificial
  Synthetic oligonucleotide
ggccaaccaaggtaagcgcaaggtctcagggatttatccagtaatatggccggat

SEQ ID NO: 423352 - DNA, 55 bp, Artificial
  Synthetic oligonucleotide
ggccaaccctccccggacaaacacagcttgtagagaagattctcataagggtttc

SEQ ID NO: 423353 - DNA, 60 bp, Artificial
  Synthetic oligonucleotide
ggccaacgataaggtaatgttggactgcgtcctctgtgctgcaacgattgacgctgattc

SEQ ID NO: 423354 - DNA, 55 bp, Artificial
  Synthetic oligonucleotide
ggccaacgcctatctcgataaattcgtgcccgaggacttccatcctttcaccgtg

SEQ ID NO: 423355 - DNA, 56 bp, Artificial
  Synthetic oligonucleotide
ggccaactagagcatattatatctcagatggcatacataactggttccactacagg

SEQ ID NO: 423356 - DNA, 58 bp, Artificial
  Synthetic oligonucleotide
ggccaactcaagtactggcaaaacacaagagaaataccagagcccaatgaggactacc

SEQ ID NO: 423357 - DNA, 60 bp, Artificial
  Synthetic oligonucleotide
ggccaactgggactctgcgggacgtatacataaatgatctcccaagccctatgtcactgg

SEQ ID NO: 423358 - DNA, 55 bp, Artificial
  Synthetic oligonucleotide
ggccaagaaaggttctgatatggcacaaaaattgagagatgattggaagtacaag

SEQ ID NO: 423359 - DNA, 60 bp, Artificial
  Synthetic oligonucleotide
ggccaagagattgtcggatctctgatgccgggccgactgccggtagacggacactgcccg

SEQ ID NO: 423360 - DNA, 55 bp, Artificial
  Synthetic oligonucleotide
ggccaagagggttcagctggcaggttattggattgccatttccaaaccagctccc

SEQ ID NO: 423361 - DNA, 60 bp, Artificial
  Synthetic oligonucleotide
ggccaagcgcaggcccaacgctgggtaccaatgttggctgtccagtactgcgccagacat

SEQ ID NO: 423362 - DNA, 53 bp, Artificial
  Synthetic oligonucleotide
ggccaagctatcaatacttacccatggaacgactactatgtagctaataagcc

SEQ ID NO: 423363 - DNA, 55 bp, Artificial
  Synthetic oligonucleotide
ggccaagctgactccagaagatgccgagttgataatatatcaaatgggagtgtcg

SEQ ID NO: 423364 - DNA, 55 bp, Artificial
  Synthetic oligonucleotide
ggccaagcttactaacgtgaactaccttaggaaggtgatagtacaggggtctcag

SEQ ID NO: 423365 - DNA, 56 bp, Artificial
  Synthetic oligonucleotide
ggccaaggagttgcgatttcattgttccccgtttgggattgtgacttccgaggcac

SEQ ID NO: 423366 - DNA, 57 bp, Artificial
  Synthetic oligonucleotide
ggccaaggatgagcacgatttgaccaaggcactccacactctagctgtctcaggggt

SEQ ID NO: 423367 - DNA, 55 bp, Artificial
  Synthetic oligonucleotide
ggccaaggcaatcgtccaaggaattagactttatgggtgtgttaatcatttgaac

SEQ ID NO: 423368 - DNA, 55 bp, Artificial
  Synthetic oligonucleotide
ggccaagggtatgtaacaggatcagtgggaacaacacctattctcttgacccagg

SEQ ID NO: 423369 - DNA, 55 bp, Artificial
  Synthetic oligonucleotide
ggccaaggtacccgataggagacggtcttgagaattggcagtggtcctcccatgt

SEQ ID NO: 423370 - DNA, 55 bp, Artificial
  Synthetic oligonucleotide
ggccaaggtcttacgataaacggaacagccctacaaactagagtctcaggtgccc

SEQ ID NO: 423371 - DNA, 60 bp, Artificial
  Synthetic oligonucleotide
ggccaagtatgagaatcatactgagaatgcgttaatattgtatatggcatgtacacatgc

SEQ ID NO: 423372 - DNA, 58 bp, Artificial
  Synthetic oligonucleotide
ggccaagtcctaaggattaaaaacacgaatgatgcttatggaaacataatcttcattg

SEQ ID NO: 423373 - DNA, 54 bp, Artificial
  Synthetic oligonucleotide
ggccaagtctgtacaaaatcgggagtccctttatgccgctgttacccattttct

SEQ ID NO: 423374 - DNA, 53 bp, Artificial
  Synthetic oligonucleotide
ggccaagtgactcgggtacgcccagatactaatttcgggttcgacctgtagtt

SEQ ID NO: 423375 - DNA, 58 bp, Artificial
  Synthetic oligonucleotide
ggccaagtgtgtatagaaaaccatcaggtggtgtatttcaatccagtactgaccggtc

SEQ ID NO: 423376 - DNA, 58 bp, Artificial
  Synthetic oligonucleotide
ggccaagtgtttaatatgtttgacaatgagcccagtacggctactgttaagaacgatc

SEQ ID NO: 423377 - DNA, 52 bp, Artificial
  Synthetic oligonucleotide
ggccaagttagcccccccactacgcctatcgctacttcaagcgataggcaat

SEQ ID NO: 423378 - DNA, 60 bp, Artificial
  Synthetic oligonucleotide
ggccaataaccagtgacgcagacgtaccagaagtgagcgcacgccaatacaccttgccta

SEQ ID NO: 423379 - DNA, 55 bp, Artificial
  Synthetic oligonucleotide
ggccaatcaggctctccatttagaagatgtagtgctcgaaagtcaccgttacaaa

SEQ ID NO: 423380 - DNA, 57 bp, Artificial
  Synthetic oligonucleotide
ggccaatggacataccaaatttatcaagagccacataaaaatctgaaaacaggaaag

SEQ ID NO: 423381 - DNA, 55 bp, Artificial
  Synthetic oligonucleotide
ggccaatggactggacaactgcaatatcagaccccaactatcaattggagcgttc

SEQ ID NO: 423382 - DNA, 60 bp, Artificial
  Synthetic oligonucleotide
ggccaatggaggagtcggttcaggtaaagcagctgctacattcacaggcgctgcacatga

SEQ ID NO: 423383 - DNA, 60 bp, Artificial
  Synthetic oligonucleotide
ggccaatggatagaaacagatatacctggagaaggtaatctagcaagatactacagatca

SEQ ID NO: 423384 - DNA, 59 bp, Artificial
  Synthetic oligonucleotide
ggccaatggtgtggtgttatgtcattatgatcgacccagctacggttcacatgctatta

SEQ ID NO: 423385 - DNA, 55 bp, Artificial
  Synthetic oligonucleotide
ggccaatgtcgtaggagacgccatccccgttgcctcaaagacggatgattccgcg

SEQ ID NO: 423386 - DNA, 60 bp, Artificial
  Synthetic oligonucleotide
ggccaattatttcaagcgtttctgcctctcgcaaaggacttgttagctccaatggccaga

SEQ ID NO: 423387 - DNA, 55 bp, Artificial
  Synthetic oligonucleotide
ggccaatttggacaacaaagggatgctgtttaccagcaattttgtcttggcctct

SEQ ID NO: 423388 - DNA, 59 bp, Artificial
  Synthetic oligonucleotide
ggccacaaaccatggaagctgtacgcatggcgtagtggactagcggttagaggagaccc

SEQ ID NO: 423389 - DNA, 55 bp, Artificial
  Synthetic oligonucleotide
ggccacaaagaaagaacattacaatagggaataacacagtaagtggaaactgctc

SEQ ID NO: 423390 - DNA, 55 bp, Artificial
  Synthetic oligonucleotide
ggccacaaatgctgcaaaagggttagagtggctggctaacaagataagcaagttc

SEQ ID NO: 423391 - DNA, 52 bp, Artificial
  Synthetic oligonucleotide
ggccacaacgcaaacgcctttaaaaccgaacaagccaacaactccaacttaa

SEQ ID NO: 423392 - DNA, 60 bp, Artificial
  Synthetic oligonucleotide
ggccacaattctgtgccactccgctggggagtgcggcctgcgtagccccaggaggactgg

SEQ ID NO: 423393 - DNA, 55 bp, Artificial
  Synthetic oligonucleotide
ggccacacaggtaattgtgtggtcccaaagacctggcccacattgtcttgcccgt

SEQ ID NO: 423394 - DNA, 55 bp, Artificial
  Synthetic oligonucleotide
ggccacacagttgtcattgacgaaattcagttgtttccacctggatacattgatc

SEQ ID NO: 423395 - DNA, 55 bp, Artificial
  Synthetic oligonucleotide
ggccacacatcacaagtcacccctagtgacacaatgcaaaccagacatgtgcaca

SEQ ID NO: 423396 - DNA, 55 bp, Artificial
  Synthetic oligonucleotide
ggccacaccaggtggaactacaactacgccctccatagcgaggactacacagagg

SEQ ID NO: 423397 - DNA, 55 bp, Artificial
  Synthetic oligonucleotide
ggccacacgttgcaaaattgtacagacctttcagcactgctagtacagacagtgc

SEQ ID NO: 423398 - DNA, 55 bp, Artificial
  Synthetic oligonucleotide
ggccacagaaatgatagtttatacagtgcagaacatcaaacccgaattgtaccca

SEQ ID NO: 423399 - DNA, 55 bp, Artificial
  Synthetic oligonucleotide
ggccacagaggcctctaactatgcccagtatcgcgttgtccgtgccactattcgg

SEQ ID NO: 423400 - DNA, 60 bp, Artificial
  Synthetic oligonucleotide
ggccacagtatttgacccctgatcatgctagtgcaattgacaagccaacacacccagata

SEQ ID NO: 423401 - DNA, 55 bp, Artificial
  Synthetic oligonucleotide
ggccacataggtcccttaaagtacgaatgagcgatgagtatatcgcacgtcacgc

SEQ ID NO: 423402 - DNA, 56 bp, Artificial
  Synthetic oligonucleotide
ggccacatgcccaagtctttcaaccccgacaagccgacccagctgaggggcccgta

SEQ ID NO: 423403 - DNA, 58 bp, Artificial
  Synthetic oligonucleotide
ggccaccaaagcagactacacccttgacgaagaaagcagagcgaggattaaaaccaga

SEQ ID NO: 423404 - DNA, 56 bp, Artificial
  Synthetic oligonucleotide
ggccaccacggaataacggcaattgtttacatgtgggaagtgcaacctccctagcc

SEQ ID NO: 423405 - DNA, 60 bp, Artificial
  Synthetic oligonucleotide
ggccaccaggaccttatcactgataagattgccatcagatcaggtcaacggacatttgag

SEQ ID NO: 423406 - DNA, 51 bp, Artificial
  Synthetic oligonucleotide
ggccacccaaacatatagtagacttggtgggggacacatggcataagctcc

SEQ ID NO: 423407 - DNA, 55 bp, Artificial
  Synthetic oligonucleotide
ggccacccagctcacaacgagagctagaagggcaactcgggtttctcgtaaggga

SEQ ID NO: 423408 - DNA, 55 bp, Artificial
  Synthetic oligonucleotide
ggccacccatcagatgtgacagcagttcagtttactgttggacggcagtaccgtg

SEQ ID NO: 423409 - DNA, 59 bp, Artificial
  Synthetic oligonucleotide
ggccacccatcagtgattgaggtagacgggcaatgtcctctaaaagagagaaaactcta

SEQ ID NO: 423410 - DNA, 58 bp, Artificial
  Synthetic oligonucleotide
ggccaccccctaaatagttggccagtatacactgtcatcgatccagaaggtactacta

SEQ ID NO: 423411 - DNA, 60 bp, Artificial
  Synthetic oligonucleotide
ggccaccggagcctgcatttgcgagatccccactgatgtctcgtgcgagggcttgggggc

SEQ ID NO: 423412 - DNA, 60 bp, Artificial
  Synthetic oligonucleotide
ggccaccgtgacaaatgcacaaaattatggagttaatttgcctatcacaggatccatgga

SEQ ID NO: 423413 - DNA, 53 bp, Artificial
  Synthetic oligonucleotide
ggccacctggattcctgattgggagtttgtcaacaccccccctctggtaaaat

SEQ ID NO: 423414 - DNA, 56 bp, Artificial
  Synthetic oligonucleotide
ggccacctgggtgggaagtaatttggaagacccagcatccgcttacagaccaccaa

SEQ ID NO: 423415 - DNA, 55 bp, Artificial
  Synthetic oligonucleotide
ggccacctttgcaatgaacattgcccctgctctagtggtagactcatcgtgtctg

SEQ ID NO: 423416 - DNA, 55 bp, Artificial
  Synthetic oligonucleotide
ggccaccttttggcactgaagatactagcttgcatgtatattacccaaattcttc

SEQ ID NO: 423417 - DNA, 56 bp, Artificial
  Synthetic oligonucleotide
ggccacgagacggcacttttaacccagacattattacacaggttaagatcaaggtc

SEQ ID NO: 423418 - DNA, 55 bp, Artificial
  Synthetic oligonucleotide
ggccacgatctggttagagatctagtctcagttatcagggctcgtaattatgtcg

SEQ ID NO: 423419 - DNA, 60 bp, Artificial
  Synthetic oligonucleotide
ggccacgcgactgcaagcggttgctcccatgacaccagttggggttggcatcaacatgga

SEQ ID NO: 423420 - DNA, 55 bp, Artificial
  Synthetic oligonucleotide
ggccacggaagcttctaattatgcccagtaccgggttgcccgtgccacgatccgt

SEQ ID NO: 423421 - DNA, 58 bp, Artificial
  Synthetic oligonucleotide
ggccacggaggcttccaattatgcccagtaccgagttgcccgcgccacaatccgctac

SEQ ID NO: 423422 - DNA, 58 bp, Artificial
  Synthetic oligonucleotide
ggccacgtggttccaatactacacggaggaccaagggcactttcctcttcagcatgct

SEQ ID NO: 423423 - DNA, 55 bp, Artificial
  Synthetic oligonucleotide
ggccactaagtatgttaagaaggttactggcaaactagccgtgcgctttaaggcg

SEQ ID NO: 423424 - DNA, 55 bp, Artificial
  Synthetic oligonucleotide
ggccactacaccaaactcgatctcaacgaatcaagaagagccaaatgagaccagt

SEQ ID NO: 423425 - DNA, 58 bp, Artificial
  Synthetic oligonucleotide
ggccactaccaccaattcccctgacagtaccctgaaggaggagccagaggcaatacaa

SEQ ID NO: 423426 - DNA, 55 bp, Artificial
  Synthetic oligonucleotide
ggccactagtctgttgtattcaatctcaaattcggcaccgtagagttttaggaga

SEQ ID NO: 423427 - DNA, 55 bp, Artificial
  Synthetic oligonucleotide
ggccactcatagaaatcacacatatctagaatcataatcctctcggtcatgaaca

SEQ ID NO: 423428 - DNA, 55 bp, Artificial
  Synthetic oligonucleotide
ggccactcctataggatggacacccgttactggacaattcgatgatatgaaagga

SEQ ID NO: 423429 - DNA, 60 bp, Artificial
  Synthetic oligonucleotide
ggccactcgaatgttcacacatgcaaccctaccttgagtggtaaggatgtgactagacgg

SEQ ID NO: 423430 - DNA, 55 bp, Artificial
  Synthetic oligonucleotide
ggccactctaactacaccgccgttagcatgttcttgagcccgatgttagcctccc

SEQ ID NO: 423431 - DNA, 55 bp, Artificial
  Synthetic oligonucleotide
ggccactctaggagagccattcagtgcaaagtgtcctcctattgaagacagtctt

SEQ ID NO: 423432 - DNA, 55 bp, Artificial
  Synthetic oligonucleotide
ggccactcttggcatactctggtgctttgtggcaagagcttcggtcagccgcatg

SEQ ID NO: 423433 - DNA, 60 bp, Artificial
  Synthetic oligonucleotide
ggccactgattccacaagaatagttaaggaggtgggtgccagagtgtatactatgaagct

SEQ ID NO: 423434 - DNA, 55 bp, Artificial
  Synthetic oligonucleotide
ggccactgccacgtttgttgtactgatctacagtgtagcagcatggcacgtaggg

SEQ ID NO: 423435 - DNA, 58 bp, Artificial
  Synthetic oligonucleotide
ggccactgctccccctgttgccgacccccaggctatggtgggcgaccagatctaaatg

SEQ ID NO: 423436 - DNA, 55 bp, Artificial
  Synthetic oligonucleotide
ggccactggagtaaaagccatcaggaccggtcttgacgaggccaaaccctggtac

SEQ ID NO: 423437 - DNA, 55 bp, Artificial
  Synthetic oligonucleotide
ggccacttgcgtggcaggttcctttaaaatcacagcacttaatgcggtcagtagg

SEQ ID NO: 423438 - DNA, 53 bp, Artificial
  Synthetic oligonucleotide
ggccacttgtctggctacatgcccccctaccccacactagccagtgcccctgg

SEQ ID NO: 423439 - DNA, 55 bp, Artificial
  Synthetic oligonucleotide
ggccagaaacaggagccgaggcggaactaagttctcttcgctaccaagcagctag

SEQ ID NO: 423440 - DNA, 50 bp, Artificial
  Synthetic oligonucleotide
ggccagaaacgtgcagacggtgctagactcgtttgagcgcggaaccgccg

SEQ ID NO: 423441 - DNA, 55 bp, Artificial
  Synthetic oligonucleotide
ggccagaattcatggcacgaattgcgtgtgtctgttgactcgtttctatcaagga

SEQ ID NO: 423442 - DNA, 51 bp, Artificial
  Synthetic oligonucleotide
ggccagacagcagctgtgctatgcggacggtaatttttggtggccgcttga

SEQ ID NO: 423443 - DNA, 55 bp, Artificial
  Synthetic oligonucleotide
ggccagacatcatcttcaacagaattcagatggctaactgtggagtgatcggagg

SEQ ID NO: 423444 - DNA, 60 bp, Artificial
  Synthetic oligonucleotide
ggccagactatgcaaggcaattattgacgatgtcgggacacgattttactggacgtacac

SEQ ID NO: 423445 - DNA, 55 bp, Artificial
  Synthetic oligonucleotide
ggccagagaaacctttgatagcagagatctctaaattaggagaaaatcagtgggg

SEQ ID NO: 423446 - DNA, 55 bp, Artificial
  Synthetic oligonucleotide
ggccagagatacaggtgtctctcaaaatacaatccatttgtatgagagaggtgga

SEQ ID NO: 423447 - DNA, 57 bp, Artificial
  Synthetic oligonucleotide
ggccagagctttgttgttggcacctagaacatcccaccgaaccatgaaaggttttga

SEQ ID NO: 423448 - DNA, 55 bp, Artificial
  Synthetic oligonucleotide
ggccagaggttccttggtgatgtaatcccttaccttgttggggctgattgcactc

SEQ ID NO: 423449 - DNA, 55 bp, Artificial
  Synthetic oligonucleotide
ggccagatcacttcaatttgatagattcattcgtgactgcaaacgcaataattct

SEQ ID NO: 423450 - DNA, 55 bp, Artificial
  Synthetic oligonucleotide
ggccagatcttcagcgctcggggaacatgggtggaagaccctcaatgtccaaata

SEQ ID NO: 423451 - DNA, 55 bp, Artificial
  Synthetic oligonucleotide
ggccagattccacagttgccttgccccttagagctcatgtgggagggccaacgcc

SEQ ID NO: 423452 - DNA, 55 bp, Artificial
  Synthetic oligonucleotide
ggccagattgtacacgggagcggacgtaggccgcataccaacatacgcggttcgg

SEQ ID NO: 423453 - DNA, 55 bp, Artificial
  Synthetic oligonucleotide
ggccagatttgcttaaaactgcacatgaaatagtggacatcactgatagtgtcac

SEQ ID NO: 423454 - DNA, 52 bp, Artificial
  Synthetic oligonucleotide
ggccagattttgagcgaggcgtgtgcgactgtggcgatccggacgagaccag

SEQ ID NO: 423455 - DNA, 58 bp, Artificial
  Synthetic oligonucleotide
ggccagatttttcgaaatttcctactgtgcaacagaaggcgaaacacgaggcgatgtg

SEQ ID NO: 423456 - DNA, 58 bp, Artificial
  Synthetic oligonucleotide
ggccagcatatgactcctgcgggcttcaaccctctcgctcctccgtcttcggttattt

SEQ ID NO: 423457 - DNA, 60 bp, Artificial
  Synthetic oligonucleotide
ggccagcattaagcattaatgaattgagtagtcttgcaaaaggagagaaggctaatgtac

SEQ ID NO: 423458 - DNA, 60 bp, Artificial
  Synthetic oligonucleotide
ggccagcccaacctggctgcatataagcagcttgcttgccgcctgtaagtgagtctctcc

SEQ ID NO: 423459 - DNA, 55 bp, Artificial
  Synthetic oligonucleotide
ggccagcccagtccgttgatgagtgcatgggaagagtatcagtcatgggatcgac

SEQ ID NO: 423460 - DNA, 55 bp, Artificial
  Synthetic oligonucleotide
ggccagccgttgagaacctccttcatcttcgattcaaaactgagtcaaccaccca

SEQ ID NO: 423461 - DNA, 55 bp, Artificial
  Synthetic oligonucleotide
ggccagccttttacatgtgccgtactatgtgcgagctcacatcttgttgcgggct

SEQ ID NO: 423462 - DNA, 53 bp, Artificial
  Synthetic oligonucleotide
ggccagcgagatcgtacaatagcacaataggctggcggtaaatcccaggatat

SEQ ID NO: 423463 - DNA, 55 bp, Artificial
  Synthetic oligonucleotide
ggccagcgcggttaatcagcgtaagttgttgctaatcgtcggtgctcatattgcc

SEQ ID NO: 423464 - DNA, 60 bp, Artificial
  Synthetic oligonucleotide
ggccagctacaactactgcaggctagtgagccggagtctcacagtaaggtcaagcacact

SEQ ID NO: 423465 - DNA, 55 bp, Artificial
  Synthetic oligonucleotide
ggccagctataaacgcgcaattgatagcatgctaagttatgaaccgcgcaaagtc

SEQ ID NO: 423466 - DNA, 55 bp, Artificial
  Synthetic oligonucleotide
ggccagctctgccaatccttccaccacaacatgtcaaaacaagccctttgcgact

SEQ ID NO: 423467 - DNA, 55 bp, Artificial
  Synthetic oligonucleotide
ggccagctgaaccgactcttggccatgaaggctgtcgcaaccgggaggaatccca

SEQ ID NO: 423468 - DNA, 56 bp, Artificial
  Synthetic oligonucleotide
ggccaggacgaaggtatgtgtggaagagtctccctcaaggatgggtattaagtcct

SEQ ID NO: 423469 - DNA, 56 bp, Artificial
  Synthetic oligonucleotide
ggccaggagatcaaaactggcctccaacaaacccagatcaaacaaattttgactgg

SEQ ID NO: 423470 - DNA, 55 bp, Artificial
  Synthetic oligonucleotide
ggccagggatagggaaaactcaccttgctagggaactggccaagaaaatcgcagc

SEQ ID NO: 423471 - DNA, 52 bp, Artificial
  Synthetic oligonucleotide
ggccagggctttcaggaagtccagaattacgtggaagttgccagctgaatac

SEQ ID NO: 423472 - DNA, 55 bp, Artificial
  Synthetic oligonucleotide
ggccaggggatatctgcatggagtaaaaccttttgtgctttgttcggcccatggt

SEQ ID NO: 423473 - DNA, 54 bp, Artificial
  Synthetic oligonucleotide
ggccagggtaaacgggccaccattcctaaggtgtctgggtatcagtacagggtg

SEQ ID NO: 423474 - DNA, 55 bp, Artificial
  Synthetic oligonucleotide
ggccagggttctccacgtccgtttcgcgtggagagcaccctgatctggtggtcaa

SEQ ID NO: 423475 - DNA, 60 bp, Artificial
  Synthetic oligonucleotide
ggccagggtttgatggaggaagatgttctgaatgtgcaaacaaacaattttgccattgag

SEQ ID NO: 423476 - DNA, 54 bp, Artificial
  Synthetic oligonucleotide
ggccaggtgatagtggactagtatttgacaaaagatcgccttttacatttgacc

SEQ ID NO: 423477 - DNA, 60 bp, Artificial
  Synthetic oligonucleotide
ggccaggttctttgctctaatgtcctttcaaatgaggttatactttacaatcacagagca

SEQ ID NO: 423478 - DNA, 55 bp, Artificial
  Synthetic oligonucleotide
ggccaggttgagcatcctcgaggtcttttaatagaatgccgtgtgagtgcctact

SEQ ID NO: 423479 - DNA, 55 bp, Artificial
  Synthetic oligonucleotide
ggccagtacaaatttgtctcaccttacacctcccactgtgcagatacctgaggcc

SEQ ID NO: 423480 - DNA, 58 bp, Artificial
  Synthetic oligonucleotide
ggccagtcaatgacacggaagttacttttctttaagggtctgaattcggcagcatcca

SEQ ID NO: 423481 - DNA, 50 bp, Artificial
  Synthetic oligonucleotide
ggccagtcataggcatgggcactggtactcatagggaaaagagagcagta

SEQ ID NO: 423482 - DNA, 53 bp, Artificial
  Synthetic oligonucleotide
ggccagtggataaagcacttatcttcatgaagtcccaactttgcaccaaattt

SEQ ID NO: 423483 - DNA, 56 bp, Artificial
  Synthetic oligonucleotide
ggccagtggatacgattttgagagggagggatactccctagtcggaattgattctt

SEQ ID NO: 423484 - DNA, 56 bp, Artificial
  Synthetic oligonucleotide
ggccagtggatatgacttcgaaagggagggatactccctagtcggaattgatcctt

SEQ ID NO: 423485 - DNA, 59 bp, Artificial
  Synthetic oligonucleotide
ggccagtttagtatggcctgccttagcactgaggaatgtccatgacatgaaaattgagt

SEQ ID NO: 423486 - DNA, 55 bp, Artificial
  Synthetic oligonucleotide
ggccataaaacaccagtgttcaacttaactttaaatgagggcggacaattgatgt

SEQ ID NO: 423487 - DNA, 55 bp, Artificial
  Synthetic oligonucleotide
ggccataatatagcaacgtcgacctatattagctaccctagtatgagtaagaccg

SEQ ID NO: 423488 - DNA, 55 bp, Artificial
  Synthetic oligonucleotide
ggccataatcaagaaatacacatcgggaaggcaagaaaagaaccccgcactcagg

SEQ ID NO: 423489 - DNA, 55 bp, Artificial
  Synthetic oligonucleotide
ggccataatcaagaaatacacatcgggacgacaggagaagaaccctgccctcagg

SEQ ID NO: 423490 - DNA, 53 bp, Artificial
  Synthetic oligonucleotide
ggccatacatgggcaggtagattgcagtccaggtatctggcagctagattgta

SEQ ID NO: 423491 - DNA, 58 bp, Artificial
  Synthetic oligonucleotide
ggccatactggctatacttctatggtaaaagcgaacaagacattaaaaaagaggcaca

SEQ ID NO: 423492 - DNA, 55 bp, Artificial
  Synthetic oligonucleotide
ggccatactggtatcattgaaagctggtcagatactaccgttacagtcttagaac

SEQ ID NO: 423493 - DNA, 55 bp, Artificial
  Synthetic oligonucleotide
ggccatacttgtcaatgaacctattcacatctgggtcaccaggaacagcctctgt

SEQ ID NO: 423494 - DNA, 55 bp, Artificial
  Synthetic oligonucleotide
ggccatagcactgagtatcctcaacctactaataggaatatccaatgtggggctg

SEQ ID NO: 423495 - DNA, 55 bp, Artificial
  Synthetic oligonucleotide
ggccataggaaacgaattacttattcgcaagaggtacttactgaatttagaaggc

SEQ ID NO: 423496 - DNA, 55 bp, Artificial
  Synthetic oligonucleotide
ggccatagtgttaagcttatagttgggcgagttagtcttggccatgcatacgggg

SEQ ID NO: 423497 - DNA, 60 bp, Artificial
  Synthetic oligonucleotide
ggccatataacgggtcaccgtatggcatgggatatgatgatgaactggtcccctacgacg

SEQ ID NO: 423498 - DNA, 60 bp, Artificial
  Synthetic oligonucleotide
ggccatatagaagaatgctcatgctaccccaatgagggtaaagtggaatgtgtttgtagg

SEQ ID NO: 423499 - DNA, 55 bp, Artificial
  Synthetic oligonucleotide
ggccatatctgggagtctgccaaccccttctgcggggaggggactttgtataccc

SEQ ID NO: 423500 - DNA, 56 bp, Artificial
  Synthetic oligonucleotide
ggccatatgactcttagtgatttcacaaggttccccaatctgaaagaagccatatc

SEQ ID NO: 423501 - DNA, 58 bp, Artificial
  Synthetic oligonucleotide
ggccatattatgtttcagagaaggtcaaggaacattcttcagcggaagaggaaattgg

SEQ ID NO: 423502 - DNA, 53 bp, Artificial
  Synthetic oligonucleotide
ggccatattggttatatttctatggaaaaagcgaacaggacgtaaaaaaagaa

SEQ ID NO: 423503 - DNA, 55 bp, Artificial
  Synthetic oligonucleotide
ggccatcaagtgggagtacgtcatcctcttgttcctcctgcttgcagacgcgcgc

SEQ ID NO: 423504 - DNA, 60 bp, Artificial
  Synthetic oligonucleotide
ggccatcactcgtgatgccgcacttgctgtcatccgagacattagctccttgcgtagggt

SEQ ID NO: 423505 - DNA, 55 bp, Artificial
  Synthetic oligonucleotide
ggccatcagaaggaagcctggacaggtcccttgtttctaaggtatggcacaaggt

SEQ ID NO: 423506 - DNA, 54 bp, Artificial
  Synthetic oligonucleotide
ggccatcagacaaatcaacaggagactgcaataatccaatcactgggagtccgg

SEQ ID NO: 423507 - DNA, 60 bp, Artificial
  Synthetic oligonucleotide
ggccatcagatagctgagatcatgaataggctacgtctcttttttacggatgttctcaaa

SEQ ID NO: 423508 - DNA, 55 bp, Artificial
  Synthetic oligonucleotide
ggccatcagatgtccctacacagaccctaagcttgtgggcagcacagaaaacacc

SEQ ID NO: 423509 - DNA, 55 bp, Artificial
  Synthetic oligonucleotide
ggccatcataaaatgccatagctggagtaaactatgcagcctgtagctccacctg

SEQ ID NO: 423510 - DNA, 55 bp, Artificial
  Synthetic oligonucleotide
ggccatccagacatggagctcaatagttgtcattttaatcaaggacaatgtttgg

SEQ ID NO: 423511 - DNA, 59 bp, Artificial
  Synthetic oligonucleotide
ggccatccagatgacgaggtaattggttgtagttctatactactagaagattctgttgg

SEQ ID NO: 423512 - DNA, 55 bp, Artificial
  Synthetic oligonucleotide
ggccatccatggaaggagacgttcattcagtgaaccactgactgttgtgggagtc

SEQ ID NO: 423513 - DNA, 55 bp, Artificial
  Synthetic oligonucleotide
ggccatcccgtgtcacgaggatcagcaaagctccgatggatagtggagaaagggt

SEQ ID NO: 423514 - DNA, 55 bp, Artificial
  Synthetic oligonucleotide
ggccatccctatatagattatagaaagggtctgtcgaaactatatgatcaggtcc

SEQ ID NO: 423515 - DNA, 60 bp, Artificial
  Synthetic oligonucleotide
ggccatccctccagatccagacactgcagcatgctgggtccaccatgataacagtcccct

SEQ ID NO: 423516 - DNA, 60 bp, Artificial
  Synthetic oligonucleotide
ggccatccgcatcatatgcggaaaaacgactgctggaacggggagtccttcacaggcaag

SEQ ID NO: 423517 - DNA, 57 bp, Artificial
  Synthetic oligonucleotide
ggccatccgctataatattaccggatggccgcgcccgccccccctctctccacgcgc

SEQ ID NO: 423518 - DNA, 53 bp, Artificial
  Synthetic oligonucleotide
ggccatccgctataatattaccggatggccgcgcgaaatttcccccctttttc

SEQ ID NO: 423519 - DNA, 55 bp, Artificial
  Synthetic oligonucleotide
ggccatccggtgaagtataaacatattatttacctgtttgtcggattcaccccgc

SEQ ID NO: 423520 - DNA, 55 bp, Artificial
  Synthetic oligonucleotide
ggccatccgttataatattaccggatggccgaccgcttaccttatctatccgtac

SEQ ID NO: 423521 - DNA, 55 bp, Artificial
  Synthetic oligonucleotide
ggccatcctatcagtgtcacctaaagagggtcttagagagggcctatggagttcc

SEQ ID NO: 423522 - DNA, 55 bp, Artificial
  Synthetic oligonucleotide
ggccatcctcacgctaaggattattcagagctccagggtcgtggatcagttccgt

SEQ ID NO: 423523 - DNA, 55 bp, Artificial
  Synthetic oligonucleotide
ggccatccttcacctgaaagacagactttgtagaggatgttttcatatgggtttc

SEQ ID NO: 423524 - DNA, 60 bp, Artificial
  Synthetic oligonucleotide
ggccatcgcaggctttattgaaggaggatggactggaatgatagatggatggtatggcta

SEQ ID NO: 423525 - DNA, 55 bp, Artificial
  Synthetic oligonucleotide
ggccatcgttcctaaatgacaaagaggccaacccagttgatgcacccactgaacc

SEQ ID NO: 423526 - DNA, 60 bp, Artificial
  Synthetic oligonucleotide
ggccatctcaacaacaactgacgatagaaggctttgatagtcatactgtgttattgtctc

SEQ ID NO: 423527 - DNA, 60 bp, Artificial
  Synthetic oligonucleotide
ggccatcttggatcacaaatccccgctgtttctggaggagggtgcaccaaatgtgcacat

SEQ ID NO: 423528 - DNA, 55 bp, Artificial
  Synthetic oligonucleotide
ggccatgactatactccaagctgttaccacatttgcagcagtcgcaggagtagtg

SEQ ID NO: 423529 - DNA, 55 bp, Artificial
  Synthetic oligonucleotide
ggccatgatggtatttctcatgtcctgtaggatggagaagaatgccccaagctca

SEQ ID NO: 423530 - DNA, 55 bp, Artificial
  Synthetic oligonucleotide
ggccatgcaagaatgtcagctccgtccaatgcacacatggaatcaggccagtagt

SEQ ID NO: 423531 - DNA, 55 bp, Artificial
  Synthetic oligonucleotide
ggccatgcattcccacggagtgcgtattttacggggtactattatgttcgacggt

SEQ ID NO: 423532 - DNA, 55 bp, Artificial
  Synthetic oligonucleotide
ggccatgcctttcactttgacgctcggttaaatataactccacttcaggcggcag

SEQ ID NO: 423533 - DNA, 55 bp, Artificial
  Synthetic oligonucleotide
ggccatggcggacctatcattggcccttatggcaaatggacaacatgaggcgatg

SEQ ID NO: 423534 - DNA, 55 bp, Artificial
  Synthetic oligonucleotide
ggccatggttgagaaaggccaggacggctctgcggttctggagctcgacttgtgc

SEQ ID NO: 423535 - DNA, 52 bp, Artificial
  Synthetic oligonucleotide
ggccatgtcatttccagtacccctaccgctgggtcccacagttttgaggaaa

SEQ ID NO: 423536 - DNA, 60 bp, Artificial
  Synthetic oligonucleotide
ggccatgtggcgggttaattctcgctcaatcaacaatgtgactccctttacttacagtga

SEQ ID NO: 423537 - DNA, 59 bp, Artificial
  Synthetic oligonucleotide
ggccatgtgttgaggcgactgctccatcaccttaagcttgtaatgtctattggtggata

SEQ ID NO: 423538 - DNA, 60 bp, Artificial
  Synthetic oligonucleotide
ggccatgttgagaccgctccagtatgccaagcgtgagcgtctgcttggacagaggaatct

SEQ ID NO: 423539 - DNA, 60 bp, Artificial
  Synthetic oligonucleotide
ggccattacgtgatttatgacacaggagttgatagcagtgctgatttggttattccttat

SEQ ID NO: 423540 - DNA, 55 bp, Artificial
  Synthetic oligonucleotide
ggccattactattaaacctgaggctactattaaccaagattcttatggtggtgcc

SEQ ID NO: 423541 - DNA, 55 bp, Artificial
  Synthetic oligonucleotide
ggccattatgccaacgaatgtcctaatcgacaagtctcggagaaggctcacatcc

SEQ ID NO: 423542 - DNA, 55 bp, Artificial
  Synthetic oligonucleotide
ggccattatgtgcgcaactactggcatgcactttggtaagtgcacacttcacttc

SEQ ID NO: 423543 - DNA, 57 bp, Artificial
  Synthetic oligonucleotide
ggccattcatttgatgaagcctctcgtgtcgaataacttggaactatatttactatt

SEQ ID NO: 423544 - DNA, 55 bp, Artificial
  Synthetic oligonucleotide
ggccattcccaccaggaggccgctactgagcggaacagtgccactgaaaccatgc

SEQ ID NO: 423545 - DNA, 60 bp, Artificial
  Synthetic oligonucleotide
ggccattgaagcagctagcatgaatgacacagcaaatttcagaagagtgtttggcaactt

SEQ ID NO: 423546 - DNA, 59 bp, Artificial
  Synthetic oligonucleotide
ggccattgacataggaggcacacgaatgtgtcctttcaccgtattgttctttggagcac

SEQ ID NO: 423547 - DNA, 54 bp, Artificial
  Synthetic oligonucleotide
ggccattggccgaatcgtgatgagcgctaggcgattcatcggaggtaaggactc

SEQ ID NO: 423548 - DNA, 55 bp, Artificial
  Synthetic oligonucleotide
ggccattggctgccactttgttctcttgctcacggcagccccggagccatcacct

SEQ ID NO: 423549 - DNA, 55 bp, Artificial
  Synthetic oligonucleotide
ggccattgtaaacaccatatttgtctgtggtaacgggtatgcagtaggacctgtg

SEQ ID NO: 423550 - DNA, 55 bp, Artificial
  Synthetic oligonucleotide
ggccattttagctggactgagcggacgaacgtcgcttgcgcacctcgcgtgatcg

SEQ ID NO: 423551 - DNA, 55 bp, Artificial
  Synthetic oligonucleotide
ggcccaaacacagcataggagtaactgcatcatgctcccagcagggaagaagcag

SEQ ID NO: 423552 - DNA, 51 bp, Artificial
  Synthetic oligonucleotide
ggcccaaacacagcgtaaacaaaggggtaactgcatcatgctctcataaag

SEQ ID NO: 423553 - DNA, 55 bp, Artificial
  Synthetic oligonucleotide
ggcccaaacaccccagaatgccctgatgatcaaagagcatggaatatctgggaag

SEQ ID NO: 423554 - DNA, 52 bp, Artificial
  Synthetic oligonucleotide
ggcccaaaccaggcccaattgagttggtgaggaaagtttccgttacttccca

SEQ ID NO: 423555 - DNA, 55 bp, Artificial
  Synthetic oligonucleotide
ggcccaaacggcctcttaaagacagcaggagggtacaaattcccctggcatctga

SEQ ID NO: 423556 - DNA, 52 bp, Artificial
  Synthetic oligonucleotide
ggcccaaactttaactcagtacactgaagtcaaggctagtaggcaactagct

SEQ ID NO: 423557 - DNA, 55 bp, Artificial
  Synthetic oligonucleotide
ggcccaaagagagggacatctgggccaagttcagcaactcatcagcacgaaggaa

SEQ ID NO: 423558 - DNA, 55 bp, Artificial
  Synthetic oligonucleotide
ggcccaaattgctacccttgagcattcctgcccaacaacagaacaacaagaaacc

SEQ ID NO: 423559 - DNA, 55 bp, Artificial
  Synthetic oligonucleotide
ggcccaacagcatttattgcaactatcagtttggggcattaaacagcttcaagcc

SEQ ID NO: 423560 - DNA, 49 bp, Artificial
  Synthetic oligonucleotide
ggcccaaccttgcggttcccaaggcttaagtaagtttttggttacaaac

SEQ ID NO: 423561 - DNA, 59 bp, Artificial
  Synthetic oligonucleotide
ggcccaacgctgttcaagagccctccgaagaatttgttgagcgtgtgcgctatgtggtt

SEQ ID NO: 423562 - DNA, 55 bp, Artificial
  Synthetic oligonucleotide
ggcccaagagcatttcctactttccagtgcattcaggggttaaacccaagtatcc

SEQ ID NO: 423563 - DNA, 55 bp, Artificial
  Synthetic oligonucleotide
ggcccaagctagtatgcttcctggggaatcagtttcacatacaccaacgtctcag

SEQ ID NO: 423564 - DNA, 54 bp, Artificial
  Synthetic oligonucleotide
ggcccaagggagggccatcgcccacaagtggcgtaaataccagaaccccatcgg

SEQ ID NO: 423565 - DNA, 57 bp, Artificial
  Synthetic oligonucleotide
ggcccaagggttgagtagcatccagagggagaaaccacacggagtagaacagagaaa

SEQ ID NO: 423566 - DNA, 53 bp, Artificial
  Synthetic oligonucleotide
ggcccaaggtttgtgcaaaggttttagagtttaagaactgcaaaactacatta

SEQ ID NO: 423567 - DNA, 56 bp, Artificial
  Synthetic oligonucleotide
ggcccaatagatgtagtcaataaaccacccccacctgcaatactagacttacttaa

SEQ ID NO: 423568 - DNA, 60 bp, Artificial
  Synthetic oligonucleotide
ggcccaatcacacaccagataattgtcaacaaccaaaactggtcgggatactcaggagca

SEQ ID NO: 423569 - DNA, 55 bp, Artificial
  Synthetic oligonucleotide
ggcccaatcatgaaacaaacagaggtacgacggcagcatgcccttatgctggagc

SEQ ID NO: 423570 - DNA, 55 bp, Artificial
  Synthetic oligonucleotide
ggcccaatcatgaaacaaccaaaggtgtaacggcagcatgcccctatgctggagc

SEQ ID NO: 423571 - DNA, 59 bp, Artificial
  Synthetic oligonucleotide
ggcccaatcatgaagcgaacagaggtgtaacggcagcatgttcttatgctggagcaaac

SEQ ID NO: 423572 - DNA, 55 bp, Artificial
  Synthetic oligonucleotide
ggcccaatcatgacacgaacagaggtgtgacggcggcatgtcctcatgctggagc

SEQ ID NO: 423573 - DNA, 58 bp, Artificial
  Synthetic oligonucleotide
ggcccaatcccagccaaagtagatggttacgagtggcagacatcaacaaaccccagcg

SEQ ID NO: 423574 - DNA, 55 bp, Artificial
  Synthetic oligonucleotide
ggcccaatgctgccttatgatattgaaaatttaatgcgcatggtgttgaaaccag

SEQ ID NO: 423575 - DNA, 56 bp, Artificial
  Synthetic oligonucleotide
ggcccaattgacgaccccagatatgctgactggggttacgttttgactggggttgc

SEQ ID NO: 423576 - DNA, 55 bp, Artificial
  Synthetic oligonucleotide
ggcccaatttgaacgtatgccacgtttctccagtgctattgcagtgcgggttcct

SEQ ID NO: 423577 - DNA, 50 bp, Artificial
  Synthetic oligonucleotide
ggcccacaagatagaagaacgggtagagattgtcatcgggtcaagacact

SEQ ID NO: 423578 - DNA, 55 bp, Artificial
  Synthetic oligonucleotide
ggcccacacatgatgtgggtgttggtgaggccgttgatatgcaaactacgcctgg

SEQ ID NO: 423579 - DNA, 54 bp, Artificial
  Synthetic oligonucleotide
ggcccacccaagaggccaacaaccagggaatcggcccaggaaccgattgaagag

SEQ ID NO: 423580 - DNA, 57 bp, Artificial
  Synthetic oligonucleotide
ggcccacccctaataacaggaaagacagcaaaaacctttgcagcacatagtaatgac

SEQ ID NO: 423581 - DNA, 55 bp, Artificial
  Synthetic oligonucleotide
ggcccacccttcctgctcttactattactgaagacacagcacgtacggcgaattt

SEQ ID NO: 423582 - DNA, 56 bp, Artificial
  Synthetic oligonucleotide
ggcccaccgggcgctagcacactggtatcgcggtacctttgtgcgcctgttttatt

SEQ ID NO: 423583 - DNA, 55 bp, Artificial
  Synthetic oligonucleotide
ggcccacgtacagaaaaccgaggatataccgaatgtatcgcagcccagatgtccc

SEQ ID NO: 423584 - DNA, 55 bp, Artificial
  Synthetic oligonucleotide
ggcccacgtggcgctagcacaccggtattccggtacccttgtgcgcctgttttat

SEQ ID NO: 423585 - DNA, 60 bp, Artificial
  Synthetic oligonucleotide
ggcccactacaatcagaggtcaattctcaaacatgtcgctgtccctattggacttgtatt

SEQ ID NO: 423586 - DNA, 60 bp, Artificial
  Synthetic oligonucleotide
ggcccactcacagtcaatgagaaacgtagactgcaattaattatgcctgctaggttctat

SEQ ID NO: 423587 - DNA, 59 bp, Artificial
  Synthetic oligonucleotide
ggcccactcactaaaaatgaagtgagacgattgaaattaattatgccagcaagatttta

SEQ ID NO: 423588 - DNA, 58 bp, Artificial
  Synthetic oligonucleotide
ggcccactgggcgctagcactctggtattacggtacctttgtgcgcctgttttatata

SEQ ID NO: 423589 - DNA, 57 bp, Artificial
  Synthetic oligonucleotide
ggcccacttgagcaaggtgggttaatatttaaacaatggtgtacaacaacatgtcaa

SEQ ID NO: 423590 - DNA, 57 bp, Artificial
  Synthetic oligonucleotide
ggcccacttttgtgggtcagtcttggatgggaagtccactgtgaattgccgtctaaa

SEQ ID NO: 423591 - DNA, 55 bp, Artificial
  Synthetic oligonucleotide
ggcccagaaccaaagtggagcagggtaagtctagactgattgaagcatccagtct

SEQ ID NO: 423592 - DNA, 52 bp, Artificial
  Synthetic oligonucleotide
ggcccagacaccacaaccaaccaagtccttttagaactacccgtgggaccag

SEQ ID NO: 423593 - DNA, 60 bp, Artificial
  Synthetic oligonucleotide
ggcccagactttgtcatggcccataattcagccatttctactttcatcagctatcccagc

SEQ ID NO: 423594 - DNA, 55 bp, Artificial
  Synthetic oligonucleotide
ggcccagattcccggatgcgactaatgggcatgctctacaccccacttcgcgcca

SEQ ID NO: 423595 - DNA, 55 bp, Artificial
  Synthetic oligonucleotide
ggcccagcagtcagtaaatatggtacaagggccatcaaaagggagatcaatgatt

SEQ ID NO: 423596 - DNA, 55 bp, Artificial
  Synthetic oligonucleotide
ggcccaggagcaaacacaacatgaggccaggctacaaggtgcaagtttcaggacc

SEQ ID NO: 423597 - DNA, 60 bp, Artificial
  Synthetic oligonucleotide
ggcccaggatagagcttcagcgcttgccactgatgtctctaattccgaaaccaaaaattg

SEQ ID NO: 423598 - DNA, 55 bp, Artificial
  Synthetic oligonucleotide
ggcccaggatctccctgacacttactctaatgataccccgttcctcaatccaaac

SEQ ID NO: 423599 - DNA, 51 bp, Artificial
  Synthetic oligonucleotide
ggcccaggtggggtgcccatagggaggtatgtctcttccgtcctgggttgg

SEQ ID NO: 423600 - DNA, 55 bp, Artificial
  Synthetic oligonucleotide
ggcccaggtttcttttaatatccttgggcaaggtgacaaccagacgatcattgta

SEQ ID NO: 423601 - DNA, 51 bp, Artificial
  Synthetic oligonucleotide
ggcccagtagaagaaatgatggggttgttcaatatatgagactagttcagg

SEQ ID NO: 423602 - DNA, 57 bp, Artificial
  Synthetic oligonucleotide
ggcccataattcagcgatatcaacgtttattaatttccctagtcttggtaagactga

SEQ ID NO: 423603 - DNA, 53 bp, Artificial
  Synthetic oligonucleotide
ggcccatacaaggaacctaaagaatgacccttattgctaaacccgctgtaccc

SEQ ID NO: 423604 - DNA, 60 bp, Artificial
  Synthetic oligonucleotide
ggcccatactggatagaatagaaatgctcaatattgacaatactaagttaactagcctac

SEQ ID NO: 423605 - DNA, 55 bp, Artificial
  Synthetic oligonucleotide
ggcccatccgaagataggccttattgctggcactacccgcctagaccgtgcggga

SEQ ID NO: 423606 - DNA, 60 bp, Artificial
  Synthetic oligonucleotide
ggcccatctatcggaagcccaggatgtacagaatgtatcgaagccctgatgtgcccaagg

SEQ ID NO: 423607 - DNA, 58 bp, Artificial
  Synthetic oligonucleotide
ggcccatgtaaggtccagtcgtttgaatctagacacgatgtagtccatatagggaagg

SEQ ID NO: 423608 - DNA, 60 bp, Artificial
  Synthetic oligonucleotide
ggcccatgtaaggttcaatcttttgatgctaagaacgatattggtcacatgggcaaggtc

SEQ ID NO: 423609 - DNA, 59 bp, Artificial
  Synthetic oligonucleotide
ggcccatgtacaggaagcccaggatatatcggatgtacaggacccccgatgttccaaga

SEQ ID NO: 423610 - DNA, 55 bp, Artificial
  Synthetic oligonucleotide
ggcccatgtcggtaaggtcctttgtgtttctgatgtcacaaggggtacgggaata

SEQ ID NO: 423611 - DNA, 55 bp, Artificial
  Synthetic oligonucleotide
ggcccatgtgagatgaatgatcatattaaggtagcaatttcccactattcagcac

SEQ ID NO: 423612 - DNA, 55 bp, Artificial
  Synthetic oligonucleotide
ggcccatgttcagtactaaagaaggttacataagggtaagcagacttggcaatag

SEQ ID NO: 423613 - DNA, 53 bp, Artificial
  Synthetic oligonucleotide
ggcccattggggagtctcccaagggagtggaagaaggttccattggaaaggtc

SEQ ID NO: 423614 - DNA, 55 bp, Artificial
  Synthetic oligonucleotide
ggcccattgtgtcaggtgaaggacgtggctaaattttgaccatgctgctgggttt

SEQ ID NO: 423615 - DNA, 50 bp, Artificial
  Synthetic oligonucleotide
ggcccatttgcaacctatgcgtaccccaattgttaattggcgtcctgtgt

SEQ ID NO: 423616 - DNA, 53 bp, Artificial
  Synthetic oligonucleotide
ggcccatttgggcccttgattaggggttaagttaccattctctcgaagttcaa

SEQ ID NO: 423617 - DNA, 55 bp, Artificial
  Synthetic oligonucleotide
ggcccattttaaggtgtgtaaactcacatcaaggtttcaggacaatctaaggaag

SEQ ID NO: 423618 - DNA, 55 bp, Artificial
  Synthetic oligonucleotide
ggccccaacttgataaggatcaatgcgcctactgcaaagaaaagggacactgggc

SEQ ID NO: 423619 - DNA, 55 bp, Artificial
  Synthetic oligonucleotide
ggccccaagacggaaggggtattcacaatggtcatagttgttgaccgcaaaccgc

SEQ ID NO: 423620 - DNA, 59 bp, Artificial
  Synthetic oligonucleotide
ggccccaagatgtcaaggacgttgatcttatgttccagtgtgcggccgcacgtaccgga

SEQ ID NO: 423621 - DNA, 55 bp, Artificial
  Synthetic oligonucleotide
ggccccaagcctacccttcaggacattgtgcttacagaaactgctgatcctgtaa

SEQ ID NO: 423622 - DNA, 55 bp, Artificial
  Synthetic oligonucleotide
ggccccaatctgcggattaaaataaaatctgagatcgccactctcatttatcgca

SEQ ID NO: 423623 - DNA, 55 bp, Artificial
  Synthetic oligonucleotide
ggccccaattattgaagccgaatcacctgggtctaagatggcagtgcccaacctg

SEQ ID NO: 423624 - DNA, 55 bp, Artificial
  Synthetic oligonucleotide
ggccccacaagccgatcttaaagtgaattgttacgcgcgaaatatccttgcttcg

SEQ ID NO: 423625 - DNA, 57 bp, Artificial
  Synthetic oligonucleotide
ggccccacacctctcctgtaccgcttgggctctgttaccaacgaggtcaccctcaca

SEQ ID NO: 423626 - DNA, 60 bp, Artificial
  Synthetic oligonucleotide
ggccccacacggagataatgacattgctttataaggaccaatcaggttgccgtgcttggc

SEQ ID NO: 423627 - DNA, 60 bp, Artificial
  Synthetic oligonucleotide
ggccccacatggtgcccaccagctgtgatgcactttgtaaaggtaatacgtggaacgctc

SEQ ID NO: 423628 - DNA, 57 bp, Artificial
  Synthetic oligonucleotide
ggccccactgttcctaaacgtttgcgcttcggcacagaacaaggcaatcgcaaggaa

SEQ ID NO: 423629 - DNA, 55 bp, Artificial
  Synthetic oligonucleotide
ggccccagacaaccactacccctacttctgttgatatgaattctatcacctctac

SEQ ID NO: 423630 - DNA, 57 bp, Artificial
  Synthetic oligonucleotide
ggccccagagggagggggactatgaattgatgatgagggttaccgcagcccgtactg

SEQ ID NO: 423631 - DNA, 60 bp, Artificial
  Synthetic oligonucleotide
ggccccatcatatttgacaaacactctaagtataggtaccactatgatgctgactactct

SEQ ID NO: 423632 - DNA, 57 bp, Artificial
  Synthetic oligonucleotide
ggccccatccttggtagattcatacatcaatatcggtgcccggtggtccttggaccc

SEQ ID NO: 423633 - DNA, 58 bp, Artificial
  Synthetic oligonucleotide
ggccccatcttaatggtgggtctcgctatcgcgggggggatgatctacgcgtcttaca

SEQ ID NO: 423634 - DNA, 59 bp, Artificial
  Synthetic oligonucleotide
ggccccatgtgatttcacattttcttcaggtaccaagagcacgcgttccgtgcgatttc

SEQ ID NO: 423635 - DNA, 59 bp, Artificial
  Synthetic oligonucleotide
ggccccattagacatgccaacggaagcggccccgaccatcgtccctattgctggcacta

SEQ ID NO: 423636 - DNA, 55 bp, Artificial
  Synthetic oligonucleotide
ggccccattatttgacaccacaggatgctacagcgattgacaaacctagccagcc

SEQ ID NO: 423637 - DNA, 56 bp, Artificial
  Synthetic oligonucleotide
ggcccccaaatacgggtcgcgtcccctgcttagcgagtggtccgacatcggcacca

SEQ ID NO: 423638 - DNA, 49 bp, Artificial
  Synthetic oligonucleotide
ggcccccacccgtacggtggggaaccctgtccagtccttaccggattgg

SEQ ID NO: 423639 - DNA, 56 bp, Artificial
  Synthetic oligonucleotide
ggcccccataaactctttaaagtgttttagatagtggggatctacgtcatcaatga

SEQ ID NO: 423640 - DNA, 60 bp, Artificial
  Synthetic oligonucleotide
ggccccccttggcgcactatctctcatctttcgacgtggcgcgtcgatgagcgttggcta

SEQ ID NO: 423641 - DNA, 57 bp, Artificial
  Synthetic oligonucleotide
ggcccccgaagccaaattggccataaagtcgctcacagagcggctctatatcggggg

SEQ ID NO: 423642 - DNA, 57 bp, Artificial
  Synthetic oligonucleotide
ggcccccgaagccaggcaggtcataaggtcgctcacagagcggctttatatcggggg

SEQ ID NO: 423643 - DNA, 53 bp, Artificial
  Synthetic oligonucleotide
ggcccccgaatgcggctaacctaaaccccggagccttgagacacaatccagtg

SEQ ID NO: 423644 - DNA, 53 bp, Artificial
  Synthetic oligonucleotide
ggccccctcaccttcactggtaattctaaactcgtaggcaatagtcttaacgt

SEQ ID NO: 423645 - DNA, 58 bp, Artificial
  Synthetic oligonucleotide
ggcccccttgctcccagcggtcaaaattcttactgatggatgccttgaaactaagcat

SEQ ID NO: 423646 - DNA, 50 bp, Artificial
  Synthetic oligonucleotide
ggccccgaaattcaagttcgccaagaccaagtaaccccctccgcccgttc

SEQ ID NO: 423647 - DNA, 54 bp, Artificial
  Synthetic oligonucleotide
ggccccgaacggacgctccggagttgcgtcaaggaccgctgcggagcgcaattc

SEQ ID NO: 423648 - DNA, 54 bp, Artificial
  Synthetic oligonucleotide
ggccccgactcctaggctccgccccccattccaatcccgactcctctcctcttg

SEQ ID NO: 423649 - DNA, 50 bp, Artificial
  Synthetic oligonucleotide
ggccccgagtgggatcagttggctcgacacatgaagaaatttggagctga

SEQ ID NO: 423650 - DNA, 55 bp, Artificial
  Synthetic oligonucleotide
ggccccgcagggcaagggaaatccgcgttatgcaaccttcttatcagggctattg

SEQ ID NO: 423651 - DNA, 55 bp, Artificial
  Synthetic oligonucleotide
ggccccggagttgtatgctcctctcgactctgtgtgtctgcagatggagtcaccc

SEQ ID NO: 423652 - DNA, 55 bp, Artificial
  Synthetic oligonucleotide
ggccccggctcagggccaaggacagatggtacccagataaagcggaaccaggaac

SEQ ID NO: 423653 - DNA, 54 bp, Artificial
  Synthetic oligonucleotide
ggccccgggtgtttcacttagcggtgtctacctctaaaggtcactaagcactcc

SEQ ID NO: 423654 - DNA, 60 bp, Artificial
  Synthetic oligonucleotide
ggccccgtccctgtagaagttatttatgacaatgatccagataatgccaatttgtataca

SEQ ID NO: 423655 - DNA, 55 bp, Artificial
  Synthetic oligonucleotide
ggccccgtgtattgttttactcccagccctgtcgtggtcggaacaactgatcgcc

SEQ ID NO: 423656 - DNA, 57 bp, Artificial
  Synthetic oligonucleotide
ggcccctaatagagggaaacacaagcttgctatggaatggtcctatggccgtttcca

SEQ ID NO: 423657 - DNA, 55 bp, Artificial
  Synthetic oligonucleotide
ggcccctagagcaaggtggtgttatattaaagcaatggtgcacaacatcatgtac

SEQ ID NO: 423658 - DNA, 54 bp, Artificial
  Synthetic oligonucleotide
ggcccctagtccagttaagcacgtaaatactaaagccgtccccacgtatctcat

SEQ ID NO: 423659 - DNA, 58 bp, Artificial
  Synthetic oligonucleotide
ggcccctattagctctttccagtgtttcaactttaagtaatgcggagcgacgtcatca

SEQ ID NO: 423660 - DNA, 55 bp, Artificial
  Synthetic oligonucleotide
ggcccctcatacggattccagtactctcctgggcagcgggtcgagttcctggtga

SEQ ID NO: 423661 - DNA, 55 bp, Artificial
  Synthetic oligonucleotide
ggcccctcatccactctttgggagactttcctgttttcataaaggacaaggtgag

SEQ ID NO: 423662 - DNA, 55 bp, Artificial
  Synthetic oligonucleotide
ggcccctccttgcagcaggtcatgcgggatcagctcaagccctattcagagccac

SEQ ID NO: 423663 - DNA, 50 bp, Artificial
  Synthetic oligonucleotide
ggcccctcgtcttgtaaaacgccctcgacggccctgcgtgtgatttccac

SEQ ID NO: 423664 - DNA, 55 bp, Artificial
  Synthetic oligonucleotide
ggcccctctacatactccagacctcgctcctacgcgtcccttactttgtgagggc

SEQ ID NO: 423665 - DNA, 55 bp, Artificial
  Synthetic oligonucleotide
ggcccctctacttaattgtattcatgttgtagttatgtctaattttctcccagac

SEQ ID NO: 423666 - DNA, 55 bp, Artificial
  Synthetic oligonucleotide
ggcccctctcgatctaagggattgcaccatagaaggttggatattagggaatcct

SEQ ID NO: 423667 - DNA, 55 bp, Artificial
  Synthetic oligonucleotide
ggcccctctggaaggtaacgggcggacagcaggagaggtggactagcctagtgaa

SEQ ID NO: 423668 - DNA, 58 bp, Artificial
  Synthetic oligonucleotide
ggcccctcttggctgttcacccgagtgcggctagacacaaacagaaaatagtggcacc

SEQ ID NO: 423669 - DNA, 58 bp, Artificial
  Synthetic oligonucleotide
ggcccctgaatgcggctaatcccaactgcggagcaaatacccacaaaccagtgggcag

SEQ ID NO: 423670 - DNA, 55 bp, Artificial
  Synthetic oligonucleotide
ggcccctgaatgcggctaatcctaactgtggagcaagtgcccacaacccagtggg

SEQ ID NO: 423671 - DNA, 60 bp, Artificial
  Synthetic oligonucleotide
ggcccctgaatgtggctaaccttaaccctgcagctagtgtgtacaatccagtacatagct

SEQ ID NO: 423672 - DNA, 55 bp, Artificial
  Synthetic oligonucleotide
ggcccctgactatagggttgagcagaaccccaagaggctagaggcggcatatcgc

SEQ ID NO: 423673 - DNA, 55 bp, Artificial
  Synthetic oligonucleotide
ggcccctgagctacgaaagcgcaagggccagtgactgagaactagatgagagtct

SEQ ID NO: 423674 - DNA, 50 bp, Artificial
  Synthetic oligonucleotide
ggcccctgcaacttctctactcttcccttaaaggcatcgatgaccctagg

SEQ ID NO: 423675 - DNA, 60 bp, Artificial
  Synthetic oligonucleotide
ggcccctgctcagaaacgatgccgtgaagagccatagactgatgccccccaatgccctac

SEQ ID NO: 423676 - DNA, 55 bp, Artificial
  Synthetic oligonucleotide
ggcccctggactgttggaatgactaagttctatggaggttggaacaaattactgc

SEQ ID NO: 423677 - DNA, 55 bp, Artificial
  Synthetic oligonucleotide
ggcccctggtgccgaatgcggttggcggatacgccatatccatctccttttggcc

SEQ ID NO: 423678 - DNA, 54 bp, Artificial
  Synthetic oligonucleotide
ggcccctgtaccccccttcctgcgccgaactacgagttcgcgctgtggagggta

SEQ ID NO: 423679 - DNA, 52 bp, Artificial
  Synthetic oligonucleotide
ggcccctgtccccattcccgggtccacgaatggaccttcaacgggtcttaca

SEQ ID NO: 423680 - DNA, 52 bp, Artificial
  Synthetic oligonucleotide
ggccccttcatgcccagagatcaggaagccaactcttgggacataaccatag

SEQ ID NO: 423681 - DNA, 57 bp, Artificial
  Synthetic oligonucleotide
ggccccttcctactcatgatgcacaatgtttcatacctcgccacccggtctggtcgg

SEQ ID NO: 423682 - DNA, 54 bp, Artificial
  Synthetic oligonucleotide
ggccccttcttttgcttgtcctcgcactgccaccgcgggcgtatgcctacgacg

SEQ ID NO: 423683 - DNA, 57 bp, Artificial
  Synthetic oligonucleotide
ggcccgaagttaaggaagagcaggcagaggcttccacgagtgggagggctgaagaaa

SEQ ID NO: 423684 - DNA, 55 bp, Artificial
  Synthetic oligonucleotide
ggcccgaatgctgcatccggagttttacaaagactgctgacactgagttttctac

SEQ ID NO: 423685 - DNA, 55 bp, Artificial
  Synthetic oligonucleotide
ggcccgaattgatgcacgcattgatttcgagtctggaaggattaagaaagaagag

SEQ ID NO: 423686 - DNA, 57 bp, Artificial
  Synthetic oligonucleotide
ggcccgaatttgtattggcccataatatggccttgtcctcgtacattagctttccca

SEQ ID NO: 423687 - DNA, 55 bp, Artificial
  Synthetic oligonucleotide
ggcccgacagctccccgttcaggatctcgataaccacagcgggaacattcacccg

SEQ ID NO: 423688 - DNA, 60 bp, Artificial
  Synthetic oligonucleotide
ggcccgactcttgtgcctcgtctgtcattgcaacttgggacggctcacttcaccgcccaa

SEQ ID NO: 423689 - DNA, 60 bp, Artificial
  Synthetic oligonucleotide
ggcccgagaaatccaaaggagcccgcatgacaattcagttatcatgccaatcacgaacat

SEQ ID NO: 423690 - DNA, 60 bp, Artificial
  Synthetic oligonucleotide
ggcccgagagaagcatccggagttttacaagaactgctgacaccgaactgctgacaccga

SEQ ID NO: 423691 - DNA, 51 bp, Artificial
  Synthetic oligonucleotide
ggcccgagccgagtttgggttgcctaaaccaactgaggcaaacagactcat

SEQ ID NO: 423692 - DNA, 55 bp, Artificial
  Synthetic oligonucleotide
ggcccgagtacgtgacacccttgacaggctccgtgatccgtcggtccttacctca

SEQ ID NO: 423693 - DNA, 57 bp, Artificial
  Synthetic oligonucleotide
ggcccgagtactagcagggcctcagcttgggttaatcgcccaatgtacaggaagccc

SEQ ID NO: 423694 - DNA, 55 bp, Artificial
  Synthetic oligonucleotide
ggcccgataaatggtccaatgaatggacccagaggtagacaaatgaacggaccaa

SEQ ID NO: 423695 - DNA, 55 bp, Artificial
  Synthetic oligonucleotide
ggcccgataccgacctgaccaactggtatggtctcgctctcgcaggtgtccagtc

SEQ ID NO: 423696 - DNA, 60 bp, Artificial
  Synthetic oligonucleotide
ggcccgatggagcagacatcaatctcatgccaatataagctttcgcaattttagaaaaaa

SEQ ID NO: 423697 - DNA, 55 bp, Artificial
  Synthetic oligonucleotide
ggcccgcactaaacgagtagtctcactctctaacgcaatagagctcatgaggccc

SEQ ID NO: 423698 - DNA, 60 bp, Artificial
  Synthetic oligonucleotide
ggcccgcagtattctgattaccagcaatcagaccccgttggaatggtactcctcaactgc

SEQ ID NO: 423699 - DNA, 58 bp, Artificial
  Synthetic oligonucleotide
ggcccgctgaaatcagactaccaatcttagaaattagacctactgcacagtactcgtt

SEQ ID NO: 423700 - DNA, 55 bp, Artificial
  Synthetic oligonucleotide
ggcccgctgagacaccgtttcgacgtctccaatgtcggtctgtttgtacgcgcgg

SEQ ID NO: 423701 - DNA, 55 bp, Artificial
  Synthetic oligonucleotide
ggcccggaagacttggccaaagatctgataccactcatactgggtgggattgggt

SEQ ID NO: 423702 - DNA, 60 bp, Artificial
  Synthetic oligonucleotide
ggcccggacttcggccttggttagcgcgtatgctgcagcgcctgctcccttggcagacct

SEQ ID NO: 423703 - DNA, 56 bp, Artificial
  Synthetic oligonucleotide
ggcccggagcgactgacccctgccgagaactcagagggtcgtcggaagacggagag

SEQ ID NO: 423704 - DNA, 58 bp, Artificial
  Synthetic oligonucleotide
ggcccggcaagagtcgggctgtcaatatgctaaaacgcggaatgccccgcgtgttgtc

SEQ ID NO: 423705 - DNA, 60 bp, Artificial
  Synthetic oligonucleotide
ggcccggccgtgctgttgtcaaaaatcgctgagcttcagcgcattaacagagagctgtcc

SEQ ID NO: 423706 - DNA, 54 bp, Artificial
  Synthetic oligonucleotide
ggcccggctgagcagttgtttttactgctagggaagaaattggccggtgacccc

SEQ ID NO: 423707 - DNA, 54 bp, Artificial
  Synthetic oligonucleotide
ggcccggtatactgtttcactcctagccctgtggtggtgggaacgaccgacagg

SEQ ID NO: 423708 - DNA, 59 bp, Artificial
  Synthetic oligonucleotide
ggcccggtgccctgttcttgacattcaaccttggggtgtcgtgaaactcagagcataca

SEQ ID NO: 423709 - DNA, 60 bp, Artificial
  Synthetic oligonucleotide
ggcccgtcactaagcctggccctagcacaccaacagtgagtaagggtgttgatgagccag

SEQ ID NO: 423710 - DNA, 56 bp, Artificial
  Synthetic oligonucleotide
ggcccgtccccactccaaaggtgacgcctttggggcagatcgcaccttgggtgcta

SEQ ID NO: 423711 - DNA, 56 bp, Artificial
  Synthetic oligonucleotide
ggcccgtgacgagttttttacttcatttgtgcatactggaaacgtgcatagtttaa

SEQ ID NO: 423712 - DNA, 55 bp, Artificial
  Synthetic oligonucleotide
ggcccgtgcagagttgaaacctctcacggatatggaagctttgtgtggaagggat

SEQ ID NO: 423713 - DNA, 51 bp, Artificial
  Synthetic oligonucleotide
ggcccgttcacaatctaggggccgagacaaatcagtcaagattacagtcaa

SEQ ID NO: 423714 - DNA, 53 bp, Artificial
  Synthetic oligonucleotide
ggcccgttctaagttcgggtacggggcgaaggaggtccgtagccacgccagca

SEQ ID NO: 423715 - DNA, 54 bp, Artificial
  Synthetic oligonucleotide
ggccctacagacccccggcgtaggtcgcgcaatttgggtaaggtcatcgatacc

SEQ ID NO: 423716 - DNA, 51 bp, Artificial
  Synthetic oligonucleotide
ggccctactgctggcactatgctcctagggagtgtagtgtagtgccggcgt

SEQ ID NO: 423717 - DNA, 54 bp, Artificial
  Synthetic oligonucleotide
ggccctaggttggtggttcaaattgccaatctttcttttaacaacagcagctaa

SEQ ID NO: 423718 - DNA, 55 bp, Artificial
  Synthetic oligonucleotide
ggccctagtctatcgcaatgcccagcgctttcagacggaatacttaagtcctacc

SEQ ID NO: 423719 - DNA, 55 bp, Artificial
  Synthetic oligonucleotide
ggccctatggaaggaggcgggatcatctttaaacattggtgtacatccacctgcc

SEQ ID NO: 423720 - DNA, 60 bp, Artificial
  Synthetic oligonucleotide
ggccctatgtgtgaatatctaaccgcatattgtgtgaattgtttaaacgtggcaatatca

SEQ ID NO: 423721 - DNA, 57 bp, Artificial
  Synthetic oligonucleotide
ggccctcaaatactgtactacacctccatgtagagacagactgttgcgtgattccta

SEQ ID NO: 423722 - DNA, 55 bp, Artificial
  Synthetic oligonucleotide
ggccctcacatttattttggaactcctagcggttctcttgtatcaagtgaatctc

SEQ ID NO: 423723 - DNA, 56 bp, Artificial
  Synthetic oligonucleotide
ggccctcatggcgtaatccgtccaggtcagaggccctctcaaagtctccgaaccgg

SEQ ID NO: 423724 - DNA, 57 bp, Artificial
  Synthetic oligonucleotide
ggccctccatacggaggagacctcacaagactttagacgcatctaagcggaactata

SEQ ID NO: 423725 - DNA, 56 bp, Artificial
  Synthetic oligonucleotide
ggccctccccgtaaatggttctgtttgttcgtggcgcaggcagagtttgttgcaag

SEQ ID NO: 423726 - DNA, 59 bp, Artificial
  Synthetic oligonucleotide
ggccctccgctccggaaacaagcaggtctcaatccagagatctggcttgggcgggctta

SEQ ID NO: 423727 - DNA, 60 bp, Artificial
  Synthetic oligonucleotide
ggccctccttcggcgcccaagccgaggagacgagtctgagactccaagcggcacgctggc

SEQ ID NO: 423728 - DNA, 55 bp, Artificial
  Synthetic oligonucleotide
ggccctcgaaaggcttcactcacacctgtattataaattgggagttctcccaact

SEQ ID NO: 423729 - DNA, 55 bp, Artificial
  Synthetic oligonucleotide
ggccctcgagcctagtagagtcactagaggaggaagacgacccgcagacagcacg

SEQ ID NO: 423730 - DNA, 55 bp, Artificial
  Synthetic oligonucleotide
ggccctcgcaaacgccctgcgtcagctaaatcgtcttcctcagcctctaaacaca

SEQ ID NO: 423731 - DNA, 55 bp, Artificial
  Synthetic oligonucleotide
ggccctcgcagagagtgatgctaatctaacggtggttgtggacaaaagagatccc

SEQ ID NO: 423732 - DNA, 58 bp, Artificial
  Synthetic oligonucleotide
ggccctcggaccagggctcaatccttaccttgcccacctctcagccatgtacaccggc

SEQ ID NO: 423733 - DNA, 55 bp, Artificial
  Synthetic oligonucleotide
ggccctctaaatttatgatctaagccaggaattttaccttctgcgttggagccat

SEQ ID NO: 423734 - DNA, 55 bp, Artificial
  Synthetic oligonucleotide
ggccctctaacggaggcgttactagagcacccgccggctggtataagccgagggc

SEQ ID NO: 423735 - DNA, 55 bp, Artificial
  Synthetic oligonucleotide
ggccctgaaatccaggttcattgtgcctatcggaaagatatcctctctggagctt

SEQ ID NO: 423736 - DNA, 51 bp, Artificial
  Synthetic oligonucleotide
ggccctgatgttccacggggctgtgaaggcccgtgcaaggttcagtcttat

SEQ ID NO: 423737 - DNA, 59 bp, Artificial
  Synthetic oligonucleotide
ggccctgcagaccgtctgggttgcgcccccaggctccacatctacttccgtgtatgggc

SEQ ID NO: 423738 - DNA, 51 bp, Artificial
  Synthetic oligonucleotide
ggccctgctgccaatagtgcagatcacagggtttactggatacgggagggg

SEQ ID NO: 423739 - DNA, 58 bp, Artificial
  Synthetic oligonucleotide
ggccctggaaattgctggtggtctaggagcccttgtatcaggggaaggactggctaca

SEQ ID NO: 423740 - DNA, 51 bp, Artificial
  Synthetic oligonucleotide
ggccctggaccagatgccggtcgtcctcggcaactgctacaaacataagat

SEQ ID NO: 423741 - DNA, 56 bp, Artificial
  Synthetic oligonucleotide
ggccctggacccctcagctctggagacttccgacctgtgaggtcgaggattccccg

SEQ ID NO: 423742 - DNA, 55 bp, Artificial
  Synthetic oligonucleotide
ggccctggacgagacggatcttatgagtgaagacacaccagataatgcttttcca

SEQ ID NO: 423743 - DNA, 58 bp, Artificial
  Synthetic oligonucleotide
ggccctggattgcacaggaagattgtcggaatgccgcctttaatttgaatcggcttcc

SEQ ID NO: 423744 - DNA, 55 bp, Artificial
  Synthetic oligonucleotide
ggccctggctccatggcctaggacagcacatctataacacttatggggatacttg

SEQ ID NO: 423745 - DNA, 55 bp, Artificial
  Synthetic oligonucleotide
ggccctgggagcctattaaattgactgctcctctttatatagtgggctctgtatg

SEQ ID NO: 423746 - DNA, 55 bp, Artificial
  Synthetic oligonucleotide
ggccctggtatgggaccgctggtgcctgtgataccagccataccatcctctgtgt

SEQ ID NO: 423747 - DNA, 55 bp, Artificial
  Synthetic oligonucleotide
ggccctggtgttcgctacccgcttatgccaggtgtcttgttctgcttaaggcctg

SEQ ID NO: 423748 - DNA, 55 bp, Artificial
  Synthetic oligonucleotide
ggccctgtacttaaatgccaccagcactaaaggtactgacaactactatatcagt

SEQ ID NO: 423749 - DNA, 53 bp, Artificial
  Synthetic oligonucleotide
ggccctgtcgtacgttttaaggccgacaactgtttccgtggtggtttgcttga

SEQ ID NO: 423750 - DNA, 60 bp, Artificial
  Synthetic oligonucleotide
ggcccttaatgatgccatggtgtcggctaatggtaacctgtatggactagcagaaaagct

SEQ ID NO: 423751 - DNA, 58 bp, Artificial
  Synthetic oligonucleotide
ggcccttagggacaatctggagcctggaacctttgatcttggggggctatatgaagca

SEQ ID NO: 423752 - DNA, 55 bp, Artificial
  Synthetic oligonucleotide
ggcccttcaagctagtgccagtggacacaagggaagtagaagaggccaatgaagg

SEQ ID NO: 423753 - DNA, 57 bp, Artificial
  Synthetic oligonucleotide
ggcccttcaatgtcaagccacagtgtattagtggggtctaacttctttacagcctct

SEQ ID NO: 423754 - DNA, 59 bp, Artificial
  Synthetic oligonucleotide
ggcccttcagttgttcatcaaggactaccggtacacataccgctgccacaggggtgata

SEQ ID NO: 423755 - DNA, 55 bp, Artificial
  Synthetic oligonucleotide
ggcccttctctctcacaactcgtagtgcaggaccactgtggacaccaagccaagt

SEQ ID NO: 423756 - DNA, 55 bp, Artificial
  Synthetic oligonucleotide
ggcccttgagcgtgagtcactcagattagcgaatgatcgtaggaccacacaacgc

SEQ ID NO: 423757 - DNA, 55 bp, Artificial
  Synthetic oligonucleotide
ggcccttgatgtcaagcagacacaaatgctaatagtaggctgtgcccctgctatg

SEQ ID NO: 423758 - DNA, 56 bp, Artificial
  Synthetic oligonucleotide
ggcccttgggtgttcgacttggagggaatgtattctgggatagaggaatgtattag

SEQ ID NO: 423759 - DNA, 53 bp, Artificial
  Synthetic oligonucleotide
ggcccttggttccgggccattgagaaaccgatattaaccttgctcccgcctaa

SEQ ID NO: 423760 - DNA, 50 bp, Artificial
  Synthetic oligonucleotide
ggccctttaagataaacaagtacagcagtcccatggcccatccgggcatg

SEQ ID NO: 423761 - DNA, 56 bp, Artificial
  Synthetic oligonucleotide
ggccctttaggacacaaaacccagatatagttatctatcaatatatggatgacttg

SEQ ID NO: 423762 - DNA, 54 bp, Artificial
  Synthetic oligonucleotide
ggcccttttaacggtctagataaaggagaacccgtcaacgaggcagacgctgcc

SEQ ID NO: 423763 - DNA, 55 bp, Artificial
  Synthetic oligonucleotide
ggccctttttatcccgccaacagacagagattttaattaatttgatgcagccccg

SEQ ID NO: 423764 - DNA, 59 bp, Artificial
  Synthetic oligonucleotide
ggccgaaaacctgcagtaatacatggcatggtaccttccccatcaatgcttacactacg

SEQ ID NO: 423765 - DNA, 57 bp, Artificial
  Synthetic oligonucleotide
ggccgaaacagccaatggaacggctgtcgtagctgacaacgctggagtaacgttaac

SEQ ID NO: 423766 - DNA, 55 bp, Artificial
  Synthetic oligonucleotide
ggccgaaagaatagctgccctcaagacccaatatggtgattcttggcatgtggac

SEQ ID NO: 423767 - DNA, 60 bp, Artificial
  Synthetic oligonucleotide
ggccgaaatctgtcgatacgacactatgtctcgatacacccacgcgactccatatattag

SEQ ID NO: 423768 - DNA, 55 bp, Artificial
  Synthetic oligonucleotide
ggccgaaattcaccttttctaatatggttacagccgatcaggcgaaacttgtcac

SEQ ID NO: 423769 - DNA, 50 bp, Artificial
  Synthetic oligonucleotide
ggccgaacccccgaccctaacagaccctatcgcggggtccaataatccgc

SEQ ID NO: 423770 - DNA, 54 bp, Artificial
  Synthetic oligonucleotide
ggccgaacgaaagaagcaagcggatgaaaaagcgtcagaaccggttataaccga

SEQ ID NO: 423771 - DNA, 55 bp, Artificial
  Synthetic oligonucleotide
ggccgaacgattcaatcttctttgagagtactgggaactttatagctcccgaata

SEQ ID NO: 423772 - DNA, 55 bp, Artificial
  Synthetic oligonucleotide
ggccgaacgttggataaagacccttgcactattcaagagtggaatgaggggaaaa

SEQ ID NO: 423773 - DNA, 60 bp, Artificial
  Synthetic oligonucleotide
ggccgaagccccttagcaatacattacccatttctgagcgcgtgtgcaaccgacatagcc

SEQ ID NO: 423774 - DNA, 55 bp, Artificial
  Synthetic oligonucleotide
ggccgaatcttaatttcgaaggacagtgaccgtaagaatgtgcttggaaacccat

SEQ ID NO: 423775 - DNA, 55 bp, Artificial
  Synthetic oligonucleotide
ggccgaatcttcaggatctccatactctcaccttaccgtcatgcctggagggcgg

SEQ ID NO: 423776 - DNA, 55 bp, Artificial
  Synthetic oligonucleotide
ggccgaatgtgccacgatgattggggattatctaaagtccaggagtaatgagtgc

SEQ ID NO: 423777 - DNA, 55 bp, Artificial
  Synthetic oligonucleotide
ggccgacaaacttacgattggaccttgaataggaatcaacctgccgcaacagcac

SEQ ID NO: 423778 - DNA, 55 bp, Artificial
  Synthetic oligonucleotide
ggccgacaatgtttgatgtggctacagctgtgtacatgttgacagtctttcatcc

SEQ ID NO: 423779 - DNA, 59 bp, Artificial
  Synthetic oligonucleotide
ggccgacaggatcagtttatttcaaagggtatgtggatatcgcgtcattttctgtagaa

SEQ ID NO: 423780 - DNA, 59 bp, Artificial
  Synthetic oligonucleotide
ggccgaccaggacagactcctttcacatctgaaaggatggcttactaagaagcagactt

SEQ ID NO: 423781 - DNA, 60 bp, Artificial
  Synthetic oligonucleotide
ggccgacgcaccctcccacgcggaggatgccatggatgcaagggagcctgtggtggggtc

SEQ ID NO: 423782 - DNA, 55 bp, Artificial
  Synthetic oligonucleotide
ggccgacgccaggggcctcattcagtcatcccgggcccatgctatagtcgcactt

SEQ ID NO: 423783 - DNA, 54 bp, Artificial
  Synthetic oligonucleotide
ggccgactactgtgacaaggtctcggccatactccggcgcttgagcctcactcg

SEQ ID NO: 423784 - DNA, 57 bp, Artificial
  Synthetic oligonucleotide
ggccgactagctctgtatctggcggacccgtggtggaactgacgagttcggaacacc

SEQ ID NO: 423785 - DNA, 55 bp, Artificial
  Synthetic oligonucleotide
ggccgactgggtccgtttatttcaaagagtacacagacatagcatccttttcagt

SEQ ID NO: 423786 - DNA, 57 bp, Artificial
  Synthetic oligonucleotide
ggccgagagaccgagcccacattgtcttcccaatacgactatcaccctctaaaacaa

SEQ ID NO: 423787 - DNA, 55 bp, Artificial
  Synthetic oligonucleotide
ggccgagagagtggcaaatgccactagtaaggaaatacagatgtaccgcatccgt

SEQ ID NO: 423788 - DNA, 55 bp, Artificial
  Synthetic oligonucleotide
ggccgagatcgcataccaaatagtaaggtatgaagcgattcggctcatcggaggc

SEQ ID NO: 423789 - DNA, 59 bp, Artificial
  Synthetic oligonucleotide
ggccgagatgccccgaccattgaagcaatcactagaccaatccaagtggctaagggagg

SEQ ID NO: 423790 - DNA, 55 bp, Artificial
  Synthetic oligonucleotide
ggccgaggaggaatttgtggactatgcaaacggtataacgaactagtaactagcg

SEQ ID NO: 423791 - DNA, 55 bp, Artificial
  Synthetic oligonucleotide
ggccgaggcacacctaaagtctgcagacttagtcacggcctatgagcatactgtg

SEQ ID NO: 423792 - DNA, 55 bp, Artificial
  Synthetic oligonucleotide
ggccgataaaattctcaaatatggctccactgctgtttattttggagggcttggg

SEQ ID NO: 423793 - DNA, 55 bp, Artificial
  Synthetic oligonucleotide
ggccgatattgctgtgtaccaggatgtgtacgcagttgacgcgccgtctaccatc

SEQ ID NO: 423794 - DNA, 51 bp, Artificial
  Synthetic oligonucleotide
ggccgatggaatataagtgcatgtgctaagctagatccaaaattacaatct

SEQ ID NO: 423795 - DNA, 55 bp, Artificial
  Synthetic oligonucleotide
ggccgatggttcacgatcttgcggtgaatatcccgttcggtgttgggaagcatgt

SEQ ID NO: 423796 - DNA, 54 bp, Artificial
  Synthetic oligonucleotide
ggccgatgtttccaatcacgtcactaaagttgtcccaaccacctcgggtattaa

SEQ ID NO: 423797 - DNA, 55 bp, Artificial
  Synthetic oligonucleotide
ggccgattcgacaatggaatgtcgaccacgcagtgggcaagcagtacgaacagga

SEQ ID NO: 423798 - DNA, 60 bp, Artificial
  Synthetic oligonucleotide
ggccgattggatagaaactccatagaaagacagctatggtggactcgtggccccaatcat

SEQ ID NO: 423799 - DNA, 55 bp, Artificial
  Synthetic oligonucleotide
ggccgattgtagctaacaacaatctttcttcataaatacatgtaaccgcctgcgt

SEQ ID NO: 423800 - DNA, 55 bp, Artificial
  Synthetic oligonucleotide
ggccgatttgcctgacaagggcatgcactttaagtctgaaatccttattgccaac

SEQ ID NO: 423801 - DNA, 55 bp, Artificial
  Synthetic oligonucleotide
ggccgcaagccagctcgctttatcgtattcccggacctgggagttcgtgtatgcg

SEQ ID NO: 423802 - DNA, 55 bp, Artificial
  Synthetic oligonucleotide
ggccgcaagcgcttacttaccacacggctctgaggtgtatacatttggagaaagt

SEQ ID NO: 423803 - DNA, 56 bp, Artificial
  Synthetic oligonucleotide
ggccgcacgggctaaagtgcatttttctattccgggttctgattgggcttatacac

SEQ ID NO: 423804 - DNA, 58 bp, Artificial
  Synthetic oligonucleotide
ggccgcactgacaggcacgtatgtctatgaccaccttactccgctgcgagactgggcc

SEQ ID NO: 423805 - DNA, 58 bp, Artificial
  Synthetic oligonucleotide
ggccgcactgacaggtacgtacgtttatgaccatcttactccactgcgggactgggcc

SEQ ID NO: 423806 - DNA, 55 bp, Artificial
  Synthetic oligonucleotide
ggccgcactggtaggggaaggttgggcatataccggtatgtcaccccaggggaga

SEQ ID NO: 423807 - DNA, 59 bp, Artificial
  Synthetic oligonucleotide
ggccgcagcattgaaatcagcccaatctcgacttttcgggttggacggtggcgtcagta

SEQ ID NO: 423808 - DNA, 50 bp, Artificial
  Synthetic oligonucleotide
ggccgcaggtagcacgacgcctaccatcacgttcagtgcgcaggtcaact

SEQ ID NO: 423809 - DNA, 55 bp, Artificial
  Synthetic oligonucleotide
ggccgcataagagcggcgtgacacagactatcgagtaatgtaaaggttactatgc

SEQ ID NO: 423810 - DNA, 60 bp, Artificial
  Synthetic oligonucleotide
ggccgcatgattccaaaagggacagttacatggtcaggcaaatttccaacaatagatcac

SEQ ID NO: 423811 - DNA, 60 bp, Artificial
  Synthetic oligonucleotide
ggccgccaaagtgccaaagtgtgagtggcacgacgaactgatcacacgtgtgtagggtgc

SEQ ID NO: 423812 - DNA, 56 bp, Artificial
  Synthetic oligonucleotide
ggccgccaagtatggcaccggacaaaggtgggacgtggtaattaacaatgaacata

SEQ ID NO: 423813 - DNA, 50 bp, Artificial
  Synthetic oligonucleotide
ggccgccagggcgtgatattttgtatagccggaatatgaggaactatcgc

SEQ ID NO: 423814 - DNA, 55 bp, Artificial
  Synthetic oligonucleotide
ggccgcccctcggagtctgtgttcatggcccgcaaatccagtaacgacaaggaca

SEQ ID NO: 423815 - DNA, 55 bp, Artificial
  Synthetic oligonucleotide
ggccgccgtacgaagctgtatgaagctgctcatgcagatgttcgtgggtctccga

SEQ ID NO: 423816 - DNA, 53 bp, Artificial
  Synthetic oligonucleotide
ggccgcctctggtaaactgcgatgaaacgcgattgccgtgcgtgtcagacgag

SEQ ID NO: 423817 - DNA, 57 bp, Artificial
  Synthetic oligonucleotide
ggccgcgaaaattttgacccccttatcctgaccgttgatgcgtaatcattgcacgcc

SEQ ID NO: 423818 - DNA, 58 bp, Artificial
  Synthetic oligonucleotide
ggccgcgagctcattcggaccctcctggcggagggggatcacgggcgcatcggatagg

SEQ ID NO: 423819 - DNA, 54 bp, Artificial
  Synthetic oligonucleotide
ggccgcgatgccatcatcctcctcacgtgtgcagtccatccagagctaatcttt

SEQ ID NO: 423820 - DNA, 55 bp, Artificial
  Synthetic oligonucleotide
ggccgcgcagcggaagtgttttgcgaataagaggatgttgatatcaaggtggtgt

SEQ ID NO: 423821 - DNA, 60 bp, Artificial
  Synthetic oligonucleotide
ggccgcgcagcggaattggctccgcaggtgaatattctttgaaacgtatgcgagattgtg

SEQ ID NO: 423822 - DNA, 59 bp, Artificial
  Synthetic oligonucleotide
ggccgcgcagcggcacttacaataaattgtaatatccagttgattaaaatcgtgtggaa

SEQ ID NO: 423823 - DNA, 55 bp, Artificial
  Synthetic oligonucleotide
ggccgcggaggctggtgttactatgctgctgcgcagaaggaagtgagtggggtga

SEQ ID NO: 423824 - DNA, 54 bp, Artificial
  Synthetic oligonucleotide
ggccgcggtgtgtacccgtggagtggctaaagcggtggactttatccccgtaga

SEQ ID NO: 423825 - DNA, 56 bp, Artificial
  Synthetic oligonucleotide
ggccgcggttcagaagggagttaaggacctggctttctgtaggcgcataccactcc

SEQ ID NO: 423826 - DNA, 55 bp, Artificial
  Synthetic oligonucleotide
ggccgcgttggggcttcgcactgtaagcgagggcacggtaaagtttgtaattggc

SEQ ID NO: 423827 - DNA, 55 bp, Artificial
  Synthetic oligonucleotide
ggccgctaagaggacaggagtcaagatcccaaaagtgttttcgttcggaatccac

SEQ ID NO: 423828 - DNA, 55 bp, Artificial
  Synthetic oligonucleotide
ggccgctacacaagacaccgtcaatgaaggaaaagacggtacatagagcgtgcag

SEQ ID NO: 423829 - DNA, 60 bp, Artificial
  Synthetic oligonucleotide
ggccgctatccctcatcttgaaggtttgactgcgagcaaatatatatatgaaacgactgc

SEQ ID NO: 423830 - DNA, 55 bp, Artificial
  Synthetic oligonucleotide
ggccgctcaagtaattatgtgggcctaacgacctagcccacattgtcttgcccgt

SEQ ID NO: 423831 - DNA, 55 bp, Artificial
  Synthetic oligonucleotide
ggccgctccatcagaatcacgaacaaggcataggatgaatcccagacagcctgga

SEQ ID NO: 423832 - DNA, 55 bp, Artificial
  Synthetic oligonucleotide
ggccgctcccacaggaactatctgggcttgtagtactggactcactccctgtatc

SEQ ID NO: 423833 - DNA, 60 bp, Artificial
  Synthetic oligonucleotide
ggccgctcctagtattgtgtcaaaaattactatagctggcggagatcctccatcaaagtc

SEQ ID NO: 423834 - DNA, 60 bp, Artificial
  Synthetic oligonucleotide
ggccgctcgcattggtatctcaggattgtgtgctaatgtaggtaacgcgcgtaagtccat

SEQ ID NO: 423835 - DNA, 55 bp, Artificial
  Synthetic oligonucleotide
ggccgctgagggcgcgggaatattccggtatcggacatggtgaacgcttgcgaca

SEQ ID NO: 423836 - DNA, 55 bp, Artificial
  Synthetic oligonucleotide
ggccgctggagctttcttagtcccagcgatgcccatacaagtgccggtgccacac

SEQ ID NO: 423837 - DNA, 51 bp, Artificial
  Synthetic oligonucleotide
ggccgcttgggttatctccctgtataggcggcgcttgctttatgtattcgc

SEQ ID NO: 423838 - DNA, 55 bp, Artificial
  Synthetic oligonucleotide
ggccgctttggtggacgcgtggacgttgtcgcagttgtgggtcctacggaaatcg

SEQ ID NO: 423839 - DNA, 53 bp, Artificial
  Synthetic oligonucleotide
ggccgcttttcgtgtgtggtttcccaattctgtaggaaaagtgatataccctt

SEQ ID NO: 423840 - DNA, 53 bp, Artificial
  Synthetic oligonucleotide
ggccggaaatcatacccctgtgcctcgggagaaatacccgtcgttctacaagg

SEQ ID NO: 423841 - DNA, 55 bp, Artificial
  Synthetic oligonucleotide
ggccggaatttgcgattcacggcgtaaatccgatgccagggccgctcacacgtgc

SEQ ID NO: 423842 - DNA, 60 bp, Artificial
  Synthetic oligonucleotide
ggccggacaggatccacacttccaacagatacgtgatgctattgcgggaacgaatactgc

SEQ ID NO: 423843 - DNA, 52 bp, Artificial
  Synthetic oligonucleotide
ggccggacgagactacggcgttgattgttgcccctttcagggttaacttctg

SEQ ID NO: 423844 - DNA, 54 bp, Artificial
  Synthetic oligonucleotide
ggccggactataaccccccgctgatagagacgtggaaaaagcctaactatgaac

SEQ ID NO: 423845 - DNA, 54 bp, Artificial
  Synthetic oligonucleotide
ggccggactccaacaaggtgggagtgggagcgttcgggccgggattcactccgc

SEQ ID NO: 423846 - DNA, 55 bp, Artificial
  Synthetic oligonucleotide
ggccggagaaggaaagctcaaatccgcgatacgacaaatgctcgatgcaggggat

SEQ ID NO: 423847 - DNA, 55 bp, Artificial
  Synthetic oligonucleotide
ggccggagtcaaaacatgtctttggtatcaaaggaaaagtggtgatgtgacaacc

SEQ ID NO: 423848 - DNA, 60 bp, Artificial
  Synthetic oligonucleotide
ggccggcaagtatgagaatcatactgaaaacgcattaatgttgtatatggcctgtactca

SEQ ID NO: 423849 - DNA, 56 bp, Artificial
  Synthetic oligonucleotide
ggccggctggctggacaccatttgggacgccattaagcggttcttcggcagcgtgc

SEQ ID NO: 423850 - DNA, 59 bp, Artificial
  Synthetic oligonucleotide
ggccgggctgggcatttgtgaggtccttgagcaacatcccgtgggagtacttactctga

SEQ ID NO: 423851 - DNA, 58 bp, Artificial
  Synthetic oligonucleotide
ggccgggtcaatgcaattgggccttaattgaaatgggcttggtccagtagattcgagc

SEQ ID NO: 423852 - DNA, 51 bp, Artificial
  Synthetic oligonucleotide
ggccgggttaatacatcgtgcgcgacccggttatcgtattataccagaaag

SEQ ID NO: 423853 - DNA, 54 bp, Artificial
  Synthetic oligonucleotide
ggccggtctcctcaacgaccgtatcaaaacgactcgttcgatcgagttccccgc

SEQ ID NO: 423854 - DNA, 54 bp, Artificial
  Synthetic oligonucleotide
ggccggtgtcagtaaaaacccctccactagtgatttttcagtagtggagtgttc

SEQ ID NO: 423855 - DNA, 55 bp, Artificial
  Synthetic oligonucleotide
ggccggttggtctttatgtagatatacctggagtaaccgtgactactagcgcatc

SEQ ID NO: 423856 - DNA, 55 bp, Artificial
  Synthetic oligonucleotide
ggccggtttcgaacaatagtatgtggtctatttcctactcagattcaagtacgca

SEQ ID NO: 423857 - DNA, 54 bp, Artificial
  Synthetic oligonucleotide
ggccgtaaagtcgtccagattcggaagttcaggaaagctttgtgaatccccaac

SEQ ID NO: 423858 - DNA, 55 bp, Artificial
  Synthetic oligonucleotide
ggccgtaacatggtggaataggaatggaccgacaacaagtacagttcactacccg

SEQ ID NO: 423859 - DNA, 56 bp, Artificial
  Synthetic oligonucleotide
ggccgtaagactaaggggtgaattgttaactgactctgaacttgttactagctcaa

SEQ ID NO: 423860 - DNA, 55 bp, Artificial
  Synthetic oligonucleotide
ggccgtaatgacgcaagggcctaacacagagtttgcactttccttacttaggaag

SEQ ID NO: 423861 - DNA, 55 bp, Artificial
  Synthetic oligonucleotide
ggccgtaccatgctgtttaccccgtctcaacttgggtcactccttgagggcgcct

SEQ ID NO: 423862 - DNA, 60 bp, Artificial
  Synthetic oligonucleotide
ggccgtactcttcaacatatgtgagcaacactgttcttgcagtttcatctaatcctggtc

SEQ ID NO: 423863 - DNA, 52 bp, Artificial
  Synthetic oligonucleotide
ggccgtccaaggtcggcataccggccattgcacggctccaggtggctaacca

SEQ ID NO: 423864 - DNA, 55 bp, Artificial
  Synthetic oligonucleotide
ggccgtccactgctggacgctcacaacccgcacattgcatctgacctgccaatgc

SEQ ID NO: 423865 - DNA, 55 bp, Artificial
  Synthetic oligonucleotide
ggccgtcgtatatacttgacaagaaagtatggcgcacatgtgacgcgatcaagcg

SEQ ID NO: 423866 - DNA, 52 bp, Artificial
  Synthetic oligonucleotide
ggccgtcgtcccgaacccgaatcggagcagcccaagggccggttccagaacc

SEQ ID NO: 423867 - DNA, 55 bp, Artificial
  Synthetic oligonucleotide
ggccgtcgtgtggtgtcttgacgagaatcgcaaggtggcgaaacgcattgcgttc

SEQ ID NO: 423868 - DNA, 53 bp, Artificial
  Synthetic oligonucleotide
ggccgtctctcgggattctaatgggccgtgaaaacggcggattcggtaagtac

SEQ ID NO: 423869 - DNA, 51 bp, Artificial
  Synthetic oligonucleotide
ggccgtcttccacacttacatgaattaagaccgtgccgccccctcgcaggg

SEQ ID NO: 423870 - DNA, 55 bp, Artificial
  Synthetic oligonucleotide
ggccgtcttgttggttatggcactgttcatgatggagaacaccccgcgtcatgtg

SEQ ID NO: 423871 - DNA, 55 bp, Artificial
  Synthetic oligonucleotide
ggccgtgacgccgtcattttactcacgtgtgctgtacacccgaccctggtattcg

SEQ ID NO: 423872 - DNA, 50 bp, Artificial
  Synthetic oligonucleotide
ggccgtgagtacgaatttaatgtactttcccgcagattccacaacttagg

SEQ ID NO: 423873 - DNA, 58 bp, Artificial
  Synthetic oligonucleotide
ggccgtgattatatccccggccgtcagttggagttctacgcccagtgtaggcgctggc

SEQ ID NO: 423874 - DNA, 54 bp, Artificial
  Synthetic oligonucleotide
ggccgtggatggacgtacttgcgttaccaccccagaaatttagccaggctaccg

SEQ ID NO: 423875 - DNA, 60 bp, Artificial
  Synthetic oligonucleotide
ggccgtggctagccgtctctacggagtcccatcgcaccatgtttatgtgtacggatgaga

SEQ ID NO: 423876 - DNA, 59 bp, Artificial
  Synthetic oligonucleotide
ggccgtggctcgaccctcacacaacactgcaggtagggggcgcaattgggatcgtttca

SEQ ID NO: 423877 - DNA, 55 bp, Artificial
  Synthetic oligonucleotide
ggccgtgggactttcacttgtcggtgtctgcttataaaagtaactaagcactccg

SEQ ID NO: 423878 - DNA, 56 bp, Artificial
  Synthetic oligonucleotide
ggccgtgggagtttcacttgtcggtgtctgcttcttaaggttaccaagcactccga

SEQ ID NO: 423879 - DNA, 55 bp, Artificial
  Synthetic oligonucleotide
ggccgtggtactcccttcaacaggcggcacccagtgaggctcgccaatccatatg

SEQ ID NO: 423880 - DNA, 55 bp, Artificial
  Synthetic oligonucleotide
ggccgtgtcgattccaatcctaaagtaatcactcttcagcttggcacaccctcaa

SEQ ID NO: 423881 - DNA, 55 bp, Artificial
  Synthetic oligonucleotide
ggccgttcctcgtcacccggccggatcagtaatggtcgaacggactctcgatcag

SEQ ID NO: 423882 - DNA, 55 bp, Artificial
  Synthetic oligonucleotide
ggccgttctagtctgcagatcgtgagagacttaaaatcgtaacaccgtcgcgagt

SEQ ID NO: 423883 - DNA, 55 bp, Artificial
  Synthetic oligonucleotide
ggccgttgcgcatggtaatcccatgcaagaatttcctcatggcgcgtttcacgcc

SEQ ID NO: 423884 - DNA, 55 bp, Artificial
  Synthetic oligonucleotide
ggccgtttgagcgagctgagcttgccaacatgacccattgtgccgaaacaccacc

SEQ ID NO: 423885 - DNA, 55 bp, Artificial
  Synthetic oligonucleotide
ggcctaaagacttggccgtttgtatacagctatggcgggattcaattcgccctat

SEQ ID NO: 423886 - DNA, 52 bp, Artificial
  Synthetic oligonucleotide
ggcctaaatacttgaaagattgtgggtgtaaacccacaggaccctctaaagt

SEQ ID NO: 423887 - DNA, 60 bp, Artificial
  Synthetic oligonucleotide
ggcctaaatgtagctgctggcgcactgctgtcgccaggtgtcccaaacatggggcacaac

SEQ ID NO: 423888 - DNA, 55 bp, Artificial
  Synthetic oligonucleotide
ggcctaacaataacacctgctgacaaatctgaccagtttgtgaaagtcacatggg

SEQ ID NO: 423889 - DNA, 57 bp, Artificial
  Synthetic oligonucleotide
ggcctaacacgtaattcgtactcttcgtgagtaagttgtgttagccatatctatcct

SEQ ID NO: 423890 - DNA, 54 bp, Artificial
  Synthetic oligonucleotide
ggcctaacagcgttagctgttaggtgctttgtagtgatacaaagcatggtataa

SEQ ID NO: 423891 - DNA, 55 bp, Artificial
  Synthetic oligonucleotide
ggcctaaggaacgggcccacatggtctttcctgtccggctgtcaccctcaatcac

SEQ ID NO: 423892 - DNA, 55 bp, Artificial
  Synthetic oligonucleotide
ggcctaatacaaacagagaccaaacaaactttgactggggaatacgaggactatg

SEQ ID NO: 423893 - DNA, 57 bp, Artificial
  Synthetic oligonucleotide
ggcctaatctctattgggcctcgaagtccaatcctggacatggacgcgcatctaatg

SEQ ID NO: 423894 - DNA, 60 bp, Artificial
  Synthetic oligonucleotide
ggcctaatgactatagaaggcctatcagcctctgaagccttaggggccatggggctaaca

SEQ ID NO: 423895 - DNA, 60 bp, Artificial
  Synthetic oligonucleotide
ggcctaatgcacgtgcccacattgtcttgccgcttcgcgaatcaccctcaatgacaatac

SEQ ID NO: 423896 - DNA, 55 bp, Artificial
  Synthetic oligonucleotide
ggcctaatggaacatgctccagaggatgagaccaacccaagagaaccatgggatg

SEQ ID NO: 423897 - DNA, 55 bp, Artificial
  Synthetic oligonucleotide
ggcctacaaacatgagcagcagccgtggttatcgcgaccacaggatgcacctgag

SEQ ID NO: 423898 - DNA, 55 bp, Artificial
  Synthetic oligonucleotide
ggcctacaagactaacttggaggcctgtgataacaaatgctggtgtaggagatgc

SEQ ID NO: 423899 - DNA, 55 bp, Artificial
  Synthetic oligonucleotide
ggcctacatacttatccgacattgatgcaacgtccgtcgataaacccactcaccc

SEQ ID NO: 423900 - DNA, 60 bp, Artificial
  Synthetic oligonucleotide
ggcctaccatatagcatttcgcaccttgcacacataattggtctatcggacatatttaca

SEQ ID NO: 423901 - DNA, 55 bp, Artificial
  Synthetic oligonucleotide
ggcctacctaggacacctattacaagacatcaaaggggagttaactgaagattgg

SEQ ID NO: 423902 - DNA, 55 bp, Artificial
  Synthetic oligonucleotide
ggcctacctattgtgcttcgggaagcccacgactcgcctggttttaattctattg

SEQ ID NO: 423903 - DNA, 55 bp, Artificial
  Synthetic oligonucleotide
ggcctacgcagcaggcctcatcaagacgatctacccgagtaacaatctccaggag

SEQ ID NO: 423904 - DNA, 55 bp, Artificial
  Synthetic oligonucleotide
ggcctacgtagacattccagcagttgagggcctcaagtctcatcattccaaggcg

SEQ ID NO: 423905 - DNA, 55 bp, Artificial
  Synthetic oligonucleotide
ggcctactagatcctatattatatgaaggtagtgttaagtcaatagcacatccag

SEQ ID NO: 423906 - DNA, 55 bp, Artificial
  Synthetic oligonucleotide
ggcctactataggagtaaatacgaaacacgatgaactgtgcacaggatcatgccc

SEQ ID NO: 423907 - DNA, 60 bp, Artificial
  Synthetic oligonucleotide
ggcctactggatctgtctactttaaagaatacacagatattgcttccttctcggttgatc

SEQ ID NO: 423908 - DNA, 60 bp, Artificial
  Synthetic oligonucleotide
ggcctacttaattagcatcttcctccatctgctgaagatccctacacatagacacatcaa

SEQ ID NO: 423909 - DNA, 54 bp, Artificial
  Synthetic oligonucleotide
ggcctacttagatttgccaatgctttgcctgcagaattaagtccagtaaagcag

SEQ ID NO: 423910 - DNA, 60 bp, Artificial
  Synthetic oligonucleotide
ggcctacttgcttgctgtgccaaatgcttatactacttgcgcggcgctatagcgccgcgc

SEQ ID NO: 423911 - DNA, 55 bp, Artificial
  Synthetic oligonucleotide
ggcctacttttaggtgggtcaatgcagcggtgctgataggggagcaagagacatt

SEQ ID NO: 423912 - DNA, 56 bp, Artificial
  Synthetic oligonucleotide
ggcctagaaatgaatccatgttcacctttttagaccatccgtcaataaaacagttc

SEQ ID NO: 423913 - DNA, 60 bp, Artificial
  Synthetic oligonucleotide
ggcctagcaagtggaatgtctgctacagatatggctaaaatgctcgagaaatatatcgac

SEQ ID NO: 423914 - DNA, 58 bp, Artificial
  Synthetic oligonucleotide
ggcctagctccatacattgcagagacagcactccgaaatctctatcttggaacgggta

SEQ ID NO: 423915 - DNA, 55 bp, Artificial
  Synthetic oligonucleotide
ggcctaggagctatgatgcacaactatggtgatgacaagagggttgaggtcctca

SEQ ID NO: 423916 - DNA, 60 bp, Artificial
  Synthetic oligonucleotide
ggcctaggagctgtgttcgttgggttcttgggagcagccggaagcactatgggcgcagtg

SEQ ID NO: 423917 - DNA, 59 bp, Artificial
  Synthetic oligonucleotide
ggcctaggcctcgcccacagcctccaacatatgagggaccatctagtggcgtcacatac

SEQ ID NO: 423918 - DNA, 54 bp, Artificial
  Synthetic oligonucleotide
ggcctaggggagaacctctatagggtcgccgaacccattcttatgctattagtg

SEQ ID NO: 423919 - DNA, 59 bp, Artificial
  Synthetic oligonucleotide
ggcctaggtggaccggtaatggctgccacacctgccacataacggctgagacacttccc

SEQ ID NO: 423920 - DNA, 55 bp, Artificial
  Synthetic oligonucleotide
ggcctagtgtgatacccgaggctattgggcctgttgatatcatacctattgacac

SEQ ID NO: 423921 - DNA, 55 bp, Artificial
  Synthetic oligonucleotide
ggcctagttacatcgtagggaatgaagcaccatatctcaataaacgctttcgtat

SEQ ID NO: 423922 - DNA, 55 bp, Artificial
  Synthetic oligonucleotide
ggcctagttctactgttatagcagatcaatgccctttgcctggtaaccatcctac

SEQ ID NO: 423923 - DNA, 52 bp, Artificial
  Synthetic oligonucleotide
ggcctagttggggccccacagacccccggcgtaggtcgcgcaacctgggtaa

SEQ ID NO: 423924 - DNA, 53 bp, Artificial
  Synthetic oligonucleotide
ggcctagtttcacaacccttcaagaatttcctaggtaagctcaagccccttaa

SEQ ID NO: 423925 - DNA, 60 bp, Artificial
  Synthetic oligonucleotide
ggcctatacaataggattgttgatcaagttgccactaggaacatagattttctaggtcaa

SEQ ID NO: 423926 - DNA, 55 bp, Artificial
  Synthetic oligonucleotide
ggcctatacggtgctttctctacatgattgaggttggtcggtttacacaggagga

SEQ ID NO: 423927 - DNA, 55 bp, Artificial
  Synthetic oligonucleotide
ggcctatactcaccgaatcccgaaagactgtaaatactatttagtcgacacaagt

SEQ ID NO: 423928 - DNA, 60 bp, Artificial
  Synthetic oligonucleotide
ggcctataggtcaagttctgctgatggctggcatacctaatgatattatacaaggcatgg

SEQ ID NO: 423929 - DNA, 52 bp, Artificial
  Synthetic oligonucleotide
ggcctatatttaggcccagtgtcataatcagtgccgggctcattctgaatga

SEQ ID NO: 423930 - DNA, 55 bp, Artificial
  Synthetic oligonucleotide
ggcctatcaagcggaagatgccaaggtaggcccaacagaggacggtcaacaaatc

SEQ ID NO: 423931 - DNA, 55 bp, Artificial
  Synthetic oligonucleotide
ggcctatcagtttgatgatatcgagttctgctcccatacaccagtacaagttagg

SEQ ID NO: 423932 - DNA, 58 bp, Artificial
  Synthetic oligonucleotide
ggcctatgaagaattcatagccagattgctagaggcaatcgatgcagagcctgtggca

SEQ ID NO: 423933 - DNA, 55 bp, Artificial
  Synthetic oligonucleotide
ggcctatgccaacccagaattatatttaacatcaaacggtagtaatgcagatgtt

SEQ ID NO: 423934 - DNA, 55 bp, Artificial
  Synthetic oligonucleotide
ggcctatgtacaggaagcccaggatatatcgggcttggagaacacccgacgttcc

SEQ ID NO: 423935 - DNA, 59 bp, Artificial
  Synthetic oligonucleotide
ggcctatgtcgagagaaagtttgtggccgcaattacattttgtgcgagctaagaaattg

SEQ ID NO: 423936 - DNA, 55 bp, Artificial
  Synthetic oligonucleotide
ggcctattagtaaactacacacagataatgggcctaactttactagtcaggaagt

SEQ ID NO: 423937 - DNA, 60 bp, Artificial
  Synthetic oligonucleotide
ggcctattccaccaggccagatgagagaaccaaggggaagtgacatagcaggaaccacta

SEQ ID NO: 423938 - DNA, 55 bp, Artificial
  Synthetic oligonucleotide
ggcctattgattggaaggtctgtcaacgtattgtgggtcttctgggttttgctgc

SEQ ID NO: 423939 - DNA, 59 bp, Artificial
  Synthetic oligonucleotide
ggcctattgtgaagcagctaagttcagctcaaactgcatcagtttgtgtgcaacccctc

SEQ ID NO: 423940 - DNA, 60 bp, Artificial
  Synthetic oligonucleotide
ggcctcaaaaggatgacggcagtatgttgactaatactattgcttacgctggtctcatta

SEQ ID NO: 423941 - DNA, 55 bp, Artificial
  Synthetic oligonucleotide
ggcctcaagagttcaatttgccagggttttacagaggctgactgtgtatcatcag

SEQ ID NO: 423942 - DNA, 55 bp, Artificial
  Synthetic oligonucleotide
ggcctcaaggttataacacataacgtttcaaccacacacctagcgaaatgcacgg

SEQ ID NO: 423943 - DNA, 55 bp, Artificial
  Synthetic oligonucleotide
ggcctcaagtgcctcatttaatacgtctgagaaagtcctactcctggccgatgcc

SEQ ID NO: 423944 - DNA, 55 bp, Artificial
  Synthetic oligonucleotide
ggcctcaatgctcttggacaacatggaggtgagaggtggaatggtcgccccactc

SEQ ID NO: 423945 - DNA, 57 bp, Artificial
  Synthetic oligonucleotide
ggcctcacaaaaaaacagagcggaagagacctggatcaccccagggtatctactcca

SEQ ID NO: 423946 - DNA, 53 bp, Artificial
  Synthetic oligonucleotide
ggcctcaccaccggagtggtattcctagtaggaggttcttccttgcttaaacc

SEQ ID NO: 423947 - DNA, 55 bp, Artificial
  Synthetic oligonucleotide
ggcctcacccatatagatgcccacttcttgtcccagactaaacaggcaggagaca

SEQ ID NO: 423948 - DNA, 60 bp, Artificial
  Synthetic oligonucleotide
ggcctcacctcaattagacgcccgctaagagagaccagattgacgaacccatactcagga

SEQ ID NO: 423949 - DNA, 55 bp, Artificial
  Synthetic oligonucleotide
ggcctcacggccaatgagtctggaaggctgatagacttcctcaaggatgtcatgg

SEQ ID NO: 423950 - DNA, 55 bp, Artificial
  Synthetic oligonucleotide
ggcctcacggccagtgaatctggaagactcatagacttcctaaaggatgttatgg

SEQ ID NO: 423951 - DNA, 55 bp, Artificial
  Synthetic oligonucleotide
ggcctcacggtgcaagcttccgtgtgtctgcacgtggtccgcatgtgttgtgtgg

SEQ ID NO: 423952 - DNA, 55 bp, Artificial
  Synthetic oligonucleotide
ggcctcactatctcacagcacaggatgccaccgcaatagacaaaccatcacaacc

SEQ ID NO: 423953 - DNA, 60 bp, Artificial
  Synthetic oligonucleotide
ggcctcagacaacaaccaccccgacgtctgttgatatgaactctattacttctactgatg

SEQ ID NO: 423954 - DNA, 60 bp, Artificial
  Synthetic oligonucleotide
ggcctcagcgcattttcactccatagttactctccaggtgaaatcaatagggtggccgca

SEQ ID NO: 423955 - DNA, 59 bp, Artificial
  Synthetic oligonucleotide
ggcctcatatacaacagaatgggaacagtaaccacagaagtggcttttggcctagtatg

SEQ ID NO: 423956 - DNA, 60 bp, Artificial
  Synthetic oligonucleotide
ggcctcatatacaacagaatggggactgtcaccactgaagtggcatttggcctagtatgc

SEQ ID NO: 423957 - DNA, 60 bp, Artificial
  Synthetic oligonucleotide
ggcctcatccagacgctgagctagtagacgccaacttgttatggcggcaagaaatgggca

SEQ ID NO: 423958 - DNA, 55 bp, Artificial
  Synthetic oligonucleotide
ggcctcatccagtcatcccgggcgcatgcaattgtcgcgttaacccggcacacag

SEQ ID NO: 423959 - DNA, 55 bp, Artificial
  Synthetic oligonucleotide
ggcctcatggcaaatgaatctggaaggctaatagactttcttaaggatgtaatgg

SEQ ID NO: 423960 - DNA, 55 bp, Artificial
  Synthetic oligonucleotide
ggcctcattaacccctaaagcacaacgagagatattttcagcgtggatttctcac

SEQ ID NO: 423961 - DNA, 60 bp, Artificial
  Synthetic oligonucleotide
ggcctcattaagccctggaatgatgatgggcatgtttaacatgctgagcacagttctagg

SEQ ID NO: 423962 - DNA, 60 bp, Artificial
  Synthetic oligonucleotide
ggcctcattcaatcatcccgggcccatgctatagttgcacttactcgccacaccgagaag

SEQ ID NO: 423963 - DNA, 55 bp, Artificial
  Synthetic oligonucleotide
ggcctcattcttcttttggtctgagtgctacggttataacgtttgggaggcccag

SEQ ID NO: 423964 - DNA, 55 bp, Artificial
  Synthetic oligonucleotide
ggcctccaaagttcgcaggtgaggccgagcctttactggatctcggaagggatac

SEQ ID NO: 423965 - DNA, 57 bp, Artificial
  Synthetic oligonucleotide
ggcctccatattggggctttggggtctgtcaacgtggcatccaatccggccctatac

SEQ ID NO: 423966 - DNA, 58 bp, Artificial
  Synthetic oligonucleotide
ggcctccattgccttcaggtgtgttagtgtacttccttaaatgttatgcatttatgtg

SEQ ID NO: 423967 - DNA, 58 bp, Artificial
  Synthetic oligonucleotide
ggcctccgcaaggtaattggttcggctgtacatggatgaatagcaccgggttcaccaa

SEQ ID NO: 423968 - DNA, 60 bp, Artificial
  Synthetic oligonucleotide
ggcctccgccgcctacccactcgatatctcctacgtctgtatgccatgactcaccgtcta

SEQ ID NO: 423969 - DNA, 56 bp, Artificial
  Synthetic oligonucleotide
ggcctccggttgcgggtaagtgcaacaagaagagtcataggactgagttccctact

SEQ ID NO: 423970 - DNA, 60 bp, Artificial
  Synthetic oligonucleotide
ggcctcctctacgcagccagacataacatatgacatttatgctgaccctgatttagggga

SEQ ID NO: 423971 - DNA, 58 bp, Artificial
  Synthetic oligonucleotide
ggcctcctgtgtccaatctattattcctacaccacttcaaaatggcggcgggtcacaa

SEQ ID NO: 423972 - DNA, 60 bp, Artificial
  Synthetic oligonucleotide
ggcctccttgtagcgtttatagccactcaagaagtgctgaaacgcagatggactgggaaa

SEQ ID NO: 423973 - DNA, 55 bp, Artificial
  Synthetic oligonucleotide
ggcctcctttgaaacagcgctgaatgctccatctctcgcccttgctggtgaggga

SEQ ID NO: 423974 - DNA, 56 bp, Artificial
  Synthetic oligonucleotide
ggcctcgaaagggctttgctttaacatgggtggcaagtggtcaaaaagtagcatag

SEQ ID NO: 423975 - DNA, 55 bp, Artificial
  Synthetic oligonucleotide
ggcctcgacgtctgaactgcctgtggtagagttggattactccggcaatgagatc

SEQ ID NO: 423976 - DNA, 55 bp, Artificial
  Synthetic oligonucleotide
ggcctcgagtgtgtgatcatggaggaatgtggcatgccccagtggctagtcagac

SEQ ID NO: 423977 - DNA, 55 bp, Artificial
  Synthetic oligonucleotide
ggcctcgatcattgttcgcggatgaggttaataagcataaagggctctacttagg

SEQ ID NO: 423978 - DNA, 55 bp, Artificial
  Synthetic oligonucleotide
ggcctcggtattggtaccggtcgcggtactggaggtgtcactggatacagacctc

SEQ ID NO: 423979 - DNA, 54 bp, Artificial
  Synthetic oligonucleotide
ggcctcgtcccaactaggccagacaaaactgagggcccacttgtaattacccag

SEQ ID NO: 423980 - DNA, 52 bp, Artificial
  Synthetic oligonucleotide
ggcctcgtgaaacggcacctgcgacttgtaatagccatctccgatggtccac

SEQ ID NO: 423981 - DNA, 55 bp, Artificial
  Synthetic oligonucleotide
ggcctcgtgtcaatgtcgctggataaacgacaacagtcaggatgatggagcaccc

SEQ ID NO: 423982 - DNA, 55 bp, Artificial
  Synthetic oligonucleotide
ggcctctacccggacgagttcataccgaacttcgatgcagtgagagaagcggtgg

SEQ ID NO: 423983 - DNA, 50 bp, Artificial
  Synthetic oligonucleotide
ggcctctacggggccagttacaggggacagcagatcaggagctgggtgcg

SEQ ID NO: 423984 - DNA, 55 bp, Artificial
  Synthetic oligonucleotide
ggcctctagctcagatttcctatcaggttaagtaaggtcgctatcatgggtgatt

SEQ ID NO: 423985 - DNA, 55 bp, Artificial
  Synthetic oligonucleotide
ggcctctatgcacaagtaatgaaaagagttcaacaagcggaagatttcaaaccca

SEQ ID NO: 423986 - DNA, 55 bp, Artificial
  Synthetic oligonucleotide
ggcctctcaacatcatcaacatcctagcttcatgtgattggactttcgcgggcat

SEQ ID NO: 423987 - DNA, 53 bp, Artificial
  Synthetic oligonucleotide
ggcctctcgcccgtcttaaaggttcctctgggggtcctgttatgtgcccttcg

SEQ ID NO: 423988 - DNA, 60 bp, Artificial
  Synthetic oligonucleotide
ggcctctcgtatgatgatcttccggatctgcatgccgagaacttgcagttttatgatcac

SEQ ID NO: 423989 - DNA, 55 bp, Artificial
  Synthetic oligonucleotide
ggcctctcgtggtgcttgattatcttgaaatataggggattgttgattgtccagg

SEQ ID NO: 423990 - DNA, 57 bp, Artificial
  Synthetic oligonucleotide
ggcctctgactgggtaaacaggcccatgtacagaaagccctggatataccggattta

SEQ ID NO: 423991 - DNA, 59 bp, Artificial
  Synthetic oligonucleotide
ggcctctgactgggtaaacaggcctatgtacaggaagcccaagatatatcggatttata

SEQ ID NO: 423992 - DNA, 55 bp, Artificial
  Synthetic oligonucleotide
ggcctctgccgagcctaccacagatctccatttcacactgaggcctttgatcccg

SEQ ID NO: 423993 - DNA, 55 bp, Artificial
  Synthetic oligonucleotide
ggcctctggtacatgttctggtgaatccacctcaaaccgcgtactaggagtggga

SEQ ID NO: 423994 - DNA, 50 bp, Artificial
  Synthetic oligonucleotide
ggcctctgtcggaaactgaactacaattcattaaggcactaaatagcctt

SEQ ID NO: 423995 - DNA, 55 bp, Artificial
  Synthetic oligonucleotide
ggcctctgtgttgagccccttgttgaagtgcttccctccatcgcgacgtggttgg

SEQ ID NO: 423996 - DNA, 55 bp, Artificial
  Synthetic oligonucleotide
ggcctcttacatgcatgcgtctcaccggcgagcctgggacttatgatgacaactc

SEQ ID NO: 423997 - DNA, 53 bp, Artificial
  Synthetic oligonucleotide
ggcctcttgcacgggaaccgtagggaaaccagtatgttgggaccctgtagccc

SEQ ID NO: 423998 - DNA, 60 bp, Artificial
  Synthetic oligonucleotide
ggcctctttcgttaacattactggatgctattcatgcaattatggagctagggtgtgcgt

SEQ ID NO: 423999 - DNA, 55 bp, Artificial
  Synthetic oligonucleotide
ggcctctttgaaggcatcatctaacttctcggaagattactatttatacacacct

SEQ ID NO: 424000 - DNA, 53 bp, Artificial
  Synthetic oligonucleotide
ggcctgaaccagtggttatcttgttcagaggggattccggccaggggaaaagt

SEQ ID NO: 424001 - DNA, 50 bp, Artificial
  Synthetic oligonucleotide
ggcctgaacggttgcattcaggtttctcaatcgttcaggccaatacaatt

SEQ ID NO: 424002 - DNA, 55 bp, Artificial
  Synthetic oligonucleotide
ggcctgaatcggtattggtgaatacctaccagtggatcatcagaaactgggaaac

SEQ ID NO: 424003 - DNA, 56 bp, Artificial
  Synthetic oligonucleotide
ggcctgaatttgtattaggtaataattcggcgatatccacatttattacgtatcct

SEQ ID NO: 424004 - DNA, 57 bp, Artificial
  Synthetic oligonucleotide
ggcctgaatttgtcatgacccataactcagctctttcaacttttattaatttcccag

SEQ ID NO: 424005 - DNA, 55 bp, Artificial
  Synthetic oligonucleotide
ggcctgacacggagatcgcgtcggaggatctccagataggtatgtcagcggcttc

SEQ ID NO: 424006 - DNA, 60 bp, Artificial
  Synthetic oligonucleotide
ggcctgacctcaattagcatgtcctcaagacctgaacctgactggcatctactagttccc

SEQ ID NO: 424007 - DNA, 58 bp, Artificial
  Synthetic oligonucleotide
ggcctgagccacatcgggttacaagtagtaccaccattaactgtgtcagagactaaag

SEQ ID NO: 424008 - DNA, 58 bp, Artificial
  Synthetic oligonucleotide
ggcctgcaaattcctacaaagtcctgcaagctatcgtttagaagaacaccaagggaca

SEQ ID NO: 424009 - DNA, 55 bp, Artificial
  Synthetic oligonucleotide
ggcctgcagaggcctggaaattggacggggtcagcctcttggggttgggagttct

SEQ ID NO: 424010 - DNA, 55 bp, Artificial
  Synthetic oligonucleotide
ggcctgccgctactcgtccatcggtgtaggggtggcttggttggtgtatgacgca

SEQ ID NO: 424011 - DNA, 55 bp, Artificial
  Synthetic oligonucleotide
ggcctgccgtgagagagagaataagacgaactgagccagcagcagagggagtagg

SEQ ID NO: 424012 - DNA, 54 bp, Artificial
  Synthetic oligonucleotide
ggcctgcctacggggaaacccgtaggacgctttaatgttaacatggtgcgaaga

SEQ ID NO: 424013 - DNA, 60 bp, Artificial
  Synthetic oligonucleotide
ggcctgcctattatcctcgcaacaaagaggaggctatgcactacggtgaccgtcttgcgc

SEQ ID NO: 424014 - DNA, 56 bp, Artificial
  Synthetic oligonucleotide
ggcctgccttaacagcacgtaggtcaggtgttagatatagtcgcataggtcaaagg

SEQ ID NO: 424015 - DNA, 55 bp, Artificial
  Synthetic oligonucleotide
ggcctgcgaatagaatcaacctaatcaagccagtctacgtttaagtaagactgac

SEQ ID NO: 424016 - DNA, 59 bp, Artificial
  Synthetic oligonucleotide
ggcctgcgcaacactaaaatcaaacccaattggcatcttcaacggtgttgcattcaagg

SEQ ID NO: 424017 - DNA, 57 bp, Artificial
  Synthetic oligonucleotide
ggcctggaactaacctttacaaatgactccatcattcaacacaacttctgcaaccta

SEQ ID NO: 424018 - DNA, 55 bp, Artificial
  Synthetic oligonucleotide
ggcctggacagtggtgaacagcatctgcaatactacggaggttgagaagcccaag

SEQ ID NO: 424019 - DNA, 55 bp, Artificial
  Synthetic oligonucleotide
ggcctggacagtggtgaatagcatctgtaacaccacaggagttgagaagcccaag

SEQ ID NO: 424020 - DNA, 57 bp, Artificial
  Synthetic oligonucleotide
ggcctggagtgagatatccaaaggcctttggctggctatggaagctagcaccagtca

SEQ ID NO: 424021 - DNA, 55 bp, Artificial
  Synthetic oligonucleotide
ggcctggatagctactagaccacttcgcaacgatgctaatgccatcctaaagcgg

SEQ ID NO: 424022 - DNA, 55 bp, Artificial
  Synthetic oligonucleotide
ggcctggcgaacgctaggctttggtggtgcagcacccctccctgatcttaaaggg

SEQ ID NO: 424023 - DNA, 53 bp, Artificial
  Synthetic oligonucleotide
ggcctggctccgcaattttgacctgtgaggtgctccctaccagataccccaga

SEQ ID NO: 424024 - DNA, 60 bp, Artificial
  Synthetic oligonucleotide
ggcctggctgtgtgccttcttgatagaggggggctgtgagggtgatgaagatcgcattct

SEQ ID NO: 424025 - DNA, 55 bp, Artificial
  Synthetic oligonucleotide
ggcctggctgttaccgcacattaaatctttttaggtataagagtaggtgttatat

SEQ ID NO: 424026 - DNA, 55 bp, Artificial
  Synthetic oligonucleotide
ggcctgggaacagtcttgaccaaggagaaccaactaacccttctgacgccgctgc

SEQ ID NO: 424027 - DNA, 55 bp, Artificial
  Synthetic oligonucleotide
ggcctgggcacagatcttactcacggcctgaaggagggtatcatcgacttggggt

SEQ ID NO: 424028 - DNA, 55 bp, Artificial
  Synthetic oligonucleotide
ggcctgggctcttcgccgtcaccttacactaactggacagtttcaagcgatcaga

SEQ ID NO: 424029 - DNA, 60 bp, Artificial
  Synthetic oligonucleotide
ggcctgggtgtatgctgaagcagcctagagaatctaagtgcgcttgtattagctgtaagc

SEQ ID NO: 424030 - DNA, 55 bp, Artificial
  Synthetic oligonucleotide
ggcctggtaaagggtcacggcggagaacaacttaccattgacaatgctatacggg

SEQ ID NO: 424031 - DNA, 55 bp, Artificial
  Synthetic oligonucleotide
ggcctggttgaagtgcaagagagtgaatactaccccaagagataccagtcccacg

SEQ ID NO: 424032 - DNA, 55 bp, Artificial
  Synthetic oligonucleotide
ggcctgtaaacagggaccagacagcatgaatatcgtgacagacagtagatacgcc

SEQ ID NO: 424033 - DNA, 55 bp, Artificial
  Synthetic oligonucleotide
ggcctgtaagaagcaattgatcttttacacacagcttacacccttgtggagagct

SEQ ID NO: 424034 - DNA, 60 bp, Artificial
  Synthetic oligonucleotide
ggcctgtaataccagatcctgtctagttgattccaacattaacacccttctttgtgctgc

SEQ ID NO: 424035 - DNA, 52 bp, Artificial
  Synthetic oligonucleotide
ggcctgtaatgacttctcagtgcggatgttgaaagatacaccctttgtggag

SEQ ID NO: 424036 - DNA, 55 bp, Artificial
  Synthetic oligonucleotide
ggcctgtacaaacatggaccttggtattaccaaggttagccctttcaataaagca

SEQ ID NO: 424037 - DNA, 57 bp, Artificial
  Synthetic oligonucleotide
ggcctgtaccaacgtggtcaaataacactgctgtggtgcattttactaatgaccctt

SEQ ID NO: 424038 - DNA, 53 bp, Artificial
  Synthetic oligonucleotide
ggcctgtagaggtttggaaataggtcgcggacaacccctaggagtagggtcta

SEQ ID NO: 424039 - DNA, 60 bp, Artificial
  Synthetic oligonucleotide
ggcctgtcgtaattacaggcccttacccgctgtggatgtcagcgagagtgtcacagagga

SEQ ID NO: 424040 - DNA, 55 bp, Artificial
  Synthetic oligonucleotide
ggcctgtcgttacttgtgtatcgcatggaactgctccgtccaatagatgatcttg

SEQ ID NO: 424041 - DNA, 60 bp, Artificial
  Synthetic oligonucleotide
ggcctgtgacatggcaatttgttatggtgcagaaagtgtgacactctcacgagggcaaaa

SEQ ID NO: 424042 - DNA, 60 bp, Artificial
  Synthetic oligonucleotide
ggcctgtgctatccaggagacttcaatgattatgaagaactgaagcacttaatgagcagc

SEQ ID NO: 424043 - DNA, 55 bp, Artificial
  Synthetic oligonucleotide
ggcctgtggctaccttctatggaccagagcaggagaatatgccagaggtggcggg

SEQ ID NO: 424044 - DNA, 55 bp, Artificial
  Synthetic oligonucleotide
ggcctgtgtatacgggtgttttattcttcgagcttattgtctacagctcaaattt

SEQ ID NO: 424045 - DNA, 51 bp, Artificial
  Synthetic oligonucleotide
ggcctgtgtgtaattgccacgcaggcctacgagcactcaaccacgatgccg

SEQ ID NO: 424046 - DNA, 55 bp, Artificial
  Synthetic oligonucleotide
ggcctgtgttactttggatcgagatcaacagagctatgctctgatcccgtacgtt

SEQ ID NO: 424047 - DNA, 55 bp, Artificial
  Synthetic oligonucleotide
ggcctgtgtttggtgcagggagcctctcacagaagttgatgcttttaggtgcatg

SEQ ID NO: 424048 - DNA, 57 bp, Artificial
  Synthetic oligonucleotide
ggcctgttaaaagtactctgggaaaaatcgcaatatcagacttacgtgaaagataga

SEQ ID NO: 424049 - DNA, 55 bp, Artificial
  Synthetic oligonucleotide
ggcctgttacagaagtcaatacatgggcccgaaacatactacggacacaagaatc

SEQ ID NO: 424050 - DNA, 60 bp, Artificial
  Synthetic oligonucleotide
ggcctgttctacctcaatggtgtggagacgaagattcgtcgtggaggccacccatcagtg

SEQ ID NO: 424051 - DNA, 55 bp, Artificial
  Synthetic oligonucleotide
ggcctgtttctatatctgctgtcggtgtcctcgcacctcactctgtactggctgc

SEQ ID NO: 424052 - DNA, 56 bp, Artificial
  Synthetic oligonucleotide
ggccttaaagcttttagagaactctttttgcagtaaaaagcacaaggcgtatgaca

SEQ ID NO: 424053 - DNA, 57 bp, Artificial
  Synthetic oligonucleotide
ggccttaaatggggttctgtgagaggggatccctccattgacagctggactgttctt

SEQ ID NO: 424054 - DNA, 56 bp, Artificial
  Synthetic oligonucleotide
ggccttaagagaagaataaacgtgtccattgggtggtctgacaggccgaatcaggt

SEQ ID NO: 424055 - DNA, 55 bp, Artificial
  Synthetic oligonucleotide
ggccttaagtccctatacggcatagtatgtgtcgtttgggcatgccacgccaacc

SEQ ID NO: 424056 - DNA, 50 bp, Artificial
  Synthetic oligonucleotide
ggccttaatgctgtagcctattacagaggattagacgtttcggtgatacc

SEQ ID NO: 424057 - DNA, 55 bp, Artificial
  Synthetic oligonucleotide
ggccttaatggtcctagcaagggtgcacctccgtttctcactggaacaggggccc

SEQ ID NO: 424058 - DNA, 60 bp, Artificial
  Synthetic oligonucleotide
ggccttaattctattgggcctgtgagcccaatagtggatgtggaggcggatctgatcatt

SEQ ID NO: 424059 - DNA, 55 bp, Artificial
  Synthetic oligonucleotide
ggccttacagtctatccatcatgcattcaggggcacctcatcatcttacatagca

SEQ ID NO: 424060 - DNA, 60 bp, Artificial
  Synthetic oligonucleotide
ggccttacctggcatggtgtggcaagatcgtgacgtgtaccttcaaggacctatctgggc

SEQ ID NO: 424061 - DNA, 57 bp, Artificial
  Synthetic oligonucleotide
ggccttaccttggcctcagaaaggtgacgcagtttcactacccttaggcacgtctgc

SEQ ID NO: 424062 - DNA, 57 bp, Artificial
  Synthetic oligonucleotide
ggccttagacttatggatggaacgtgggttgcaatgcaaacatcggacgaaaccaag

SEQ ID NO: 424063 - DNA, 60 bp, Artificial
  Synthetic oligonucleotide
ggccttagtaatgagcattataacgggtatgacctgtttagagagataggatctctagtc

SEQ ID NO: 424064 - DNA, 55 bp, Artificial
  Synthetic oligonucleotide
ggccttataacttaaccgtcggcagttgggtaagagaccatgtccgctcaattgt

SEQ ID NO: 424065 - DNA, 55 bp, Artificial
  Synthetic oligonucleotide
ggccttatacatgttatcaacacgaggaagacagactgtgaaggaaaataagggg

SEQ ID NO: 424066 - DNA, 55 bp, Artificial
  Synthetic oligonucleotide
ggccttatagcttcatctcgcgcgcatgccatagtcgcgctgactcgccatcggg

SEQ ID NO: 424067 - DNA, 57 bp, Artificial
  Synthetic oligonucleotide
ggccttatctgctaatcaaccagaaacgactataattaatgtaggagatgtagtatc

SEQ ID NO: 424068 - DNA, 55 bp, Artificial
  Synthetic oligonucleotide
ggccttcaacaggccatgatagacatcaagcgggaggcattgaccgcaggcggct

SEQ ID NO: 424069 - DNA, 55 bp, Artificial
  Synthetic oligonucleotide
ggccttcacagaatagtcctgtttagctatgaacatatcatacttgttcaccttg

SEQ ID NO: 424070 - DNA, 55 bp, Artificial
  Synthetic oligonucleotide
ggccttcagcgttcccccactcaaccagagggagaatagggacgccaaggaacca

SEQ ID NO: 424071 - DNA, 55 bp, Artificial
  Synthetic oligonucleotide
ggccttcagcttaccaatctgatacctggcgagttgtttatacctgatacaaggt

SEQ ID NO: 424072 - DNA, 58 bp, Artificial
  Synthetic oligonucleotide
ggccttccacatcgtacgacaagagccaacaggaaagatctggaagcggtcaaccaaa

SEQ ID NO: 424073 - DNA, 56 bp, Artificial
  Synthetic oligonucleotide
ggccttccagcaaggggaggccaggaaactttcctcagaaaagagtggagccaaca

SEQ ID NO: 424074 - DNA, 53 bp, Artificial
  Synthetic oligonucleotide
ggccttccagtggcctcgagtgctgccaatcctggggcctgcgaagtgggcat

SEQ ID NO: 424075 - DNA, 58 bp, Artificial
  Synthetic oligonucleotide
ggccttccatatgttaagaaaggcttgcgccggactgacctgtggaactcaaagactg

SEQ ID NO: 424076 - DNA, 55 bp, Artificial
  Synthetic oligonucleotide
ggccttccggactaccaaaatggccgaatcagtgacgtcacggccgccattttaa

SEQ ID NO: 424077 - DNA, 55 bp, Artificial
  Synthetic oligonucleotide
ggccttcctgtgtgccaagaccacctggaattctgggagagcgtcttcacagggc

SEQ ID NO: 424078 - DNA, 55 bp, Artificial
  Synthetic oligonucleotide
ggccttcgggatgtctaaggtgttctccaggacacatgaattcttccagaggtca

SEQ ID NO: 424079 - DNA, 55 bp, Artificial
  Synthetic oligonucleotide
ggccttcggtaacctgtatgctgctttccacaagaaccctggcgtaatcaccgga

SEQ ID NO: 424080 - DNA, 56 bp, Artificial
  Synthetic oligonucleotide
ggccttctaaagaagttggttacccagtgattaatgcaccaagcaagactaaactc

SEQ ID NO: 424081 - DNA, 55 bp, Artificial
  Synthetic oligonucleotide
ggccttctcatccaactcaacaggtaacaagccccaagtggcacaagcgggtggg

SEQ ID NO: 424082 - DNA, 55 bp, Artificial
  Synthetic oligonucleotide
ggccttctccggatttgcgcgttagcgcggaagatggctggaggccattacgtgc

SEQ ID NO: 424083 - DNA, 55 bp, Artificial
  Synthetic oligonucleotide
ggccttctgtagcaaatggacttttaaatgaattgggcttggaccagtagattcg

SEQ ID NO: 424084 - DNA, 55 bp, Artificial
  Synthetic oligonucleotide
ggccttgaaattccgcaaagcacgggacaaaagggcaggatttgagatagatgca

SEQ ID NO: 424085 - DNA, 55 bp, Artificial
  Synthetic oligonucleotide
ggccttgaggaggttgtatcttaacgaacacattgaggatgatgagttagaggca

SEQ ID NO: 424086 - DNA, 55 bp, Artificial
  Synthetic oligonucleotide
ggccttgatggcagtgttagtagcaaggaagaggacacggagaggcacactgttg

SEQ ID NO: 424087 - DNA, 55 bp, Artificial
  Synthetic oligonucleotide
ggccttgcggatcttgcagtagtagagccccgtcttaaggcccttcttataggcg

SEQ ID NO: 424088 - DNA, 60 bp, Artificial
  Synthetic oligonucleotide
ggccttggaaaaccagcatacaattgatctgactgattctgaaatgaacaaactattcga

SEQ ID NO: 424089 - DNA, 55 bp, Artificial
  Synthetic oligonucleotide
ggccttggcacatggtgtcagggccgtggaagacgggatcaattatgcaacaggg

SEQ ID NO: 424090 - DNA, 56 bp, Artificial
  Synthetic oligonucleotide
ggccttgggtatgcaatttgggcctagaattatgggcttcatttaacggcctttga

SEQ ID NO: 424091 - DNA, 55 bp, Artificial
  Synthetic oligonucleotide
ggccttggtatgtttggctcggcttcattgctggactaattgccatcgtcatggt

SEQ ID NO: 424092 - DNA, 60 bp, Artificial
  Synthetic oligonucleotide
ggccttgtctttactgcagacgacactccccatgaacatggaattcatggaatgggccga

SEQ ID NO: 424093 - DNA, 55 bp, Artificial
  Synthetic oligonucleotide
ggccttgtggatcctgtgagactcttcgtcaagcaagaaccacatacgatgcgga

SEQ ID NO: 424094 - DNA, 53 bp, Artificial
  Synthetic oligonucleotide
ggccttgtgggtcttacagttatagccacttcatttgctcctaaggcagtaat

SEQ ID NO: 424095 - DNA, 55 bp, Artificial
  Synthetic oligonucleotide
ggccttgtttgttagcttttctccggatttgagggtagagttctagcttctcgcc

SEQ ID NO: 424096 - DNA, 55 bp, Artificial
  Synthetic oligonucleotide
ggcctttaggttgatcaactaggggtgcctagaggaactcgctgggttttgcacg

SEQ ID NO: 424097 - DNA, 55 bp, Artificial
  Synthetic oligonucleotide
ggcctttcaatcatgctaataagagaggaatcatgccagagtatgcttacttggc

SEQ ID NO: 424098 - DNA, 52 bp, Artificial
  Synthetic oligonucleotide
ggcctttcgcttgctattacccccccgctgcgtttgtttaacagcgaccccg

SEQ ID NO: 424099 - DNA, 52 bp, Artificial
  Synthetic oligonucleotide
ggcctttctaaatcaacaatatatgaacctttaccccgttgcccggcaacgg

SEQ ID NO: 424100 - DNA, 54 bp, Artificial
  Synthetic oligonucleotide
ggcctttctacgcaaacaatatctggacctttaccccgttgctcggcaacggtc

SEQ ID NO: 424101 - DNA, 53 bp, Artificial
  Synthetic oligonucleotide
ggcctttctcatgcccaggaggcatcacatggccacatccgttgccgaactcg

SEQ ID NO: 424102 - DNA, 51 bp, Artificial
  Synthetic oligonucleotide
ggcctttctccgtgaacagtatttgaacctttaccccgttgttcggcaacg

SEQ ID NO: 424103 - DNA, 51 bp, Artificial
  Synthetic oligonucleotide
ggcctttctgtgtaaccaatatcttaacctttaccccgttgcccggcaacg

SEQ ID NO: 424104 - DNA, 55 bp, Artificial
  Synthetic oligonucleotide
ggcctttctgtgtcaacaatatctgcacctttaccccgttgcccggcaacgttcc

SEQ ID NO: 424105 - DNA, 60 bp, Artificial
  Synthetic oligonucleotide
ggcctttgacaatggaaatgatatttggatgggacgaacgatcaaagaagattcacgctc

SEQ ID NO: 424106 - DNA, 55 bp, Artificial
  Synthetic oligonucleotide
ggcctttgactccctgcaagcctcagcgaccgaatatatcggttatgcgtgggcg

SEQ ID NO: 424107 - DNA, 56 bp, Artificial
  Synthetic oligonucleotide
ggcctttgagggtgacgaagatcgcatttcttatagcccagtttctaagtgcggag

SEQ ID NO: 424108 - DNA, 55 bp, Artificial
  Synthetic oligonucleotide
ggcctttggcgttgtagcccgtcgggaccacatcctggcgttggtgttaatagtc

SEQ ID NO: 424109 - DNA, 59 bp, Artificial
  Synthetic oligonucleotide
ggcgaaaacggacgaagaacaaggatcgcgtatgagaggatgtgcaacatcctcaaagg

SEQ ID NO: 424110 - DNA, 60 bp, Artificial
  Synthetic oligonucleotide
ggcgaaaatactgtcagcagaaactatgccacacactcagacggtaccaactacccagga

SEQ ID NO: 424111 - DNA, 55 bp, Artificial
  Synthetic oligonucleotide
ggcgaaaatcaaatggagatccagtcgataagcccttaggtcaaaaatgggtagg

SEQ ID NO: 424112 - DNA, 58 bp, Artificial
  Synthetic oligonucleotide
ggcgaaaatggacggaggacaagaattgcttacgaaagaatgtgcaacatcctcaagg

SEQ ID NO: 424113 - DNA, 58 bp, Artificial
  Synthetic oligonucleotide
ggcgaaaatgggcgaagaacaaggactgcatatgagagaatgtgcaatatcctcaaag

SEQ ID NO: 424114 - DNA, 60 bp, Artificial
  Synthetic oligonucleotide
ggcgaaacaacctggtgatatgagctggagccgtccagtacataatgccgccgggatcga

SEQ ID NO: 424115 - DNA, 58 bp, Artificial
  Synthetic oligonucleotide
ggcgaaacccgagctggtgttcacttacgcgatgcaggtgtcagtagcgttaaacacc

SEQ ID NO: 424116 - DNA, 55 bp, Artificial
  Synthetic oligonucleotide
ggcgaaactttcgtctgtcacgactgatctttgcatttaatctgttgaagaggct

SEQ ID NO: 424117 - DNA, 55 bp, Artificial
  Synthetic oligonucleotide
ggcgaaagatgctgcgaaaggacacgacttaaaattagtcgtccacgcggttgct

SEQ ID NO: 424118 - DNA, 55 bp, Artificial
  Synthetic oligonucleotide
ggcgaaagctgcatcattcggtgcttttatgtggagttgataaggcgaaggccac

SEQ ID NO: 424119 - DNA, 50 bp, Artificial
  Synthetic oligonucleotide
ggcgaaaggacaacgtttgagagcaatggaggccttatagcacccagata

SEQ ID NO: 424120 - DNA, 55 bp, Artificial
  Synthetic oligonucleotide
ggcgaaatatgtttcgcttctcaacggttgggactgcaacgcgaacctgcatcag

SEQ ID NO: 424121 - DNA, 60 bp, Artificial
  Synthetic oligonucleotide
ggcgaaatgagaagaacgaacatgtacttgcaactaagataccatggtattgttcagatt

SEQ ID NO: 424122 - DNA, 57 bp, Artificial
  Synthetic oligonucleotide
ggcgaaattatttgacgattttaacgctaaatatgaagacgatgttggacctctgta

SEQ ID NO: 424123 - DNA, 55 bp, Artificial
  Synthetic oligonucleotide
ggcgaacaaatcttatgggaagactgcaaagagtcagaaaaggaagcggtgttag

SEQ ID NO: 424124 - DNA, 55 bp, Artificial
  Synthetic oligonucleotide
ggcgaacaaccttggagatgtcagggatgcacaagcagcccggaacaacctgggc

SEQ ID NO: 424125 - DNA, 55 bp, Artificial
  Synthetic oligonucleotide
ggcgaacacacttctcccaaatatgtgaggagtaccctatagtcccatatttagc

SEQ ID NO: 424126 - DNA, 55 bp, Artificial
  Synthetic oligonucleotide
ggcgaacatgtgggatcctctagttcatcctttccctgaaagcttgcacggcttt

SEQ ID NO: 424127 - DNA, 55 bp, Artificial
  Synthetic oligonucleotide
ggcgaaccagtagagatgtatttctgtgcagatggaggtcaatcagatgccacct

SEQ ID NO: 424128 - DNA, 55 bp, Artificial
  Synthetic oligonucleotide
ggcgaacccccgagtgaactcaattgtcctccacactggccggggaccctctgcg

SEQ ID NO: 424129 - DNA, 55 bp, Artificial
  Synthetic oligonucleotide
ggcgaacctcctcgctatattgttctgttgcactaatcatacgatgggcatataa

SEQ ID NO: 424130 - DNA, 57 bp, Artificial
  Synthetic oligonucleotide
ggcgaacctcttaaagctacctcgtatatggctgtcggcttctacgtcgctaaatac

SEQ ID NO: 424131 - DNA, 60 bp, Artificial
  Synthetic oligonucleotide
ggcgaacgctgtgatctggacgacagggacaggtccgagctcagcccattgctgctgtct

SEQ ID NO: 424132 - DNA, 55 bp, Artificial
  Synthetic oligonucleotide
ggcgaacgtcgtgaggaaaatgatgactaattcacaagacacagaactctctttc

SEQ ID NO: 424133 - DNA, 52 bp, Artificial
  Synthetic oligonucleotide
ggcgaactcgatagcaaatttggcgctgattaaaacagttctatcacgcata

SEQ ID NO: 424134 - DNA, 56 bp, Artificial
  Synthetic oligonucleotide
ggcgaactgcccaatacacaaggtcacctactacctagccaaaccgacgttcgcca

SEQ ID NO: 424135 - DNA, 60 bp, Artificial
  Synthetic oligonucleotide
ggcgaagaggatcagcaaattagagaacacgatcaataattacatacagttcaagagcaa

SEQ ID NO: 424136 - DNA, 55 bp, Artificial
  Synthetic oligonucleotide
ggcgaagcacatgtggaacttcatcagcggaatacagtacctggcaggcttgtcc

SEQ ID NO: 424137 - DNA, 55 bp, Artificial
  Synthetic oligonucleotide
ggcgaagcgcatggggctcctgtggagcatcagccccaacgtccaggccatgaac

SEQ ID NO: 424138 - DNA, 56 bp, Artificial
  Synthetic oligonucleotide
ggcgaaggagtagagccgcaacatgtgggatccattaaccaacgagtttcccgaaa

SEQ ID NO: 424139 - DNA, 55 bp, Artificial
  Synthetic oligonucleotide
ggcgaaggctggtttggattttggtactactttctctactatcagcagttatgtt

SEQ ID NO: 424140 - DNA, 50 bp, Artificial
  Synthetic oligonucleotide
ggcgaagtgcatgcaaccgtacacgcccatggcaactttcggagtcgcag

SEQ ID NO: 424141 - DNA, 60 bp, Artificial
  Synthetic oligonucleotide
ggcgaagtgggtccgctgatgcacgtttgtatcgcagactttgtagtacaatttccatgg

SEQ ID NO: 424142 - DNA, 57 bp, Artificial
  Synthetic oligonucleotide
ggcgaagtgggtcctctgatgaacattcgtatcggaaaccctgtagtacaacttcca

SEQ ID NO: 424143 - DNA, 55 bp, Artificial
  Synthetic oligonucleotide
ggcgaatactcatacatacgcttcgtagacccattgactggagcacaaatcgagg

SEQ ID NO: 424144 - DNA, 60 bp, Artificial
  Synthetic oligonucleotide
ggcgaatatgggacagtttagagcagcgatcaggcgtacattggatgataacggttggat

SEQ ID NO: 424145 - DNA, 60 bp, Artificial
  Synthetic oligonucleotide
ggcgaatccagcacggggggagaagatagcgctcttaatgtggcacatcaactttcggag

SEQ ID NO: 424146 - DNA, 55 bp, Artificial
  Synthetic oligonucleotide
ggcgaatcgagtaatgaattcagtctgttttgaacattcgccgtgtgaacacgga

SEQ ID NO: 424147 - DNA, 60 bp, Artificial
  Synthetic oligonucleotide
ggcgaatctatcgatccgatttcaagaggcaatcgacaataagttccgacaacatgatcc

SEQ ID NO: 424148 - DNA, 59 bp, Artificial
  Synthetic oligonucleotide
ggcgaatgtgaatgcggtgatgttaacgaaacgcgcgtcactcatattgtgcccggcga

SEQ ID NO: 424149 - DNA, 58 bp, Artificial
  Synthetic oligonucleotide
ggcgaattaaagttaatcgagtttgatggagcgcaacattttagcaactcgagtaata

SEQ ID NO: 424150 - DNA, 55 bp, Artificial
  Synthetic oligonucleotide
ggcgaattaccttccgtttggctgctctgtgtcgtggtttgatagaggggggagt

SEQ ID NO: 424151 - DNA, 55 bp, Artificial
  Synthetic oligonucleotide
ggcgaattctgccgcttgaggttcccaaagccaatcaggactgatgtgacgggca

SEQ ID NO: 424152 - DNA, 55 bp, Artificial
  Synthetic oligonucleotide
ggcgaattctttggcttgacatgtcctatagatctgactttgtccacgatagtgg

SEQ ID NO: 424153 - DNA, 60 bp, Artificial
  Synthetic oligonucleotide
ggcgaattggcgccctcctccgtctgaatctccgcctcctcatgacctacgtagtgcgta

SEQ ID NO: 424154 - DNA, 58 bp, Artificial
  Synthetic oligonucleotide
ggcgacaacaaagctggtgctagtggacaacttgtagccattatacccaagaaacgtc

SEQ ID NO: 424155 - DNA, 60 bp, Artificial
  Synthetic oligonucleotide
ggcgacaacatggcttacgctcatagacagtggagcatacctgtcctattatacgctcat

SEQ ID NO: 424156 - DNA, 60 bp, Artificial
  Synthetic oligonucleotide
ggcgacaaggagttatctcctatagatggacagtgcgtcacattacataaccatgatcta

SEQ ID NO: 424157 - DNA, 55 bp, Artificial
  Synthetic oligonucleotide
ggcgacaattggagtgctagcaacgccagagattcctttcacaacagaagctgcg

SEQ ID NO: 424158 - DNA, 51 bp, Artificial
  Synthetic oligonucleotide
ggcgacaccaacgactgttgcacagtggtggtgccaactgttgagctcaga

SEQ ID NO: 424159 - DNA, 58 bp, Artificial
  Synthetic oligonucleotide
ggcgacagagatgttactaaattgtacctcggaggtatgtcatacttctgtggtaatc

SEQ ID NO: 424160 - DNA, 55 bp, Artificial
  Synthetic oligonucleotide
ggcgacagcataattatgcagcccttaggtgaaagtacctttgtggatgcaggag

SEQ ID NO: 424161 - DNA, 56 bp, Artificial
  Synthetic oligonucleotide
ggcgacagctatcgtctagggtataaactggttgagagggttacggaactatgaaa

SEQ ID NO: 424162 - DNA, 55 bp, Artificial
  Synthetic oligonucleotide
ggcgacagtattaagtcagtttaagactgacttcttaatgacgcccttaagccgt

SEQ ID NO: 424163 - DNA, 50 bp, Artificial
  Synthetic oligonucleotide
ggcgacagtgtattgtttgtcctttggatacacttgccttgttggacaca

SEQ ID NO: 424164 - DNA, 55 bp, Artificial
  Synthetic oligonucleotide
ggcgacatagtaaaggcaatctcataccatgctggaatagtcgtagctcctaata

SEQ ID NO: 424165 - DNA, 58 bp, Artificial
  Synthetic oligonucleotide
ggcgacattgtctatgtctagcacttatcacttaccgatgaaacacaagtgcacttat

SEQ ID NO: 424166 - DNA, 60 bp, Artificial
  Synthetic oligonucleotide
ggcgaccaaagcacctctatgtatctatgcctacagcccagtctactatgaaagcagagg

SEQ ID NO: 424167 - DNA, 55 bp, Artificial
  Synthetic oligonucleotide
ggcgaccatgcgcctcctcgatgtgaattaccgagaccttgccctctcgggctac

SEQ ID NO: 424168 - DNA, 55 bp, Artificial
  Synthetic oligonucleotide
ggcgacccgtcggtacctctgttgctaccatcgactcacttgccatcgttagcga

SEQ ID NO: 424169 - DNA, 50 bp, Artificial
  Synthetic oligonucleotide
ggcgacctacaacatggctaccgacattgatatgctaatcgacctaggat

SEQ ID NO: 424170 - DNA, 55 bp, Artificial
  Synthetic oligonucleotide
ggcgacctgcatcaacggtgcgtgttggactgtctaccacggtgccggctcaaag

SEQ ID NO: 424171 - DNA, 51 bp, Artificial
  Synthetic oligonucleotide
ggcgaccttaccctgacctctgggacacctggcaactacaacgcaagcacc

SEQ ID NO: 424172 - DNA, 55 bp, Artificial
  Synthetic oligonucleotide
ggcgacgacgaactttgccgaaataagatcgaacgtgatcgtattcgatccgccc

SEQ ID NO: 424173 - DNA, 55 bp, Artificial
  Synthetic oligonucleotide
ggcgacgcaaacgagcgtccgcaacagatttgtatcggacctgcaaagctgcagg

SEQ ID NO: 424174 - DNA, 55 bp, Artificial
  Synthetic oligonucleotide
ggcgacgcagtatgcactgttcaaaaaggcatatggcattagtattacggagctg

SEQ ID NO: 424175 - DNA, 59 bp, Artificial
  Synthetic oligonucleotide
ggcgacggaagacaaatctgtatggattcatcataaaggggaggtctcatttgagaaac

SEQ ID NO: 424176 - DNA, 60 bp, Artificial
  Synthetic oligonucleotide
ggcgacgtaaggcttctgtgtcccacctgtcgagaagacattcgcaatggcggacgataa

SEQ ID NO: 424177 - DNA, 58 bp, Artificial
  Synthetic oligonucleotide
ggcgacgtcctcgttcaacatcaatgaattggtagcctcccacggcgataaaggacta

SEQ ID NO: 424178 - DNA, 55 bp, Artificial
  Synthetic oligonucleotide
ggcgactatagcatcggaaggctcgtcatcggaacgacgagtcaagtgtcggcgg

SEQ ID NO: 424179 - DNA, 51 bp, Artificial
  Synthetic oligonucleotide
ggcgactataggaagcaaccaggggtcagcaaaaagtgtacgagttcgaaa

SEQ ID NO: 424180 - DNA, 55 bp, Artificial
  Synthetic oligonucleotide
ggcgactcatggctgggctggtaggatactgttcactaggctgtgaggcttgaac

SEQ ID NO: 424181 - DNA, 56 bp, Artificial
  Synthetic oligonucleotide
ggcgactccttgcacccatcacggcttactcccaacagacgcggggcctacttggt

SEQ ID NO: 424182 - DNA, 52 bp, Artificial
  Synthetic oligonucleotide
ggcgactccttgcctatactttatccttccttggccctaccggccccccgac

SEQ ID NO: 424183 - DNA, 55 bp, Artificial
  Synthetic oligonucleotide
ggcgactgaggcgtctaattacgcccaatatcgagtcgtccgggctacaattcgc

SEQ ID NO: 424184 - DNA, 52 bp, Artificial
  Synthetic oligonucleotide
ggcgactgatatgcctggacaggctctgtgaatatccgtgacaaattacaat

SEQ ID NO: 424185 - DNA, 60 bp, Artificial
  Synthetic oligonucleotide
ggcgactgcaccagtggataagctcggagagcactactccatgctccggctcctggctaa

SEQ ID NO: 424186 - DNA, 55 bp, Artificial
  Synthetic oligonucleotide
ggcgactggaattgcaattaggaaacatcacgtggatgccaaaattttggtcctg

SEQ ID NO: 424187 - DNA, 60 bp, Artificial
  Synthetic oligonucleotide
ggcgactgtccggttggacgctgcatgcaggcagtcgtagattttagacgggactggtaa

SEQ ID NO: 424188 - DNA, 55 bp, Artificial
  Synthetic oligonucleotide
ggcgactgttgtccctaaagtactttcaagtgctacacttcagtaacaatctggc

SEQ ID NO: 424189 - DNA, 58 bp, Artificial
  Synthetic oligonucleotide
ggcgacttactcaacaagtaaatgtccaggatccattattcttacaacagccctcacg

SEQ ID NO: 424190 - DNA, 55 bp, Artificial
  Synthetic oligonucleotide
ggcgacttccccttcacctgaagaaagggttttccccatgatcttgggagctggc

SEQ ID NO: 424191 - DNA, 50 bp, Artificial
  Synthetic oligonucleotide
ggcgacttggatatcgcaccgattgaggtcactcctggtatgcagactgt

SEQ ID NO: 424192 - DNA, 55 bp, Artificial
  Synthetic oligonucleotide
ggcgacttgggaggaagggtgcactgtcccatcaactgaggggtgtggtagattg

SEQ ID NO: 424193 - DNA, 52 bp, Artificial
  Synthetic oligonucleotide
ggcgacttttacgcagaggactcgcgaccgcatctacaatgcgatgggggcc

SEQ ID NO: 424194 - DNA, 60 bp, Artificial
  Synthetic oligonucleotide
ggcgagaaatcgtggatttaatgtgtcatgccacatttaccatgaggttgttatcaccag

SEQ ID NO: 424195 - DNA, 55 bp, Artificial
  Synthetic oligonucleotide
ggcgagaatgtatgccacacgcgtactaggacggttcctagggaaaagggcaaag

SEQ ID NO: 424196 - DNA, 55 bp, Artificial
  Synthetic oligonucleotide
ggcgagacaacgttatatcagtaatgccctggaagcctggcgcaataacgaggcg

SEQ ID NO: 424197 - DNA, 56 bp, Artificial
  Synthetic oligonucleotide
ggcgagacagagaaagctagctggcgtgtgccgccatgtatagcaacggaggcagc

SEQ ID NO: 424198 - DNA, 55 bp, Artificial
  Synthetic oligonucleotide
ggcgagacctgtcatgagggagttgcgtgaagcaattctgactgagacgaaacct

SEQ ID NO: 424199 - DNA, 55 bp, Artificial
  Synthetic oligonucleotide
ggcgagacgctggatgagagtcctcaaaccgatatctcaatggtacaggaacact

SEQ ID NO: 424200 - DNA, 55 bp, Artificial
  Synthetic oligonucleotide
ggcgagactgcaaaggtatttagtaagaccgctaccaatggagcccatacggtcc

SEQ ID NO: 424201 - DNA, 55 bp, Artificial
  Synthetic oligonucleotide
ggcgagagagggccctgcggcgatcttgagttcgcaggcattagcgagatgttcg

SEQ ID NO: 424202 - DNA, 55 bp, Artificial
  Synthetic oligonucleotide
ggcgagagcctcttgcacacttgctgcattaactgcgttatggtagacatcgtcc

SEQ ID NO: 424203 - DNA, 51 bp, Artificial
  Synthetic oligonucleotide
ggcgagagggtttgtaaaaatagttgaggacgctgcaagggtattgcttga

SEQ ID NO: 424204 - DNA, 55 bp, Artificial
  Synthetic oligonucleotide
ggcgagaggtgttttctcaactcctcatctccgaacaccgtttcagagctcctgc

SEQ ID NO: 424205 - DNA, 55 bp, Artificial
  Synthetic oligonucleotide
ggcgagatcgaatacgtccgtactctcgggcctgacgaattctactatgccatcg

SEQ ID NO: 424206 - DNA, 55 bp, Artificial
  Synthetic oligonucleotide
ggcgagatgtgctaacagcccaagttgggattaacccttactcgcgagagtggac

SEQ ID NO: 424207 - DNA, 60 bp, Artificial
  Synthetic oligonucleotide
ggcgagcaattgcaacacccgggatgcagatcagagggttcgtgtactttgttgaaacat

SEQ ID NO: 424208 - DNA, 59 bp, Artificial
  Synthetic oligonucleotide
ggcgagcatgagggtaagttgtacgacgccagaattaaagtgacgcgaactattagtca

SEQ ID NO: 424209 - DNA, 55 bp, Artificial
  Synthetic oligonucleotide
ggcgagccagacttcctatgcacgtgtgctcgcgatggacgtacgtaccgaagag

SEQ ID NO: 424210 - DNA, 54 bp, Artificial
  Synthetic oligonucleotide
ggcgagccatacgatttaatgcagacgtgtatccgggtcaatcatgtggcgcta

SEQ ID NO: 424211 - DNA, 60 bp, Artificial
  Synthetic oligonucleotide
ggcgagccgatcgactacaggggaatcaccgcacacaggcttgtcggcgcagaacccaga

SEQ ID NO: 424212 - DNA, 52 bp, Artificial
  Synthetic oligonucleotide
ggcgagcctcggtgttgtgcagatgtgtagacagaaatacgtaggtgaactt

SEQ ID NO: 424213 - DNA, 59 bp, Artificial
  Synthetic oligonucleotide
ggcgagcgattgcaacacccggaatgcaaatcaggggattcgtgtactttgttgaaaca

SEQ ID NO: 424214 - DNA, 51 bp, Artificial
  Synthetic oligonucleotide
ggcgagcgtataaacattaacgattatcactatatcggcttcgctattctc

SEQ ID NO: 424215 - DNA, 60 bp, Artificial
  Synthetic oligonucleotide
ggcgagcgtgaaatatgagtgggcgaaacagagggctatatacggagtagatctaaccag

SEQ ID NO: 424216 - DNA, 55 bp, Artificial
  Synthetic oligonucleotide
ggcgagcgttgcaactgtggaaggtatgataacaacaattaaaatcatggatccc

SEQ ID NO: 424217 - DNA, 55 bp, Artificial
  Synthetic oligonucleotide
ggcgagctgctattgctccgcaaatccaagacccagctgttcccgcgatccagac

SEQ ID NO: 424218 - DNA, 51 bp, Artificial
  Synthetic oligonucleotide
ggcgagcttgagaggctgcagaagatcgccagtgatttaggtgaagagacc

SEQ ID NO: 424219 - DNA, 55 bp, Artificial
  Synthetic oligonucleotide
ggcgaggacgtgtttacgttgcgttacgtgttagatcgagatattgtaaagtttg

SEQ ID NO: 424220 - DNA, 60 bp, Artificial
  Synthetic oligonucleotide
ggcgaggcaccaagaactgctactagcgcaggtagctgctaatccgaacatactactgta

SEQ ID NO: 424221 - DNA, 59 bp, Artificial
  Synthetic oligonucleotide
ggcgaggcacgttagagacagtcgactgcgaggtagtatccgactacgatccctaacca

SEQ ID NO: 424222 - DNA, 55 bp, Artificial
  Synthetic oligonucleotide
ggcgaggcaggaccggtaggggcaggatgggcacttataggtttgtgactccagg

SEQ ID NO: 424223 - DNA, 60 bp, Artificial
  Synthetic oligonucleotide
ggcgaggccgaatcaaatgagatgagcgggggtatgggagcaatacctagcaacgccgaa

SEQ ID NO: 424224 - DNA, 54 bp, Artificial
  Synthetic oligonucleotide
ggcgaggcggggaaagcaccgcgcgcaaaccgacaagttagttaattatttgtg

SEQ ID NO: 424225 - DNA, 58 bp, Artificial
  Synthetic oligonucleotide
ggcgagggaacgtcgagtcaacgagaggtctacagccgagagggagcatggaacgtct

SEQ ID NO: 424226 - DNA, 55 bp, Artificial
  Synthetic oligonucleotide
ggcgagggacctttagagtacctgaaggctgccaaggacaggtgcgtggagttct

SEQ ID NO: 424227 - DNA, 58 bp, Artificial
  Synthetic oligonucleotide
ggcgagggacggggggctcatatggctatgtgcctgttggaagtgggcaaggggtgcg

SEQ ID NO: 424228 - DNA, 57 bp, Artificial
  Synthetic oligonucleotide
ggcgagggcagcctttaggtgttggcaccacaggtcatccattatttaataaggtat

SEQ ID NO: 424229 - DNA, 55 bp, Artificial
  Synthetic oligonucleotide
ggcgaggggacggtatcatgcataccacctgcccgtgtggagcacaaatcaccgg

SEQ ID NO: 424230 - DNA, 57 bp, Artificial
  Synthetic oligonucleotide
ggcgaggggcagcgactggtgagtacgctaaaataattttgactagcggaggctaaa

SEQ ID NO: 424231 - DNA, 52 bp, Artificial
  Synthetic oligonucleotide
ggcgaggggttgacagggtaggagtgtgtctgtagagtgcgccctgtctcca

SEQ ID NO: 424232 - DNA, 60 bp, Artificial
  Synthetic oligonucleotide
ggcgagggtggtatgcaaggcgatagactgtttcgagtaggccattgcgcatgttagcct

SEQ ID NO: 424233 - DNA, 60 bp, Artificial
  Synthetic oligonucleotide
ggcgaggtggcggattctgatccgcatgtcaggagtgcgacgctcccgatcagcgttgcc

SEQ ID NO: 424234 - DNA, 55 bp, Artificial
  Synthetic oligonucleotide
ggcgaggtggtactgatagggaacttaattacccacacggacaatgaggtggtgg

SEQ ID NO: 424235 - DNA, 55 bp, Artificial
  Synthetic oligonucleotide
ggcgagtaatcgcacgagctgtagtacatcccgccgtagcagctcgatcgcccgt

SEQ ID NO: 424236 - DNA, 57 bp, Artificial
  Synthetic oligonucleotide
ggcgagtacctccgcaggggcccatcagtaaatgggttcacagtggggtcgtcataa

SEQ ID NO: 424237 - DNA, 56 bp, Artificial
  Synthetic oligonucleotide
ggcgagtactgcagcgctctcatacatacgctaatgtaaaggttttgaccgggtcg

SEQ ID NO: 424238 - DNA, 60 bp, Artificial
  Synthetic oligonucleotide
ggcgagtacttagtcaataacgcgtgtgcacttaaaatgcatcccatccctgaacgagat

SEQ ID NO: 424239 - DNA, 60 bp, Artificial
  Synthetic oligonucleotide
ggcgagtcacaagctaggagggcctagctgtagagcctgtggcggctcacacccatgata

SEQ ID NO: 424240 - DNA, 58 bp, Artificial
  Synthetic oligonucleotide
ggcgagtcagccgaccccgtgactgctaccgttgagaactacggtggcgagacacagg

SEQ ID NO: 424241 - DNA, 55 bp, Artificial
  Synthetic oligonucleotide
ggcgagtccactcaccgtggtccgacagtgtcagtaaataagacggtttgacgaa

SEQ ID NO: 424242 - DNA, 60 bp, Artificial
  Synthetic oligonucleotide
ggcgagttacagacgtatcggttcagggtgcacagggagatggtggagcatcgcgtccga

SEQ ID NO: 424243 - DNA, 59 bp, Artificial
  Synthetic oligonucleotide
ggcgagttataatgaagttgatagtctttcaaagcttctaactgataagcaaatgatgg

SEQ ID NO: 424244 - DNA, 55 bp, Artificial
  Synthetic oligonucleotide
ggcgagttcaaagacacgtgcactgagtcagactatgaagcctttgacgcaagtc

SEQ ID NO: 424245 - DNA, 58 bp, Artificial
  Synthetic oligonucleotide
ggcgataattagaggattttatcgtgtaaataattatgtagtgtacaatcaccaggaa

SEQ ID NO: 424246 - DNA, 55 bp, Artificial
  Synthetic oligonucleotide
ggcgatacaaagcaaattccgtttatcaatagagtgatgacttttgattaccctg

SEQ ID NO: 424247 - DNA, 55 bp, Artificial
  Synthetic oligonucleotide
ggcgatacctgaaagataaggtttgcaggtggttaggtatcgatccaccaccaag

SEQ ID NO: 424248 - DNA, 59 bp, Artificial
  Synthetic oligonucleotide
ggcgatagactgcgcactcccccaggagtttgtctcctggttcgcgtctaacgcgttca

SEQ ID NO: 424249 - DNA, 60 bp, Artificial
  Synthetic oligonucleotide
ggcgatagcactgagcgtctaggcaggtccagaatgctcattctgtttacttcagctggc

SEQ ID NO: 424250 - DNA, 55 bp, Artificial
  Synthetic oligonucleotide
ggcgataggcgcattatatcccaatgaattcactgagaacgtattggacctgagc

SEQ ID NO: 424251 - DNA, 55 bp, Artificial
  Synthetic oligonucleotide
ggcgatagtcacgtagtcttccttagacactgtctggacggtggtcctcttcgga

SEQ ID NO: 424252 - DNA, 55 bp, Artificial
  Synthetic oligonucleotide
ggcgatatgacggctgttagttgggtgatacctattgcagaggaacgcaagctac

SEQ ID NO: 424253 - DNA, 60 bp, Artificial
  Synthetic oligonucleotide
ggcgatcaaatgtttgcaacattggtgcagttttagtagcagctgtaaattgtgaacgta

SEQ ID NO: 424254 - DNA, 55 bp, Artificial
  Synthetic oligonucleotide
ggcgatcatcccaacaaatgcagacaaaatttgccttgggcatcatgctgtgtcg

SEQ ID NO: 424255 - DNA, 55 bp, Artificial
  Synthetic oligonucleotide
ggcgatcatctattcaacggtggtgtcaaccaccacgatgaagaccctgacgcgt

SEQ ID NO: 424256 - DNA, 55 bp, Artificial
  Synthetic oligonucleotide
ggcgatcattccgacaaatgcagacaaaatctgccttgggcaccatgccgtgtca

SEQ ID NO: 424257 - DNA, 55 bp, Artificial
  Synthetic oligonucleotide
ggcgatccctggagagcctgtttgtgtcaagcagtgcctatcctgccgaattatg

SEQ ID NO: 424258 - DNA, 55 bp, Artificial
  Synthetic oligonucleotide
ggcgatcgtgtccaccttgcactaccaagggaagatgagaacgacaaaccgatgc

SEQ ID NO: 424259 - DNA, 55 bp, Artificial
  Synthetic oligonucleotide
ggcgatctaactcttatacacaacgcgtgagacttcctgggagttgggcgtggac

SEQ ID NO: 424260 - DNA, 59 bp, Artificial
  Synthetic oligonucleotide
ggcgatctactcaactgtcgccagttcactggtgcttttagtctccctgggggcaacca

SEQ ID NO: 424261 - DNA, 54 bp, Artificial
  Synthetic oligonucleotide
ggcgatctgagagcttaggggcgtagcccctctgaactggctgttggatgcgtt

SEQ ID NO: 424262 - DNA, 55 bp, Artificial
  Synthetic oligonucleotide
ggcgatgaatagctggaagacatcttttagtgcttggacatcagaagttgagaag

SEQ ID NO: 424263 - DNA, 55 bp, Artificial
  Synthetic oligonucleotide
ggcgatgacaagagcatcgaactacctgcacgtgaagatggccatatgtacattg

SEQ ID NO: 424264 - DNA, 55 bp, Artificial
  Synthetic oligonucleotide
ggcgatgacggagaagtgtaacagctactctctttcctgactgatcccctggccg

SEQ ID NO: 424265 - DNA, 55 bp, Artificial
  Synthetic oligonucleotide
ggcgatgatctggttaccgttcagggtgccctcgccccgtttgatgagtattggt

SEQ ID NO: 424266 - DNA, 60 bp, Artificial
  Synthetic oligonucleotide
ggcgatgcaactacgaatatacgtacgaatagtcacataatataactgactaaattacca

SEQ ID NO: 424267 - DNA, 55 bp, Artificial
  Synthetic oligonucleotide
ggcgatgcaagcttcctagattgggctagtgatccgtattcaggaaatctaccgg

SEQ ID NO: 424268 - DNA, 60 bp, Artificial
  Synthetic oligonucleotide
ggcgatgccttcttcaatctctacaacagattgagagcatgattgaggccgaatcttctg

SEQ ID NO: 424269 - DNA, 60 bp, Artificial
  Synthetic oligonucleotide
ggcgatgcgcgctgatataggtgacatgagaaagtacgccgtcctcgtgtattcaaaaga

SEQ ID NO: 424270 - DNA, 60 bp, Artificial
  Synthetic oligonucleotide
ggcgatgctctagccatggtagagctgtttgtgatggttgatcctacaaccaaaagacgc

SEQ ID NO: 424271 - DNA, 58 bp, Artificial
  Synthetic oligonucleotide
ggcgatggactcaagtaccgatttgattctgacgatctctggtcagaccattctaagg

SEQ ID NO: 424272 - DNA, 60 bp, Artificial
  Synthetic oligonucleotide
ggcgatggcagtgggaactttactcactatgatactcgacccacaaaagagcgatgcagt

SEQ ID NO: 424273 - DNA, 55 bp, Artificial
  Synthetic oligonucleotide
ggcgatggtcgttcaagggattacatcaaattgcttcatttatcagcctcaggcg

SEQ ID NO: 424274 - DNA, 55 bp, Artificial
  Synthetic oligonucleotide
ggcgatgtagcgttaaagcactgggtggcacttttaatagaactctcaagcactg

SEQ ID NO: 424275 - DNA, 57 bp, Artificial
  Synthetic oligonucleotide
ggcgatgtccagtacctgacccaaaccagataccttgtgaagctcccccgaccacca

SEQ ID NO: 424276 - DNA, 55 bp, Artificial
  Synthetic oligonucleotide
ggcgattaacggcggggaccgccaagattagtcgaactggcaatagttcgcgggc

SEQ ID NO: 424277 - DNA, 56 bp, Artificial
  Synthetic oligonucleotide
ggcgattacattattacagaatcttggtgtaatccaatctgcagcaaaattagacc

SEQ ID NO: 424278 - DNA, 53 bp, Artificial
  Synthetic oligonucleotide
ggcgattactacatcgcagacgggtggcattataatgagagcggcgagtgctg

SEQ ID NO: 424279 - DNA, 55 bp, Artificial
  Synthetic oligonucleotide
ggcgattcatggtggcgctcatcttggacatcaaacgatccccagggaacaagcc

SEQ ID NO: 424280 - DNA, 60 bp, Artificial
  Synthetic oligonucleotide
ggcgattcatgtacgataaaagtatgcccactcaatacacagacccttggaataggatgt

SEQ ID NO: 424281 - DNA, 55 bp, Artificial
  Synthetic oligonucleotide
ggcgattccgcagacatccccgaacaacgaggaggtgtgatccttgggcatcccg

SEQ ID NO: 424282 - DNA, 60 bp, Artificial
  Synthetic oligonucleotide
ggcgattccggacaattgcttgtggcctcttcccagctcaagtaaaagcaaggaatatca

SEQ ID NO: 424283 - DNA, 58 bp, Artificial
  Synthetic oligonucleotide
ggcgattcggtgttgcaccttgataggaacgtgagtagagtgggccttggagggtgac

SEQ ID NO: 424284 - DNA, 51 bp, Artificial
  Synthetic oligonucleotide
ggcgattgtaaaccaccttcaacgcgaacgtacgaaggttcataggaatgg

SEQ ID NO: 424285 - DNA, 56 bp, Artificial
  Synthetic oligonucleotide
ggcgattgtcccactgcccgaggccccggttagtaagcctgctaactcacctattc

SEQ ID NO: 424286 - DNA, 50 bp, Artificial
  Synthetic oligonucleotide
ggcgattgtgtttgaagcattcggagaaagtcatgcacgggacgaaattg

SEQ ID NO: 424287 - DNA, 50 bp, Artificial
  Synthetic oligonucleotide
ggcgattgtttttcgaacgcagtctccgtctatgctaaggcaatggtgca

SEQ ID NO: 424288 - DNA, 59 bp, Artificial
  Synthetic oligonucleotide
ggcgatttagaaccatagtatgcggtctatttccaactcaaattcaagtacgcaacata

SEQ ID NO: 424289 - DNA, 59 bp, Artificial
  Synthetic oligonucleotide
ggcgatttcgaatgtttcaggaacgcagatgcatacgaaaaggttggtgagatcgaaaa

SEQ ID NO: 424290 - DNA, 59 bp, Artificial
  Synthetic oligonucleotide
ggcgatttgaggaaatttcacctctggattctattagtcaagtcgatacggctagtcag

SEQ ID NO: 424291 - DNA, 58 bp, Artificial
  Synthetic oligonucleotide
ggcgcaaatgcaggtgagaattattatcaggttaagattggtagaacgacccaaatta

SEQ ID NO: 424292 - DNA, 55 bp, Artificial
  Synthetic oligonucleotide
ggcgcaacacgctctgcgttgcgatcctgagtacgtgcctcatgaagtcattcgc

SEQ ID NO: 424293 - DNA, 60 bp, Artificial
  Synthetic oligonucleotide
ggcgcaacacttagttgggccattggagcaactgttacgagcctgttgtggcagtgtaac

SEQ ID NO: 424294 - DNA, 55 bp, Artificial
  Synthetic oligonucleotide
ggcgcaacagcacatgttgcaactcacggtctggggcattaagcaactacagaca

SEQ ID NO: 424295 - DNA, 60 bp, Artificial
  Synthetic oligonucleotide
ggcgcaacagcatatgttgcaactcacagtctaaagcgtcaagcagcttcaggcaaaggt

SEQ ID NO: 424296 - DNA, 55 bp, Artificial
  Synthetic oligonucleotide
ggcgcaaccaataagaagacaaccgggaagtatccgaaatgacctagctggactc

SEQ ID NO: 424297 - DNA, 60 bp, Artificial
  Synthetic oligonucleotide
ggcgcaacctgtgacgaccaatctgctaaaattcatgcgcaatttgacccgaacaatcgg

SEQ ID NO: 424298 - DNA, 52 bp, Artificial
  Synthetic oligonucleotide
ggcgcaactgataaatcttgtttctagcacaccctattcagttgttatggct

SEQ ID NO: 424299 - DNA, 55 bp, Artificial
  Synthetic oligonucleotide
ggcgcaactgtgaacgaggaggcattaagacagaaaatcatggaaagtggaggga

SEQ ID NO: 424300 - DNA, 60 bp, Artificial
  Synthetic oligonucleotide
ggcgcaagatatgacacatcagataggatgaaactccatagagcatcaggtctttgccct

SEQ ID NO: 424301 - DNA, 55 bp, Artificial
  Synthetic oligonucleotide
ggcgcaagctctgttcccatgtagcaaactcacatgtggaatctgtgcgaactca

SEQ ID NO: 424302 - DNA, 57 bp, Artificial
  Synthetic oligonucleotide
ggcgcaagggacacggcaaactcttagggcaggaaccgcagtgtgtaaggccggcag

SEQ ID NO: 424303 - DNA, 59 bp, Artificial
  Synthetic oligonucleotide
ggcgcaataatattctttctctggaggtgtttcttacgtgctaagcgtatgaaattcca

SEQ ID NO: 424304 - DNA, 56 bp, Artificial
  Synthetic oligonucleotide
ggcgcaatatcagctcctgtcgctattagtcggcgagtggctggcatgaagcctag

SEQ ID NO: 424305 - DNA, 55 bp, Artificial
  Synthetic oligonucleotide
ggcgcaatcgattttgctggtgtcgctgctcttgtaactgctgctggtgtttcca

SEQ ID NO: 424306 - DNA, 51 bp, Artificial
  Synthetic oligonucleotide
ggcgcacaagtgcgctctgaggagtaccccaattggaaccgttttgaggtt

SEQ ID NO: 424307 - DNA, 52 bp, Artificial
  Synthetic oligonucleotide
ggcgcacacagcatgatgagtatgatacacgtaataaacaaaagcgtgtctc

SEQ ID NO: 424308 - DNA, 55 bp, Artificial
  Synthetic oligonucleotide
ggcgcacagagtgttacacttgttagagggcagaatacagtaaaggtttctggga

SEQ ID NO: 424309 - DNA, 60 bp, Artificial
  Synthetic oligonucleotide
ggcgcaccatgcacggattccgtgcaacattgcgcgctccgtcatgcacgaaaaccgtgc

SEQ ID NO: 424310 - DNA, 56 bp, Artificial
  Synthetic oligonucleotide
ggcgcacggaaacattcggacaccacaccgggcaaggatgggttcttcaggctaac

SEQ ID NO: 424311 - DNA, 57 bp, Artificial
  Synthetic oligonucleotide
ggcgcacggcaagaggcgaggagcggcgactggtgagtacgccgaaaaatttttgac

SEQ ID NO: 424312 - DNA, 60 bp, Artificial
  Synthetic oligonucleotide
ggcgcactaccggtgggcaaacaattgctcaagaggctgatcctttgcaacatagggtca

SEQ ID NO: 424313 - DNA, 55 bp, Artificial
  Synthetic oligonucleotide
ggcgcactgtctctacacccatctgcgtcgcacaaccttacgctggctgcaaatc

SEQ ID NO: 424314 - DNA, 60 bp, Artificial
  Synthetic oligonucleotide
ggcgcactgttggaggtcagatgggcatgcttctgacaggatccaacgccaaaaacatgg

SEQ ID NO: 424315 - DNA, 60 bp, Artificial
  Synthetic oligonucleotide
ggcgcagaagcttccggggcactacctcgatctatacctggcctaccatccagatgttga

SEQ ID NO: 424316 - DNA, 55 bp, Artificial
  Synthetic oligonucleotide
ggcgcagactcagttcggaaataaggagtggtcaatgcaagaagtgagctatgag

SEQ ID NO: 424317 - DNA, 53 bp, Artificial
  Synthetic oligonucleotide
ggcgcagactctaattaggaacataatgtctctgacaggccctgatttccctc

SEQ ID NO: 424318 - DNA, 55 bp, Artificial
  Synthetic oligonucleotide
ggcgcagagtgggatgttttcatagagaggcccagtgcagtagacacttgctacc

SEQ ID NO: 424319 - DNA, 58 bp, Artificial
  Synthetic oligonucleotide
ggcgcagatcccgcaatttgggtaaagtcatcgatacctttacttgcggtctcgccga

SEQ ID NO: 424320 - DNA, 55 bp, Artificial
  Synthetic oligonucleotide
ggcgcagcaatttgaacgtgagatcaatgctgcggttgcaagggatgactgcgta

SEQ ID NO: 424321 - DNA, 60 bp, Artificial
  Synthetic oligonucleotide
ggcgcaggctcaaaatagagccttatatgtgaggtcggcggcaatagacgttccatttcc

SEQ ID NO: 424322 - DNA, 59 bp, Artificial
  Synthetic oligonucleotide
ggcgcagggacaaaggggtcaaacaagaagaagctactcagcatgttaagtgactattg

SEQ ID NO: 424323 - DNA, 50 bp, Artificial
  Synthetic oligonucleotide
ggcgcaggggtgtatgccctcgttccccacctcttccctacatatccagc

SEQ ID NO: 424324 - DNA, 60 bp, Artificial
  Synthetic oligonucleotide
ggcgcagtacaagtacagaaacgttcccatcaccaagcgagcttgggcacagggagacat

SEQ ID NO: 424325 - DNA, 60 bp, Artificial
  Synthetic oligonucleotide
ggcgcagtgactctgtcaccagcaggagtcacattgtcaacgcaatttactgattatgta

SEQ ID NO: 424326 - DNA, 60 bp, Artificial
  Synthetic oligonucleotide
ggcgcagtgtgcgctatataaacgcaacggatgaaatccccacaggtctattctgccgta

SEQ ID NO: 424327 - DNA, 55 bp, Artificial
  Synthetic oligonucleotide
ggcgcagttaagtgcgctgaaataggaacaaccacagggaagatcaatcctccgt

SEQ ID NO: 424328 - DNA, 55 bp, Artificial
  Synthetic oligonucleotide
ggcgcagttcttatgctcgaaccaacaagaccattggcagagaatgtctcacgac

SEQ ID NO: 424329 - DNA, 58 bp, Artificial
  Synthetic oligonucleotide
ggcgcatacaaagtaccaggagtgaagacggtttggaaaagacgctaggctctggcgc

SEQ ID NO: 424330 - DNA, 56 bp, Artificial
  Synthetic oligonucleotide
ggcgcatacaagtgaacagcgctggataactgcactcagccgctttcggaaggaga

SEQ ID NO: 424331 - DNA, 55 bp, Artificial
  Synthetic oligonucleotide
ggcgcatataatgggcccagctgtcatcggtgccatagccgcatctgccgctggt

SEQ ID NO: 424332 - DNA, 55 bp, Artificial
  Synthetic oligonucleotide
ggcgcatatctagtgaatcggttagcgtcacgtttagcgagtacgttatttcccg

SEQ ID NO: 424333 - DNA, 51 bp, Artificial
  Synthetic oligonucleotide
ggcgcatcgcagatcgcggccacagccgcccagcttcccggtcagatccaa

SEQ ID NO: 424334 - DNA, 60 bp, Artificial
  Synthetic oligonucleotide
ggcgcatgcgcgatagggagacacctatcgggcggggagggatgtgctcatgatctgttc

SEQ ID NO: 424335 - DNA, 55 bp, Artificial
  Synthetic oligonucleotide
ggcgcattgacggaagatccggacgagggaacagccggggtggaatctgcagtac

SEQ ID NO: 424336 - DNA, 55 bp, Artificial
  Synthetic oligonucleotide
ggcgccaaatacatcctaccgaaccatgaagtgttttgaggacctggtcgcggct

SEQ ID NO: 424337 - DNA, 58 bp, Artificial
  Synthetic oligonucleotide
ggcgccaacagttaaccatgattgtggttctttgattgtggctgaagtgaacaaaacg

SEQ ID NO: 424338 - DNA, 54 bp, Artificial
  Synthetic oligonucleotide
ggcgccaaccacctagggtggctgtcggcttctctatggcacacgaactgaccg

SEQ ID NO: 424339 - DNA, 58 bp, Artificial
  Synthetic oligonucleotide
ggcgccacttggacaccgtgcaacccccaaaatcgccgccccgccctgagatcgctgc

SEQ ID NO: 424340 - DNA, 57 bp, Artificial
  Synthetic oligonucleotide
ggcgccagatggcgggaacctcaaaggtaagccgctcttccaatttctctcctcgtg

SEQ ID NO: 424341 - DNA, 55 bp, Artificial
  Synthetic oligonucleotide
ggcgccaggtactcgaacatgagagtcgtcttccccaggccacgagagcagaggt

SEQ ID NO: 424342 - DNA, 50 bp, Artificial
  Synthetic oligonucleotide
ggcgccagtagttacgatgttccgagtgccgcacctgctcccgagcagtg

SEQ ID NO: 424343 - DNA, 56 bp, Artificial
  Synthetic oligonucleotide
ggcgccagtcgcacagcaatcaccaccctcgggaaatttggacaacaatccggggc

SEQ ID NO: 424344 - DNA, 55 bp, Artificial
  Synthetic oligonucleotide
ggcgccatctgtaacggtttctgaaggcggggtgtaccaaatatggtcttctccg

SEQ ID NO: 424345 - DNA, 60 bp, Artificial
  Synthetic oligonucleotide
ggcgccattggacgacgcagggctgtaactgctctatctatcccggccatataacgggcc

SEQ ID NO: 424346 - DNA, 56 bp, Artificial
  Synthetic oligonucleotide
ggcgcccaccaagtgacatcccctaatggccccctggggatgcgcatcccttaggg

SEQ ID NO: 424347 - DNA, 55 bp, Artificial
  Synthetic oligonucleotide
ggcgcccacccacgatcgatcaacgacaatcctaatgttttgcatcgctgttttc

SEQ ID NO: 424348 - DNA, 55 bp, Artificial
  Synthetic oligonucleotide
ggcgcccattacggcatacgcccagcagacaaggggcctcctagggtgcataatc

SEQ ID NO: 424349 - DNA, 57 bp, Artificial
  Synthetic oligonucleotide
ggcgccctagtgacaacttggtgtacctgcctcctactcccgtgtccaaagttctca

SEQ ID NO: 424350 - DNA, 58 bp, Artificial
  Synthetic oligonucleotide
ggcgccggaacagggacttgagagcgaaagtagaaccagaggagacctctcgacgcag

SEQ ID NO: 424351 - DNA, 58 bp, Artificial
  Synthetic oligonucleotide
ggcgccggcatgacagggggcgccttcgaaccattggtccggaggtgttcactcttga

SEQ ID NO: 424352 - DNA, 57 bp, Artificial
  Synthetic oligonucleotide
ggcgccgtcgcggttttgttgctttcaccccgcatactgccgctagagtcacccagg

SEQ ID NO: 424353 - DNA, 60 bp, Artificial
  Synthetic oligonucleotide
ggcgcctatgacatcataatatgtgatgaatgccactcaactgactcgactaccatcttg

SEQ ID NO: 424354 - DNA, 55 bp, Artificial
  Synthetic oligonucleotide
ggcgcctcagaccctgattcccaaaggtacaacgcctggctcgagctacgcgcaa

SEQ ID NO: 424355 - DNA, 60 bp, Artificial
  Synthetic oligonucleotide
ggcgcctcgtgcgttgcttatgctagaatgctcgtatcccgatgtacgtatattagatgg

SEQ ID NO: 424356 - DNA, 50 bp, Artificial
  Synthetic oligonucleotide
ggcgcctgggtaacccggacgacgtccatcgatactgtgcgtgtcatgat

SEQ ID NO: 424357 - DNA, 60 bp, Artificial
  Synthetic oligonucleotide
ggcgcctgtttacagtcgtctatgtcttagaaaccatcctgacaccacctggataggtga

SEQ ID NO: 424358 - DNA, 54 bp, Artificial
  Synthetic oligonucleotide
ggcgcgaacacaacgcctccagaaaattggatttgtcagtggaggatttcttaa

SEQ ID NO: 424359 - DNA, 60 bp, Artificial
  Synthetic oligonucleotide
ggcgcgaatctttgattcgtctttatgttgcctctacaaacgccactgtcgatgctgatt

SEQ ID NO: 424360 - DNA, 55 bp, Artificial
  Synthetic oligonucleotide
ggcgcgacctaaattgtacacagtgcaatttggaagtcttgacccagtagtcgtc

SEQ ID NO: 424361 - DNA, 55 bp, Artificial
  Synthetic oligonucleotide
ggcgcgatatgctttcgatttctatgaggtgaactctaagacgtcggacagagct

SEQ ID NO: 424362 - DNA, 55 bp, Artificial
  Synthetic oligonucleotide
ggcgcgatcaatagtagtctatccacattgggtaacagaatcgatgctgcagaac

SEQ ID NO: 424363 - DNA, 55 bp, Artificial
  Synthetic oligonucleotide
ggcgcgattaatccattagcgttactgtatgcacaacatgcattacgttcaacgt

SEQ ID NO: 424364 - DNA, 54 bp, Artificial
  Synthetic oligonucleotide
ggcgcgcaacacgtcgaacagacgatattcaaagctcgattattgcaggctttt

SEQ ID NO: 424365 - DNA, 55 bp, Artificial
  Synthetic oligonucleotide
ggcgcgcacgattgcatgttttcgcaacacgtgtcctcttatgattactttatga

SEQ ID NO: 424366 - DNA, 55 bp, Artificial
  Synthetic oligonucleotide
ggcgcgcacggaatcacgatggtgtccagcgacaactctgacatcctcggcaacc

SEQ ID NO: 424367 - DNA, 60 bp, Artificial
  Synthetic oligonucleotide
ggcgcgcgcacgcagaactaagcgtgattctgttactaacatttacaggggctgcaaggc

SEQ ID NO: 424368 - DNA, 54 bp, Artificial
  Synthetic oligonucleotide
ggcgcgctttaagttggttggaaaagtcttctataacatggcaattgaaaaggt

SEQ ID NO: 424369 - DNA, 60 bp, Artificial
  Synthetic oligonucleotide
ggcgcggagtagtatgctaactgctgcattaaagcgaatgcgtgatggagattaggatac

SEQ ID NO: 424370 - DNA, 56 bp, Artificial
  Synthetic oligonucleotide
ggcgcggatatacgcgtctttaaccacgttcagagtagggacgattgtcttaccga

SEQ ID NO: 424371 - DNA, 55 bp, Artificial
  Synthetic oligonucleotide
ggcgcggccttgatcatccggccaccattggcgcgcttgaggaaattcagacccc

SEQ ID NO: 424372 - DNA, 55 bp, Artificial
  Synthetic oligonucleotide
ggcgcggcgtcccaactcaaacaaaacgcgtcggataatttcttaacacataatc

SEQ ID NO: 424373 - DNA, 52 bp, Artificial
  Synthetic oligonucleotide
ggcgcggctgggacacaaaatggcggcgtagtgggggggggacccccccaca

SEQ ID NO: 424374 - DNA, 51 bp, Artificial
  Synthetic oligonucleotide
ggcgcggcttggtgtttgccataggtgtctccgggtttcgcactgtgccgc

SEQ ID NO: 424375 - DNA, 55 bp, Artificial
  Synthetic oligonucleotide
ggcgcgggtattgaacaataccgttgctgtcggggacactgcatcggcactgtcc

SEQ ID NO: 424376 - DNA, 54 bp, Artificial
  Synthetic oligonucleotide
ggcgcggttgtgtgactatttcgaaacggttagcgacaaggacgctcccgaccg

SEQ ID NO: 424377 - DNA, 55 bp, Artificial
  Synthetic oligonucleotide
ggcgcgtaccggttgacatctccaccgaaccatttagtcccgattcgatccgtca

SEQ ID NO: 424378 - DNA, 60 bp, Artificial
  Synthetic oligonucleotide
ggcgcgtagcatattgacgccaacttatgaatcggaatatcagcgactcctaaatgttcg

SEQ ID NO: 424379 - DNA, 57 bp, Artificial
  Synthetic oligonucleotide
ggcgcgtatccctacacggtgcagtattatcagggacgtgagttcactgacggtttt

SEQ ID NO: 424380 - DNA, 60 bp, Artificial
  Synthetic oligonucleotide
ggcgcgtatgatatcatcatatgtgacgagtgccactccacggatccgaccacggtccta

SEQ ID NO: 424381 - DNA, 55 bp, Artificial
  Synthetic oligonucleotide
ggcgcgtcactcttgatggtgagttgatgggcaccacccaactcttacctagtca

SEQ ID NO: 424382 - DNA, 59 bp, Artificial
  Synthetic oligonucleotide
ggcgcgtcactgaggccaaaaatagagtgtagcaactccctctgttggggagccaagta

SEQ ID NO: 424383 - DNA, 55 bp, Artificial
  Synthetic oligonucleotide
ggcgcgtcctgcaattccgccctcgtggtgcgttcgttcgtcgacgtggtcatca

SEQ ID NO: 424384 - DNA, 55 bp, Artificial
  Synthetic oligonucleotide
ggcgcgtcgcacttttgtagggttcaccccgagcttctatggccaacctggccca

SEQ ID NO: 424385 - DNA, 56 bp, Artificial
  Synthetic oligonucleotide
ggcgcgtcggagtgcgccgataaagttaacattctctctcctcttttaggacctaa

SEQ ID NO: 424386 - DNA, 55 bp, Artificial
  Synthetic oligonucleotide
ggcgcgtcgttggacgttcttgtatgtgacagggaccctttaactggcaccctaa

SEQ ID NO: 424387 - DNA, 60 bp, Artificial
  Synthetic oligonucleotide
ggcgcgtcttctctaccgtatgttgctcgtgacgcgtttcatggagtacaagggctatcc

SEQ ID NO: 424388 - DNA, 60 bp, Artificial
  Synthetic oligonucleotide
ggcgcgtgagtctgagagtgtaaattctattggttgagaaacggcgtctgcggaagtgcc

SEQ ID NO: 424389 - DNA, 54 bp, Artificial
  Synthetic oligonucleotide
ggcgcgtgatgtgttaaaggcggcgtacccccagattaggagggcgtctcagta

SEQ ID NO: 424390 - DNA, 55 bp, Artificial
  Synthetic oligonucleotide
ggcgcgtgccatatacgacttcttttctacgcctttcgggaatcgtggtctagcg

SEQ ID NO: 424391 - DNA, 55 bp, Artificial
  Synthetic oligonucleotide
ggcgcgtgcttcgttcgccaaaattttaaaagcttctgagtcgtcaattcctgct

SEQ ID NO: 424392 - DNA, 55 bp, Artificial
  Synthetic oligonucleotide
ggcgcgtggataaaagcagcgtccagatacaccgtttgggtgtgacccggttgaa

SEQ ID NO: 424393 - DNA, 55 bp, Artificial
  Synthetic oligonucleotide
ggcgcgtgttcttacttatcgcgaacatgctgtgaaccattgcgaccgtgccctc

SEQ ID NO: 424394 - DNA, 59 bp, Artificial
  Synthetic oligonucleotide
ggcgcgtgttttgatggtgataggtgcgtagtggagaagccgcgccaaagtgaaagtaa

SEQ ID NO: 424395 - DNA, 54 bp, Artificial
  Synthetic oligonucleotide
ggcgctaaagaagaggaaggcggtacgccgtaagtatggaagtaaagctacgac

SEQ ID NO: 424396 - DNA, 58 bp, Artificial
  Synthetic oligonucleotide
ggcgctaaagttaggttggtcacatgggacgatgatttcaacgcttccttgtctgacc

SEQ ID NO: 424397 - DNA, 52 bp, Artificial
  Synthetic oligonucleotide
ggcgctaagtagttgaaattaaaatgtgggatcctttggttaacgacttccc

SEQ ID NO: 424398 - DNA, 55 bp, Artificial
  Synthetic oligonucleotide
ggcgctaatgtatgtttaccggacccgtgttcgattgatcccttaacaggcgtta

SEQ ID NO: 424399 - DNA, 55 bp, Artificial
  Synthetic oligonucleotide
ggcgctactgcatgatggcgcggtacctcgcacaagcccgtacttttggagcact

SEQ ID NO: 424400 - DNA, 55 bp, Artificial
  Synthetic oligonucleotide
ggcgctaggagcactcgccaacccagcttccatatctgaaaatatggccgcgcag

SEQ ID NO: 424401 - DNA, 55 bp, Artificial
  Synthetic oligonucleotide
ggcgctagggtctcacccctagcatgccaacgactgctcctgcgttgtactccac

SEQ ID NO: 424402 - DNA, 55 bp, Artificial
  Synthetic oligonucleotide
ggcgctagggtctcacccctagtacaccaacgacagtccctgcgttgcactccac

SEQ ID NO: 424403 - DNA, 60 bp, Artificial
  Synthetic oligonucleotide
ggcgctagtgcttcctctggcactagtgggaattaccctatagtacagaatgctcaaggg

SEQ ID NO: 424404 - DNA, 55 bp, Artificial
  Synthetic oligonucleotide
ggcgctatgtaggcacccatgttaccgtaaatattaacccacatacaggcaagat

SEQ ID NO: 424405 - DNA, 55 bp, Artificial
  Synthetic oligonucleotide
ggcgctattaatcagtcgttaccacgtaatgtagtcaataataatgagggatcga

SEQ ID NO: 424406 - DNA, 55 bp, Artificial
  Synthetic oligonucleotide
ggcgctcaaatgcgcaaacatcaggtgtcggtgaagtgttctgggcagtgtccac

SEQ ID NO: 424407 - DNA, 55 bp, Artificial
  Synthetic oligonucleotide
ggcgctcagagaaatctgagagacagaacgctagctcgctatgcattcgatttct

SEQ ID NO: 424408 - DNA, 55 bp, Artificial
  Synthetic oligonucleotide
ggcgctcatctactttggacggtttctggaggaagcatccggactgagatttccc

SEQ ID NO: 424409 - DNA, 55 bp, Artificial
  Synthetic oligonucleotide
ggcgctcattataaaattcggagtatattacatggaatgggaatccattacaggg

SEQ ID NO: 424410 - DNA, 57 bp, Artificial
  Synthetic oligonucleotide
ggcgctcctcgcaacaatggagaaccaagtccccgagtgggcgcaacggatcgtccg

SEQ ID NO: 424411 - DNA, 60 bp, Artificial
  Synthetic oligonucleotide
ggcgctcgctctactcgcatatctgcgagcgcggaagtgatacgtcgtccgcacaaggaa

SEQ ID NO: 424412 - DNA, 59 bp, Artificial
  Synthetic oligonucleotide
ggcgctcggaagtcaagcacaaccgactaggcaatggatagaccgcccaaccaccgtca

SEQ ID NO: 424413 - DNA, 60 bp, Artificial
  Synthetic oligonucleotide
ggcgctcggaggattcatcaattgagattccattctgaaataagggagcgcagcgacaat

SEQ ID NO: 424414 - DNA, 55 bp, Artificial
  Synthetic oligonucleotide
ggcgctgaaatgtgggagctattcaaccaaggcgcaagaaaaggcaaccgaaaca

SEQ ID NO: 424415 - DNA, 60 bp, Artificial
  Synthetic oligonucleotide
ggcgctgaacgtccaaattgggaatatttcaccagattatgatcaagcgttggcaactgt

SEQ ID NO: 424416 - DNA, 56 bp, Artificial
  Synthetic oligonucleotide
ggcgctgaagatttctttagaccgctcatgtctcattatggtccaagccggttaaa

SEQ ID NO: 424417 - DNA, 55 bp, Artificial
  Synthetic oligonucleotide
ggcgctgagaggatttgctttgcgggtgatgacatgtgctcaaacacgagactgc

SEQ ID NO: 424418 - DNA, 55 bp, Artificial
  Synthetic oligonucleotide
ggcgctgaggcgtagagtgtccgcccatttgaggaaggttcgtcagcgaagcaag

SEQ ID NO: 424419 - DNA, 55 bp, Artificial
  Synthetic oligonucleotide
ggcgctgcctccttcagtctctacagcagattgaaagcatgactgaagctgagtc

SEQ ID NO: 424420 - DNA, 55 bp, Artificial
  Synthetic oligonucleotide
ggcgctgctcaatggatgaataggctcatagcgtttgcgtcgcggggtaaccacg

SEQ ID NO: 424421 - DNA, 56 bp, Artificial
  Synthetic oligonucleotide
ggcgctggggactattattacccccagcgcccgggacgggacatttgcatctataa

SEQ ID NO: 424422 - DNA, 50 bp, Artificial
  Synthetic oligonucleotide
ggcgctgtcaactaggactagacgcccgatgttgggagaccaagccccgt

SEQ ID NO: 424423 - DNA, 60 bp, Artificial
  Synthetic oligonucleotide
ggcgcttaaccgcgagctctcggcaaacctgctcgcagactggagcgatgcgtttactgt

SEQ ID NO: 424424 - DNA, 59 bp, Artificial
  Synthetic oligonucleotide
ggcgcttaagtcctctcgtgtgaagtggtccgatcctacttgtgatactgactttcctg

SEQ ID NO: 424425 - DNA, 58 bp, Artificial
  Synthetic oligonucleotide
ggcgcttcctgatgtcgacgacattttcgtcggcccgtctccacctctcagcgacgtt

SEQ ID NO: 424426 - DNA, 58 bp, Artificial
  Synthetic oligonucleotide
ggcgcttggttcagccagtatggtctcaccacagtctgcttggggttattcccaaacc

SEQ ID NO: 424427 - DNA, 55 bp, Artificial
  Synthetic oligonucleotide
ggcgcttgtcgagccttgaggtcaaatgcactcccttagttgggtcgagtgctgt

SEQ ID NO: 424428 - DNA, 55 bp, Artificial
  Synthetic oligonucleotide
ggcgctttgacgattcttaccctgaggggtacattatatcctactccaccaacat

SEQ ID NO: 424429 - DNA, 55 bp, Artificial
  Synthetic oligonucleotide
ggcgctttgtgggaatacagaaagccggtactatctgcgtgggctcgcgagaggt

SEQ ID NO: 424430 - DNA, 55 bp, Artificial
  Synthetic oligonucleotide
ggcgcttttcgactcaccctaacctcattcgataggcaccaagaagtttcaagac

SEQ ID NO: 424431 - DNA, 53 bp, Artificial
  Synthetic oligonucleotide
ggcggaaatcccccaatttgggtagggtcatccataccctaacgtgcggattc

SEQ ID NO: 424432 - DNA, 54 bp, Artificial
  Synthetic oligonucleotide
ggcggaaattaacttattctccacacacaaatacaaccttaatttccactacca

SEQ ID NO: 424433 - DNA, 60 bp, Artificial
  Synthetic oligonucleotide
ggcggaaattcattggtcccgattctccacaggacatgcatgacagctatcatgccatgt

SEQ ID NO: 424434 - DNA, 56 bp, Artificial
  Synthetic oligonucleotide
ggcggaaattctagtatgaggatggtagggcccctggcgtgggaaaacattgagga

SEQ ID NO: 424435 - DNA, 60 bp, Artificial
  Synthetic oligonucleotide
ggcggaacaagcagtgtgtacattgaagtattgcatttgactcaagggacctgttgggaa

SEQ ID NO: 424436 - DNA, 55 bp, Artificial
  Synthetic oligonucleotide
ggcggaaccacacaaggtttccgagcctaagtggggattccttgcagcgtccttc

SEQ ID NO: 424437 - DNA, 51 bp, Artificial
  Synthetic oligonucleotide
ggcggaacccccctactacgaaggagttgccgttctagggacttattctaa

SEQ ID NO: 424438 - DNA, 55 bp, Artificial
  Synthetic oligonucleotide
ggcggaacgggagacagcacaggcgttgttgcaggtccaagaaacacaggcacac

SEQ ID NO: 424439 - DNA, 55 bp, Artificial
  Synthetic oligonucleotide
ggcggaactgccagactccctggaaacgcttctcctgattggaatgctatgcgtc

SEQ ID NO: 424440 - DNA, 53 bp, Artificial
  Synthetic oligonucleotide
ggcggaagaaaaggagggagccctccgaatctcgaggaggcccaaccaccgga

SEQ ID NO: 424441 - DNA, 59 bp, Artificial
  Synthetic oligonucleotide
ggcggaagactcaattagctagaagactgagggagcgcttagacaggcaacaaagacgt

SEQ ID NO: 424442 - DNA, 53 bp, Artificial
  Synthetic oligonucleotide
ggcggaagagctgggcctaaagtaccccttaaaactgttggtaccacatccga

SEQ ID NO: 424443 - DNA, 55 bp, Artificial
  Synthetic oligonucleotide
ggcggaagctctcacaagggttcaaacagttcaaacaaaaggaccaaggctagtg

SEQ ID NO: 424444 - DNA, 53 bp, Artificial
  Synthetic oligonucleotide
ggcggaagggtcccctctagttgttactaagagtaagactgaagtgaaacact

SEQ ID NO: 424445 - DNA, 57 bp, Artificial
  Synthetic oligonucleotide
ggcggaaggtaccactccacggccgcaggagggcgctacaaagacgtgctcgagtcc

SEQ ID NO: 424446 - DNA, 55 bp, Artificial
  Synthetic oligonucleotide
ggcggaagtgtggcatttgtaagtgggaggagctcacatgcaagcttccgtcgcg

SEQ ID NO: 424447 - DNA, 55 bp, Artificial
  Synthetic oligonucleotide
ggcggaatccgaaatgagcaagatttcaagaatctccgccgagagataatccgca

SEQ ID NO: 424448 - DNA, 52 bp, Artificial
  Synthetic oligonucleotide
ggcggaattaaatcacaatttgttaacttcctaggtacagcccctactaaaa

SEQ ID NO: 424449 - DNA, 58 bp, Artificial
  Synthetic oligonucleotide
ggcggaattgtccgagtctgaggcctctcgtttagagttatcggcggaagaccatgaa

SEQ ID NO: 424450 - DNA, 55 bp, Artificial
  Synthetic oligonucleotide
ggcggaattttcgaccgattggctaaagtcgtaaaatgcgatctcaggtagttgc

SEQ ID NO: 424451 - DNA, 55 bp, Artificial
  Synthetic oligonucleotide
ggcggacaaagtgttcctcagtaaagacatggacgacactctggtgtggaacttc

SEQ ID NO: 424452 - DNA, 60 bp, Artificial
  Synthetic oligonucleotide
ggcggacacagtcaatgggaatccagcttgatcagaggattattctcttgtatatgcttg

SEQ ID NO: 424453 - DNA, 55 bp, Artificial
  Synthetic oligonucleotide
ggcggacacagtggtggatctgggcgcgtacccgatgatgctgcattttcagggg

SEQ ID NO: 424454 - DNA, 55 bp, Artificial
  Synthetic oligonucleotide
ggcggaccaaacctgtacaacattcggaatctccacatcccggaagtttgcctga

SEQ ID NO: 424455 - DNA, 60 bp, Artificial
  Synthetic oligonucleotide
ggcggaccagagtggctatgcaggtacgccaggcatatctcccttccaaacgacctgcag

SEQ ID NO: 424456 - DNA, 55 bp, Artificial
  Synthetic oligonucleotide
ggcggacctgattgaagaccgaaaaccgttaaattcaaaattcaggatggcgcca

SEQ ID NO: 424457 - DNA, 55 bp, Artificial
  Synthetic oligonucleotide
ggcggacctgattgaagactgaaaaccgttagattcaaaattgaaaatggcgccc

SEQ ID NO: 424458 - DNA, 56 bp, Artificial
  Synthetic oligonucleotide
ggcggacctgttctatctgacgaatcgtcggaatacgccggaatccgtcttccgtg

SEQ ID NO: 424459 - DNA, 57 bp, Artificial
  Synthetic oligonucleotide
ggcggacgcgtaagattttacgcgttggcaagggtcaatcgagttcaaatccgatga

SEQ ID NO: 424460 - DNA, 55 bp, Artificial
  Synthetic oligonucleotide
ggcggacggaacggcttgggtcgacacggctaattgttgcgacatgttggtaata

SEQ ID NO: 424461 - DNA, 55 bp, Artificial
  Synthetic oligonucleotide
ggcggacgtttctataatagcggtactcatattacgagaccctgtagcgtacccc

SEQ ID NO: 424462 - DNA, 53 bp, Artificial
  Synthetic oligonucleotide
ggcggactaagctaggctttggggtaataactttcccaatcggggttgtgctc

SEQ ID NO: 424463 - DNA, 55 bp, Artificial
  Synthetic oligonucleotide
ggcggactacaaaattgcgcaggccgatctggatgagtacctctacgcccgtcac

SEQ ID NO: 424464 - DNA, 55 bp, Artificial
  Synthetic oligonucleotide
ggcggactaccttgcaagcaacggcatagtcgccttggccggacaacgccatacg

SEQ ID NO: 424465 - DNA, 55 bp, Artificial
  Synthetic oligonucleotide
ggcggactgaaggacttcttccttggaatgtatgtacctttctcccacttgtcct

SEQ ID NO: 424466 - DNA, 56 bp, Artificial
  Synthetic oligonucleotide
ggcggactgggttttccttgcgagcgcgtccctgcaaaccgtgcccagtgctttaa

SEQ ID NO: 424467 - DNA, 55 bp, Artificial
  Synthetic oligonucleotide
ggcggagaaacatattgagaacccaagagtcagaatgccaatgtttacacggaac

SEQ ID NO: 424468 - DNA, 55 bp, Artificial
  Synthetic oligonucleotide
ggcggagagacggttgaacggcatgtgaaattgaaggttaacgctcagacagaga

SEQ ID NO: 424469 - DNA, 55 bp, Artificial
  Synthetic oligonucleotide
ggcggagcaacttacggatcaggcaacactatccaagaatctgactcgagtagta

SEQ ID NO: 424470 - DNA, 55 bp, Artificial
  Synthetic oligonucleotide
ggcggagcaatttggtactcgttgcaatctctatggtgtatgtcaggagacgcct

SEQ ID NO: 424471 - DNA, 55 bp, Artificial
  Synthetic oligonucleotide
ggcggagcaccgagttgtacaccatctgacgttggcgcttgaagtaagtccagtc

SEQ ID NO: 424472 - DNA, 57 bp, Artificial
  Synthetic oligonucleotide
ggcggagccaataaggtggtggattctgggtatattcccgcctacctgctgccgaag

SEQ ID NO: 424473 - DNA, 58 bp, Artificial
  Synthetic oligonucleotide
ggcggagccatgtcatcgaaggataatttgggtctacggcccaaatggaggcgaagga

SEQ ID NO: 424474 - DNA, 51 bp, Artificial
  Synthetic oligonucleotide
ggcggagctctggttgcctccagccattgatggagattccgaagtctgaag

SEQ ID NO: 424475 - DNA, 55 bp, Artificial
  Synthetic oligonucleotide
ggcggagcttctgttctcattcagaaaggtcaagccaaggcttttagtcaaggca

SEQ ID NO: 424476 - DNA, 57 bp, Artificial
  Synthetic oligonucleotide
ggcggaggaagacaaatctgtatgggttcattataaagggaaggtctcatttgagga

SEQ ID NO: 424477 - DNA, 52 bp, Artificial
  Synthetic oligonucleotide
ggcggaggaccatgcactgtgatcgctccgacattcgggtttgaggtaggtt

SEQ ID NO: 424478 - DNA, 56 bp, Artificial
  Synthetic oligonucleotide
ggcggaggctaaaatggcgggagccaatgaattcatactttcactttccaattaaa

SEQ ID NO: 424479 - DNA, 58 bp, Artificial
  Synthetic oligonucleotide
ggcggaggcttttcaagccggactggcagaaagaggttgatgaccggcaaggtaatca

SEQ ID NO: 424480 - DNA, 50 bp, Artificial
  Synthetic oligonucleotide
ggcggaggttccagccgttggggcggtgagacgccttggtgtgctagctt

SEQ ID NO: 424481 - DNA, 57 bp, Artificial
  Synthetic oligonucleotide
ggcggagtaaatatgtgggtctataggggtatgcgtgtgcaattttaaaggtcgata

SEQ ID NO: 424482 - DNA, 53 bp, Artificial
  Synthetic oligonucleotide
ggcggagtaagtgttgagctccctaaacgggatccgcctccgggagtacccac

SEQ ID NO: 424483 - DNA, 55 bp, Artificial
  Synthetic oligonucleotide
ggcggataaagacaacgttagaacggtggattccttcttgatgcaccctccgagg

SEQ ID NO: 424484 - DNA, 55 bp, Artificial
  Synthetic oligonucleotide
ggcggatatgttgacgaaaacctgaaagcacatgtggctttgcttatcacggcgc

SEQ ID NO: 424485 - DNA, 55 bp, Artificial
  Synthetic oligonucleotide
ggcggatcaattgttacggcgttaccccattgcgtctcaccatgggcgactggtt

SEQ ID NO: 424486 - DNA, 55 bp, Artificial
  Synthetic oligonucleotide
ggcggatcagaaggttacgggagtctagtttcacagggtctgggaacgcaggaag

SEQ ID NO: 424487 - DNA, 51 bp, Artificial
  Synthetic oligonucleotide
ggcggatcagtggcgggaacgaattcaacagttctgtccaggtgccacgat

SEQ ID NO: 424488 - DNA, 60 bp, Artificial
  Synthetic oligonucleotide
ggcggatgaggaaatggatgactaccgtgataggggtatgtcagcagtcgtgattgatgc

SEQ ID NO: 424489 - DNA, 60 bp, Artificial
  Synthetic oligonucleotide
ggcggatgctcattatgcagctgtgcaagacttaaaacgaaagtatttaggtagtccata

SEQ ID NO: 424490 - DNA, 59 bp, Artificial
  Synthetic oligonucleotide
ggcggattaatagcacctaatagagtgagcaaactaaagggaagaggccttggcattca

SEQ ID NO: 424491 - DNA, 55 bp, Artificial
  Synthetic oligonucleotide
ggcggattcagtgacgtcacggccgccattttaagtaggtgccgtccaggactgc

SEQ ID NO: 424492 - DNA, 57 bp, Artificial
  Synthetic oligonucleotide
ggcggattcgtaagaaagtgcagggaccgccagtaaattccaggatgacaacagtag

SEQ ID NO: 424493 - DNA, 55 bp, Artificial
  Synthetic oligonucleotide
ggcggatttgggtcacgatcattcgggaccctgctcccattggacgatgttgaag

SEQ ID NO: 424494 - DNA, 55 bp, Artificial
  Synthetic oligonucleotide
ggcggcaaaattgcctgaatgtcctagaggatccagtatctcagctccttctcag

SEQ ID NO: 424495 - DNA, 55 bp, Artificial
  Synthetic oligonucleotide
ggcggcaagactacgcacgactcgtgggcccggcattacgcctatcccaccccct

SEQ ID NO: 424496 - DNA, 55 bp, Artificial
  Synthetic oligonucleotide
ggcggcaaggcagagttgccgcaccgaaaccagcacattgaaacttcccacggag

SEQ ID NO: 424497 - DNA, 55 bp, Artificial
  Synthetic oligonucleotide
ggcggcaataggcgtgctggggagtctgctgtttgggctgctgacatatctgacg

SEQ ID NO: 424498 - DNA, 51 bp, Artificial
  Synthetic oligonucleotide
ggcggcaatccgtttaaaggaggatttaaaacggcagggccttgtggtgct

SEQ ID NO: 424499 - DNA, 55 bp, Artificial
  Synthetic oligonucleotide
ggcggcacggaggcaccaatccccccggtggtgtcgtctcttacgaggtccctca

SEQ ID NO: 424500 - DNA, 55 bp, Artificial
  Synthetic oligonucleotide
ggcggcacggagtggagcaagcgtgacaagtccacgtatgacccgaccgacgata

SEQ ID NO: 424501 - DNA, 57 bp, Artificial
  Synthetic oligonucleotide
ggcggcaggactaatagacatgcaaaaaccttttgacgctaatggtgccttccgaaa

SEQ ID NO: 424502 - DNA, 59 bp, Artificial
  Synthetic oligonucleotide
ggcggcaggtgtagatttagaggcgctctttagaaaggcgctactccgttctgcgccca

SEQ ID NO: 424503 - DNA, 52 bp, Artificial
  Synthetic oligonucleotide
ggcggcagtgctgaacctccaattaaaagtggacgcagatctgaaagcgttc

SEQ ID NO: 424504 - DNA, 55 bp, Artificial
  Synthetic oligonucleotide
ggcggcataagcgacacacggagccacacttcggtggggctataaggttccgtgt

SEQ ID NO: 424505 - DNA, 58 bp, Artificial
  Synthetic oligonucleotide
ggcggcatcgaaccatctactcggacggacctcggattttgggcaatcgactatcaaa

SEQ ID NO: 424506 - DNA, 55 bp, Artificial
  Synthetic oligonucleotide
ggcggcatcttgaggtgtgagcacggagttattggcattgtgaccatgggaggtg

SEQ ID NO: 424507 - DNA, 53 bp, Artificial
  Synthetic oligonucleotide
ggcggcattaaacttgtagcgaagtataaaacgctttacccctggtggttggc

SEQ ID NO: 424508 - DNA, 55 bp, Artificial
  Synthetic oligonucleotide
ggcggccaatgcatccggacggatagattccattggactgtgtatgcctaagggg

SEQ ID NO: 424509 - DNA, 55 bp, Artificial
  Synthetic oligonucleotide
ggcggccatagctcacatgacaaacaagcggattgctatcgataggcataggcgc

SEQ ID NO: 424510 - DNA, 59 bp, Artificial
  Synthetic oligonucleotide
ggcggccccttacccaaagatcgggccacagcgatgctgggtacacacgtcatctggga

SEQ ID NO: 424511 - DNA, 55 bp, Artificial
  Synthetic oligonucleotide
ggcggccctgatttctggggtcacaagtatgtcaaaggcgaccaaacctactggc

SEQ ID NO: 424512 - DNA, 55 bp, Artificial
  Synthetic oligonucleotide
ggcggcctccaagattggtgtcgagttcacagctccgaccaatattgctgatctc

SEQ ID NO: 424513 - DNA, 60 bp, Artificial
  Synthetic oligonucleotide
ggcggcctgtgtgttcaaggtgctggccccatatcgcccagaagtgatagaagcactgca

SEQ ID NO: 424514 - DNA, 56 bp, Artificial
  Synthetic oligonucleotide
ggcggccttctaccagtttgtaccctggcactttattaccggaatgcaatgcggcg

SEQ ID NO: 424515 - DNA, 55 bp, Artificial
  Synthetic oligonucleotide
ggcggcgaagttagtgccatggtagagtgtatggaattatgcgacgcgttgacgc

SEQ ID NO: 424516 - DNA, 60 bp, Artificial
  Synthetic oligonucleotide
ggcggcgactgaggtacataattgtaaatggtgctcaattaataacagttatactgtatg

SEQ ID NO: 424517 - DNA, 58 bp, Artificial
  Synthetic oligonucleotide
ggcggcgcaaatattccgatgaatacaagagctaaacgccgccgtagaaagataatac

SEQ ID NO: 424518 - DNA, 55 bp, Artificial
  Synthetic oligonucleotide
ggcggcgcgaacattctagacattacagctgatccaacaactgcgccacaaacag

SEQ ID NO: 424519 - DNA, 58 bp, Artificial
  Synthetic oligonucleotide
ggcggcgcttttacatggagtggagataatgactcgcccaaattttctcacgaacgac

SEQ ID NO: 424520 - DNA, 55 bp, Artificial
  Synthetic oligonucleotide
ggcggcgtcggatttgcctcttcttcgcctggcgatgtcttaccttgatcgggac

SEQ ID NO: 424521 - DNA, 55 bp, Artificial
  Synthetic oligonucleotide
ggcggcgttgagcatcgattcaacgctgcttgcaactggacccgcggagaacggt

SEQ ID NO: 424522 - DNA, 59 bp, Artificial
  Synthetic oligonucleotide
ggcggctagcccagtgccatgggacccggatttcaaagtagctcagggtcaatctgact

SEQ ID NO: 424523 - DNA, 54 bp, Artificial
  Synthetic oligonucleotide
ggcggctatacacgaaggggttgctagtagctctatcggaaaaccgtttatggg

SEQ ID NO: 424524 - DNA, 60 bp, Artificial
  Synthetic oligonucleotide
ggcggctatggatgaggcatatcgccagctcaatgacggacagccggttaacgtcgggat

SEQ ID NO: 424525 - DNA, 54 bp, Artificial
  Synthetic oligonucleotide
ggcggctcggaaaagagctcaggctaactcagaggcggacagggagagtttggc

SEQ ID NO: 424526 - DNA, 55 bp, Artificial
  Synthetic oligonucleotide
ggcggctcttgcttgctttgcatataacttgccagtgatgacaggaggcgtctca

SEQ ID NO: 424527 - DNA, 53 bp, Artificial
  Synthetic oligonucleotide
ggcggctgaactgacaaagactgacgtggcattggcagacgatggaactgtca

SEQ ID NO: 424528 - DNA, 60 bp, Artificial
  Synthetic oligonucleotide
ggcggctgacatgaaacagaaatcaggagtgccaagctcggactctcgcggtattttaac

SEQ ID NO: 424529 - DNA, 58 bp, Artificial
  Synthetic oligonucleotide
ggcggctgctttctgttccgctatgtacgtgggagatctctgcgggtctgttttcctt

SEQ ID NO: 424530 - DNA, 56 bp, Artificial
  Synthetic oligonucleotide
ggcggctggtcaataaaagcctcaaacgtaactaacacctaagaagatcatgtaaa

SEQ ID NO: 424531 - DNA, 58 bp, Artificial
  Synthetic oligonucleotide
ggcgggaaagaggacacgtgcgccgcacgccactttagtggtgggccatatgtcccga

SEQ ID NO: 424532 - DNA, 55 bp, Artificial
  Synthetic oligonucleotide
ggcgggaacagagagaattgaactcccattagttggttaacagccaaccgttcta

SEQ ID NO: 424533 - DNA, 56 bp, Artificial
  Synthetic oligonucleotide
ggcgggaaccgtcccaaattcaaacttcgattgcttgccccgcaagccatctagaa

SEQ ID NO: 424534 - DNA, 57 bp, Artificial
  Synthetic oligonucleotide
ggcgggaacgcatggacgtgcttgactctgtgggtttttagaggggctctgtaccgc

SEQ ID NO: 424535 - DNA, 55 bp, Artificial
  Synthetic oligonucleotide
ggcgggaagtacttagcggaatgggacagaatgttcctaaacatgtctgcagaac

SEQ ID NO: 424536 - DNA, 51 bp, Artificial
  Synthetic oligonucleotide
ggcgggaattactacttaaagggtgggtcagttaatctgttgtgggtgggt

SEQ ID NO: 424537 - DNA, 55 bp, Artificial
  Synthetic oligonucleotide
ggcgggaccatctgatctccgccatgtgatgacccctaatgaggtacaaatgtgt

SEQ ID NO: 424538 - DNA, 60 bp, Artificial
  Synthetic oligonucleotide
ggcgggacgcattatagcatgggacggacaggccgcgttgcatgtgcataaccccacaca

SEQ ID NO: 424539 - DNA, 55 bp, Artificial
  Synthetic oligonucleotide
ggcgggactcatggactctgacggcaccgtctctgatcgacaggtgacgatctct

SEQ ID NO: 424540 - DNA, 51 bp, Artificial
  Synthetic oligonucleotide
ggcgggagaagtaatctcccgtccagcccgacagaacggaggacaatcgaa

SEQ ID NO: 424541 - DNA, 60 bp, Artificial
  Synthetic oligonucleotide
ggcgggagcctcaccggtactggtttatcagtacatgcgcgctgatataggtgacatgag

SEQ ID NO: 424542 - DNA, 55 bp, Artificial
  Synthetic oligonucleotide
ggcgggagtagcctttaatccccatgatagcaccgcagctgctgagttctgcgtg

SEQ ID NO: 424543 - DNA, 54 bp, Artificial
  Synthetic oligonucleotide
ggcgggatcggtgcatcgcaatcaatgcagagaacacgggaaacgcccggcgtt

SEQ ID NO: 424544 - DNA, 58 bp, Artificial
  Synthetic oligonucleotide
ggcgggatctttaatataacttctcccatgtgtttagtctcagagcaaaatcgcttta

SEQ ID NO: 424545 - DNA, 59 bp, Artificial
  Synthetic oligonucleotide
ggcgggcaattgcgacacccggaatgcagattagaggatttgtgtactttgtcgaaaca

SEQ ID NO: 424546 - DNA, 60 bp, Artificial
  Synthetic oligonucleotide
ggcgggcatattatataagagagaaaccacacgtagcgcttcattctgcgggtcaccata

SEQ ID NO: 424547 - DNA, 57 bp, Artificial
  Synthetic oligonucleotide
ggcgggccagcagcctgcaagaaaaagattgaattttggtcagactggagacgcaga

SEQ ID NO: 424548 - DNA, 55 bp, Artificial
  Synthetic oligonucleotide
ggcgggcgtgcgccggttgccgtgtcgagcctggcgtaattcactatcagtttac

SEQ ID NO: 424549 - DNA, 55 bp, Artificial
  Synthetic oligonucleotide
ggcgggctcacaaataggcgtttggttcaacaggttaatgtagagaatcctttgt

SEQ ID NO: 424550 - DNA, 55 bp, Artificial
  Synthetic oligonucleotide
ggcgggctcgagccttcgggcgagtccgcccttggacggcttatacaactcggag

SEQ ID NO: 424551 - DNA, 59 bp, Artificial
  Synthetic oligonucleotide
ggcgggctctagcaaattcaatcaaaagggacctggaaatggatgatgagtgtaaggta

SEQ ID NO: 424552 - DNA, 55 bp, Artificial
  Synthetic oligonucleotide
ggcggggaaggtttagtagccttctcggacattagagacctgtatgcttatgagg

SEQ ID NO: 424553 - DNA, 54 bp, Artificial
  Synthetic oligonucleotide
ggcggggacctctaaggtcagtcgtaatgtcaactattcgccccgtggtggtcc

SEQ ID NO: 424554 - DNA, 50 bp, Artificial
  Synthetic oligonucleotide
ggcggggactcaggtatataagtagaagcagacctgtgtggttagctcat

SEQ ID NO: 424555 - DNA, 55 bp, Artificial
  Synthetic oligonucleotide
ggcggggactctactcaggatggcgtggcacaacatggataaacaccgttctcaa

SEQ ID NO: 424556 - DNA, 56 bp, Artificial
  Synthetic oligonucleotide
ggcggggagtcttcgagctctcggacgaaaaggcagcgaacccgatcgtgccttcc

SEQ ID NO: 424557 - DNA, 54 bp, Artificial
  Synthetic oligonucleotide
ggcggggcccgctttcgtgtaacttgcggccgcgagcgggctaggcccgacctg

SEQ ID NO: 424558 - DNA, 57 bp, Artificial
  Synthetic oligonucleotide
ggcggggcttagtcctatataagtggcaacacctgggcactggggcacagaccttta

SEQ ID NO: 424559 - DNA, 52 bp, Artificial
  Synthetic oligonucleotide
ggcgggggagcgaaaccaataatattaccgctccccctccctggcccattag

SEQ ID NO: 424560 - DNA, 52 bp, Artificial
  Synthetic oligonucleotide
ggcgggggctaaaatggcgggacccaatcaatttatactttcactttccaat

SEQ ID NO: 424561 - DNA, 51 bp, Artificial
  Synthetic oligonucleotide
ggcgggggggcatattattaccccccccgcccgggacgggacatcacgtgc

SEQ ID NO: 424562 - DNA, 50 bp, Artificial
  Synthetic oligonucleotide
ggcgggggggcatattattaccccccccgcccgggacgggacattctgta

SEQ ID NO: 424563 - DNA, 56 bp, Artificial
  Synthetic oligonucleotide
ggcgggggtgcttacattccacgtaccagagacgccgatcttagggtaggaacatc

SEQ ID NO: 424564 - DNA, 55 bp, Artificial
  Synthetic oligonucleotide
ggcggggtggctcctcggcaacccagaatgtgacctgctgctcactgcgaattca

SEQ ID NO: 424565 - DNA, 55 bp, Artificial
  Synthetic oligonucleotide
ggcggggtgtgccaaatatggtcttctccggagaatgtttccaagatggctgcgg

SEQ ID NO: 424566 - DNA, 55 bp, Artificial
  Synthetic oligonucleotide
ggcggggtttagctattggaatgagggatgacattctggagcctatcccagtccc

SEQ ID NO: 424567 - DNA, 50 bp, Artificial
  Synthetic oligonucleotide
ggcggggtttatcctagtgacggggttaagtcatacctcgaagggtaggg

SEQ ID NO: 424568 - DNA, 57 bp, Artificial
  Synthetic oligonucleotide
ggcgggtcgccattatccactgtcctggccaccagaggggaagtaaccctgtggcca

SEQ ID NO: 424569 - DNA, 55 bp, Artificial
  Synthetic oligonucleotide
ggcgggtctcatcaatttgagcagtactccaaccaacagaatgattcgttatgaa

SEQ ID NO: 424570 - DNA, 55 bp, Artificial
  Synthetic oligonucleotide
ggcgggtctgtcccgccgtgcaagaccaacaatacgtcgacatcgcggtgttgtc

SEQ ID NO: 424571 - DNA, 55 bp, Artificial
  Synthetic oligonucleotide
ggcgggtgtgtgaccctcagtgctgaggggaagccctccatagacctttggctag

SEQ ID NO: 424572 - DNA, 53 bp, Artificial
  Synthetic oligonucleotide
ggcgggttcaacaagttagaactaggaacatagatttcctaaaccgcccacga

SEQ ID NO: 424573 - DNA, 55 bp, Artificial
  Synthetic oligonucleotide
ggcgggttcaattacatgagtctctctaggttgttcgtgcgtaatatcggggatc

SEQ ID NO: 424574 - DNA, 55 bp, Artificial
  Synthetic oligonucleotide
ggcgggttcttacaccaacgtgaagccgaacacatttgtgtaccggactcagtcg

SEQ ID NO: 424575 - DNA, 55 bp, Artificial
  Synthetic oligonucleotide
ggcgggttgctgtgttgtacgcatggagtggttggcatcctcacagcgggtggtg

SEQ ID NO: 424576 - DNA, 55 bp, Artificial
  Synthetic oligonucleotide
ggcgggttgtacaatatgtatctaaaagaccagcacctgaatttaggagtcgtga

SEQ ID NO: 424577 - DNA, 55 bp, Artificial
  Synthetic oligonucleotide
ggcggtaaaataatagtaggagatctcgaggcgacgggatctcgcgtaattgatg

SEQ ID NO: 424578 - DNA, 57 bp, Artificial
  Synthetic oligonucleotide
ggcggtaaatcaaggttgtcgaagatcttttcagaattgggatacaatgtgttagat

SEQ ID NO: 424579 - DNA, 56 bp, Artificial
  Synthetic oligonucleotide
ggcggtaacgtccctcgcagaatacaagtcatcaatccgaaattcctcgggcccaa

SEQ ID NO: 424580 - DNA, 52 bp, Artificial
  Synthetic oligonucleotide
ggcggtaagttttcccttaaaattaaaggctcatcaggattagacacacctt

SEQ ID NO: 424581 - DNA, 55 bp, Artificial
  Synthetic oligonucleotide
ggcggtacacacagaccaaagcctctggatgaagtccgtgagaaatgacacggga

SEQ ID NO: 424582 - DNA, 55 bp, Artificial
  Synthetic oligonucleotide
ggcggtacggggaatgttactgtcgttcctgttagcaatgccaacggcgtcgctg

SEQ ID NO: 424583 - DNA, 55 bp, Artificial
  Synthetic oligonucleotide
ggcggtacgttcgaagctatgggttgttgcgtgagtgccgcaccatttccagtga

SEQ ID NO: 424584 - DNA, 55 bp, Artificial
  Synthetic oligonucleotide
ggcggtagaactggatatgttcctttagagtctgccccacgccctgccataccct

SEQ ID NO: 424585 - DNA, 55 bp, Artificial
  Synthetic oligonucleotide
ggcggtagagaagttttacctagagcatatcaatgcttagccgccgggagggcca

SEQ ID NO: 424586 - DNA, 55 bp, Artificial
  Synthetic oligonucleotide
ggcggtagtttggaacagaacctggtagaggcgtgcaaggttgctccttcggtgg

SEQ ID NO: 424587 - DNA, 54 bp, Artificial
  Synthetic oligonucleotide
ggcggtatagatgcgaaaaaaagtttggccatctttttagttttataagctctg

SEQ ID NO: 424588 - DNA, 55 bp, Artificial
  Synthetic oligonucleotide
ggcggtatgccatcaggatccccatgcactactgttttgaattcattatgcaacc

SEQ ID NO: 424589 - DNA, 56 bp, Artificial
  Synthetic oligonucleotide
ggcggtcaaaccgaaaacatgtacacgagtttctacctaaataacgtgatgcaata

SEQ ID NO: 424590 - DNA, 55 bp, Artificial
  Synthetic oligonucleotide
ggcggtccattatctgcattatgcgttgttagctcagccggacagagcaattgcc

SEQ ID NO: 424591 - DNA, 60 bp, Artificial
  Synthetic oligonucleotide
ggcggtcccactcttcacaggaatctgcacaggtggctttcacctctggacagtgcattc

SEQ ID NO: 424592 - DNA, 55 bp, Artificial
  Synthetic oligonucleotide
ggcggtcgataatttcagcttccctttgaattttgcgaagtgggtacgctgttga

SEQ ID NO: 424593 - DNA, 59 bp, Artificial
  Synthetic oligonucleotide
ggcggtcgttgtacatctagaagtcgagcacgtaaggcctacgttcgatgacttcttca

SEQ ID NO: 424594 - DNA, 55 bp, Artificial
  Synthetic oligonucleotide
ggcggtctccattactcatcaacacaataactctgggtttaccggctttgcttcc

SEQ ID NO: 424595 - DNA, 55 bp, Artificial
  Synthetic oligonucleotide
ggcggtctttgaattcgagcgccgagattaggcggggcttcggttcgtagaccag

SEQ ID NO: 424596 - DNA, 56 bp, Artificial
  Synthetic oligonucleotide
ggcggtgaaatctcttgatacacaagataaacgccccaaagtaaatttctctagag

SEQ ID NO: 424597 - DNA, 55 bp, Artificial
  Synthetic oligonucleotide
ggcggtgagcaactttaatacggcatgcacgacagaattttctatgtgtgcagcg

SEQ ID NO: 424598 - DNA, 55 bp, Artificial
  Synthetic oligonucleotide
ggcggtgctgaggaaaagggagagtacgaattatgtgcattggggagcattgtcg

SEQ ID NO: 424599 - DNA, 55 bp, Artificial
  Synthetic oligonucleotide
ggcggtggactttatacccgtcgagtccatggaaaccactatgcggtctccggtc

SEQ ID NO: 424600 - DNA, 53 bp, Artificial
  Synthetic oligonucleotide
ggcggtggactttgtaccggttgagtctatggaaactaccatgcggtccccgg

SEQ ID NO: 424601 - DNA, 55 bp, Artificial
  Synthetic oligonucleotide
ggcggtggatttcatacccgttgaatcaatggaaactactatgcggtctccggtc

SEQ ID NO: 424602 - DNA, 53 bp, Artificial
  Synthetic oligonucleotide
ggcggtggcatttttctaataagaggaagtactctctttggttactccagttg

SEQ ID NO: 424603 - DNA, 57 bp, Artificial
  Synthetic oligonucleotide
ggcggtggcatttttgtaataagaatgggtactctagttggagtactccagttgagc

SEQ ID NO: 424604 - DNA, 50 bp, Artificial
  Synthetic oligonucleotide
ggcggtgtgtacccctgggagggtaaaatagaggggtttcccgagcccgc

SEQ ID NO: 424605 - DNA, 55 bp, Artificial
  Synthetic oligonucleotide
ggcggttaaccacttccatcttggagatgacatggatccagagctgagagagctg

SEQ ID NO: 424606 - DNA, 55 bp, Artificial
  Synthetic oligonucleotide
ggcggttcagacagcgagttggccagaatgttactacatcaatcgtatcctcgac

SEQ ID NO: 424607 - DNA, 52 bp, Artificial
  Synthetic oligonucleotide
ggcggttcgtacgctttcaaatcttattggaaacatataaccaaccccggtc

SEQ ID NO: 424608 - DNA, 56 bp, Artificial
  Synthetic oligonucleotide
ggcggttgggacaatatgctaagaaacctagttcaaggtgtggaaggcccaatgct

SEQ ID NO: 424609 - DNA, 60 bp, Artificial
  Synthetic oligonucleotide
ggcgtaaatccaatgcccggcccgctaacacgtgcaattgcgcgcgccgcttatgtgtag

SEQ ID NO: 424610 - DNA, 55 bp, Artificial
  Synthetic oligonucleotide
ggcgtaacctaaaaccagatcaaatggacgagattcgtaattacactcatctaga

SEQ ID NO: 424611 - DNA, 55 bp, Artificial
  Synthetic oligonucleotide
ggcgtaacgctttatgctgctctggtctgtgccacctctatctcacatccagatc

SEQ ID NO: 424612 - DNA, 60 bp, Artificial
  Synthetic oligonucleotide
ggcgtaagatattatgtagagtcagaagatgacttagttagcgtggctcacgagttggct

SEQ ID NO: 424613 - DNA, 60 bp, Artificial
  Synthetic oligonucleotide
ggcgtaagcgtcattggctgtctgttgccctcctcttgctgaccttccgtcgatctgaaa

SEQ ID NO: 424614 - DNA, 56 bp, Artificial
  Synthetic oligonucleotide
ggcgtaagctcgtccagaccttgaagttgagaaaacacttgtgaatccccaacgcc

SEQ ID NO: 424615 - DNA, 57 bp, Artificial
  Synthetic oligonucleotide
ggcgtacaaattatatggcattaggatagttgatacaaaactacagtcatatggtgg

SEQ ID NO: 424616 - DNA, 55 bp, Artificial
  Synthetic oligonucleotide
ggcgtacaacggtctcgttaccactgtcttatcggaggatgcattccccgacagc

SEQ ID NO: 424617 - DNA, 55 bp, Artificial
  Synthetic oligonucleotide
ggcgtacatgtccaaggcatatggcaccgaccccaacatcagaactggggtaagg

SEQ ID NO: 424618 - DNA, 58 bp, Artificial
  Synthetic oligonucleotide
ggcgtaccaaggcataacgcaaagtacagatatgaatacgacgtaatgaaagataaac

SEQ ID NO: 424619 - DNA, 55 bp, Artificial
  Synthetic oligonucleotide
ggcgtaccactgtacattagagattccctagcaccacgtattaagaggcgtttaa

SEQ ID NO: 424620 - DNA, 52 bp, Artificial
  Synthetic oligonucleotide
ggcgtaccgggcgagtcactacatgtacagctgggtgcgagagatcagcacg

SEQ ID NO: 424621 - DNA, 53 bp, Artificial
  Synthetic oligonucleotide
ggcgtacgaatgctgggacctccaaggtacgtcgttctttaaatttttcgcca

SEQ ID NO: 424622 - DNA, 55 bp, Artificial
  Synthetic oligonucleotide
ggcgtacgtgatggtatccgaaccaggtcgctgtccgcaggagtaagatccgtct

SEQ ID NO: 424623 - DNA, 56 bp, Artificial
  Synthetic oligonucleotide
ggcgtactactggagacgaaggtatccaaggtacaccaggaggagaacaacaaaca

SEQ ID NO: 424624 - DNA, 52 bp, Artificial
  Synthetic oligonucleotide
ggcgtactctaaggagtacgttttggacccctccggtaggaaccatcagtcc

SEQ ID NO: 424625 - DNA, 55 bp, Artificial
  Synthetic oligonucleotide
ggcgtacttgctgaccgttgtacttgatgccgacagtgacgcaacgttggaggat

SEQ ID NO: 424626 - DNA, 60 bp, Artificial
  Synthetic oligonucleotide
ggcgtagaagtgtgtgtaacactggtcgttgcgctgttaacaagcatgtggcctatcagc

SEQ ID NO: 424627 - DNA, 56 bp, Artificial
  Synthetic oligonucleotide
ggcgtagacgggacccatggtgcgggtgaggggtcgccacaccctctgccgcgact

SEQ ID NO: 424628 - DNA, 50 bp, Artificial
  Synthetic oligonucleotide
ggcgtagaggaggccttactaacagaagattagttcaacaagtgcctgta

SEQ ID NO: 424629 - DNA, 60 bp, Artificial
  Synthetic oligonucleotide
ggcgtaggaagaagtgaagcagcgttactgcaataaacgtgattgagtgagcacagagtg

SEQ ID NO: 424630 - DNA, 57 bp, Artificial
  Synthetic oligonucleotide
ggcgtagtggactagcggttagaggagacccctcccttacaaatcgcagcaacaatg

SEQ ID NO: 424631 - DNA, 55 bp, Artificial
  Synthetic oligonucleotide
ggcgtagtggctatggtcaacccgtagcatcatcattaagtaatatctcactacc

SEQ ID NO: 424632 - DNA, 60 bp, Artificial
  Synthetic oligonucleotide
ggcgtataacccggaagtcaatactctgacgtggcctgtcacgtgactgctacgtcacga

SEQ ID NO: 424633 - DNA, 55 bp, Artificial
  Synthetic oligonucleotide
ggcgtatctccagaaaccttcccaactgtttcacagtttcttttcgagctaggga

SEQ ID NO: 424634 - DNA, 53 bp, Artificial
  Synthetic oligonucleotide
ggcgtatctctacttccgactcctgtgtaatacttcataagggcaccattcta

SEQ ID NO: 424635 - DNA, 55 bp, Artificial
  Synthetic oligonucleotide
ggcgtatcttcgccctcatgcagcgcagacgcctagacgtcaaagcgtatcgggc

SEQ ID NO: 424636 - DNA, 57 bp, Artificial
  Synthetic oligonucleotide
ggcgtatctttacgacacgaattccctagaatacaaccggatagcatacgtaagcaa

SEQ ID NO: 424637 - DNA, 55 bp, Artificial
  Synthetic oligonucleotide
ggcgtatggtgatgatattgtagccacctaccctttccagttggatgctgccgct

SEQ ID NO: 424638 - DNA, 56 bp, Artificial
  Synthetic oligonucleotide
ggcgtattaattgttgggccacgtttaaggacgtggatcgtgagtcatgcaagggt

SEQ ID NO: 424639 - DNA, 58 bp, Artificial
  Synthetic oligonucleotide
ggcgtattcgagcacgggtggagatactaagacggagttccttcatttaatcgatcac

SEQ ID NO: 424640 - DNA, 55 bp, Artificial
  Synthetic oligonucleotide
ggcgtattcggtgacgtcacggccgccattttaagtagggcggaagcagccccac

SEQ ID NO: 424641 - DNA, 58 bp, Artificial
  Synthetic oligonucleotide
ggcgtatttgtcttaggcacgcttaaccacaagcgttacaacgagacattggcattta

SEQ ID NO: 424642 - DNA, 55 bp, Artificial
  Synthetic oligonucleotide
ggcgtcaaaatactgttccaaaatactattcaccaaatcactaggggtatcctgt

SEQ ID NO: 424643 - DNA, 55 bp, Artificial
  Synthetic oligonucleotide
ggcgtcaaaccttacgacatagtgcacttttgtgacactcgcttttacccttggg

SEQ ID NO: 424644 - DNA, 53 bp, Artificial
  Synthetic oligonucleotide
ggcgtcaaccaccagagggttgcctcggtcggaaaaggcttgatagagccccc

SEQ ID NO: 424645 - DNA, 54 bp, Artificial
  Synthetic oligonucleotide
ggcgtcacctaggaaagtacagttcgagtccagggaattactttatagtacgag

SEQ ID NO: 424646 - DNA, 60 bp, Artificial
  Synthetic oligonucleotide
ggcgtcacctccctatatgccaggtcttccacaggcggtcttgatgcatacaaggtcatg

SEQ ID NO: 424647 - DNA, 57 bp, Artificial
  Synthetic oligonucleotide
ggcgtcacctgaaggtacagaggatgaggggggatgtcggggatggtttcacgtgga

SEQ ID NO: 424648 - DNA, 55 bp, Artificial
  Synthetic oligonucleotide
ggcgtcagaatgtttccaactctctgacaaatctgtttactttccaaggaccaag

SEQ ID NO: 424649 - DNA, 55 bp, Artificial
  Synthetic oligonucleotide
ggcgtcagggtttgcgagaaaatggccctttatgacatcacacagaagctacccc

SEQ ID NO: 424650 - DNA, 55 bp, Artificial
  Synthetic oligonucleotide
ggcgtcatatggtttgaactttaagtgtatttggacagatcacacacttgttgtc

SEQ ID NO: 424651 - DNA, 59 bp, Artificial
  Synthetic oligonucleotide
ggcgtcatcaagaatcgaagttccgtcatgttactcgtaacctaaatgtctatagacca

SEQ ID NO: 424652 - DNA, 57 bp, Artificial
  Synthetic oligonucleotide
ggcgtcattgaattcgacggaggggccatcactcgtgatgccgcacttgctgtcatc

SEQ ID NO: 424653 - DNA, 55 bp, Artificial
  Synthetic oligonucleotide
ggcgtcatttgttgttgtgaaatagcatgagagttcctattagacgaccttttgc

SEQ ID NO: 424654 - DNA, 57 bp, Artificial
  Synthetic oligonucleotide
ggcgtccatacagtggtcgaatccattttgcttaggaacgttctcgtaatcgtccga

SEQ ID NO: 424655 - DNA, 60 bp, Artificial
  Synthetic oligonucleotide
ggcgtcccaaggcaccaaacggtcatatgaacagatggagactgatggggaacgccagaa

SEQ ID NO: 424656 - DNA, 58 bp, Artificial
  Synthetic oligonucleotide
ggcgtcctattgccacgagtactcacaacttcagtggctcaaggtcgggaaattcgag

SEQ ID NO: 424657 - DNA, 50 bp, Artificial
  Synthetic oligonucleotide
ggcgtcctccatccaagactcgcacctctgcgcgaagagccagctcggtc

SEQ ID NO: 424658 - DNA, 54 bp, Artificial
  Synthetic oligonucleotide
ggcgtcgaataagtagtcaaacccaaaactggtcgctatgccgagtatgagcgc

SEQ ID NO: 424659 - DNA, 51 bp, Artificial
  Synthetic oligonucleotide
ggcgtcgacgcggaaacccacgtcaccgggggaaccgccgccgaagccacg

SEQ ID NO: 424660 - DNA, 55 bp, Artificial
  Synthetic oligonucleotide
ggcgtcgatcccggaatctgggtaaggtcatcgataccctaacgtgcgggttcgc

SEQ ID NO: 424661 - DNA, 55 bp, Artificial
  Synthetic oligonucleotide
ggcgtcgatgtcaattggttgtgggcctgtgtatcgcatgcttgtagagcgccca

SEQ ID NO: 424662 - DNA, 55 bp, Artificial
  Synthetic oligonucleotide
ggcgtcgcgggtgattaatcggccgcccgatttgtactgcggcccttgcccgaat

SEQ ID NO: 424663 - DNA, 55 bp, Artificial
  Synthetic oligonucleotide
ggcgtcgctggtaagtacctgcagcggaggctgcaagttaatggtctccgagcag

SEQ ID NO: 424664 - DNA, 55 bp, Artificial
  Synthetic oligonucleotide
ggcgtcgttttgtatcggtgtctctctaaaagtcctatgtatcggtgtatcggtg

SEQ ID NO: 424665 - DNA, 55 bp, Artificial
  Synthetic oligonucleotide
ggcgtctaaccaactgaggcttgcagtaatgggactaaattatgtagaccctgca

SEQ ID NO: 424666 - DNA, 55 bp, Artificial
  Synthetic oligonucleotide
ggcgtctaaccgcgctccgcatgcctttggcagtcaaaactctgtcaatgacagt

SEQ ID NO: 424667 - DNA, 55 bp, Artificial
  Synthetic oligonucleotide
ggcgtctaacgacgctaccactgcctcttgtggcgaaaacaccactaagaaagac

SEQ ID NO: 424668 - DNA, 60 bp, Artificial
  Synthetic oligonucleotide
ggcgtctcaaggcaccaaacgatcttacgaacagatggaaactggtggagagcgccagaa

SEQ ID NO: 424669 - DNA, 60 bp, Artificial
  Synthetic oligonucleotide
ggcgtctcgtcgcgtttatgataacgcggttgaggagctgaatgctcgttcaagacgtcc

SEQ ID NO: 424670 - DNA, 50 bp, Artificial
  Synthetic oligonucleotide
ggcgtctggagagagaaaggaataattgtaaggtagacgacgatgtagtg

SEQ ID NO: 424671 - DNA, 60 bp, Artificial
  Synthetic oligonucleotide
ggcgtctggccattgcaagtacagacacagtgcaccgtttgcggtcgaggatctcacgct

SEQ ID NO: 424672 - DNA, 53 bp, Artificial
  Synthetic oligonucleotide
ggcgtctgttctgaaggctgtatcgcaccgccttacccacaagacgggctgcc

SEQ ID NO: 424673 - DNA, 56 bp, Artificial
  Synthetic oligonucleotide
ggcgtcttgcctgttgggctgctggaaagaacccccatctagggggttctgttgaa

SEQ ID NO: 424674 - DNA, 60 bp, Artificial
  Synthetic oligonucleotide
ggcgtgaacatatcagtgatacaggattaacaattaggctaattgccaatagaccctaat

SEQ ID NO: 424675 - DNA, 55 bp, Artificial
  Synthetic oligonucleotide
ggcgtgaatcagatcgtcggttgcttgcgtgcctggatgcgggatgtgtgagccg

SEQ ID NO: 424676 - DNA, 52 bp, Artificial
  Synthetic oligonucleotide
ggcgtgacctgatgcgtgattggaggcgtgacatgagtgtcaatgacttcct

SEQ ID NO: 424677 - DNA, 55 bp, Artificial
  Synthetic oligonucleotide
ggcgtgagacacttgagaatggcatcttcttcgctcattaatccgagacttttaa

SEQ ID NO: 424678 - DNA, 55 bp, Artificial
  Synthetic oligonucleotide
ggcgtgatcacgaagatgatcctctgcctgccactggtggcggcgttgaaactct

SEQ ID NO: 424679 - DNA, 59 bp, Artificial
  Synthetic oligonucleotide
ggcgtgatcgggtccgaacaagtctgttctccaagaatgtcgacaaggtgcctatgagg

SEQ ID NO: 424680 - DNA, 50 bp, Artificial
  Synthetic oligonucleotide
ggcgtgatgaaaagatggggtacccgtcatcacgacctagtaaaaggctg

SEQ ID NO: 424681 - DNA, 55 bp, Artificial
  Synthetic oligonucleotide
ggcgtgatgatcaattgtactatactggtcaagataaggagaacgtccggttctc

SEQ ID NO: 424682 - DNA, 55 bp, Artificial
  Synthetic oligonucleotide
ggcgtgcacattcctacatagattatcttctgtgttggcagggatttcccctgcg

SEQ ID NO: 424683 - DNA, 55 bp, Artificial
  Synthetic oligonucleotide
ggcgtgccactgactagggctactccggccaagccccctgtggtaaggccggttg

SEQ ID NO: 424684 - DNA, 54 bp, Artificial
  Synthetic oligonucleotide
ggcgtgccctacgtttctacacttcgaaggcgacgtaccgtacgtgaccacgaa

SEQ ID NO: 424685 - DNA, 50 bp, Artificial
  Synthetic oligonucleotide
ggcgtgcctccagatttaaccgtaggagcctcagtagacacgccggggga

SEQ ID NO: 424686 - DNA, 56 bp, Artificial
  Synthetic oligonucleotide
ggcgtgccttatggggagctaacaaggcaattccgtagtgataagacggggtgctt

SEQ ID NO: 424687 - DNA, 55 bp, Artificial
  Synthetic oligonucleotide
ggcgtgcgaactaacggactccagttggattgaacttgacgaaattggagaggac

SEQ ID NO: 424688 - DNA, 55 bp, Artificial
  Synthetic oligonucleotide
ggcgtgcgcggtatgtaatcgtctggatatgtatcgctgtctgttcctcctcctc

SEQ ID NO: 424689 - DNA, 50 bp, Artificial
  Synthetic oligonucleotide
ggcgtgcgggcacttcgcttaagatcttgacacgtggcagcagccattga

SEQ ID NO: 424690 - DNA, 55 bp, Artificial
  Synthetic oligonucleotide
ggcgtgcgggtgacgtgataggctacccatcaagggctgtttcgagtctcgtatc

SEQ ID NO: 424691 - DNA, 55 bp, Artificial
  Synthetic oligonucleotide
ggcgtgcggttcgtttgcaatcgtacaaagaatatctataacctccaacaggtag

SEQ ID NO: 424692 - DNA, 55 bp, Artificial
  Synthetic oligonucleotide
ggcgtgcgtgaccaactggcagaacaagcaaagcaggcctatagggtgttaacag

SEQ ID NO: 424693 - DNA, 60 bp, Artificial
  Synthetic oligonucleotide
ggcgtgcttagaggcacatcagaacgccttgatgaaacagcataccgatacctcagttgg

SEQ ID NO: 424694 - DNA, 53 bp, Artificial
  Synthetic oligonucleotide
ggcgtgcttccgtcggaggtcttcacgtgttcgtgaaacgcggtaactttacg

SEQ ID NO: 424695 - DNA, 55 bp, Artificial
  Synthetic oligonucleotide
ggcgtggaagagttggtcggcaagacggacgaacagatgaatacatatactctgg

SEQ ID NO: 424696 - DNA, 55 bp, Artificial
  Synthetic oligonucleotide
ggcgtggacgatggtcaataccccgggcctaatcagcagagagctagcctgctcg

SEQ ID NO: 424697 - DNA, 60 bp, Artificial
  Synthetic oligonucleotide
ggcgtggactggtcggatgatcacggtccaactgtgcggttggcggatgcggtgaatgcc

SEQ ID NO: 424698 - DNA, 60 bp, Artificial
  Synthetic oligonucleotide
ggcgtggatccctgacttatactattcacgttcaatctgggtccgctatccagcactcat

SEQ ID NO: 424699 - DNA, 55 bp, Artificial
  Synthetic oligonucleotide
ggcgtggccgatcactatcggccgttccgtgaacaacaccctgcgtgtgtctcac

SEQ ID NO: 424700 - DNA, 55 bp, Artificial
  Synthetic oligonucleotide
ggcgtggccggaagaacaactacaatgccttttcccgtagaggactcaatgatga

SEQ ID NO: 424701 - DNA, 55 bp, Artificial
  Synthetic oligonucleotide
ggcgtggccgtcaacttcagtaagtggaagtggcatgcactaaacttagtttacg

SEQ ID NO: 424702 - DNA, 55 bp, Artificial
  Synthetic oligonucleotide
ggcgtggcggctctgaaggggacactcttggtgacttgtggaagcggaagctcaa

SEQ ID NO: 424703 - DNA, 59 bp, Artificial
  Synthetic oligonucleotide
ggcgtgggtttcaccaggaggtcgggcacacgttattgtcactggctattgctcattgg

SEQ ID NO: 424704 - DNA, 51 bp, Artificial
  Synthetic oligonucleotide
ggcgtggtcttcacgaaagaagatggtgcttgttaattcaccgaaatcaaa

SEQ ID NO: 424705 - DNA, 55 bp, Artificial
  Synthetic oligonucleotide
ggcgtgtacggcagtctcatggcctcgtacgcctacatgagaaacgggtgggata

SEQ ID NO: 424706 - DNA, 54 bp, Artificial
  Synthetic oligonucleotide
ggcgtgtactctgaaccccgccccattggcacccgttacctcacccgtaatctg

SEQ ID NO: 424707 - DNA, 60 bp, Artificial
  Synthetic oligonucleotide
ggcgtgtagcccttattgtataagccaagtatctgtcttgcaaatatgtaaccatatact

SEQ ID NO: 424708 - DNA, 60 bp, Artificial
  Synthetic oligonucleotide
ggcgtgtcaacaattatgtggtctataaccaccaagaagctgctaagtatgagaatcata

SEQ ID NO: 424709 - DNA, 60 bp, Artificial
  Synthetic oligonucleotide
ggcgtgtcaagagtgttcatgccaatatattaaatgacatatcacctcaggtcgtctctg

SEQ ID NO: 424710 - DNA, 60 bp, Artificial
  Synthetic oligonucleotide
ggcgtgtcccctaggcgtctggcatccatgtgttatggtagtgtaacgctcgatgttatg

SEQ ID NO: 424711 - DNA, 60 bp, Artificial
  Synthetic oligonucleotide
ggcgtgtcctgtttcatagagtacttgtaggacaccgcatctatgacggtaactcgtcca

SEQ ID NO: 424712 - DNA, 55 bp, Artificial
  Synthetic oligonucleotide
ggcgtgtctctgtatgtgtcaccggagactgcatgtatcgtgcatatctgtattg

SEQ ID NO: 424713 - DNA, 60 bp, Artificial
  Synthetic oligonucleotide
ggcgtgtgacacatacgcagttggaaaaattgatcaatggtcggtacggcagctacgcgc

SEQ ID NO: 424714 - DNA, 55 bp, Artificial
  Synthetic oligonucleotide
ggcgtgtgatgcgactaagctcggggatcctgccacgcaagaatggctttctcgc

SEQ ID NO: 424715 - DNA, 55 bp, Artificial
  Synthetic oligonucleotide
ggcgtgtgattatgtttgtgccatctcgaagggagtgtgagttagcgcgatccag

SEQ ID NO: 424716 - DNA, 56 bp, Artificial
  Synthetic oligonucleotide
ggcgtgtggcacctcgttcgggtttggctgtgaagcactgtatcaacgttggtgcg

SEQ ID NO: 424717 - DNA, 59 bp, Artificial
  Synthetic oligonucleotide
ggcgtgtgttacgtcacgaatataattgtttcggtatttgcaaaggggacatcatcatc

SEQ ID NO: 424718 - DNA, 60 bp, Artificial
  Synthetic oligonucleotide
ggcgtgtgtttacgtcagactatgtcatttgcacgtccaactatccaacatctgttatcc

SEQ ID NO: 424719 - DNA, 60 bp, Artificial
  Synthetic oligonucleotide
ggcgtgttcgaacgattctatgtctgtgctgcttaaccgtctctatgctggtgcggatgc

SEQ ID NO: 424720 - DNA, 60 bp, Artificial
  Synthetic oligonucleotide
ggcgtgttggagaacagcccactagtgcttctgacgctgctaatgaggagttggttcaac

SEQ ID NO: 424721 - DNA, 51 bp, Artificial
  Synthetic oligonucleotide
ggcgttaacgggatgcaaccgtaagatacaccttcacccggaagtaaaacg

SEQ ID NO: 424722 - DNA, 54 bp, Artificial
  Synthetic oligonucleotide
ggcgttaaggggttatgaagttgtatgctggtagactataagtatttaagttta

SEQ ID NO: 424723 - DNA, 60 bp, Artificial
  Synthetic oligonucleotide
ggcgttaatgggtacctgctgtctgtattctatgacgcaatggtctattttcatacagct

SEQ ID NO: 424724 - DNA, 58 bp, Artificial
  Synthetic oligonucleotide
ggcgttacaactgctggtctacgtttaaagaccttgatcgtgaatcatgcaagggtgt

SEQ ID NO: 424725 - DNA, 55 bp, Artificial
  Synthetic oligonucleotide
ggcgttacaactgttggtccaattttaaggatctagaacatgactcatgtaacgg

SEQ ID NO: 424726 - DNA, 59 bp, Artificial
  Synthetic oligonucleotide
ggcgttacggtgatttgcaggttacgcgtaaacgccacactaggagtgctatgcgacaa

SEQ ID NO: 424727 - DNA, 55 bp, Artificial
  Synthetic oligonucleotide
ggcgttagatcgccttgatatttgcactacagcgtatgcctccataaacaagtgc

SEQ ID NO: 424728 - DNA, 60 bp, Artificial
  Synthetic oligonucleotide
ggcgttagcaatgaagacttgcctaggcagtatatgatgaaatccgtagatgtaaattgg

SEQ ID NO: 424729 - DNA, 55 bp, Artificial
  Synthetic oligonucleotide
ggcgttatgccgggctccgtggacgaatcgttacctaagcttaacgatgccaagc

SEQ ID NO: 424730 - DNA, 55 bp, Artificial
  Synthetic oligonucleotide
ggcgttatgtctgcttagcaggaagtcttgctagtggatgttccttctcgaggca

SEQ ID NO: 424731 - DNA, 56 bp, Artificial
  Synthetic oligonucleotide
ggcgttatttgatatgttaattagagtttgtgcaaaactaattcccgcaatattgt

SEQ ID NO: 424732 - DNA, 55 bp, Artificial
  Synthetic oligonucleotide
ggcgttcacttgcacttcgcgctttacaaaacgaggtagcgtgtaatcgaacccg

SEQ ID NO: 424733 - DNA, 55 bp, Artificial
  Synthetic oligonucleotide
ggcgttcagccggtttgtgcaggactatctggtatttggtaacgcctatctggag

SEQ ID NO: 424734 - DNA, 55 bp, Artificial
  Synthetic oligonucleotide
ggcgttcatctcaatcctaacgggcctattactgccgaccgagacggattagact

SEQ ID NO: 424735 - DNA, 56 bp, Artificial
  Synthetic oligonucleotide
ggcgttccaggaggagtggtctgggcgggaccggggagtggccaaccctcagatgc

SEQ ID NO: 424736 - DNA, 55 bp, Artificial
  Synthetic oligonucleotide
ggcgttccatggaaagtttgggtcttgcgcatgtcttgcattggcttagccgccc

SEQ ID NO: 424737 - DNA, 52 bp, Artificial
  Synthetic oligonucleotide
ggcgttccccaatgtttaaatagacaagtttattttcgtacaactctgtaaa

SEQ ID NO: 424738 - DNA, 57 bp, Artificial
  Synthetic oligonucleotide
ggcgttcctgtctgtgacggtacataccctttcagtatcgaagtgtcgctaatttgg

SEQ ID NO: 424739 - DNA, 52 bp, Artificial
  Synthetic oligonucleotide
ggcgttccttatatagcatatggtctccccacccatcgaggatgggttgaga

SEQ ID NO: 424740 - DNA, 60 bp, Artificial
  Synthetic oligonucleotide
ggcgttcgcatgctacgcgtcacgaggtgcgtacaccgataagtacggcgaaacgcatat

SEQ ID NO: 424741 - DNA, 55 bp, Artificial
  Synthetic oligonucleotide
ggcgttcggtagtacttgcactaggccgggtcaatccgaaggcctcacggctacg

SEQ ID NO: 424742 - DNA, 58 bp, Artificial
  Synthetic oligonucleotide
ggcgttcgtagcacaacaacaatgacggtttgacgcgggtgcatacatcttttcctcc

SEQ ID NO: 424743 - DNA, 55 bp, Artificial
  Synthetic oligonucleotide
ggcgttcgtgcgcctgcttcgcagtagtgcatgcatagatgacgccgcgcacctt

SEQ ID NO: 424744 - DNA, 55 bp, Artificial
  Synthetic oligonucleotide
ggcgttctagaggcagagtagagtgtttcgcatttgcgggctatcggttaaggac

SEQ ID NO: 424745 - DNA, 57 bp, Artificial
  Synthetic oligonucleotide
ggcgttctatgagggccttccgaagataggcgtattagtactcggtagtgcgggtgc

SEQ ID NO: 424746 - DNA, 57 bp, Artificial
  Synthetic oligonucleotide
ggcgttctgactgtggtagccttgacagtatatccgaaggtgcgggagaggcgggca

SEQ ID NO: 424747 - DNA, 58 bp, Artificial
  Synthetic oligonucleotide
ggcgttctgactgtggttcgcttgacagtatatccgaaggtgtgggagaggcgggtgt

SEQ ID NO: 424748 - DNA, 55 bp, Artificial
  Synthetic oligonucleotide
ggcgttctggcacgctggacagaagctctacctacctcctacacctgtgagcaaa

SEQ ID NO: 424749 - DNA, 57 bp, Artificial
  Synthetic oligonucleotide
ggcgttgagacttaagcgcgatagcgttttgcgcgaagacggtaggtgttccgtcga

SEQ ID NO: 424750 - DNA, 55 bp, Artificial
  Synthetic oligonucleotide
ggcgttgcaaaataccagtccaactgggaataacaccagtcagctgggttgtcac

SEQ ID NO: 424751 - DNA, 55 bp, Artificial
  Synthetic oligonucleotide
ggcgttgcactcattggaatggggatccccgagcatcaactcacagaggtgggag

SEQ ID NO: 424752 - DNA, 59 bp, Artificial
  Synthetic oligonucleotide
ggcgttggaaaacacgcttcgaacaaatcgcatgcgaattgggcgacgctagcattaaa

SEQ ID NO: 424753 - DNA, 60 bp, Artificial
  Synthetic oligonucleotide
ggcgttggaggccatatctccggatatatcccccgaccaccgagtgccataatcaccatc

SEQ ID NO: 424754 - DNA, 49 bp, Artificial
  Synthetic oligonucleotide
ggcgttggattttaaccgttttactgcctggtaaaaccgtgaaaatatt

SEQ ID NO: 424755 - DNA, 55 bp, Artificial
  Synthetic oligonucleotide
ggcgttggcttccgacttggcaactacctatatacagcgggtcatgttgttgggg

SEQ ID NO: 424756 - DNA, 55 bp, Artificial
  Synthetic oligonucleotide
ggcgttgttacagcgtcgtttccccgatgtgttgattgaagcgagaccaacgcat

SEQ ID NO: 424757 - DNA, 59 bp, Artificial
  Synthetic oligonucleotide
ggcgttgttgcaaagggacatgttggaggccagcggctacgtgcgccgttgcattacgg

SEQ ID NO: 424758 - DNA, 58 bp, Artificial
  Synthetic oligonucleotide
ggcgttgttgctaaccctgacgggaacgcaagccaggctctactccacgctttcaaca

SEQ ID NO: 424759 - DNA, 54 bp, Artificial
  Synthetic oligonucleotide
ggcgttgttgtgtgtttggctcaatgtgtctgaccaacaactaaatagcgggat

SEQ ID NO: 424760 - DNA, 54 bp, Artificial
  Synthetic oligonucleotide
ggcgtttaaacccctttctcagatcccattttctggcgccgtcaaagtccatga

SEQ ID NO: 424761 - DNA, 52 bp, Artificial
  Synthetic oligonucleotide
ggcgtttaagggtataacccttgaacaactcgccgcggatttaacgatctac

SEQ ID NO: 424762 - DNA, 54 bp, Artificial
  Synthetic oligonucleotide
ggcgtttaatggcggggacctcaaaggtctcacgctctgctaacttttcccctc

SEQ ID NO: 424763 - DNA, 52 bp, Artificial
  Synthetic oligonucleotide
ggcgtttcatcaggtccgtcgcaagtcattgttctcgctgagtgatcggagc

SEQ ID NO: 424764 - DNA, 56 bp, Artificial
  Synthetic oligonucleotide
ggcgtttctctttaatttgtgtcgtgtcatactattattggctattacccatttac

SEQ ID NO: 424765 - DNA, 55 bp, Artificial
  Synthetic oligonucleotide
ggcgtttgcactccttaatcccgccgaagttgcgtgggaagttactccctacagc

SEQ ID NO: 424766 - DNA, 55 bp, Artificial
  Synthetic oligonucleotide
ggcgtttgcccaaagactactctcttgcttcggaaagcgtgtttaagctcttcac

SEQ ID NO: 424767 - DNA, 50 bp, Artificial
  Synthetic oligonucleotide
ggcgtttgcgacgatggcgtaccctacagacgttcggaatatagctgatt

SEQ ID NO: 424768 - DNA, 54 bp, Artificial
  Synthetic oligonucleotide
ggcgtttgtgcaactgcgccgtaagcttgaggtattcacatatatgcggtttga

SEQ ID NO: 424769 - DNA, 53 bp, Artificial
  Synthetic oligonucleotide
ggcgttttacctttgttgaagtgccgttggatgaagtctgggaaaggtaaatc

SEQ ID NO: 424770 - DNA, 55 bp, Artificial
  Synthetic oligonucleotide
ggcgttttatgataaccccaatgctttgcgtgactattttcgtgatattggtcgt

SEQ ID NO: 424771 - DNA, 55 bp, Artificial
  Synthetic oligonucleotide
ggcgttttgaaccaattgctaggtctgaattattgaatattgccccgatgattga

SEQ ID NO: 424772 - DNA, 55 bp, Artificial
  Synthetic oligonucleotide
ggcgttttggacttgcgcaactaattgaccttgtctgattgccccacaatggggc

SEQ ID NO: 424773 - DNA, 55 bp, Artificial
  Synthetic oligonucleotide
ggctaaaagaaccagtacatggtgtatattatcagcctgacaaagacttatgggt

SEQ ID NO: 424774 - DNA, 57 bp, Artificial
  Synthetic oligonucleotide
ggctaaaaggagagagatgggtgcgagagcgtcagttttaagcgggggaagattaga

SEQ ID NO: 424775 - DNA, 58 bp, Artificial
  Synthetic oligonucleotide
ggctaaacaaaagtagtgaccctgagagtgccaccaacatgaccctagataacatccg

SEQ ID NO: 424776 - DNA, 54 bp, Artificial
  Synthetic oligonucleotide
ggctaaacggttgaaaagactgctaactggacccaagaagaataagccgaatgt

SEQ ID NO: 424777 - DNA, 56 bp, Artificial
  Synthetic oligonucleotide
ggctaaagaggaaagtgttaagtcatcatacgcttatgctaccctaaaggagattg

SEQ ID NO: 424778 - DNA, 55 bp, Artificial
  Synthetic oligonucleotide
ggctaaagatatgcttatagctttaggcgttctcggtggtggttgttggatgttg

SEQ ID NO: 424779 - DNA, 60 bp, Artificial
  Synthetic oligonucleotide
ggctaaagcatataagacagaggttcataatatctgggccacacatacctgtgtacccac

SEQ ID NO: 424780 - DNA, 55 bp, Artificial
  Synthetic oligonucleotide
ggctaaagcctacgctacacgggccaacacccctgttgtataggctgggagccgt

SEQ ID NO: 424781 - DNA, 55 bp, Artificial
  Synthetic oligonucleotide
ggctaaagctcgtgtcgaacagcaggacatgatgactcaatccctacagtacctg

SEQ ID NO: 424782 - DNA, 60 bp, Artificial
  Synthetic oligonucleotide
ggctaaaggaggatgtgagagtgagcaatagacagagtaattcagaagccatagctgaca

SEQ ID NO: 424783 - DNA, 55 bp, Artificial
  Synthetic oligonucleotide
ggctaaaggtggccacgagtataatgattcaaagaatttgttgtcaagaacgaca

SEQ ID NO: 424784 - DNA, 54 bp, Artificial
  Synthetic oligonucleotide
ggctaaagtcattcggtggtgcatcactaccggtgcattggtttgtggcatcta

SEQ ID NO: 424785 - DNA, 55 bp, Artificial
  Synthetic oligonucleotide
ggctaaataaggaatttcgttatgcctgtgtgtgctctaccgaacgcggacggtt

SEQ ID NO: 424786 - DNA, 56 bp, Artificial
  Synthetic oligonucleotide
ggctaaataccgacattacacctcgaaatcgccttccaaacttgctcttatacgaa

SEQ ID NO: 424787 - DNA, 55 bp, Artificial
  Synthetic oligonucleotide
ggctaaatacgagtacatgggagagaacttgttgacacttgtcaagaacacgtca

SEQ ID NO: 424788 - DNA, 55 bp, Artificial
  Synthetic oligonucleotide
ggctaaatgtattgtggagttggattggtctaagtttgaccgggagcgaccttcg

SEQ ID NO: 424789 - DNA, 52 bp, Artificial
  Synthetic oligonucleotide
ggctaaattcttcaacattcctgcagacgtgattgaagggtatatcaacatt

SEQ ID NO: 424790 - DNA, 55 bp, Artificial
  Synthetic oligonucleotide
ggctaacaaaacacgcactttcacagctgctcctatggacacattgcttggggcg

SEQ ID NO: 424791 - DNA, 60 bp, Artificial
  Synthetic oligonucleotide
ggctaacaaaatctggaagttcctatcccacattgaatgtgacaatgcctaacaatgaca

SEQ ID NO: 424792 - DNA, 55 bp, Artificial
  Synthetic oligonucleotide
ggctaacacattgtaatgtctcaaccatcaaacaggcttgtccaaaggtaacttt

SEQ ID NO: 424793 - DNA, 55 bp, Artificial
  Synthetic oligonucleotide
ggctaacaccaggcagaatatccccggaaaccccaggactttacacagacgtgac

SEQ ID NO: 424794 - DNA, 55 bp, Artificial
  Synthetic oligonucleotide
ggctaacactaagaacaatgtccagcctcaggtggtcacgactactacgacggtg

SEQ ID NO: 424795 - DNA, 55 bp, Artificial
  Synthetic oligonucleotide
ggctaaccaaacagcagctagccaaggccatagcgaacactttggaaccaccttc

SEQ ID NO: 424796 - DNA, 54 bp, Artificial
  Synthetic oligonucleotide
ggctaaccaattgtttttaacaattgtggataacacaagaggtactaacctgtc

SEQ ID NO: 424797 - DNA, 56 bp, Artificial
  Synthetic oligonucleotide
ggctaaccgcaacgcgcttttcctggatgaatcactccccgaccgcgtcggttgta

SEQ ID NO: 424798 - DNA, 56 bp, Artificial
  Synthetic oligonucleotide
ggctaacctacccacgcagcgtttactgggccgtcaagcgcccgggggctgctcat

SEQ ID NO: 424799 - DNA, 56 bp, Artificial
  Synthetic oligonucleotide
ggctaacgaaaggtagtacagtgtacaacgagatacctaaagagcacagacaaacg

SEQ ID NO: 424800 - DNA, 55 bp, Artificial
  Synthetic oligonucleotide
ggctaacgcaccagaaacctctaagcccagcctagcagcagcgcatagagtagtc

SEQ ID NO: 424801 - DNA, 59 bp, Artificial
  Synthetic oligonucleotide
ggctaacggaagatacacaccaggcataataccaccagtgaatgtcgataaaccaatac

SEQ ID NO: 424802 - DNA, 60 bp, Artificial
  Synthetic oligonucleotide
ggctaacgtggttaagatcattccattcgacagattaagagatcttggaagagatcatct

SEQ ID NO: 424803 - DNA, 58 bp, Artificial
  Synthetic oligonucleotide
ggctaacgttggggctaccttaatgaatgctgctggcgtggtcaactcacctaataaa

SEQ ID NO: 424804 - DNA, 55 bp, Artificial
  Synthetic oligonucleotide
ggctaactttgagtttggaaacaccaatgtgcaaatcgttttagttcctggtcga

SEQ ID NO: 424805 - DNA, 55 bp, Artificial
  Synthetic oligonucleotide
ggctaagaaagggtctgtccacctaattaataggaagagtacgcatgttcgatat

SEQ ID NO: 424806 - DNA, 55 bp, Artificial
  Synthetic oligonucleotide
ggctaagaagtctaacttggttcagcctttgcggcctcataatatatacaacatg

SEQ ID NO: 424807 - DNA, 59 bp, Artificial
  Synthetic oligonucleotide
ggctaagagactctacgtttcactggcaccttcgatgtaacaggtgtgtaaggccaatc

SEQ ID NO: 424808 - DNA, 57 bp, Artificial
  Synthetic oligonucleotide
ggctaagagcgccaacatcgggtatatcggaaagaagtcaattaaggctgatttcgt

SEQ ID NO: 424809 - DNA, 51 bp, Artificial
  Synthetic oligonucleotide
ggctaagaggttaaaacatggaaccttcggtcccgttcatttccgaaacca

SEQ ID NO: 424810 - DNA, 56 bp, Artificial
  Synthetic oligonucleotide
ggctaagataaactctaagagcttagttgtacttgtacttctaaggttcatttcga

SEQ ID NO: 424811 - DNA, 60 bp, Artificial
  Synthetic oligonucleotide
ggctaagcctcgccgtcaactgagacgccgtcgatgggaattgcagaactatctcggtca

SEQ ID NO: 424812 - DNA, 58 bp, Artificial
  Synthetic oligonucleotide
ggctaagctgtccgcagcttactcccagttcttcgagctctcttccgggttggctacc

SEQ ID NO: 424813 - DNA, 60 bp, Artificial
  Synthetic oligonucleotide
ggctaaggaggtcgcactcagctactcaaccggtgcacttgccagctgtatgggtctcat

SEQ ID NO: 424814 - DNA, 54 bp, Artificial
  Synthetic oligonucleotide
ggctaaggcccgtgttcggaaccttagattcacgagcccgcgtgattaatcggg

SEQ ID NO: 424815 - DNA, 55 bp, Artificial
  Synthetic oligonucleotide
ggctaagtcaatgattgggaggtgcacggatcagtatgatgtcagagaaaatgtt

SEQ ID NO: 424816 - DNA, 55 bp, Artificial
  Synthetic oligonucleotide
ggctaagtcgaagatacaggctggctggttctactccagaggaggaaagggcgag

SEQ ID NO: 424817 - DNA, 57 bp, Artificial
  Synthetic oligonucleotide
ggctaagtcgaaggctcccaatccccgccgctgtgaggtagctctcagcaagtggga

SEQ ID NO: 424818 - DNA, 59 bp, Artificial
  Synthetic oligonucleotide
ggctaagtgacatgtgtgatcttacccggacccttggcaaattcaacaccacaatgtcc

SEQ ID NO: 424819 - DNA, 54 bp, Artificial
  Synthetic oligonucleotide
ggctaataaattgtaatacctcggtcattaaacaagcttgcccaaaggtgtcct

SEQ ID NO: 424820 - DNA, 55 bp, Artificial
  Synthetic oligonucleotide
ggctaataagatggcaaatgtggttttcacattacacctttaaggtggaccacct

SEQ ID NO: 424821 - DNA, 55 bp, Artificial
  Synthetic oligonucleotide
ggctaatattaacaagagatggtggtaaaaacatgaacacgagcgaggaggtctt

SEQ ID NO: 424822 - DNA, 58 bp, Artificial
  Synthetic oligonucleotide
ggctaatattaacaagagatggtggtaaaagcaagaatgggtccgagatcttcagacc

SEQ ID NO: 424823 - DNA, 53 bp, Artificial
  Synthetic oligonucleotide
ggctaatattaacaagagatggtggtacaaacatgagtgagaacggggaggtc

SEQ ID NO: 424824 - DNA, 55 bp, Artificial
  Synthetic oligonucleotide
ggctaatattaacaagagatggtggtgcagacgcgaacaggacagaggaggtctt

SEQ ID NO: 424825 - DNA, 58 bp, Artificial
  Synthetic oligonucleotide
ggctaatcctaactgcggaacaggcaatcacaatccagtgggtggcctgtcgtaacgg

SEQ ID NO: 424826 - DNA, 60 bp, Artificial
  Synthetic oligonucleotide
ggctaatcctaactgcggagcagatacccacacgccagtgggcagtctgtcgtaatgggt

SEQ ID NO: 424827 - DNA, 55 bp, Artificial
  Synthetic oligonucleotide
ggctaatctagacaataaaggaatgctattcactagtaactttgttctggcctcc

SEQ ID NO: 424828 - DNA, 60 bp, Artificial
  Synthetic oligonucleotide
ggctaatgcaagacaagcctccgtatttatcatgccacaagactttgacaccaaagtatt

SEQ ID NO: 424829 - DNA, 58 bp, Artificial
  Synthetic oligonucleotide
ggctaatgctggcgatacagggtttaacgggttcggctggcagtatgggtacaacaca

SEQ ID NO: 424830 - DNA, 55 bp, Artificial
  Synthetic oligonucleotide
ggctaatgctggtaaggcacctttctatcagtacaatcaagcccattcctcccca

SEQ ID NO: 424831 - DNA, 59 bp, Artificial
  Synthetic oligonucleotide
ggctaatggaagatatacaccaggcataattccacctgtaaatgttgataaaccaatac

SEQ ID NO: 424832 - DNA, 56 bp, Artificial
  Synthetic oligonucleotide
ggctaatggctacgtaactgatagatgctcgcccgtattcgggaacgcagattatc

SEQ ID NO: 424833 - DNA, 55 bp, Artificial
  Synthetic oligonucleotide
ggctaatgtccgatctactatgcttggcaaattcaaaactgcatttgactgtagc

SEQ ID NO: 424834 - DNA, 50 bp, Artificial
  Synthetic oligonucleotide
ggctaatgtgagagctagaccagcgcagcctgttgtgcgattagaccaat

SEQ ID NO: 424835 - DNA, 57 bp, Artificial
  Synthetic oligonucleotide
ggctaatgttgcttcatacgcaaaagaccttgacggaaagaactccttcgccgtatc

SEQ ID NO: 424836 - DNA, 54 bp, Artificial
  Synthetic oligonucleotide
ggctaattcagagccaatttagtgatattcgtgaacagcagttactaaatgatg

SEQ ID NO: 424837 - DNA, 55 bp, Artificial
  Synthetic oligonucleotide
ggctacaacacggccgtccacagtgtcatacctgatggagtgttgttggaccacg

SEQ ID NO: 424838 - DNA, 51 bp, Artificial
  Synthetic oligonucleotide
ggctacaaggtgttggtgctcaacccttccgttgccgcaacgctgggcttt

SEQ ID NO: 424839 - DNA, 55 bp, Artificial
  Synthetic oligonucleotide
ggctacaaggttttgcagccacggtctctgcccgagaatgaggagtatgagaccg

SEQ ID NO: 424840 - DNA, 58 bp, Artificial
  Synthetic oligonucleotide
ggctacaattgattcatttcaatcctccaatactagtaccatgcattttactgatgag

SEQ ID NO: 424841 - DNA, 55 bp, Artificial
  Synthetic oligonucleotide
ggctacaattggtgtgctagcaacaccggaaataccttttacaacggaggcggcg

SEQ ID NO: 424842 - DNA, 55 bp, Artificial
  Synthetic oligonucleotide
ggctacaattggtgtgctagcgacgccagagataccctttacaacggaagcggcg

SEQ ID NO: 424843 - DNA, 55 bp, Artificial
  Synthetic oligonucleotide
ggctacacaagctaggctacattttaagagacgtgagtaagaaagaaggaggagc

SEQ ID NO: 424844 - DNA, 59 bp, Artificial
  Synthetic oligonucleotide
ggctacacccgcccctgcaccacacgcatctaccaagtcctgccagacaccgcccaccc

SEQ ID NO: 424845 - DNA, 58 bp, Artificial
  Synthetic oligonucleotide
ggctacacgatacatgtccagtgcaacgcatcccgcttccaccagggttgcttgttag

SEQ ID NO: 424846 - DNA, 55 bp, Artificial
  Synthetic oligonucleotide
ggctacagaagagttagtggatgttgacaccgaccatgatgctacccaagcatgt

SEQ ID NO: 424847 - DNA, 60 bp, Artificial
  Synthetic oligonucleotide
ggctacagaagatgttggaggtaaggtatgatgacttgtcgcctgcggagcttgtgcgag

SEQ ID NO: 424848 - DNA, 59 bp, Artificial
  Synthetic oligonucleotide
ggctacagaagcttctaattatgcccagtaccgggttgctcgtgctacaattcgctacc

SEQ ID NO: 424849 - DNA, 55 bp, Artificial
  Synthetic oligonucleotide
ggctacagcaaatacaccataagacgcaatccaaatgggcatcgaaagttggcaa

SEQ ID NO: 424850 - DNA, 55 bp, Artificial
  Synthetic oligonucleotide
ggctacagccctagaagactggtctgctatcatggcgaaacccgagctggtgttc

SEQ ID NO: 424851 - DNA, 55 bp, Artificial
  Synthetic oligonucleotide
ggctacagcctctttcagagtgcaaaatagcactgctagacgatgctacagatcc

SEQ ID NO: 424852 - DNA, 55 bp, Artificial
  Synthetic oligonucleotide
ggctacagggatgaggaacattcctgagaaagcaaccagaggtctgtttggtgca

SEQ ID NO: 424853 - DNA, 55 bp, Artificial
  Synthetic oligonucleotide
ggctacaggtcagttatggtgcgtcattcatgaatacccgcgaagtggatgccgg

SEQ ID NO: 424854 - DNA, 55 bp, Artificial
  Synthetic oligonucleotide
ggctacagtgtcgtcattccctcatccccactgaaaggccattcccgttaacgtt

SEQ ID NO: 424855 - DNA, 55 bp, Artificial
  Synthetic oligonucleotide
ggctacatgagaccccaaaagagccggatgtttctctagggtccacatggctttc

SEQ ID NO: 424856 - DNA, 60 bp, Artificial
  Synthetic oligonucleotide
ggctacatggcctagggcagcatatctataacacctatggagatacctggacaggagtag

SEQ ID NO: 424857 - DNA, 60 bp, Artificial
  Synthetic oligonucleotide
ggctacatgggcttgaggccttttcactgcacacatactctccccacgaactctcacggg

SEQ ID NO: 424858 - DNA, 60 bp, Artificial
  Synthetic oligonucleotide
ggctacattagaagaaatgatgacagcttgccagggagtgggaggacctggccataaagc

SEQ ID NO: 424859 - DNA, 58 bp, Artificial
  Synthetic oligonucleotide
ggctacattttgttaacaacaatcagtttaggcaagtagttattgatggtgtattgaa

SEQ ID NO: 424860 - DNA, 58 bp, Artificial
  Synthetic oligonucleotide
ggctaccaacctctcaatgtttgttcgagtcaatgattatatacaacgagcaaaaaac

SEQ ID NO: 424861 - DNA, 55 bp, Artificial
  Synthetic oligonucleotide
ggctaccaagattgggtggacggagagtcaaatctcctaatcacgaaggccttag

SEQ ID NO: 424862 - DNA, 55 bp, Artificial
  Synthetic oligonucleotide
ggctaccacaaccttgactgccgctgcggagactggtacggacacctccaaagac

SEQ ID NO: 424863 - DNA, 55 bp, Artificial
  Synthetic oligonucleotide
ggctaccataggtgtgctggcgacgcctgagataccgtttacgaccgaagctgcg

SEQ ID NO: 424864 - DNA, 53 bp, Artificial
  Synthetic oligonucleotide
ggctacccctccattttgatctccctccagggttccctcaacctgccactttt

SEQ ID NO: 424865 - DNA, 57 bp, Artificial
  Synthetic oligonucleotide
ggctaccccttcgacttcacgtcagattcagaccgaaattctaaaatggctgacttc

SEQ ID NO: 424866 - DNA, 55 bp, Artificial
  Synthetic oligonucleotide
ggctacctcgcggacttcaaggctgcggtgtggaattcgcacgagcacgcaacag

SEQ ID NO: 424867 - DNA, 53 bp, Artificial
  Synthetic oligonucleotide
ggctacctcttcttgttggctttgcttagctttgagcccaccttactatgagg

SEQ ID NO: 424868 - DNA, 54 bp, Artificial
  Synthetic oligonucleotide
ggctacgaacgacgacgtcgtgcaggttagcgggttgtacgagaccgaccctag

SEQ ID NO: 424869 - DNA, 55 bp, Artificial
  Synthetic oligonucleotide
ggctacgagcgtacatgaacactccggggcttcccgtgtgccaggatcatcttga

SEQ ID NO: 424870 - DNA, 55 bp, Artificial
  Synthetic oligonucleotide
ggctacgcagaatttgacttgactacttttgatatttgcgatcccgttctctatg

SEQ ID NO: 424871 - DNA, 56 bp, Artificial
  Synthetic oligonucleotide
ggctacgcctctttttcacggatgttcttaaagttaagatggaagctgacgcttta

SEQ ID NO: 424872 - DNA, 58 bp, Artificial
  Synthetic oligonucleotide
ggctacgcggtagcccatcactctagtgtccaaagcctacagctgttggccctaaagg

SEQ ID NO: 424873 - DNA, 60 bp, Artificial
  Synthetic oligonucleotide
ggctacgctcagctcacttagacaaatcttagctggcaacacgcaggttcatgcaacgcc

SEQ ID NO: 424874 - DNA, 55 bp, Artificial
  Synthetic oligonucleotide
ggctacggatatgcggacagagctagcgagaacattatcggggccgtcgctagac

SEQ ID NO: 424875 - DNA, 55 bp, Artificial
  Synthetic oligonucleotide
ggctacggcaatgtcaaacgtaaaaccctgatgattcataaacaacagggcaccg

SEQ ID NO: 424876 - DNA, 55 bp, Artificial
  Synthetic oligonucleotide
ggctacggcagaggatcaaccgactcagccagatgtagcgacttgccgcttctac

SEQ ID NO: 424877 - DNA, 55 bp, Artificial
  Synthetic oligonucleotide
ggctacggcggtgccacttgctttatagcgtctggcggtgctggtatttccgcgc

SEQ ID NO: 424878 - DNA, 60 bp, Artificial
  Synthetic oligonucleotide
ggctacggtgtctgagccggcggctatgtgccgtaaacactcagactatgagtttaagga

SEQ ID NO: 424879 - DNA, 57 bp, Artificial
  Synthetic oligonucleotide
ggctacggttacaggtggacagtatgccagtaaggaacaagccatggttgccaagtt

SEQ ID NO: 424880 - DNA, 55 bp, Artificial
  Synthetic oligonucleotide
ggctacggttgttaccggtgcgggcatccaacacaccctgaccaccgagacaaaa

SEQ ID NO: 424881 - DNA, 54 bp, Artificial
  Synthetic oligonucleotide
ggctacgtaaagctcgttctaaatctgcagagagggtagagcaagaggttgtac

SEQ ID NO: 424882 - DNA, 55 bp, Artificial
  Synthetic oligonucleotide
ggctacgtatactgtgcaaccacaagggatgtcaatcctgcgtctcctgattgct

SEQ ID NO: 424883 - DNA, 55 bp, Artificial
  Synthetic oligonucleotide
ggctacgtctgatagtgtgcttacttttgaactggcagacatagtgcactgccgt

SEQ ID NO: 424884 - DNA, 55 bp, Artificial
  Synthetic oligonucleotide
ggctacgtgttacagaattgaagctccgtgttgcaggtgttcaagtgtagtacaa

SEQ ID NO: 424885 - DNA, 58 bp, Artificial
  Synthetic oligonucleotide
ggctactagcttataactacgaaacactaattgcatgtgtaacgatgaatatgcaaca

SEQ ID NO: 424886 - DNA, 55 bp, Artificial
  Synthetic oligonucleotide
ggctactataggtgtgctggcaacgcctgagataccgttcacaactgaggcagcg

SEQ ID NO: 424887 - DNA, 57 bp, Artificial
  Synthetic oligonucleotide
ggctactattagtaagagatggtggtagtaatacaaccaataatgagaccttcagac

SEQ ID NO: 424888 - DNA, 60 bp, Artificial
  Synthetic oligonucleotide
ggctactcaagtgactataccggatgacgtggctgagctgattagagccacgcttaaggt

SEQ ID NO: 424889 - DNA, 56 bp, Artificial
  Synthetic oligonucleotide
ggctactcacctctgtcattccagacccataccccaaaccagagggaacccgacag

SEQ ID NO: 424890 - DNA, 53 bp, Artificial
  Synthetic oligonucleotide
ggctactcccttaacttcatgggttatgtaattggaagttttggcaccttacc

SEQ ID NO: 424891 - DNA, 55 bp, Artificial
  Synthetic oligonucleotide
ggctactctgactttatagagaccgagctaggccccttccaagacgcagagacgg

SEQ ID NO: 424892 - DNA, 55 bp, Artificial
  Synthetic oligonucleotide
ggctactgaaaagtaagcgtgttcggttgcaagtggaaacaatggccataggcga

SEQ ID NO: 424893 - DNA, 55 bp, Artificial
  Synthetic oligonucleotide
ggctactgaggcttccaactacgcccagtatcgtgttatccgggccactattcgc

SEQ ID NO: 424894 - DNA, 55 bp, Artificial
  Synthetic oligonucleotide
ggctactgattcgcttgtaaagagcaagaagataagttcacaggtgcacctaggg

SEQ ID NO: 424895 - DNA, 60 bp, Artificial
  Synthetic oligonucleotide
ggctactgcggatgacgtgcataggattggcttctgtcacaccctgggccataatcccag

SEQ ID NO: 424896 - DNA, 59 bp, Artificial
  Synthetic oligonucleotide
ggctactgttaacaatagatggtggtgttaatagcacgaccgagaccttcagacctgga

SEQ ID NO: 424897 - DNA, 60 bp, Artificial
  Synthetic oligonucleotide
ggctactttctggcgcagctaaattagtcgggcgtggcattactgcagcaagaggtgaga

SEQ ID NO: 424898 - DNA, 54 bp, Artificial
  Synthetic oligonucleotide
ggctagaaaaacggcaaacgttacagttaatccgggaccattcgcgcagactgg

SEQ ID NO: 424899 - DNA, 60 bp, Artificial
  Synthetic oligonucleotide
ggctagaaggggcagtaccatagatttcccttggtgcagggatacaacaggattcgtgca

SEQ ID NO: 424900 - DNA, 53 bp, Artificial
  Synthetic oligonucleotide
ggctagacccaccccatttaacccagaggaatggaacaaactaaaagcccata

SEQ ID NO: 424901 - DNA, 59 bp, Artificial
  Synthetic oligonucleotide
ggctagactgccatctggtacacttatgaatgtggctaaatacacccaattgtgtcagt

SEQ ID NO: 424902 - DNA, 57 bp, Artificial
  Synthetic oligonucleotide
ggctagagataccaacttgcacaaacaaagtggtccaataacccaaaatcctgtgga

SEQ ID NO: 424903 - DNA, 56 bp, Artificial
  Synthetic oligonucleotide
ggctagagatctagtagttaattatgtcaacactaatatgggcctaaaaattagac

SEQ ID NO: 424904 - DNA, 58 bp, Artificial
  Synthetic oligonucleotide
ggctagaggaagcacgatttgccctaaatcctcgtaagacatttctgtttgatgtttc

SEQ ID NO: 424905 - DNA, 55 bp, Artificial
  Synthetic oligonucleotide
ggctagagtcaatttattgattataggttaagtgttactatttatgtacttttag

SEQ ID NO: 424906 - DNA, 55 bp, Artificial
  Synthetic oligonucleotide
ggctagatagatttatcagagtaggtgtgcctcctattgatccagaaattcagtg

SEQ ID NO: 424907 - DNA, 60 bp, Artificial
  Synthetic oligonucleotide
ggctagattggagtaagaaagtgcccaacactgaaccatacatgttcaagacctatgaaa

SEQ ID NO: 424908 - DNA, 56 bp, Artificial
  Synthetic oligonucleotide
ggctagattttattcgaaagttaaacttcttggattgactgtcgaccaatctacag

SEQ ID NO: 424909 - DNA, 58 bp, Artificial
  Synthetic oligonucleotide
ggctagcagacggatgttccaccccccagctgccgagtgaggcttatcccggggatcg

SEQ ID NO: 424910 - DNA, 55 bp, Artificial
  Synthetic oligonucleotide
ggctagcagagatggctcataatacaatgctggacagagagaaagtgtggctgca

SEQ ID NO: 424911 - DNA, 55 bp, Artificial
  Synthetic oligonucleotide
ggctagcaggtggatgttccgcctccccggaggtcccgagtgaggcttatcccgg

SEQ ID NO: 424912 - DNA, 55 bp, Artificial
  Synthetic oligonucleotide
ggctagcatacacctttgtaaatgaggacattgggacgataaggccatcctttgg

SEQ ID NO: 424913 - DNA, 55 bp, Artificial
  Synthetic oligonucleotide
ggctagcatagtttcaactaaggcgttactttatgagacgtatctatcctcggtg

SEQ ID NO: 424914 - DNA, 54 bp, Artificial
  Synthetic oligonucleotide
ggctagccagtgggtgttccgcctcccgagaggggacgagtgaggcttttcccg

SEQ ID NO: 424915 - DNA, 51 bp, Artificial
  Synthetic oligonucleotide
ggctagccatggaatcccgggagcccctcaatgtgcatcctggaccagtgg

SEQ ID NO: 424916 - DNA, 54 bp, Artificial
  Synthetic oligonucleotide
ggctagccgataggtgttccgccccccgagaggggacgagtgaggcttatcccg

SEQ ID NO: 424917 - DNA, 60 bp, Artificial
  Synthetic oligonucleotide
ggctagcctaatcagaaaggatcaggacgaaatgtgtgcattcgttcctaatgtcctgaa

SEQ ID NO: 424918 - DNA, 54 bp, Artificial
  Synthetic oligonucleotide
ggctagcctaccaacaaggctttccagtcttgaatactccaggaagtaaccagt

SEQ ID NO: 424919 - DNA, 58 bp, Artificial
  Synthetic oligonucleotide
ggctagcgagtggatgttccgccccccgagaggagacgagtgaggcttatcccggaga

SEQ ID NO: 424920 - DNA, 55 bp, Artificial
  Synthetic oligonucleotide
ggctagcgagtggatgttcctccccccgagagtcccgagtgaggcttatcccggg

SEQ ID NO: 424921 - DNA, 60 bp, Artificial
  Synthetic oligonucleotide
ggctagcgggacatcaaggtctgccgaccatgaacactccagggagtacacagttcctta

SEQ ID NO: 424922 - DNA, 55 bp, Artificial
  Synthetic oligonucleotide
ggctagcggtccgaacgtatgaaacacacgtaacgtcttaccggcatgggccgtg

SEQ ID NO: 424923 - DNA, 55 bp, Artificial
  Synthetic oligonucleotide
ggctagcgtgtgaacgcctgaatccatgaaagctcaacaacggcagttcagcatt

SEQ ID NO: 424924 - DNA, 55 bp, Artificial
  Synthetic oligonucleotide
ggctagctgatgcagaggcaagatatattgcatatctgttcgctagggacataca

SEQ ID NO: 424925 - DNA, 57 bp, Artificial
  Synthetic oligonucleotide
ggctagcttaaattaagtcgttccatgagtcatccgttcttacgagctggacgtgtt

SEQ ID NO: 424926 - DNA, 52 bp, Artificial
  Synthetic oligonucleotide
ggctagcttataagaaaacgagctcagcatttggattcgagttcatctaact

SEQ ID NO: 424927 - DNA, 53 bp, Artificial
  Synthetic oligonucleotide
ggctaggaaaacaacgaacgttacagttaatccaggaccgttcgcgcagaccg

SEQ ID NO: 424928 - DNA, 60 bp, Artificial
  Synthetic oligonucleotide
ggctaggaacattctaaggacccaggagtcggaatgtgtgtgccataatggcacatgtgc

SEQ ID NO: 424929 - DNA, 55 bp, Artificial
  Synthetic oligonucleotide
ggctaggactagatgatattttagcttggatgtggtccatgggtcataagagaac

SEQ ID NO: 424930 - DNA, 57 bp, Artificial
  Synthetic oligonucleotide
ggctaggagattgctttggtggcattataattgtttactgtggggagaagctaacgt

SEQ ID NO: 424931 - DNA, 55 bp, Artificial
  Synthetic oligonucleotide
ggctaggagcatgaagatgctccgaattttatgcaagccaagagggaattttgag

SEQ ID NO: 424932 - DNA, 55 bp, Artificial
  Synthetic oligonucleotide
ggctaggctgaatgggtggaaaggaacacacgcatgaacaacacgaaggactcgg

SEQ ID NO: 424933 - DNA, 60 bp, Artificial
  Synthetic oligonucleotide
ggctagggcggacaataagcacagcttcaagatccggatacgagatgctaaaggtgccaa

SEQ ID NO: 424934 - DNA, 53 bp, Artificial
  Synthetic oligonucleotide
ggctaggggtaagggctaggggtaagggctagggtgagctagggtgagctagg

SEQ ID NO: 424935 - DNA, 55 bp, Artificial
  Synthetic oligonucleotide
ggctagggtgaccatccaacccatagccgcttggtggagggtttgttacataccc

SEQ ID NO: 424936 - DNA, 58 bp, Artificial
  Synthetic oligonucleotide
ggctaggtggcccatacaacaagttcacacagacaatggacccaactttattagtcag

SEQ ID NO: 424937 - DNA, 60 bp, Artificial
  Synthetic oligonucleotide
ggctaggttgcaaggggaacttgttgacgcgactcgcaccccaggacacgcgctgcgtca

SEQ ID NO: 424938 - DNA, 55 bp, Artificial
  Synthetic oligonucleotide
ggctagtaaggagagtactgcaagcgtaaatttagcacccgttgtccgctctgtg

SEQ ID NO: 424939 - DNA, 59 bp, Artificial
  Synthetic oligonucleotide
ggctagtaccccaatggataatcccaagcctgctgaagaagaacctcagcctggagccc

SEQ ID NO: 424940 - DNA, 54 bp, Artificial
  Synthetic oligonucleotide
ggctagtactcgtagtccccttaccacaccaatttgcctttcccgaagcaccta

SEQ ID NO: 424941 - DNA, 55 bp, Artificial
  Synthetic oligonucleotide
ggctagtagatggccaataacacacttgcacacagatagtggtgtcaacttcacc

SEQ ID NO: 424942 - DNA, 59 bp, Artificial
  Synthetic oligonucleotide
ggctagtagcttgaatgactctgtctacctcagaatgactttcgggcacctttacgagg

SEQ ID NO: 424943 - DNA, 57 bp, Artificial
  Synthetic oligonucleotide
ggctagtcagatagaaactacagtcgaaaaggttaaacaaagtggaataccagcaga

SEQ ID NO: 424944 - DNA, 55 bp, Artificial
  Synthetic oligonucleotide
ggctagtgacacgccaatatgcaaccacgcaaaaggatagtacgtttgcaaccat

SEQ ID NO: 424945 - DNA, 55 bp, Artificial
  Synthetic oligonucleotide
ggctagtgagtttaacctgccacccatagtggcaaaagaaatagtagccagctgt

SEQ ID NO: 424946 - DNA, 55 bp, Artificial
  Synthetic oligonucleotide
ggctagtgcgtaaatttgcctacgaagagagttacgagtctcattgccatcaggg

SEQ ID NO: 424947 - DNA, 56 bp, Artificial
  Synthetic oligonucleotide
ggctagtgggtgattaatcgttagtacagtattaacatcttgtcgtttaataaaca

SEQ ID NO: 424948 - DNA, 55 bp, Artificial
  Synthetic oligonucleotide
ggctagtgtcctcccttacctcaggtgtgcaaggaagatactgtagaagtgttcg

SEQ ID NO: 424949 - DNA, 55 bp, Artificial
  Synthetic oligonucleotide
ggctagttccaatttccaggcttcagctacaatacatgatgcaggatgtaaacga

SEQ ID NO: 424950 - DNA, 55 bp, Artificial
  Synthetic oligonucleotide
ggctagttgtacagcttattggcgagggacattgacgtatgagctacgtgttaca

SEQ ID NO: 424951 - DNA, 55 bp, Artificial
  Synthetic oligonucleotide
ggctagtttcacgttggggctcgagaggctggtgacacgtgcgacgaatcggacg

SEQ ID NO: 424952 - DNA, 60 bp, Artificial
  Synthetic oligonucleotide
ggctataaaatggcttcactcgtatatagacagcttttagctaattcttatacttctgaa

SEQ ID NO: 424953 - DNA, 57 bp, Artificial
  Synthetic oligonucleotide
ggctataaaatggcttcgctaatttacagacaattactatcgaattcgtacattact

SEQ ID NO: 424954 - DNA, 60 bp, Artificial
  Synthetic oligonucleotide
ggctataaaatggcttcgctcatatacagacagctgctcgctaattcttacgcagtggat

SEQ ID NO: 424955 - DNA, 60 bp, Artificial
  Synthetic oligonucleotide
ggctataaaatggcttcgctcatttacagacagcttctcacgaattcatatgcagttgat

SEQ ID NO: 424956 - DNA, 59 bp, Artificial
  Synthetic oligonucleotide
ggctataaaatggcttcgctcatttatagacaactacttaacaattcgtatacaactga

SEQ ID NO: 424957 - DNA, 60 bp, Artificial
  Synthetic oligonucleotide
ggctataaaatggcttcgctcatttatagacaactacttacgaactcatatactgtagat

SEQ ID NO: 424958 - DNA, 60 bp, Artificial
  Synthetic oligonucleotide
ggctataaaatggcttcgctcatttatagacaactcctcactaattcatatgccctagac

SEQ ID NO: 424959 - DNA, 60 bp, Artificial
  Synthetic oligonucleotide
ggctataaaatggcttcgctcatttatagacaattgctcacgaattcttatacagtagat

SEQ ID NO: 424960 - DNA, 60 bp, Artificial
  Synthetic oligonucleotide
ggctataaaatggcttcgctcatttatagacaattgcttacaaattcctatacagttgga

SEQ ID NO: 424961 - DNA, 59 bp, Artificial
  Synthetic oligonucleotide
ggctataaaatggcttcgctcatttatagacaattgcttacaaattcgtacacaaccga

SEQ ID NO: 424962 - DNA, 59 bp, Artificial
  Synthetic oligonucleotide
ggctataaaatggcttctttgatctacagacagttgctatcgaattcgtacgtaacaaa

SEQ ID NO: 424963 - DNA, 50 bp, Artificial
  Synthetic oligonucleotide
ggctataaacaagaaccagcacgttattgttcctggtcgtaatccggaaa

SEQ ID NO: 424964 - DNA, 52 bp, Artificial
  Synthetic oligonucleotide
ggctataagaaccaggagcggcggaaacaccaatcaacaaagagcatccgct

SEQ ID NO: 424965 - DNA, 52 bp, Artificial
  Synthetic oligonucleotide
ggctataagcagtataactctgatagtgtcgaagaaagatccgaaataactg

SEQ ID NO: 424966 - DNA, 60 bp, Artificial
  Synthetic oligonucleotide
ggctataaggaccagaagtggagggaacactaaccagcaaagagcatctgcagggcaaat

SEQ ID NO: 424967 - DNA, 59 bp, Artificial
  Synthetic oligonucleotide
ggctataaggtactggtgctcaacccctctgttgccgcaacactgggctttggtgccta

SEQ ID NO: 424968 - DNA, 55 bp, Artificial
  Synthetic oligonucleotide
ggctataatgacattcgagagggccctaatgcacgtcggtaatctaggggttggc

SEQ ID NO: 424969 - DNA, 60 bp, Artificial
  Synthetic oligonucleotide
ggctatacaatgctaaagtggtccccatatatattgtcgtacatctactaagtgcggttg

SEQ ID NO: 424970 - DNA, 58 bp, Artificial
  Synthetic oligonucleotide
ggctatacacccagagccataggaggcaccttgtggaatttgttacgtggtctacacc

SEQ ID NO: 424971 - DNA, 55 bp, Artificial
  Synthetic oligonucleotide
ggctatacaggttatactcagttgacttgaaagaccattctttatgtgggaagca

SEQ ID NO: 424972 - DNA, 60 bp, Artificial
  Synthetic oligonucleotide
ggctatactgcaaaggtaggggatcttccctgtgaagaagaagagattctttctcagcat

SEQ ID NO: 424973 - DNA, 55 bp, Artificial
  Synthetic oligonucleotide
ggctatacttacgcgaataacacaagggtattgaggtgttactctggtggaaacg

SEQ ID NO: 424974 - DNA, 55 bp, Artificial
  Synthetic oligonucleotide
ggctataggcccaaagtatacatttgcgtgcttggaactttgctaatgtgcactg

SEQ ID NO: 424975 - DNA, 55 bp, Artificial
  Synthetic oligonucleotide
ggctataggctcagtattagtagggcccacacctgtcaacatagttggaaggaac

SEQ ID NO: 424976 - DNA, 55 bp, Artificial
  Synthetic oligonucleotide
ggctatatctgggcgacgtatgacgttgagatgttcgagccactccccgcaaggc

SEQ ID NO: 424977 - DNA, 60 bp, Artificial
  Synthetic oligonucleotide
ggctatatgctatgggtgcgagcaagttcgagatgccaaagctgacaggcggccagctca

SEQ ID NO: 424978 - DNA, 55 bp, Artificial
  Synthetic oligonucleotide
ggctatcatggattacgtggacatgcgccaccaggagttggaggacttcctcctc

SEQ ID NO: 424979 - DNA, 53 bp, Artificial
  Synthetic oligonucleotide
ggctatccaactctattaaaccacataaggaagttctacctttgggtcttagg

SEQ ID NO: 424980 - DNA, 55 bp, Artificial
  Synthetic oligonucleotide
ggctatccacacaggtcgcgttcattgtcaaagtggtgcgccgtgttaagtgagc

SEQ ID NO: 424981 - DNA, 53 bp, Artificial
  Synthetic oligonucleotide
ggctatccaccttggcccacgcatcaacccatacaccgctcacctgagcgcaa

SEQ ID NO: 424982 - DNA, 55 bp, Artificial
  Synthetic oligonucleotide
ggctatcgctctacagcggaggaaagactccaatcagaacaccccgaggctttcg

SEQ ID NO: 424983 - DNA, 55 bp, Artificial
  Synthetic oligonucleotide
ggctatcgttgtgctgctagtactacttatctgggcgagtcacaagctagggagg

SEQ ID NO: 424984 - DNA, 58 bp, Artificial
  Synthetic oligonucleotide
ggctatctagtgcgcactgacaattacagtaattccgggacacaacgtggcagtttta

SEQ ID NO: 424985 - DNA, 60 bp, Artificial
  Synthetic oligonucleotide
ggctatctcgcagaacgagataaatatatgcgtgttgctggagttcctgtggccactgag

SEQ ID NO: 424986 - DNA, 55 bp, Artificial
  Synthetic oligonucleotide
ggctatctcgtaccaagatggaatagttgtagctcctaatatatgacttgggatg

SEQ ID NO: 424987 - DNA, 54 bp, Artificial
  Synthetic oligonucleotide
ggctatctcttcggaggtgcagactttgcagcactggaggaccggatcaatgct

SEQ ID NO: 424988 - DNA, 50 bp, Artificial
  Synthetic oligonucleotide
ggctatcttcgagaccaaaaaccgaaaagacttcttccacttgacactct

SEQ ID NO: 424989 - DNA, 60 bp, Artificial
  Synthetic oligonucleotide
ggctatgaattcattggaatgacccctttgaaagacctgctctggcgcgagctaaagcgc

SEQ ID NO: 424990 - DNA, 60 bp, Artificial
  Synthetic oligonucleotide
ggctatgacatcaaccaatgttatgtcgttagttatggggatgactgtgtcctgtcagtg

SEQ ID NO: 424991 - DNA, 55 bp, Artificial
  Synthetic oligonucleotide
ggctatgcacttagaatagggcatactgaagttgggttgacatctatcccaatat

SEQ ID NO: 424992 - DNA, 60 bp, Artificial
  Synthetic oligonucleotide
ggctatgcagagcttataatgagggaattggatttgtcttagaaccattatggaatgagt

SEQ ID NO: 424993 - DNA, 55 bp, Artificial
  Synthetic oligonucleotide
ggctatgccacctggctgggtctggaataacgtggaacttaaaactaacacagcg

SEQ ID NO: 424994 - DNA, 60 bp, Artificial
  Synthetic oligonucleotide
ggctatgcgagaatcctcttccttatcagagggttgctctcatgtctctaaaaagagcgt

SEQ ID NO: 424995 - DNA, 55 bp, Artificial
  Synthetic oligonucleotide
ggctatgctggtactgtagaggtctcattactggattcgggcctgtcaccacttg

SEQ ID NO: 424996 - DNA, 54 bp, Artificial
  Synthetic oligonucleotide
ggctatggaatctcgtaagcactaacgaacgtgattacagcgattacttagacg

SEQ ID NO: 424997 - DNA, 60 bp, Artificial
  Synthetic oligonucleotide
ggctatggacgatgcgtgggagtacaaaaagacgcttgcgatgctaaatgcagaaagaac

SEQ ID NO: 424998 - DNA, 55 bp, Artificial
  Synthetic oligonucleotide
ggctatggagcggagggcaccaacttggactatcagttattagaggagcagcggc

SEQ ID NO: 424999 - DNA, 55 bp, Artificial
  Synthetic oligonucleotide
ggctatggagcgggtgtgtcaggagcgctcgtcgcctttaaaatcatgagcggcg

SEQ ID NO: 425000 - DNA, 55 bp, Artificial
  Synthetic oligonucleotide
ggctatggagtatgacgcgtacatggctgtgcgttcctatgaaccactgagggct

SEQ ID NO: 425001 - DNA, 55 bp, Artificial
  Synthetic oligonucleotide
ggctatgtagattttatagagtcagaactaggcatctcagcagagatacacaact

SEQ ID NO: 425002 - DNA, 60 bp, Artificial
  Synthetic oligonucleotide
ggctatgtctttcatttggcagtctgccccagatattgggagaaagttagagagattaga

SEQ ID NO: 425003 - DNA, 55 bp, Artificial
  Synthetic oligonucleotide
ggctatgtggacaaaatgttatcggttcacgttcaactactgcttggaggcccgt

SEQ ID NO: 425004 - DNA, 55 bp, Artificial
  Synthetic oligonucleotide
ggctatgttgatatgtgaagctctaaattcattgaaagtgacgcaagcaaacgtc

SEQ ID NO: 425005 - DNA, 58 bp, Artificial
  Synthetic oligonucleotide
ggctattaaagcagtactagtagtgtgctttacctctaatggtgtaaacatgaaagta

SEQ ID NO: 425006 - DNA, 60 bp, Artificial
  Synthetic oligonucleotide
ggctattaaagctacatgagtagtgcgtcttactcttagtggtgtaggcatgaaagtgat

SEQ ID NO: 425007 - DNA, 60 bp, Artificial
  Synthetic oligonucleotide
ggctattaaagctatacaatggggaagtacaatctaatcttgtcagagtatttgtcattc

SEQ ID NO: 425008 - DNA, 57 bp, Artificial
  Synthetic oligonucleotide
ggctattaaagctatacgatggggacgtataatgtcctactctcggagtatttacag

SEQ ID NO: 425009 - DNA, 59 bp, Artificial
  Synthetic oligonucleotide
ggctattaaaggctcaatggcgtacagaaaacgtggagcgcgtcgtgagacgaatttga

SEQ ID NO: 425010 - DNA, 59 bp, Artificial
  Synthetic oligonucleotide
ggctattaaaggctcaatggcgtacaggaaacgtggagcgcgccgcgaggcgaatataa

SEQ ID NO: 425011 - DNA, 56 bp, Artificial
  Synthetic oligonucleotide
ggctattaaaggctcaatggcgtacaggaagcgcggagctaaacgcgaaaacttac

SEQ ID NO: 425012 - DNA, 58 bp, Artificial
  Synthetic oligonucleotide
ggctattaaaggttcaatggcatataggaagcgcggaacaaagcgtgagaactttcca

SEQ ID NO: 425013 - DNA, 59 bp, Artificial
  Synthetic oligonucleotide
ggctattaacttgttaactcacgataatcgtactacactggtgtatcacaataatacta

SEQ ID NO: 425014 - DNA, 53 bp, Artificial
  Synthetic oligonucleotide
ggctattagactttcaagaacgcatgtcagcagatcttgatcagtattcttta

SEQ ID NO: 425015 - DNA, 60 bp, Artificial
  Synthetic oligonucleotide
ggctattatggcctattgttctagctcttacgatttttaatgcatattcggagtatcaag

SEQ ID NO: 425016 - DNA, 59 bp, Artificial
  Synthetic oligonucleotide
ggctattcagaaaatagcccaccaaatagttatacagcattatatcaaaataaggacac

SEQ ID NO: 425017 - DNA, 55 bp, Artificial
  Synthetic oligonucleotide
ggctattctctaccggcaacaaatttgatgtcgaagtggatcggagattatttgg

SEQ ID NO: 425018 - DNA, 55 bp, Artificial
  Synthetic oligonucleotide
ggctattctgaagtggaagtacagcagacacaggtagaacacggacatggcgccg

SEQ ID NO: 425019 - DNA, 60 bp, Artificial
  Synthetic oligonucleotide
ggctattctgtgctggactttgattggcagttgagtagagtggctcgtggagggtgacga

SEQ ID NO: 425020 - DNA, 55 bp, Artificial
  Synthetic oligonucleotide
ggctattcttatgatcaggacggcaacttgtcgtctagcgcaatcttattacccc

SEQ ID NO: 425021 - DNA, 59 bp, Artificial
  Synthetic oligonucleotide
ggctattgaaggctcaatggcgtacaggaaacgtggagcgaccgtagaggcggatataa

SEQ ID NO: 425022 - DNA, 60 bp, Artificial
  Synthetic oligonucleotide
ggctattgatacggattactatctacgtgatccatcaatctacctttcgaacaacaatcc

SEQ ID NO: 425023 - DNA, 55 bp, Artificial
  Synthetic oligonucleotide
ggctattgatggccttgccgacaagttaaaactttgtgaccccaatactgacccc

SEQ ID NO: 425024 - DNA, 55 bp, Artificial
  Synthetic oligonucleotide
ggctattgcaacacccgggatgcaaattagagggttcgtgtacttcgttgaaact

SEQ ID NO: 425025 - DNA, 55 bp, Artificial
  Synthetic oligonucleotide
ggctattggcacgcgctcaagtgcccctgcgttgagtttccgtctggggacctgc

SEQ ID NO: 425026 - DNA, 53 bp, Artificial
  Synthetic oligonucleotide
ggctatttacgaagacgaaggcgcccctaaccaaatacacatccgaaaccgaa

SEQ ID NO: 425027 - DNA, 60 bp, Artificial
  Synthetic oligonucleotide
ggctatttccctgactggcagaactacacaccagggccagggatcagatatccactgacc

SEQ ID NO: 425028 - DNA, 55 bp, Artificial
  Synthetic oligonucleotide
ggctatttctgagtggaatcattacccgcggcatggaaatatatggcacacaatc

SEQ ID NO: 425029 - DNA, 55 bp, Artificial
  Synthetic oligonucleotide
ggctattttggtctccaaagagagcagccattctagacacttggatgtataatac

SEQ ID NO: 425030 - DNA, 60 bp, Artificial
  Synthetic oligonucleotide
ggctatttttggaacaggacagcgggcttgagctatctttacccaatgagtctgaagata

SEQ ID NO: 425031 - DNA, 55 bp, Artificial
  Synthetic oligonucleotide
ggctattttttagttgacacatctgtgcttggccccggtataacacgggtcaccg

SEQ ID NO: 425032 - DNA, 51 bp, Artificial
  Synthetic oligonucleotide
ggctcaaaataggcagctacataatcggctttgcactacctatcatcctta

SEQ ID NO: 425033 - DNA, 54 bp, Artificial
  Synthetic oligonucleotide
ggctcaaactgaaggttgactaccgccctattgggctgtatgccggtgtggtag

SEQ ID NO: 425034 - DNA, 55 bp, Artificial
  Synthetic oligonucleotide
ggctcaaacttcatcgtcccaacacgttcggaacaggaggaaatgtaaggctgcc

SEQ ID NO: 425035 - DNA, 60 bp, Artificial
  Synthetic oligonucleotide
ggctcaaaggcccatgtatcggaagcccaggatgtacagaatgtatagaagtcctgatgt

SEQ ID NO: 425036 - DNA, 60 bp, Artificial
  Synthetic oligonucleotide
ggctcaacaagagccgtccctctcagcccatctcctacaaagtgtgcttcgatctgtatc

SEQ ID NO: 425037 - DNA, 55 bp, Artificial
  Synthetic oligonucleotide
ggctcaacaagatgatttccccgcgctaacagattatacgaaggagaagaacggt

SEQ ID NO: 425038 - DNA, 50 bp, Artificial
  Synthetic oligonucleotide
ggctcaaccagcgaatagtcgtaaatggccgcactcaaaggaatactaac

SEQ ID NO: 425039 - DNA, 59 bp, Artificial
  Synthetic oligonucleotide
ggctcaaccgccactccacacatgcctagcgaaagcgaagttcaaccttcagattatcc

SEQ ID NO: 425040 - DNA, 60 bp, Artificial
  Synthetic oligonucleotide
ggctcaacgcaggttcagagattcaagtagctggattcgattattcatgtgccattaatg

SEQ ID NO: 425041 - DNA, 59 bp, Artificial
  Synthetic oligonucleotide
ggctcaactacactacatcaatgtaaccaatcttgaacaacacgaggcttacaaaacga

SEQ ID NO: 425042 - DNA, 59 bp, Artificial
  Synthetic oligonucleotide
ggctcaactagtagaactacaagctttaattgcagtcttatcagccttccctaatcaac

SEQ ID NO: 425043 - DNA, 60 bp, Artificial
  Synthetic oligonucleotide
ggctcaactctgactggtggataaaaagtgatcgctgggaccagctcctagcggatttga

SEQ ID NO: 425044 - DNA, 55 bp, Artificial
  Synthetic oligonucleotide
ggctcaactctggttattggttcatctgcctttgcagcagatgatgcaaccagtc

SEQ ID NO: 425045 - DNA, 55 bp, Artificial
  Synthetic oligonucleotide
ggctcaagaaatttactgagatgtgcaatgcggcacgcggtcttgaatggatagg

SEQ ID NO: 425046 - DNA, 55 bp, Artificial
  Synthetic oligonucleotide
ggctcaagaagaccatgaaagatatcacagcaattggagagcaatggctagtgac

SEQ ID NO: 425047 - DNA, 55 bp, Artificial
  Synthetic oligonucleotide
ggctcaagcagtacagagagttaaaacctcagacctgcaccatatgtgagacaac

SEQ ID NO: 425048 - DNA, 55 bp, Artificial
  Synthetic oligonucleotide
ggctcaagcagtggaactgtccaagaagtccaatgcccttcgcgcacaaggagca

SEQ ID NO: 425049 - DNA, 55 bp, Artificial
  Synthetic oligonucleotide
ggctcaaggtgcgtatgatcaacgctgaagacttccataaactctcaaccgggtt

SEQ ID NO: 425050 - DNA, 50 bp, Artificial
  Synthetic oligonucleotide
ggctcaatatctaatggttggagccttggaggctgtttctaccgttcatt

SEQ ID NO: 425051 - DNA, 56 bp, Artificial
  Synthetic oligonucleotide
ggctcaatccgcgaccctctcccagcgattttaccgatttaaagaattacatccat

SEQ ID NO: 425052 - DNA, 55 bp, Artificial
  Synthetic oligonucleotide
ggctcaatctatttagatgaacatcctctcgatcggatagcaacgtgttacccag

SEQ ID NO: 425053 - DNA, 55 bp, Artificial
  Synthetic oligonucleotide
ggctcaatggcgtacaggaagcgcggagctaaacgtgaagacttatcacaacaac

SEQ ID NO: 425054 - DNA, 59 bp, Artificial
  Synthetic oligonucleotide
ggctcaatttcaaagagtaagatcactcaggccgggttgtcgcacatgataacctttct

SEQ ID NO: 425055 - DNA, 55 bp, Artificial
  Synthetic oligonucleotide
ggctcaatttggctcgcgttcgctcgcaccacgtttgctgccaggcggacctgat

SEQ ID NO: 425056 - DNA, 55 bp, Artificial
  Synthetic oligonucleotide
ggctcacaaacaactggatatcatattctaaaagcatccagcgtgtctcaactta

SEQ ID NO: 425057 - DNA, 53 bp, Artificial
  Synthetic oligonucleotide
ggctcacacccaggtgcctggtccactactcttacaggttatggcattaccct

SEQ ID NO: 425058 - DNA, 55 bp, Artificial
  Synthetic oligonucleotide
ggctcacagcacttacaagtagtttgttaaagttgtactccaataatcgttctcc

SEQ ID NO: 425059 - DNA, 60 bp, Artificial
  Synthetic oligonucleotide
ggctcacagttctcggaaaggatgcaggtgcattgaccgaagatccagatgagggcacag

SEQ ID NO: 425060 - DNA, 55 bp, Artificial
  Synthetic oligonucleotide
ggctcacagtttgatagctccctgacaccattgctactgaatgcagttctggatg

SEQ ID NO: 425061 - DNA, 57 bp, Artificial
  Synthetic oligonucleotide
ggctcacataaatgaactgcagtcataaaatatgtatgagtaagtgttgtggtaagc

SEQ ID NO: 425062 - DNA, 55 bp, Artificial
  Synthetic oligonucleotide
ggctcacatccgatttatatgggatcgatggattataccataagttacgaacagc

SEQ ID NO: 425063 - DNA, 55 bp, Artificial
  Synthetic oligonucleotide
ggctcacctagtggacatatagtaggagcagatggtgtagaagtgtatgaagaaa

SEQ ID NO: 425064 - DNA, 55 bp, Artificial
  Synthetic oligonucleotide
ggctcacctgtaaattcttatactaacacaccttataccggtgcccttggcgtgt

SEQ ID NO: 425065 - DNA, 55 bp, Artificial
  Synthetic oligonucleotide
ggctcacgcacaaatgcagataaactagtggctttagctttgcgagcacttttag

SEQ ID NO: 425066 - DNA, 59 bp, Artificial
  Synthetic oligonucleotide
ggctcacgctattgtggccctaacccgtcatacggagaaatgtgtggtcgttgatgccc

SEQ ID NO: 425067 - DNA, 58 bp, Artificial
  Synthetic oligonucleotide
ggctcactagtgacttaatatagtaattgaacttattagggcctctaacacacttgct

SEQ ID NO: 425068 - DNA, 55 bp, Artificial
  Synthetic oligonucleotide
ggctcactatccggactcaggtgtgcagtgcttaacatttggtgaatcaactggg

SEQ ID NO: 425069 - DNA, 60 bp, Artificial
  Synthetic oligonucleotide
ggctcactcattttaaataggccaataatgccacaattcttgctagctggcactaattcc

SEQ ID NO: 425070 - DNA, 59 bp, Artificial
  Synthetic oligonucleotide
ggctcacttagtgagtcgatgcagcttaacgagtttatcgtgaaacacgtttcttctaa

SEQ ID NO: 425071 - DNA, 55 bp, Artificial
  Synthetic oligonucleotide
ggctcagaataggatgttaacaaccattgataggaccctcaaggagactgtaacc

SEQ ID NO: 425072 - DNA, 55 bp, Artificial
  Synthetic oligonucleotide
ggctcagacgatagtagcatgatgatcagcttcccttgttcaaatgaggatgagc

SEQ ID NO: 425073 - DNA, 58 bp, Artificial
  Synthetic oligonucleotide
ggctcagaggacagatagaattatagaagctttgcaaagaattagtagtgctattctc

SEQ ID NO: 425074 - DNA, 55 bp, Artificial
  Synthetic oligonucleotide
ggctcagagtttgctttagaccaaattctaatcaggaatatagtgctcctcagtc

SEQ ID NO: 425075 - DNA, 60 bp, Artificial
  Synthetic oligonucleotide
ggctcagataaggcattgcgtgtcgatttgacacctcataacccattgctggtgtgtcgg

SEQ ID NO: 425076 - DNA, 55 bp, Artificial
  Synthetic oligonucleotide
ggctcagattggcactattatgtgaacgacccaccacattgaagttgtacggtag

SEQ ID NO: 425077 - DNA, 55 bp, Artificial
  Synthetic oligonucleotide
ggctcagatttacctatagaggaacatagaaagagagtagaagagctcagagcac

SEQ ID NO: 425078 - DNA, 60 bp, Artificial
  Synthetic oligonucleotide
ggctcagcaaatccaccgtaattggcctacaccatctcagattacttacggtgcacctga

SEQ ID NO: 425079 - DNA, 57 bp, Artificial
  Synthetic oligonucleotide
ggctcagcacaacacagctgatctcctcgcttccccttagcctagctacagcttgac

SEQ ID NO: 425080 - DNA, 57 bp, Artificial
  Synthetic oligonucleotide
ggctcagccttactgttctaggccgtgggagtttcacttgtcggtgtctacctctaa

SEQ ID NO: 425081 - DNA, 57 bp, Artificial
  Synthetic oligonucleotide
ggctcagcctttctctatataagggtttgtaacccctcgttgcaagcatagtcggaa

SEQ ID NO: 425082 - DNA, 55 bp, Artificial
  Synthetic oligonucleotide
ggctcagctataggaactgacccagacgttgactggactgtgtttgcacaccagc

SEQ ID NO: 425083 - DNA, 54 bp, Artificial
  Synthetic oligonucleotide
ggctcagcttcgacgcgccgcactttcacagcatgttcgcctacgtgaagccga

SEQ ID NO: 425084 - DNA, 58 bp, Artificial
  Synthetic oligonucleotide
ggctcaggagaaactttaacagtaatcaaaatgtctgttacagtcaagagaatcattg

SEQ ID NO: 425085 - DNA, 50 bp, Artificial
  Synthetic oligonucleotide
ggctcaggagacgactacccgcccctgctagcgcgtgtgtgcgaggacga

SEQ ID NO: 425086 - DNA, 55 bp, Artificial
  Synthetic oligonucleotide
ggctcaggataaggcccaatacattgaagaccaacgggccggaaacaattgggct

SEQ ID NO: 425087 - DNA, 55 bp, Artificial
  Synthetic oligonucleotide
ggctcaggattcaccaaccaaatctgcgaacaggttaatctattaaaggaatccc

SEQ ID NO: 425088 - DNA, 55 bp, Artificial
  Synthetic oligonucleotide
ggctcaggtatataccaggtccccgttggtctcagttttgacgcctgggagcgta

SEQ ID NO: 425089 - DNA, 57 bp, Artificial
  Synthetic oligonucleotide
ggctcaggtatatgcagatacgcaaacttacttgcatgacgattcaaaagacgagta

SEQ ID NO: 425090 - DNA, 60 bp, Artificial
  Synthetic oligonucleotide
ggctcaggttgttgtactatgtgcgtagaaataggtgggacttagtgatgcgcaaagtgc

SEQ ID NO: 425091 - DNA, 55 bp, Artificial
  Synthetic oligonucleotide
ggctcagtaatggacattgattgatcatcagacaattgttaggaggcctaggtat

SEQ ID NO: 425092 - DNA, 55 bp, Artificial
  Synthetic oligonucleotide
ggctcagtcgccaccgcgagaacccgacccgcagtcgctctcggaagctgggtcg

SEQ ID NO: 425093 - DNA, 55 bp, Artificial
  Synthetic oligonucleotide
ggctcagtcggtccgtcaatggaagcaaaaagttctgggcaaaatacagaagggg

SEQ ID NO: 425094 - DNA, 55 bp, Artificial
  Synthetic oligonucleotide
ggctcagtttactagcgccatttgttcagtggttcgtagggctttcccccactgt

SEQ ID NO: 425095 - DNA, 55 bp, Artificial
  Synthetic oligonucleotide
ggctcataacagagtgcttgcggagaaagattactactgcttactatgtcacccc

SEQ ID NO: 425096 - DNA, 60 bp, Artificial
  Synthetic oligonucleotide
ggctcatagcagagcagcaagatcttcagtgcctggagtgaggcgagaaatgcagatggt

SEQ ID NO: 425097 - DNA, 55 bp, Artificial
  Synthetic oligonucleotide
ggctcatcagcagtctatctagtcttgaaaaccaaagtttagggcttgaatcact

SEQ ID NO: 425098 - DNA, 55 bp, Artificial
  Synthetic oligonucleotide
ggctcatcagtgactcaggaagagttagacttggctctagaacaactgttacgga

SEQ ID NO: 425099 - DNA, 60 bp, Artificial
  Synthetic oligonucleotide
ggctcatcctataactgaggactcccaatggataacagcattcacttgggaaggtaaaca

SEQ ID NO: 425100 - DNA, 54 bp, Artificial
  Synthetic oligonucleotide
ggctcatcggttacccccctaacgtccagcctgtaggacgcttcggtgacttcc

SEQ ID NO: 425101 - DNA, 60 bp, Artificial
  Synthetic oligonucleotide
ggctcatctacagctgagagcaacacaatatccataccagctcaagacaccaccatcagt

SEQ ID NO: 425102 - DNA, 55 bp, Artificial
  Synthetic oligonucleotide
ggctcatcttcacctgacagagtgctgtactaaagaggtcccggcccagtatttg

SEQ ID NO: 425103 - DNA, 55 bp, Artificial
  Synthetic oligonucleotide
ggctcatgacattaacaccctgttaaataatataggtgatcatcaggctgccatg

SEQ ID NO: 425104 - DNA, 55 bp, Artificial
  Synthetic oligonucleotide
ggctcatggataaaaccccaatgtgtgggctatgagagagtcttagtagacaggg

SEQ ID NO: 425105 - DNA, 50 bp, Artificial
  Synthetic oligonucleotide
ggctcatgtactgtgcgagagcgagcaacgttggagtggcgcgagaggtg

SEQ ID NO: 425106 - DNA, 60 bp, Artificial
  Synthetic oligonucleotide
ggctcatgtgtcagcaaatgtcacacagacaaaggctctctatccacaactaagcctttc

SEQ ID NO: 425107 - DNA, 55 bp, Artificial
  Synthetic oligonucleotide
ggctcattcacttgccacctcgatgcagctatccaccaggataatgcagacagat

SEQ ID NO: 425108 - DNA, 55 bp, Artificial
  Synthetic oligonucleotide
ggctcattcgtatttgatggtagagactgggtagagatctacccgatagagcatc

SEQ ID NO: 425109 - DNA, 55 bp, Artificial
  Synthetic oligonucleotide
ggctcattctcactgatcaaaagtaaaacactacagtgtatcatgttggctgatg

SEQ ID NO: 425110 - DNA, 58 bp, Artificial
  Synthetic oligonucleotide
ggctcattctgcattagaagcctagcatagtagggagctaagttgttgtttagctcaa

SEQ ID NO: 425111 - DNA, 55 bp, Artificial
  Synthetic oligonucleotide
ggctcattgagattagtcatggagcagcttttgccagttttactcaacaagctgg

SEQ ID NO: 425112 - DNA, 57 bp, Artificial
  Synthetic oligonucleotide
ggctccaaatttgatcaggtataggcctgtcactgacttcgttgagtgctcctcaag

SEQ ID NO: 425113 - DNA, 55 bp, Artificial
  Synthetic oligonucleotide
ggctccaagctccgaatctctaccttggtatcacgatatagagggtgctccgcga

SEQ ID NO: 425114 - DNA, 60 bp, Artificial
  Synthetic oligonucleotide
ggctccaatcatcttacctgacggtcggatgtacagaagacactttgctggaataccttc

SEQ ID NO: 425115 - DNA, 55 bp, Artificial
  Synthetic oligonucleotide
ggctccacaaggtgggtttgacaatcaagggaacacaccgtttggcaaaggcacc

SEQ ID NO: 425116 - DNA, 60 bp, Artificial
  Synthetic oligonucleotide
ggctccacagccaacagccccaccagcagagagcttcaggttcgaggagacaacccttgc

SEQ ID NO: 425117 - DNA, 55 bp, Artificial
  Synthetic oligonucleotide
ggctccacgggtgatacagcctagggatcctaggtataatgtggagttggggcgc

SEQ ID NO: 425118 - DNA, 60 bp, Artificial
  Synthetic oligonucleotide
ggctccagacctggttaggtcagacatccattggaggtcaatacgtgcttgttcctccga

SEQ ID NO: 425119 - DNA, 58 bp, Artificial
  Synthetic oligonucleotide
ggctccagctgttcaatatatcatctcgactgaatataacgatcggtctctgttctgc

SEQ ID NO: 425120 - DNA, 57 bp, Artificial
  Synthetic oligonucleotide
ggctccagtactttctgaccagaatagaagcgcaactgcacgtgtgggttccccccc

SEQ ID NO: 425121 - DNA, 60 bp, Artificial
  Synthetic oligonucleotide
ggctccagtcttctgatgactttgctcttatagtgaatgcaccaaatcatgagggaatac

SEQ ID NO: 425122 - DNA, 60 bp, Artificial
  Synthetic oligonucleotide
ggctccagttcaggaacactgaaccctgttcagaatattgcctctcacatgtcgtcaatc

SEQ ID NO: 425123 - DNA, 55 bp, Artificial
  Synthetic oligonucleotide
ggctccataacttagggcaatacatctatgcaacctatggggatacttgggcagg

SEQ ID NO: 425124 - DNA, 52 bp, Artificial
  Synthetic oligonucleotide
ggctccatacaaaacaactgtagtcggagtcttcggcgtgcctggatctgga

SEQ ID NO: 425125 - DNA, 60 bp, Artificial
  Synthetic oligonucleotide
ggctccatagcttagggcaacatatctatgagacttatggggatacttggacaggagtgg

SEQ ID NO: 425126 - DNA, 55 bp, Artificial
  Synthetic oligonucleotide
ggctccatgacttaggacaacatatctatgtaaactatggggatacttggactgg

SEQ ID NO: 425127 - DNA, 60 bp, Artificial
  Synthetic oligonucleotide
ggctccatgtgacggccaggtgccgtcagaacccaggaggttatccagtgtctgccgccg

SEQ ID NO: 425128 - DNA, 54 bp, Artificial
  Synthetic oligonucleotide
ggctccatttttggagggggatctgttaagaagtctagtactgtgagggggttc

SEQ ID NO: 425129 - DNA, 55 bp, Artificial
  Synthetic oligonucleotide
ggctcccaatcgtggactcgtagaagcttttctatcaagtgctgctttgactggt

SEQ ID NO: 425130 - DNA, 60 bp, Artificial
  Synthetic oligonucleotide
ggctcccacgcgggctatgccacatgcgtgatgctttacaacggaacaaccggtcttctg

SEQ ID NO: 425131 - DNA, 54 bp, Artificial
  Synthetic oligonucleotide
ggctcccagttttgtgaatgaagatggcgtcgagtgacgccaacccatctgatg

SEQ ID NO: 425132 - DNA, 59 bp, Artificial
  Synthetic oligonucleotide
ggctcccattagtttcagtaaatgatgggttcatagttgggtttcatggcttgacttca

SEQ ID NO: 425133 - DNA, 54 bp, Artificial
  Synthetic oligonucleotide
ggctccccctgtcgtggtgtgtgaatcttccggaaaaggcgcattctaccgcat

SEQ ID NO: 425134 - DNA, 55 bp, Artificial
  Synthetic oligonucleotide
ggctccccgtcgtagagcgcatgcgcgactcgaccacggcataaatgtgaggctt

SEQ ID NO: 425135 - DNA, 56 bp, Artificial
  Synthetic oligonucleotide
ggctcccgacagaattgatttcgtcggccggcggtcagctgttttactctcgcccc

SEQ ID NO: 425136 - DNA, 55 bp, Artificial
  Synthetic oligonucleotide
ggctccctgcggccttggataggaacggtgcttgtgctagcgccaagtacgtgct

SEQ ID NO: 425137 - DNA, 55 bp, Artificial
  Synthetic oligonucleotide
ggctcccttattgcgagatgctccgccttatggaccgttacccacataaggtgcc

SEQ ID NO: 425138 - DNA, 60 bp, Artificial
  Synthetic oligonucleotide
ggctccgaacgataccacaataggtttgcaagcgcgtgatggtagaataatcttgacaat

SEQ ID NO: 425139 - DNA, 60 bp, Artificial
  Synthetic oligonucleotide
ggctccgagacatcgggccatctatccggaagggtggatgctgagatacgcgtaaacaag

SEQ ID NO: 425140 - DNA, 53 bp, Artificial
  Synthetic oligonucleotide
ggctccggaaccccccagaggcgttattgcccctggaggtctggaggcggttc

SEQ ID NO: 425141 - DNA, 59 bp, Artificial
  Synthetic oligonucleotide
ggctccggaagaacccaaagcccttgtatatgcggacaacatatacattgtccactcca

SEQ ID NO: 425142 - DNA, 60 bp, Artificial
  Synthetic oligonucleotide
ggctccggagtttggattatagtcatctggaagaagaacgatgggagtcataatccgaga

SEQ ID NO: 425143 - DNA, 56 bp, Artificial
  Synthetic oligonucleotide
ggctccggctaacggattaacttttgtagcacgcggaaatatccgcatgtatttta

SEQ ID NO: 425144 - DNA, 56 bp, Artificial
  Synthetic oligonucleotide
ggctccgggccctgttcgagactatgtcccaggtggccagcactgcggctcccttg

SEQ ID NO: 425145 - DNA, 60 bp, Artificial
  Synthetic oligonucleotide
ggctccgggcgtgaagctgtctggactggcgtcattcattacttcaatactcctatcccc

SEQ ID NO: 425146 - DNA, 60 bp, Artificial
  Synthetic oligonucleotide
ggctccggtgttccatatgacaaactattttgagcaaccagtcagtaatggtctcggcaa

SEQ ID NO: 425147 - DNA, 57 bp, Artificial
  Synthetic oligonucleotide
ggctccgtcactgtgccccatcctaacatcgaggaggttgctctgaccactaccgga

SEQ ID NO: 425148 - DNA, 55 bp, Artificial
  Synthetic oligonucleotide
ggctcctatagtagctggaccaatgggagcaacttacacagcttttaatccaaga

SEQ ID NO: 425149 - DNA, 59 bp, Artificial
  Synthetic oligonucleotide
ggctcctatgattaattgtattcatgtagtagttatgtctaattttctccctgacatgg

SEQ ID NO: 425150 - DNA, 55 bp, Artificial
  Synthetic oligonucleotide
ggctcctctaccacaagcaagagatgactacacatggcaatctggcacgaatgca

SEQ ID NO: 425151 - DNA, 58 bp, Artificial
  Synthetic oligonucleotide
ggctcctgagccaacccctcctacccgtgtcagagtttcacgtacacaatatcacaac

SEQ ID NO: 425152 - DNA, 54 bp, Artificial
  Synthetic oligonucleotide
ggctcctgtcccctcgtggctctcggcctagctggggccctacggacccccggc

SEQ ID NO: 425153 - DNA, 60 bp, Artificial
  Synthetic oligonucleotide
ggctccttacatagtagaacagtggcaagttctgtgcatgctgctcaagtgcaaggtact

SEQ ID NO: 425154 - DNA, 59 bp, Artificial
  Synthetic oligonucleotide
ggctccttattcttgagatcctaagccttcgtcttccatatcttcgtctgcggtagtag

SEQ ID NO: 425155 - DNA, 55 bp, Artificial
  Synthetic oligonucleotide
ggctcctttggaaccaggtatgctcccaattaagacacaagagatactgcctggt

SEQ ID NO: 425156 - DNA, 60 bp, Artificial
  Synthetic oligonucleotide
ggctcgaaaatggaaaacatgcgacagatgtatatgcatacggagatgtatcaaagtgga

SEQ ID NO: 425157 - DNA, 55 bp, Artificial
  Synthetic oligonucleotide
ggctcgacccgccgaagtacacgcaggacgcatacggaaacgacctttacctgcc

SEQ ID NO: 425158 - DNA, 55 bp, Artificial
  Synthetic oligonucleotide
ggctcgacccgtggccataaagctacagtttacactgggagtgccccctttactc

SEQ ID NO: 425159 - DNA, 57 bp, Artificial
  Synthetic oligonucleotide
ggctcgaccctcacacaacactgcaggtagggggcgcaattgggatcgttagaaaac

SEQ ID NO: 425160 - DNA, 55 bp, Artificial
  Synthetic oligonucleotide
ggctcgaggttctaatgctgcttacttggatatagcgaggaaaacaccgaacgag

SEQ ID NO: 425161 - DNA, 55 bp, Artificial
  Synthetic oligonucleotide
ggctcgagtcggagcactatgaaccacaggtactccgcaatggttgcgtaattga

SEQ ID NO: 425162 - DNA, 55 bp, Artificial
  Synthetic oligonucleotide
ggctcgatcattgcatcaaatacaatctcacagctattgagccaactactagtgg

SEQ ID NO: 425163 - DNA, 55 bp, Artificial
  Synthetic oligonucleotide
ggctcgatgcattacgatattacttatgaaacgttaaagacgaacgcgcagaagc

SEQ ID NO: 425164 - DNA, 55 bp, Artificial
  Synthetic oligonucleotide
ggctcgcaagacagtaccagctggtgcacctcagagagcttgagattgactcaac

SEQ ID NO: 425165 - DNA, 59 bp, Artificial
  Synthetic oligonucleotide
ggctcgcagcaagaggggcttttctttagatcacaatataaagtccttagagagattta

SEQ ID NO: 425166 - DNA, 60 bp, Artificial
  Synthetic oligonucleotide
ggctcgccatcctcgtggagctctctgcagattttgatgtacttcttgttagttggggtt

SEQ ID NO: 425167 - DNA, 55 bp, Artificial
  Synthetic oligonucleotide
ggctcgcctagagcggtgtgctggtttctacctaaggaaccaggagagtggagtg

SEQ ID NO: 425168 - DNA, 58 bp, Artificial
  Synthetic oligonucleotide
ggctcgctattgcgggcgggatgatctatgcgtcctacaccgggtccctagtggtggt

SEQ ID NO: 425169 - DNA, 54 bp, Artificial
  Synthetic oligonucleotide
ggctcggaaccccggtcaccactgattttggccggttccgcgtacagggcacta

SEQ ID NO: 425170 - DNA, 55 bp, Artificial
  Synthetic oligonucleotide
ggctcggaatgctatatactcttaacactaggccaccacaacagtttaccttgcc

SEQ ID NO: 425171 - DNA, 55 bp, Artificial
  Synthetic oligonucleotide
ggctcggagacttctttagtgggatattcggaggaatcaaagacacgatagacag

SEQ ID NO: 425172 - DNA, 55 bp, Artificial
  Synthetic oligonucleotide
ggctcggatttggaaatccccgacctgacgatagataccttcagtcggcaatgcc

SEQ ID NO: 425173 - DNA, 55 bp, Artificial
  Synthetic oligonucleotide
ggctcggcaaatccagggggtactctgggatctcctaaagggatctcggagtacc

SEQ ID NO: 425174 - DNA, 55 bp, Artificial
  Synthetic oligonucleotide
ggctcggccgtccctatcccctcacgtatgtcgaagagcaccagaccaagccgtt

SEQ ID NO: 425175 - DNA, 55 bp, Artificial
  Synthetic oligonucleotide
ggctcggttgcgttgataagtgctttaatcaacgaagggtccataggttgcacgg

SEQ ID NO: 425176 - DNA, 55 bp, Artificial
  Synthetic oligonucleotide
ggctcgtaacataggcctgtgcagctccgacgttatggagcggtcacgtagaggg

SEQ ID NO: 425177 - DNA, 55 bp, Artificial
  Synthetic oligonucleotide
ggctcgtaagaatcgtcggtcggctacgaaagtagttcaacctgtaattgttgaa

SEQ ID NO: 425178 - DNA, 55 bp, Artificial
  Synthetic oligonucleotide
ggctcgtacggacctgcgcattggtatcgacatggtatgttcattgtacgcggtc

SEQ ID NO: 425179 - DNA, 60 bp, Artificial
  Synthetic oligonucleotide
ggctcgtcaagatgaagagtgggacagacgagagagggagtttgaaaacgcgtgcaacag

SEQ ID NO: 425180 - DNA, 57 bp, Artificial
  Synthetic oligonucleotide
ggctcgtcagtacccaacactgattgcggttacggaaagtgctccggaaccgccagc

SEQ ID NO: 425181 - DNA, 55 bp, Artificial
  Synthetic oligonucleotide
ggctcgtccactagaagcccagtttatggcaccccactactcatacggacagcct

SEQ ID NO: 425182 - DNA, 57 bp, Artificial
  Synthetic oligonucleotide
ggctcgtcgtaattagtagcagcgacgttaatcaacccgtccgggcatacaatagga

SEQ ID NO: 425183 - DNA, 55 bp, Artificial
  Synthetic oligonucleotide
ggctcgtctgccattttagaggtggctgacccaagccctcctatgcgaacccgtg

SEQ ID NO: 425184 - DNA, 57 bp, Artificial
  Synthetic oligonucleotide
ggctcgtgaaatagccattgccctcaaagaaagggctgaaaaaggaccgccaccaca

SEQ ID NO: 425185 - DNA, 50 bp, Artificial
  Synthetic oligonucleotide
ggctcgtggtgtacctgtcacttggaatctcttctcgaccttcgacatga

SEQ ID NO: 425186 - DNA, 54 bp, Artificial
  Synthetic oligonucleotide
ggctcgtgtggatttaccccgcagaaatgttggtagtcgaagggttctacgccc

SEQ ID NO: 425187 - DNA, 50 bp, Artificial
  Synthetic oligonucleotide
ggctcgttatgatcaattggaaaaaagatttgagtcattgaagcaaagag

SEQ ID NO: 425188 - DNA, 57 bp, Artificial
  Synthetic oligonucleotide
ggctcgttgattggattggccgcatggtacaaaagaattcccgcattaaaggtgttg

SEQ ID NO: 425189 - DNA, 60 bp, Artificial
  Synthetic oligonucleotide
ggctcgttgcgtctttaatgacagcagcctttgtattggaggtgaagctctgcagctccc

SEQ ID NO: 425190 - DNA, 55 bp, Artificial
  Synthetic oligonucleotide
ggctcgtttgagtactttgaaacgcaattacgtaccggtatgtctactttagcaa

SEQ ID NO: 425191 - DNA, 55 bp, Artificial
  Synthetic oligonucleotide
ggctctaaagtaaatgaaattcacgcttaatctcagaagcatcggaccaaaccag

SEQ ID NO: 425192 - DNA, 55 bp, Artificial
  Synthetic oligonucleotide
ggctctaaatgactttagcaactcaggtgctgatgttctctaccaaccaccacag

SEQ ID NO: 425193 - DNA, 55 bp, Artificial
  Synthetic oligonucleotide
ggctctaacagaccatggatgcgcgtaaacaatgaaactatattggaaactggtt

SEQ ID NO: 425194 - DNA, 53 bp, Artificial
  Synthetic oligonucleotide
ggctctacacttacctgttttggtttcgtggacccagctagaggttgtcgttt

SEQ ID NO: 425195 - DNA, 55 bp, Artificial
  Synthetic oligonucleotide
ggctctacccgcgcgttcctggtacattacaaagccacgaggaggcgacatcgag

SEQ ID NO: 425196 - DNA, 59 bp, Artificial
  Synthetic oligonucleotide
ggctctacctaatacctcagcgcgtttaggcctggacggtgtcatctataacaacgaga

SEQ ID NO: 425197 - DNA, 51 bp, Artificial
  Synthetic oligonucleotide
ggctctactcagggtcctcagggtcctccgacttcggcctctctaactcct

SEQ ID NO: 425198 - DNA, 60 bp, Artificial
  Synthetic oligonucleotide
ggctctactggggactaaacacagcaatggaaccatcaaggacaggacaccctatagatc

SEQ ID NO: 425199 - DNA, 55 bp, Artificial
  Synthetic oligonucleotide
ggctctagagtctccggagcattgttcacctcaccatacggccatcaggcaagct

SEQ ID NO: 425200 - DNA, 55 bp, Artificial
  Synthetic oligonucleotide
ggctctagatctgaaaggcctaaaagttactataataggcgaagatatcagcaag

SEQ ID NO: 425201 - DNA, 55 bp, Artificial
  Synthetic oligonucleotide
ggctctagcatttcaatgttcctcataattctatagcctctatttccgtctaccc

SEQ ID NO: 425202 - DNA, 55 bp, Artificial
  Synthetic oligonucleotide
ggctctagcgatctcgggtcacgtaaacgagaggaactacgttgagatgatgcgg

SEQ ID NO: 425203 - DNA, 53 bp, Artificial
  Synthetic oligonucleotide
ggctctagctgtatcagacttactagaacacccgagcttcataccgacgccta

SEQ ID NO: 425204 - DNA, 60 bp, Artificial
  Synthetic oligonucleotide
ggctctagtgtacccacatgtagcgctacttggtcgtgtatgcctcagcacattaggtgc

SEQ ID NO: 425205 - DNA, 55 bp, Artificial
  Synthetic oligonucleotide
ggctctataaggccggcgtgactccagaaaccttcccgactgtctcacagttcct

SEQ ID NO: 425206 - DNA, 55 bp, Artificial
  Synthetic oligonucleotide
ggctctatgctgtgagacatgacattgttgatcagatgataaaacatgactggtc

SEQ ID NO: 425207 - DNA, 55 bp, Artificial
  Synthetic oligonucleotide
ggctctattagccaatattcgtgccataccaatattcgcactataatgggctgaa

SEQ ID NO: 425208 - DNA, 60 bp, Artificial
  Synthetic oligonucleotide
ggctctatttgaagcagtccagaccataggaaaccccctaagactcatctaccatctgta

SEQ ID NO: 425209 - DNA, 59 bp, Artificial
  Synthetic oligonucleotide
ggctctcaacaacgcctacagtcctattttaaaacatactccacatcagctgttatttg

SEQ ID NO: 425210 - DNA, 60 bp, Artificial
  Synthetic oligonucleotide
ggctctcacctataactactggactgtcgccaatcacaactgggctgctatcagccacca

SEQ ID NO: 425211 - DNA, 60 bp, Artificial
  Synthetic oligonucleotide
ggctctcagaacattgactcttgctcgtcgatcaccgttgacctctttcatgatcggggc

SEQ ID NO: 425212 - DNA, 57 bp, Artificial
  Synthetic oligonucleotide
ggctctcagtgatgcattttcctctttctcgaggaaatctttataggaccccccctc

SEQ ID NO: 425213 - DNA, 57 bp, Artificial
  Synthetic oligonucleotide
ggctctcgatttgggccttactcgcttctacaccgggaagaaatgtatccacggtca

SEQ ID NO: 425214 - DNA, 55 bp, Artificial
  Synthetic oligonucleotide
ggctctctagtttcgtgagtcaggttatgtcggatggcgtgaatgagaccccgtt

SEQ ID NO: 425215 - DNA, 55 bp, Artificial
  Synthetic oligonucleotide
ggctctctggatcgtaagccagtaaagcgagaatagcgggctctcgcagcagagc

SEQ ID NO: 425216 - DNA, 60 bp, Artificial
  Synthetic oligonucleotide
ggctctctgtatccctacttgtgatgcggaatcacctgggtctaatacgctgcctcctaa

SEQ ID NO: 425217 - DNA, 60 bp, Artificial
  Synthetic oligonucleotide
ggctctgaggctgaggtgactttcgggagcgatccggacaacagtgtctcctatatggtg

SEQ ID NO: 425218 - DNA, 60 bp, Artificial
  Synthetic oligonucleotide
ggctctgatacaagccaaccaaaatgctgccaacatcctccggcttaaagagagcattgc

SEQ ID NO: 425219 - DNA, 55 bp, Artificial
  Synthetic oligonucleotide
ggctctgcaaactctacttgctaggtacactaagcgagccaagtcactcaacccc

SEQ ID NO: 425220 - DNA, 60 bp, Artificial
  Synthetic oligonucleotide
ggctctgcaagattctagatacaaccaaagacacagcaggtgattctacttctccctcag

SEQ ID NO: 425221 - DNA, 60 bp, Artificial
  Synthetic oligonucleotide
ggctctgcatactcgtatttaaacacatatctactgtcttgctgatgatgtcgtgtaagt

SEQ ID NO: 425222 - DNA, 55 bp, Artificial
  Synthetic oligonucleotide
ggctctgctaacttgaacgaccgaactctactcgtggaggaagggcaagtaaacg

SEQ ID NO: 425223 - DNA, 55 bp, Artificial
  Synthetic oligonucleotide
ggctctgctcgagtcgaccacgctaagtagcgcgtctgtgagaattgctgaactg

SEQ ID NO: 425224 - DNA, 60 bp, Artificial
  Synthetic oligonucleotide
ggctctgctgtgccagtgcatctcatctgtgccatttactgtacctatggctgatctaac

SEQ ID NO: 425225 - DNA, 52 bp, Artificial
  Synthetic oligonucleotide
ggctctggaacactataaatcctaagatgaccctgttctgcaagtaacggaa

SEQ ID NO: 425226 - DNA, 54 bp, Artificial
  Synthetic oligonucleotide
ggctctggcggtgaagtcattaaccctactgttcctcctaaaccaccgaccgag

SEQ ID NO: 425227 - DNA, 60 bp, Artificial
  Synthetic oligonucleotide
ggctctgtagccaattttcaagttgggatgtatcgcctgttgtggccggctcgtggcgcc

SEQ ID NO: 425228 - DNA, 55 bp, Artificial
  Synthetic oligonucleotide
ggctctgtatctccctgctggtggctccagttcagggacacagaaccctgctccg

SEQ ID NO: 425229 - DNA, 55 bp, Artificial
  Synthetic oligonucleotide
ggctctgtcttctgacttaaggttgaacttagtcatcaagtcgtcgaacctacgc

SEQ ID NO: 425230 - DNA, 60 bp, Artificial
  Synthetic oligonucleotide
ggctctgtgagggagacgaagagcgcattcttgatcgcccaatgctttagattggaattc

SEQ ID NO: 425231 - DNA, 50 bp, Artificial
  Synthetic oligonucleotide
ggctctgtgcctctcgacgtccttctcatggagtctgagcgccccagcaa

SEQ ID NO: 425232 - DNA, 54 bp, Artificial
  Synthetic oligonucleotide
ggctctgttacggtccctcacccaaacatacaggagacggcacttcccctaacg

SEQ ID NO: 425233 - DNA, 56 bp, Artificial
  Synthetic oligonucleotide
ggctcttaaatccaggtttgtagtcccgattggaaagatatcttccttggagatac

SEQ ID NO: 425234 - DNA, 55 bp, Artificial
  Synthetic oligonucleotide
ggctcttgaaggtcttggggtacccactgagtcagtcaaagaggtgatcatccgt

SEQ ID NO: 425235 - DNA, 55 bp, Artificial
  Synthetic oligonucleotide
ggctcttggcagtagcaggcacggtagacccgtgaaagcatgccgtacgacgtgc

SEQ ID NO: 425236 - DNA, 57 bp, Artificial
  Synthetic oligonucleotide
ggctcttgggtaggttacaccagcaatggcatccatagtggtcccagacacgggcag

SEQ ID NO: 425237 - DNA, 55 bp, Artificial
  Synthetic oligonucleotide
ggctcttggtgagaacatggcaccagagaaagtagactttgacaactgcagagac

SEQ ID NO: 425238 - DNA, 55 bp, Artificial
  Synthetic oligonucleotide
ggctcttgtcgggagggcgtgttccaaactacaacatgttcataatggatgaggc

SEQ ID NO: 425239 - DNA, 55 bp, Artificial
  Synthetic oligonucleotide
ggctcttgttcggaccggaatggatcctaggatgtgctctctgatgcaggggtcg

SEQ ID NO: 425240 - DNA, 56 bp, Artificial
  Synthetic oligonucleotide
ggctctttacatgctaacaaccagagggagacaaactactaaagacaataaaggga

SEQ ID NO: 425241 - DNA, 56 bp, Artificial
  Synthetic oligonucleotide
ggctctttcccacccatgatggctagagctgctaggaacaggttttcatgcttcat

SEQ ID NO: 425242 - DNA, 58 bp, Artificial
  Synthetic oligonucleotide
ggctctttcccttcagatggggagacaagatggggaactcaagagtaacaagagagag

SEQ ID NO: 425243 - DNA, 51 bp, Artificial
  Synthetic oligonucleotide
ggctctttgtttactctaacaaatctactctgcctcaagtctagcctgcag

SEQ ID NO: 425244 - DNA, 60 bp, Artificial
  Synthetic oligonucleotide
ggctcttttggatatgaagtgtgtcgtaaggctttcaggtctagcagtgagcatggatca

SEQ ID NO: 425245 - DNA, 55 bp, Artificial
  Synthetic oligonucleotide
ggctgaaaaggaagaagtttccaagcatttggctggcgtaaaaggtgctacagtc

SEQ ID NO: 425246 - DNA, 60 bp, Artificial
  Synthetic oligonucleotide
ggctgaaaagggggggagagctcacaggatggcgctggaagagctcccggacgcgctaca

SEQ ID NO: 425247 - DNA, 60 bp, Artificial
  Synthetic oligonucleotide
ggctgaaaaggttgtcaatatgatatcaggcacaaagtctataactaatctattacagag

SEQ ID NO: 425248 - DNA, 57 bp, Artificial
  Synthetic oligonucleotide
ggctgaaaatcttttgcttaaggaatcgtccaaaggacgaggatcaagcacacccga

SEQ ID NO: 425249 - DNA, 53 bp, Artificial
  Synthetic oligonucleotide
ggctgaaaccaggggaatgacaggttataatcccatggccggacccctaagga

SEQ ID NO: 425250 - DNA, 55 bp, Artificial
  Synthetic oligonucleotide
ggctgaaactatgataaccggtctcatcaacagaattgcagtagctggctgcaaa

SEQ ID NO: 425251 - DNA, 55 bp, Artificial
  Synthetic oligonucleotide
ggctgaacacaggctcgaggcaatttgcgcagctatgatagagtcatggggctac

SEQ ID NO: 425252 - DNA, 55 bp, Artificial
  Synthetic oligonucleotide
ggctgaacctccttttggggaaagtaacatagtgatcggaattggagacaaagcc

SEQ ID NO: 425253 - DNA, 60 bp, Artificial
  Synthetic oligonucleotide
ggctgaacttcgacagcccatacacgggtcgtgctgctgtccccactgtccgcgtcacca

SEQ ID NO: 425254 - DNA, 60 bp, Artificial
  Synthetic oligonucleotide
ggctgaacttcgacagccccgggatcagccgtgccgctgcccccactgtcctcgtcacaa

SEQ ID NO: 425255 - DNA, 60 bp, Artificial
  Synthetic oligonucleotide
ggctgaacttcgacagtccaggatcgagccgtgcttatgtccctactgtccgcgtcacca

SEQ ID NO: 425256 - DNA, 55 bp, Artificial
  Synthetic oligonucleotide
ggctgaagaactgacccctggacgatttagaaccatagtatgcggtctatttccg

SEQ ID NO: 425257 - DNA, 55 bp, Artificial
  Synthetic oligonucleotide
ggctgaagatactccggtacttagtgctagacgctgaaatggatccaagcgacat

SEQ ID NO: 425258 - DNA, 55 bp, Artificial
  Synthetic oligonucleotide
ggctgaagcagaaaagcatacagttgagataccagactatggaagtcttgacttc

SEQ ID NO: 425259 - DNA, 60 bp, Artificial
  Synthetic oligonucleotide
ggctgaagcaggtggaaaggcgtacaatcatgctctcagtgaactaccggagaccctgga

SEQ ID NO: 425260 - DNA, 54 bp, Artificial
  Synthetic oligonucleotide
ggctgaagctcccgcttcccaccatcgttaccccgcccctttagtgggcactct

SEQ ID NO: 425261 - DNA, 57 bp, Artificial
  Synthetic oligonucleotide
ggctgaagttgtatccagatatgtttatggcactttttttgggttctataactccca

SEQ ID NO: 425262 - DNA, 59 bp, Artificial
  Synthetic oligonucleotide
ggctgaagtttaaattcagaagaagtccatgaaattggcccagcatccaggtccattgt

SEQ ID NO: 425263 - DNA, 55 bp, Artificial
  Synthetic oligonucleotide
ggctgaatgttgacgcatctgggtttccaacctcttcgcacgttcacgcgcctcc

SEQ ID NO: 425264 - DNA, 58 bp, Artificial
  Synthetic oligonucleotide
ggctgacactagaatactatttattagagaggggaaaatcgtacacattagcccattg

SEQ ID NO: 425265 - DNA, 55 bp, Artificial
  Synthetic oligonucleotide
ggctgacagcggatatggtagtctcagaatgagtggccgcggacgccagagcgag

SEQ ID NO: 425266 - DNA, 60 bp, Artificial
  Synthetic oligonucleotide
ggctgacattgcggaatttacagatttcctgcatttggtgcaaaaagcacttaacaggcg

SEQ ID NO: 425267 - DNA, 59 bp, Artificial
  Synthetic oligonucleotide
ggctgaccaaatccgatgggaatgcatatccactacaaaacttgacaaaggtcaacaac

SEQ ID NO: 425268 - DNA, 58 bp, Artificial
  Synthetic oligonucleotide
ggctgaccaaatctggtggaaatgcatacccactccaaaacttgacaaaagtcaacaa

SEQ ID NO: 425269 - DNA, 55 bp, Artificial
  Synthetic oligonucleotide
ggctgaccagttctgaagtggaggggtggctggcgcaggtgggttgggggggtaa

SEQ ID NO: 425270 - DNA, 60 bp, Artificial
  Synthetic oligonucleotide
ggctgaccggcatgcgtacatgctgcaaaagaattggtttgactcagatgtagcgccaaa

SEQ ID NO: 425271 - DNA, 55 bp, Artificial
  Synthetic oligonucleotide
ggctgaccttgcagacgatgcaaaccgtggtgctactgcggttgagcgtgctaaa

SEQ ID NO: 425272 - DNA, 55 bp, Artificial
  Synthetic oligonucleotide
ggctgacgattcagatattcgatacctgtcccaattccgtatcctacacctggat

SEQ ID NO: 425273 - DNA, 60 bp, Artificial
  Synthetic oligonucleotide
ggctgactcacaagagcaattcttaccctgttcaagacgcccaatacaccaataatgagg

SEQ ID NO: 425274 - DNA, 54 bp, Artificial
  Synthetic oligonucleotide
ggctgactctttagtaactgggcattttggccacgtgaggaaaaaagaaacgcc

SEQ ID NO: 425275 - DNA, 55 bp, Artificial
  Synthetic oligonucleotide
ggctgagaaatattactacgtcacaagttgctttataagcaacgacaacgatcga

SEQ ID NO: 425276 - DNA, 60 bp, Artificial
  Synthetic oligonucleotide
ggctgagaagcaggggcagattggaagtgtgcggctaaacacggacagtgaggttgacat

SEQ ID NO: 425277 - DNA, 59 bp, Artificial
  Synthetic oligonucleotide
ggctgagaagccttgcaattactattaatacattcatggaccgttgtcctaactaactc

SEQ ID NO: 425278 - DNA, 60 bp, Artificial
  Synthetic oligonucleotide
ggctgagacttgctacacaaaaacagcaacaggattatgtagacactttgacactgatgt

SEQ ID NO: 425279 - DNA, 55 bp, Artificial
  Synthetic oligonucleotide
ggctgagcgccagaacagtggatggcttaagaagtttaccgagatgacaaacgcc

SEQ ID NO: 425280 - DNA, 60 bp, Artificial
  Synthetic oligonucleotide
ggctgaggcatgtggatacagtgatagattagctcaattgacagtggggaattcaacaat

SEQ ID NO: 425281 - DNA, 60 bp, Artificial
  Synthetic oligonucleotide
ggctgaggccttgctgcatgtctatgttccatctttcgacgtgcgtgggcctcgcgattc

SEQ ID NO: 425282 - DNA, 55 bp, Artificial
  Synthetic oligonucleotide
ggctgagggaagctgaaggcaatgccgtagtgcttgacgttggctcctgccgcgt

SEQ ID NO: 425283 - DNA, 56 bp, Artificial
  Synthetic oligonucleotide
ggctgagtaggcgaatgatccagagaacaactggtttcttcaggccctaccaagat

SEQ ID NO: 425284 - DNA, 55 bp, Artificial
  Synthetic oligonucleotide
ggctgagtctgccactatattcgcagatattgctactcctcattcagtttgggtc

SEQ ID NO: 425285 - DNA, 60 bp, Artificial
  Synthetic oligonucleotide
ggctgagttacacgcaattcagttagctttacaagattcaggatcagaagtgaacatagt

SEQ ID NO: 425286 - DNA, 60 bp, Artificial
  Synthetic oligonucleotide
ggctgagttgaggaagtgcgttggcatgactgtcccttacgtggcaactactgttaactg

SEQ ID NO: 425287 - DNA, 55 bp, Artificial
  Synthetic oligonucleotide
ggctgagtttatgccgccagacggagacgggatcacttcagtgactccaggctga

SEQ ID NO: 425288 - DNA, 55 bp, Artificial
  Synthetic oligonucleotide
ggctgataagtgtctccgtgatgcaaatcacaacacggtgctctctcgggcgtgg

SEQ ID NO: 425289 - DNA, 55 bp, Artificial
  Synthetic oligonucleotide
ggctgataagtttgctttaaagagattaccaggtatgagcaacgttgacgtgctc

SEQ ID NO: 425290 - DNA, 55 bp, Artificial
  Synthetic oligonucleotide
ggctgatacagacgcaaatgctagagcttttctgcaacataatagccaagctcgt

SEQ ID NO: 425291 - DNA, 60 bp, Artificial
  Synthetic oligonucleotide
ggctgatacatgtacacgtatggctgaatgcctggatcgcgtgcatttggtatgccggtc

SEQ ID NO: 425292 - DNA, 55 bp, Artificial
  Synthetic oligonucleotide
ggctgatatgtccgtatacaacccggacaaggagcgtttagtgtgggcctgtaga

SEQ ID NO: 425293 - DNA, 59 bp, Artificial
  Synthetic oligonucleotide
ggctgatattaacaagagatggtggaaataaccacaataatgataccgagacctttaga

SEQ ID NO: 425294 - DNA, 59 bp, Artificial
  Synthetic oligonucleotide
ggctgatattaacaagagatggtggtaacagcacgaacgagaccggggaggtcttcaga

SEQ ID NO: 425295 - DNA, 53 bp, Artificial
  Synthetic oligonucleotide
ggctgatattaacaagagatggtggtacaaacacaagcgggacccaggaggtc

SEQ ID NO: 425296 - DNA, 58 bp, Artificial
  Synthetic oligonucleotide
ggctgatattaacaagagatggtggtgaaaacaatactgggtccgagaccttcagacc

SEQ ID NO: 425297 - DNA, 60 bp, Artificial
  Synthetic oligonucleotide
ggctgatcatgttggcaagatattcgagaaattggatcctgctagcccttttggagtcaa

SEQ ID NO: 425298 - DNA, 60 bp, Artificial
  Synthetic oligonucleotide
ggctgatctatcgacgctctctcagtcggctattggtaattctactgggtttcttcccac

SEQ ID NO: 425299 - DNA, 55 bp, Artificial
  Synthetic oligonucleotide
ggctgatgacgtttgcgccaacttataccacaccaataccgtcgcgcaaatctac

SEQ ID NO: 425300 - DNA, 55 bp, Artificial
  Synthetic oligonucleotide
ggctgatgataacattgatcactcaagccatactccaagcggagtagcgtctgcc

SEQ ID NO: 425301 - DNA, 60 bp, Artificial
  Synthetic oligonucleotide
ggctgatggatctgagttcggtgaggaattgcctccgattccttcggactttacagtctc

SEQ ID NO: 425302 - DNA, 53 bp, Artificial
  Synthetic oligonucleotide
ggctgatgtctccacacagagttcccaactacaacctgtttataatggatgaa

SEQ ID NO: 425303 - DNA, 56 bp, Artificial
  Synthetic oligonucleotide
ggctgattaccgacaccctgatcttgttggacctgctgcacgtgttctacccggtg

SEQ ID NO: 425304 - DNA, 60 bp, Artificial
  Synthetic oligonucleotide
ggctgattccagcttccggtagcacttacatggaggatactccatttggtgtcgccgaac

SEQ ID NO: 425305 - DNA, 57 bp, Artificial
  Synthetic oligonucleotide
ggctgattggacattaggatggaaagaggtactccgttgggggtgagtaatgtcgaa

SEQ ID NO: 425306 - DNA, 55 bp, Artificial
  Synthetic oligonucleotide
ggctgatttaccagataagggcaaaacttttgactctagatttgtcttgtgtagc

SEQ ID NO: 425307 - DNA, 55 bp, Artificial
  Synthetic oligonucleotide
ggctgcaagccagggacttggatgggaagcctattcaatgtgacaccactccagg

SEQ ID NO: 425308 - DNA, 60 bp, Artificial
  Synthetic oligonucleotide
ggctgcaatcctgacacaagcactttcaccgtgtggtaagatcacatgtaaacgttgcat

SEQ ID NO: 425309 - DNA, 55 bp, Artificial
  Synthetic oligonucleotide
ggctgcacaatttgtaccgaccgctgctggccactgtatcaggcgggtttagccg

SEQ ID NO: 425310 - DNA, 55 bp, Artificial
  Synthetic oligonucleotide
ggctgcacacatgaaggctgcgggtctaccgaaagagcaacaggcgaactacctc

SEQ ID NO: 425311 - DNA, 55 bp, Artificial
  Synthetic oligonucleotide
ggctgcaccgagtgttgtgtcgaagattactattgctggtggagagccaccttcg

SEQ ID NO: 425312 - DNA, 60 bp, Artificial
  Synthetic oligonucleotide
ggctgcacgtgtcgggatatcagggctatgtgcgaacgtcggcaatgcacgtaaatccat

SEQ ID NO: 425313 - DNA, 55 bp, Artificial
  Synthetic oligonucleotide
ggctgcactcaaaattgagggaaccagaggtggaaacctaccatctcgacgttcc

SEQ ID NO: 425314 - DNA, 55 bp, Artificial
  Synthetic oligonucleotide
ggctgcactgccattaagcagtgtgtcgcttataagagcgaccaaacgaagtggg

SEQ ID NO: 425315 - DNA, 55 bp, Artificial
  Synthetic oligonucleotide
ggctgcagcgccagaccaggattttgcagatgtcagggaattaggacgagctcgg

SEQ ID NO: 425316 - DNA, 60 bp, Artificial
  Synthetic oligonucleotide
ggctgcatacaacgcgagactagctttccgatctgacttggcgtgatccgtgacatgcgt

SEQ ID NO: 425317 - DNA, 51 bp, Artificial
  Synthetic oligonucleotide
ggctgcatctgtggtcccggagtcttcaggtgggtacgctacgacaaagtc

SEQ ID NO: 425318 - DNA, 55 bp, Artificial
  Synthetic oligonucleotide
ggctgcatgtcgtatcgacgggctcctaggatgtccacccgtatcggtaaagctc

SEQ ID NO: 425319 - DNA, 60 bp, Artificial
  Synthetic oligonucleotide
ggctgcattgattctctggatttagttggtcgctagaagactgaaggagatagatgtatt

SEQ ID NO: 425320 - DNA, 60 bp, Artificial
  Synthetic oligonucleotide
ggctgcattttgtcaataacaatcaatttagacaagtagttattgatggtgtattgaacc

SEQ ID NO: 425321 - DNA, 60 bp, Artificial
  Synthetic oligonucleotide
ggctgccatgtacaacacccactccatgtggaactgcggttggcgcgtccaagtgaccgt

SEQ ID NO: 425322 - DNA, 55 bp, Artificial
  Synthetic oligonucleotide
ggctgccatgtgggcctccctgttttcaacgatccaaatttcttttgatggatgc

SEQ ID NO: 425323 - DNA, 60 bp, Artificial
  Synthetic oligonucleotide
ggctgccgataatgcagttccgcactactacgctgacatctttagcgtaatggcaagtga

SEQ ID NO: 425324 - DNA, 55 bp, Artificial
  Synthetic oligonucleotide
ggctgccgctagaaaacacatcggtctgatggtcccaattgagggagagtctggg

SEQ ID NO: 425325 - DNA, 55 bp, Artificial
  Synthetic oligonucleotide
ggctgccgctgcgagaaattacctgtgtaaataatgtctgtctggttgtggcttt

SEQ ID NO: 425326 - DNA, 55 bp, Artificial
  Synthetic oligonucleotide
ggctgccgtgtcggcatacctggagtacacagagccgaacgtctgcatctcggag

SEQ ID NO: 425327 - DNA, 55 bp, Artificial
  Synthetic oligonucleotide
ggctgcctccaatgcagaatactagaaatgtagtaccagtgagcgtgacatcgag

SEQ ID NO: 425328 - DNA, 59 bp, Artificial
  Synthetic oligonucleotide
ggctgcctgaatgtttgggtgaaaattggcagaccttctggggtgagtgatgtcgaaaa

SEQ ID NO: 425329 - DNA, 60 bp, Artificial
  Synthetic oligonucleotide
ggctgcctgcaaatgcttttactggattgacgtgggtgatgagcttcgatgcttataacc

SEQ ID NO: 425330 - DNA, 60 bp, Artificial
  Synthetic oligonucleotide
ggctgcctgtaagtatgccagtcgcgctgttggcgtggtctggttggtctatgatgcgca

SEQ ID NO: 425331 - DNA, 55 bp, Artificial
  Synthetic oligonucleotide
ggctgcgaatctatctataattaaaactgctttggcaggattgggctcgggttgg

SEQ ID NO: 425332 - DNA, 55 bp, Artificial
  Synthetic oligonucleotide
ggctgcgatgattcgtcggagggcgaacaatggtttaggtgctgagcacgctacg

SEQ ID NO: 425333 - DNA, 55 bp, Artificial
  Synthetic oligonucleotide
ggctgcgatgttggcgtcagcacagtttgtgccgctgccttcaaacgcgtctcag

SEQ ID NO: 425334 - DNA, 59 bp, Artificial
  Synthetic oligonucleotide
ggctgcgcagcagaattggctccgcaggtgaataaaatacgaaacggatggtaaagaag

SEQ ID NO: 425335 - DNA, 52 bp, Artificial
  Synthetic oligonucleotide
ggctgcggatagagattatgattttgtggatttcagcgtggaaggattaggg

SEQ ID NO: 425336 - DNA, 58 bp, Artificial
  Synthetic oligonucleotide
ggctgcggcttagggaggcagaagctgagtaccgtcggagggagctccagggcccgga

SEQ ID NO: 425337 - DNA, 57 bp, Artificial
  Synthetic oligonucleotide
ggctgcgggaagtacgctcgcaatgagtcgtcccctttccaagcgcaacacacagcc

SEQ ID NO: 425338 - DNA, 60 bp, Artificial
  Synthetic oligonucleotide
ggctgcgtatgcagcccagggctacaaggtgctagtgctcaacccctctgtcgctgcgac

SEQ ID NO: 425339 - DNA, 55 bp, Artificial
  Synthetic oligonucleotide
ggctgcgtgaaccatcaaaacaagaacttcgtcttcaacgactgcgcggccaagc

SEQ ID NO: 425340 - DNA, 54 bp, Artificial
  Synthetic oligonucleotide
ggctgcgtgtgtcacgagcacgacccatggaggaatctaacccaggtggtgttg

SEQ ID NO: 425341 - DNA, 55 bp, Artificial
  Synthetic oligonucleotide
ggctgcgttagcttgtttcgcatacaacttaccagtaatggctagtaatgtcacg

SEQ ID NO: 425342 - DNA, 60 bp, Artificial
  Synthetic oligonucleotide
ggctgctatgccttcaccgtttgcctgtgtgtctggactatcaaggtatgttgcccgtgt

SEQ ID NO: 425343 - DNA, 60 bp, Artificial
  Synthetic oligonucleotide
ggctgctattaacaagagatggggggcctgagaacaacgagactgagatcttcagacctg

SEQ ID NO: 425344 - DNA, 56 bp, Artificial
  Synthetic oligonucleotide
ggctgctattaacaagagatggtgggtctaataacgagaccaacatgaccgagacc

SEQ ID NO: 425345 - DNA, 60 bp, Artificial
  Synthetic oligonucleotide
ggctgctattaacaagagatggtggtaaggacacgaacgggactgagatcttcagacctg

SEQ ID NO: 425346 - DNA, 60 bp, Artificial
  Synthetic oligonucleotide
ggctgctattaacaagagatggtggtaaggacgagaacaagactgggactgagatcttca

SEQ ID NO: 425347 - DNA, 60 bp, Artificial
  Synthetic oligonucleotide
ggctgctattaacaagagatggtggtaataacaacaatgagtccgagatcttcagacctg

SEQ ID NO: 425348 - DNA, 57 bp, Artificial
  Synthetic oligonucleotide
ggctgctattaacaagagatggtggtaataacaataacacgaacaggaccgagacct

SEQ ID NO: 425349 - DNA, 56 bp, Artificial
  Synthetic oligonucleotide
ggctgctattaacaagagatggtggtaataacgagaacgatcccgaaaattcaccc

SEQ ID NO: 425350 - DNA, 59 bp, Artificial
  Synthetic oligonucleotide
ggctgctattaacaagagatggtggtaatactgagaacaagaccgaggtcttcagacct

SEQ ID NO: 425351 - DNA, 60 bp, Artificial
  Synthetic oligonucleotide
ggctgctattaacaagagatggtggtaatagcgaggacaataccacagagatcttcagac

SEQ ID NO: 425352 - DNA, 60 bp, Artificial
  Synthetic oligonucleotide
ggctgctattaacaagagatggtggtaatattaaggagaccaacaccaccgagatcttca

SEQ ID NO: 425353 - DNA, 60 bp, Artificial
  Synthetic oligonucleotide
ggctgctattaacaagagatggtggtattaatgagaatgggaccgagatcttcagacctg

SEQ ID NO: 425354 - DNA, 58 bp, Artificial
  Synthetic oligonucleotide
ggctgctattaatgagagatggtggtaaggacaacaatatttccgaaatctttagacc

SEQ ID NO: 425355 - DNA, 55 bp, Artificial
  Synthetic oligonucleotide
ggctgctattttgggtggtcacttgcatttcacgaaggacgacgctatctccacc

SEQ ID NO: 425356 - DNA, 55 bp, Artificial
  Synthetic oligonucleotide
ggctgctcgcaactgccttgtgtctgagaagcaatatgggagctgctcccgagtg

SEQ ID NO: 425357 - DNA, 55 bp, Artificial
  Synthetic oligonucleotide
ggctgctcgggtcaaatcttataagtgagaaggctttactcggagtcaagaggac

SEQ ID NO: 425358 - DNA, 55 bp, Artificial
  Synthetic oligonucleotide
ggctgctctgagcaaattcaaggaggatgtggaatctgctttacacctgtttaag

SEQ ID NO: 425359 - DNA, 60 bp, Artificial
  Synthetic oligonucleotide
ggctgctcttaacaagagatggtggtgaggacaataacagcaccaccgagatcttcagac

SEQ ID NO: 425360 - DNA, 58 bp, Artificial
  Synthetic oligonucleotide
ggctgctcttttagtatcaaatccacgccgagttatatagtgccgtactttttgttca

SEQ ID NO: 425361 - DNA, 55 bp, Artificial
  Synthetic oligonucleotide
ggctgctgaggagtacgtggaggttacgcgggtgggggatttccattacgtgacg

SEQ ID NO: 425362 - DNA, 60 bp, Artificial
  Synthetic oligonucleotide
ggctgctgagtgggacaggacacaccctacccatgcagggcctatagctccaggacaaat

SEQ ID NO: 425363 - DNA, 60 bp, Artificial
  Synthetic oligonucleotide
ggctgcttatggtgacaatcgaagagttgttaccatatagctattggattggccatccgg

SEQ ID NO: 425364 - DNA, 60 bp, Artificial
  Synthetic oligonucleotide
ggctgcttatggtgacaatctaagattgccatcatatagcttttggattggccatccggt

SEQ ID NO: 425365 - DNA, 50 bp, Artificial
  Synthetic oligonucleotide
ggctgcttatggtgacaattacggaattgttaccatatagctattggatt

SEQ ID NO: 425366 - DNA, 60 bp, Artificial
  Synthetic oligonucleotide
ggctgcttttggtaacgattgtgacatatccgtctgcccactagatacaacaatgaatgg

SEQ ID NO: 425367 - DNA, 58 bp, Artificial
  Synthetic oligonucleotide
ggctggaacggctccgagttgggattagcaggtatgggtgcccaattcttatcacgcg

SEQ ID NO: 425368 - DNA, 55 bp, Artificial
  Synthetic oligonucleotide
ggctggaactgctaagcatatcgaagaatgctcatgctacggagagcgagcagag

SEQ ID NO: 425369 - DNA, 55 bp, Artificial
  Synthetic oligonucleotide
ggctggacactagtacccacggattctacggtgacactgagtgcccaaaacgccc

SEQ ID NO: 425370 - DNA, 55 bp, Artificial
  Synthetic oligonucleotide
ggctggacagatagggtgatagaaataggacaagaaattggtgcagctattctcc

SEQ ID NO: 425371 - DNA, 55 bp, Artificial
  Synthetic oligonucleotide
ggctggaccgcaatgaaaagttcagggatattaggagattcctgcccgactatca

SEQ ID NO: 425372 - DNA, 60 bp, Artificial
  Synthetic oligonucleotide
ggctggactgcataaggccttgtttctgggttgaactgatcagaggacggcctcaggaga

SEQ ID NO: 425373 - DNA, 55 bp, Artificial
  Synthetic oligonucleotide
ggctggacttggtaattgggcatatgctaacccgactgcatgggcccataccgag

SEQ ID NO: 425374 - DNA, 58 bp, Artificial
  Synthetic oligonucleotide
ggctggagaagtgcgtggttgcaccccactcggaaacattttggcaggatgggagtac

SEQ ID NO: 425375 - DNA, 55 bp, Artificial
  Synthetic oligonucleotide
ggctggaggccattacgtgcaaatggtcatcattaagttaggggcgattactggc

SEQ ID NO: 425376 - DNA, 59 bp, Artificial
  Synthetic oligonucleotide
ggctggaggtcaactgttctactcccgcccggttgtctcagccaatggcgagccgactg

SEQ ID NO: 425377 - DNA, 55 bp, Artificial
  Synthetic oligonucleotide
ggctggagtcgcatttcaaggcctacaacctttggaacacgtagtggtgtcagag

SEQ ID NO: 425378 - DNA, 60 bp, Artificial
  Synthetic oligonucleotide
ggctggagtggacactggcagtggagttacaaaagcctgcccctacaacagtggctcgtc

SEQ ID NO: 425379 - DNA, 55 bp, Artificial
  Synthetic oligonucleotide
ggctggatctcctcatgaaatattcaatcgctgccgtgatggtatcattccactg

SEQ ID NO: 425380 - DNA, 52 bp, Artificial
  Synthetic oligonucleotide
ggctggatggctcctcgggaaccccatgtgtgatgaattcctcaatgtgcct

SEQ ID NO: 425381 - DNA, 55 bp, Artificial
  Synthetic oligonucleotide
ggctggattgattcgagaaaccaggaaaaggcagccatccaaacacttgtttcca

SEQ ID NO: 425382 - DNA, 60 bp, Artificial
  Synthetic oligonucleotide
ggctggcaaagaaaaggtcagtgtcagtcaaaattatcctatagtgcagaatctccaggg

SEQ ID NO: 425383 - DNA, 55 bp, Artificial
  Synthetic oligonucleotide
ggctggcaagtatgagaatcacacggagaacgcgttgttattgtatatggcgtgt

SEQ ID NO: 425384 - DNA, 60 bp, Artificial
  Synthetic oligonucleotide
ggctggcatgaatcgccggagaccgttcttaccgagaatctgcggggacatatagacgcc

SEQ ID NO: 425385 - DNA, 55 bp, Artificial
  Synthetic oligonucleotide
ggctggccacatgaaatcgtacgccattactaccacctctatcccttctacaccg

SEQ ID NO: 425386 - DNA, 55 bp, Artificial
  Synthetic oligonucleotide
ggctggccagatgtaccaatcccatcgcggtagttcggctagcttgtctgtcgac

SEQ ID NO: 425387 - DNA, 57 bp, Artificial
  Synthetic oligonucleotide
ggctggcctaaccaatggtgttcctgccactaggaaacgcacctcaggtggtccctc

SEQ ID NO: 425388 - DNA, 58 bp, Artificial
  Synthetic oligonucleotide
ggctggcgctcagttgagacctctggtgtcgctgaggaggaggctacttccggtctcg

SEQ ID NO: 425389 - DNA, 60 bp, Artificial
  Synthetic oligonucleotide
ggctggcgctgccttacacggctccacaccgtgtcttagcgaccgtctacaacgggagca

SEQ ID NO: 425390 - DNA, 55 bp, Artificial
  Synthetic oligonucleotide
ggctggcggtgtcagttacgggaacatggctggagtggccctcatcttctacacg

SEQ ID NO: 425391 - DNA, 56 bp, Artificial
  Synthetic oligonucleotide
ggctggctgtggccacgtatgcacaatgtgctctgcaaccgtcatgcccaactgcg

SEQ ID NO: 425392 - DNA, 56 bp, Artificial
  Synthetic oligonucleotide
ggctgggaactatgaaaaagtggtttaacgctagagctcactacgaggccgctaaa

SEQ ID NO: 425393 - DNA, 58 bp, Artificial
  Synthetic oligonucleotide
ggctgggaccaggaaaggttcaaaatgcataagatcctcaagtcacaaggaaatgttc

SEQ ID NO: 425394 - DNA, 55 bp, Artificial
  Synthetic oligonucleotide
ggctgggagacactgttgccgagtcagaggcggtcgagataaccattagtccggt

SEQ ID NO: 425395 - DNA, 55 bp, Artificial
  Synthetic oligonucleotide
ggctgggatcgcctgttggagtcactaccggatggttgggtttactgcgacgcgg

SEQ ID NO: 425396 - DNA, 56 bp, Artificial
  Synthetic oligonucleotide
ggctgggattcatcatgtgggcttgccagaaaggcaacattaggtgcaacatttgc

SEQ ID NO: 425397 - DNA, 55 bp, Artificial
  Synthetic oligonucleotide
ggctgggcaaaccatagcctcattccaacaacacgccgtcatgctgtacggaaca

SEQ ID NO: 425398 - DNA, 60 bp, Artificial
  Synthetic oligonucleotide
ggctgggcagatgagtactgtactgccaagcactgggacaggcccactcgcacccactac

SEQ ID NO: 425399 - DNA, 56 bp, Artificial
  Synthetic oligonucleotide
ggctgggccaactaagagggttgctactaccatcttttctaacacaacggatagga

SEQ ID NO: 425400 - DNA, 55 bp, Artificial
  Synthetic oligonucleotide
ggctgggcctttgacaatggagatgacgtgtggatgggaagaacgatcagcaagg

SEQ ID NO: 425401 - DNA, 55 bp, Artificial
  Synthetic oligonucleotide
ggctgggcgagaggtctgattctgagtctcaactaactctcctacaggtttgcga

SEQ ID NO: 425402 - DNA, 55 bp, Artificial
  Synthetic oligonucleotide
ggctggggagcaacacacagttttgcgtaaaagtcctcaacccttacatgccatc

SEQ ID NO: 425403 - DNA, 59 bp, Artificial
  Synthetic oligonucleotide
ggctggggccctatcagtcatgctagtgggagtacctccgaccaacgcccctactgctg

SEQ ID NO: 425404 - DNA, 59 bp, Artificial
  Synthetic oligonucleotide
ggctggggcgagcgtcgaatttcgtattgggtcacgtcagacgcgaaattgatccgcaa

SEQ ID NO: 425405 - DNA, 54 bp, Artificial
  Synthetic oligonucleotide
ggctggggtatggtatggcgggaggagtagtttacataggggtcataggttagg

SEQ ID NO: 425406 - DNA, 55 bp, Artificial
  Synthetic oligonucleotide
ggctgggtaccaactccccgcgagacttggaagagaggcgcaagctcatgatggc

SEQ ID NO: 425407 - DNA, 55 bp, Artificial
  Synthetic oligonucleotide
ggctgggtccctcagaagtggcgtggtagtaggatgaggactggtgtactcttcc

SEQ ID NO: 425408 - DNA, 53 bp, Artificial
  Synthetic oligonucleotide
ggctgggtctttgttcaacctaccccgcggactccccttcacggagctggact

SEQ ID NO: 425409 - DNA, 56 bp, Artificial
  Synthetic oligonucleotide
ggctgggttatggtatggcgggaggagtagtttacataggggtcataggtgaggac

SEQ ID NO: 425410 - DNA, 55 bp, Artificial
  Synthetic oligonucleotide
ggctggtaccacgtcacgaagggcacccgcccaatgatgtggctcgaatcatggg

SEQ ID NO: 425411 - DNA, 54 bp, Artificial
  Synthetic oligonucleotide
ggctggtacgtctatgattaccgtcccctcggggggcgtttgtgatattcttgg

SEQ ID NO: 425412 - DNA, 55 bp, Artificial
  Synthetic oligonucleotide
ggctggtataaagacatgtttgtggtaccaaaggaaaagcggtgacgtgactacc

SEQ ID NO: 425413 - DNA, 55 bp, Artificial
  Synthetic oligonucleotide
ggctggtattgtgatcgttgtagacctgtatacgaaactgagttgagagacgcgc

SEQ ID NO: 425414 - DNA, 55 bp, Artificial
  Synthetic oligonucleotide
ggctggtcaaacccttgcatgctttcagcacagaatactggtggaatttagccct

SEQ ID NO: 425415 - DNA, 59 bp, Artificial
  Synthetic oligonucleotide
ggctggtcaatgccgacaggttgatatctagcaaaactggccatttgtacatacctgac

SEQ ID NO: 425416 - DNA, 55 bp, Artificial
  Synthetic oligonucleotide
ggctggtcaccgtacctcccagtccgatagcgcttccggtcaacgactcttccct

SEQ ID NO: 425417 - DNA, 56 bp, Artificial
  Synthetic oligonucleotide
ggctggtcatccgacccttttgagagagtctcctttctggttgaagacttaaacgc

SEQ ID NO: 425418 - DNA, 60 bp, Artificial
  Synthetic oligonucleotide
ggctggtcatttgctagacatactcaaggaatgtcctaggacaatgcattcatatgtacc

SEQ ID NO: 425419 - DNA, 60 bp, Artificial
  Synthetic oligonucleotide
ggctggtccgctccgcaaggtacccgctcattgacaccttgcacctgcggctcctcggac

SEQ ID NO: 425420 - DNA, 50 bp, Artificial
  Synthetic oligonucleotide
ggctggtcctcccgagatggcggcgtccttggaagatgtccacttggaag

SEQ ID NO: 425421 - DNA, 53 bp, Artificial
  Synthetic oligonucleotide
ggctggtctagaaggcgggttcggtgttcgggagtccggtgcacgttcgcggt

SEQ ID NO: 425422 - DNA, 55 bp, Artificial
  Synthetic oligonucleotide
ggctggtctccaacagtcaacaccggccttggtgatggacccgtttcctcctctc

SEQ ID NO: 425423 - DNA, 60 bp, Artificial
  Synthetic oligonucleotide
ggctggtgaaagggctacaaccattcggctcgtgtccaagatgtgcgctcgtggggccta

SEQ ID NO: 425424 - DNA, 55 bp, Artificial
  Synthetic oligonucleotide
ggctggtgagcatgatgattgccatggaggtggtgttgcgcagaaggcaaggacc

SEQ ID NO: 425425 - DNA, 60 bp, Artificial
  Synthetic oligonucleotide
ggctggtgcacaggcaatggttcctagacctgccattaccatggctacccggagcggaca

SEQ ID NO: 425426 - DNA, 54 bp, Artificial
  Synthetic oligonucleotide
ggctggtggaagccttagctaaacagctgggagaagtcagccatttcaccatgg

SEQ ID NO: 425427 - DNA, 55 bp, Artificial
  Synthetic oligonucleotide
ggctggtggttggaatgcatttcatattgacattccatcaagtggagtatgtcag

SEQ ID NO: 425428 - DNA, 56 bp, Artificial
  Synthetic oligonucleotide
ggctggtgtacgacactactcccggcggaaacgcacccaccaccaaagatatcttc

SEQ ID NO: 425429 - DNA, 55 bp, Artificial
  Synthetic oligonucleotide
ggctggtgtgtggtgctcccccgtgacggggggggccgtaagcgcaaggcagacg

SEQ ID NO: 425430 - DNA, 55 bp, Artificial
  Synthetic oligonucleotide
ggctggtgttttacgataaacaatcctacggaagatgactctctggtagccctcg

SEQ ID NO: 425431 - DNA, 55 bp, Artificial
  Synthetic oligonucleotide
ggctggttagaaagattgggacagaggaaaaggattacgtattcacaagaggttc

SEQ ID NO: 425432 - DNA, 60 bp, Artificial
  Synthetic oligonucleotide
ggctggttgacagtgtcagtgacagcttcttccccggcctgtctgtctgtaagacatgct

SEQ ID NO: 425433 - DNA, 55 bp, Artificial
  Synthetic oligonucleotide
ggctggttgcttacttcccatggtatcattaggcacccctaccttttgtatgcga

SEQ ID NO: 425434 - DNA, 55 bp, Artificial
  Synthetic oligonucleotide
ggctggtttaagacaaaagtctctatagatctggacaacacatgtgaggatctac

SEQ ID NO: 425435 - DNA, 55 bp, Artificial
  Synthetic oligonucleotide
ggctggtttgaagtcccttcacctaagccttgccgcggttttcgatcgtgtgctg

SEQ ID NO: 425436 - DNA, 55 bp, Artificial
  Synthetic oligonucleotide
ggctggtttggctgctaaaggccattgaaattggtagaggaggcccattaggtgt

SEQ ID NO: 425437 - DNA, 53 bp, Artificial
  Synthetic oligonucleotide
ggctggtttgttgtcccattttttgggagtgggcggtacaattcattttgtgg

SEQ ID NO: 425438 - DNA, 55 bp, Artificial
  Synthetic oligonucleotide
ggctgtaaacaaataatgaaacagctacacccagctcctcagacagggacagagg

SEQ ID NO: 425439 - DNA, 55 bp, Artificial
  Synthetic oligonucleotide
ggctgtaaacaaatcatggaacagctacaaccagctattaagacaggatcagagg

SEQ ID NO: 425440 - DNA, 59 bp, Artificial
  Synthetic oligonucleotide
ggctgtaaacagatactaagtcagctacaaccagctcttaagacaggaacagaggaact

SEQ ID NO: 425441 - DNA, 58 bp, Artificial
  Synthetic oligonucleotide
ggctgtaacatggtggaacaggaacggaccaacaacaagcactgtccactatcccaag

SEQ ID NO: 425442 - DNA, 60 bp, Artificial
  Synthetic oligonucleotide
ggctgtaaccgctgtggtgtgcggcccggatatgattcaagtatcgttgaatgctggtgc

SEQ ID NO: 425443 - DNA, 55 bp, Artificial
  Synthetic oligonucleotide
ggctgtaagtgcccatcgtttcagtgatttgagcatgtctcatgagtgactgtaa

SEQ ID NO: 425444 - DNA, 55 bp, Artificial
  Synthetic oligonucleotide
ggctgtaatggaggtggaatctgtaaatgtagcacccaatgtttctgcccgcaga

SEQ ID NO: 425445 - DNA, 55 bp, Artificial
  Synthetic oligonucleotide
ggctgtaatttttagggacaggaatacatgccaaacttacaccttatcacaagtg

SEQ ID NO: 425446 - DNA, 55 bp, Artificial
  Synthetic oligonucleotide
ggctgtacatttgccgcggagacggggattgctctctattcgctgcatgaccttt

SEQ ID NO: 425447 - DNA, 55 bp, Artificial
  Synthetic oligonucleotide
ggctgtacccacggctgaaactctatgatccgttatccggtatggtactgcgaga

SEQ ID NO: 425448 - DNA, 55 bp, Artificial
  Synthetic oligonucleotide
ggctgtacccagcttagtaatttagatagtgtcatagaagcccttaatcatcgct

SEQ ID NO: 425449 - DNA, 55 bp, Artificial
  Synthetic oligonucleotide
ggctgtacccgggcggtcccactcttcacaggaatctgcacaggtggctttcacc

SEQ ID NO: 425450 - DNA, 55 bp, Artificial
  Synthetic oligonucleotide
ggctgtacgttgtggccctgtaataccagccgtcaagcatcatttcaacttcaag

SEQ ID NO: 425451 - DNA, 59 bp, Artificial
  Synthetic oligonucleotide
ggctgtactgcggcggccccatgtacaactcacggggccaactctgcggaatacgcagg

SEQ ID NO: 425452 - DNA, 55 bp, Artificial
  Synthetic oligonucleotide
ggctgtacttagactgaaagtctgtcgcgagatagaagagagcgcgtcgtgcccc

SEQ ID NO: 425453 - DNA, 55 bp, Artificial
  Synthetic oligonucleotide
ggctgtagacaaataatggaacaactacaaccatcccttaagacaggatcagagg

SEQ ID NO: 425454 - DNA, 55 bp, Artificial
  Synthetic oligonucleotide
ggctgtaggaacgatggatacaccgagtaggtatgccataactattgtgtccgga

SEQ ID NO: 425455 - DNA, 55 bp, Artificial
  Synthetic oligonucleotide
ggctgtaggcgcgtcaaagcgggcggtaggccgtgggcggtacatctcctagtct

SEQ ID NO: 425456 - DNA, 55 bp, Artificial
  Synthetic oligonucleotide
ggctgtatcatttggtccggtctgcctggattttgcaggcaccaaaggagtctct

SEQ ID NO: 425457 - DNA, 59 bp, Artificial
  Synthetic oligonucleotide
ggctgtatcttcggctccacaggtttactcaccaatcgatggcaacggaaatacttcca

SEQ ID NO: 425458 - DNA, 56 bp, Artificial
  Synthetic oligonucleotide
ggctgtattggtagtccttaaattcattgcaaatattctccacacaaattcccaag

SEQ ID NO: 425459 - DNA, 58 bp, Artificial
  Synthetic oligonucleotide
ggctgtcaaaatttatctaggcaagcgagagtcagaaattagtgaaggaaagccttct

SEQ ID NO: 425460 - DNA, 59 bp, Artificial
  Synthetic oligonucleotide
ggctgtcaacgcctactcctctggcgggtacgcgcagctggcctcctacttcaaccctg

SEQ ID NO: 425461 - DNA, 55 bp, Artificial
  Synthetic oligonucleotide
ggctgtcaagataaccagagggcatatgcacccgcgctggatttgctaacgatac

SEQ ID NO: 425462 - DNA, 55 bp, Artificial
  Synthetic oligonucleotide
ggctgtcacagaagaaatacaaaccattcagagatacatcatcatggaaggtttc

SEQ ID NO: 425463 - DNA, 55 bp, Artificial
  Synthetic oligonucleotide
ggctgtcaccggccatgtatatactgatgaaaccaagagtggttcaccaccaccg

SEQ ID NO: 425464 - DNA, 54 bp, Artificial
  Synthetic oligonucleotide
ggctgtcccgagaggttagccagctgccgaccccttaccgattttgaccagggg

SEQ ID NO: 425465 - DNA, 60 bp, Artificial
  Synthetic oligonucleotide
ggctgtcctgagaggttggctagctgccgacgcctcaccgattatgcccagggctggggc

SEQ ID NO: 425466 - DNA, 55 bp, Artificial
  Synthetic oligonucleotide
ggctgtcctggaaaaggatgctgccgtgacggttgattaccttctcggaagcccg

SEQ ID NO: 425467 - DNA, 55 bp, Artificial
  Synthetic oligonucleotide
ggctgtcgacaaataataggacaactacagtcagcccttcaaacaggaacagaag

SEQ ID NO: 425468 - DNA, 52 bp, Artificial
  Synthetic oligonucleotide
ggctgtcgatagaagggcccgtgtcagggcttgttcggtgagacaccaccgt

SEQ ID NO: 425469 - DNA, 60 bp, Artificial
  Synthetic oligonucleotide
ggctgtcgtaataatggatgatctccaccagaatccggacggcaaggacatgagtttgtt

SEQ ID NO: 425470 - DNA, 55 bp, Artificial
  Synthetic oligonucleotide
ggctgtcgttttggatcaggggacacacaaagtctatggcaatcggtggaatggg

SEQ ID NO: 425471 - DNA, 57 bp, Artificial
  Synthetic oligonucleotide
ggctgtctgcctttgtatgggagaggttctttagttcagacctgttgttgttaacaa

SEQ ID NO: 425472 - DNA, 55 bp, Artificial
  Synthetic oligonucleotide
ggctgtctgttgccctcctcttgctgaccttccgtcgatctgaaactctccccac

SEQ ID NO: 425473 - DNA, 53 bp, Artificial
  Synthetic oligonucleotide
ggctgtgaaaagaatgcaacatcacctattgatgcaaaaccataatagggaat

SEQ ID NO: 425474 - DNA, 55 bp, Artificial
  Synthetic oligonucleotide
ggctgtgaaccgttctgcaacaaaaggggtgacacttcttctcccagaaccggag

SEQ ID NO: 425475 - DNA, 55 bp, Artificial
  Synthetic oligonucleotide
ggctgtgaagcagcaggactacagttgggaattgcattaacacaacattactcag

SEQ ID NO: 425476 - DNA, 60 bp, Artificial
  Synthetic oligonucleotide
ggctgtgaaggcccatgtaaggttcaatcatatgaacagcgtcatgatgtggcccatgtc

SEQ ID NO: 425477 - DNA, 60 bp, Artificial
  Synthetic oligonucleotide
ggctgtgagagctcaatgggtgcaccggctaatttctagagaggagcgtgaattcagaat

SEQ ID NO: 425478 - DNA, 55 bp, Artificial
  Synthetic oligonucleotide
ggctgtgagggtccatgtaaggtccagtcttttgagtccagacacgacgtagtgc

SEQ ID NO: 425479 - DNA, 55 bp, Artificial
  Synthetic oligonucleotide
ggctgtgagggtgacgaagagcgcattcttaatggtccagttgtgtaaagctcgg

SEQ ID NO: 425480 - DNA, 60 bp, Artificial
  Synthetic oligonucleotide
ggctgtgagtgcggccgtcgctcttgtgatcactgacaggttgcaggcgtacagtcagtc

SEQ ID NO: 425481 - DNA, 55 bp, Artificial
  Synthetic oligonucleotide
ggctgtgcaccttgcttaggagaacattgggataaagctatcccatgtgcaactg

SEQ ID NO: 425482 - DNA, 54 bp, Artificial
  Synthetic oligonucleotide
ggctgtgcacgagagagccttatcaaccagtgccgagtttatgcagatcagtga

SEQ ID NO: 425483 - DNA, 60 bp, Artificial
  Synthetic oligonucleotide
ggctgtgcagcggatagtcatggtaggctggtgtgggttgcagatggatcagaaggtagt

SEQ ID NO: 425484 - DNA, 55 bp, Artificial
  Synthetic oligonucleotide
ggctgtgcctggacttgattcgtcatggatcttgcgaggtcggatatcattccgc

SEQ ID NO: 425485 - DNA, 56 bp, Artificial
  Synthetic oligonucleotide
ggctgtgcgttttaccacgtgtgaaggcatgcccagtaattctctcaccgggcaga

SEQ ID NO: 425486 - DNA, 58 bp, Artificial
  Synthetic oligonucleotide
ggctgtggaaagctacctaagggatcaacagctcctaggaacttggggttgctctgga

SEQ ID NO: 425487 - DNA, 55 bp, Artificial
  Synthetic oligonucleotide
ggctgtggaccttcttggcaagaaacaagcgaccacgcatgtgcaccagagagga

SEQ ID NO: 425488 - DNA, 55 bp, Artificial
  Synthetic oligonucleotide
ggctgtggctcagtgtggtctcgttttgaatgcgggtgtacccatactcgaaagc

SEQ ID NO: 425489 - DNA, 52 bp, Artificial
  Synthetic oligonucleotide
ggctgtggctgagagattctttatttcatacatcaatggtaactctttagca

SEQ ID NO: 425490 - DNA, 60 bp, Artificial
  Synthetic oligonucleotide
ggctgtggtacagtcactcaggtgatgattggagagcacgtagatgcatcccttccagtg

SEQ ID NO: 425491 - DNA, 55 bp, Artificial
  Synthetic oligonucleotide
ggctgtggtagatttgagtcaaccaatgcttaagtttctcaaggacgtgttctta

SEQ ID NO: 425492 - DNA, 55 bp, Artificial
  Synthetic oligonucleotide
ggctgtgtccggggttccgaaagacaagaaagacttccatcgtggcctcactaac

SEQ ID NO: 425493 - DNA, 55 bp, Artificial
  Synthetic oligonucleotide
ggctgtgtgaacgttgcagcaacctcctcctttgttctacctcggaggtttgggt

SEQ ID NO: 425494 - DNA, 60 bp, Artificial
  Synthetic oligonucleotide
ggctgtgttcctcacgtgctaccatacaaagctgtgacagcccatggctactgcggctct

SEQ ID NO: 425495 - DNA, 55 bp, Artificial
  Synthetic oligonucleotide
ggctgtgtttacatcgcatatcatcaccccttagagactgacacccttttcatca

SEQ ID NO: 425496 - DNA, 59 bp, Artificial
  Synthetic oligonucleotide
ggctgttaacggttatacctaatgatatgtttatacgtgaatctttagtggcatgtcag

SEQ ID NO: 425497 - DNA, 55 bp, Artificial
  Synthetic oligonucleotide
ggctgttactcctgtgattatggggctagagtatgtgttagagtcaatgcagaca

SEQ ID NO: 425498 - DNA, 56 bp, Artificial
  Synthetic oligonucleotide
ggctgttaggttattaagttcaagggctagtaacatgggagctttgagtactcaag

SEQ ID NO: 425499 - DNA, 56 bp, Artificial
  Synthetic oligonucleotide
ggctgttattaacaagagatggggggaatgggaacgagactgagaacgggactgaa

SEQ ID NO: 425500 - DNA, 59 bp, Artificial
  Synthetic oligonucleotide
ggctgttcaccataagacaggaaatggccagcaggggtctgtgggattcctttcgtcag

SEQ ID NO: 425501 - DNA, 55 bp, Artificial
  Synthetic oligonucleotide
ggctgttcccacggctgaaagggtgaacatccgttacccgcctcagtacttcgag

SEQ ID NO: 425502 - DNA, 60 bp, Artificial
  Synthetic oligonucleotide
ggctgttcgagagtcgtacgatccttccactcttgggtacgatcttcttagcgatctcat

SEQ ID NO: 425503 - DNA, 60 bp, Artificial
  Synthetic oligonucleotide
ggctgttgattcatatgaaaacctactcgtcacagagaatgagcaaatgcgtacgttggc

SEQ ID NO: 425504 - DNA, 60 bp, Artificial
  Synthetic oligonucleotide
ggctgttgcacaaaacgcctatgtgtgagggcagttatggcacggcataacgctcacaca

SEQ ID NO: 425505 - DNA, 56 bp, Artificial
  Synthetic oligonucleotide
ggctgttggaacaattaggggttatgcaatatcctctagtagaacgtaatggaaaa

SEQ ID NO: 425506 - DNA, 56 bp, Artificial
  Synthetic oligonucleotide
ggctgttggacatatatagaccagtacctaagaaatttcctaaatggtaatccatg

SEQ ID NO: 425507 - DNA, 55 bp, Artificial
  Synthetic oligonucleotide
ggctgttggagggattctaatctttctagcgaccagcgtgcaagctgattcggga

SEQ ID NO: 425508 - DNA, 60 bp, Artificial
  Synthetic oligonucleotide
ggctgttggcaaagccactcggccaaagcatgatctccattgaaaaccgtataatgcaat

SEQ ID NO: 425509 - DNA, 50 bp, Artificial
  Synthetic oligonucleotide
ggctgttggtacagccagctggccaaagcatgatcttcattgaaaaccgt

SEQ ID NO: 425510 - DNA, 52 bp, Artificial
  Synthetic oligonucleotide
ggctgttgtcagtgcattgaaaagaggcatgtatgctatagcaagcatagag

SEQ ID NO: 425511 - DNA, 55 bp, Artificial
  Synthetic oligonucleotide
ggctgttgtctgatgttaaccaggacatagaagagactagtgacgtcttgatgtc

SEQ ID NO: 425512 - DNA, 54 bp, Artificial
  Synthetic oligonucleotide
ggctgtttaggatttggttctaggtgtatcaaataggggttgaggtgttaggcg

SEQ ID NO: 425513 - DNA, 55 bp, Artificial
  Synthetic oligonucleotide
ggctgtttgaaaacgggaaggagcgccttggtaggatggcagttagcggtgacga

SEQ ID NO: 425514 - DNA, 55 bp, Artificial
  Synthetic oligonucleotide
ggctgtttggaggtgttaaaagtacatccagagacaccagtacaagcaattgcag

SEQ ID NO: 425515 - DNA, 55 bp, Artificial
  Synthetic oligonucleotide
ggctgtttggcactttgctatggactttagtcttgcctatccaatctgtgttatg

SEQ ID NO: 425516 - DNA, 54 bp, Artificial
  Synthetic oligonucleotide
ggctgtttggcttcctgcccagaataagttttaccttcctacccaaccgatcac

SEQ ID NO: 425517 - DNA, 55 bp, Artificial
  Synthetic oligonucleotide
ggcttaaaactgagcatgaaggtttcctgaatatgatttgccttaaggctaaagt

SEQ ID NO: 425518 - DNA, 55 bp, Artificial
  Synthetic oligonucleotide
ggcttaaagaaatcaggctctagcgcgttgtttgcattgtacaagctaggcgtgg

SEQ ID NO: 425519 - DNA, 52 bp, Artificial
  Synthetic oligonucleotide
ggcttaaagtttattgcggagacccttgcctttaactttggttcacctagga

SEQ ID NO: 425520 - DNA, 60 bp, Artificial
  Synthetic oligonucleotide
ggcttaacagttgaccaatcaactgttggtgcaagtggagtttatccttcattcatgtca

SEQ ID NO: 425521 - DNA, 52 bp, Artificial
  Synthetic oligonucleotide
ggcttaaccctactgtactaaccgaactagataacggtgcagtaggggtaaa

SEQ ID NO: 425522 - DNA, 60 bp, Artificial
  Synthetic oligonucleotide
ggcttaacgccgcatgcaattggactcgaggagagcgttgcagtttggaggacagggata

SEQ ID NO: 425523 - DNA, 58 bp, Artificial
  Synthetic oligonucleotide
ggcttaacgccgcttgcaactggacccgaggagagcgttgtgacttggaggacaggga

SEQ ID NO: 425524 - DNA, 55 bp, Artificial
  Synthetic oligonucleotide
ggcttaacgtatgcgtgaaccaaagaagttctccttagagtgtgtgttgtttacc

SEQ ID NO: 425525 - DNA, 60 bp, Artificial
  Synthetic oligonucleotide
ggcttaagacacaaagtgcgtgtgatcaactctggttcgttgggagcactgaccaacgtg

SEQ ID NO: 425526 - DNA, 54 bp, Artificial
  Synthetic oligonucleotide
ggcttaagatttatgacagttgataacccataccccatgggtttcctaccaaaa

SEQ ID NO: 425527 - DNA, 55 bp, Artificial
  Synthetic oligonucleotide
ggcttaagcttgtgactggctatagacctttcgttcaccggaacaagcgccttgc

SEQ ID NO: 425528 - DNA, 55 bp, Artificial
  Synthetic oligonucleotide
ggcttaagtgtggacgggtatttctacgcaggaacaggggcctcaaccacactca

SEQ ID NO: 425529 - DNA, 55 bp, Artificial
  Synthetic oligonucleotide
ggcttaataaggaggcttacaataaggatctattccagtacgcaacgcaaattcg

SEQ ID NO: 425530 - DNA, 50 bp, Artificial
  Synthetic oligonucleotide
ggcttaatgccggagcgtggaccaactggatgtatgcggtaaacgtcatg

SEQ ID NO: 425531 - DNA, 56 bp, Artificial
  Synthetic oligonucleotide
ggcttacaaagttttagtatcgataacacttctgactcacgaatagataaggtagg

SEQ ID NO: 425532 - DNA, 55 bp, Artificial
  Synthetic oligonucleotide
ggcttacaacagtgatagttcagacccggtgcctactaaagctggaatagtggag

SEQ ID NO: 425533 - DNA, 55 bp, Artificial
  Synthetic oligonucleotide
ggcttacaactttcccttaagtgcatagttggctgccttagtacattgtactgcc

SEQ ID NO: 425534 - DNA, 55 bp, Artificial
  Synthetic oligonucleotide
ggcttacactgctccaacttgtacgaggacgccccattctacacgtatggtgatg

SEQ ID NO: 425535 - DNA, 60 bp, Artificial
  Synthetic oligonucleotide
ggcttacagtcctcgggaaagatgcaggtgcattgaccgaagacccagatgaaggcactg

SEQ ID NO: 425536 - DNA, 55 bp, Artificial
  Synthetic oligonucleotide
ggcttacagtcctcgggaaagatgcgggtgcattaactgaagacccggacgaagg

SEQ ID NO: 425537 - DNA, 58 bp, Artificial
  Synthetic oligonucleotide
ggcttacatgtccaaagcacacgggatcaatcccaacatcagaactggggttcgaacc

SEQ ID NO: 425538 - DNA, 59 bp, Artificial
  Synthetic oligonucleotide
ggcttacccaatgtacaaacttgcagtttacaagatattgtagattgcgatttgtcgaa

SEQ ID NO: 425539 - DNA, 58 bp, Artificial
  Synthetic oligonucleotide
ggcttacccatcgcctgggtaagcgtgtttgtgtgaagtccatgggtatagatggtaa

SEQ ID NO: 425540 - DNA, 55 bp, Artificial
  Synthetic oligonucleotide
ggcttacccggcactggcaaatctcgccgttgcatgaagatgactgaacgattac

SEQ ID NO: 425541 - DNA, 52 bp, Artificial
  Synthetic oligonucleotide
ggcttacccttaaagttaaacttgattacccagtgatgaactagcttaaccc

SEQ ID NO: 425542 - DNA, 55 bp, Artificial
  Synthetic oligonucleotide
ggcttacctcttgtaaacattttacgattgaaaatcttattcacactagtcctaa

SEQ ID NO: 425543 - DNA, 60 bp, Artificial
  Synthetic oligonucleotide
ggcttacgctgtcacttagtgattacaccgaccgctgatatccaaggtaaacctgctgct

SEQ ID NO: 425544 - DNA, 55 bp, Artificial
  Synthetic oligonucleotide
ggcttacggtaggtggccatctggcctgagggatactgacgccaccgctgttgac

SEQ ID NO: 425545 - DNA, 58 bp, Artificial
  Synthetic oligonucleotide
ggcttagaaatggctattcattgactgaagaacaagaaacaatggtaaaagatctaga

SEQ ID NO: 425546 - DNA, 53 bp, Artificial
  Synthetic oligonucleotide
ggcttagatacgtgctaaacgatccggtcaagtttgtggccaaagacgtcgcc

SEQ ID NO: 425547 - DNA, 55 bp, Artificial
  Synthetic oligonucleotide
ggcttagcactccagctaagtctcgatcaagcacttctgttaccccggaccgagt

SEQ ID NO: 425548 - DNA, 58 bp, Artificial
  Synthetic oligonucleotide
ggcttagctgtacacatgacgtactactcagtttcgtcggtcaagcaacctatcaatg

SEQ ID NO: 425549 - DNA, 56 bp, Artificial
  Synthetic oligonucleotide
ggcttaggacagtacatctataacaattatggggatacttgggaaggggttgaagc

SEQ ID NO: 425550 - DNA, 55 bp, Artificial
  Synthetic oligonucleotide
ggcttaggcatctcctatggcaggaagaagcggagacaacatcgaggaccttctc

SEQ ID NO: 425551 - DNA, 58 bp, Artificial
  Synthetic oligonucleotide
ggcttaggcatttcctatggcaggaagaagcggagacagagacgcagcgctcctccac

SEQ ID NO: 425552 - DNA, 55 bp, Artificial
  Synthetic oligonucleotide
ggcttagggaaaacatccataggcctactctgcgtgacgtcctcaagtgcactgt

SEQ ID NO: 425553 - DNA, 55 bp, Artificial
  Synthetic oligonucleotide
ggcttagggctgctaaagaggataggcgcagggaacatttggctttcctgcgcaa

SEQ ID NO: 425554 - DNA, 53 bp, Artificial
  Synthetic oligonucleotide
ggcttaggggccgaacctcccatagatagaaagacgtccaggtacttgacgac

SEQ ID NO: 425555 - DNA, 60 bp, Artificial
  Synthetic oligonucleotide
ggcttaggtccaaatgtccgcatagataattgtgttggcccagagatctagcccacatcg

SEQ ID NO: 425556 - DNA, 55 bp, Artificial
  Synthetic oligonucleotide
ggcttagtagactacatgaacgctaagaaaatggactctagctacagtaacagag

SEQ ID NO: 425557 - DNA, 59 bp, Artificial
  Synthetic oligonucleotide
ggcttagtcgttgcatcgggagatgacagtttgatcggtacgattaaacatcttttgcc

SEQ ID NO: 425558 - DNA, 55 bp, Artificial
  Synthetic oligonucleotide
ggcttagtgcgtcaccacccacgtgacccgcctccgccaattaacaggtacttcg

SEQ ID NO: 425559 - DNA, 59 bp, Artificial
  Synthetic oligonucleotide
ggcttagtgcgtctccccttgtcccgaaactccaatcatgagatgtactgggtgagtgg

SEQ ID NO: 425560 - DNA, 53 bp, Artificial
  Synthetic oligonucleotide
ggcttagttacataactgaattctcagtcggacattcacttggtgactctttc

SEQ ID NO: 425561 - DNA, 55 bp, Artificial
  Synthetic oligonucleotide
ggcttagttatttaactttacttatcaagatggccgttggcagccccacgaaatc

SEQ ID NO: 425562 - DNA, 57 bp, Artificial
  Synthetic oligonucleotide
ggcttagttgccctttcgggcaagttaggagagcgaaatgactcagcccgatgtttc

SEQ ID NO: 425563 - DNA, 55 bp, Artificial
  Synthetic oligonucleotide
ggcttataactatgagcccgagcagttgaataagagtgaccccgagatgaattac

SEQ ID NO: 425564 - DNA, 55 bp, Artificial
  Synthetic oligonucleotide
ggcttataatgaaacgaaggtatccaagagccagtgctgaggacatatggcggca

SEQ ID NO: 425565 - DNA, 57 bp, Artificial
  Synthetic oligonucleotide
ggcttataatggctactggggaacgcctatatgcagatacaagggagcagagtttcc

SEQ ID NO: 425566 - DNA, 55 bp, Artificial
  Synthetic oligonucleotide
ggcttatagagacttcgaacggaagatacgcagtgttagcgctggacgcgcactg

SEQ ID NO: 425567 - DNA, 55 bp, Artificial
  Synthetic oligonucleotide
ggcttatagcactctaaaagcggtcatgggcgttcgaagtgcctcacttgactgg

SEQ ID NO: 425568 - DNA, 59 bp, Artificial
  Synthetic oligonucleotide
ggcttatatagtgatggtatagatttaaagaaatcagtccaagcatctaagggattcac

SEQ ID NO: 425569 - DNA, 59 bp, Artificial
  Synthetic oligonucleotide
ggcttatccctcactggtggaattcctgttgtccaaagttactataatatgatgattcg

SEQ ID NO: 425570 - DNA, 57 bp, Artificial
  Synthetic oligonucleotide
ggcttatcggggtcgagtcagaactggttcaaaaccaattactatcatgacatatgg

SEQ ID NO: 425571 - DNA, 55 bp, Artificial
  Synthetic oligonucleotide
ggcttatctgtggacgaactgacagaaacacaggaagacgagccacaagaaacag

SEQ ID NO: 425572 - DNA, 52 bp, Artificial
  Synthetic oligonucleotide
ggcttatgaatccagatcaaaacctggaggattcattaagcagaagggccag

SEQ ID NO: 425573 - DNA, 52 bp, Artificial
  Synthetic oligonucleotide
ggcttatgataataatctgctggaagaatgtgatattgcgtatcattatgct

SEQ ID NO: 425574 - DNA, 60 bp, Artificial
  Synthetic oligonucleotide
ggcttatgatagtctgtgatttgtaaagcaactctcaatgccatatatgccaacacttga

SEQ ID NO: 425575 - DNA, 55 bp, Artificial
  Synthetic oligonucleotide
ggcttatgcagggactgtacgagagaagtgaaacagaacttcagagacacggagg

SEQ ID NO: 425576 - DNA, 55 bp, Artificial
  Synthetic oligonucleotide
ggcttatgcctctatcgacctgaccatccctatctttgctgcaaccgacgacgtg

SEQ ID NO: 425577 - DNA, 55 bp, Artificial
  Synthetic oligonucleotide
ggcttatggccaacgccatttgctccgctgtccctgtgaattgggtccctaccgg

SEQ ID NO: 425578 - DNA, 53 bp, Artificial
  Synthetic oligonucleotide
ggcttatgggaaggtataacgggcatgggtggctggttaaaagaccaagtcct

SEQ ID NO: 425579 - DNA, 58 bp, Artificial
  Synthetic oligonucleotide
ggcttatggtgcgtgacccggattacagtctcagcaaagattgttacagcttagttca

SEQ ID NO: 425580 - DNA, 55 bp, Artificial
  Synthetic oligonucleotide
ggcttattaatccgtcaaacactttggatttatctggtttgcagccaactgagga

SEQ ID NO: 425581 - DNA, 52 bp, Artificial
  Synthetic oligonucleotide
ggcttattgaggtatgacaagctgtcagagcatcctgaggacaaaaggagaa

SEQ ID NO: 425582 - DNA, 54 bp, Artificial
  Synthetic oligonucleotide
ggcttatttataccctccgttatcttgggcacacacatcgagtacgtgtctaaa

SEQ ID NO: 425583 - DNA, 56 bp, Artificial
  Synthetic oligonucleotide
ggcttcaaataaagtgaaccgtggggctacagaaaaccgcctctgcgtctaccgca

SEQ ID NO: 425584 - DNA, 55 bp, Artificial
  Synthetic oligonucleotide
ggcttcaatcatgattggaacgatcaccgtaccacttgtatggaatgaatgcacc

SEQ ID NO: 425585 - DNA, 55 bp, Artificial
  Synthetic oligonucleotide
ggcttcacatgtccaatggttttacagtcgaacaagctttaggtatcgagaaggt

SEQ ID NO: 425586 - DNA, 60 bp, Artificial
  Synthetic oligonucleotide
ggcttcactttcaaaagaacaagtggatcatctgtcaagagagaggaagaattactcaca

SEQ ID NO: 425587 - DNA, 54 bp, Artificial
  Synthetic oligonucleotide
ggcttcagaagactgggaactcgattaaggttattgtgggtacggggatgtggt

SEQ ID NO: 425588 - DNA, 55 bp, Artificial
  Synthetic oligonucleotide
ggcttcaggcactcacccattgcctccgtctgcactaatgagaggaggagaggaa

SEQ ID NO: 425589 - DNA, 55 bp, Artificial
  Synthetic oligonucleotide
ggcttcagttaagagagatactgacagaacaatcagacctggttttgctatccgc

SEQ ID NO: 425590 - DNA, 55 bp, Artificial
  Synthetic oligonucleotide
ggcttcagttacattagcgggcaattcctctctctgtcccgttagtgggtgggct

SEQ ID NO: 425591 - DNA, 56 bp, Artificial
  Synthetic oligonucleotide
ggcttcatctctccgagccagtcttcgtcgtcatttgttaaaatgatggagggaat

SEQ ID NO: 425592 - DNA, 53 bp, Artificial
  Synthetic oligonucleotide
ggcttcatcttccggttcgactcggaggttttggactgtatccgtttgagggg

SEQ ID NO: 425593 - DNA, 53 bp, Artificial
  Synthetic oligonucleotide
ggcttcatggcccaagactctgtttaaatacttgtctgaagctaagtggttct

SEQ ID NO: 425594 - DNA, 55 bp, Artificial
  Synthetic oligonucleotide
ggcttccataggcacacatccataatggtgaagtacaagccaccaccaggatatg

SEQ ID NO: 425595 - DNA, 55 bp, Artificial
  Synthetic oligonucleotide
ggcttcccagtgaggccaggtgtacctctgagggtaatgacttacaaattggcag

SEQ ID NO: 425596 - DNA, 52 bp, Artificial
  Synthetic oligonucleotide
ggcttcccgaacgaattcgagaccgattcgcaagatgcatcggtgtcgtatg

SEQ ID NO: 425597 - DNA, 60 bp, Artificial
  Synthetic oligonucleotide
ggcttcccttctaagtcgatcaatgtgttgtcccaggctctcccaacaatctgagatctc

SEQ ID NO: 425598 - DNA, 59 bp, Artificial
  Synthetic oligonucleotide
ggcttccgcaggaagccttgcaatatatgggtttgtctaagacctgccgactctataaa

SEQ ID NO: 425599 - DNA, 58 bp, Artificial
  Synthetic oligonucleotide
ggcttcctgccaggaataatttgggcgctcaccaagtttaaatactcgccagcattcg

SEQ ID NO: 425600 - DNA, 55 bp, Artificial
  Synthetic oligonucleotide
ggcttcctgggtgggcaataatttagaggatcctgcggctagagatctagtagtt

SEQ ID NO: 425601 - DNA, 54 bp, Artificial
  Synthetic oligonucleotide
ggcttcgaaatttcttaccaagcctaaggtcccggatcatttcgagatcccaac

SEQ ID NO: 425602 - DNA, 55 bp, Artificial
  Synthetic oligonucleotide
ggcttcgagcttgaatgattccgtagcaatgaggcagacattcggtaacctatac

SEQ ID NO: 425603 - DNA, 55 bp, Artificial
  Synthetic oligonucleotide
ggcttcgatgagttcgagtacgcgggtgagcttgttgccggtggtgtttccaccc

SEQ ID NO: 425604 - DNA, 55 bp, Artificial
  Synthetic oligonucleotide
ggcttcgcccttttctatggcataggattctttaaatccattgctgaacgcatcg

SEQ ID NO: 425605 - DNA, 56 bp, Artificial
  Synthetic oligonucleotide
ggcttcgctcatttatagacaacttctcactaattcatattcggtagacttacatg

SEQ ID NO: 425606 - DNA, 55 bp, Artificial
  Synthetic oligonucleotide
ggcttcggaccatccagagtgggtgcgggccctagggaaatactatgcctcaggc

SEQ ID NO: 425607 - DNA, 55 bp, Artificial
  Synthetic oligonucleotide
ggcttcggccatcggttacatcctcctttatccttggcatcccatcacacggtgg

SEQ ID NO: 425608 - DNA, 55 bp, Artificial
  Synthetic oligonucleotide
ggcttcggccgtgccaacacccgttaaccactggaggcacacgtgctgcgaatca

SEQ ID NO: 425609 - DNA, 54 bp, Artificial
  Synthetic oligonucleotide
ggcttcggcctccattttaggccttccggactaccaaaatggcggattccgtga

SEQ ID NO: 425610 - DNA, 58 bp, Artificial
  Synthetic oligonucleotide
ggcttcggttgtatctccgctaggataccatctggacgacaggtactttgttgttcca

SEQ ID NO: 425611 - DNA, 55 bp, Artificial
  Synthetic oligonucleotide
ggcttcgtggaggtcaactcggtgtcctccggtagaaacgcgggcgagtagatgg

SEQ ID NO: 425612 - DNA, 60 bp, Artificial
  Synthetic oligonucleotide
ggcttcgttcgcaacccttcactccatctgtggatatgtctcaatcgcgcaaattcctca

SEQ ID NO: 425613 - DNA, 54 bp, Artificial
  Synthetic oligonucleotide
ggcttctacataaggtcggtacccctgaaatagggatcctgttcgcgtgcgtgg

SEQ ID NO: 425614 - DNA, 56 bp, Artificial
  Synthetic oligonucleotide
ggcttctatgacaaaattggcaaggccaccaagttctacagccaaatcaaagccct

SEQ ID NO: 425615 - DNA, 60 bp, Artificial
  Synthetic oligonucleotide
ggcttctcgtcatgtgtatgacaacgcggttgaggagctgaatgctcgttccaggcgtcc

SEQ ID NO: 425616 - DNA, 55 bp, Artificial
  Synthetic oligonucleotide
ggcttctctcacaaagaactagagacatatacattagcagaaggttgttggggac

SEQ ID NO: 425617 - DNA, 60 bp, Artificial
  Synthetic oligonucleotide
ggcttctgcgcttagcatggctttcaccaatttagtcgatactctcgccaacaccatcca

SEQ ID NO: 425618 - DNA, 55 bp, Artificial
  Synthetic oligonucleotide
ggcttctggcctcccggataccaccactcagaattcttttgttcgtggtatgggg

SEQ ID NO: 425619 - DNA, 55 bp, Artificial
  Synthetic oligonucleotide
ggcttcttagcacttttctgggtcgacctgcggaacctgtgcctcttcagttacc

SEQ ID NO: 425620 - DNA, 59 bp, Artificial
  Synthetic oligonucleotide
ggcttcttcaattagtagatctgcgtccgtaaggtcaataggtagtaatacgacgatgc

SEQ ID NO: 425621 - DNA, 55 bp, Artificial
  Synthetic oligonucleotide
ggcttcttcagaccctaccaagagtggaacagaaagcccctacccactatggatg

SEQ ID NO: 425622 - DNA, 55 bp, Artificial
  Synthetic oligonucleotide
ggcttcttccctgattggcaaaactacacagaagggccagggaccagattcccac

SEQ ID NO: 425623 - DNA, 55 bp, Artificial
  Synthetic oligonucleotide
ggcttcttgaatcgtatggtacttggtttatgtggttatacgggttcgcatggta

SEQ ID NO: 425624 - DNA, 54 bp, Artificial
  Synthetic oligonucleotide
ggcttctttcccagttcgctttagaagcctctctttgtaaatcttaagagcttg

SEQ ID NO: 425625 - DNA, 55 bp, Artificial
  Synthetic oligonucleotide
ggcttctttgatctacagacagttgctatcgaattcgtacgtaacaaacatctct

SEQ ID NO: 425626 - DNA, 55 bp, Artificial
  Synthetic oligonucleotide
ggcttctttgtgagtgtcggtagcattacatgaatactcacggacgcaagcacgc

SEQ ID NO: 425627 - DNA, 57 bp, Artificial
  Synthetic oligonucleotide
ggcttgaaaacacaaagaaagatttgtttggccagcctcaaactagtcctagtgtga

SEQ ID NO: 425628 - DNA, 55 bp, Artificial
  Synthetic oligonucleotide
ggcttgaaacacgaacaggttcacgttgcccagcgaacggttgtgcacgatcggt

SEQ ID NO: 425629 - DNA, 55 bp, Artificial
  Synthetic oligonucleotide
ggcttgaacgaccaaagcacgatcggtattgtgttgactactcgaagtgggactc

SEQ ID NO: 425630 - DNA, 55 bp, Artificial
  Synthetic oligonucleotide
ggcttgaactcggatgtcaacaaggcgctaaatgatatgaacatcgacatcaatc

SEQ ID NO: 425631 - DNA, 60 bp, Artificial
  Synthetic oligonucleotide
ggcttgaccccgagtaatgctttcaatccacggctgatgcgcagtaacgtcattttgatg

SEQ ID NO: 425632 - DNA, 60 bp, Artificial
  Synthetic oligonucleotide
ggcttgactagggtgccgtactttgtgcgcgcccaagggctcattcgtgcatgcatgctg

SEQ ID NO: 425633 - DNA, 55 bp, Artificial
  Synthetic oligonucleotide
ggcttgaggaccgcacgaaatttgtaatcactcagatactctttgcactcgccga

SEQ ID NO: 425634 - DNA, 53 bp, Artificial
  Synthetic oligonucleotide
ggcttgagttcgcgcaccgtcccggactcatggccaccctctcgtggaccatg

SEQ ID NO: 425635 - DNA, 55 bp, Artificial
  Synthetic oligonucleotide
ggcttgataactggcaaccctatactatatgactcacagacccaactcttaggca

SEQ ID NO: 425636 - DNA, 60 bp, Artificial
  Synthetic oligonucleotide
ggcttgatactcatgctgattcgagcgggtttcgtccgcctctactgcgctcaagcgctt

SEQ ID NO: 425637 - DNA, 55 bp, Artificial
  Synthetic oligonucleotide
ggcttgatcagtaagtagacgcctgaatccatgagcctcttgacaatgaactggt

SEQ ID NO: 425638 - DNA, 60 bp, Artificial
  Synthetic oligonucleotide
ggcttgatgcagggagagcagctaggttgtgctctgagaacaacactgcaaactttaaac

SEQ ID NO: 425639 - DNA, 52 bp, Artificial
  Synthetic oligonucleotide
ggcttgatggaggaggacgttttgaatgttcagactaacaatttcgtcattg

SEQ ID NO: 425640 - DNA, 55 bp, Artificial
  Synthetic oligonucleotide
ggcttgcacataataaccaagctaaatatgttagagaatgtgctatgatggttcg

SEQ ID NO: 425641 - DNA, 58 bp, Artificial
  Synthetic oligonucleotide
ggcttgcactgatggtacctcctacgaaacttggagaggcttcggtctcgaagagcgg

SEQ ID NO: 425642 - DNA, 59 bp, Artificial
  Synthetic oligonucleotide
ggcttgcactttcgtacgaacggccgactctgtgctgcttaatgattgtccgaccgtta

SEQ ID NO: 425643 - DNA, 55 bp, Artificial
  Synthetic oligonucleotide
ggcttgcagaacgactcctccggtcaaacgaaagtttgattagagctgtccactc

SEQ ID NO: 425644 - DNA, 55 bp, Artificial
  Synthetic oligonucleotide
ggcttgcagacatcttctattgaaggggcatggggttctggtgtaggctttacac

SEQ ID NO: 425645 - DNA, 55 bp, Artificial
  Synthetic oligonucleotide
ggcttgcagcgatcgaaccaagtcgtccctcacgggtagacaaatcccactcgcc

SEQ ID NO: 425646 - DNA, 60 bp, Artificial
  Synthetic oligonucleotide
ggcttgccccgtgctgctcaatataagcagctgctttgcgcctgtaaaacagtctctgct

SEQ ID NO: 425647 - DNA, 55 bp, Artificial
  Synthetic oligonucleotide
ggcttgcgaaaggcatgattgaaccagatatgtctgtgcgtcttaccgttggaca

SEQ ID NO: 425648 - DNA, 55 bp, Artificial
  Synthetic oligonucleotide
ggcttgcgtttatggaactctggactttgtgggataccctcgctttcctgctcct

SEQ ID NO: 425649 - DNA, 58 bp, Artificial
  Synthetic oligonucleotide
ggcttgctaggcatgtaacacaatgtcctagacggaaggagaaagtggaggaaaccga

SEQ ID NO: 425650 - DNA, 55 bp, Artificial
  Synthetic oligonucleotide
ggcttgctgcctctccaccacatcttgaccgagtcactggattcaatcaaataga

SEQ ID NO: 425651 - DNA, 55 bp, Artificial
  Synthetic oligonucleotide
ggcttgctgttgccagtggatatgatttcgaaagagaggggtattccctcgtagg

SEQ ID NO: 425652 - DNA, 55 bp, Artificial
  Synthetic oligonucleotide
ggcttgcttactgaccattccacataagatacctccatcctatcctctcagccaa

SEQ ID NO: 425653 - DNA, 55 bp, Artificial
  Synthetic oligonucleotide
ggcttgcttatgatcctgtatttgatggtgagaagtgggttaaaacggttgagcc

SEQ ID NO: 425654 - DNA, 55 bp, Artificial
  Synthetic oligonucleotide
ggcttgcttgcagatccgcttatagggcaatcatcaactctccaagaagagtgcg

SEQ ID NO: 425655 - DNA, 55 bp, Artificial
  Synthetic oligonucleotide
ggcttggacaccacagggttttaatgcatcaatgccagaaactatggccgaggca

SEQ ID NO: 425656 - DNA, 60 bp, Artificial
  Synthetic oligonucleotide
ggcttggacacgctgctcgaatcttccagcgatacgctgttgaaacactggagttcgaaa

SEQ ID NO: 425657 - DNA, 55 bp, Artificial
  Synthetic oligonucleotide
ggcttggacttaccttactccacctacataaaagatgaacttaggtctctggaca

SEQ ID NO: 425658 - DNA, 55 bp, Artificial
  Synthetic oligonucleotide
ggcttggatggaaacgttggtacaacggtagagaacacggagaggcatactaccg

SEQ ID NO: 425659 - DNA, 60 bp, Artificial
  Synthetic oligonucleotide
ggcttggatggacattatgtttcattagattgtaaatatagagctccaacgcaaatgaaa

SEQ ID NO: 425660 - DNA, 56 bp, Artificial
  Synthetic oligonucleotide
ggcttggattttaaaacgttgtggaggagccatttggagacactcataagttcaaa

SEQ ID NO: 425661 - DNA, 55 bp, Artificial
  Synthetic oligonucleotide
ggcttggggtggaagctacattgctcttgattcaggccatggtagatgggactgt

SEQ ID NO: 425662 - DNA, 55 bp, Artificial
  Synthetic oligonucleotide
ggcttgggtaggtgctccgattgtccttgcgttcaccgatagcgttaactggcgt

SEQ ID NO: 425663 - DNA, 59 bp, Artificial
  Synthetic oligonucleotide
ggcttgggtcaaggttatattatagggtcaactgagctcgggctgattccgattgagac

SEQ ID NO: 425664 - DNA, 55 bp, Artificial
  Synthetic oligonucleotide
ggcttgtaggcagcccgaaaatggagcagtgtaaagcagtacatgggtggtggta

SEQ ID NO: 425665 - DNA, 54 bp, Artificial
  Synthetic oligonucleotide
ggcttgtagtagtcgcaaaacctacgattaaaatgaccaccaaggcaaaccgcc

SEQ ID NO: 425666 - DNA, 57 bp, Artificial
  Synthetic oligonucleotide
ggcttgtcaatgagttactaactcccaaagccttagaattatactcggagcgtagtg

SEQ ID NO: 425667 - DNA, 55 bp, Artificial
  Synthetic oligonucleotide
ggcttgtcagatcccacgacctggaaaggtttagagcccgtggatcctttaccgc

SEQ ID NO: 425668 - DNA, 55 bp, Artificial
  Synthetic oligonucleotide
ggcttgtccaaagatatcctttgatccaattcctatacattattgcactccagct

SEQ ID NO: 425669 - DNA, 60 bp, Artificial
  Synthetic oligonucleotide
ggcttgtcgctcctgagtgagcacttgctaagcacctcacccgagcctgatcagcttggg

SEQ ID NO: 425670 - DNA, 56 bp, Artificial
  Synthetic oligonucleotide
ggcttgtgacgtacaatcagaccactcggtgcagtgtgacgcttggcagtgctggt

SEQ ID NO: 425671 - DNA, 52 bp, Artificial
  Synthetic oligonucleotide
ggcttgtgaggccgtctggttggaacatcgggccgcttggttactcgctaag

SEQ ID NO: 425672 - DNA, 55 bp, Artificial
  Synthetic oligonucleotide
ggcttgtgatagtacaatgtgtccccatcacactgctgtgtgtgagacctatgag

SEQ ID NO: 425673 - DNA, 55 bp, Artificial
  Synthetic oligonucleotide
ggcttgtgcaatggacacccgctagtaattatatcaattgggctaacagtcaagg

SEQ ID NO: 425674 - DNA, 60 bp, Artificial
  Synthetic oligonucleotide
ggcttgtgggcaagctgacagcgcgctagtgacaaagcatgtggttaaaggaaaatgccc

SEQ ID NO: 425675 - DNA, 55 bp, Artificial
  Synthetic oligonucleotide
ggcttgtgtggcttatccctcactggtggaattcctgttgtccagagttattata

SEQ ID NO: 425676 - DNA, 55 bp, Artificial
  Synthetic oligonucleotide
ggcttgttagagggctagttagaagggttatacagaggggctattaagaccacta

SEQ ID NO: 425677 - DNA, 60 bp, Artificial
  Synthetic oligonucleotide
ggcttgttgtggagcctgtctcacgtaggcacgcaggaggagcgcgaagtttacttctgg

SEQ ID NO: 425678 - DNA, 57 bp, Artificial
  Synthetic oligonucleotide
ggcttgttgtgttggacaaggtgccctatttagggtgaggagccttactggcagccc

SEQ ID NO: 425679 - DNA, 51 bp, Artificial
  Synthetic oligonucleotide
ggctttaaaacgaagtctccatcatggatgtactttattcgctcgccaaaa

SEQ ID NO: 425680 - DNA, 55 bp, Artificial
  Synthetic oligonucleotide
ggctttaaaacgaagtcttcgacatggaggttctgtattcattgtcaaaaactct

SEQ ID NO: 425681 - DNA, 55 bp, Artificial
  Synthetic oligonucleotide
ggctttaccccatacgatagtccggctggtgtctacggatgggaccggagagagg

SEQ ID NO: 425682 - DNA, 54 bp, Artificial
  Synthetic oligonucleotide
ggctttacgcctgatgcacccatgtgccgcacaattaattttactcagcggttt

SEQ ID NO: 425683 - DNA, 55 bp, Artificial
  Synthetic oligonucleotide
ggctttactagcttcttattttgaacatttgtcaacttgaggacccgaagcttct

SEQ ID NO: 425684 - DNA, 55 bp, Artificial
  Synthetic oligonucleotide
ggctttagaccttggcatgggtcaagaaattttagtctacagccctattgtgtcc

SEQ ID NO: 425685 - DNA, 58 bp, Artificial
  Synthetic oligonucleotide
ggctttagagtggttgcttatgctggggcaaggagctttcgttttttccgctgctgta

SEQ ID NO: 425686 - DNA, 55 bp, Artificial
  Synthetic oligonucleotide
ggctttagctacgttaggagtgccagaaaacactggatgtgctctaatgatgtgc

SEQ ID NO: 425687 - DNA, 55 bp, Artificial
  Synthetic oligonucleotide
ggctttaggaaactactgtccgaagagccaggtgatgactgcatatcaagaactc

SEQ ID NO: 425688 - DNA, 52 bp, Artificial
  Synthetic oligonucleotide
ggctttataagcacccctgtatagcaaaggggtttaacgcttttcagactgg

SEQ ID NO: 425689 - DNA, 60 bp, Artificial
  Synthetic oligonucleotide
ggctttatacatgcaccgaataatatagaggatcaatacagatacctacagtcaattgca

SEQ ID NO: 425690 - DNA, 55 bp, Artificial
  Synthetic oligonucleotide
ggctttatagaagcagaggtgataccagcagaaacaggacaggaaactgcctatt

SEQ ID NO: 425691 - DNA, 54 bp, Artificial
  Synthetic oligonucleotide
ggctttatagaaggagggtggcaaggaatggtagacggttggtatgggtaccac

SEQ ID NO: 425692 - DNA, 57 bp, Artificial
  Synthetic oligonucleotide
ggctttatcaacagaacccctgaaaacagtgggagagaactctacataaacacatac

SEQ ID NO: 425693 - DNA, 55 bp, Artificial
  Synthetic oligonucleotide
ggctttatcattccacattacagaacagagggtttgttcatggaattcaccagag

SEQ ID NO: 425694 - DNA, 60 bp, Artificial
  Synthetic oligonucleotide
ggctttatcgcgaaggtattactgcgagtgatcgcggatacacaatcgtcgatgacagcc

SEQ ID NO: 425695 - DNA, 57 bp, Artificial
  Synthetic oligonucleotide
ggctttcactcgccctgctgacaaaactaggcacaagttccccacaaatattaacaa

SEQ ID NO: 425696 - DNA, 53 bp, Artificial
  Synthetic oligonucleotide
ggctttcacttacggggtgccggatccggtaaacctgtctggaattagaattc

SEQ ID NO: 425697 - DNA, 60 bp, Artificial
  Synthetic oligonucleotide
ggctttcaggttagccacaagcattgcatccttgatacttcagaaggccgagtctccttg

SEQ ID NO: 425698 - DNA, 55 bp, Artificial
  Synthetic oligonucleotide
ggctttcagttagcgacacgtttggatagatatccgacaaataagacgatcgctg

SEQ ID NO: 425699 - DNA, 55 bp, Artificial
  Synthetic oligonucleotide
ggctttccagtcaagcctcaggtgccgctaagaccaatgacttataaaggagcag

SEQ ID NO: 425700 - DNA, 55 bp, Artificial
  Synthetic oligonucleotide
ggctttccagttaagccacaggtacccttaagaccaatgaccttcaaagcagcct

SEQ ID NO: 425701 - DNA, 55 bp, Artificial
  Synthetic oligonucleotide
ggctttccagttagaccccaggtacccctaagaccaatgacatacaagcaagctt

SEQ ID NO: 425702 - DNA, 57 bp, Artificial
  Synthetic oligonucleotide
ggctttcctgttgtcatttttgacgactatactaagctgccacccggttacattgaa

SEQ ID NO: 425703 - DNA, 53 bp, Artificial
  Synthetic oligonucleotide
ggctttccttgaagaatcacacccggggatttttgaaaactcgtgtcttgaaa

SEQ ID NO: 425704 - DNA, 55 bp, Artificial
  Synthetic oligonucleotide
ggctttcgacctttcgtcatgatttcgctctcacaaatcggttacttcggcgcgg

SEQ ID NO: 425705 - DNA, 55 bp, Artificial
  Synthetic oligonucleotide
ggctttcgcccgtcaacacaagctcctccaaatcgtcccagacaagttcgtggtc

SEQ ID NO: 425706 - DNA, 56 bp, Artificial
  Synthetic oligonucleotide
ggctttcgctcaaaaacttcccggaaatgacaacagcccggcaacgctgtgcctgg

SEQ ID NO: 425707 - DNA, 55 bp, Artificial
  Synthetic oligonucleotide
ggctttcgctgatgtcggcaaccgttgcatgacttatgccggttgccagggtctc

SEQ ID NO: 425708 - DNA, 55 bp, Artificial
  Synthetic oligonucleotide
ggctttcgctggatgtatctgcggcgttttatcatatacctgttagtcctgctgc

SEQ ID NO: 425709 - DNA, 55 bp, Artificial
  Synthetic oligonucleotide
ggctttctgataacagagagaggcctagggttgaagtttgccagtaaaggagccc

SEQ ID NO: 425710 - DNA, 55 bp, Artificial
  Synthetic oligonucleotide
ggctttcttagcattccaagacacaagaagccagccggctaaagtaatagccgca

SEQ ID NO: 425711 - DNA, 58 bp, Artificial
  Synthetic oligonucleotide
ggctttcttgctacataatcacatgggtttaagtgcttaagagttaggttctcactgt

SEQ ID NO: 425712 - DNA, 53 bp, Artificial
  Synthetic oligonucleotide
ggctttgaacctttaatcagaaaattctttgagcggccttttaaaagtgcact

SEQ ID NO: 425713 - DNA, 55 bp, Artificial
  Synthetic oligonucleotide
ggctttgatcgacaaccgaatcaaagaccgaaaagactgtctccttgggacagca

SEQ ID NO: 425714 - DNA, 55 bp, Artificial
  Synthetic oligonucleotide
ggctttgcaataagatgggtggcaagtggtcaaagcgtagtgtgctaggatggtc

SEQ ID NO: 425715 - DNA, 55 bp, Artificial
  Synthetic oligonucleotide
ggctttgcacctttctccaaagacaatgggataagaattggttccagaggacatg

SEQ ID NO: 425716 - DNA, 55 bp, Artificial
  Synthetic oligonucleotide
ggctttgcattgcgtccaattgttgtgcacaataaagttgtatcccatcccagtg

SEQ ID NO: 425717 - DNA, 55 bp, Artificial
  Synthetic oligonucleotide
ggctttggaaaacgaacgaaggctttagaaatatgattatcggtgcttggaatgg

SEQ ID NO: 425718 - DNA, 60 bp, Artificial
  Synthetic oligonucleotide
ggctttgggagatttggatgtgcggtgtatgggatgctacaaattgatgacaacccttga

SEQ ID NO: 425719 - DNA, 55 bp, Artificial
  Synthetic oligonucleotide
ggctttgggcgcactagagatcggcgctactgcagatgtgggaccggaggcaatg

SEQ ID NO: 425720 - DNA, 55 bp, Artificial
  Synthetic oligonucleotide
ggctttgtacatgctgtcaacccgtggaaggcagacggtcaaggacaacaagggg

SEQ ID NO: 425721 - DNA, 55 bp, Artificial
  Synthetic oligonucleotide
ggctttgtagaggctactctcctcttttgcagatccctatccgaccccagaaggc

SEQ ID NO: 425722 - DNA, 56 bp, Artificial
  Synthetic oligonucleotide
ggctttgtaggggatataattccggatggcacagtcaaccaggaccacaagtacta

SEQ ID NO: 425723 - DNA, 57 bp, Artificial
  Synthetic oligonucleotide
ggctttgtatcctctttattcttttagaacccttgtatcatatgctgtttatgggga

SEQ ID NO: 425724 - DNA, 58 bp, Artificial
  Synthetic oligonucleotide
ggctttgttccaggatggaactcccccttctacaacgctatcattgatggttagtaga

SEQ ID NO: 425725 - DNA, 55 bp, Artificial
  Synthetic oligonucleotide
ggctttgttgacggccttcgagtttccctcagactccctaacatccaaaagtgcc

SEQ ID NO: 425726 - DNA, 58 bp, Artificial
  Synthetic oligonucleotide
ggcttttaaaagcacttgctggaaatggcgactcaggcttccgttgaatggatcttta

SEQ ID NO: 425727 - DNA, 55 bp, Artificial
  Synthetic oligonucleotide
ggcttttaaaagctaaacagtggtgttggtgagacgcaatggcttcaaaccaact

SEQ ID NO: 425728 - DNA, 55 bp, Artificial
  Synthetic oligonucleotide
ggcttttaaacgaagtcttcaacatggatgtcctgtactccttgtcaaaaactct

SEQ ID NO: 425729 - DNA, 54 bp, Artificial
  Synthetic oligonucleotide
ggcttttaaacgaagtcttcaacatggatgtccttttttcgttatcaaagactc

SEQ ID NO: 425730 - DNA, 54 bp, Artificial
  Synthetic oligonucleotide
ggcttttaaacgaagtcttcgacatggaggttctgtactcactgtcaaaaactt

SEQ ID NO: 425731 - DNA, 58 bp, Artificial
  Synthetic oligonucleotide
ggcttttaaagcaatactagtagtgcgttttacctctgatggtgtaagcatgaaagta

SEQ ID NO: 425732 - DNA, 58 bp, Artificial
  Synthetic oligonucleotide
ggcttttaaagcgtctcagtccccgtttgacccttgcggtgtatccatggctgagcta

SEQ ID NO: 425733 - DNA, 60 bp, Artificial
  Synthetic oligonucleotide
ggcttttaaagcgtctcagtcgccgtttgagcttgcggtgtcgttatggctgagctagcc

SEQ ID NO: 425734 - DNA, 60 bp, Artificial
  Synthetic oligonucleotide
ggcttttaaagtcacatcgaggcactgagaccattgctgttcagcgctttggtgatatca

SEQ ID NO: 425735 - DNA, 60 bp, Artificial
  Synthetic oligonucleotide
ggcttttaatgcttttcagtggttgatgctcaagatggagtctacgcaacagatggccgt

SEQ ID NO: 425736 - DNA, 50 bp, Artificial
  Synthetic oligonucleotide
ggcttttacagcccatactacttaacaccatccaaaagagacatagactg

SEQ ID NO: 425737 - DNA, 54 bp, Artificial
  Synthetic oligonucleotide
ggcttttactttctcgccaacttataaggcctttctaaatcaacaatattcgac

SEQ ID NO: 425738 - DNA, 55 bp, Artificial
  Synthetic oligonucleotide
ggcttttatgccgcacccgtaacctttgcataacaccctacagattggcaccaaa

SEQ ID NO: 425739 - DNA, 60 bp, Artificial
  Synthetic oligonucleotide
ggcttttatgtggccatagcacaggacggggggctgcgtataatgcgagactagctttcc

SEQ ID NO: 425740 - DNA, 57 bp, Artificial
  Synthetic oligonucleotide
ggcttttcactaggcccatcaaggatcttatagggaagttgaggccactgaacatac

SEQ ID NO: 425741 - DNA, 55 bp, Artificial
  Synthetic oligonucleotide
ggcttttcatggacaacagccagtggccctcaccgtgtgtgcaggccacgcatgt

SEQ ID NO: 425742 - DNA, 60 bp, Artificial
  Synthetic oligonucleotide
ggcttttcatgtttaaagtacattctgactacttcagcaaacctaacatcgacgcaatca

SEQ ID NO: 425743 - DNA, 55 bp, Artificial
  Synthetic oligonucleotide
ggcttttcattggctgctggtaggagtgtgtggacattggaaatggatgctggag

SEQ ID NO: 425744 - DNA, 53 bp, Artificial
  Synthetic oligonucleotide
ggcttttcccattcgattcgttgcaaagttaactgggttacttccacctggaa

SEQ ID NO: 425745 - DNA, 54 bp, Artificial
  Synthetic oligonucleotide
ggcttttctctcacgcccgccggtggaaacctgggggcatggcctaccagcggg

SEQ ID NO: 425746 - DNA, 56 bp, Artificial
  Synthetic oligonucleotide
ggcttttgagcctagcgttgggctacgttctcgcataaggtcggctatacgacgtt

SEQ ID NO: 425747 - DNA, 59 bp, Artificial
  Synthetic oligonucleotide
ggcttttggcctagtgtgtgccacttgtgagcagattgctgactcacagcatcggtctc

SEQ ID NO: 425748 - DNA, 60 bp, Artificial
  Synthetic oligonucleotide
ggcttttgtcccgtgtgtggttatgtaccactttgtcattgtatgtgctacaattactca

SEQ ID NO: 425749 - DNA, 55 bp, Artificial
  Synthetic oligonucleotide
ggcttttgtcgtaagcggtctagcaggagccacggttggaagcatcgggctcggg

SEQ ID NO: 425750 - DNA, 50 bp, Artificial
  Synthetic oligonucleotide
ggcttttttttgaaaagtcttgtggaagccatggctacttttaaagatgc

SEQ ID NO: 425751 - DNA, 53 bp, Artificial
  Synthetic oligonucleotide
gggaaaaagtacctgccccatacttaagctacatttggggttgtagtgaccca

SEQ ID NO: 425752 - DNA, 55 bp, Artificial
  Synthetic oligonucleotide
gggaaaacagttgaaggtggtattcatttctctagtgcagatgacaggactcttg

SEQ ID NO: 425753 - DNA, 54 bp, Artificial
  Synthetic oligonucleotide
gggaaaacatatcaaagtcgggtctttctccctcgggataaatcgagctgcctt

SEQ ID NO: 425754 - DNA, 59 bp, Artificial
  Synthetic oligonucleotide
gggaaaacatcatggtcttacatagtagagaaaccgaatcctgtcaatggaatatgtta

SEQ ID NO: 425755 - DNA, 55 bp, Artificial
  Synthetic oligonucleotide
gggaaaaccattgcagatatgcaggcccctttgggatatccagaattctccttgc

SEQ ID NO: 425756 - DNA, 53 bp, Artificial
  Synthetic oligonucleotide
gggaaaacctactgcacaatatggttttacgacctgcgtgggtaggaacttgg

SEQ ID NO: 425757 - DNA, 60 bp, Artificial
  Synthetic oligonucleotide
gggaaaacgagaagagcttttggacagacttctatgacgcgctctctgctcaatagattt

SEQ ID NO: 425758 - DNA, 60 bp, Artificial
  Synthetic oligonucleotide
gggaaaacgagacgagcatttggacaaacatctatgacgcgctcattgcttaacagattt

SEQ ID NO: 425759 - DNA, 60 bp, Artificial
  Synthetic oligonucleotide
gggaaaactctgctgcgaggattagtggatttacgtcgacttcgcaatctacgatagatg

SEQ ID NO: 425760 - DNA, 53 bp, Artificial
  Synthetic oligonucleotide
gggaaaactggcggactagttcagggttccttattggtaacgccaggcgattc

SEQ ID NO: 425761 - DNA, 59 bp, Artificial
  Synthetic oligonucleotide
gggaaaagatagatggagtgaaattggaaccaatgggggtctatcagattctggcgata

SEQ ID NO: 425762 - DNA, 60 bp, Artificial
  Synthetic oligonucleotide
gggaaaagctcaataatgaggtcagatgcacctattggcacctgcagttctgaatgcatc

SEQ ID NO: 425763 - DNA, 54 bp, Artificial
  Synthetic oligonucleotide
gggaaaagctcaccggcgcaagagccttcaatcaactcttagatgcactccaat

SEQ ID NO: 425764 - DNA, 58 bp, Artificial
  Synthetic oligonucleotide
gggaaaaggacaatcgaccttggccgatgtggactgctgggaacaatcactggaccac

SEQ ID NO: 425765 - DNA, 58 bp, Artificial
  Synthetic oligonucleotide
gggaaaagttataagtgtcataccagcaccaacatcctggttgaatcggatttctgga

SEQ ID NO: 425766 - DNA, 60 bp, Artificial
  Synthetic oligonucleotide
gggaaaatgtggctgtaatccaagttggaggttctgacatacttgatataacagctgatc

SEQ ID NO: 425767 - DNA, 53 bp, Artificial
  Synthetic oligonucleotide
gggaaaattaaactgggcaagtcagatttacccagggatccaagtaaagtatc

SEQ ID NO: 425768 - DNA, 55 bp, Artificial
  Synthetic oligonucleotide
gggaaaattaagtgcgtaactgccgcacatgtccttacgggtaattcagctaggg

SEQ ID NO: 425769 - DNA, 54 bp, Artificial
  Synthetic oligonucleotide
gggaaaattgaactgggcaagccagatttacccaggaataaaagtaacacagct

SEQ ID NO: 425770 - DNA, 55 bp, Artificial
  Synthetic oligonucleotide
gggaaacaatatgtttctggcatagattctagtatcttgggaacctactccagtg

SEQ ID NO: 425771 - DNA, 55 bp, Artificial
  Synthetic oligonucleotide
gggaaaccaggatacttccaatcatcctgacttgttcaaggagagaaaactcgcc

SEQ ID NO: 425772 - DNA, 59 bp, Artificial
  Synthetic oligonucleotide
gggaaacctggcggtggtgcagctcgtaagctgtcgggtatgtcggactggttgtgcag

SEQ ID NO: 425773 - DNA, 55 bp, Artificial
  Synthetic oligonucleotide
gggaaacgagtggggatgtcggcaatacataggtagcggtacttagctttaacta

SEQ ID NO: 425774 - DNA, 53 bp, Artificial
  Synthetic oligonucleotide
gggaaactatgtaaactagggggaatagccccattgcacctaggtaaatgtaa

SEQ ID NO: 425775 - DNA, 55 bp, Artificial
  Synthetic oligonucleotide
gggaaactcatcggacgggtgctatctggtgattctgacttctttacagtcagag

SEQ ID NO: 425776 - DNA, 54 bp, Artificial
  Synthetic oligonucleotide
gggaaactgaataggttaatcgagaaaacgaacgagaaatttcatcaaatcgaa

SEQ ID NO: 425777 - DNA, 59 bp, Artificial
  Synthetic oligonucleotide
gggaaactgtgaagattcaatggtcccaagaccctacaatgctatacaataagatggag

SEQ ID NO: 425778 - DNA, 54 bp, Artificial
  Synthetic oligonucleotide
gggaaacttaatgtaacaatggcaactagtatttgtaaagattgtcaccaacct

SEQ ID NO: 425779 - DNA, 55 bp, Artificial
  Synthetic oligonucleotide
gggaaactttactgggctttattcttctactgtacctgtccttatcctgagtggc

SEQ ID NO: 425780 - DNA, 55 bp, Artificial
  Synthetic oligonucleotide
gggaaagaagtgaaaatcttggacgcaaagaggttggtcgacaatgacgaagtca

SEQ ID NO: 425781 - DNA, 55 bp, Artificial
  Synthetic oligonucleotide
gggaaagaagtgctcgtgctctggggagtgcatcaccctccaactaccagtgagc

SEQ ID NO: 425782 - DNA, 50 bp, Artificial
  Synthetic oligonucleotide
gggaaagaattaaatgctagcctttaatcagatgggaaacctaggcagac

SEQ ID NO: 425783 - DNA, 55 bp, Artificial
  Synthetic oligonucleotide
gggaaagactttgagctccggctacctgtggacgctagaaaacaaactacgacca

SEQ ID NO: 425784 - DNA, 55 bp, Artificial
  Synthetic oligonucleotide
gggaaagcaattcacctgatggacaagaacactagacaaagatacaccattgatg

SEQ ID NO: 425785 - DNA, 55 bp, Artificial
  Synthetic oligonucleotide
gggaaagcacatatgaccgttagcgctaacctacttgtaagaacacccgaccgag

SEQ ID NO: 425786 - DNA, 60 bp, Artificial
  Synthetic oligonucleotide
gggaaagcagcggagaggttcgcagaaagcgaaataggatcagcagccatagatggatta

SEQ ID NO: 425787 - DNA, 55 bp, Artificial
  Synthetic oligonucleotide
gggaaagccggaaccctggaaatgctgaaattgaggaccttatcttcctggcacg

SEQ ID NO: 425788 - DNA, 60 bp, Artificial
  Synthetic oligonucleotide
gggaaagcgacagatatgctttacagctattcattggaccccacatgccacgtatgcatt

SEQ ID NO: 425789 - DNA, 52 bp, Artificial
  Synthetic oligonucleotide
gggaaagcgggccgaggacgggctatttatagtaatttcggcccgaggtcac

SEQ ID NO: 425790 - DNA, 56 bp, Artificial
  Synthetic oligonucleotide
gggaaagctatccaacttagggataggaagtctaaagttagatacagtgtggatac

SEQ ID NO: 425791 - DNA, 56 bp, Artificial
  Synthetic oligonucleotide
gggaaagctggtaaacctactaaacgttctcagaactatgctgccttacgcaaagc

SEQ ID NO: 425792 - DNA, 54 bp, Artificial
  Synthetic oligonucleotide
gggaaagcttagaggaaagttatccgataggttcggagaaatgggtacacctca

SEQ ID NO: 425793 - DNA, 55 bp, Artificial
  Synthetic oligonucleotide
gggaaaggacaatggggatatgtgatcagacaacctaagggaatattaaagacag

SEQ ID NO: 425794 - DNA, 55 bp, Artificial
  Synthetic oligonucleotide
gggaaaggagcagcgtctcacgtcacctggtcggctgatactcctgtgtgtcggc

SEQ ID NO: 425795 - DNA, 55 bp, Artificial
  Synthetic oligonucleotide
gggaaaggagctacacagtacaaaataaatatgtttgtcatgagtcaggggtttg

SEQ ID NO: 425796 - DNA, 55 bp, Artificial
  Synthetic oligonucleotide
gggaaaggaggggcaccaatgcatggtatggtagattatgaggttgggacatggc

SEQ ID NO: 425797 - DNA, 55 bp, Artificial
  Synthetic oligonucleotide
gggaaaggcattactgtgcctctaactccgcttcactgttttagtaaactttaca

SEQ ID NO: 425798 - DNA, 49 bp, Artificial
  Synthetic oligonucleotide
gggaaagggaggcaaaagaattagggataacttacgcggggttaatagg

SEQ ID NO: 425799 - DNA, 55 bp, Artificial
  Synthetic oligonucleotide
gggaaagggcgaatgaatcaaaagatctttgatatcggatacaatattgcgagga

SEQ ID NO: 425800 - DNA, 55 bp, Artificial
  Synthetic oligonucleotide
gggaaaggtacgcagctcgacttacaaacgggaagaacaagagtcatttctgcgc

SEQ ID NO: 425801 - DNA, 55 bp, Artificial
  Synthetic oligonucleotide
gggaaaggttaggaaagacatacctcagtggcagccatcaaaaggatggcatgat

SEQ ID NO: 425802 - DNA, 55 bp, Artificial
  Synthetic oligonucleotide
gggaaaggttgtggatctcgggtgtggtagaggcggctggtgctattacatggct

SEQ ID NO: 425803 - DNA, 51 bp, Artificial
  Synthetic oligonucleotide
gggaaagtataagctaaacaattttagcgaattgttgacgactgggttcga

SEQ ID NO: 425804 - DNA, 60 bp, Artificial
  Synthetic oligonucleotide
gggaaagtatgcagaacattactggcaaaatctgtattcaacagtctatacgcatcccca

SEQ ID NO: 425805 - DNA, 60 bp, Artificial
  Synthetic oligonucleotide
gggaaagtgatatgtgtatccgacgtgacacggggcaatggtattacgcatcgtgtgggc

SEQ ID NO: 425806 - DNA, 52 bp, Artificial
  Synthetic oligonucleotide
gggaaagttccctgggtaatgctcccaggaaaagaggaagattggatcctag

SEQ ID NO: 425807 - DNA, 51 bp, Artificial
  Synthetic oligonucleotide
gggaaataaggaaccagctgtcttgcacagtaaagacccccgactcgaggt

SEQ ID NO: 425808 - DNA, 52 bp, Artificial
  Synthetic oligonucleotide
gggaaatatcaaacctaaccgagtccgttcttatattaagttgaaacgactc

SEQ ID NO: 425809 - DNA, 55 bp, Artificial
  Synthetic oligonucleotide
gggaaatatcttggggaaagaaggttgttggtactactgtgcctcacccatctga

SEQ ID NO: 425810 - DNA, 55 bp, Artificial
  Synthetic oligonucleotide
gggaaatcaactcctgaagttctgttcgacccaacatcagaagatccattgcagg

SEQ ID NO: 425811 - DNA, 55 bp, Artificial
  Synthetic oligonucleotide
gggaaatccttttggagagtgcccatgagaataatgaagcgtttagtacacgata

SEQ ID NO: 425812 - DNA, 51 bp, Artificial
  Synthetic oligonucleotide
gggaaatcgtctatgacacctcattggtaggaccactattacctagtagct

SEQ ID NO: 425813 - DNA, 55 bp, Artificial
  Synthetic oligonucleotide
gggaaatctaaaggtctgtctgaggaacaaaaggacaatcttggatgtttatcag

SEQ ID NO: 425814 - DNA, 60 bp, Artificial
  Synthetic oligonucleotide
gggaaatctagactcatcgaggcttccagtctcaacgactcagtggcaatgaggcagaca

SEQ ID NO: 425815 - DNA, 55 bp, Artificial
  Synthetic oligonucleotide
gggaaatctgggctagaactaaccttcaccaatgactccatcatcagtcacaacc

SEQ ID NO: 425816 - DNA, 56 bp, Artificial
  Synthetic oligonucleotide
gggaaatcttatgctgtatgggggtctggagctaaaaaagagtgttattaggctgt

SEQ ID NO: 425817 - DNA, 52 bp, Artificial
  Synthetic oligonucleotide
gggaaatgaactgtttgttactgtggttgacaacaccagaaacacaaatgtc

SEQ ID NO: 425818 - DNA, 56 bp, Artificial
  Synthetic oligonucleotide
gggaaatgattgggtatcaggttgaagcttcaaatcaattattggctaaaaatttg

SEQ ID NO: 425819 - DNA, 60 bp, Artificial
  Synthetic oligonucleotide
gggaaatgccgtggcctgatctcagacccgccacagcttgggctgcatacgctggggcca

SEQ ID NO: 425820 - DNA, 54 bp, Artificial
  Synthetic oligonucleotide
gggaaatggggcctcttgttcttggggatgttaataatctgtaatgcagacaat

SEQ ID NO: 425821 - DNA, 51 bp, Artificial
  Synthetic oligonucleotide
gggaaattaaatcggcttatagaaaaaactaaccaacagtttgagttaata

SEQ ID NO: 425822 - DNA, 59 bp, Artificial
  Synthetic oligonucleotide
gggaaattattaggagcactccaccaagaacattacagagacttgtcctcctgagacta

SEQ ID NO: 425823 - DNA, 60 bp, Artificial
  Synthetic oligonucleotide
gggaaattcccttgcgttatttagtgcgcagcaagcagaggatacagagaatagtgtgtt

SEQ ID NO: 425824 - DNA, 55 bp, Artificial
  Synthetic oligonucleotide
gggaaattgcagaacaatttccgttaggtcgtgcgataactgaaattcgtccctc

SEQ ID NO: 425825 - DNA, 53 bp, Artificial
  Synthetic oligonucleotide
gggaaattggccggatggttctaacattgggtttatgcccaagtaacagaaaa

SEQ ID NO: 425826 - DNA, 55 bp, Artificial
  Synthetic oligonucleotide
gggaaattgttgccacgtcgcgcggtttctcgaatcagtggactgtaattgtgcc

SEQ ID NO: 425827 - DNA, 56 bp, Artificial
  Synthetic oligonucleotide
gggaaatttgtgagattatcgccctaaaggataactctcatgcgggtccgagtccc

SEQ ID NO: 425828 - DNA, 48 bp, Artificial
  Synthetic oligonucleotide
gggaaattttacggggttttattcttctactgtacctgtctttaaccc

SEQ ID NO: 425829 - DNA, 60 bp, Artificial
  Synthetic oligonucleotide
gggaacaaatatctcttatcgaaattaatggctaagattgaacagtagcgtgactgctac

SEQ ID NO: 425830 - DNA, 55 bp, Artificial
  Synthetic oligonucleotide
gggaacaacagtgggcaaccatcaacagtggtagacaattcgctaatggtcgtcc

SEQ ID NO: 425831 - DNA, 55 bp, Artificial
  Synthetic oligonucleotide
gggaacaaccccagctgaagtgtgcctgtggagaaaatgccgtactccttacttc

SEQ ID NO: 425832 - DNA, 56 bp, Artificial
  Synthetic oligonucleotide
gggaacaacctgcaagttcaacacttggggagactcaaacaggtctggcaagttta

SEQ ID NO: 425833 - DNA, 55 bp, Artificial
  Synthetic oligonucleotide
gggaacaatgcacccagttattcatgatctattaaagaagtacaaattgcgagac

SEQ ID NO: 425834 - DNA, 59 bp, Artificial
  Synthetic oligonucleotide
gggaacaatgggagttgcaatgaaacagtcatcaaggaatacaatgagacggtaaggat

SEQ ID NO: 425835 - DNA, 55 bp, Artificial
  Synthetic oligonucleotide
gggaacaatgggattatgttagcgagtggacagacttagaaggggttaacctcga

SEQ ID NO: 425836 - DNA, 55 bp, Artificial
  Synthetic oligonucleotide
gggaacacaagaggatgcggcatgcctacgagttttcacggaagctatgactagg

SEQ ID NO: 425837 - DNA, 55 bp, Artificial
  Synthetic oligonucleotide
gggaacacaataggttaatttggacaccattatatatcggtgttccaattggtgt

SEQ ID NO: 425838 - DNA, 51 bp, Artificial
  Synthetic oligonucleotide
gggaacacacgggcactactgttatggtctctgggggttctgagtcatcgt

SEQ ID NO: 425839 - DNA, 55 bp, Artificial
  Synthetic oligonucleotide
gggaacacagacagctagtgcaacataatgggcaacaacataaaagtcaccttca

SEQ ID NO: 425840 - DNA, 54 bp, Artificial
  Synthetic oligonucleotide
gggaacacagacggagaaggtaaaatttcgttacaaatgcatgctttccctaaa

SEQ ID NO: 425841 - DNA, 55 bp, Artificial
  Synthetic oligonucleotide
gggaacacagctgttgcaaaatgcaatgtcaatcatgacgaagagttctgtgaca

SEQ ID NO: 425842 - DNA, 51 bp, Artificial
  Synthetic oligonucleotide
gggaacaccgctgggttaaggagttccgtggggcggcaaaccccaagccgc

SEQ ID NO: 425843 - DNA, 55 bp, Artificial
  Synthetic oligonucleotide
gggaacacgttccgcagtcgcacaatcgctacgaacgacgctgttcggtattacc

SEQ ID NO: 425844 - DNA, 53 bp, Artificial
  Synthetic oligonucleotide
gggaacactactcccggttctcgagaaaataacttatcggatcaggttcgtaa

SEQ ID NO: 425845 - DNA, 54 bp, Artificial
  Synthetic oligonucleotide
gggaacagctgctggtggggctagtacaaaatttggcagtctaacatcaactat

SEQ ID NO: 425846 - DNA, 59 bp, Artificial
  Synthetic oligonucleotide
gggaacaggatacactatggacacagtcaacaggacacatcaatattcggaaaagggaa

SEQ ID NO: 425847 - DNA, 55 bp, Artificial
  Synthetic oligonucleotide
gggaacaggcaatgaacctataagtagtacacctattcctggggtacgcaggtta

SEQ ID NO: 425848 - DNA, 54 bp, Artificial
  Synthetic oligonucleotide
gggaacaggcgttggcacgacaggtaccaaatttacatgttttaccacgaccga

SEQ ID NO: 425849 - DNA, 60 bp, Artificial
  Synthetic oligonucleotide
gggaacagtaaccacagaagtggcttttggtctagtgtgtgccacttgtgagcagatcgc

SEQ ID NO: 425850 - DNA, 59 bp, Artificial
  Synthetic oligonucleotide
gggaacatgtcctttagagacctgggaagagtgatggttatggtgggcgctaccatgac

SEQ ID NO: 425851 - DNA, 55 bp, Artificial
  Synthetic oligonucleotide
gggaacattactgtgagtccactattgtgtgggacaaccggccagacactgctgc

SEQ ID NO: 425852 - DNA, 55 bp, Artificial
  Synthetic oligonucleotide
gggaacattgggacaaggccttaccttgtgtagaaaatcctcctgatcagggagc

SEQ ID NO: 425853 - DNA, 51 bp, Artificial
  Synthetic oligonucleotide
gggaaccaaataggtaaccacaaacggacagggaaaccgcaaaatttgcat

SEQ ID NO: 425854 - DNA, 54 bp, Artificial
  Synthetic oligonucleotide
gggaaccaaggggaagcgatatagcaggaagtactagtacccttcaagaacaaa

SEQ ID NO: 425855 - DNA, 55 bp, Artificial
  Synthetic oligonucleotide
gggaaccaatcactcggttggagatttagttacggttttcacgcttatgaacatc

SEQ ID NO: 425856 - DNA, 55 bp, Artificial
  Synthetic oligonucleotide
gggaaccacggtagtggtgaccgaggattgcggaaacagaggaccatccttgaga

SEQ ID NO: 425857 - DNA, 60 bp, Artificial
  Synthetic oligonucleotide
gggaaccagcgccttatgatcatgcacaacggtatatacgatattgcaatatagactcac

SEQ ID NO: 425858 - DNA, 58 bp, Artificial
  Synthetic oligonucleotide
gggaaccatatgtgttagaatagttacatctaaccagaaacatgatttaaatatcgtg

SEQ ID NO: 425859 - DNA, 60 bp, Artificial
  Synthetic oligonucleotide
gggaacccacgcaaccatgaagattcaagggcgcactgttggaggtcaaatgggcatgct

SEQ ID NO: 425860 - DNA, 55 bp, Artificial
  Synthetic oligonucleotide
gggaacccttaacttccctcaaatcactgtttggcagcgaccccttgtcacaata

SEQ ID NO: 425861 - DNA, 52 bp, Artificial
  Synthetic oligonucleotide
gggaaccgcagttggacccaacacttgggcaggcaaagcttatgcatccggg

SEQ ID NO: 425862 - DNA, 55 bp, Artificial
  Synthetic oligonucleotide
gggaacctcataccgtgcacggagtccttcaggcttcggatacccatggacggcg

SEQ ID NO: 425863 - DNA, 60 bp, Artificial
  Synthetic oligonucleotide
gggaacctctgactggaactgctaagcacattgaagaatgctcatgctacggggaacaag

SEQ ID NO: 425864 - DNA, 55 bp, Artificial
  Synthetic oligonucleotide
gggaacctgactatattcccacaccagttgataaatttgagaactaacaactcag

SEQ ID NO: 425865 - DNA, 54 bp, Artificial
  Synthetic oligonucleotide
gggaacctgagcgaccgggcaagaaagacacctagggaaggaagacctccacta

SEQ ID NO: 425866 - DNA, 54 bp, Artificial
  Synthetic oligonucleotide
gggaacctgagtacagtggtctctcgagggtgatgaattctgcattatgaagag

SEQ ID NO: 425867 - DNA, 55 bp, Artificial
  Synthetic oligonucleotide
gggaacctttatctgaagaatcaacggtgacaattgtcatcacggttaagggttg

SEQ ID NO: 425868 - DNA, 50 bp, Artificial
  Synthetic oligonucleotide
gggaacgaaaacacgcaaatttgtgaacatgtacgggtacgatcctacag

SEQ ID NO: 425869 - DNA, 56 bp, Artificial
  Synthetic oligonucleotide
gggaacgaacaaccgcgttcgttcctacatcaagttaaagagtctgaacatatctg

SEQ ID NO: 425870 - DNA, 53 bp, Artificial
  Synthetic oligonucleotide
gggaacgacagcctacaacgtcaggggccttacgtccctctttacaccagggc

SEQ ID NO: 425871 - DNA, 52 bp, Artificial
  Synthetic oligonucleotide
gggaacgaggaagatgcaactagtcgctgagtggagtggttgtgtggaatgg

SEQ ID NO: 425872 - DNA, 55 bp, Artificial
  Synthetic oligonucleotide
gggaacgatagcagtgtaaatgagaccttcaggcctggaggaggagatatgaggg

SEQ ID NO: 425873 - DNA, 54 bp, Artificial
  Synthetic oligonucleotide
gggaacgattatatgatcgcgcccgtttcagcactcaacactcttcgcttcaat

SEQ ID NO: 425874 - DNA, 55 bp, Artificial
  Synthetic oligonucleotide
gggaacgcactaacctcgaggaggtcaaaagacgtactcctgcccctggagagcg

SEQ ID NO: 425875 - DNA, 51 bp, Artificial
  Synthetic oligonucleotide
gggaacgcgggaccctgtctttttggcgcgaaagcgacgggtggtcccgcg

SEQ ID NO: 425876 - DNA, 53 bp, Artificial
  Synthetic oligonucleotide
gggaacgctcctttccgaggcacgacgcaaggaagctactcgacagtatggcg

SEQ ID NO: 425877 - DNA, 55 bp, Artificial
  Synthetic oligonucleotide
gggaacggttggcaataaaccatctagtaaccaacgctcaaaatttatggtgcca

SEQ ID NO: 425878 - DNA, 53 bp, Artificial
  Synthetic oligonucleotide
gggaacgtaaccaccggcccggggatgagttgtatctgactgaaccggccgta

SEQ ID NO: 425879 - DNA, 55 bp, Artificial
  Synthetic oligonucleotide
gggaacgtcttcgttcagtaggacttctgtcctgcttagatcagacatccattgg

SEQ ID NO: 425880 - DNA, 54 bp, Artificial
  Synthetic oligonucleotide
gggaacgtgacgtcgcgtgggaaaatgacgtgtgatgacgtcccgtgggaacgg

SEQ ID NO: 425881 - DNA, 55 bp, Artificial
  Synthetic oligonucleotide
gggaacgtgctgggagcaaatgtacaccccaggaggagaagttagaaacgacgac

SEQ ID NO: 425882 - DNA, 51 bp, Artificial
  Synthetic oligonucleotide
gggaacgtgcttatacgtctgacatagcaacaccacggacgtgtttaaatg

SEQ ID NO: 425883 - DNA, 56 bp, Artificial
  Synthetic oligonucleotide
gggaactaccgtgtgtgttgtccaaaattcgcagtccccaacctccaatcactcac

SEQ ID NO: 425884 - DNA, 55 bp, Artificial
  Synthetic oligonucleotide
gggaactacgcactatatggatgtttcacagcatgacccagactatctaaagcag

SEQ ID NO: 425885 - DNA, 54 bp, Artificial
  Synthetic oligonucleotide
gggaactacgttttgccttcggcctactcgagagtatcttaatcttcccgtcga

SEQ ID NO: 425886 - DNA, 55 bp, Artificial
  Synthetic oligonucleotide
gggaactagaacaatttgcaattaatcccggccttttagaaacagcagagggctg

SEQ ID NO: 425887 - DNA, 55 bp, Artificial
  Synthetic oligonucleotide
gggaactagaattgagggacattcgcagactctccaagatgtacgagagtggcca

SEQ ID NO: 425888 - DNA, 60 bp, Artificial
  Synthetic oligonucleotide
gggaactaggagaacaagcagcgcacgctaacaacatgtatgaacaagccaaaagcatga

SEQ ID NO: 425889 - DNA, 60 bp, Artificial
  Synthetic oligonucleotide
gggaactatggctttacttgtattcagggatacaagatggaactccgatgacaggagcat

SEQ ID NO: 425890 - DNA, 51 bp, Artificial
  Synthetic oligonucleotide
gggaactcaaaacagtctctgctgatcagttggcgagagaggagcaaattg

SEQ ID NO: 425891 - DNA, 55 bp, Artificial
  Synthetic oligonucleotide
gggaactcaatcgcgtggcagcaggcctcagaaagcttggggctccaccgttgag

SEQ ID NO: 425892 - DNA, 58 bp, Artificial
  Synthetic oligonucleotide
gggaactcaggaggacgcggcgagcctacgagtcttcacggaggctatgactaggtac

SEQ ID NO: 425893 - DNA, 55 bp, Artificial
  Synthetic oligonucleotide
gggaactgccgcccacaacgcggctggactgtctagtctcttcacatttggtgcc

SEQ ID NO: 425894 - DNA, 55 bp, Artificial
  Synthetic oligonucleotide
gggaactgcgtatcttaaggatggctttgtgcgatatcgtgtcgatggttgcagg

SEQ ID NO: 425895 - DNA, 55 bp, Artificial
  Synthetic oligonucleotide
gggaactgctggttgcccctgatgtccagcccatctcccgtcctagagaagggag

SEQ ID NO: 425896 - DNA, 56 bp, Artificial
  Synthetic oligonucleotide
gggaactggggggcaatttatatgtgccccccaaatggcataactgtaatatcgta

SEQ ID NO: 425897 - DNA, 55 bp, Artificial
  Synthetic oligonucleotide
gggaactgtgaccaccgaagtagcatttggcctggtatgcgccacatgtgagcaa

SEQ ID NO: 425898 - DNA, 55 bp, Artificial
  Synthetic oligonucleotide
gggaactgtgcactggtttcttacaccctggatggcctaccactctttgaggcca

SEQ ID NO: 425899 - DNA, 55 bp, Artificial
  Synthetic oligonucleotide
gggaactgttattgggtgatgacagatggtcctgcgaacaatcaggctagctaca

SEQ ID NO: 425900 - DNA, 57 bp, Artificial
  Synthetic oligonucleotide
gggaacttcgaaatccaagtaccctttggtgattaggatttacatgaggatgaagca

SEQ ID NO: 425901 - DNA, 55 bp, Artificial
  Synthetic oligonucleotide
gggaacttgatgcatgcatatgagcataagcttaacaaggcagcagttcctgtcg

SEQ ID NO: 425902 - DNA, 55 bp, Artificial
  Synthetic oligonucleotide
gggaacttgcatttcaccactctattttaactcatagtgcaaatcagcatccgac

SEQ ID NO: 425903 - DNA, 55 bp, Artificial
  Synthetic oligonucleotide
gggaagaagcctcatggcgatgcgcagaaagagagtgccgaggaggagaagacgt

SEQ ID NO: 425904 - DNA, 55 bp, Artificial
  Synthetic oligonucleotide
gggaagaagggtctttggaatgggtctcttaaagctgaattgaggccaaaagaga

SEQ ID NO: 425905 - DNA, 52 bp, Artificial
  Synthetic oligonucleotide
gggaagaatacagaaggtagaggacttgacaggaagcgcacaacatatagaa

SEQ ID NO: 425906 - DNA, 58 bp, Artificial
  Synthetic oligonucleotide
gggaagaattattggtttaaatttcaggcctagctcattcacattacatacatctctg

SEQ ID NO: 425907 - DNA, 59 bp, Artificial
  Synthetic oligonucleotide
gggaagaattggagagaattccacacaagatgacgagttcttatcctacttcaaactca

SEQ ID NO: 425908 - DNA, 55 bp, Artificial
  Synthetic oligonucleotide
gggaagacacctagggattatgtaaggtccttgcctaagcggaacaagattgagt

SEQ ID NO: 425909 - DNA, 55 bp, Artificial
  Synthetic oligonucleotide
gggaagacccacagagtcctcccggagctcattcgccaatgcattgacagacgcc

SEQ ID NO: 425910 - DNA, 59 bp, Artificial
  Synthetic oligonucleotide
gggaagacccacctcgctagggaagtggctaagagaatcgcagcctccctcacaggaga

SEQ ID NO: 425911 - DNA, 60 bp, Artificial
  Synthetic oligonucleotide
gggaagacctaagagaccctgactatctgaaggatctcttggcctccgaggccatgatag

SEQ ID NO: 425912 - DNA, 53 bp, Artificial
  Synthetic oligonucleotide
gggaagacggatgtgtcgaagttggaggaaactcggggaattttcgttcgtgc

SEQ ID NO: 425913 - DNA, 59 bp, Artificial
  Synthetic oligonucleotide
gggaagagaagtatgtggactacatgggttccctaaggagatacgaagacactatcata

SEQ ID NO: 425914 - DNA, 55 bp, Artificial
  Synthetic oligonucleotide
gggaagagatttcggatagatcgttagtcgccgtattggagtgattctaacatac

SEQ ID NO: 425915 - DNA, 55 bp, Artificial
  Synthetic oligonucleotide
gggaagagcaagggcaggacacgtggtctcggacacaagaatagaaagttcatca

SEQ ID NO: 425916 - DNA, 57 bp, Artificial
  Synthetic oligonucleotide
gggaagagcagaggggaacgagtgaaagacgcgaaggaattggtgtggatggatctt

SEQ ID NO: 425917 - DNA, 55 bp, Artificial
  Synthetic oligonucleotide
gggaagaggttcaagcagtatagagagttaaaaccccagacctgtaccatatgtg

SEQ ID NO: 425918 - DNA, 54 bp, Artificial
  Synthetic oligonucleotide
gggaagaggttctgtgtgaagtccatatatatattgggcaaggtttggatggat

SEQ ID NO: 425919 - DNA, 53 bp, Artificial
  Synthetic oligonucleotide
gggaagaggttttgtattaagtccgtttatgtgttgggtaagatttggatgga

SEQ ID NO: 425920 - DNA, 53 bp, Artificial
  Synthetic oligonucleotide
gggaagagtacaaagaatttgtactagcgcatatgagttgtcacagagaggtc

SEQ ID NO: 425921 - DNA, 53 bp, Artificial
  Synthetic oligonucleotide
gggaagagtgcttcgaagaagtaccaatggaagaagccggttgtaagtaaccg

SEQ ID NO: 425922 - DNA, 55 bp, Artificial
  Synthetic oligonucleotide
gggaagagtgtggagaacgaacctttacccttgtttgcgaggtgcgttggttgca

SEQ ID NO: 425923 - DNA, 55 bp, Artificial
  Synthetic oligonucleotide
gggaagagttcgcagcgcttgtataccgagtggacctgtggactgagggacggtg

SEQ ID NO: 425924 - DNA, 60 bp, Artificial
  Synthetic oligonucleotide
gggaagataattgggcaagttgaaatcagtttcaatggaggccatatagaagaatgctca

SEQ ID NO: 425925 - DNA, 56 bp, Artificial
  Synthetic oligonucleotide
gggaagatatggatggacgaaaatattaaactgaagaaccacacaaacaacgtcat

SEQ ID NO: 425926 - DNA, 59 bp, Artificial
  Synthetic oligonucleotide
gggaagatatggttaggaatcggcgtttgccttcagttatgagtcattctttcgcgcaa

SEQ ID NO: 425927 - DNA, 59 bp, Artificial
  Synthetic oligonucleotide
gggaagatccgaaaatcgaaacgaacaaattcgctgcaatatgcacacatttggaagtc

SEQ ID NO: 425928 - DNA, 60 bp, Artificial
  Synthetic oligonucleotide
gggaagatgcaactgctggtctaacccatttgatgatatggcattccaacctcaatgatg

SEQ ID NO: 425929 - DNA, 53 bp, Artificial
  Synthetic oligonucleotide
gggaagatgtgccacaggacatgatacttaaaggcactggtggtcagaagcag

SEQ ID NO: 425930 - DNA, 60 bp, Artificial
  Synthetic oligonucleotide
gggaagattgtccatgttagtccattgtcaggaagtgctcagcatatagaggaatgttcc

SEQ ID NO: 425931 - DNA, 59 bp, Artificial
  Synthetic oligonucleotide
gggaagcaaaacgctaataaggtcatcaagatctgtccaacttgggacagcagaaaaca

SEQ ID NO: 425932 - DNA, 53 bp, Artificial
  Synthetic oligonucleotide
gggaagcaaccatcttggggcatccccctcgttcgttacgacagcgtttgcgc

SEQ ID NO: 425933 - DNA, 57 bp, Artificial
  Synthetic oligonucleotide
gggaagcaagggtacaaaagacgaatacatgagaggcatgaagaatggccttttaag

SEQ ID NO: 425934 - DNA, 56 bp, Artificial
  Synthetic oligonucleotide
gggaagcaatttgattggacgggaacttaagtcctaatttgcattgacgtggacca

SEQ ID NO: 425935 - DNA, 60 bp, Artificial
  Synthetic oligonucleotide
gggaagcagaatcagttagagatagctgagtgggagaatataccgtcgaaacctggaatg

SEQ ID NO: 425936 - DNA, 55 bp, Artificial
  Synthetic oligonucleotide
gggaagcattaacaaggttgtgcatgttagctgtttcgtacaaaacggtagacgt

SEQ ID NO: 425937 - DNA, 55 bp, Artificial
  Synthetic oligonucleotide
gggaagcattgacacatgtgcaaaattctcctgcaccagtaaggcgattgggaga

SEQ ID NO: 425938 - DNA, 60 bp, Artificial
  Synthetic oligonucleotide
gggaagccaggcatctacagatttgtggcaccgggggagcgcccttctggcatgttcgac

SEQ ID NO: 425939 - DNA, 60 bp, Artificial
  Synthetic oligonucleotide
gggaagccatgcatggacaggtagactgcagtccagggatatggcaactagattgcacac

SEQ ID NO: 425940 - DNA, 60 bp, Artificial
  Synthetic oligonucleotide
gggaagcccaacaagaatgatgatgtctcttggacaagcaatagtatagttactttctgt

SEQ ID NO: 425941 - DNA, 54 bp, Artificial
  Synthetic oligonucleotide
gggaagcccacgactcgcctggttttaattctattgggcctgttagcccaagac

SEQ ID NO: 425942 - DNA, 60 bp, Artificial
  Synthetic oligonucleotide
gggaagccctagaatcgccagaacattgttcacctaaccacacagcactcaggcaagctg

SEQ ID NO: 425943 - DNA, 55 bp, Artificial
  Synthetic oligonucleotide
gggaagcctctccatacgtgggagctacaaggcttgttgtggagcctgtctcacg

SEQ ID NO: 425944 - DNA, 60 bp, Artificial
  Synthetic oligonucleotide
gggaagcgattttgtgtgaaatccgtgtatgtgctgggaaagatatggatggatgaaaac

SEQ ID NO: 425945 - DNA, 55 bp, Artificial
  Synthetic oligonucleotide
gggaagcgccattgtgtatggacacaatactggaaatgcctaattggtgtcgagg

SEQ ID NO: 425946 - DNA, 58 bp, Artificial
  Synthetic oligonucleotide
gggaagcggagttagtggtgtgtacccagattacttgtttaatggatcgatgttcaga

SEQ ID NO: 425947 - DNA, 55 bp, Artificial
  Synthetic oligonucleotide
gggaagcgtttctgtgtcaagtcaatttacatcatagggaagatatggatggacg

SEQ ID NO: 425948 - DNA, 55 bp, Artificial
  Synthetic oligonucleotide
gggaagctgaatgcaatgccgtagtgccggactttcgctcccgctgagttgggtc

SEQ ID NO: 425949 - DNA, 55 bp, Artificial
  Synthetic oligonucleotide
gggaagcttcaggtagctggtgtagccctctaagtgggaattcagcctcagaggt

SEQ ID NO: 425950 - DNA, 57 bp, Artificial
  Synthetic oligonucleotide
gggaagcttcctatgaccttaaaacgtcgagatctgatgaaaactcgatttttgcaa

SEQ ID NO: 425951 - DNA, 55 bp, Artificial
  Synthetic oligonucleotide
gggaaggaccataagcaaagactcaaggtcgggatacgaaatgctgaaagtccca

SEQ ID NO: 425952 - DNA, 55 bp, Artificial
  Synthetic oligonucleotide
gggaaggaccataagcaaagattcaagatcagggtatgagatactaaaggtcccg

SEQ ID NO: 425953 - DNA, 55 bp, Artificial
  Synthetic oligonucleotide
gggaaggagacctgacatgtaattccactgtaactagtctcatagcagagataga

SEQ ID NO: 425954 - DNA, 57 bp, Artificial
  Synthetic oligonucleotide
gggaaggagcagtcatcttaaaggtagggacagagatcaaggtagtaccaagaagga

SEQ ID NO: 425955 - DNA, 57 bp, Artificial
  Synthetic oligonucleotide
gggaaggagtcgaggttataacaagaattctgcaacaactactgtttactcatttca

SEQ ID NO: 425956 - DNA, 55 bp, Artificial
  Synthetic oligonucleotide
gggaaggatacatggttatgcgggccagcggaagggacgcagcaagccaggtcag

SEQ ID NO: 425957 - DNA, 60 bp, Artificial
  Synthetic oligonucleotide
gggaaggcaataattgtactactcatggtagtaacatccaacgcagatcgaatctgcact

SEQ ID NO: 425958 - DNA, 55 bp, Artificial
  Synthetic oligonucleotide
gggaaggcatacacctgtggaagacccagaaagccctcgtcaaacgcatccgggg

SEQ ID NO: 425959 - DNA, 55 bp, Artificial
  Synthetic oligonucleotide
gggaaggccttctattctgagcttaaaagtcctacaaagcgtcatttagttattg

SEQ ID NO: 425960 - DNA, 50 bp, Artificial
  Synthetic oligonucleotide
gggaaggcgtctttacaggcctcaatcacatagatgcccactttctatct

SEQ ID NO: 425961 - DNA, 55 bp, Artificial
  Synthetic oligonucleotide
gggaaggctcaagcgggatctaagattcatgaatcaaaacagccagaccagcagt

SEQ ID NO: 425962 - DNA, 60 bp, Artificial
  Synthetic oligonucleotide
gggaaggggtcaccgtcctcagcttacccacatcatatgatcttgggtatgtgaggcttg

SEQ ID NO: 425963 - DNA, 59 bp, Artificial
  Synthetic oligonucleotide
gggaaggtagtcaaatcagtcgagttgagtgctcctaattaccactatgaggagtgttc

SEQ ID NO: 425964 - DNA, 55 bp, Artificial
  Synthetic oligonucleotide
gggaaggtatcttatgatagttgagatcaatcctggtcgagcattctccacgtcc

SEQ ID NO: 425965 - DNA, 52 bp, Artificial
  Synthetic oligonucleotide
gggaaggtccctcaacggcagctatttttagaactaggtccgaggttgacgt

SEQ ID NO: 425966 - DNA, 55 bp, Artificial
  Synthetic oligonucleotide
gggaaggtgacaggcatagatgagaagcttaaactgaatgaatcagagtgtagca

SEQ ID NO: 425967 - DNA, 55 bp, Artificial
  Synthetic oligonucleotide
gggaaggtgatagccattgacgaggagtcagagacaacactgtccaggcatggtg

SEQ ID NO: 425968 - DNA, 60 bp, Artificial
  Synthetic oligonucleotide
gggaaggtgatatgcatggcctcttaagactggtcacacgcacactagagagtgaggcgg

SEQ ID NO: 425969 - DNA, 55 bp, Artificial
  Synthetic oligonucleotide
gggaaggtgatttgtgtgtctgacgttacacgtggtaacggtattactcaccgtg

SEQ ID NO: 425970 - DNA, 55 bp, Artificial
  Synthetic oligonucleotide
gggaaggttccatctggcgaattcccactgcatcagatgatgttaatgagacgtg

SEQ ID NO: 425971 - DNA, 54 bp, Artificial
  Synthetic oligonucleotide
gggaagtagcagtaggtcttgggagggacatctggaatccattaacgagcctgc

SEQ ID NO: 425972 - DNA, 55 bp, Artificial
  Synthetic oligonucleotide
gggaagtaggataggatcatggtgccaaatggtcagtttaataggagctgagcta

SEQ ID NO: 425973 - DNA, 60 bp, Artificial
  Synthetic oligonucleotide
gggaagtcaacaggaagcacattagccagaagcggggcatggtgcgcgggggagatcgga

SEQ ID NO: 425974 - DNA, 55 bp, Artificial
  Synthetic oligonucleotide
gggaagtcaccgtccaacgccgaggcaacccgtcagggcaaatctcaacaactcc

SEQ ID NO: 425975 - DNA, 55 bp, Artificial
  Synthetic oligonucleotide
gggaagtcccacctgaagaggtgactcaggtatcagttcctgcgagagatacttc

SEQ ID NO: 425976 - DNA, 60 bp, Artificial
  Synthetic oligonucleotide
gggaagtctgagtaccaatcgttatttaagcgcaatagtgcaccaataggtatgcgtagc

SEQ ID NO: 425977 - DNA, 55 bp, Artificial
  Synthetic oligonucleotide
gggaagtgccggccacaccgtatctggattcgctggcctcttcacatcaggcgcc

SEQ ID NO: 425978 - DNA, 54 bp, Artificial
  Synthetic oligonucleotide
gggaagtgccggcggcctaattgccagaactccactaggtcaagggggtcgaac

SEQ ID NO: 425979 - DNA, 55 bp, Artificial
  Synthetic oligonucleotide
gggaagtggatactatcgagtgattcaatacgacttagatgggaatattaatgtg

SEQ ID NO: 425980 - DNA, 60 bp, Artificial
  Synthetic oligonucleotide
gggaagtggctaagagaatcgcagcctccctcacaggagaccagcgtgtgggcctcatcc

SEQ ID NO: 425981 - DNA, 57 bp, Artificial
  Synthetic oligonucleotide
gggaagtggttgtgcgttgccaatattgtttaaaacgtctagatctaatagagaagc

SEQ ID NO: 425982 - DNA, 55 bp, Artificial
  Synthetic oligonucleotide
gggaagtgtacgccgatgattacaccatggaacacacgtttggagaggcgtacac

SEQ ID NO: 425983 - DNA, 55 bp, Artificial
  Synthetic oligonucleotide
gggaagttagaggtgtaatttcacagtgcatgaatggaagcatcccaaggatatt

SEQ ID NO: 425984 - DNA, 60 bp, Artificial
  Synthetic oligonucleotide
gggaagttatgcaaactgaatggaatccctccacttgaattaagagattgcagcattgcc

SEQ ID NO: 425985 - DNA, 60 bp, Artificial
  Synthetic oligonucleotide
gggaagttcctcctgattgagtaaagtatgtggttgatgcccaccttgtcctcaagctca

SEQ ID NO: 425986 - DNA, 60 bp, Artificial
  Synthetic oligonucleotide
gggaataaaccatccacccaccgatactgtgcagacaaatctgtacacaaggactgacac

SEQ ID NO: 425987 - DNA, 55 bp, Artificial
  Synthetic oligonucleotide
gggaataaactaataacagttgggagttctaactatcagcaatcctttgtgccga

SEQ ID NO: 425988 - DNA, 55 bp, Artificial
  Synthetic oligonucleotide
gggaataatagatgattggcaagcttactcaccaggcccggggataaggtacccg

SEQ ID NO: 425989 - DNA, 55 bp, Artificial
  Synthetic oligonucleotide
gggaataatgcgacttggcctgcaagttgtgccttcccttgcagcttcccaggat

SEQ ID NO: 425990 - DNA, 55 bp, Artificial
  Synthetic oligonucleotide
gggaataattacgaggttaagtcagtccaccgcgcataaaactatacgtgttgag

SEQ ID NO: 425991 - DNA, 55 bp, Artificial
  Synthetic oligonucleotide
gggaatacaatgaaacagtaagggttgagaaggtaacacaatggcacaataccaa

SEQ ID NO: 425992 - DNA, 57 bp, Artificial
  Synthetic oligonucleotide
gggaatacatagtgaagaagccatattatggtttaccgccttttctacagatctaac

SEQ ID NO: 425993 - DNA, 55 bp, Artificial
  Synthetic oligonucleotide
gggaatacatgtgggtggtaatggtagggatggcttctcagcaatgttactcaga

SEQ ID NO: 425994 - DNA, 55 bp, Artificial
  Synthetic oligonucleotide
gggaataccctttaactaagagacaggaacagctatacttggtcagggcaggaag

SEQ ID NO: 425995 - DNA, 55 bp, Artificial
  Synthetic oligonucleotide
gggaatacgcaaagagtgcgatgaacgaaccagttagataccaaggtaagaggca

SEQ ID NO: 425996 - DNA, 53 bp, Artificial
  Synthetic oligonucleotide
gggaatactataatggaccaatcccggatgggtatgaagttgaccacatcaat

SEQ ID NO: 425997 - DNA, 55 bp, Artificial
  Synthetic oligonucleotide
gggaatactgaaacaacgggtgtaattaggacggcactctttgggaataatgcaa

SEQ ID NO: 425998 - DNA, 55 bp, Artificial
  Synthetic oligonucleotide
gggaatacttcgtcaacatggtggcatacagggctggagcgttcgctgctcctgc

SEQ ID NO: 425999 - DNA, 55 bp, Artificial
  Synthetic oligonucleotide
gggaatagattgcttctcagactcgagatacgaccagtccgccagaggttcggta

SEQ ID NO: 426000 - DNA, 55 bp, Artificial
  Synthetic oligonucleotide
gggaataggtttggcagacccatcacagctgtggtcatagtaggtgtggcacaac

SEQ ID NO: 426001 - DNA, 57 bp, Artificial
  Synthetic oligonucleotide
gggaatagtgtcataaaactaggaggattggggtataaatggtctggaatatcatac

SEQ ID NO: 426002 - DNA, 57 bp, Artificial
  Synthetic oligonucleotide
gggaatataaccacaggcacagtgtaggggccacccttgaggcactattccagggtc

SEQ ID NO: 426003 - DNA, 60 bp, Artificial
  Synthetic oligonucleotide
gggaatataatcatagacatagcgtgggggcgactcttgaagcattgtttcagggaccac

SEQ ID NO: 426004 - DNA, 55 bp, Artificial
  Synthetic oligonucleotide
gggaatataggctgaatcattccacccgggagataacctatgcacaagggaaccc

SEQ ID NO: 426005 - DNA, 58 bp, Artificial
  Synthetic oligonucleotide
gggaatatcgaaattacaacaagtggaacacctagcaagaagcacttcatagtagcca

SEQ ID NO: 426006 - DNA, 55 bp, Artificial
  Synthetic oligonucleotide
gggaatatcgagaaatgaacgattactttcaagatgcacaagatccatatcctgc

SEQ ID NO: 426007 - DNA, 60 bp, Artificial
  Synthetic oligonucleotide
gggaatatgaggctaaaatgtgtatgtatgctgtagaaagaatagccaaagagcgctgca

SEQ ID NO: 426008 - DNA, 55 bp, Artificial
  Synthetic oligonucleotide
gggaatattgtcaacgtgtccttcaacaaagatgatctagccacgtgcatccaac

SEQ ID NO: 426009 - DNA, 60 bp, Artificial
  Synthetic oligonucleotide
gggaatcacaccttgcggagattgatgatctgattgaccttgcggcctcaggggatccta

SEQ ID NO: 426010 - DNA, 59 bp, Artificial
  Synthetic oligonucleotide
gggaatcaccgcacacaggcttgttggcgcagaacccagacctccggtcagtggaacca

SEQ ID NO: 426011 - DNA, 54 bp, Artificial
  Synthetic oligonucleotide
gggaatcaggggtatggtgtaaaaggcttcggatttcgacagggaaccgatgta

SEQ ID NO: 426012 - DNA, 53 bp, Artificial
  Synthetic oligonucleotide
gggaatcaggtcactattcaagacattgtcttggagttagagccgtaccccat

SEQ ID NO: 426013 - DNA, 58 bp, Artificial
  Synthetic oligonucleotide
gggaatcagtatatcagggtaagggcacatttatgggtgggaatcattactcagaggg

SEQ ID NO: 426014 - DNA, 51 bp, Artificial
  Synthetic oligonucleotide
gggaatcattctggtgctactaattatctggatcttatcaagctacaaggc

SEQ ID NO: 426015 - DNA, 57 bp, Artificial
  Synthetic oligonucleotide
gggaatccacttattaagagaggagattggtcttcatattgtgaggtttccctaaca

SEQ ID NO: 426016 - DNA, 58 bp, Artificial
  Synthetic oligonucleotide
gggaatcccaaattgggaaagtgaacagccactaaatgcactgtgacgttgacatacg

SEQ ID NO: 426017 - DNA, 54 bp, Artificial
  Synthetic oligonucleotide
gggaatcccacctttaatttgaatgggctttccgtatttggtgtttgattgcca

SEQ ID NO: 426018 - DNA, 53 bp, Artificial
  Synthetic oligonucleotide
gggaatcccgtttaacaccatcgtgaatagggccgggtacgcacccctagcaa

SEQ ID NO: 426019 - DNA, 58 bp, Artificial
  Synthetic oligonucleotide
gggaatccctgctacgggtgccatactttgtgagggctcacgccctactacgagtgtg

SEQ ID NO: 426020 - DNA, 60 bp, Artificial
  Synthetic oligonucleotide
gggaatccgtgataaaatgcgccacacggaacgtttaatgaacatgcgcaagatcatctt

SEQ ID NO: 426021 - DNA, 55 bp, Artificial
  Synthetic oligonucleotide
gggaatccttatgggactcccgacgacctggcctctgctatgtctaatccacctg

SEQ ID NO: 426022 - DNA, 60 bp, Artificial
  Synthetic oligonucleotide
gggaatcctttgatcaagagaggagattgggcctcatattgtgaaatttcactggtccag

SEQ ID NO: 426023 - DNA, 55 bp, Artificial
  Synthetic oligonucleotide
gggaatcgacctgatcaggcccctgttgtaacctgcacatagcggctctcgtggt

SEQ ID NO: 426024 - DNA, 60 bp, Artificial
  Synthetic oligonucleotide
gggaatctaatcgctccttggtatgcatacaaatttgacagtaccactagcaagggagca

SEQ ID NO: 426025 - DNA, 55 bp, Artificial
  Synthetic oligonucleotide
gggaatctcctacagtattggggtcaggagctaaggaatagtgctatcagcttgc

SEQ ID NO: 426026 - DNA, 55 bp, Artificial
  Synthetic oligonucleotide
gggaatctcctgcggtattggattcaggagctaaagaatagtgctgtcagcttgc

SEQ ID NO: 426027 - DNA, 55 bp, Artificial
  Synthetic oligonucleotide
gggaatctgtatgataccaggccagcggtgatgggatcaaccctatcaatgagac

SEQ ID NO: 426028 - DNA, 55 bp, Artificial
  Synthetic oligonucleotide
gggaatcttcctggttgctctttctctatcttcctcctagctttgctttcttgct

SEQ ID NO: 426029 - DNA, 55 bp, Artificial
  Synthetic oligonucleotide
gggaatcttctgtcatattgggttcaggaactaagaattagtgctattactttgc

SEQ ID NO: 426030 - DNA, 55 bp, Artificial
  Synthetic oligonucleotide
gggaatcttgcggtgatgggtacaagcgaacagacagactacccaggggaacatc

SEQ ID NO: 426031 - DNA, 59 bp, Artificial
  Synthetic oligonucleotide
gggaatgacaaatgctattcaacattcagttaaagaaggtattgaacttgatgaagcag

SEQ ID NO: 426032 - DNA, 55 bp, Artificial
  Synthetic oligonucleotide
gggaatgacctgtttcaatctattgggaggtttaacctttgctttcatacactgg

SEQ ID NO: 426033 - DNA, 55 bp, Artificial
  Synthetic oligonucleotide
gggaatgaccttataggagagttgtgtgtagtccaggctgctagagtggcaagtc

SEQ ID NO: 426034 - DNA, 58 bp, Artificial
  Synthetic oligonucleotide
gggaatgagaataacagctccagtgagtatagattaataaattgtaatacctcagcag

SEQ ID NO: 426035 - DNA, 55 bp, Artificial
  Synthetic oligonucleotide
gggaatgagtcagagattctccgatacaacatctcgcagcgggaagagcaacctc

SEQ ID NO: 426036 - DNA, 55 bp, Artificial
  Synthetic oligonucleotide
gggaatgatgagcttatgacgaaattactcaatatttaggtccttgacacagacc

SEQ ID NO: 426037 - DNA, 55 bp, Artificial
  Synthetic oligonucleotide
gggaatgcatggataagtatggactcaacttaccaatggtcacccatgtcaaaga

SEQ ID NO: 426038 - DNA, 55 bp, Artificial
  Synthetic oligonucleotide
gggaatgccgcactaaagcggatgaactgaattattacgcgttcaccgttaccgt

SEQ ID NO: 426039 - DNA, 59 bp, Artificial
  Synthetic oligonucleotide
gggaatgcgagaacgtgagaatcgagtacaataacaagactcggaacaatactctcgcg

SEQ ID NO: 426040 - DNA, 55 bp, Artificial
  Synthetic oligonucleotide
gggaatgcgcaatgtggcagcgacccggcagtatataatgaacgcctcgcccaaa

SEQ ID NO: 426041 - DNA, 56 bp, Artificial
  Synthetic oligonucleotide
gggaatgcggagggaagaacatcagacatgagggcagaaatcataaggatgatgga

SEQ ID NO: 426042 - DNA, 55 bp, Artificial
  Synthetic oligonucleotide
gggaatgctcggcttgatggccaagtatgaacagtccatggtagccgaagtcgac

SEQ ID NO: 426043 - DNA, 55 bp, Artificial
  Synthetic oligonucleotide
gggaatggagatccgagcaacatggacagagcagttaagctgtacaggaaactca

SEQ ID NO: 426044 - DNA, 55 bp, Artificial
  Synthetic oligonucleotide
gggaatggattgcagtggactggtactatcctgacccagatttagcggacatgcg

SEQ ID NO: 426045 - DNA, 60 bp, Artificial
  Synthetic oligonucleotide
gggaatgggaaactgttcaggagtgacttgaatattgaatcttgctcaactagatgccag

SEQ ID NO: 426046 - DNA, 55 bp, Artificial
  Synthetic oligonucleotide
gggaatggttgttttgaattctaccacaaatgtgataacgaatgcatggagagcg

SEQ ID NO: 426047 - DNA, 60 bp, Artificial
  Synthetic oligonucleotide
gggaatgtattggatttgaaccacctggatattgatgagcctacaggacagactgcagac

SEQ ID NO: 426048 - DNA, 57 bp, Artificial
  Synthetic oligonucleotide
gggaatgtcaacacgcatgtggacgagtacatgctagaagctgtggaccactacgca

SEQ ID NO: 426049 - DNA, 58 bp, Artificial
  Synthetic oligonucleotide
gggaatgtcccaaatacgtgaaatcagatagattggtccttgcaactgggcttaggaa

SEQ ID NO: 426050 - DNA, 55 bp, Artificial
  Synthetic oligonucleotide
gggaatgtgattacgagcctgtgctgcttgttcgtaactgagtcttgtgtcacgt

SEQ ID NO: 426051 - DNA, 55 bp, Artificial
  Synthetic oligonucleotide
gggaatgtgtaccaaattaactattatggttcagactatgcagttgccaagggcg

SEQ ID NO: 426052 - DNA, 53 bp, Artificial
  Synthetic oligonucleotide
gggaatgttcacgagtatgacactgtgatgttgtatgggcaatttggtccgaa

SEQ ID NO: 426053 - DNA, 55 bp, Artificial
  Synthetic oligonucleotide
gggaatgttcatgagtacgattctgtggtgttgtatggacaatttggcactgacg

SEQ ID NO: 426054 - DNA, 60 bp, Artificial
  Synthetic oligonucleotide
gggaatgttgggactatgtgagtcagagagtgaacaatgagacactgcaacgttggctag

SEQ ID NO: 426055 - DNA, 55 bp, Artificial
  Synthetic oligonucleotide
gggaattaatggacgaggattaccaggggcgattgtgcaatccactaaacccatt

SEQ ID NO: 426056 - DNA, 58 bp, Artificial
  Synthetic oligonucleotide
gggaattacgggatgaatacacaaggttcaggcttattgatattcggcgagagtgacg

SEQ ID NO: 426057 - DNA, 60 bp, Artificial
  Synthetic oligonucleotide
gggaattagaaccactcaatactcacagatggaacatgagaagcatgatttcgtacgaga

SEQ ID NO: 426058 - DNA, 55 bp, Artificial
  Synthetic oligonucleotide
gggaattcaactggtcctcacttacattgggagcttagagtaaatggaattccac

SEQ ID NO: 426059 - DNA, 59 bp, Artificial
  Synthetic oligonucleotide
gggaattccagatccattagaacctttaaatattgaatcttcagggcaactatctctca

SEQ ID NO: 426060 - DNA, 60 bp, Artificial
  Synthetic oligonucleotide
gggaattccctgcgccacttgtatcctggacaggcggcctgcctcgtgtggcacctgtgt

SEQ ID NO: 426061 - DNA, 55 bp, Artificial
  Synthetic oligonucleotide
gggaattcttagacctaaggtgatgagacggttgctgttagatgagccttacctg

SEQ ID NO: 426062 - DNA, 60 bp, Artificial
  Synthetic oligonucleotide
gggaattgaacgctgataaatcggtcaatgttgcagactcattgaatgttacacgtcatg

SEQ ID NO: 426063 - DNA, 60 bp, Artificial
  Synthetic oligonucleotide
gggaattgagagaagaattcaatgcactatcacaagaaattgcaatgtcacaattgattg

SEQ ID NO: 426064 - DNA, 58 bp, Artificial
  Synthetic oligonucleotide
gggaattgcggcgggtacctaaacgatactgacaatgtaggtgtgttcgataagatga

SEQ ID NO: 426065 - DNA, 58 bp, Artificial
  Synthetic oligonucleotide
gggaattgggacaatggtgatggaactaattcggatgataaagcggggaatcaatgac

SEQ ID NO: 426066 - DNA, 55 bp, Artificial
  Synthetic oligonucleotide
gggaattgtggatggttggcagaattacactgatgggccaggtacacggtacccg

SEQ ID NO: 426067 - DNA, 57 bp, Artificial
  Synthetic oligonucleotide
gggaattgttggacggttatcaaatacccctaatgtggcctttgcttatcagatcca

SEQ ID NO: 426068 - DNA, 51 bp, Artificial
  Synthetic oligonucleotide
gggaatttaattcgttatcgatttgaaagtgagtgtaacgaagcaagaata

SEQ ID NO: 426069 - DNA, 55 bp, Artificial
  Synthetic oligonucleotide
gggaatttacttctaggaaatcacaatatataggcaagatctccatgcagtctct

SEQ ID NO: 426070 - DNA, 56 bp, Artificial
  Synthetic oligonucleotide
gggaatttattaacaccccaccattgatcagattatggtacaatttgttgtctgac

SEQ ID NO: 426071 - DNA, 53 bp, Artificial
  Synthetic oligonucleotide
gggaatttgacagatttagggcaaaatgtactttatgcaaattctagtcattc

SEQ ID NO: 426072 - DNA, 60 bp, Artificial
  Synthetic oligonucleotide
gggaatttgatagcaccatggtatgctttcgcattgaataaggggtctgactctggaatt

SEQ ID NO: 426073 - DNA, 60 bp, Artificial
  Synthetic oligonucleotide
gggaattttactgaaacttgatgctcatttacacctggtgcgatccatgtagctggcacc

SEQ ID NO: 426074 - DNA, 50 bp, Artificial
  Synthetic oligonucleotide
gggaattttcacgcttacatgcagaagtggcactcgtctctctcctacga

SEQ ID NO: 426075 - DNA, 54 bp, Artificial
  Synthetic oligonucleotide
gggaatttttctactgtaatacaacaccactgtttaatagtacgtggaatacta

SEQ ID NO: 426076 - DNA, 52 bp, Artificial
  Synthetic oligonucleotide
gggaatttttctactgtaatacaacacgactatttaatagtacttggtttgt

SEQ ID NO: 426077 - DNA, 55 bp, Artificial
  Synthetic oligonucleotide
gggacaaaggtgaacacgctaacagagaaggggattgaagtagtgaatgctacgg

SEQ ID NO: 426078 - DNA, 55 bp, Artificial
  Synthetic oligonucleotide
gggacaaaggttattagcttctaactcatatattgaaaatgggaaaattgctagg

SEQ ID NO: 426079 - DNA, 60 bp, Artificial
  Synthetic oligonucleotide
gggacaaatcaccctgacgacgtttctaacagccatggtgctagtgacactccattatgg

SEQ ID NO: 426080 - DNA, 55 bp, Artificial
  Synthetic oligonucleotide
gggacaacaactcggagtggttcaacctacccaccgctaacgcgaggcaagcatc

SEQ ID NO: 426081 - DNA, 55 bp, Artificial
  Synthetic oligonucleotide
gggacaacagtgcctcacccctctgagatgattgctctcatccccaaatcatcaa

SEQ ID NO: 426082 - DNA, 50 bp, Artificial
  Synthetic oligonucleotide
gggacaacatcgggcgctgcgtcaggcacacctacgtgcatcatacctcg

SEQ ID NO: 426083 - DNA, 53 bp, Artificial
  Synthetic oligonucleotide
gggacaacctgcaaaccttcgcacttctgaacgttcccctccgaccaaacgtc

SEQ ID NO: 426084 - DNA, 56 bp, Artificial
  Synthetic oligonucleotide
gggacaacctgcaaacttacgcgctcttgaacgcccctgtccgcccaagagtcgtg

SEQ ID NO: 426085 - DNA, 58 bp, Artificial
  Synthetic oligonucleotide
gggacaacctggaacctgggactttcgatcttggagggctatatgaagcaattgagga

SEQ ID NO: 426086 - DNA, 51 bp, Artificial
  Synthetic oligonucleotide
gggacaagagttttgaactgtttctttcatggatcaaaatgcgttataccc

SEQ ID NO: 426087 - DNA, 55 bp, Artificial
  Synthetic oligonucleotide
gggacaagatatgtgttgaagtccagataacagccaagcaccttggccaagagct

SEQ ID NO: 426088 - DNA, 60 bp, Artificial
  Synthetic oligonucleotide
gggacaagcaatacccagatgcacaaggagcaaggatgcaatggatatacgatgcattca

SEQ ID NO: 426089 - DNA, 56 bp, Artificial
  Synthetic oligonucleotide
gggacaagcggggattctctaaccgaaaggcacgccgcatgattccgtcacaagag

SEQ ID NO: 426090 - DNA, 52 bp, Artificial
  Synthetic oligonucleotide
gggacaagcttaccccgctaatgttccctacccactaataggcaaaaccgcg

SEQ ID NO: 426091 - DNA, 58 bp, Artificial
  Synthetic oligonucleotide
gggacaaggatggtggacattcttaggcagaacccgacggaagaacaagctgtggata

SEQ ID NO: 426092 - DNA, 60 bp, Artificial
  Synthetic oligonucleotide
gggacaagtagaacaaattctgctgagttactcaaacacttcatgttctgtgctctgcag

SEQ ID NO: 426093 - DNA, 54 bp, Artificial
  Synthetic oligonucleotide
gggacaagtcccaatggttggcactacaaaggtatacaacctaaatagcgctct

SEQ ID NO: 426094 - DNA, 55 bp, Artificial
  Synthetic oligonucleotide
gggacaataagactacctcgtatctaccatgaaggaacatttataccaggaacct

SEQ ID NO: 426095 - DNA, 60 bp, Artificial
  Synthetic oligonucleotide
gggacaataagcatgctatagaagtttatggagacgacgctaacttagagcattatttcg

SEQ ID NO: 426096 - DNA, 55 bp, Artificial
  Synthetic oligonucleotide
gggacaatcaaagtctctgatatccgatatatcggggacaatatataggtctccc

SEQ ID NO: 426097 - DNA, 55 bp, Artificial
  Synthetic oligonucleotide
gggacaatcaacctacacttcatgttcactgggccgaccgacgcgaaagctcggt

SEQ ID NO: 426098 - DNA, 59 bp, Artificial
  Synthetic oligonucleotide
gggacaatcagcctacaatgaaccacagttacgttttgcactagcttttaggcgctata

SEQ ID NO: 426099 - DNA, 55 bp, Artificial
  Synthetic oligonucleotide
gggacaatctcgtggttcgaagaagaatatgattcctattccaaccctacttaac

SEQ ID NO: 426100 - DNA, 57 bp, Artificial
  Synthetic oligonucleotide
gggacaatgaaggcagttgtgccgccagtggaagggtcctatccggatttccggctc

SEQ ID NO: 426101 - DNA, 55 bp, Artificial
  Synthetic oligonucleotide
gggacaatggtattggagttaatcaggatgatcaaacgtggaatcaacgaccgaa

SEQ ID NO: 426102 - DNA, 55 bp, Artificial
  Synthetic oligonucleotide
gggacacaaggacccacagtacacatctatgattgttcagtattacaccggcaag

SEQ ID NO: 426103 - DNA, 55 bp, Artificial
  Synthetic oligonucleotide
gggacacaccatggacatatgtaagatacaacccactatcagacaaaggcatagg

SEQ ID NO: 426104 - DNA, 55 bp, Artificial
  Synthetic oligonucleotide
gggacacaccgtgccacatgcggtgcttgacccgcttcactctgggtcctatcaa

SEQ ID NO: 426105 - DNA, 55 bp, Artificial
  Synthetic oligonucleotide
gggacaccaaagaccccctgaattttttcgtcatgtccaacataaactattatgc

SEQ ID NO: 426106 - DNA, 55 bp, Artificial
  Synthetic oligonucleotide
gggacacctgcagcagattcaacagctcggggttaggaacgtgaccgtgctcgcg

SEQ ID NO: 426107 - DNA, 55 bp, Artificial
  Synthetic oligonucleotide
gggacacgaaatgaacactcaaatcctggtattcgctctggtggcgatcattccg

SEQ ID NO: 426108 - DNA, 55 bp, Artificial
  Synthetic oligonucleotide
gggacacgtcatttcaacagcagaaggcatgtgcggctgtattgtattcaacccc

SEQ ID NO: 426109 - DNA, 55 bp, Artificial
  Synthetic oligonucleotide
gggacactaaactgggaaaagcagggtatgttactgacagaggaaggcagagggt

SEQ ID NO: 426110 - DNA, 58 bp, Artificial
  Synthetic oligonucleotide
gggacactctaatagagagagataattctattgcctactgttatccgggcgctactgt

SEQ ID NO: 426111 - DNA, 55 bp, Artificial
  Synthetic oligonucleotide
gggacactgggctgaactcgaaattcacgttttcgatcccatacctttcggcggc

SEQ ID NO: 426112 - DNA, 54 bp, Artificial
  Synthetic oligonucleotide
gggacagaaagtatagtaatctggggaagggtacccaaattcagaatacccata

SEQ ID NO: 426113 - DNA, 55 bp, Artificial
  Synthetic oligonucleotide
gggacagacgattcttacggaggtgatggacaaaggacccaatccgtttatagcg

SEQ ID NO: 426114 - DNA, 55 bp, Artificial
  Synthetic oligonucleotide
gggacagagatggcacacccttgttccgctcggcacagagaccatcaccgacagc

SEQ ID NO: 426115 - DNA, 60 bp, Artificial
  Synthetic oligonucleotide
gggacagatacttatgttatgactgtacatctgtgtgggagtcctaaacctgcacacata

SEQ ID NO: 426116 - DNA, 58 bp, Artificial
  Synthetic oligonucleotide
gggacagatccgaaagattagtgggtggattcttgacacttatctgggacgatctacg

SEQ ID NO: 426117 - DNA, 56 bp, Artificial
  Synthetic oligonucleotide
gggacagatggacctgacatctgtacattcggttcgggatctgagttctgctctcc

SEQ ID NO: 426118 - DNA, 60 bp, Artificial
  Synthetic oligonucleotide
gggacagcagaaaacaatacatgatgatttccaggattgtgatatgggtctgccccacta

SEQ ID NO: 426119 - DNA, 60 bp, Artificial
  Synthetic oligonucleotide
gggacagccattggggctcatctgtttggggtctcacctgaatacagggtgttgatcgga

SEQ ID NO: 426120 - DNA, 59 bp, Artificial
  Synthetic oligonucleotide
gggacagccccagtgttagggaactacaaagagatatgtgtagcttggtcgagtagcag

SEQ ID NO: 426121 - DNA, 55 bp, Artificial
  Synthetic oligonucleotide
gggacagctgttatagtgtgttacagctaatatgcttagccgttaggacttgctt

SEQ ID NO: 426122 - DNA, 60 bp, Artificial
  Synthetic oligonucleotide
gggacagcttgtctccttcattggagaaataccagccattgtgcacgaagccctgaatgt

SEQ ID NO: 426123 - DNA, 58 bp, Artificial
  Synthetic oligonucleotide
gggacaggaagtacatggtaattctctgtttttctttgctcgcagagaacaaatgtat

SEQ ID NO: 426124 - DNA, 60 bp, Artificial
  Synthetic oligonucleotide
gggacaggctatccatgtgacggccagtcacaggcagatactcctcaaccacttccgtgg

SEQ ID NO: 426125 - DNA, 55 bp, Artificial
  Synthetic oligonucleotide
gggacagggcatacttcacaattcatctgatctttatggtttgattactgagcaa

SEQ ID NO: 426126 - DNA, 55 bp, Artificial
  Synthetic oligonucleotide
gggacaggtgcatacggaagtgcacacagaaagcgagatagaacaccacacgggt

SEQ ID NO: 426127 - DNA, 55 bp, Artificial
  Synthetic oligonucleotide
gggacaggtgtgcaatgggctgtacatgtgtgtggtcaggtaatctgttgtcctg

SEQ ID NO: 426128 - DNA, 55 bp, Artificial
  Synthetic oligonucleotide
gggacagtacaaaggaacaatggactctggtcagattaagagggagctcaaaagc

SEQ ID NO: 426129 - DNA, 55 bp, Artificial
  Synthetic oligonucleotide
gggacagtgctgagcaacctgtagaacgggcacagcaggcccatagggtggttac

SEQ ID NO: 426130 - DNA, 57 bp, Artificial
  Synthetic oligonucleotide
gggacagtgtgtctgcgaccccagacaaggcgtcacatgggacggtaagagttgtgt

SEQ ID NO: 426131 - DNA, 55 bp, Artificial
  Synthetic oligonucleotide
gggacagttgacctggaccagacttccacaaggcttcaagaacagccccactctg

SEQ ID NO: 426132 - DNA, 58 bp, Artificial
  Synthetic oligonucleotide
gggacataaggacccgctatacacttccatgatagtacagtattatactggaaagaag

SEQ ID NO: 426133 - DNA, 60 bp, Artificial
  Synthetic oligonucleotide
gggacatagatataacaggttacgcgcaaatgcgtagaaaggtggagctgttcacttaca

SEQ ID NO: 426134 - DNA, 55 bp, Artificial
  Synthetic oligonucleotide
gggacatatacaacagctcaagcggcttcaaggatccagaacaccatcggtgagc

SEQ ID NO: 426135 - DNA, 60 bp, Artificial
  Synthetic oligonucleotide
gggacatatatcacagcgtgtcccatgctcggccccgcctcttctggttctgcctactcc

SEQ ID NO: 426136 - DNA, 55 bp, Artificial
  Synthetic oligonucleotide
gggacatatgattatcccaagtatgaagaggaatctaaactgaacaggaatgaga

SEQ ID NO: 426137 - DNA, 57 bp, Artificial
  Synthetic oligonucleotide
gggacatcaagcgggactccagtccaggggtccccctcagcttgattggaactacaa

SEQ ID NO: 426138 - DNA, 51 bp, Artificial
  Synthetic oligonucleotide
gggacatcagggctctgatcaccctccatctgaccagaggtaacaagctct

SEQ ID NO: 426139 - DNA, 55 bp, Artificial
  Synthetic oligonucleotide
gggacatccccatgcctatcgtgagggtgagtgttacggctacgtctgccaccgc

SEQ ID NO: 426140 - DNA, 57 bp, Artificial
  Synthetic oligonucleotide
gggacatcgtttgtttatagtctgacgcaagttgggattttggttgctctttagtca

SEQ ID NO: 426141 - DNA, 57 bp, Artificial
  Synthetic oligonucleotide
gggacatcttgccaagttcatacttgggagaccgccctaaagaaaatagatgggaca

SEQ ID NO: 426142 - DNA, 56 bp, Artificial
  Synthetic oligonucleotide
gggacatggacctagcaaaataccacgaaaccaccttactgttccccagacacaga

SEQ ID NO: 426143 - DNA, 60 bp, Artificial
  Synthetic oligonucleotide
gggacatgttacccaggagatttcatcaattatgaagagctaagagagcagttgagctca

SEQ ID NO: 426144 - DNA, 55 bp, Artificial
  Synthetic oligonucleotide
gggacattagaacacacttaccaacccaactccatgagaccaacgacgcagttct

SEQ ID NO: 426145 - DNA, 55 bp, Artificial
  Synthetic oligonucleotide
gggacattagagtacaccatgggacgttatgaaggcttaacatctttgatcacta

SEQ ID NO: 426146 - DNA, 55 bp, Artificial
  Synthetic oligonucleotide
gggacattcatatattgtcttattcagctacagattcagaccttagtcctgccag

SEQ ID NO: 426147 - DNA, 57 bp, Artificial
  Synthetic oligonucleotide
gggacattcatgtacaggaattgttaatggtttgcctagctaggttaatgattaaac

SEQ ID NO: 426148 - DNA, 55 bp, Artificial
  Synthetic oligonucleotide
gggacattggcttgcaatcaacagtagttatgaacataccatggacatcagggtc

SEQ ID NO: 426149 - DNA, 55 bp, Artificial
  Synthetic oligonucleotide
gggacattggtaatccatgaactacagtgaatatcgagtttagcagtaggactcc

SEQ ID NO: 426150 - DNA, 60 bp, Artificial
  Synthetic oligonucleotide
gggacattggttgcattgcttgccctagatgccactagcatgagtatggaccagggcctc

SEQ ID NO: 426151 - DNA, 55 bp, Artificial
  Synthetic oligonucleotide
gggacatttggtcttatcctctatgtacgcccacttgttaccggccggcacgttg

SEQ ID NO: 426152 - DNA, 55 bp, Artificial
  Synthetic oligonucleotide
gggaccaaagcttaaggccatgtgtaaagttaacccctctctgcgtcacgttaga

SEQ ID NO: 426153 - DNA, 55 bp, Artificial
  Synthetic oligonucleotide
gggaccaaagtgaacacactaaccgagaggggaattgaggtagtgaatgccacag

SEQ ID NO: 426154 - DNA, 55 bp, Artificial
  Synthetic oligonucleotide
gggaccaaatggatcacgaaggcttgcaataggaagtctaatagttccattagac

SEQ ID NO: 426155 - DNA, 59 bp, Artificial
  Synthetic oligonucleotide
gggaccaagagagaacgtagcagttatacaggttggtggctcaaatatactcgacataa

SEQ ID NO: 426156 - DNA, 60 bp, Artificial
  Synthetic oligonucleotide
gggaccaagagagaatgtagctgtgatacaagtcggtggtgctgacatacttgacataac

SEQ ID NO: 426157 - DNA, 60 bp, Artificial
  Synthetic oligonucleotide
gggaccaagcaagtatgcatagcatggtctagttcaagttgtcacgatggaagagcatgg

SEQ ID NO: 426158 - DNA, 60 bp, Artificial
  Synthetic oligonucleotide
gggaccaataaatagacttgctcaccaagtcttcatcgaccaacatgtgggatccattgt

SEQ ID NO: 426159 - DNA, 60 bp, Artificial
  Synthetic oligonucleotide
gggaccaatcactcgcgagtgtatcgcactgcgcaacaacaattacgttcatgtatgtag

SEQ ID NO: 426160 - DNA, 55 bp, Artificial
  Synthetic oligonucleotide
gggaccaccactataatgataatgtttcctgttattgcggtccacgtggtccaat

SEQ ID NO: 426161 - DNA, 59 bp, Artificial
  Synthetic oligonucleotide
gggaccacgagaaaatgtggctgtaatccaagttggaggttctgacatacttgatataa

SEQ ID NO: 426162 - DNA, 55 bp, Artificial
  Synthetic oligonucleotide
gggaccagatatgcattgggtaccatgccaataactctaccgaaacggtcgacac

SEQ ID NO: 426163 - DNA, 60 bp, Artificial
  Synthetic oligonucleotide
gggaccagattgccactctagcaatgaggagttgcaaggtcaccaatgatcttgaggact

SEQ ID NO: 426164 - DNA, 60 bp, Artificial
  Synthetic oligonucleotide
gggaccagcagctacactagaagaaatgatgacagcatgtcaaggagtggggggacccgg

SEQ ID NO: 426165 - DNA, 58 bp, Artificial
  Synthetic oligonucleotide
gggaccagccgatagtcttgaggggcaagggtggcgacttctcgcgcctatcacggcc

SEQ ID NO: 426166 - DNA, 55 bp, Artificial
  Synthetic oligonucleotide
gggaccagcgccgtttatctatagaaatgtacattaacacacgcagttcagctag

SEQ ID NO: 426167 - DNA, 60 bp, Artificial
  Synthetic oligonucleotide
gggaccaggagacaagtcatctgacatctcatcggccctcgacatcattgaattcatact

SEQ ID NO: 426168 - DNA, 60 bp, Artificial
  Synthetic oligonucleotide
gggaccaggggcttcactagaagaaatgatgacagcatgtcagggagtgggaggacctag

SEQ ID NO: 426169 - DNA, 56 bp, Artificial
  Synthetic oligonucleotide
gggaccagttcaggagaatcatttgtcggaagcccagtttcctccgaagttgtagc

SEQ ID NO: 426170 - DNA, 60 bp, Artificial
  Synthetic oligonucleotide
gggaccatacagagtacaggtagtttatgagagaacctattgcatgacaggagtcctgat

SEQ ID NO: 426171 - DNA, 55 bp, Artificial
  Synthetic oligonucleotide
gggaccatacctgctagaagaaccaagactcatccctatgaggcatatgtcaagc

SEQ ID NO: 426172 - DNA, 55 bp, Artificial
  Synthetic oligonucleotide
gggaccatgaaaatcgtgggtcctaaaacatgcagcaatgtctggcacggcacat

SEQ ID NO: 426173 - DNA, 50 bp, Artificial
  Synthetic oligonucleotide
gggaccatgaagatccacggtcccaagacatgtagtaatatctggcatgg

SEQ ID NO: 426174 - DNA, 55 bp, Artificial
  Synthetic oligonucleotide
gggaccatgcaaagtacagtcattcgaaaagagacatgatgtcacgcacacgggg

SEQ ID NO: 426175 - DNA, 55 bp, Artificial
  Synthetic oligonucleotide
gggaccatgcggaaccgcgccacgacattccacgtcacgatcagctgggagattg

SEQ ID NO: 426176 - DNA, 60 bp, Artificial
  Synthetic oligonucleotide
gggaccatgtgagccaggtgattgtggaggaaagttactctgtaaacatggtgtgattgg

SEQ ID NO: 426177 - DNA, 55 bp, Artificial
  Synthetic oligonucleotide
gggaccattaacagcaaaagtaccgagcaccagctctagtgatactctgcaggga

SEQ ID NO: 426178 - DNA, 58 bp, Artificial
  Synthetic oligonucleotide
gggaccattacccccaggacaactgagagaacctagaggaagtgatatagcagggaca

SEQ ID NO: 426179 - DNA, 55 bp, Artificial
  Synthetic oligonucleotide
gggacccaaattaaatagtgacgctaaagactgtaggtaggtcatcataacacgc

SEQ ID NO: 426180 - DNA, 55 bp, Artificial
  Synthetic oligonucleotide
gggacccaagagggtcagatatagcaggaaccaccagcacagtagaggaacagat

SEQ ID NO: 426181 - DNA, 55 bp, Artificial
  Synthetic oligonucleotide
gggacccaagaggttcagacatagcgggaacaaccagctctgttgctgagcaaat

SEQ ID NO: 426182 - DNA, 55 bp, Artificial
  Synthetic oligonucleotide
gggacccactagatactccatattcatccatacaccataaagaactattcttcgc

SEQ ID NO: 426183 - DNA, 55 bp, Artificial
  Synthetic oligonucleotide
gggaccccaatgtaaccagacgatgcatgataaacgggtacgaccacgcactgtt

SEQ ID NO: 426184 - DNA, 55 bp, Artificial
  Synthetic oligonucleotide
gggaccccacaagctctgaatttattacatctcaaatcctagtatgcaatgagga

SEQ ID NO: 426185 - DNA, 55 bp, Artificial
  Synthetic oligonucleotide
gggaccccatcctcttttcccgattatatttgggttgaccattccatgaatagcg

SEQ ID NO: 426186 - DNA, 55 bp, Artificial
  Synthetic oligonucleotide
gggaccccatcgatggacgcgttgtcagctcagctctacaataccttatccctcg

SEQ ID NO: 426187 - DNA, 60 bp, Artificial
  Synthetic oligonucleotide
gggaccccccacaaccagaatacgacttagagctcataacatcatgctcctccaatgtgt

SEQ ID NO: 426188 - DNA, 56 bp, Artificial
  Synthetic oligonucleotide
gggaccccgatatatcggtaatcaattgggacctctggagtcttataaagtgcttg

SEQ ID NO: 426189 - DNA, 55 bp, Artificial
  Synthetic oligonucleotide
gggacccctagtgggtctcttgtatctagtgatggtcagctgttcaacagacctt

SEQ ID NO: 426190 - DNA, 55 bp, Artificial
  Synthetic oligonucleotide
gggacccctcacagtaaatgaaactagaagactaaaattgatcatgcctgctagg

SEQ ID NO: 426191 - DNA, 53 bp, Artificial
  Synthetic oligonucleotide
gggacccctccgcataggctctagtaacgaagtagtttacgtagacaaggggc

SEQ ID NO: 426192 - DNA, 52 bp, Artificial
  Synthetic oligonucleotide
gggaccccttggtagtaaccttggacacctgttaagcgccattttcaggact

SEQ ID NO: 426193 - DNA, 53 bp, Artificial
  Synthetic oligonucleotide
gggacccggatttcaaagtagctcagggtcaatctgacttcttactgagctac

SEQ ID NO: 426194 - DNA, 56 bp, Artificial
  Synthetic oligonucleotide
gggacccggccataaagcaagagttttggcggaagcaatgagccaagtaacaggtc

SEQ ID NO: 426195 - DNA, 55 bp, Artificial
  Synthetic oligonucleotide
gggaccctagagcagttgactctaaaagcgaaggtgcacatatcggaggaaccac

SEQ ID NO: 426196 - DNA, 57 bp, Artificial
  Synthetic oligonucleotide
gggaccctgaacgccgcgaccttcgaaggaagtctgtctgaagtggagagcttctcc

SEQ ID NO: 426197 - DNA, 55 bp, Artificial
  Synthetic oligonucleotide
gggacccttgcgccctcgcggaaatgacttctacgatgaaccagacgactggtac

SEQ ID NO: 426198 - DNA, 55 bp, Artificial
  Synthetic oligonucleotide
gggaccctttgcagaatccactcccggagactttatacggtctccggtgtatgct

SEQ ID NO: 426199 - DNA, 55 bp, Artificial
  Synthetic oligonucleotide
gggaccgactgtgattaaaggctacgacgtgaaccagataggaaatatcatggag

SEQ ID NO: 426200 - DNA, 53 bp, Artificial
  Synthetic oligonucleotide
gggaccgagagcgcgttgaatcggggtcgtatctttacgacctcttttcgcgt

SEQ ID NO: 426201 - DNA, 54 bp, Artificial
  Synthetic oligonucleotide
gggaccgaggcatactgcaaagagtacgtacttgacccaaccggtaggaaccac

SEQ ID NO: 426202 - DNA, 54 bp, Artificial
  Synthetic oligonucleotide
gggaccgattcgttcctacctagcaagtcgcgaatcacgaccccttaataacaa

SEQ ID NO: 426203 - DNA, 53 bp, Artificial
  Synthetic oligonucleotide
gggaccgcaggcctaaagtcaatttttccaaagtagtaagcgaagaacagacg

SEQ ID NO: 426204 - DNA, 53 bp, Artificial
  Synthetic oligonucleotide
gggaccgctcatttttggaggaggactgaggggcggaagccctaatgtacccg

SEQ ID NO: 426205 - DNA, 55 bp, Artificial
  Synthetic oligonucleotide
gggaccgctgcaaagaaacacttcatcgtcgcaactaacatcattgaaaatggag

SEQ ID NO: 426206 - DNA, 56 bp, Artificial
  Synthetic oligonucleotide
gggaccgctggactaccgtccacccacctacggctggactcacggcgccgcgtagc

SEQ ID NO: 426207 - DNA, 54 bp, Artificial
  Synthetic oligonucleotide
gggaccggacaccatatcttgggtccggtccctctatctgctagaataggaaga

SEQ ID NO: 426208 - DNA, 60 bp, Artificial
  Synthetic oligonucleotide
gggaccggacgctcgagggcatggcaagcaatgttattcacttttagagcgtgcatatca

SEQ ID NO: 426209 - DNA, 57 bp, Artificial
  Synthetic oligonucleotide
gggaccggccgatagctttgaagggcaaggttggcgactcctcgcgcctatcacggc

SEQ ID NO: 426210 - DNA, 55 bp, Artificial
  Synthetic oligonucleotide
gggaccggggagtggcgagccctcagatgctgcatataagaagacgcttgttgcc

SEQ ID NO: 426211 - DNA, 53 bp, Artificial
  Synthetic oligonucleotide
gggaccggggtcgccgtgttagggggcgtggtccccactgactcatacgcagg

SEQ ID NO: 426212 - DNA, 55 bp, Artificial
  Synthetic oligonucleotide
gggacctaatgaatctagccacctgggtgggtagtaatttggaaccaacagccag

SEQ ID NO: 426213 - DNA, 55 bp, Artificial
  Synthetic oligonucleotide
gggacctccaagcatagcgggaggattggccaaaatatggcagcacaaaactttg

SEQ ID NO: 426214 - DNA, 55 bp, Artificial
  Synthetic oligonucleotide
gggacctccaaggtttcccgctcagctaattattcacgtggcacgggtatgggcc

SEQ ID NO: 426215 - DNA, 58 bp, Artificial
  Synthetic oligonucleotide
gggacctccgtgctacggagagacaacccttgaccccagctcaacatgagctggtttc

SEQ ID NO: 426216 - DNA, 60 bp, Artificial
  Synthetic oligonucleotide
gggacctgctaatggtttcttcagtagactgaactggttgaccaaatcaggaagcacata

SEQ ID NO: 426217 - DNA, 58 bp, Artificial
  Synthetic oligonucleotide
gggacctgctagcggttttttcagtagactgaactggttgactaagtcagggagcgca

SEQ ID NO: 426218 - DNA, 58 bp, Artificial
  Synthetic oligonucleotide
gggacctggggccaccctagaggaaatgatgacagcttgtcaaggagtaggaggacca

SEQ ID NO: 426219 - DNA, 55 bp, Artificial
  Synthetic oligonucleotide
gggacctgggtgcgatgcgagcccaacaacgtgggatgtgtgatgaggaccgtca

SEQ ID NO: 426220 - DNA, 56 bp, Artificial
  Synthetic oligonucleotide
gggaccttggaaaagcagccacctctgcagaccccgagtcggaagtcaagaaagta

SEQ ID NO: 426221 - DNA, 58 bp, Artificial
  Synthetic oligonucleotide
gggacctttttattgaacgcagcaaagcttacagcaactgttacccttatgatgtgcc

SEQ ID NO: 426222 - DNA, 58 bp, Artificial
  Synthetic oligonucleotide
gggacgaaaccaacgagccctcgagtattccacatatcacatgggaagtgtcccagtg

SEQ ID NO: 426223 - DNA, 55 bp, Artificial
  Synthetic oligonucleotide
gggacgaacattggtgaagggattgtcagggtggttcatggaaagggcgaagctc

SEQ ID NO: 426224 - DNA, 59 bp, Artificial
  Synthetic oligonucleotide
gggacgaacttggaagatagcacactacttgcgcctataaagcccaactgtctgtgacc

SEQ ID NO: 426225 - DNA, 54 bp, Artificial
  Synthetic oligonucleotide
gggacgaagccgcccccggctgcgcccctctgtccaccttcgagggggttcaca

SEQ ID NO: 426226 - DNA, 51 bp, Artificial
  Synthetic oligonucleotide
gggacgaccactctaactaccaggcgttttagttgttggtcttcgtttacg

SEQ ID NO: 426227 - DNA, 54 bp, Artificial
  Synthetic oligonucleotide
gggacgaccgacagggcgggcgttcctacctacagctggggtgaaaatgatacg

SEQ ID NO: 426228 - DNA, 60 bp, Artificial
  Synthetic oligonucleotide
gggacgacctccctgctgagcaaatccgagtgttctcaaaatctcactcctcctgttgag

SEQ ID NO: 426229 - DNA, 55 bp, Artificial
  Synthetic oligonucleotide
gggacgagatcctcgataacaaggagaggagatcagatctaatgatacaatgcgc

SEQ ID NO: 426230 - DNA, 54 bp, Artificial
  Synthetic oligonucleotide
gggacgagcaagtactcgacaactggtgggcacacacggggtgacttgggagct

SEQ ID NO: 426231 - DNA, 60 bp, Artificial
  Synthetic oligonucleotide
gggacgagcaatgtatgccgctcccattgcaggaaacattaactgtagctcaaatattac

SEQ ID NO: 426232 - DNA, 55 bp, Artificial
  Synthetic oligonucleotide
gggacgagctcaacactgatgactgaagtgactggcggcagaactggccaagttc

SEQ ID NO: 426233 - DNA, 54 bp, Artificial
  Synthetic oligonucleotide
gggacgaggtgtcgttctcggtaggactcaattcgttcgtagtgggatcccaac

SEQ ID NO: 426234 - DNA, 52 bp, Artificial
  Synthetic oligonucleotide
gggacgataaaagctcgatacatgggcctgattttctgggctcttggattgg

SEQ ID NO: 426235 - DNA, 55 bp, Artificial
  Synthetic oligonucleotide
gggacgatgagcctgtcatcacagagacttcatgcaatgtagatttccttcctgg

SEQ ID NO: 426236 - DNA, 55 bp, Artificial
  Synthetic oligonucleotide
gggacgattgtggtgtattaacatgaactcgagggcttgccaactttggtcggat

SEQ ID NO: 426237 - DNA, 56 bp, Artificial
  Synthetic oligonucleotide
gggacgcagcagtctcaggggactacagaaggggtgggaagcccttaagtagctgg

SEQ ID NO: 426238 - DNA, 60 bp, Artificial
  Synthetic oligonucleotide
gggacgccaattcaatgacatggtgtgaagacctgcatgtgcttgattgtgagtcctccg

SEQ ID NO: 426239 - DNA, 57 bp, Artificial
  Synthetic oligonucleotide
gggacgcccggagcaaggtaagcagggacgcctgctggtggggagggaactagcagc

SEQ ID NO: 426240 - DNA, 55 bp, Artificial
  Synthetic oligonucleotide
gggacgcggaagtacaggggatttgggaccgtccagataaagacgccattgttga

SEQ ID NO: 426241 - DNA, 55 bp, Artificial
  Synthetic oligonucleotide
gggacgcggttagtcccgggacagccgacaacagccatcagcaaacatgcacgtc

SEQ ID NO: 426242 - DNA, 59 bp, Artificial
  Synthetic oligonucleotide
gggacgcgtaacgatcttgaactgtgacccattagtcttgatccatctacaagccgtct

SEQ ID NO: 426243 - DNA, 60 bp, Artificial
  Synthetic oligonucleotide
gggacgcttacggcttccaatattcacccaagcagcgagtggaacgcttgctcgcgatgt

SEQ ID NO: 426244 - DNA, 55 bp, Artificial
  Synthetic oligonucleotide
gggacggaaaatggatgagagaactgattctgtatgacaaagaggagatcaggag

SEQ ID NO: 426245 - DNA, 53 bp, Artificial
  Synthetic oligonucleotide
gggacggaacttattagctatgccggtttaggtaggagataatagccgtccct

SEQ ID NO: 426246 - DNA, 59 bp, Artificial
  Synthetic oligonucleotide
gggacggacaatcaaagaggattcacgctcaggttatgagaccttcagggtcattggtg

SEQ ID NO: 426247 - DNA, 56 bp, Artificial
  Synthetic oligonucleotide
gggacggaccctgcggtgtcgggtttagtgtgaattatcagcctcgaactggagac

SEQ ID NO: 426248 - DNA, 53 bp, Artificial
  Synthetic oligonucleotide
gggacggacgaagaacaggggcccattcctacggcacccagagaaaattcgct

SEQ ID NO: 426249 - DNA, 55 bp, Artificial
  Synthetic oligonucleotide
gggacggagaacttccgtgtcgcgtgaactctgccatcaacgtctggtggccaga

SEQ ID NO: 426250 - DNA, 59 bp, Artificial
  Synthetic oligonucleotide
gggacggcaagtaagccacatttcgttgtagccacaaacataatcgagaatggagtgac

SEQ ID NO: 426251 - DNA, 60 bp, Artificial
  Synthetic oligonucleotide
gggacggcagactccccgcgacgcagcttcgacgtcacatcgatctgcttgttgggagcg

SEQ ID NO: 426252 - DNA, 55 bp, Artificial
  Synthetic oligonucleotide
gggacggcagagatccggtttggaagggaccagcgcgactgctgtggaaaggtga

SEQ ID NO: 426253 - DNA, 55 bp, Artificial
  Synthetic oligonucleotide
gggacggggcgtagacgtgctgtataatggctggagctttctttgctggattggc

SEQ ID NO: 426254 - DNA, 57 bp, Artificial
  Synthetic oligonucleotide
gggacggggcgtgatcacacggtcccatataagcgggtgtactgacgaatggctgag

SEQ ID NO: 426255 - DNA, 59 bp, Artificial
  Synthetic oligonucleotide
gggacggtacaggaattcactccacccctaaatcgtgactcacagagtcatattacata

SEQ ID NO: 426256 - DNA, 52 bp, Artificial
  Synthetic oligonucleotide
gggacggtcatccttttactgcctggaatatttcccatcgcagatgctgaga

SEQ ID NO: 426257 - DNA, 54 bp, Artificial
  Synthetic oligonucleotide
gggacggtggtagttgcgatcccttatcgtccgttcaaagagacctacttgcgg

SEQ ID NO: 426258 - DNA, 60 bp, Artificial
  Synthetic oligonucleotide
gggacggttgatccaaaacagcttaacaatagagagaatggtgctctctgcttttgacga

SEQ ID NO: 426259 - DNA, 55 bp, Artificial
  Synthetic oligonucleotide
gggacgtacacacatggggcgtatcttctaacccgtttaactcaccgaacagaga

SEQ ID NO: 426260 - DNA, 55 bp, Artificial
  Synthetic oligonucleotide
gggacgtagacgtattggtccgatcccgtagcctcctgctcttccggcttcttac

SEQ ID NO: 426261 - DNA, 55 bp, Artificial
  Synthetic oligonucleotide
gggacgtccttctcattaaaaggataatgaagcgctgctaagatcttcgggccta

SEQ ID NO: 426262 - DNA, 58 bp, Artificial
  Synthetic oligonucleotide
gggacgtcgcacaagcaatcagtgacgtgctagcgggaggtacccaaacagtgggttc

SEQ ID NO: 426263 - DNA, 57 bp, Artificial
  Synthetic oligonucleotide
gggacgtcgcttacagcctctatttacggctgggggagaccgactatgacgtcacca

SEQ ID NO: 426264 - DNA, 58 bp, Artificial
  Synthetic oligonucleotide
gggacgtgacacgtattacgacgtgttccatgttagcgtaaccctgattacatccgca

SEQ ID NO: 426265 - DNA, 60 bp, Artificial
  Synthetic oligonucleotide
gggacgtgatatcatccgctgcacacgttgccacgcaggctgttaccgatgggaaagttt

SEQ ID NO: 426266 - DNA, 55 bp, Artificial
  Synthetic oligonucleotide
gggacgtgtcggccacaccgtgtctggggttactagcctcttttcaccaggcgct

SEQ ID NO: 426267 - DNA, 55 bp, Artificial
  Synthetic oligonucleotide
gggacgttctggtatcttctatcgactgtagaccggactatgtcgacctgaagca

SEQ ID NO: 426268 - DNA, 53 bp, Artificial
  Synthetic oligonucleotide
gggacgttgggaaaaaagttcaaacagtatagagagttgaaacctcagacctg

SEQ ID NO: 426269 - DNA, 55 bp, Artificial
  Synthetic oligonucleotide
gggacgtttggttgaacggtggctctgaaatgagttacgcagagttcaaagccga

SEQ ID NO: 426270 - DNA, 55 bp, Artificial
  Synthetic oligonucleotide
gggactaacaagatcctagtgccaaaggtcaatgcatcacagtatagagtgtttc

SEQ ID NO: 426271 - DNA, 55 bp, Artificial
  Synthetic oligonucleotide
gggactaagccgtatgcatcctacatgatggcggttaaaaccttagagaggatga

SEQ ID NO: 426272 - DNA, 54 bp, Artificial
  Synthetic oligonucleotide
gggactaaggagggggtgggaggtcctcaaacttctggggaatctcgtgcagta

SEQ ID NO: 426273 - DNA, 55 bp, Artificial
  Synthetic oligonucleotide
gggactaatgtgtcaggatgacataacgtatctgtgcccaaagttggagtacggc

SEQ ID NO: 426274 - DNA, 57 bp, Artificial
  Synthetic oligonucleotide
gggactacaatcgacatgcaccattgtggtaccatggatagctcagggatactaccg

SEQ ID NO: 426275 - DNA, 55 bp, Artificial
  Synthetic oligonucleotide
gggactacagtaccccgcacgtcattagtcaacttggggaggaactgtactggac

SEQ ID NO: 426276 - DNA, 58 bp, Artificial
  Synthetic oligonucleotide
gggactacgaggggaccctagagcagttgactctaaaagcgaaggtgcacatatcgga

SEQ ID NO: 426277 - DNA, 55 bp, Artificial
  Synthetic oligonucleotide
gggactactgcccattgggctggtgttcccggggatatggtgtctattcccaagc

SEQ ID NO: 426278 - DNA, 55 bp, Artificial
  Synthetic oligonucleotide
gggactataaaaccagtactgggggagagagtgatccccgacccagtagtagaca

SEQ ID NO: 426279 - DNA, 55 bp, Artificial
  Synthetic oligonucleotide
gggactatacatgatcggagcccgttcagagccctcataagctgggagatgggtc

SEQ ID NO: 426280 - DNA, 55 bp, Artificial
  Synthetic oligonucleotide
gggactatcctaagtgtgatagagctatgccctcaatgattcgtatgttgtcggc

SEQ ID NO: 426281 - DNA, 57 bp, Artificial
  Synthetic oligonucleotide
gggactatggcatgtataggcgcaaagcggggtttcggttgtacgcgattaggagtc

SEQ ID NO: 426282 - DNA, 59 bp, Artificial
  Synthetic oligonucleotide
gggactatgttgtcacaacagacatatccgaaatgggagcaaactttcgagccgacagg

SEQ ID NO: 426283 - DNA, 60 bp, Artificial
  Synthetic oligonucleotide
gggactattatactcacatagacccagtaacagcagacagaatgattcattgggaatatt

SEQ ID NO: 426284 - DNA, 55 bp, Artificial
  Synthetic oligonucleotide
gggactcaaatcgtgaccgtaacagaacacaacggcaagggtctggtgaagacca

SEQ ID NO: 426285 - DNA, 55 bp, Artificial
  Synthetic oligonucleotide
gggactcaattatgatttcacctcgagatcaacacaaaagaaggacctttggttc

SEQ ID NO: 426286 - DNA, 60 bp, Artificial
  Synthetic oligonucleotide
gggactcagaggactctgcgtactcagagataatatgaaattaggagcacaagaactaga

SEQ ID NO: 426287 - DNA, 55 bp, Artificial
  Synthetic oligonucleotide
gggactcatcatatatgcaacaagtcagcgaagggttgatgactggaaaagttcc

SEQ ID NO: 426288 - DNA, 60 bp, Artificial
  Synthetic oligonucleotide
gggactccctccgatatcagtttacggagcgagactcaggcgggtatacagtctatctgc

SEQ ID NO: 426289 - DNA, 59 bp, Artificial
  Synthetic oligonucleotide
gggactcctgcttgtgacctacacctcaccgggacatgggacactttaatagagagaga

SEQ ID NO: 426290 - DNA, 60 bp, Artificial
  Synthetic oligonucleotide
gggactcgaaagcggaagttcccagaggagatctctcgacgcaggactcggcttgctgca

SEQ ID NO: 426291 - DNA, 55 bp, Artificial
  Synthetic oligonucleotide
gggactcgtgtagtgaatctggaccaaatagctccaatgaggtttgttttagatc

SEQ ID NO: 426292 - DNA, 55 bp, Artificial
  Synthetic oligonucleotide
gggactctacagttatcctatattgattctttgtgctattctaagcaccattggg

SEQ ID NO: 426293 - DNA, 55 bp, Artificial
  Synthetic oligonucleotide
gggactctcttaacatcagaaagatctaagcatgctcgtatggttagtgagcaca

SEQ ID NO: 426294 - DNA, 55 bp, Artificial
  Synthetic oligonucleotide
gggactctgtaacttcagaagctagaggacaaataggccatgcctcaaaccaagt

SEQ ID NO: 426295 - DNA, 54 bp, Artificial
  Synthetic oligonucleotide
gggactgaaaggaaaactgtgtccgtgcaagagacccggagcctaggcggctcc

SEQ ID NO: 426296 - DNA, 55 bp, Artificial
  Synthetic oligonucleotide
gggactgaaaggggatcaccatggcaatacagaacagcaggagtatggaaaagtg

SEQ ID NO: 426297 - DNA, 60 bp, Artificial
  Synthetic oligonucleotide
gggactgatgttcgccattgttggaggactcgctgagctagacattgattctatgtcagt

SEQ ID NO: 426298 - DNA, 55 bp, Artificial
  Synthetic oligonucleotide
gggactgattgttgccatgggtctttggatgtgctcgaatggttcaatgcagtgc

SEQ ID NO: 426299 - DNA, 60 bp, Artificial
  Synthetic oligonucleotide
gggactgcaaacacaacacttaaattattacttgcatacacaccacctggtattgatgaa

SEQ ID NO: 426300 - DNA, 57 bp, Artificial
  Synthetic oligonucleotide
gggactgcagcgtacacgctttgtccaaaatgcccttaatgggaatggggatccaaa

SEQ ID NO: 426301 - DNA, 55 bp, Artificial
  Synthetic oligonucleotide
gggactgccaaatgatctcattgaagattacaagttcatcaagacgcacttaggt

SEQ ID NO: 426302 - DNA, 55 bp, Artificial
  Synthetic oligonucleotide
gggactgcccacaatgtccaccccagggtcaaaccagttcttgacttcagacgat

SEQ ID NO: 426303 - DNA, 59 bp, Artificial
  Synthetic oligonucleotide
gggactggagagtcaattagacataggtatgctggtaacattgaggggccgtgtagatt

SEQ ID NO: 426304 - DNA, 59 bp, Artificial
  Synthetic oligonucleotide
gggactggctgagacttaaagcggcctacctgcaatatgggggcgagtggatccaagaa

SEQ ID NO: 426305 - DNA, 55 bp, Artificial
  Synthetic oligonucleotide
gggactggtggggcggaagcagaattgcgtgacttcatagcaaaatggaaaagtg

SEQ ID NO: 426306 - DNA, 54 bp, Artificial
  Synthetic oligonucleotide
gggactgtacagaattttcctatacctcgagtcgggtttggaatctaaggttga

SEQ ID NO: 426307 - DNA, 55 bp, Artificial
  Synthetic oligonucleotide
gggactgtcccaaatatgtcaaacagggatccttgaaacttgctacaggaatgag

SEQ ID NO: 426308 - DNA, 59 bp, Artificial
  Synthetic oligonucleotide
gggactgtggtggcatccttaggtgccagcacggtgtcattggcctagtgaccatggga

SEQ ID NO: 426309 - DNA, 55 bp, Artificial
  Synthetic oligonucleotide
gggactgttatgtaaatatccttgggtcccttggctataaataacacgtcacgag

SEQ ID NO: 426310 - DNA, 60 bp, Artificial
  Synthetic oligonucleotide
gggactgttcaatgagcacgaactatggcgcaatgtgtggtcgagatcgaatgacgggat

SEQ ID NO: 426311 - DNA, 55 bp, Artificial
  Synthetic oligonucleotide
gggactgttgtgtaaatattcttgggtacccaggatataaataccacgtcacgag

SEQ ID NO: 426312 - DNA, 55 bp, Artificial
  Synthetic oligonucleotide
gggactgtttcctgcgcttcctcagtgccttcaaacgccaaaattggggatgtgg

SEQ ID NO: 426313 - DNA, 54 bp, Artificial
  Synthetic oligonucleotide
gggactgtttggacaaaacatgctataccactacctcgggagggccggttacac

SEQ ID NO: 426314 - DNA, 55 bp, Artificial
  Synthetic oligonucleotide
gggacttacgatcatgacatatacagggacgaagcactgaacaatcggttccaga

SEQ ID NO: 426315 - DNA, 55 bp, Artificial
  Synthetic oligonucleotide
gggacttagagtaccagaccccaactctaagctggcgggtgcctgtgactgtgag

SEQ ID NO: 426316 - DNA, 55 bp, Artificial
  Synthetic oligonucleotide
gggacttatgcaagtcctgcatacagggagaaatcataagaagtacaccagctaa

SEQ ID NO: 426317 - DNA, 54 bp, Artificial
  Synthetic oligonucleotide
gggacttcaaccccaacaaggacaattggccagaagccaacaaggtaggagtgg

SEQ ID NO: 426318 - DNA, 55 bp, Artificial
  Synthetic oligonucleotide
gggacttcaaccccagcaaggaccactggccagcagccaatcaggtaggagtggg

SEQ ID NO: 426319 - DNA, 54 bp, Artificial
  Synthetic oligonucleotide
gggacttcagcttacacttcacttaacgttttagctaggtttacagatttggag

SEQ ID NO: 426320 - DNA, 55 bp, Artificial
  Synthetic oligonucleotide
gggacttcagggctggaattgactttcaccaatgactccatcattgaccacaagc

SEQ ID NO: 426321 - DNA, 55 bp, Artificial
  Synthetic oligonucleotide
gggacttcccaggccaaccagacatgtggaaagacacctttaaacctgacttctc

SEQ ID NO: 426322 - DNA, 55 bp, Artificial
  Synthetic oligonucleotide
gggacttcgccaaacattaatggctattgggtgatgatggacggagatgaacaag

SEQ ID NO: 426323 - DNA, 55 bp, Artificial
  Synthetic oligonucleotide
gggacttcggtggattctgttgtgccatccgatttagttggcgcttatacacctg

SEQ ID NO: 426324 - DNA, 55 bp, Artificial
  Synthetic oligonucleotide
gggacttcgtatctaccccaccactggtcaggttgacatttaacctagtaggaga

SEQ ID NO: 426325 - DNA, 55 bp, Artificial
  Synthetic oligonucleotide
gggacttcgtggaaggactgtcaggagctacgtgggtggatgtggtactggagca

SEQ ID NO: 426326 - DNA, 55 bp, Artificial
  Synthetic oligonucleotide
gggacttctctcacggacctcttggactacccttctggttggcttaaggggcagc

SEQ ID NO: 426327 - DNA, 55 bp, Artificial
  Synthetic oligonucleotide
gggacttcttcattcttgcgctcgccctaccattgacaactgatccgtgcgctcc

SEQ ID NO: 426328 - DNA, 56 bp, Artificial
  Synthetic oligonucleotide
gggacttcttgactttgcacttgagcttgaatttaggaatttgacccctgggaaca

SEQ ID NO: 426329 - DNA, 60 bp, Artificial
  Synthetic oligonucleotide
gggacttgacgcaggagcaattgcagttgttgaatgatttgtatcctgagaggcacattg

SEQ ID NO: 426330 - DNA, 60 bp, Artificial
  Synthetic oligonucleotide
gggacttgcattatcgcgtaatatcaactgcgcattatagcgggttcctcgaatttggaa

SEQ ID NO: 426331 - DNA, 54 bp, Artificial
  Synthetic oligonucleotide
gggacttgctcgtgagcactaccacggcacaagggtgtgatgttatcgctaggt

SEQ ID NO: 426332 - DNA, 56 bp, Artificial
  Synthetic oligonucleotide
gggacttggaacagttaaaacgtagacatgtgaggcgaccgaaactgaaagacagc

SEQ ID NO: 426333 - DNA, 60 bp, Artificial
  Synthetic oligonucleotide
gggacttgggagtggtcaaccctcagatgctgcatataagcagctgcttttcgcctgtac

SEQ ID NO: 426334 - DNA, 55 bp, Artificial
  Synthetic oligonucleotide
gggacttgggcctcaactctagctacaatttcaccgtcccattcatttccccgac

SEQ ID NO: 426335 - DNA, 60 bp, Artificial
  Synthetic oligonucleotide
gggacttgtacagaagtgggtcctggttctatacacgtggaggatctgcagacaacgtca

SEQ ID NO: 426336 - DNA, 59 bp, Artificial
  Synthetic oligonucleotide
gggacttgtttctatgagcacgatattaccaatgcttaaacttgacccagaaacagagc

SEQ ID NO: 426337 - DNA, 49 bp, Artificial
  Synthetic oligonucleotide
gggactttaattagtcccgttttaggttcctgcccttactagggtggtc

SEQ ID NO: 426338 - DNA, 55 bp, Artificial
  Synthetic oligonucleotide
gggactttacaaagacggcacaaagcagatacagtacggggctcccaggaaattg

SEQ ID NO: 426339 - DNA, 55 bp, Artificial
  Synthetic oligonucleotide
gggactttagtagaacagaccgaccaaataactccaactaatgcgagcaaaggtg

SEQ ID NO: 426340 - DNA, 55 bp, Artificial
  Synthetic oligonucleotide
gggactttcaggctatctccaactttatcgatcagaaaatgtccctaaagaccgg

SEQ ID NO: 426341 - DNA, 56 bp, Artificial
  Synthetic oligonucleotide
gggactttccagcgtgggagggacaagggcggatcagggagtggctaaccctcaga

SEQ ID NO: 426342 - DNA, 56 bp, Artificial
  Synthetic oligonucleotide
gggactttccagggaggtgtggcctgggcgggactggggagtggcgagccctcaga

SEQ ID NO: 426343 - DNA, 53 bp, Artificial
  Synthetic oligonucleotide
gggactttccagggaggtgtggctgggcggagttggggagtggttaaccctca

SEQ ID NO: 426344 - DNA, 53 bp, Artificial
  Synthetic oligonucleotide
gggactttccagggcgggtcatgggcggtacggggagtggctttaccctcaga

SEQ ID NO: 426345 - DNA, 56 bp, Artificial
  Synthetic oligonucleotide
gggactttctaggatactattatactacagaaccacctacattgccgtttctggtc

SEQ ID NO: 426346 - DNA, 52 bp, Artificial
  Synthetic oligonucleotide
gggactttgaacgacgcaaagccgagttaaaaagtttattcgatcgtaacca

SEQ ID NO: 426347 - DNA, 60 bp, Artificial
  Synthetic oligonucleotide
gggactttgttgtgaccactgacatatcagagatgggggctaactttggagcgcacagag

SEQ ID NO: 426348 - DNA, 52 bp, Artificial
  Synthetic oligonucleotide
gggacttttacctggacattgtcggattcttcgggaactgaaaccccaggtg

SEQ ID NO: 426349 - DNA, 55 bp, Artificial
  Synthetic oligonucleotide
gggactttttcaagcgcggcggggaacgcacaagagacaccacaaggagtaacat

SEQ ID NO: 426350 - DNA, 57 bp, Artificial
  Synthetic oligonucleotide
gggagaaacaagcgatatgagaggtaggtcaatattaactcctagaaagttcacaac

SEQ ID NO: 426351 - DNA, 55 bp, Artificial
  Synthetic oligonucleotide
gggagaaacatcctgcccaagcttggttgtgctaagagatagcccagtagaagta

SEQ ID NO: 426352 - DNA, 55 bp, Artificial
  Synthetic oligonucleotide
gggagaaagcctaggtgagtcggtcaagcgtgccgtaatcctgaacgttgcgggg

SEQ ID NO: 426353 - DNA, 59 bp, Artificial
  Synthetic oligonucleotide
gggagaacaatgaaacagaacactacagggatagtgacaaatggcacctctcaaaagaa

SEQ ID NO: 426354 - DNA, 56 bp, Artificial
  Synthetic oligonucleotide
gggagaacagacttcactattccacgtagatgattgtgtgaagaaccacgcacgcc

SEQ ID NO: 426355 - DNA, 53 bp, Artificial
  Synthetic oligonucleotide
gggagaaccaggtcggacatcggcgtattgagccacataagatagccactggg

SEQ ID NO: 426356 - DNA, 50 bp, Artificial
  Synthetic oligonucleotide
gggagaaccaggtgggattgacagtggtaaatgtgttgaccacgagtaaa

SEQ ID NO: 426357 - DNA, 55 bp, Artificial
  Synthetic oligonucleotide
gggagaacgttttcgaaaatcacgaaatggtgacaaagctgatgaactaatctcg

SEQ ID NO: 426358 - DNA, 55 bp, Artificial
  Synthetic oligonucleotide
gggagaagtagtagtaatgataaccacgcctgtagaagtgttaggtagggataac

SEQ ID NO: 426359 - DNA, 55 bp, Artificial
  Synthetic oligonucleotide
gggagaagtatgctctagcacaggatgtgctcaaataatttggccctgtaaggtg

SEQ ID NO: 426360 - DNA, 55 bp, Artificial
  Synthetic oligonucleotide
gggagaagtcatccaaggggtggtactggaaattcccggatgtgttaactgagac

SEQ ID NO: 426361 - DNA, 51 bp, Artificial
  Synthetic oligonucleotide
gggagaagtgcccttttacggcaaagcgattcccctagggttgattaaggg

SEQ ID NO: 426362 - DNA, 55 bp, Artificial
  Synthetic oligonucleotide
gggagaagtgctggaccccttacaataccagctactgtcgccgatgttagtgcgg

SEQ ID NO: 426363 - DNA, 60 bp, Artificial
  Synthetic oligonucleotide
gggagaagtgttagtgtggagatttgacagcagcctagcacgcagacatctggcccgcga

SEQ ID NO: 426364 - DNA, 55 bp, Artificial
  Synthetic oligonucleotide
gggagaatagggacgccaaggaaccactaactggaacaattattgagatgtggga

SEQ ID NO: 426365 - DNA, 53 bp, Artificial
  Synthetic oligonucleotide
gggagaatgaaccgaggaaatgtgcgctccacttggtttgtaacgaatgaggt

SEQ ID NO: 426366 - DNA, 57 bp, Artificial
  Synthetic oligonucleotide
gggagaatggattactactgggctgttcttaaacctggccaaactgtcaagatacaa

SEQ ID NO: 426367 - DNA, 55 bp, Artificial
  Synthetic oligonucleotide
gggagaatttctgaactcctggatgaccctactcgttgtagcagttattgacata

SEQ ID NO: 426368 - DNA, 55 bp, Artificial
  Synthetic oligonucleotide
gggagacaacacagccaatggaattggccgattgagagacgttggggtcgagaac

SEQ ID NO: 426369 - DNA, 55 bp, Artificial
  Synthetic oligonucleotide
gggagacactctggacatgctcgactcaacaggcaaagaagctcagggatctatc

SEQ ID NO: 426370 - DNA, 59 bp, Artificial
  Synthetic oligonucleotide
gggagacatacgggttaaagatggactagctcggaagattgatgtaaatccatgcgaaa

SEQ ID NO: 426371 - DNA, 58 bp, Artificial
  Synthetic oligonucleotide
gggagacatcttctccaccattttcgtgggcttattccctctagtaaggcacaggaca

SEQ ID NO: 426372 - DNA, 60 bp, Artificial
  Synthetic oligonucleotide
gggagaccaaatatgcttcagggtgggttgccatgtgcttacttaactcatctaattgca

SEQ ID NO: 426373 - DNA, 55 bp, Artificial
  Synthetic oligonucleotide
gggagaccagatcgaagaatcgctgattttggcacttgtatttgccctcgaactg

SEQ ID NO: 426374 - DNA, 55 bp, Artificial
  Synthetic oligonucleotide
gggagaccgttcttaggagatccaagtgaggtacacccacagtcaacgctgaggt

SEQ ID NO: 426375 - DNA, 51 bp, Artificial
  Synthetic oligonucleotide
gggagacgacacactgttttacacaaagctacacactacagatactaaggt

SEQ ID NO: 426376 - DNA, 55 bp, Artificial
  Synthetic oligonucleotide
gggagacgcaaatctcacagtggtggtggacaaactcgaccccactgattaccga

SEQ ID NO: 426377 - DNA, 55 bp, Artificial
  Synthetic oligonucleotide
gggagacggcgacagagcttgttgaagatacgcaggccattgcccgttacggtcg

SEQ ID NO: 426378 - DNA, 55 bp, Artificial
  Synthetic oligonucleotide
gggagactagtgaaatgagatctcgatcacttttaacacctcgtaaattcacaac

SEQ ID NO: 426379 - DNA, 55 bp, Artificial
  Synthetic oligonucleotide
gggagactggaggcccatagtgcaattccttaggtatcaaaatgtggagttcata

SEQ ID NO: 426380 - DNA, 55 bp, Artificial
  Synthetic oligonucleotide
gggagactgtagcttcgagggttggattgtagggaaccctgcctgtgccagcaac

SEQ ID NO: 426381 - DNA, 60 bp, Artificial
  Synthetic oligonucleotide
gggagactgtgaagatccaatggtcccaaaatcctacgatgctatacaataagatggagt

SEQ ID NO: 426382 - DNA, 55 bp, Artificial
  Synthetic oligonucleotide
gggagactgtgtaatccactaaatccttttgtcagccacaaagagattgaatcgg

SEQ ID NO: 426383 - DNA, 55 bp, Artificial
  Synthetic oligonucleotide
gggagacttctatttgcaccctagctactttggtattcgcaggaaacgtaaacgc

SEQ ID NO: 426384 - DNA, 60 bp, Artificial
  Synthetic oligonucleotide
gggagagaatgtggcggattggcttgatgagtgtgattgcatgcttgcatatttgttaga

SEQ ID NO: 426385 - DNA, 55 bp, Artificial
  Synthetic oligonucleotide
gggagagacctccaagcacaccctttccaggtcggggtcgccaacaacatcgcga

SEQ ID NO: 426386 - DNA, 55 bp, Artificial
  Synthetic oligonucleotide
gggagagacgagcagtcaatcgccgaagcgatcatagtggcaatggtgttctcac

SEQ ID NO: 426387 - DNA, 59 bp, Artificial
  Synthetic oligonucleotide
gggagagagcgtcggacgaagataccgacagtggtagaccagagacaagtgggcgagac

SEQ ID NO: 426388 - DNA, 57 bp, Artificial
  Synthetic oligonucleotide
gggagagatttgtcaatctccgtgaatcggctatgtatgaccctgttaccatgagat

SEQ ID NO: 426389 - DNA, 60 bp, Artificial
  Synthetic oligonucleotide
gggagagcaactccgatcgctcctctaccaaatgcagagggtccaacaaaatcaacacat

SEQ ID NO: 426390 - DNA, 55 bp, Artificial
  Synthetic oligonucleotide
gggagagcaattcggaagctcttagtaaggccctgtctttgacaaactgtaccac

SEQ ID NO: 426391 - DNA, 59 bp, Artificial
  Synthetic oligonucleotide
gggagagcctatcaagcaaggacaaaggacggacctacagctgctggttaaagacacaa

SEQ ID NO: 426392 - DNA, 54 bp, Artificial
  Synthetic oligonucleotide
gggagagcgcagttatgttagtttcaaatagtattaaagacgtggtgcgagcta

SEQ ID NO: 426393 - DNA, 60 bp, Artificial
  Synthetic oligonucleotide
gggagaggcatccgcagcccgtgggcgggacccgcagagcattccgaaggtatgcggcgc

SEQ ID NO: 426394 - DNA, 55 bp, Artificial
  Synthetic oligonucleotide
gggagaggcattggtcacaaagggtcgagaggatacgcgccggatgaaagcgacc

SEQ ID NO: 426395 - DNA, 51 bp, Artificial
  Synthetic oligonucleotide
gggagagggagtatgattgctcaatctaattcggggactgaacaacaaaac

SEQ ID NO: 426396 - DNA, 60 bp, Artificial
  Synthetic oligonucleotide
gggagaggggataccgctatacgatgcaatcaaatgcatgaagacatttttcggctggaa

SEQ ID NO: 426397 - DNA, 60 bp, Artificial
  Synthetic oligonucleotide
gggagagggtctcttttcccgtctgcacgtatgtgccagcgactctatgcgaccaaatga

SEQ ID NO: 426398 - DNA, 55 bp, Artificial
  Synthetic oligonucleotide
gggagaggtgtatactatataaagtagaagctgtattgggcagttctcttttgcg

SEQ ID NO: 426399 - DNA, 55 bp, Artificial
  Synthetic oligonucleotide
gggagagtcggtgttattgcgcttgagtcgactaccgtgtgtcctcgcgtgtccg

SEQ ID NO: 426400 - DNA, 58 bp, Artificial
  Synthetic oligonucleotide
gggagagttcgctagacttttcaagaagtatggccaccgtgtggtgggattgtgtgga

SEQ ID NO: 426401 - DNA, 55 bp, Artificial
  Synthetic oligonucleotide
gggagataaatgggttctatgctctaaccgaagaacatctcgtagcttgcccacc

SEQ ID NO: 426402 - DNA, 56 bp, Artificial
  Synthetic oligonucleotide
gggagataatcattgatgaggctatgggattatcgcatagatgggaatatagattt

SEQ ID NO: 426403 - DNA, 55 bp, Artificial
  Synthetic oligonucleotide
gggagataatcgtgttgctgatcttggaagtgcctactttgatattgaaggaaca

SEQ ID NO: 426404 - DNA, 55 bp, Artificial
  Synthetic oligonucleotide
gggagatacatacgttcgctatggaccaagtggtaccggttggttgctaagctcg

SEQ ID NO: 426405 - DNA, 55 bp, Artificial
  Synthetic oligonucleotide
gggagatactgtgctgagttcttccctttgaggaaggtatgtcatatgaatccat

SEQ ID NO: 426406 - DNA, 55 bp, Artificial
  Synthetic oligonucleotide
gggagatacttaatgcaaggactagctaacggaatcatgaaaggtgttagttggg

SEQ ID NO: 426407 - DNA, 51 bp, Artificial
  Synthetic oligonucleotide
gggagatatagtacacaagtagaccctaacctagcagatcaactaattcat

SEQ ID NO: 426408 - DNA, 55 bp, Artificial
  Synthetic oligonucleotide
gggagatcaatggtcctgaatcagtgttgatcaatacttaccagtgggtcatcag

SEQ ID NO: 426409 - DNA, 59 bp, Artificial
  Synthetic oligonucleotide
gggagatcccttacgccctgatcaaccaatatcccttggcaattcagacggatgttaga

SEQ ID NO: 426410 - DNA, 58 bp, Artificial
  Synthetic oligonucleotide
gggagatcccttacgctctgattaatcgataccctttggcaatccagacggatgttaa

SEQ ID NO: 426411 - DNA, 55 bp, Artificial
  Synthetic oligonucleotide
gggagatccggattgccagtctgctcgatatcgcaggctgggtccgtgactaccc

SEQ ID NO: 426412 - DNA, 57 bp, Artificial
  Synthetic oligonucleotide
gggagatccgggtacacagtacacgtgcagtgtaacgcatccaaatttcaccaaggg

SEQ ID NO: 426413 - DNA, 55 bp, Artificial
  Synthetic oligonucleotide
gggagatctcacctgagaaatgacaccgatgtggtaaattttgtgagtatggagt

SEQ ID NO: 426414 - DNA, 57 bp, Artificial
  Synthetic oligonucleotide
gggagatctcactaccttacccggtcagctgtggcctgacccgtacagacgcgttat

SEQ ID NO: 426415 - DNA, 55 bp, Artificial
  Synthetic oligonucleotide
gggagatgacatacacattagagttatcatcaaagttgcgaaggatccaacttag

SEQ ID NO: 426416 - DNA, 55 bp, Artificial
  Synthetic oligonucleotide
gggagatgacgggatctcgggaacggtactgggaattggttgagagtctgattcg

SEQ ID NO: 426417 - DNA, 55 bp, Artificial
  Synthetic oligonucleotide
gggagatgaggatctagtaggctttcctgttttaccacaagtacccttgagaccc

SEQ ID NO: 426418 - DNA, 55 bp, Artificial
  Synthetic oligonucleotide
gggagatgattcgttgattgggtcatatcgtcctcttgatagatcaagggagcac

SEQ ID NO: 426419 - DNA, 55 bp, Artificial
  Synthetic oligonucleotide
gggagatggttgatgctgagcgcaagctccatcaacaggggcgatgccagtcttg

SEQ ID NO: 426420 - DNA, 60 bp, Artificial
  Synthetic oligonucleotide
gggagatgtatttgtcatcagggagccattcatttcatgctcccacttggaatgcaggac

SEQ ID NO: 426421 - DNA, 60 bp, Artificial
  Synthetic oligonucleotide
gggagattcgtgctaagaaggtattggacgatgagttagatcctcaccagacaagaatcc

SEQ ID NO: 426422 - DNA, 60 bp, Artificial
  Synthetic oligonucleotide
gggagattctaccaatcacttggactgcagaataggtgaaggtgaccctatgctaatgag

SEQ ID NO: 426423 - DNA, 59 bp, Artificial
  Synthetic oligonucleotide
gggagattgcagctttgagggttggatcgtaggaaatcctgcctgtactagcaactttg

SEQ ID NO: 426424 - DNA, 55 bp, Artificial
  Synthetic oligonucleotide
gggagattggtcaatgcaaggctcgtaacatttacctatagattcgggtacatgc

SEQ ID NO: 426425 - DNA, 55 bp, Artificial
  Synthetic oligonucleotide
gggagatttaagggtcacatttaattttggccttgattgtgcaaggttggaaatc

SEQ ID NO: 426426 - DNA, 56 bp, Artificial
  Synthetic oligonucleotide
gggagatttctggcatcactgtaaaagtcagaggttatgttgcaaattgtgttgga

SEQ ID NO: 426427 - DNA, 55 bp, Artificial
  Synthetic oligonucleotide
gggagatttgaatatatcatcggacggggtatcctatgctcttaggagccagcag

SEQ ID NO: 426428 - DNA, 55 bp, Artificial
  Synthetic oligonucleotide
gggagatttgtgggtcacatatgaggtcgagttatcgaaacctattatggactcc

SEQ ID NO: 426429 - DNA, 58 bp, Artificial
  Synthetic oligonucleotide
gggagattttcactgttacatcatccgatcaatccttacttctcgatcttttggtggt

SEQ ID NO: 426430 - DNA, 52 bp, Artificial
  Synthetic oligonucleotide
gggagcaaatgtcaaggtactaacaagtccccttttcgaaagtacaagggtg

SEQ ID NO: 426431 - DNA, 55 bp, Artificial
  Synthetic oligonucleotide
gggagcaagagatctattggtgcaagaaaccggcactaaagtcatgcatgcgacc

SEQ ID NO: 426432 - DNA, 55 bp, Artificial
  Synthetic oligonucleotide
gggagcaagctcgcaccactctccgctttgcatccctcttctcgttagggccgtc

SEQ ID NO: 426433 - DNA, 58 bp, Artificial
  Synthetic oligonucleotide
gggagcaccacgtgtcctggccaaaattcgcagtccccaacctccaatcactcaccaa

SEQ ID NO: 426434 - DNA, 60 bp, Artificial
  Synthetic oligonucleotide
gggagcacccgctttgaactctcctaatgtagaagcgtgtggatacagtgatagggttca

SEQ ID NO: 426435 - DNA, 55 bp, Artificial
  Synthetic oligonucleotide
gggagcacggattttctttgcaccctgaaatgatcaacatgaatgcagtggatgc

SEQ ID NO: 426436 - DNA, 55 bp, Artificial
  Synthetic oligonucleotide
gggagcacttactttgacattcggggcacgctggaccggggtccaagctttaagc

SEQ ID NO: 426437 - DNA, 55 bp, Artificial
  Synthetic oligonucleotide
gggagcagactttctcactggtactctaccgagctactccgagcatgatagggct

SEQ ID NO: 426438 - DNA, 55 bp, Artificial
  Synthetic oligonucleotide
gggagcaggcagcatctctaggtgcagcggtcattgtcatcctgaccctcgtcac

SEQ ID NO: 426439 - DNA, 55 bp, Artificial
  Synthetic oligonucleotide
gggagcagttgtacagacaggctaccaaccatacccttcagttactacctttacc

SEQ ID NO: 426440 - DNA, 60 bp, Artificial
  Synthetic oligonucleotide
gggagcatacccttgcgatggtcgtggaccccaacagtgagctggaacgctcactggctc

SEQ ID NO: 426441 - DNA, 57 bp, Artificial
  Synthetic oligonucleotide
gggagcatacctaatgacaaaccctttcaaaatgtaaacaagatcacatacggggca

SEQ ID NO: 426442 - DNA, 55 bp, Artificial
  Synthetic oligonucleotide
gggagcatatttgccactggggtctttcttcgtcagaggacgatatgtatcctcg

SEQ ID NO: 426443 - DNA, 55 bp, Artificial
  Synthetic oligonucleotide
gggagcattcggttggcttttcgaactgggaggaggttcccttctgctcacacca

SEQ ID NO: 426444 - DNA, 53 bp, Artificial
  Synthetic oligonucleotide
gggagccaaaggtcgtcgtctcctagcaacctggttaaaggttaaccacatcc

SEQ ID NO: 426445 - DNA, 55 bp, Artificial
  Synthetic oligonucleotide
gggagccaaccagctaacaagtaaacaagtcaccagctggccatggttcttcgcc

SEQ ID NO: 426446 - DNA, 60 bp, Artificial
  Synthetic oligonucleotide
gggagccagcgccgtatgatcacgcacaacggtttatacgatactgtaatatagattcac

SEQ ID NO: 426447 - DNA, 55 bp, Artificial
  Synthetic oligonucleotide
gggagccagctcttatgcagtaaggtttaccagagaggattggaagcgtgctaag

SEQ ID NO: 426448 - DNA, 55 bp, Artificial
  Synthetic oligonucleotide
gggagccaggtaccttgagttcgaggcgctcggattcctcaatgaagaccactgg

SEQ ID NO: 426449 - DNA, 55 bp, Artificial
  Synthetic oligonucleotide
gggagccaggttaagcactggcagctcaacaggcaggagtgcgccatcctgcact

SEQ ID NO: 426450 - DNA, 60 bp, Artificial
  Synthetic oligonucleotide
gggagccagtacagtccagtcttgtgagttcgccacaggctgatattccaaaggtcaccc

SEQ ID NO: 426451 - DNA, 60 bp, Artificial
  Synthetic oligonucleotide
gggagcccaagttgtgtacactcgcacttccaaagtgctcggagctcctctcaagctcgc

SEQ ID NO: 426452 - DNA, 50 bp, Artificial
  Synthetic oligonucleotide
gggagcccacggaccagaaatctatgtcgttaacggtgaattctttgctc

SEQ ID NO: 426453 - DNA, 55 bp, Artificial
  Synthetic oligonucleotide
gggagcccggagtccgtttatataagttcacgccgagaacacaaaatggcgaaga

SEQ ID NO: 426454 - DNA, 55 bp, Artificial
  Synthetic oligonucleotide
gggagccgcatacggcttccagtactcgcccaagcaaagggtagatcaactcctc

SEQ ID NO: 426455 - DNA, 55 bp, Artificial
  Synthetic oligonucleotide
gggagccgcgtgattggtataaatgtgagtttgatgtgtctgcattatatcggag

SEQ ID NO: 426456 - DNA, 58 bp, Artificial
  Synthetic oligonucleotide
gggagcctagcagtgacgatccacggtggcaactatccaggggccctccgtcccgtca

SEQ ID NO: 426457 - DNA, 55 bp, Artificial
  Synthetic oligonucleotide
gggagcctatcggtaactatcaagacttagatgttttaggtctagcaagacaagt

SEQ ID NO: 426458 - DNA, 55 bp, Artificial
  Synthetic oligonucleotide
gggagcctccattttccagttagagctgccaggagatgtcgttgggccccaagcc

SEQ ID NO: 426459 - DNA, 54 bp, Artificial
  Synthetic oligonucleotide
gggagccttgctgatgtagactgtgttatagattttcgcctgtggtattgactt

SEQ ID NO: 426460 - DNA, 55 bp, Artificial
  Synthetic oligonucleotide
gggagcgaggcgattacgctgacccttactccgactccgatcaactttctgttcc

SEQ ID NO: 426461 - DNA, 60 bp, Artificial
  Synthetic oligonucleotide
gggagcgcaagtgtcaacgcagaaaacgggcgcgcacgagactggagtgaatgcaagcgg

SEQ ID NO: 426462 - DNA, 55 bp, Artificial
  Synthetic oligonucleotide
gggagcgcttctaaatataacacatgctgcgaataggataataattgataatcgc

SEQ ID NO: 426463 - DNA, 55 bp, Artificial
  Synthetic oligonucleotide
gggagcggaccgtcacttctatatagtacctgtgggcggggaaacgactgtggac

SEQ ID NO: 426464 - DNA, 55 bp, Artificial
  Synthetic oligonucleotide
gggagcgggtccgaggagagtgaagattcggcctccgatgagactgatgactccg

SEQ ID NO: 426465 - DNA, 55 bp, Artificial
  Synthetic oligonucleotide
gggagcggtgtcgatcgagggacgaggatttagacaagcttatagtgaattcatg

SEQ ID NO: 426466 - DNA, 55 bp, Artificial
  Synthetic oligonucleotide
gggagcgtcctcttacatccctatcacagtgacagttgcccctatgagcgctgag

SEQ ID NO: 426467 - DNA, 55 bp, Artificial
  Synthetic oligonucleotide
gggagcgtgatgcaatgtatggccaaccctcaccagaaaggcacagcttgtaaag

SEQ ID NO: 426468 - DNA, 60 bp, Artificial
  Synthetic oligonucleotide
gggagcgtggtgcgacgactccattgagtatgagtgcataaccattgagccaaacgagga

SEQ ID NO: 426469 - DNA, 60 bp, Artificial
  Synthetic oligonucleotide
gggagctaaagatcttgtcaagaaattattctactggctaatgacacccctgtgctggct

SEQ ID NO: 426470 - DNA, 55 bp, Artificial
  Synthetic oligonucleotide
gggagctaagattattccttactctcaaaagttcaccttcgatgcagtgtcaacg

SEQ ID NO: 426471 - DNA, 60 bp, Artificial
  Synthetic oligonucleotide
gggagctaccttgagattgccactgttggtcatactgggattatccccgtcctgtctggc

SEQ ID NO: 426472 - DNA, 55 bp, Artificial
  Synthetic oligonucleotide
gggagctagaacgattcgcacttaatcctggccttttagagacatcagagggctg

SEQ ID NO: 426473 - DNA, 55 bp, Artificial
  Synthetic oligonucleotide
gggagctagaacgattcgcagtcaatcctggcctactagaaacatcaggaggctg

SEQ ID NO: 426474 - DNA, 55 bp, Artificial
  Synthetic oligonucleotide
gggagctagagcgatttgcagttaatcctggtcttttagagacagcggacggctg

SEQ ID NO: 426475 - DNA, 55 bp, Artificial
  Synthetic oligonucleotide
gggagctaggacgatttgctgtcaatcctggccttttagagacagcagagggctg

SEQ ID NO: 426476 - DNA, 52 bp, Artificial
  Synthetic oligonucleotide
gggagctatcagcgctgctgaagcaaggtgcaggggccaaagggtcaaacaa

SEQ ID NO: 426477 - DNA, 55 bp, Artificial
  Synthetic oligonucleotide
gggagctatggccagcgacaaccagaaactacagaagctcctacaagactactgg

SEQ ID NO: 426478 - DNA, 55 bp, Artificial
  Synthetic oligonucleotide
gggagctcaacactcggtcttaaccaaggcaaatgggcccctgtcctcgcgtacc

SEQ ID NO: 426479 - DNA, 60 bp, Artificial
  Synthetic oligonucleotide
gggagctcatcaatatcccttactgcaattacaccaagttctggtatgtaaatcacacag

SEQ ID NO: 426480 - DNA, 52 bp, Artificial
  Synthetic oligonucleotide
gggagctcccgccccggtcacaaacaaacccgttatatacgacgttgtgagt

SEQ ID NO: 426481 - DNA, 51 bp, Artificial
  Synthetic oligonucleotide
gggagctcgatatcgatacatggtattggattcggccctcttatcatcacg

SEQ ID NO: 426482 - DNA, 55 bp, Artificial
  Synthetic oligonucleotide
gggagctcggaagataagccctactgctggcactacccgccaagaccatgtgggg

SEQ ID NO: 426483 - DNA, 55 bp, Artificial
  Synthetic oligonucleotide
gggagctggagagatttgcatgtaatcctgagcttatggaaacagccgagggctg

SEQ ID NO: 426484 - DNA, 60 bp, Artificial
  Synthetic oligonucleotide
gggagcttgccatgccaagaaaccccgcattactacagccataaatgatactagtagtga

SEQ ID NO: 426485 - DNA, 58 bp, Artificial
  Synthetic oligonucleotide
gggagcttggatcgccgtgtagtggtgacgactccgatacccgtgtctcaacgggcta

SEQ ID NO: 426486 - DNA, 60 bp, Artificial
  Synthetic oligonucleotide
gggagctttctcccttaatatattgagtgccgatgacttagatcctgagttgattgcctc

SEQ ID NO: 426487 - DNA, 55 bp, Artificial
  Synthetic oligonucleotide
gggagctttgcatcatgtgtcttatcgtgatgggggttataatgtacccaacggg

SEQ ID NO: 426488 - DNA, 56 bp, Artificial
  Synthetic oligonucleotide
gggaggaaataggggaggaagcagctcagatagtagagctgagactatggtcactc

SEQ ID NO: 426489 - DNA, 55 bp, Artificial
  Synthetic oligonucleotide
gggaggaaccatgaagataggggataaccaattcagaattccctacacatttgca

SEQ ID NO: 426490 - DNA, 55 bp, Artificial
  Synthetic oligonucleotide
gggaggaagcagtgtttgaattagttaacattccaaccttattgagagaacatgc

SEQ ID NO: 426491 - DNA, 55 bp, Artificial
  Synthetic oligonucleotide
gggaggaaggatgttgtagcctctgatcttgctagcgactcggttgatgagtgtc

SEQ ID NO: 426492 - DNA, 55 bp, Artificial
  Synthetic oligonucleotide
gggaggaatacaattagtgctgatacactcctgaacggttgatctaactatctcg

SEQ ID NO: 426493 - DNA, 60 bp, Artificial
  Synthetic oligonucleotide
gggaggaatcccaacaagactccactggccgttggctataccaacgagcagatggcaaga

SEQ ID NO: 426494 - DNA, 55 bp, Artificial
  Synthetic oligonucleotide
gggaggaatcgacgatgtggatcgccccagcacgcagcctgtacgtcgtggcaat

SEQ ID NO: 426495 - DNA, 56 bp, Artificial
  Synthetic oligonucleotide
gggaggaatgcgagaatagatatgagcgatccggggtattcgctttttaaaggtgg

SEQ ID NO: 426496 - DNA, 57 bp, Artificial
  Synthetic oligonucleotide
gggaggacctaagaccaatagggcctcacatttacgaccatgagctaccagaagttc

SEQ ID NO: 426497 - DNA, 55 bp, Artificial
  Synthetic oligonucleotide
gggaggacgtccgaaaggctgagggcatggagcacgtgaagaaattaatcgagag

SEQ ID NO: 426498 - DNA, 55 bp, Artificial
  Synthetic oligonucleotide
gggaggactagcttgttaacaccttaaggtgttggccacttataatagctgacct

SEQ ID NO: 426499 - DNA, 60 bp, Artificial
  Synthetic oligonucleotide
gggaggactcagatgttctagtgacgagagaaccctatgtctcctgtgagccagatgagt

SEQ ID NO: 426500 - DNA, 56 bp, Artificial
  Synthetic oligonucleotide
gggaggagactactaaactatataactaactacagtgacgaatggctgagtttacc

SEQ ID NO: 426501 - DNA, 56 bp, Artificial
  Synthetic oligonucleotide
gggaggagctaagacaggtcaaggatcgggatcaaaagggacgggtggttcattca

SEQ ID NO: 426502 - DNA, 55 bp, Artificial
  Synthetic oligonucleotide
gggaggagggacgacgcgagaccggtaccagccttcatttcacacgctgttcctg

SEQ ID NO: 426503 - DNA, 55 bp, Artificial
  Synthetic oligonucleotide
gggaggagtccccgggatagtggcactgtttgtggtcctggaatgtatcattcgg

SEQ ID NO: 426504 - DNA, 58 bp, Artificial
  Synthetic oligonucleotide
gggaggagtggatcgcgcccttctcattgagggcaaactctgcgaggtgttcgaagtc

SEQ ID NO: 426505 - DNA, 55 bp, Artificial
  Synthetic oligonucleotide
gggaggagtgttcacatctataggaaaggccctccaccaagtctttggagctatc

SEQ ID NO: 426506 - DNA, 55 bp, Artificial
  Synthetic oligonucleotide
gggaggagttatgttgcaagttatcgcggtaaaggtgacgtaaaatgaggtgtgg

SEQ ID NO: 426507 - DNA, 55 bp, Artificial
  Synthetic oligonucleotide
gggaggatcggatgggaagagtatatcccatgggaatccctgggttccccttgtg

SEQ ID NO: 426508 - DNA, 55 bp, Artificial
  Synthetic oligonucleotide
gggaggatgatgtacatgctgtgtctgcagtaaaacgaaagtttacaagcagtcc

SEQ ID NO: 426509 - DNA, 58 bp, Artificial
  Synthetic oligonucleotide
gggaggatgcccaatttactggttcatgcactagccccatggggaatcaggggtatgg

SEQ ID NO: 426510 - DNA, 60 bp, Artificial
  Synthetic oligonucleotide
gggaggattcctccctctcttagctcccattctagccgcagccataggatccataccagg

SEQ ID NO: 426511 - DNA, 60 bp, Artificial
  Synthetic oligonucleotide
gggaggcaactacatgtatgctttctaaagagtcttcgagactcctatattttctacaca

SEQ ID NO: 426512 - DNA, 60 bp, Artificial
  Synthetic oligonucleotide
gggaggcacttgatgtcagaacagtgattagatcttatagagcaagtgacccttctgcta

SEQ ID NO: 426513 - DNA, 51 bp, Artificial
  Synthetic oligonucleotide
gggaggcagagtggtgttctgacctatgaccccgcgcttaatgggctgcta

SEQ ID NO: 426514 - DNA, 57 bp, Artificial
  Synthetic oligonucleotide
gggaggcagttgttcctgccaattgggggtggggggatcattgagtgttgtccaggc

SEQ ID NO: 426515 - DNA, 60 bp, Artificial
  Synthetic oligonucleotide
gggaggcatggagctgacgagagaccccacagtctcggagcatgcatctttagtcggttt

SEQ ID NO: 426516 - DNA, 60 bp, Artificial
  Synthetic oligonucleotide
gggaggcatggtggacagactattggcaggccacctggattcctgagtgggagtttgtta

SEQ ID NO: 426517 - DNA, 55 bp, Artificial
  Synthetic oligonucleotide
gggaggcatttccctccgcacggtgggttcacggccgtcaatcaggtcagtgttc

SEQ ID NO: 426518 - DNA, 55 bp, Artificial
  Synthetic oligonucleotide
gggaggccatatgttttgcaggtgatgacatgtgcgcaaactcaaggttaaaggt

SEQ ID NO: 426519 - DNA, 55 bp, Artificial
  Synthetic oligonucleotide
gggaggcccgaagcaaagctgaaaggactagcggttagaggagaccccttccatc

SEQ ID NO: 426520 - DNA, 60 bp, Artificial
  Synthetic oligonucleotide
gggaggccttagagtctccggaacattgtacacctcaccatactgcgctcaggcaagcta

SEQ ID NO: 426521 - DNA, 58 bp, Artificial
  Synthetic oligonucleotide
gggaggccttagagtctccggaacattgttcacctcaccatacagcggggtgagttga

SEQ ID NO: 426522 - DNA, 55 bp, Artificial
  Synthetic oligonucleotide
gggaggcctttcttgagtatttggtgtcttttggagtgtggattcgcacccctcc

SEQ ID NO: 426523 - DNA, 55 bp, Artificial
  Synthetic oligonucleotide
gggaggcgcgatgtctcggccgacgttcgcgtgtgattactgcggtggggagtat

SEQ ID NO: 426524 - DNA, 55 bp, Artificial
  Synthetic oligonucleotide
gggaggcgtgatctaggcaggaccgaggtgtggcgagccctcagatgctgcatat

SEQ ID NO: 426525 - DNA, 55 bp, Artificial
  Synthetic oligonucleotide
gggaggctactcaaggtcaaatcaaattactgactttaagggtaccatagatgac

SEQ ID NO: 426526 - DNA, 60 bp, Artificial
  Synthetic oligonucleotide
gggaggctgatccagaacagtatcacaatagaaagaatggtcctttctgcgtttgatgag

SEQ ID NO: 426527 - DNA, 55 bp, Artificial
  Synthetic oligonucleotide
gggaggctggtacgaccaaagccggctatccctacaattacaacaccaccgctag

SEQ ID NO: 426528 - DNA, 55 bp, Artificial
  Synthetic oligonucleotide
gggaggcttcaccaaacccacacttattgggccaggaatcagcggtgacgtggac

SEQ ID NO: 426529 - DNA, 54 bp, Artificial
  Synthetic oligonucleotide
gggagggaaagtatgggaggacaaactccatgggaagtatttattactaatcag

SEQ ID NO: 426530 - DNA, 53 bp, Artificial
  Synthetic oligonucleotide
gggagggaagaacaggaagaaccatgattaactttattccaaacggtctcgga

SEQ ID NO: 426531 - DNA, 55 bp, Artificial
  Synthetic oligonucleotide
gggagggaaggaatggtcctacattgtcgaaaggtcatcggctgtcaatggaatg

SEQ ID NO: 426532 - DNA, 55 bp, Artificial
  Synthetic oligonucleotide
gggagggaccgaacgatggcttggacagtggtaaatagtatctgcaacaccacag

SEQ ID NO: 426533 - DNA, 55 bp, Artificial
  Synthetic oligonucleotide
gggagggcacgctagcttcagtgcgcgcccgttgcaactcgtgtcctgaatgcta

SEQ ID NO: 426534 - DNA, 60 bp, Artificial
  Synthetic oligonucleotide
gggagggcactcctgagctccttgctatggagcatgcttaccttgccaagcaaggtgata

SEQ ID NO: 426535 - DNA, 55 bp, Artificial
  Synthetic oligonucleotide
gggagggccgccatttgtggcaggtacctcttcaattgggcagtaaggaccaagc

SEQ ID NO: 426536 - DNA, 51 bp, Artificial
  Synthetic oligonucleotide
gggagggcgtcgtaacgggtaactctgtggcggaaccgactactttgggtg

SEQ ID NO: 426537 - DNA, 52 bp, Artificial
  Synthetic oligonucleotide
gggagggcgtttttacgggccttactcatatagatgcccacttcttatccca

SEQ ID NO: 426538 - DNA, 55 bp, Artificial
  Synthetic oligonucleotide
gggagggctggctacacagtgcacgtgcagtgcaacgcttcgaagtttcatcaag

SEQ ID NO: 426539 - DNA, 57 bp, Artificial
  Synthetic oligonucleotide
gggaggggccacagtagaacatattttggtattgaaccctccacaatcattcaacca

SEQ ID NO: 426540 - DNA, 55 bp, Artificial
  Synthetic oligonucleotide
gggaggggccacgtgaagctgtcgagaggctcggaaattgtcttggacgcttgcg

SEQ ID NO: 426541 - DNA, 58 bp, Artificial
  Synthetic oligonucleotide
gggaggggggggacggcgaatgtgaaccgtctgtgcaggtacagcaacagcaaacgca

SEQ ID NO: 426542 - DNA, 55 bp, Artificial
  Synthetic oligonucleotide
gggaggggttgggatctcgtcctcaactgttgagtccctcttccatgaatccatt

SEQ ID NO: 426543 - DNA, 57 bp, Artificial
  Synthetic oligonucleotide
gggagggtcaagctgggggattagaaggactgcgacagaagggatggagtattctaa

SEQ ID NO: 426544 - DNA, 55 bp, Artificial
  Synthetic oligonucleotide
gggagggtggttggctggaatgtctatcacatggacagtctacaagaatgtggac

SEQ ID NO: 426545 - DNA, 55 bp, Artificial
  Synthetic oligonucleotide
gggagggttcacacccccatcctgcgggccggctgctcttctttcccttctctcg

SEQ ID NO: 426546 - DNA, 54 bp, Artificial
  Synthetic oligonucleotide
gggaggtaatgtccaacacttacgaacttcctcccttagacatgatcggttaaa

SEQ ID NO: 426547 - DNA, 55 bp, Artificial
  Synthetic oligonucleotide
gggaggtacaactcgaacttgcagaacatatctttcgagattggtaggcccaacc

SEQ ID NO: 426548 - DNA, 58 bp, Artificial
  Synthetic oligonucleotide
gggaggtactgttagagggagggtgcacatttgtgcgccaatcttctacagtattgtt

SEQ ID NO: 426549 - DNA, 56 bp, Artificial
  Synthetic oligonucleotide
gggaggtagcaaaactatctagttttgaatccaccccattgtgcaacattttcttg

SEQ ID NO: 426550 - DNA, 55 bp, Artificial
  Synthetic oligonucleotide
gggaggtatcaattctacaagtaatacgaggggaagaagaccctctgagatactg

SEQ ID NO: 426551 - DNA, 55 bp, Artificial
  Synthetic oligonucleotide
gggaggtatggccgtaagacaaaattgtatgaggcagcccattcggatgtccgtg

SEQ ID NO: 426552 - DNA, 54 bp, Artificial
  Synthetic oligonucleotide
gggaggtccccccaggaatggcgggacccctctcatcggagtccgcgtaccatc

SEQ ID NO: 426553 - DNA, 51 bp, Artificial
  Synthetic oligonucleotide
gggaggtcttagaagttgctgcagggcggaaatatttgcagatgaacaatt

SEQ ID NO: 426554 - DNA, 53 bp, Artificial
  Synthetic oligonucleotide
gggaggtgaagcaaacccttgcaaaacatcccaggtacggaggaacaaatgat

SEQ ID NO: 426555 - DNA, 58 bp, Artificial
  Synthetic oligonucleotide
gggaggtgggctatagtgaggaggcagtctcccttatagaggggattaaccatacaca

SEQ ID NO: 426556 - DNA, 60 bp, Artificial
  Synthetic oligonucleotide
gggaggtgtcttatgatacatgaaataagtcctggttgtgtgtcagctagatccttgagc

SEQ ID NO: 426557 - DNA, 53 bp, Artificial
  Synthetic oligonucleotide
gggaggttggtggttcgtaaaacttattgctggaagaactaggacaggcaccc

SEQ ID NO: 426558 - DNA, 55 bp, Artificial
  Synthetic oligonucleotide
gggaggttgtgctcgtcctctacttggttcataatacgttcgaagttcctcatga

SEQ ID NO: 426559 - DNA, 55 bp, Artificial
  Synthetic oligonucleotide
gggagtaaaggattggatgtattaggaggagtaatagatgaaggatatcgaggtg

SEQ ID NO: 426560 - DNA, 55 bp, Artificial
  Synthetic oligonucleotide
gggagtaacatcacaaacgggtccaagtctgacaccttcagacgtcaaggaggag

SEQ ID NO: 426561 - DNA, 47 bp, Artificial
  Synthetic oligonucleotide
gggagtaaccgaaaagggtttaagaccgaaaacggtacatataaaag

SEQ ID NO: 426562 - DNA, 55 bp, Artificial
  Synthetic oligonucleotide
gggagtacaaccataggcacagcgttggagctactcttgaggcactgttccaagg

SEQ ID NO: 426563 - DNA, 55 bp, Artificial
  Synthetic oligonucleotide
gggagtacaccagaatggatagaaagacaaacacagttacaacatagctttgagg

SEQ ID NO: 426564 - DNA, 60 bp, Artificial
  Synthetic oligonucleotide
gggagtaccatactgtaactactctaaattctggtatctggaacatgcaaagactggtga

SEQ ID NO: 426565 - DNA, 55 bp, Artificial
  Synthetic oligonucleotide
gggagtacgaattaatttcgccgaagtactcagtgagtaaccacaagggaaatca

SEQ ID NO: 426566 - DNA, 57 bp, Artificial
  Synthetic oligonucleotide
gggagtacgttccagaaggactacacaaacctgcctgtctgtaacacagacaacctg

SEQ ID NO: 426567 - DNA, 59 bp, Artificial
  Synthetic oligonucleotide
gggagtactaaactgggcagctcaactctttcctgggattaaaacaaggcatatatgca

SEQ ID NO: 426568 - DNA, 56 bp, Artificial
  Synthetic oligonucleotide
gggagtagaagaaggctcaatagggaaagtctgcaggaccttgttggcaaaatccg

SEQ ID NO: 426569 - DNA, 55 bp, Artificial
  Synthetic oligonucleotide
gggagtagctcagagccattgtatgttcccacgctggatgattatcggtcagctg

SEQ ID NO: 426570 - DNA, 54 bp, Artificial
  Synthetic oligonucleotide
gggagtaggagttggtaacctgacaatcttccctcaccagtggataaacttacg

SEQ ID NO: 426571 - DNA, 60 bp, Artificial
  Synthetic oligonucleotide
gggagtataaagaacactagccaagcatacacgagttgcaagcattggaagtataagtct

SEQ ID NO: 426572 - DNA, 55 bp, Artificial
  Synthetic oligonucleotide
gggagtatacttttccaataacactgtcctctacatcgaatccacctcatggttt

SEQ ID NO: 426573 - DNA, 55 bp, Artificial
  Synthetic oligonucleotide
gggagtatcatggtagctaccacattagagatgttggaactaaatgttcagctcc

SEQ ID NO: 426574 - DNA, 52 bp, Artificial
  Synthetic oligonucleotide
gggagtattcaaaagagtgatgagagaagcagatatcatagaattaagctca

SEQ ID NO: 426575 - DNA, 55 bp, Artificial
  Synthetic oligonucleotide
gggagtattgaccgttgacgggatggtgccgagtgggtcattatggacagggatc

SEQ ID NO: 426576 - DNA, 56 bp, Artificial
  Synthetic oligonucleotide
gggagtatttggagtcctgtttgaactgtttggcgtctgtgggttctctgtagaag

SEQ ID NO: 426577 - DNA, 58 bp, Artificial
  Synthetic oligonucleotide
gggagtcaaacacgtcgacgtctggtccccttcttgggtagcctgtgctgcactttga

SEQ ID NO: 426578 - DNA, 60 bp, Artificial
  Synthetic oligonucleotide
gggagtcactacacagcagtgcgtaagcctacagtcagtctatcaaaggacaccttttgc

SEQ ID NO: 426579 - DNA, 60 bp, Artificial
  Synthetic oligonucleotide
gggagtcacttcgtgaagaattgtctaaatacggtatgcgccattcaagcttgtcagctg

SEQ ID NO: 426580 - DNA, 55 bp, Artificial
  Synthetic oligonucleotide
gggagtcatcaaatgctgaaattgtcggggtttcagcatgtagaaattatgtatc

SEQ ID NO: 426581 - DNA, 60 bp, Artificial
  Synthetic oligonucleotide
gggagtcattcaaacaacgcaagctcgcagacccaaatgggatactgtggatgcgcaagg

SEQ ID NO: 426582 - DNA, 59 bp, Artificial
  Synthetic oligonucleotide
gggagtcccgccctgagaccaccaagcactataattgttaattccttgatttgcatctc

SEQ ID NO: 426583 - DNA, 55 bp, Artificial
  Synthetic oligonucleotide
gggagtcctcctgtgattatatccgtgacaatggaggaatcagctgaaccatggc

SEQ ID NO: 426584 - DNA, 57 bp, Artificial
  Synthetic oligonucleotide
gggagtcgagcataggctcgaagcggcgtgcaattttacccgtggggaccgttgcaa

SEQ ID NO: 426585 - DNA, 55 bp, Artificial
  Synthetic oligonucleotide
gggagtcgcagacgggctcatcagtctatttcaaaattctcgtactattcggaac

SEQ ID NO: 426586 - DNA, 57 bp, Artificial
  Synthetic oligonucleotide
gggagtcgggacaatggtgatggaactaattcggatgataaagcgagggattaacga

SEQ ID NO: 426587 - DNA, 54 bp, Artificial
  Synthetic oligonucleotide
gggagtcgggagtcagggagtcgggagtcagggagtcgggagtcagggagtcgg

SEQ ID NO: 426588 - DNA, 55 bp, Artificial
  Synthetic oligonucleotide
gggagtcggtacagtcctagatgttcaaatgcgaaattacacttatgcacgacct

SEQ ID NO: 426589 - DNA, 55 bp, Artificial
  Synthetic oligonucleotide
gggagtcgtctgccgtgttctcctcgacgttacggcggagcttaacctgggacag

SEQ ID NO: 426590 - DNA, 55 bp, Artificial
  Synthetic oligonucleotide
gggagtcgtgggacaggtgtgactcgctaatttatggtgatgaccgcttgacaac

SEQ ID NO: 426591 - DNA, 60 bp, Artificial
  Synthetic oligonucleotide
gggagtctttactggtttgactaacatagacgcacacatgctatctcaaactaagcaggg

SEQ ID NO: 426592 - DNA, 55 bp, Artificial
  Synthetic oligonucleotide
gggagtgaaataatagagatgaaacacatggatgttggaactttaacccctggtg

SEQ ID NO: 426593 - DNA, 53 bp, Artificial
  Synthetic oligonucleotide
gggagtgaccgaaaacggtgcaaccgaaaacggtgcatataaaagacacccta

SEQ ID NO: 426594 - DNA, 55 bp, Artificial
  Synthetic oligonucleotide
gggagtgaccttacctgatctggacgtagtggtagacacaggactgaagtgtgag

SEQ ID NO: 426595 - DNA, 53 bp, Artificial
  Synthetic oligonucleotide
gggagtgagatcctcgagatcttcagacctggaggaggagatatgagggacaa

SEQ ID NO: 426596 - DNA, 59 bp, Artificial
  Synthetic oligonucleotide
gggagtgagatctccgtagagccctaaaagtaaagggagcatccagtcaggggctgatc

SEQ ID NO: 426597 - DNA, 57 bp, Artificial
  Synthetic oligonucleotide
gggagtgataaatgaggataaggatgaggtattgcttgttcgtcacaaactaaccgt

SEQ ID NO: 426598 - DNA, 54 bp, Artificial
  Synthetic oligonucleotide
gggagtgataatgttaaactgcgttgtagtttaaaaagttcagccagggtcagt

SEQ ID NO: 426599 - DNA, 53 bp, Artificial
  Synthetic oligonucleotide
gggagtgatagcagtcgctacggcgctagcagctaaagtgtttgtgatagggt

SEQ ID NO: 426600 - DNA, 60 bp, Artificial
  Synthetic oligonucleotide
gggagtgattatagcttatagagacatgcagttagagagagatgaaatgtatggctacgt

SEQ ID NO: 426601 - DNA, 55 bp, Artificial
  Synthetic oligonucleotide
gggagtgcaaaccctatgttgaaaggtcttttccatgatgattttgatcaagagg

SEQ ID NO: 426602 - DNA, 55 bp, Artificial
  Synthetic oligonucleotide
gggagtgcattgctcgacacactcacgtgtacgcagacggggccaggttgatggg

SEQ ID NO: 426603 - DNA, 58 bp, Artificial
  Synthetic oligonucleotide
gggagtgccccaagtatgtcaaatcggacaagctggtccttgcaacaggaccaagaaa

SEQ ID NO: 426604 - DNA, 58 bp, Artificial
  Synthetic oligonucleotide
gggagtgcccgtgtgtcctggcctaaattcgcagtccccaacctccaatcactcacca

SEQ ID NO: 426605 - DNA, 60 bp, Artificial
  Synthetic oligonucleotide
gggagtggagtcagcagtgttgagaggattcctaattctaggcaaagaagacaggagata

SEQ ID NO: 426606 - DNA, 55 bp, Artificial
  Synthetic oligonucleotide
gggagtggatgaatactccagcacagaaagagtggtggtgagcattgaccgtttt

SEQ ID NO: 426607 - DNA, 55 bp, Artificial
  Synthetic oligonucleotide
gggagtggatgaatattctagtactgagagagtggtagtgagtattgatcgtttc

SEQ ID NO: 426608 - DNA, 56 bp, Artificial
  Synthetic oligonucleotide
gggagtggccaactccatcactaggggttcctggaggggtggagtcgtgacgtgaa

SEQ ID NO: 426609 - DNA, 55 bp, Artificial
  Synthetic oligonucleotide
gggagtggcttgccctcagaaccagcatataagcagatgctctgtagctatcctt

SEQ ID NO: 426610 - DNA, 55 bp, Artificial
  Synthetic oligonucleotide
gggagtgggctacgctagtgatgggatgataagatataaggttgatggttgtcgt

SEQ ID NO: 426611 - DNA, 57 bp, Artificial
  Synthetic oligonucleotide
gggagtggtaatatttaatgagcttgaaggaggatatcaactttctccaaggttcat

SEQ ID NO: 426612 - DNA, 55 bp, Artificial
  Synthetic oligonucleotide
gggagtgtactatataccacatgaggacatttgggtagacattttcaggttaggg

SEQ ID NO: 426613 - DNA, 55 bp, Artificial
  Synthetic oligonucleotide
gggagtgtcaccattagattggttgacttgataagcgcttcgtcggttgagattc

SEQ ID NO: 426614 - DNA, 51 bp, Artificial
  Synthetic oligonucleotide
gggagtgtgggacgttagaagaggacgttggttacttaaacctaacgcgaa

SEQ ID NO: 426615 - DNA, 55 bp, Artificial
  Synthetic oligonucleotide
gggagtgttgctcagggcgcgtatacaatcgccagccttctcagtccgggctcca

SEQ ID NO: 426616 - DNA, 55 bp, Artificial
  Synthetic oligonucleotide
gggagttacacaggtggacttaactttaatggcggtcgtcactatggtatcgact

SEQ ID NO: 426617 - DNA, 55 bp, Artificial
  Synthetic oligonucleotide
gggagttacatcaagaacctggtttcttaaacaacacagaacctctctgcaatgt

SEQ ID NO: 426618 - DNA, 56 bp, Artificial
  Synthetic oligonucleotide
gggagttacgttgtcaacgcaatttactgattatgtatcacttaattcgctaaggt

SEQ ID NO: 426619 - DNA, 58 bp, Artificial
  Synthetic oligonucleotide
gggagttagaggcgaggtaccaaattggcgatcaatacaggacgtgcaatatcttaaa

SEQ ID NO: 426620 - DNA, 52 bp, Artificial
  Synthetic oligonucleotide
gggagttagtaagttttggttacctggagacgaagaaacgcggtaacactca

SEQ ID NO: 426621 - DNA, 55 bp, Artificial
  Synthetic oligonucleotide
gggagttcacgatgctaggagtccatgacaatgtggctattttgccaacccacgc

SEQ ID NO: 426622 - DNA, 58 bp, Artificial
  Synthetic oligonucleotide
gggagttcatctgttgcaacaaccaggaaacgtgtgggtcacctgggcaaatatgacg

SEQ ID NO: 426623 - DNA, 55 bp, Artificial
  Synthetic oligonucleotide
gggagttcgccagatagtttcacaatgtgtggatgccaatgttaagacgctcttc

SEQ ID NO: 426624 - DNA, 55 bp, Artificial
  Synthetic oligonucleotide
gggagttctattgaatggactgatggtttggtgtattgagaatggcacctcacca

SEQ ID NO: 426625 - DNA, 60 bp, Artificial
  Synthetic oligonucleotide
gggagttgctgtcaggactggactatgaagctagatgcatatcgcaatcaggatgggtga

SEQ ID NO: 426626 - DNA, 57 bp, Artificial
  Synthetic oligonucleotide
gggagttggaacatttaactcccgggtggaacaagagacaactaagatcatggatga

SEQ ID NO: 426627 - DNA, 55 bp, Artificial
  Synthetic oligonucleotide
gggagttgtcaattcttaacgtcagatgatttccagtccccgtctgccatgccgc

SEQ ID NO: 426628 - DNA, 59 bp, Artificial
  Synthetic oligonucleotide
gggagtttgagccctcacccgcccatatccaaatcgccgtgaaggcgcacatatttgcg

SEQ ID NO: 426629 - DNA, 51 bp, Artificial
  Synthetic oligonucleotide
gggagtttgcgaagttgattgaagggcgcagaattcccctttccggcgccc

SEQ ID NO: 426630 - DNA, 60 bp, Artificial
  Synthetic oligonucleotide
gggataaacaatcagtgacagctcgagcgcagctcgtggcggatcagcggaggttatgtg

SEQ ID NO: 426631 - DNA, 58 bp, Artificial
  Synthetic oligonucleotide
gggataaactccattccgcatgatttgcattttttaggcttgagcgatttaacccgca

SEQ ID NO: 426632 - DNA, 55 bp, Artificial
  Synthetic oligonucleotide
gggataaacttgaggcgtgggctagggaagatgatcagtataatcaggctaatcc

SEQ ID NO: 426633 - DNA, 55 bp, Artificial
  Synthetic oligonucleotide
gggataaagttgtttgtttccgtctttctaagacgacgaatctactgcattctgg

SEQ ID NO: 426634 - DNA, 55 bp, Artificial
  Synthetic oligonucleotide
gggataaatcaagcaactataacagcacaatgcgttaaagagtttggagtatctg

SEQ ID NO: 426635 - DNA, 55 bp, Artificial
  Synthetic oligonucleotide
gggataaattccggaaaacgtgtgcgataggatttgacatgaagagattcgacca

SEQ ID NO: 426636 - DNA, 55 bp, Artificial
  Synthetic oligonucleotide
gggataaattgatgagatcactaccagaaggctggatctattgccatgcagacgg

SEQ ID NO: 426637 - DNA, 55 bp, Artificial
  Synthetic oligonucleotide
gggataacagacattatcaattttccaaatatccagagatgtccctgggacccac

SEQ ID NO: 426638 - DNA, 55 bp, Artificial
  Synthetic oligonucleotide
gggataacagcagcgagcggttccagctaccctctgctcaaggaacccatggggc

SEQ ID NO: 426639 - DNA, 55 bp, Artificial
  Synthetic oligonucleotide
gggataacattcgttagggttaatcgttactccgttatcacttgtcatcggagtg

SEQ ID NO: 426640 - DNA, 54 bp, Artificial
  Synthetic oligonucleotide
gggataaccaaattctaccaaggatgggataggcttctcacatctctacctgag

SEQ ID NO: 426641 - DNA, 57 bp, Artificial
  Synthetic oligonucleotide
gggataagacccctcgtatatattctgccactgagcctttgataccgttcccacagt

SEQ ID NO: 426642 - DNA, 55 bp, Artificial
  Synthetic oligonucleotide
gggataagatatcccctgacctttggatggctgtttaagttagtgccagtctcag

SEQ ID NO: 426643 - DNA, 55 bp, Artificial
  Synthetic oligonucleotide
gggataagcagtaagccatgtcgacgtccaagaggaagcgcgccgatgaagcgca

SEQ ID NO: 426644 - DNA, 58 bp, Artificial
  Synthetic oligonucleotide
gggataagcggcatggtgtgtcatcgagatatcatggtccgcccaacagagacagttc

SEQ ID NO: 426645 - DNA, 57 bp, Artificial
  Synthetic oligonucleotide
gggataagcgtatcgagggctctgtttggcccaaatccatacgcggttcgacaccga

SEQ ID NO: 426646 - DNA, 55 bp, Artificial
  Synthetic oligonucleotide
gggataaggccttaccttgtgctgaagatgctccagatccaggttcatgtcctcc

SEQ ID NO: 426647 - DNA, 57 bp, Artificial
  Synthetic oligonucleotide
gggataataagttgatagatatcttgactgctacaagtaataaaggtatcgactggc

SEQ ID NO: 426648 - DNA, 59 bp, Artificial
  Synthetic oligonucleotide
gggataatagatctgagagaggatatcttaatagcagggccgtataatttagtaagaac

SEQ ID NO: 426649 - DNA, 56 bp, Artificial
  Synthetic oligonucleotide
gggataatgatccgctttaaaggattttcagacacatagtttaaccgaataccata

SEQ ID NO: 426650 - DNA, 55 bp, Artificial
  Synthetic oligonucleotide
gggataatgcagaagtatgggtggtgtgggtgtagtcaacatacacatgtgacga

SEQ ID NO: 426651 - DNA, 53 bp, Artificial
  Synthetic oligonucleotide
gggatacaagaccccgccaaggtacaaaacacagtcctcaacccttgggacta

SEQ ID NO: 426652 - DNA, 55 bp, Artificial
  Synthetic oligonucleotide
gggatacactgtcgaacagattggtaagatagcccgtgacgcatgggattcattc

SEQ ID NO: 426653 - DNA, 51 bp, Artificial
  Synthetic oligonucleotide
gggatacagaggaattgtcaacgcttgtggaaatggggcgtgacgctcatt

SEQ ID NO: 426654 - DNA, 55 bp, Artificial
  Synthetic oligonucleotide
gggatacagttagaccaaaaaatcatcatactttacatgttgtcttggggaaagg

SEQ ID NO: 426655 - DNA, 60 bp, Artificial
  Synthetic oligonucleotide
gggatacattacactcggtatctggttccaacatgctacgattcggatctcagttagtgg

SEQ ID NO: 426656 - DNA, 54 bp, Artificial
  Synthetic oligonucleotide
gggatacattctttaccccgatgttggctggttagtaatgggagttacctcaac

SEQ ID NO: 426657 - DNA, 53 bp, Artificial
  Synthetic oligonucleotide
gggataccaggtcgaagaaccgttggttcttacattggtatttgccttcgaat

SEQ ID NO: 426658 - DNA, 50 bp, Artificial
  Synthetic oligonucleotide
gggatacccttagaaaccttagaagggataggggcattccggcctggcat

SEQ ID NO: 426659 - DNA, 55 bp, Artificial
  Synthetic oligonucleotide
gggatacgagaggtggctactaagttaggtgcacctggcaatacgttaaccatct

SEQ ID NO: 426660 - DNA, 55 bp, Artificial
  Synthetic oligonucleotide
gggatacgcgttcctggtggctgttcaacttcgcagtgcgctgctacgcagtggg

SEQ ID NO: 426661 - DNA, 55 bp, Artificial
  Synthetic oligonucleotide
gggatacggacggagagaactcccagccggagacatcgaacgtggataatcgtcc

SEQ ID NO: 426662 - DNA, 55 bp, Artificial
  Synthetic oligonucleotide
gggatacggcataatcaggtggtacaacaagcatggcaagctatgactgccatgg

SEQ ID NO: 426663 - DNA, 60 bp, Artificial
  Synthetic oligonucleotide
gggatactacccgacttaatcccaagcactgagatgtcaatgaggggagtgagaatcagc

SEQ ID NO: 426664 - DNA, 55 bp, Artificial
  Synthetic oligonucleotide
gggatactattgacaagagatggtggtgctaataatacgcagaacgagaccttca

SEQ ID NO: 426665 - DNA, 52 bp, Artificial
  Synthetic oligonucleotide
gggatactcacctttgtctttacagacccgcctcccaagcccacgggaaccc

SEQ ID NO: 426666 - DNA, 55 bp, Artificial
  Synthetic oligonucleotide
gggatactcatctcttcaacagctcgcatgaactcgtaaagaggggtgccttcag

SEQ ID NO: 426667 - DNA, 51 bp, Artificial
  Synthetic oligonucleotide
gggatactttatgggaaggggcgttgataggagactactcccagacaccca

SEQ ID NO: 426668 - DNA, 52 bp, Artificial
  Synthetic oligonucleotide
gggatagaactgaatgctactccatgtcaccaagtgatgtgcagacactttg

SEQ ID NO: 426669 - DNA, 55 bp, Artificial
  Synthetic oligonucleotide
gggatagaccaactgagagaatgataacttacattgaagatgaccatattcgacg

SEQ ID NO: 426670 - DNA, 55 bp, Artificial
  Synthetic oligonucleotide
gggatagacgggacaaccaagctatgtattagcaatgagtccccgttagagggcc

SEQ ID NO: 426671 - DNA, 60 bp, Artificial
  Synthetic oligonucleotide
gggatagagaaattagtaagtacacagacataatatatggcctaattgaagaatcgcaga

SEQ ID NO: 426672 - DNA, 58 bp, Artificial
  Synthetic oligonucleotide
gggatagagagtgcatatattgagtcagaagtacctgcattggctgggacatctatcg

SEQ ID NO: 426673 - DNA, 53 bp, Artificial
  Synthetic oligonucleotide
gggatagaggctctccggaacataggagggggaacattagggggagtacaaaa

SEQ ID NO: 426674 - DNA, 59 bp, Artificial
  Synthetic oligonucleotide
gggatagatatagatcattgtgtaaatgatggtgtcctgtctcctttcgcccaggaaat

SEQ ID NO: 426675 - DNA, 58 bp, Artificial
  Synthetic oligonucleotide
gggatagatccaaacatcaggaccggtgtcaggaccatcacgaccggaggggctatta

SEQ ID NO: 426676 - DNA, 55 bp, Artificial
  Synthetic oligonucleotide
gggatagattagctaggtactttaaccatagttggaacttcatagattgtgatgg

SEQ ID NO: 426677 - DNA, 60 bp, Artificial
  Synthetic oligonucleotide
gggatagcatcaataagcgaattgtgtggacccgaagcagagccccagatcgtgtgcgct

SEQ ID NO: 426678 - DNA, 55 bp, Artificial
  Synthetic oligonucleotide
gggatagcgaacttagggttgaatataggactacatttgaaaccaaactgcaact

SEQ ID NO: 426679 - DNA, 55 bp, Artificial
  Synthetic oligonucleotide
gggatagcgcccaccatttgaagtgtaggatagcgcctaccaatcgaatttcagg

SEQ ID NO: 426680 - DNA, 55 bp, Artificial
  Synthetic oligonucleotide
gggatagctgtaaaggttagttagtagtggtgggccactatatacttgcaggcga

SEQ ID NO: 426681 - DNA, 60 bp, Artificial
  Synthetic oligonucleotide
gggataggagcaaggaaattatgcaccgcactgaggcaatttgtgcagccatgatagaag

SEQ ID NO: 426682 - DNA, 55 bp, Artificial
  Synthetic oligonucleotide
gggataggagcccacgagatgaccaaccacatgacaccggcgcaggcccgcagaa

SEQ ID NO: 426683 - DNA, 57 bp, Artificial
  Synthetic oligonucleotide
gggataggccaacaggattgtggtttactggaaaagagttaggcattggatttgcca

SEQ ID NO: 426684 - DNA, 60 bp, Artificial
  Synthetic oligonucleotide
gggatagggagtgtggtgacaaacttgttgccatgctcgactatcttatccctcatgctg

SEQ ID NO: 426685 - DNA, 59 bp, Artificial
  Synthetic oligonucleotide
gggataggggcggttcggggagtggctaaccctcagatgctgcatataagcagccgctt

SEQ ID NO: 426686 - DNA, 53 bp, Artificial
  Synthetic oligonucleotide
gggatagggtatgccctcccacggtagtcgaaagaccacggaatatagaaccg

SEQ ID NO: 426687 - DNA, 55 bp, Artificial
  Synthetic oligonucleotide
gggatatagaagacatatctggaacaagtagaacaaactcagcagagatgcttaa

SEQ ID NO: 426688 - DNA, 55 bp, Artificial
  Synthetic oligonucleotide
gggatataggcacagccttcacctcggatcgcgttgtggtgcgtgatgggaacgg

SEQ ID NO: 426689 - DNA, 56 bp, Artificial
  Synthetic oligonucleotide
gggatatatttttagagatctttcaaataataatttcaatctaataggtactaatg

SEQ ID NO: 426690 - DNA, 60 bp, Artificial
  Synthetic oligonucleotide
gggatatccaattagtgatgcttggggtttacagatgaataggcgaatggacagtgtaat

SEQ ID NO: 426691 - DNA, 60 bp, Artificial
  Synthetic oligonucleotide
gggatatcctgatcttgtacaagagatacgcaagttttatgcgtggcttctggagatgca

SEQ ID NO: 426692 - DNA, 55 bp, Artificial
  Synthetic oligonucleotide
gggatatctctctcacccaattctctgatcagtttcttatacaggttgacaagag

SEQ ID NO: 426693 - DNA, 55 bp, Artificial
  Synthetic oligonucleotide
gggatatgcagacgtcaaaatggcgtacaaacacgttccgcacgaatggaagatt

SEQ ID NO: 426694 - DNA, 55 bp, Artificial
  Synthetic oligonucleotide
gggatatggatgaagccgttgagagcaaactatgtggtttcacctttgttttccc

SEQ ID NO: 426695 - DNA, 55 bp, Artificial
  Synthetic oligonucleotide
gggatatgtcaagaaatagtttcttgcgtttattgcaaaacgaccatcccttggc

SEQ ID NO: 426696 - DNA, 55 bp, Artificial
  Synthetic oligonucleotide
gggatattacctgacatgaccccgagcacagagatgtcattaagaggagtgagag

SEQ ID NO: 426697 - DNA, 60 bp, Artificial
  Synthetic oligonucleotide
gggatattagataccaggcagtagatgctgtaagtaatgtgtggtttatccataagggga

SEQ ID NO: 426698 - DNA, 55 bp, Artificial
  Synthetic oligonucleotide
gggatattcaggagtcgttagcatatgtcttgaatagggaagcttgggcggttgc

SEQ ID NO: 426699 - DNA, 55 bp, Artificial
  Synthetic oligonucleotide
gggatattcgtatcctcgatgaaggaagacttgtctaacaataacgctataacgc

SEQ ID NO: 426700 - DNA, 55 bp, Artificial
  Synthetic oligonucleotide
gggatatttggggacaatcccaggcctgtggatggcacaggctcatgtaccagcc

SEQ ID NO: 426701 - DNA, 59 bp, Artificial
  Synthetic oligonucleotide
gggatcaagcactcttgaactgagaagcgggtactgggccataaggaccaggagtggag

SEQ ID NO: 426702 - DNA, 55 bp, Artificial
  Synthetic oligonucleotide
gggatcaaggggaatctcgaagatacacttgtgttctttgccaacggggatgacc

SEQ ID NO: 426703 - DNA, 50 bp, Artificial
  Synthetic oligonucleotide
gggatcaagtcttcagtcttcgtccaaagcggttttgggtacgacggagt

SEQ ID NO: 426704 - DNA, 60 bp, Artificial
  Synthetic oligonucleotide
gggatcacatcaatgtgattgtaagccgtgatttgtcctttcaggatttaagtgaaacac

SEQ ID NO: 426705 - DNA, 55 bp, Artificial
  Synthetic oligonucleotide
gggatcagagtctaaaaccatgtgtaaagttgaccccgctctgtgtcactttaaa

SEQ ID NO: 426706 - DNA, 55 bp, Artificial
  Synthetic oligonucleotide
gggatcaggatgaagaggagtccatggacttgataaacaataaagattacaatct

SEQ ID NO: 426707 - DNA, 55 bp, Artificial
  Synthetic oligonucleotide
gggatcaggcttgtttgcgccacctatcgagggacaattgcagtgccactccaac

SEQ ID NO: 426708 - DNA, 60 bp, Artificial
  Synthetic oligonucleotide
gggatcatctaacattagaaattcctggctataacacacgtaaacagcattccagtcata

SEQ ID NO: 426709 - DNA, 60 bp, Artificial
  Synthetic oligonucleotide
gggatcatgacaagaagctgctatgttcaattgatagcatctgatcaagatgtagcagtt

SEQ ID NO: 426710 - DNA, 60 bp, Artificial
  Synthetic oligonucleotide
gggatcatggtcctggcatgatggtgctgaaatcatctactttaagtagcaatgatttaa

SEQ ID NO: 426711 - DNA, 57 bp, Artificial
  Synthetic oligonucleotide
gggatcattccgcttaatccccaatgcacgttcaggtatgagccgtggagagatcaa

SEQ ID NO: 426712 - DNA, 55 bp, Artificial
  Synthetic oligonucleotide
gggatccaacaccgccggactctataaaatcaccacaagccccgtgggtgtttgc

SEQ ID NO: 426713 - DNA, 55 bp, Artificial
  Synthetic oligonucleotide
gggatccaacagagatacccaaactttccacacacaatagcactccttgagacat

SEQ ID NO: 426714 - DNA, 55 bp, Artificial
  Synthetic oligonucleotide
gggatccaataggcccgttctatatataaatatggcagattatagtgttgagtcc

SEQ ID NO: 426715 - DNA, 55 bp, Artificial
  Synthetic oligonucleotide
gggatccaatggaaatcctcagtgatctaaacaagaaggcagcaatgggtgcact

SEQ ID NO: 426716 - DNA, 55 bp, Artificial
  Synthetic oligonucleotide
gggatccactccacagtgattatgacagtatgaacgataggcacgtcttcctcgg

SEQ ID NO: 426717 - DNA, 51 bp, Artificial
  Synthetic oligonucleotide
gggatccacttcaaagtgactacgatagtatgaatgataggcatgttttcc

SEQ ID NO: 426718 - DNA, 55 bp, Artificial
  Synthetic oligonucleotide
gggatccagccggttctgacgctgttcagccacaatgctgcagactggttcgctg

SEQ ID NO: 426719 - DNA, 55 bp, Artificial
  Synthetic oligonucleotide
gggatccattattgcacgaatttccacgtagcgttcatggtctgaagtgcatgct

SEQ ID NO: 426720 - DNA, 55 bp, Artificial
  Synthetic oligonucleotide
gggatcccaactcatacaacccactggacaaagtcgatgaactgagcacagagca

SEQ ID NO: 426721 - DNA, 53 bp, Artificial
  Synthetic oligonucleotide
gggatcccaataatgaaagagggtccccaggagtgaaagggtgggcctttgac

SEQ ID NO: 426722 - DNA, 53 bp, Artificial
  Synthetic oligonucleotide
gggatcccacaaggtcttttctttacacctcaaccaaaacctatacttcacaa

SEQ ID NO: 426723 - DNA, 54 bp, Artificial
  Synthetic oligonucleotide
gggatcccgggacatttcacacataacggatggaagggaatggttgggacctcc

SEQ ID NO: 426724 - DNA, 55 bp, Artificial
  Synthetic oligonucleotide
gggatcccgttctacttcaagcagtcgagcggatcaaagcagggccacgaacccg

SEQ ID NO: 426725 - DNA, 55 bp, Artificial
  Synthetic oligonucleotide
gggatccgctgctaaatgagtttcccgaaaccgtacacggtcttaggtgtatgct

SEQ ID NO: 426726 - DNA, 51 bp, Artificial
  Synthetic oligonucleotide
gggatccgcttttaaacgagttccctgaaaccgtacatggttttaggtgta

SEQ ID NO: 426727 - DNA, 49 bp, Artificial
  Synthetic oligonucleotide
gggatccgcttttaaacgagtttcccgaaactgttcacggttttaggtg

SEQ ID NO: 426728 - DNA, 55 bp, Artificial
  Synthetic oligonucleotide
gggatcctagctgaccagattgcacccttcttccagggaaacggggtcattcagg

SEQ ID NO: 426729 - DNA, 55 bp, Artificial
  Synthetic oligonucleotide
gggatcctctactcaacgagtttcctgatactgtacatggctttagatgcatgct

SEQ ID NO: 426730 - DNA, 53 bp, Artificial
  Synthetic oligonucleotide
gggatcctctcaaacggatttcgggaaggtggttatcgccttggtggttattc

SEQ ID NO: 426731 - DNA, 60 bp, Artificial
  Synthetic oligonucleotide
gggatcctctcctaatgcctaccaagccaaattcgagtccgtaggatggtctgcaacagc

SEQ ID NO: 426732 - DNA, 58 bp, Artificial
  Synthetic oligonucleotide
gggatcctgaacgggcatcgctactcgaagctcgctcaggccacggggagcaatcaat

SEQ ID NO: 426733 - DNA, 51 bp, Artificial
  Synthetic oligonucleotide
gggatcctgcgtcaaagtctatgacgcgaatcacgagctctgtgtccgatg

SEQ ID NO: 426734 - DNA, 55 bp, Artificial
  Synthetic oligonucleotide
gggatcctttacaaagcacgtaccacagtaaaagggacaatgtggtattggaggc

SEQ ID NO: 426735 - DNA, 49 bp, Artificial
  Synthetic oligonucleotide
gggatcctttacttaacgatttccctgaaaccgtacacggttttaggtg

SEQ ID NO: 426736 - DNA, 57 bp, Artificial
  Synthetic oligonucleotide
gggatcctttattcgaactctctccggccatagagtctatggttacgctccagacgg

SEQ ID NO: 426737 - DNA, 60 bp, Artificial
  Synthetic oligonucleotide
gggatcgaacctgatgatcatctcaaggagagatcaagccttagatatggaaatgtcctt

SEQ ID NO: 426738 - DNA, 53 bp, Artificial
  Synthetic oligonucleotide
gggatcgaatccctaaggggtgtgtgggtccctgtaaggtacaggattacgag

SEQ ID NO: 426739 - DNA, 56 bp, Artificial
  Synthetic oligonucleotide
gggatcgagcaaaggcctgtgcaggagttgaccaaacggggttgtgcccccctgtg

SEQ ID NO: 426740 - DNA, 55 bp, Artificial
  Synthetic oligonucleotide
gggatcgcaatcccgcatgacatagacctaggagactctcgtgtggtcatccagg

SEQ ID NO: 426741 - DNA, 60 bp, Artificial
  Synthetic oligonucleotide
gggatcgcacaatggcttggacggtggtgaatagcatttgcaacaccacaagagttgaga

SEQ ID NO: 426742 - DNA, 58 bp, Artificial
  Synthetic oligonucleotide
gggatcgccaggcctctacccggacgagttcataccgaacttcgacgcagtgagagaa

SEQ ID NO: 426743 - DNA, 55 bp, Artificial
  Synthetic oligonucleotide
gggatcgcgcggtgaggagctatagcgtgccaggtaacgagacgatggttggatg

SEQ ID NO: 426744 - DNA, 60 bp, Artificial
  Synthetic oligonucleotide
gggatcgctatcctccccctggcgccgctagattttgccactgaatcttccactgagata

SEQ ID NO: 426745 - DNA, 55 bp, Artificial
  Synthetic oligonucleotide
gggatcgctccattacgatgtgtctttcgcagacttacgtggaaacgcgcagcgt

SEQ ID NO: 426746 - DNA, 60 bp, Artificial
  Synthetic oligonucleotide
gggatcggagtatctactgcacaacaatcgttacatgacgtcatatgtcacgtatccatc

SEQ ID NO: 426747 - DNA, 60 bp, Artificial
  Synthetic oligonucleotide
gggatcggcgtcctactggaacgcctaatgattttcagcaggtctttaatgtatatgata

SEQ ID NO: 426748 - DNA, 51 bp, Artificial
  Synthetic oligonucleotide
gggatcgggggccacgattaaggccgccctgcagttagggcgtgaagccat

SEQ ID NO: 426749 - DNA, 50 bp, Artificial
  Synthetic oligonucleotide
gggatcgggtgtcgcgcgggttaaaccgacagtaatcaggcaccgagtgg

SEQ ID NO: 426750 - DNA, 55 bp, Artificial
  Synthetic oligonucleotide
gggatcggtgacttcctgaattccgtcggcaaatcgatgatgaacgcgcaatcgt

SEQ ID NO: 426751 - DNA, 53 bp, Artificial
  Synthetic oligonucleotide
gggatcgtaccggttgcttgttcggatgggtacggcggtttggtgacaacgga

SEQ ID NO: 426752 - DNA, 60 bp, Artificial
  Synthetic oligonucleotide
gggatcgttggattggctcacctcttactgcgatgctgttaacatacgcatcgccaactt

SEQ ID NO: 426753 - DNA, 51 bp, Artificial
  Synthetic oligonucleotide
gggatcgtttagcagtcctcccacgtcactcacaacccggcaaaactattt

SEQ ID NO: 426754 - DNA, 58 bp, Artificial
  Synthetic oligonucleotide
gggatctaaaaccccatttggagaaacagcgagctcgtaagacagacgaagcttgcga

SEQ ID NO: 426755 - DNA, 60 bp, Artificial
  Synthetic oligonucleotide
gggatctacaatcctttccagttgggtcactgacagcagtagagtgtatagactacctgg

SEQ ID NO: 426756 - DNA, 60 bp, Artificial
  Synthetic oligonucleotide
gggatctactagatacagccgcagctctatttcgggaggccttagagtctcctgagcatt

SEQ ID NO: 426757 - DNA, 60 bp, Artificial
  Synthetic oligonucleotide
gggatctagcctgggacgcttgttaggcattcagcactacaagtggaacccagctataga

SEQ ID NO: 426758 - DNA, 55 bp, Artificial
  Synthetic oligonucleotide
gggatctagcgacggaggaggaagtgagactaagagaggagatagagatgatgcg

SEQ ID NO: 426759 - DNA, 59 bp, Artificial
  Synthetic oligonucleotide
gggatctagtagtcaattatgttaacactaacatgggcctaaagatcagacaattattg

SEQ ID NO: 426760 - DNA, 55 bp, Artificial
  Synthetic oligonucleotide
gggatctcaaaccgataacactgatctgacaagcaagtcaatggtcataagtggg

SEQ ID NO: 426761 - DNA, 60 bp, Artificial
  Synthetic oligonucleotide
gggatctctctgtcagaacctctaaccaaccagacacttctggacatcaacaccccagag

SEQ ID NO: 426762 - DNA, 55 bp, Artificial
  Synthetic oligonucleotide
gggatctgaagtttacttagtccttacaataggtcctgcaaatgtgttcccagtg

SEQ ID NO: 426763 - DNA, 60 bp, Artificial
  Synthetic oligonucleotide
gggatctgttacatctaactgcgaaaccagcagtggaggcatcagagggagtggcagcaa

SEQ ID NO: 426764 - DNA, 55 bp, Artificial
  Synthetic oligonucleotide
gggatctgttacccaggagttttgaacgaagtagaagaactgaaggcacttattg

SEQ ID NO: 426765 - DNA, 60 bp, Artificial
  Synthetic oligonucleotide
gggatcttacattttacatcttctctgctacacacactacatcaagagtttgtcaggtca

SEQ ID NO: 426766 - DNA, 52 bp, Artificial
  Synthetic oligonucleotide
gggatcttcccggactggaaggggaaaacagggtaggggtgatttcaggaca

SEQ ID NO: 426767 - DNA, 54 bp, Artificial
  Synthetic oligonucleotide
gggatcttgcaaagaattccactttaacctttcttattctgtagtattcaaagg

SEQ ID NO: 426768 - DNA, 55 bp, Artificial
  Synthetic oligonucleotide
gggatgaaaaactcgatccaaatgtccgcaccgaattagtagttagtagataccg

SEQ ID NO: 426769 - DNA, 55 bp, Artificial
  Synthetic oligonucleotide
gggatgaagacatcagcgaagtggtatggaatgataaacgttgatttcctcagat

SEQ ID NO: 426770 - DNA, 56 bp, Artificial
  Synthetic oligonucleotide
gggatgaagttagtcccaaatcttggtattccggatgattccgatgtgatttttag

SEQ ID NO: 426771 - DNA, 55 bp, Artificial
  Synthetic oligonucleotide
gggatgagacgtttgtggaacgataccgtaagaattgtctgaataccgaatatag

SEQ ID NO: 426772 - DNA, 55 bp, Artificial
  Synthetic oligonucleotide
gggatgagatcaaatacatggtatatcaagtggagaggggacaggagggtactcg

SEQ ID NO: 426773 - DNA, 56 bp, Artificial
  Synthetic oligonucleotide
gggatgagcgatcgtagaacaccgctcagactggtcgggttatgaaccgggcaaac

SEQ ID NO: 426774 - DNA, 56 bp, Artificial
  Synthetic oligonucleotide
gggatgaggtgtcgttcagagtgggactacacgagtacccggtagggtcgcaatta

SEQ ID NO: 426775 - DNA, 55 bp, Artificial
  Synthetic oligonucleotide
gggatgagtattgggaccctgaagaaatagagaagatgttaatggactaagagcc

SEQ ID NO: 426776 - DNA, 55 bp, Artificial
  Synthetic oligonucleotide
gggatgagtcaactagtgaccacaagtgtgttggaggaatcacaccagaagaatg

SEQ ID NO: 426777 - DNA, 55 bp, Artificial
  Synthetic oligonucleotide
gggatgagtggtttgacctaattggtgccgtattagatggggagtgccgggcgga

SEQ ID NO: 426778 - DNA, 55 bp, Artificial
  Synthetic oligonucleotide
gggatgataaacaacgacgccctgtttcacggcacatgcgtcatgaagtccggcc

SEQ ID NO: 426779 - DNA, 55 bp, Artificial
  Synthetic oligonucleotide
gggatgatagaaatgcaactgctagctttatttataacgggaggcttgtggacag

SEQ ID NO: 426780 - DNA, 55 bp, Artificial
  Synthetic oligonucleotide
gggatgattcaattagcttgcggatttgtgactacattaaatagccctacgattc

SEQ ID NO: 426781 - DNA, 55 bp, Artificial
  Synthetic oligonucleotide
gggatgattcgcaagcatttagaaatatggtatatgtaagatcactggcggccga

SEQ ID NO: 426782 - DNA, 60 bp, Artificial
  Synthetic oligonucleotide
gggatgattgaccttcctggatactatgaagctatacatccttgcacagttttctgtgtc

SEQ ID NO: 426783 - DNA, 55 bp, Artificial
  Synthetic oligonucleotide
gggatgcaaccctgaaggagcctacccggatccagaattagagtataggaatatc

SEQ ID NO: 426784 - DNA, 55 bp, Artificial
  Synthetic oligonucleotide
gggatgcagttgaggggacggaaacagatgtctccattaggctaggattaagccc

SEQ ID NO: 426785 - DNA, 55 bp, Artificial
  Synthetic oligonucleotide
gggatgcattactttggtcgcgaatgtgttccgcgccacgatgcctgctcgcgca

SEQ ID NO: 426786 - DNA, 60 bp, Artificial
  Synthetic oligonucleotide
gggatgccccaacatcccattattaggcaaaatggcaatctacatttgtagaatgtcaaa

SEQ ID NO: 426787 - DNA, 56 bp, Artificial
  Synthetic oligonucleotide
gggatgccccgtggcgttctatggcggggacctctaaagtgtcccgcaatgctaac

SEQ ID NO: 426788 - DNA, 53 bp, Artificial
  Synthetic oligonucleotide
gggatgcccctcatatcgaccaaccgcaacaatgatcgtccccgacgtacccc

SEQ ID NO: 426789 - DNA, 55 bp, Artificial
  Synthetic oligonucleotide
gggatgcctgtaacgtataacacaacggaaactgaagcattagagccagcacttg

SEQ ID NO: 426790 - DNA, 60 bp, Artificial
  Synthetic oligonucleotide
gggatgcgaaccacttgtgtgctgattatgcaaccgcacaacccgcaaacactggcaagg

SEQ ID NO: 426791 - DNA, 55 bp, Artificial
  Synthetic oligonucleotide
gggatgcgcagcatccaataccaggccccttaccagcggggcagcttagagaacc

SEQ ID NO: 426792 - DNA, 59 bp, Artificial
  Synthetic oligonucleotide
gggatgcgcatgcaggagtcatccgcatccagacatcagctatgttcggtctgaagacg

SEQ ID NO: 426793 - DNA, 55 bp, Artificial
  Synthetic oligonucleotide
gggatgctaccataggtatagtcaggttattagaagatacccacaggtgcgcccc

SEQ ID NO: 426794 - DNA, 58 bp, Artificial
  Synthetic oligonucleotide
gggatgctataactaatctattggttaggggagatacatacacagcagggataagttt

SEQ ID NO: 426795 - DNA, 55 bp, Artificial
  Synthetic oligonucleotide
gggatgctataaggtttagatactgtgcaccaccgggctttgctttgctaagatg

SEQ ID NO: 426796 - DNA, 58 bp, Artificial
  Synthetic oligonucleotide
gggatgctatcgttgtgactctggccccggggattactctggtccactgcttatactc

SEQ ID NO: 426797 - DNA, 57 bp, Artificial
  Synthetic oligonucleotide
gggatggaaagccgggatcacacggatggtaatcgctaggccaaaccaacttcaaca

SEQ ID NO: 426798 - DNA, 60 bp, Artificial
  Synthetic oligonucleotide
gggatggacagaataatgacgatcatacgagacagtctggacacaggagaggacctggtt

SEQ ID NO: 426799 - DNA, 55 bp, Artificial
  Synthetic oligonucleotide
gggatggacgtcactagtatgtcttcatcactaagtccagcgaatagattcatgt

SEQ ID NO: 426800 - DNA, 60 bp, Artificial
  Synthetic oligonucleotide
gggatggactccaatcctctgatgactttgctctcatagtgaatgcgccgaatcatgagg

SEQ ID NO: 426801 - DNA, 55 bp, Artificial
  Synthetic oligonucleotide
gggatggagtgggacgagcccaactggcgttggacattgccaccggaagactggt

SEQ ID NO: 426802 - DNA, 55 bp, Artificial
  Synthetic oligonucleotide
gggatggataacagagcaaggagtgcattcaagaacttctcaagcagtatggttg

SEQ ID NO: 426803 - DNA, 59 bp, Artificial
  Synthetic oligonucleotide
gggatggatggacaccatgggatttaacattagaatggtgtatgaaaatagatgggaaa

SEQ ID NO: 426804 - DNA, 55 bp, Artificial
  Synthetic oligonucleotide
gggatggcacggaggatgttgtatgctgctcaatgtcttattcctggacaggcgc

SEQ ID NO: 426805 - DNA, 55 bp, Artificial
  Synthetic oligonucleotide
gggatggcctgaggtcagggaaagaatgagaagggctaggccagccagggaaaga

SEQ ID NO: 426806 - DNA, 55 bp, Artificial
  Synthetic oligonucleotide
gggatggcgtgcgccattcccatgggattgtagtatatgatgacattcttcaggt

SEQ ID NO: 426807 - DNA, 56 bp, Artificial
  Synthetic oligonucleotide
gggatggctacggctgtggcgacagggagggctatagagggagcgtataaactcaa

SEQ ID NO: 426808 - DNA, 55 bp, Artificial
  Synthetic oligonucleotide
gggatggcttgtatagtagtgaccacatattggggactgatgccaggggaaagag

SEQ ID NO: 426809 - DNA, 50 bp, Artificial
  Synthetic oligonucleotide
gggatgggaccgactactttgggtgtccgtgtttcctgttttctttaagt

SEQ ID NO: 426810 - DNA, 59 bp, Artificial
  Synthetic oligonucleotide
gggatgggtaggaatgatggaagaacgatagatttaccaagatacatacaagtggaatg

SEQ ID NO: 426811 - DNA, 55 bp, Artificial
  Synthetic oligonucleotide
gggatgggtcgcaagtccagaaatttcatacacttgtatggagttgagccagaga

SEQ ID NO: 426812 - DNA, 55 bp, Artificial
  Synthetic oligonucleotide
gggatgggtggttgctagtgtggttgcttgggccatagcgctcctgagctcgatg

SEQ ID NO: 426813 - DNA, 55 bp, Artificial
  Synthetic oligonucleotide
gggatggtatacgtgccggcggttattcctacctctcagaagatgggttttctct

SEQ ID NO: 426814 - DNA, 55 bp, Artificial
  Synthetic oligonucleotide
gggatggtggagttttgtcgtgaacgtgggtgatataatcgttcggtttgcgtta

SEQ ID NO: 426815 - DNA, 55 bp, Artificial
  Synthetic oligonucleotide
gggatggtggtgcaaagaataatagtcagaatgagaccttcagacctggaggagg

SEQ ID NO: 426816 - DNA, 55 bp, Artificial
  Synthetic oligonucleotide
gggatgtactagcgtcgaaccactggacggacacctgttgagtggccatgctacg

SEQ ID NO: 426817 - DNA, 55 bp, Artificial
  Synthetic oligonucleotide
gggatgtagagaaggcgcaattgtacgcgatgaaggaagatagtagagtagctgg

SEQ ID NO: 426818 - DNA, 55 bp, Artificial
  Synthetic oligonucleotide
gggatgtcaggtgcaccagtttgtgacaaatattgtcgggtgttagcggttcacc

SEQ ID NO: 426819 - DNA, 60 bp, Artificial
  Synthetic oligonucleotide
gggatgtcattgtgtatgcaggcggtgtgctagagattatagaccttaagtatggtaaag

SEQ ID NO: 426820 - DNA, 58 bp, Artificial
  Synthetic oligonucleotide
gggatgtcccatttgtgcgcaggcatacctggtttacgagaaccggtcacacgaccca

SEQ ID NO: 426821 - DNA, 60 bp, Artificial
  Synthetic oligonucleotide
gggatgtcggattgcaatccagctgtgtgctgtgcgtgccatggattagccagacacact

SEQ ID NO: 426822 - DNA, 57 bp, Artificial
  Synthetic oligonucleotide
gggatgtcgtgttagatcttgggacgggaccagaggctaaaatccttgaactgatac

SEQ ID NO: 426823 - DNA, 50 bp, Artificial
  Synthetic oligonucleotide
gggatgtgaagagaatgcaagagtgcattgataaatatggactgaacctg

SEQ ID NO: 426824 - DNA, 60 bp, Artificial
  Synthetic oligonucleotide
gggatgtgccgcgcagctctatcgccaacttaatcatgaatatagcaacgtgcttaccca

SEQ ID NO: 426825 - DNA, 55 bp, Artificial
  Synthetic oligonucleotide
gggatgtggggttacagtccagctgcgtactgtgcataccatggattagccagac

SEQ ID NO: 426826 - DNA, 55 bp, Artificial
  Synthetic oligonucleotide
gggatgtggtcgggtggaaaagcgacgccacctttatcagattcgagaagtgaga

SEQ ID NO: 426827 - DNA, 60 bp, Artificial
  Synthetic oligonucleotide
gggatgtgtacaagcagtttgaggagcgaatacgtagtgtaagcgctggtcgtgcactat

SEQ ID NO: 426828 - DNA, 60 bp, Artificial
  Synthetic oligonucleotide
gggatgtgtataagcagttcgaacaaaagatacgcagtgtgagcgctggtcgcgcactgt

SEQ ID NO: 426829 - DNA, 51 bp, Artificial
  Synthetic oligonucleotide
gggatgtgtcaccggaggggggcgagcggaaggggtttacgggcaaattcc

SEQ ID NO: 426830 - DNA, 55 bp, Artificial
  Synthetic oligonucleotide
gggatgtgtgtcaacacagtccatgaagtgcaaggaggaacatttcctcatgtct

SEQ ID NO: 426831 - DNA, 54 bp, Artificial
  Synthetic oligonucleotide
gggatgtgttaacagataccataagttggtccccatcaatacccacatacattg

SEQ ID NO: 426832 - DNA, 55 bp, Artificial
  Synthetic oligonucleotide
gggatgttgagacagctctaattaaatatagcatggatgatcagttaaaccagct

SEQ ID NO: 426833 - DNA, 54 bp, Artificial
  Synthetic oligonucleotide
gggatgtttcacgcttaccccgtattggtgagtagtaggcaacgggaacttata

SEQ ID NO: 426834 - DNA, 54 bp, Artificial
  Synthetic oligonucleotide
gggattaaacacttgggcagctcggttaaggttaggcacttggcagggattaaa

SEQ ID NO: 426835 - DNA, 54 bp, Artificial
  Synthetic oligonucleotide
gggattaaagtaagacaattatgtaaactccttaggggagccaaagcactaaca

SEQ ID NO: 426836 - DNA, 52 bp, Artificial
  Synthetic oligonucleotide
gggattaacatatacctactcctatacggaaacaaaacaaccaacaaggacc

SEQ ID NO: 426837 - DNA, 58 bp, Artificial
  Synthetic oligonucleotide
gggattaagtacattgttacatgttccagaaagttgtatgcttctggagcctcctaaa

SEQ ID NO: 426838 - DNA, 55 bp, Artificial
  Synthetic oligonucleotide
gggattaatagtactggaagtgagaccttcagacctggaggaggagatatgaggg

SEQ ID NO: 426839 - DNA, 60 bp, Artificial
  Synthetic oligonucleotide
gggattacacacagcacaatatagctattctacaacaggctaaagcacaactgctagaat

SEQ ID NO: 426840 - DNA, 57 bp, Artificial
  Synthetic oligonucleotide
gggattacagcaggccggaggaaaattggtatgcagacagacctccgaccagaggac

SEQ ID NO: 426841 - DNA, 55 bp, Artificial
  Synthetic oligonucleotide
gggattacatatactccacataggatttatagcagattttaatctatattgtgac

SEQ ID NO: 426842 - DNA, 55 bp, Artificial
  Synthetic oligonucleotide
gggattacgtagagggcgctccgtatacaccagtagagcacgttgtgtttaaccc

SEQ ID NO: 426843 - DNA, 55 bp, Artificial
  Synthetic oligonucleotide
gggattactctacacaaaacatagagactctgcaacaggctcggtctcaattgtt

SEQ ID NO: 426844 - DNA, 55 bp, Artificial
  Synthetic oligonucleotide
gggattactggcaagccgtgggtgcaagcggggatagacgccagtggcttagagt

SEQ ID NO: 426845 - DNA, 54 bp, Artificial
  Synthetic oligonucleotide
gggattacttctctcttgttttaacaaatgcttgtgaactaggggagtgggtgt

SEQ ID NO: 426846 - DNA, 55 bp, Artificial
  Synthetic oligonucleotide
gggattagatgtgagaggggaccatcccatgtgcaacttgtggagggaagtggtc

SEQ ID NO: 426847 - DNA, 60 bp, Artificial
  Synthetic oligonucleotide
gggattagcactttgggtcaatacctgaggagcacctctagtgtccacctatatgtgacc

SEQ ID NO: 426848 - DNA, 55 bp, Artificial
  Synthetic oligonucleotide
gggattagcgaaacagtatcaatcgaccaaacgaccttgagggagatagcttcgg

SEQ ID NO: 426849 - DNA, 57 bp, Artificial
  Synthetic oligonucleotide
gggattaggttacaaatggtccgaaatatcatataaagcggcaaactatcaatataa

SEQ ID NO: 426850 - DNA, 54 bp, Artificial
  Synthetic oligonucleotide
gggattaggttgctagccttttgggaactggcttcacgcagggggagacggtcc

SEQ ID NO: 426851 - DNA, 55 bp, Artificial
  Synthetic oligonucleotide
gggattataagccacaagattactacggttcagcgcactttaactggatgcagcg

SEQ ID NO: 426852 - DNA, 55 bp, Artificial
  Synthetic oligonucleotide
gggattatagcctggaagtgaacactcatgtggcaagtgggttagtagctctcca

SEQ ID NO: 426853 - DNA, 55 bp, Artificial
  Synthetic oligonucleotide
gggattatggacaacagatggcaggtgctgattgtgtggcaggtagacaggatga

SEQ ID NO: 426854 - DNA, 55 bp, Artificial
  Synthetic oligonucleotide
gggattcaacatggccatcgaggagccctcctacgaactggagcatatcgagttt

SEQ ID NO: 426855 - DNA, 55 bp, Artificial
  Synthetic oligonucleotide
gggattcaactacaatgtttggattgcctgtacgacgacacctttgggagagaag

SEQ ID NO: 426856 - DNA, 55 bp, Artificial
  Synthetic oligonucleotide
gggattcaccagacattggacagtcagctatactacctgaacaagctgcaacaac

SEQ ID NO: 426857 - DNA, 56 bp, Artificial
  Synthetic oligonucleotide
gggattccacactcttctttacctgactttcaatttcaggtttgagtgttgttaga

SEQ ID NO: 426858 - DNA, 54 bp, Artificial
  Synthetic oligonucleotide
gggattccacctttaatttgaattggtctcccgtacttcgtgttgctttgccag

SEQ ID NO: 426859 - DNA, 55 bp, Artificial
  Synthetic oligonucleotide
gggattccagtgccgggtacaatcatgatgtgtctatcttacgcgcttggattcg

SEQ ID NO: 426860 - DNA, 55 bp, Artificial
  Synthetic oligonucleotide
gggattcccgtgtggtcatccaggactatgataaccaacatgaacaggaccggcc

SEQ ID NO: 426861 - DNA, 60 bp, Artificial
  Synthetic oligonucleotide
gggattcgcaagcccaaacatctttatgtctcactgcctaatgcacaatccagtatgaaa

SEQ ID NO: 426862 - DNA, 55 bp, Artificial
  Synthetic oligonucleotide
gggattcgcatctaaaacctgggaaggtatccataagaattctacgaacgccatg

SEQ ID NO: 426863 - DNA, 60 bp, Artificial
  Synthetic oligonucleotide
gggattcggacattgtattcacatgggctattcatcacccacccacttctgacgagcagg

SEQ ID NO: 426864 - DNA, 55 bp, Artificial
  Synthetic oligonucleotide
gggattctaatcgtacgtcacaattgtgtgtgtatcgttgacggaggagtagcga

SEQ ID NO: 426865 - DNA, 55 bp, Artificial
  Synthetic oligonucleotide
gggattctacaactagacagttacaggtctttaatcgttcaggtgtctttacgat

SEQ ID NO: 426866 - DNA, 55 bp, Artificial
  Synthetic oligonucleotide
gggattctagcgccgggtataatcatgatgtgtccattttacgtgcttggatccg

SEQ ID NO: 426867 - DNA, 55 bp, Artificial
  Synthetic oligonucleotide
gggattctaggagaaatatatgcagtcaatggcagatggaatccgagagttccat

SEQ ID NO: 426868 - DNA, 60 bp, Artificial
  Synthetic oligonucleotide
gggattctctgcctgatgcgcagtgatgttctcccctgtgcgtgaatccatgatctgcgc

SEQ ID NO: 426869 - DNA, 55 bp, Artificial
  Synthetic oligonucleotide
gggattctgaagatgattggtttccaccacccactcagaagaaaaggcgggaact

SEQ ID NO: 426870 - DNA, 53 bp, Artificial
  Synthetic oligonucleotide
gggattctggccgttgaactacggacactggttccgtacctgtctccccttta

SEQ ID NO: 426871 - DNA, 55 bp, Artificial
  Synthetic oligonucleotide
gggattctggtgttaagggagttgcctttgtttacgactccagatgggacaatgc

SEQ ID NO: 426872 - DNA, 55 bp, Artificial
  Synthetic oligonucleotide
gggattcttgcttcacccgggatactccgcggtgcacacaacctcgactgcgtgt

SEQ ID NO: 426873 - DNA, 52 bp, Artificial
  Synthetic oligonucleotide
gggattctttacaagtgcatacttccggtgtgtgcgctattcgaggcacgat

SEQ ID NO: 426874 - DNA, 57 bp, Artificial
  Synthetic oligonucleotide
gggattgaaacctatcaacactcccactaagacaaagcttcaccctagtgtgtttca

SEQ ID NO: 426875 - DNA, 60 bp, Artificial
  Synthetic oligonucleotide
gggattgaagtagtgaatgccacagagacagtggaaactgcgaatatcaagaaaatatgt

SEQ ID NO: 426876 - DNA, 55 bp, Artificial
  Synthetic oligonucleotide
gggattgaatttcttggggcaatcattcacaaagggcttatcaagctacagcccc

SEQ ID NO: 426877 - DNA, 51 bp, Artificial
  Synthetic oligonucleotide
gggattgactttggacttaaagtggggggtactcttgacacagaaaaccgg

SEQ ID NO: 426878 - DNA, 55 bp, Artificial
  Synthetic oligonucleotide
gggattgatagttcttatatagaggttgatataacagcaaggacaaatgaggcac

SEQ ID NO: 426879 - DNA, 55 bp, Artificial
  Synthetic oligonucleotide
gggattgatcccagtaaggcccaatcatctagttattatggtcctggtccttgta

SEQ ID NO: 426880 - DNA, 55 bp, Artificial
  Synthetic oligonucleotide
gggattgcaatcattcctctgtccaagttagactttgcaccagatgcctcagtag

SEQ ID NO: 426881 - DNA, 55 bp, Artificial
  Synthetic oligonucleotide
gggattgcgagcctggtttgccaactaacaaacacttcagacgggcattgcgaaa

SEQ ID NO: 426882 - DNA, 51 bp, Artificial
  Synthetic oligonucleotide
gggattgcgcacacttactcgctaagcagttaccccacgtgactctgtaat

SEQ ID NO: 426883 - DNA, 55 bp, Artificial
  Synthetic oligonucleotide
gggattgctggcgttgactcgctggatgatctaattaagtgggtgctgaatccgg

SEQ ID NO: 426884 - DNA, 55 bp, Artificial
  Synthetic oligonucleotide
gggattggattgcggtctgtacccgcaggaggtggacgaatggctgcgtaccgag

SEQ ID NO: 426885 - DNA, 56 bp, Artificial
  Synthetic oligonucleotide
gggattggtagaaaagagcgagcctcccgatacgagtttgccaggacctatcaagt

SEQ ID NO: 426886 - DNA, 60 bp, Artificial
  Synthetic oligonucleotide
gggattgtagcattgcaggatggctccttggaaacccagaatgtgatagactcctgagtg

SEQ ID NO: 426887 - DNA, 60 bp, Artificial
  Synthetic oligonucleotide
gggattgtgaacatctggaagagcggtctcctacagcttctcaccttcctgatcttggct

SEQ ID NO: 426888 - DNA, 55 bp, Artificial
  Synthetic oligonucleotide
gggattgttcgggaacggaaattgtggcatccaatgaaccacaatctcgtgtacg

SEQ ID NO: 426889 - DNA, 55 bp, Artificial
  Synthetic oligonucleotide
gggattgtttgcgcggtttctaccgagcctctgctgtgtgacagtaagctggcgt

SEQ ID NO: 426890 - DNA, 60 bp, Artificial
  Synthetic oligonucleotide
gggatttagcattcactagcgaacatgacgaatcttgacatcgagtcgctagtagaaacc

SEQ ID NO: 426891 - DNA, 55 bp, Artificial
  Synthetic oligonucleotide
gggatttaggtcttcagtcaactgtaaattttgtggtgcctttcatatcagctag

SEQ ID NO: 426892 - DNA, 51 bp, Artificial
  Synthetic oligonucleotide
gggatttatgaactgagcaacccagattgaaatgtctagccatctgttgag

SEQ ID NO: 426893 - DNA, 55 bp, Artificial
  Synthetic oligonucleotide
gggatttatgcccatcgtctgctccgaaaacggagagtttaaacagtcgacctac

SEQ ID NO: 426894 - DNA, 58 bp, Artificial
  Synthetic oligonucleotide
gggatttattcagtttgtccgattccagcattcctagatgtggaaccagttataccga

SEQ ID NO: 426895 - DNA, 55 bp, Artificial
  Synthetic oligonucleotide
gggatttatttggctgggcggcaaagggccctgatgggcgtatccactactacgc

SEQ ID NO: 426896 - DNA, 60 bp, Artificial
  Synthetic oligonucleotide
gggatttcacgaggccaaactacacatccgactacacacagtatgaccaatcgcaggact

SEQ ID NO: 426897 - DNA, 60 bp, Artificial
  Synthetic oligonucleotide
gggatttcgaatttcccaggtatatacgccactctctgctcgatccgcagtgatgtattc

SEQ ID NO: 426898 - DNA, 55 bp, Artificial
  Synthetic oligonucleotide
gggatttcgggctacagtcttcaatcaccttaattgtcccatggatctcttctgg

SEQ ID NO: 426899 - DNA, 50 bp, Artificial
  Synthetic oligonucleotide
gggatttctcaacgctgcagtgttctacgcgcaatccctttacagaccgg

SEQ ID NO: 426900 - DNA, 55 bp, Artificial
  Synthetic oligonucleotide
gggatttgacgtaggtactcgtcatcgctattacaagtcagaacctgcgcgtctg

SEQ ID NO: 426901 - DNA, 55 bp, Artificial
  Synthetic oligonucleotide
gggatttgagcgtgttgcgtgtgctaacaaccttcgcgtcgtacccaataagggc

SEQ ID NO: 426902 - DNA, 60 bp, Artificial
  Synthetic oligonucleotide
gggatttggaacctcccagataaacacgccactctctgtacgatccgcagtgatgtattc

SEQ ID NO: 426903 - DNA, 60 bp, Artificial
  Synthetic oligonucleotide
gggatttggaatttcccaaataaagacgccactctctgctcgatccgcagtgatgtactc

SEQ ID NO: 426904 - DNA, 55 bp, Artificial
  Synthetic oligonucleotide
gggatttgggttcaggcagggcaatgatgtatggatgggaaggaccattagcagg

SEQ ID NO: 426905 - DNA, 58 bp, Artificial
  Synthetic oligonucleotide
gggatttggtatctcccaggtaaaaacgccatcctctgcctgagttgcagtgatgggt

SEQ ID NO: 426906 - DNA, 55 bp, Artificial
  Synthetic oligonucleotide
gggatttgtacgtgataacgagtgagttaccacctgtgcgaataccgatggacgt

SEQ ID NO: 426907 - DNA, 51 bp, Artificial
  Synthetic oligonucleotide
gggattttcacactccgcataaggctttggatatcacaggtaagcaggtga

SEQ ID NO: 426908 - DNA, 55 bp, Artificial
  Synthetic oligonucleotide
gggattttccgcgcggctgtgtgtaccaggggcgtggcgaagtccctcgattttg

SEQ ID NO: 426909 - DNA, 53 bp, Artificial
  Synthetic oligonucleotide
gggattttcctgcctaaccttaatgtgcaattcgatacatggataggagcttt

SEQ ID NO: 426910 - DNA, 55 bp, Artificial
  Synthetic oligonucleotide
gggattttcggagacaatccacgccctaatgataagacaggcagttgtggtccag

SEQ ID NO: 426911 - DNA, 60 bp, Artificial
  Synthetic oligonucleotide
gggattttgaatctcccagatatacacgccattctctgcttgagctgcagtgatgagttc

SEQ ID NO: 426912 - DNA, 55 bp, Artificial
  Synthetic oligonucleotide
gggcaaaagagatacaccaagaccacttattggtgggatggccttcaatcctcgg

SEQ ID NO: 426913 - DNA, 56 bp, Artificial
  Synthetic oligonucleotide
gggcaaaagaggtataccagaaccacgtactggtgggatggactccaatcctccga

SEQ ID NO: 426914 - DNA, 55 bp, Artificial
  Synthetic oligonucleotide
gggcaaacaattatccatattaccttaggacataatcacacccttgtagggcccc

SEQ ID NO: 426915 - DNA, 56 bp, Artificial
  Synthetic oligonucleotide
gggcaaacacctcagcctacccaagcgctacttgacacaggagccgaccgtacggt

SEQ ID NO: 426916 - DNA, 57 bp, Artificial
  Synthetic oligonucleotide
gggcaaacagcagattggctaagtattgttatttacttaacatcctttgttgtccca

SEQ ID NO: 426917 - DNA, 60 bp, Artificial
  Synthetic oligonucleotide
gggcaaacagccaatccctcgcaagccaagatatcactgagatagactttgtttgaagat

SEQ ID NO: 426918 - DNA, 55 bp, Artificial
  Synthetic oligonucleotide
gggcaaacatagtagtaccagattactggtccaagtacggaagccagaccagcct

SEQ ID NO: 426919 - DNA, 55 bp, Artificial
  Synthetic oligonucleotide
gggcaaaccatagcgtgcttttgtcatgcggtgctttgccgatttggaccactgc

SEQ ID NO: 426920 - DNA, 60 bp, Artificial
  Synthetic oligonucleotide
gggcaaaccgcagactggctgagcattgtggtatacttgacatcattcgtggttccaata

SEQ ID NO: 426921 - DNA, 58 bp, Artificial
  Synthetic oligonucleotide
gggcaaacctctcaacccggatgactatattccagtggcaacaacgatttattataga

SEQ ID NO: 426922 - DNA, 55 bp, Artificial
  Synthetic oligonucleotide
gggcaaaggtattggggaacacatggaaactgcatgctgcctaccggcctcagag

SEQ ID NO: 426923 - DNA, 55 bp, Artificial
  Synthetic oligonucleotide
gggcaaatagtagtctctcccaaagacagtaatgcctatgtgaaacttttgatcg

SEQ ID NO: 426924 - DNA, 51 bp, Artificial
  Synthetic oligonucleotide
gggcaaatagtggtgttacctactagcccagtagaagtactgggaagggat

SEQ ID NO: 426925 - DNA, 60 bp, Artificial
  Synthetic oligonucleotide
gggcaaatcagcgttcaacctacattctctgtccagaggaacctcccgtttgagagagca

SEQ ID NO: 426926 - DNA, 55 bp, Artificial
  Synthetic oligonucleotide
gggcaaatcgtagcggcgcaacgttggtttgttaccattcaaacgcgcccgtatg

SEQ ID NO: 426927 - DNA, 58 bp, Artificial
  Synthetic oligonucleotide
gggcaaatgcgcatgatgtgaatgatccccaggaggatgaaatgtgaactatgtggct

SEQ ID NO: 426928 - DNA, 60 bp, Artificial
  Synthetic oligonucleotide
gggcaaatgctttggagtaagacgaatgatgcaggatctgacagggtgatggtatcacct

SEQ ID NO: 426929 - DNA, 55 bp, Artificial
  Synthetic oligonucleotide
gggcaaatggtttggaaagaaggccgtctcacagaatgatcgcatggcatggatc

SEQ ID NO: 426930 - DNA, 60 bp, Artificial
  Synthetic oligonucleotide
gggcaaatgtgactccattctttacgttggagtcttcaaccttatacagcagctgccatg

SEQ ID NO: 426931 - DNA, 60 bp, Artificial
  Synthetic oligonucleotide
gggcaacaaaggtccattcaggacaatcaggtggcatatcttatcattggcatcttgaca

SEQ ID NO: 426932 - DNA, 57 bp, Artificial
  Synthetic oligonucleotide
gggcaacaaattgaaaggcgtcaagactctagaacaactcaaggacgctctaaaaga

SEQ ID NO: 426933 - DNA, 55 bp, Artificial
  Synthetic oligonucleotide
gggcaacaagataatcatgacaggactcatgcatttgtacttccgagatttggga

SEQ ID NO: 426934 - DNA, 56 bp, Artificial
  Synthetic oligonucleotide
gggcaacaatagaagctagactttctattacaactccggaagccaacttacgagaa

SEQ ID NO: 426935 - DNA, 52 bp, Artificial
  Synthetic oligonucleotide
gggcaacaattgaagctcggctcaaaatatcaactcccgagcgaaatttagc

SEQ ID NO: 426936 - DNA, 54 bp, Artificial
  Synthetic oligonucleotide
gggcaacagagcgttcttgcgctttatgccaacttgttgggaccaaatcagagg

SEQ ID NO: 426937 - DNA, 60 bp, Artificial
  Synthetic oligonucleotide
gggcaacagtctggggcaatatatgtgggtaattacagagtggtgaatagacacttggcc

SEQ ID NO: 426938 - DNA, 55 bp, Artificial
  Synthetic oligonucleotide
gggcaacatcttggttcctgagtccaagagatgggccagggtctcatgtatctcc

SEQ ID NO: 426939 - DNA, 60 bp, Artificial
  Synthetic oligonucleotide
gggcaacattgtgtttgggtgcggccctggctcgcacactgcagttccgcttcaagacac

SEQ ID NO: 426940 - DNA, 55 bp, Artificial
  Synthetic oligonucleotide
gggcaaccatactgtgcataaatctgagttgagtggtacccttggttgcgtcgca

SEQ ID NO: 426941 - DNA, 55 bp, Artificial
  Synthetic oligonucleotide
gggcaaccatcaactgttgtcgataactcattaatggtagttctagccatgcact

SEQ ID NO: 426942 - DNA, 54 bp, Artificial
  Synthetic oligonucleotide
gggcaaccccgttccccaacagactgtcagagactcttgtaaccaaccagtctt

SEQ ID NO: 426943 - DNA, 59 bp, Artificial
  Synthetic oligonucleotide
gggcaaccgcctagcagaccaagcggcccgggaggcagccataaagacgcctccagata

SEQ ID NO: 426944 - DNA, 55 bp, Artificial
  Synthetic oligonucleotide
gggcaacgatgcgctgaacgagatcgcgtccgtcaaggcgtacctgcagggagtg

SEQ ID NO: 426945 - DNA, 55 bp, Artificial
  Synthetic oligonucleotide
gggcaacgcaggcatgtgtgcctaccgacccaagcccaatagagtttccattgga

SEQ ID NO: 426946 - DNA, 55 bp, Artificial
  Synthetic oligonucleotide
gggcaacggatgatgttactacctatggtagtattgatgacccaacccttggtct

SEQ ID NO: 426947 - DNA, 54 bp, Artificial
  Synthetic oligonucleotide
gggcaacgggcttccttgcaaacacgtagtggggctcgtattgggtctagggta

SEQ ID NO: 426948 - DNA, 60 bp, Artificial
  Synthetic oligonucleotide
gggcaacgttgttggcttgttcatgcaccgatctgcagttggtaccgttaagctgcgcga

SEQ ID NO: 426949 - DNA, 55 bp, Artificial
  Synthetic oligonucleotide
gggcaactatctactgatgtgtgcaatggtacatgggtacatgcgtcatctgggg

SEQ ID NO: 426950 - DNA, 55 bp, Artificial
  Synthetic oligonucleotide
gggcaactatgaaagaaatgtttaattggtcaggatggttctcctggttaaagta

SEQ ID NO: 426951 - DNA, 55 bp, Artificial
  Synthetic oligonucleotide
gggcaactccacgatcaccacacaagagtgtgccaatgtagtggtcgcatatgga

SEQ ID NO: 426952 - DNA, 55 bp, Artificial
  Synthetic oligonucleotide
gggcaactcgggtttctcgtaagggatcccagcctgcttctaagcaggacgtgaa

SEQ ID NO: 426953 - DNA, 57 bp, Artificial
  Synthetic oligonucleotide
gggcaactgtccgtgtgtacttactgggactgcttggctgggcgctatttgggttcg

SEQ ID NO: 426954 - DNA, 55 bp, Artificial
  Synthetic oligonucleotide
gggcaacttacaccatgggatattcaaatgcatcatggacatatcaatcaagtga

SEQ ID NO: 426955 - DNA, 55 bp, Artificial
  Synthetic oligonucleotide
gggcaacttggccattatgcgtctcagcgccgaagggcccacatttgacgccaac

SEQ ID NO: 426956 - DNA, 55 bp, Artificial
  Synthetic oligonucleotide
gggcaagaataaaaaccagactgttcaccataagacaagaaatggccagtagggg

SEQ ID NO: 426957 - DNA, 53 bp, Artificial
  Synthetic oligonucleotide
gggcaagacaaaggtggtgcgcactcgcaccaccaaccgtcatgcccgtggct

SEQ ID NO: 426958 - DNA, 55 bp, Artificial
  Synthetic oligonucleotide
gggcaagactatgcccgtagaattttactatgaacaggagtttgatgcctgggca

SEQ ID NO: 426959 - DNA, 50 bp, Artificial
  Synthetic oligonucleotide
gggcaagagctcaattgactgttagtatgtgtttaggatttgcggggtcg

SEQ ID NO: 426960 - DNA, 60 bp, Artificial
  Synthetic oligonucleotide
gggcaagcaccgagtccatacaacaccagagtagaatgtgtggggtggtccagcacttca

SEQ ID NO: 426961 - DNA, 55 bp, Artificial
  Synthetic oligonucleotide
gggcaagcagggaactagaaagatttgcgatagatcccggtcttctagacacatc

SEQ ID NO: 426962 - DNA, 58 bp, Artificial
  Synthetic oligonucleotide
gggcaagcagggagctggaaagatttgcacttaaccctggccttttagaaacatcaga

SEQ ID NO: 426963 - DNA, 60 bp, Artificial
  Synthetic oligonucleotide
gggcaagcagggagctggacagattcgcatgtaatcctgagctactagaaactgcagagg

SEQ ID NO: 426964 - DNA, 55 bp, Artificial
  Synthetic oligonucleotide
gggcaagcagggagctggagagatttgcttgtaaccccgggcttatggaaacaac

SEQ ID NO: 426965 - DNA, 55 bp, Artificial
  Synthetic oligonucleotide
gggcaagccactgccagcaaattatcaaacaaccgtaaatatttggcaattaact

SEQ ID NO: 426966 - DNA, 55 bp, Artificial
  Synthetic oligonucleotide
gggcaagccagatttattcaggaattaagacaaaagagctctgtaagtgtatcag

SEQ ID NO: 426967 - DNA, 55 bp, Artificial
  Synthetic oligonucleotide
gggcaagctattggtgaacccgagcttattgagctacatgaactatcttcacgct

SEQ ID NO: 426968 - DNA, 51 bp, Artificial
  Synthetic oligonucleotide
gggcaagggcgctaaatagcattgttcatattgtaagttaaatggcactta

SEQ ID NO: 426969 - DNA, 50 bp, Artificial
  Synthetic oligonucleotide
gggcaagggtcactaatgaaaagtacagcattgaatcatgggtggcagac

SEQ ID NO: 426970 - DNA, 58 bp, Artificial
  Synthetic oligonucleotide
gggcaaggtggctctggcattcgaccgagacgctgccaaacctccgcccaacgacctc

SEQ ID NO: 426971 - DNA, 55 bp, Artificial
  Synthetic oligonucleotide
gggcaaggtgggtgcataaaatacttgcaaaggaagctagagagtttagggttgg

SEQ ID NO: 426972 - DNA, 56 bp, Artificial
  Synthetic oligonucleotide
gggcaagtcaaatttacacagggataaagactaaacatttgtgtagactaattaga

SEQ ID NO: 426973 - DNA, 55 bp, Artificial
  Synthetic oligonucleotide
gggcaagtcatcaaacgcataacccgcccgtacggtgtgaccgcgagtgtcgacc

SEQ ID NO: 426974 - DNA, 60 bp, Artificial
  Synthetic oligonucleotide
gggcaagtggtcaaaacataagatgggtggatggcctgctgtgagggaaagaatgagacg

SEQ ID NO: 426975 - DNA, 55 bp, Artificial
  Synthetic oligonucleotide
gggcaatatgctcgcgagtcataccaccacgtgggtcatccggtaattgggagcg

SEQ ID NO: 426976 - DNA, 60 bp, Artificial
  Synthetic oligonucleotide
gggcaatatgggattatcttctccaaaatatgtatgttggtcctcattcaaggaccttga

SEQ ID NO: 426977 - DNA, 55 bp, Artificial
  Synthetic oligonucleotide
gggcaatatgtgatctgcgggaaatgcaaggtcagagtatgccacctctgcatcc

SEQ ID NO: 426978 - DNA, 55 bp, Artificial
  Synthetic oligonucleotide
gggcaatattatactcgtaggtcgcgtgggcactacgttgcttacgggtttggga

SEQ ID NO: 426979 - DNA, 60 bp, Artificial
  Synthetic oligonucleotide
gggcaatcaaattcggccctagtctatcgcaatgcccagcgctttcagacggaatactta

SEQ ID NO: 426980 - DNA, 56 bp, Artificial
  Synthetic oligonucleotide
gggcaatcaacgcccccatgacaaaggctttggactggagcggaacaaggtactgg

SEQ ID NO: 426981 - DNA, 55 bp, Artificial
  Synthetic oligonucleotide
gggcaatcaagaatgtttattccacatataacgttaagtttcagtaataaaagag

SEQ ID NO: 426982 - DNA, 55 bp, Artificial
  Synthetic oligonucleotide
gggcaatcacaagtagtaacacaatacagactaatcctgactgtgcctggctagc

SEQ ID NO: 426983 - DNA, 55 bp, Artificial
  Synthetic oligonucleotide
gggcaatccagcccggcaaccggctcccagaaccagtctggcaacactggcagca

SEQ ID NO: 426984 - DNA, 55 bp, Artificial
  Synthetic oligonucleotide
gggcaatcgatgataggatggacattcagccgcttaaaatcaccttagacgaaca

SEQ ID NO: 426985 - DNA, 58 bp, Artificial
  Synthetic oligonucleotide
gggcaatgcaattgggccttaactgtatgggcctctattattgggctttgttattgga

SEQ ID NO: 426986 - DNA, 60 bp, Artificial
  Synthetic oligonucleotide
gggcaatgcacgttctccaacggtgctcctatggggcacaagttgcaggatgcagcgcct

SEQ ID NO: 426987 - DNA, 55 bp, Artificial
  Synthetic oligonucleotide
gggcaatggccaactatgttggatatcgcacttgcatgctaccaattgtcagtct

SEQ ID NO: 426988 - DNA, 55 bp, Artificial
  Synthetic oligonucleotide
gggcaatgtagggcagtcgtccccagactcactgtcatatttgttgtcggcccac

SEQ ID NO: 426989 - DNA, 54 bp, Artificial
  Synthetic oligonucleotide
gggcaatgtcacgcccgagctcatgcgagtagatgtactccgaccacatcgggt

SEQ ID NO: 426990 - DNA, 55 bp, Artificial
  Synthetic oligonucleotide
gggcaatgtggcctgcccgcagtgtcaactaaggatggctgcgtcttaggcttac

SEQ ID NO: 426991 - DNA, 60 bp, Artificial
  Synthetic oligonucleotide
gggcaatgtggctggtccccattctgtggtggcttcaatgatcgtgtcaagagattggtg

SEQ ID NO: 426992 - DNA, 60 bp, Artificial
  Synthetic oligonucleotide
gggcaattcagctgtatttatatgtcaaatccgtcaataaggtgacacaaagagatatct

SEQ ID NO: 426993 - DNA, 55 bp, Artificial
  Synthetic oligonucleotide
gggcaattccctctctatgcaataccagacaaattaggcccttggagtccgatag

SEQ ID NO: 426994 - DNA, 53 bp, Artificial
  Synthetic oligonucleotide
gggcaattgatataggatcagagttagcattactaaataggcctatgacagtt

SEQ ID NO: 426995 - DNA, 55 bp, Artificial
  Synthetic oligonucleotide
gggcaattgatcttggccagtgtggcttacttggaattgtcacagggccacctca

SEQ ID NO: 426996 - DNA, 60 bp, Artificial
  Synthetic oligonucleotide
gggcaattgcaacacctgggatgcagatcagaggatttgtgtactttgtcgaaatattgg

SEQ ID NO: 426997 - DNA, 59 bp, Artificial
  Synthetic oligonucleotide
gggcaatttgcgcatagtagacttcctgaaatttcacttggcgttggttcatcggtggc

SEQ ID NO: 426998 - DNA, 60 bp, Artificial
  Synthetic oligonucleotide
gggcaatttggagaactgtattgacaattatgcgatagaggtgtcctatgcatatagatt

SEQ ID NO: 426999 - DNA, 52 bp, Artificial
  Synthetic oligonucleotide
gggcacaacttaaaagtccaagaaacaattcatagtgagtcattcttcgtgt

SEQ ID NO: 427000 - DNA, 58 bp, Artificial
  Synthetic oligonucleotide
gggcacaagggcggttgtcctgtaaggaagactacaggtacgcgatatcatcaaccaa

SEQ ID NO: 427001 - DNA, 51 bp, Artificial
  Synthetic oligonucleotide
gggcacacaactgggttatactgtaggttaactcagcctccaaaggaagac

SEQ ID NO: 427002 - DNA, 57 bp, Artificial
  Synthetic oligonucleotide
gggcacacaacttgtttgcccgaaacaaaatgacacaacgcttatagaggaccagtg

SEQ ID NO: 427003 - DNA, 55 bp, Artificial
  Synthetic oligonucleotide
gggcacacacaacgtgatggaagttgaagtaaacataagtggaggctaccagcag

SEQ ID NO: 427004 - DNA, 55 bp, Artificial
  Synthetic oligonucleotide
gggcacactacaaaccttgccagcaaatccgcctcctgcctctaccaatcgccag

SEQ ID NO: 427005 - DNA, 55 bp, Artificial
  Synthetic oligonucleotide
gggcacactgacaatagtgtgtcccatctgcgtgtagctgccatggccgactgtg

SEQ ID NO: 427006 - DNA, 55 bp, Artificial
  Synthetic oligonucleotide
gggcacacttcataggacgttgctcacacaggtttggaaggcaaactgtgcaagt

SEQ ID NO: 427007 - DNA, 55 bp, Artificial
  Synthetic oligonucleotide
gggcacactttgctttagaatagtaactgaggaacataccaacaaggtcaaagtc

SEQ ID NO: 427008 - DNA, 55 bp, Artificial
  Synthetic oligonucleotide
gggcacagtgtggcgcaacgtacttgacgcagccacatattgggtgtgctatcgt

SEQ ID NO: 427009 - DNA, 55 bp, Artificial
  Synthetic oligonucleotide
gggcacatactcttatatggtgtctattgagcaacttaagtatatgatggctgtt

SEQ ID NO: 427010 - DNA, 55 bp, Artificial
  Synthetic oligonucleotide
gggcacatagttatccctaggtgtgactatccagcaggacacaccaaggtaggat

SEQ ID NO: 427011 - DNA, 60 bp, Artificial
  Synthetic oligonucleotide
gggcacatatgatgtacttgggtgtccaacgaccgacgagctcccaaatcatctgacaga

SEQ ID NO: 427012 - DNA, 59 bp, Artificial
  Synthetic oligonucleotide
gggcaccaacttattatgactactttcacataattgctgtcttggctgcgttttctagg

SEQ ID NO: 427013 - DNA, 55 bp, Artificial
  Synthetic oligonucleotide
gggcaccaagcacttcagggtctgttggcatgactaatccaaattacggtgacac

SEQ ID NO: 427014 - DNA, 55 bp, Artificial
  Synthetic oligonucleotide
gggcaccacaactaaacccaattgatggaccactgcccgaggataatgaaccaac

SEQ ID NO: 427015 - DNA, 55 bp, Artificial
  Synthetic oligonucleotide
gggcaccacagagcactgatagagtgtgcattatcggctctaatttccaggaaaa

SEQ ID NO: 427016 - DNA, 55 bp, Artificial
  Synthetic oligonucleotide
gggcaccagtggacatccgctgttaaataagctagatgatactgaaaacgctccc

SEQ ID NO: 427017 - DNA, 55 bp, Artificial
  Synthetic oligonucleotide
gggcaccatatatcagagaattttctagggtgttcaaaggggagaggcctgaggt

SEQ ID NO: 427018 - DNA, 60 bp, Artificial
  Synthetic oligonucleotide
gggcacccaagacttagatgatgaatgcacaatgttaactctatttggaccgtttgtaga

SEQ ID NO: 427019 - DNA, 55 bp, Artificial
  Synthetic oligonucleotide
gggcacccgtaggcgcgttttaatgacgtcacggcagccattttgtcgtgacgtt

SEQ ID NO: 427020 - DNA, 50 bp, Artificial
  Synthetic oligonucleotide
gggcaccgaagtgagtaatgcccgccgcaggaatcacacgcggcttcgca

SEQ ID NO: 427021 - DNA, 56 bp, Artificial
  Synthetic oligonucleotide
gggcaccgcagccagtggctgcggtgccccaaccgcctcccctagggcggagtaaa

SEQ ID NO: 427022 - DNA, 58 bp, Artificial
  Synthetic oligonucleotide
gggcaccgcagccattggctgccgtgccccaggtgtccgcccctactagggaggagga

SEQ ID NO: 427023 - DNA, 55 bp, Artificial
  Synthetic oligonucleotide
gggcaccggcaacagcccctcaaccgaatagacgaaagtcaacaccagccactcg

SEQ ID NO: 427024 - DNA, 59 bp, Artificial
  Synthetic oligonucleotide
gggcaccgtgcgctttagccgattaggccagagggcaacactaaccacacgcagtggta

SEQ ID NO: 427025 - DNA, 59 bp, Artificial
  Synthetic oligonucleotide
gggcacctcagccattggctgaagtgccccagtgcccgcccctagggaggagaaaatga

SEQ ID NO: 427026 - DNA, 54 bp, Artificial
  Synthetic oligonucleotide
gggcacctctaggttgatggattcggccatttgggtcaggttagaagggggacc

SEQ ID NO: 427027 - DNA, 55 bp, Artificial
  Synthetic oligonucleotide
gggcacctgaggacactctaatgcaatcccctgaaattagctaatgagctgtccg

SEQ ID NO: 427028 - DNA, 56 bp, Artificial
  Synthetic oligonucleotide
gggcacctgatcgtgcgcggctgataccctggacgcacacccttccccacgaagac

SEQ ID NO: 427029 - DNA, 55 bp, Artificial
  Synthetic oligonucleotide
gggcaccttgacaatcatgagactaaccggtgagggccccacgtttgatgccaac

SEQ ID NO: 427030 - DNA, 54 bp, Artificial
  Synthetic oligonucleotide
gggcaccttgttgttgacacccgtagtgagacggtggtgtttgaccaaacccga

SEQ ID NO: 427031 - DNA, 55 bp, Artificial
  Synthetic oligonucleotide
gggcacgaaatggaacggggttgatgaagtgcaagtcattgttgtccagccaggg

SEQ ID NO: 427032 - DNA, 55 bp, Artificial
  Synthetic oligonucleotide
gggcacgagtcaggcgtccagctgcgttgatggctatgtcgtgagtggctcagca

SEQ ID NO: 427033 - DNA, 60 bp, Artificial
  Synthetic oligonucleotide
gggcacgcatcttcaccgtaggtcgtcatgatctacatgtcttgccttctggcaagagag

SEQ ID NO: 427034 - DNA, 50 bp, Artificial
  Synthetic oligonucleotide
gggcacgcgcgcagatctaacacgtccattagccacaccgcccacgtata

SEQ ID NO: 427035 - DNA, 52 bp, Artificial
  Synthetic oligonucleotide
gggcacggccggactacaatcccccgttggtagaaccgtggaaaaagcctga

SEQ ID NO: 427036 - DNA, 60 bp, Artificial
  Synthetic oligonucleotide
gggcacggtccagatatacgcgccattccatgcctgagctgcagtgatggtgacccctgt

SEQ ID NO: 427037 - DNA, 55 bp, Artificial
  Synthetic oligonucleotide
gggcacggttcactcactgcagatgccggaggactcacgtacaccgttagttggg

SEQ ID NO: 427038 - DNA, 60 bp, Artificial
  Synthetic oligonucleotide
gggcacgttgtacagttgctgacaccatgcgtacggggcctagcaattccgcgagcgtac

SEQ ID NO: 427039 - DNA, 55 bp, Artificial
  Synthetic oligonucleotide
gggcactaacattaagttagatggccgtttgtcgtatccagctgcaaactaccag

SEQ ID NO: 427040 - DNA, 52 bp, Artificial
  Synthetic oligonucleotide
gggcactaccacacgcagggagttgaccgggtgatgaacgttcccgtgattc

SEQ ID NO: 427041 - DNA, 57 bp, Artificial
  Synthetic oligonucleotide
gggcactacccggacgagttcataccgaacttcgacgcaattagcgagtcagtggac

SEQ ID NO: 427042 - DNA, 60 bp, Artificial
  Synthetic oligonucleotide
gggcactattactagcttcgaatcacgagacggacgatccattgagtggttctaccacga

SEQ ID NO: 427043 - DNA, 55 bp, Artificial
  Synthetic oligonucleotide
gggcactcaatcattgcccgcatagtctggaacatggccggtaaatgtagctcgg

SEQ ID NO: 427044 - DNA, 60 bp, Artificial
  Synthetic oligonucleotide
gggcactcaattcacaagatagagtctcatttcaacacctcatggatgtcatgggatgga

SEQ ID NO: 427045 - DNA, 50 bp, Artificial
  Synthetic oligonucleotide
gggcactcacaagcagcaacacagcccaaagtaatgctaattgtgcctgg

SEQ ID NO: 427046 - DNA, 58 bp, Artificial
  Synthetic oligonucleotide
gggcactcagtatcgtggcagacttgtggtagttaccaccaacaggagagattttacc

SEQ ID NO: 427047 - DNA, 56 bp, Artificial
  Synthetic oligonucleotide
gggcactcctgctgggggctgttcgacgctccacgggttcccccgtgtgacgacta

SEQ ID NO: 427048 - DNA, 55 bp, Artificial
  Synthetic oligonucleotide
gggcactgatggatgaatcgttggtcaggtacgtttccgaagctgcgtttcgtca

SEQ ID NO: 427049 - DNA, 60 bp, Artificial
  Synthetic oligonucleotide
gggcactgcagccattggctgcagtatgccccgtgcccgcccctagggagggttcaatga

SEQ ID NO: 427050 - DNA, 60 bp, Artificial
  Synthetic oligonucleotide
gggcactgcagccattggctgcagtgtccccgtgcccgcccctagggaggagcaatggcg

SEQ ID NO: 427051 - DNA, 55 bp, Artificial
  Synthetic oligonucleotide
gggcactggttgatacccgccgaaatcgcagagaacgtacatccctgttgtatac

SEQ ID NO: 427052 - DNA, 60 bp, Artificial
  Synthetic oligonucleotide
gggcactgtatgcagcagcaacaatggtcatgacacctttgataaaacacctcatcacga

SEQ ID NO: 427053 - DNA, 55 bp, Artificial
  Synthetic oligonucleotide
gggcacttgagtctggctggggcaagcacgtatcaggccagaacaactatttcgg

SEQ ID NO: 427054 - DNA, 55 bp, Artificial
  Synthetic oligonucleotide
gggcacttgttcgtactgggatggatcccaggatgtgctctctaatgcaaggctc

SEQ ID NO: 427055 - DNA, 55 bp, Artificial
  Synthetic oligonucleotide
gggcagaaacaccctatagaggaatttatagctccggaagtgatgaaaggagagg

SEQ ID NO: 427056 - DNA, 60 bp, Artificial
  Synthetic oligonucleotide
gggcagaaacagagaacaccttttccacgctgcgacattatatgccaatctgaaattggt

SEQ ID NO: 427057 - DNA, 60 bp, Artificial
  Synthetic oligonucleotide
gggcagaaacctttgacttcagcaagatggtacaatgggcttatgacaaccagctcatag

SEQ ID NO: 427058 - DNA, 60 bp, Artificial
  Synthetic oligonucleotide
gggcagaaatagtaccaggatttcaggcactatcagagggatgtaccccttatgatatca

SEQ ID NO: 427059 - DNA, 60 bp, Artificial
  Synthetic oligonucleotide
gggcagaagtggatacaccattcatgtccaatgcaatgcatcaaaattccatcaaggcac

SEQ ID NO: 427060 - DNA, 55 bp, Artificial
  Synthetic oligonucleotide
gggcagaatacactgtacagaatcagatggaatcctaagaatccagctacgcacc

SEQ ID NO: 427061 - DNA, 55 bp, Artificial
  Synthetic oligonucleotide
gggcagaatgagaccaacacaagaagtttcgcaaatagtaggtgctttccgcccc

SEQ ID NO: 427062 - DNA, 55 bp, Artificial
  Synthetic oligonucleotide
gggcagaatggacaggacatgcacaccaacctattcctaaaggagatgattggac

SEQ ID NO: 427063 - DNA, 55 bp, Artificial
  Synthetic oligonucleotide
gggcagaccaacatcccgtctccagtgtaagacgatacatgaagtcctggtccag

SEQ ID NO: 427064 - DNA, 55 bp, Artificial
  Synthetic oligonucleotide
gggcagaccaaggatgttccattgacagtgagagaatggagctcagatgtggagc

SEQ ID NO: 427065 - DNA, 55 bp, Artificial
  Synthetic oligonucleotide
gggcagactacatcaccacctcctattcaattgtaccaatacggtgtaacaccat

SEQ ID NO: 427066 - DNA, 55 bp, Artificial
  Synthetic oligonucleotide
gggcagagatgatttgtgaggcaagctggagaagggtagccgtgtctacggactc

SEQ ID NO: 427067 - DNA, 55 bp, Artificial
  Synthetic oligonucleotide
gggcagaggaaaagaatcacatattcgcaggaggttctgactgattttaggaggc

SEQ ID NO: 427068 - DNA, 55 bp, Artificial
  Synthetic oligonucleotide
gggcagaggttaaatctgatgtggttgctaaccgtgaccacccaacggctatccg

SEQ ID NO: 427069 - DNA, 60 bp, Artificial
  Synthetic oligonucleotide
gggcagagtacatatatgcagcccttgtacttatggcatagtcctaagagttgttagtga

SEQ ID NO: 427070 - DNA, 60 bp, Artificial
  Synthetic oligonucleotide
gggcagatgagtgaagcaataattgtaaaaggattacgaaacgtgcatctcatgactgct

SEQ ID NO: 427071 - DNA, 55 bp, Artificial
  Synthetic oligonucleotide
gggcagatgtggttgctgagttacttccatcggcgtgacttgaggacgcttgggc

SEQ ID NO: 427072 - DNA, 55 bp, Artificial
  Synthetic oligonucleotide
gggcagattatacaggatcgtatagataaagtcatatcagagtgtgtcagagacc

SEQ ID NO: 427073 - DNA, 55 bp, Artificial
  Synthetic oligonucleotide
gggcagattatacttgatctaaagattgatcccggtgagaggatggatccggcag

SEQ ID NO: 427074 - DNA, 55 bp, Artificial
  Synthetic oligonucleotide
gggcagattgttcaacctgcaagattactatctgctcattgtgcaagccccacta

SEQ ID NO: 427075 - DNA, 55 bp, Artificial
  Synthetic oligonucleotide
gggcagcaacatgcgtagtatcacaagctaaagtgtcagaaagattcctggagcc

SEQ ID NO: 427076 - DNA, 56 bp, Artificial
  Synthetic oligonucleotide
gggcagcaaccgacgagggccgttgactggtctgggacgcggtattacgccgctaa

SEQ ID NO: 427077 - DNA, 57 bp, Artificial
  Synthetic oligonucleotide
gggcagcacaaatttatccaggaataaagactaaacatctttgcagattaatcagag

SEQ ID NO: 427078 - DNA, 55 bp, Artificial
  Synthetic oligonucleotide
gggcagcacctgttgccctaggagctttggcacttctcagtgctgcgggtactgc

SEQ ID NO: 427079 - DNA, 60 bp, Artificial
  Synthetic oligonucleotide
gggcagcagaccaattctcccgacaggtactcgatagaatcattaaagagtactcttaca

SEQ ID NO: 427080 - DNA, 60 bp, Artificial
  Synthetic oligonucleotide
gggcagcagctatatgtggtctggtgagtgtcttccatttaagaacacaatgaatacata

SEQ ID NO: 427081 - DNA, 55 bp, Artificial
  Synthetic oligonucleotide
gggcagcaggctgatagagcaggtgatgggcatgacacacatcaagatcgtgcag

SEQ ID NO: 427082 - DNA, 55 bp, Artificial
  Synthetic oligonucleotide
gggcagccaatagggagactaaactaggaaaagcagggtatgtcacagacagagg

SEQ ID NO: 427083 - DNA, 52 bp, Artificial
  Synthetic oligonucleotide
gggcagccgtacgaacaatttatatccagcttagttcaagtaatcgttaaag

SEQ ID NO: 427084 - DNA, 60 bp, Artificial
  Synthetic oligonucleotide
gggcagcctgcgctgacgctaacatgactctacatgagggcgtgcgtcaactaatttccc

SEQ ID NO: 427085 - DNA, 59 bp, Artificial
  Synthetic oligonucleotide
gggcagcgctgtgcatttccccctccccggtagctagccagccaatgtccacccccgca

SEQ ID NO: 427086 - DNA, 55 bp, Artificial
  Synthetic oligonucleotide
gggcagcgggttgagttcctcgtgcaagcgtggaagtccaagaaaaccccaatgg

SEQ ID NO: 427087 - DNA, 58 bp, Artificial
  Synthetic oligonucleotide
gggcagcgtcccttgtcaggcttcagcaagatgccctaactcatgtgttaccggggtt

SEQ ID NO: 427088 - DNA, 60 bp, Artificial
  Synthetic oligonucleotide
gggcagcgtggtgattgtcgggagagtcgtcctgtcgggccaacctgctatcattcccga

SEQ ID NO: 427089 - DNA, 55 bp, Artificial
  Synthetic oligonucleotide
gggcagctaaggcttatagcaaatcaggtaaacttaatgtcagccaagcaatgtc

SEQ ID NO: 427090 - DNA, 55 bp, Artificial
  Synthetic oligonucleotide
gggcagctaatagggaaactaagctaggaaaagcaggatatgtaactgacagagg

SEQ ID NO: 427091 - DNA, 60 bp, Artificial
  Synthetic oligonucleotide
gggcagctgtgtcagcattggaggacaaactggcagatttcaagagacaacttgcagatc

SEQ ID NO: 427092 - DNA, 55 bp, Artificial
  Synthetic oligonucleotide
gggcagctgtgtctgcattggagaccaaactcggagaactcaaacgagagctggc

SEQ ID NO: 427093 - DNA, 55 bp, Artificial
  Synthetic oligonucleotide
gggcaggaaataactactgaaaacggctgagactgcagggactttccgaagaggc

SEQ ID NO: 427094 - DNA, 55 bp, Artificial
  Synthetic oligonucleotide
gggcaggaaatgaaagcatggagaggggtaatgacaatgacactatcatacttcc

SEQ ID NO: 427095 - DNA, 55 bp, Artificial
  Synthetic oligonucleotide
gggcaggaccatccttctactggctcccgccaagagatcggtgttgccggaaacg

SEQ ID NO: 427096 - DNA, 60 bp, Artificial
  Synthetic oligonucleotide
gggcaggacggataatcgcgtgggatggacaagcggttctgcagatacataatcctaccc

SEQ ID NO: 427097 - DNA, 55 bp, Artificial
  Synthetic oligonucleotide
gggcaggagtagacaccagcagtggggtatcaagtgcttgtccgtataccattgg

SEQ ID NO: 427098 - DNA, 55 bp, Artificial
  Synthetic oligonucleotide
gggcaggatatcattagcttgatgctgacgccacatggagtcgaagcgacaacgg

SEQ ID NO: 427099 - DNA, 60 bp, Artificial
  Synthetic oligonucleotide
gggcaggcctccaacagctccagagacagtgccccgtccccctattgctgtagagcctgt

SEQ ID NO: 427100 - DNA, 55 bp, Artificial
  Synthetic oligonucleotide
gggcaggcgacgaaattgcttcgtttattcgctactgtcggctatgtggaatgtc

SEQ ID NO: 427101 - DNA, 56 bp, Artificial
  Synthetic oligonucleotide
gggcaggcggttacctctacatgcgctaatgcttgacattcctgcgcctacctgct

SEQ ID NO: 427102 - DNA, 51 bp, Artificial
  Synthetic oligonucleotide
gggcaggcgtaatgtgctcacggtgtgcacgtgctacgagcccagcgcaga

SEQ ID NO: 427103 - DNA, 55 bp, Artificial
  Synthetic oligonucleotide
gggcaggctagacggaactggcagacggaattgaaccagatgcccgaatcggtgc

SEQ ID NO: 427104 - DNA, 60 bp, Artificial
  Synthetic oligonucleotide
gggcaggctctgtaatcctctgaatccttttgtcagccataaggaaattgaatccgtcaa

SEQ ID NO: 427105 - DNA, 59 bp, Artificial
  Synthetic oligonucleotide
gggcaggggccatgtaaaactgtccagaggaacggaaattgtcctagatgtatgtgaca

SEQ ID NO: 427106 - DNA, 60 bp, Artificial
  Synthetic oligonucleotide
gggcaggtaagttactcaaaagtctgatggatgggatggcaggaatcgtatcacataact

SEQ ID NO: 427107 - DNA, 60 bp, Artificial
  Synthetic oligonucleotide
gggcaggtacgtccagatggcgctactagcccttggcaggtggactggcacttacatcta

SEQ ID NO: 427108 - DNA, 55 bp, Artificial
  Synthetic oligonucleotide
gggcaggtatccgaggccccaccgaactccatccaacaggtaacttgcccaggca

SEQ ID NO: 427109 - DNA, 55 bp, Artificial
  Synthetic oligonucleotide
gggcaggtgaggaaggatgacgacatcaacgcagggctacatggcaaacacacca

SEQ ID NO: 427110 - DNA, 59 bp, Artificial
  Synthetic oligonucleotide
gggcaggtttcaacaagtacacgcggttggtcaaaggtatgcttgtgtatcttgatctg

SEQ ID NO: 427111 - DNA, 55 bp, Artificial
  Synthetic oligonucleotide
gggcaggttttaccttgactacgcagctaacgacgatacagtgaaagacaggacg

SEQ ID NO: 427112 - DNA, 60 bp, Artificial
  Synthetic oligonucleotide
gggcagtacagcgattctggcataacatttcgcagacctaagttcacaaacactggaatt

SEQ ID NO: 427113 - DNA, 55 bp, Artificial
  Synthetic oligonucleotide
gggcagtatcaatataaagcagtggactttaagcagtatgtgagacactgtgaaa

SEQ ID NO: 427114 - DNA, 60 bp, Artificial
  Synthetic oligonucleotide
gggcagtatctcaagatttagctagacatggagcaataacaagtactaatgtaaaccacc

SEQ ID NO: 427115 - DNA, 55 bp, Artificial
  Synthetic oligonucleotide
gggcagtcaaactgtataggaagctcaaaagggagattacattccatggggccag

SEQ ID NO: 427116 - DNA, 60 bp, Artificial
  Synthetic oligonucleotide
gggcagtcggctctcagacagtataagacagagataagagtgggtcaggcatcttctggc

SEQ ID NO: 427117 - DNA, 59 bp, Artificial
  Synthetic oligonucleotide
gggcagtgaactagggtgttacactatcaatagagtaaagtcatttaagctttgcgaga

SEQ ID NO: 427118 - DNA, 59 bp, Artificial
  Synthetic oligonucleotide
gggcagtgactgcggttacaccgccttgcaaatgctattcagtgacctggtgcaaccta

SEQ ID NO: 427119 - DNA, 55 bp, Artificial
  Synthetic oligonucleotide
gggcagtgatgaaaatccacgcggcccagtgagccatgaacatgtggaatggtgc

SEQ ID NO: 427120 - DNA, 57 bp, Artificial
  Synthetic oligonucleotide
gggcagtggccagaaggccgcgctaccgagccatatatttttccccacacctagcgg

SEQ ID NO: 427121 - DNA, 57 bp, Artificial
  Synthetic oligonucleotide
gggcagtggtcgggacagttggagtatcaggcgcccaatctgacgtggagggtaccc

SEQ ID NO: 427122 - DNA, 57 bp, Artificial
  Synthetic oligonucleotide
gggcagtgtcacaaaaccttagcattacatgtactagctacggacggggcaataagg

SEQ ID NO: 427123 - DNA, 59 bp, Artificial
  Synthetic oligonucleotide
gggcagtgtggtatgtcactatgtggcggattacccttgctccaggcctattacggggc

SEQ ID NO: 427124 - DNA, 55 bp, Artificial
  Synthetic oligonucleotide
gggcagttctccgagtccgccatctgctgtattccatttaggaccagaaagtcaa

SEQ ID NO: 427125 - DNA, 55 bp, Artificial
  Synthetic oligonucleotide
gggcataaaagactgcattccatcaggaaaggatatgtatgttttccgtcagaag

SEQ ID NO: 427126 - DNA, 57 bp, Artificial
  Synthetic oligonucleotide
gggcataaataacccacccactgatactgcgcagacaaatctgtacacaaggacaga

SEQ ID NO: 427127 - DNA, 57 bp, Artificial
  Synthetic oligonucleotide
gggcataatagatgggcagtatatgtcaggtgagcatgtccttgcttcccgtggcac

SEQ ID NO: 427128 - DNA, 55 bp, Artificial
  Synthetic oligonucleotide
gggcataatgagccgggtaggccagtggatctgaactccgtacgctcagagactg

SEQ ID NO: 427129 - DNA, 55 bp, Artificial
  Synthetic oligonucleotide
gggcatacaggccaaataacacgccgacaacaggcagtggaattcggtttgacct

SEQ ID NO: 427130 - DNA, 52 bp, Artificial
  Synthetic oligonucleotide
gggcatacatttgaaccctaataaaaccaagcgttggggctactcccttaac

SEQ ID NO: 427131 - DNA, 55 bp, Artificial
  Synthetic oligonucleotide
gggcatacccacccacagacacattaggggcgaagcatgccctttgccacacagg

SEQ ID NO: 427132 - DNA, 60 bp, Artificial
  Synthetic oligonucleotide
gggcatacgataacgagttaacggacgatagtgacattgcatattattatgcacaacttg

SEQ ID NO: 427133 - DNA, 55 bp, Artificial
  Synthetic oligonucleotide
gggcatactttcgttatgcagtcaagtatcctgtccaattaatgacctactaagc

SEQ ID NO: 427134 - DNA, 55 bp, Artificial
  Synthetic oligonucleotide
gggcatagacgggaatggagcctcagctgggtccaaggagaggtccgggtctttg

SEQ ID NO: 427135 - DNA, 55 bp, Artificial
  Synthetic oligonucleotide
gggcatatacagcccctactacctaacacccaccagaattagcctagactgggac

SEQ ID NO: 427136 - DNA, 55 bp, Artificial
  Synthetic oligonucleotide
gggcatatcttagcaaagaggatacgggcatagatttcatggataatgataatca

SEQ ID NO: 427137 - DNA, 54 bp, Artificial
  Synthetic oligonucleotide
gggcatatggagtaaagggattttcatttaaatacggtaatggtgtttggatag

SEQ ID NO: 427138 - DNA, 55 bp, Artificial
  Synthetic oligonucleotide
gggcatatggtacatcagaacccattgagttatttagtcctacagctcctccagt

SEQ ID NO: 427139 - DNA, 54 bp, Artificial
  Synthetic oligonucleotide
gggcatatttgggagtctgcgaaccccttctgcggggaagggactttgtatacc

SEQ ID NO: 427140 - DNA, 55 bp, Artificial
  Synthetic oligonucleotide
gggcatcaaagaggcagatataaccccagcacatggtccagtaaagaaaatggac

SEQ ID NO: 427141 - DNA, 55 bp, Artificial
  Synthetic oligonucleotide
gggcatcaaatgcagcgaacacaattggtgagaccatatggcaggttgttgacca

SEQ ID NO: 427142 - DNA, 50 bp, Artificial
  Synthetic oligonucleotide
gggcatcacaagcctgcgttcccacagaccccaatccaaatgagtatacg

SEQ ID NO: 427143 - DNA, 60 bp, Artificial
  Synthetic oligonucleotide
gggcatcatgcagtggaaaacggcacatctgttaaaacactaacagacaatcacgtagaa

SEQ ID NO: 427144 - DNA, 56 bp, Artificial
  Synthetic oligonucleotide
gggcatccaggagagtggcaaggaccaacacaggtactttggggcggggacggtgc

SEQ ID NO: 427145 - DNA, 60 bp, Artificial
  Synthetic oligonucleotide
gggcatcctcttacaggatgaccttgggtgttgctgacctgaagaccaggtccttgctga

SEQ ID NO: 427146 - DNA, 55 bp, Artificial
  Synthetic oligonucleotide
gggcatctacgacaggtgggctgtactaccacgccatgcaaaacccgggccaacc

SEQ ID NO: 427147 - DNA, 55 bp, Artificial
  Synthetic oligonucleotide
gggcatctactttcgttggccattgctgctcactttgtcgcatcacccatgattc

SEQ ID NO: 427148 - DNA, 60 bp, Artificial
  Synthetic oligonucleotide
gggcatctgggacaacttcaacaagacgttcacagatggcgttgcctactactctgatga

SEQ ID NO: 427149 - DNA, 57 bp, Artificial
  Synthetic oligonucleotide
gggcatcttgttatctcaatataatttggacgacatagatttaatgttggtcagtgg

SEQ ID NO: 427150 - DNA, 55 bp, Artificial
  Synthetic oligonucleotide
gggcatgaatctcgacactctaggtgagctgataagtgcaaaacttcaatacccg

SEQ ID NO: 427151 - DNA, 55 bp, Artificial
  Synthetic oligonucleotide
gggcatgagtggatccccacattgcagtgttctagctggtcagagcctaatcccc

SEQ ID NO: 427152 - DNA, 55 bp, Artificial
  Synthetic oligonucleotide
gggcatgattgcagacttatacctggcgaagtactctgtgtcgagtaaagaggga

SEQ ID NO: 427153 - DNA, 60 bp, Artificial
  Synthetic oligonucleotide
gggcatgcaaaagggcaaatgtgaatgactttttcaataggctgaactggctgaccaaat

SEQ ID NO: 427154 - DNA, 60 bp, Artificial
  Synthetic oligonucleotide
gggcatgcacaaagtatgaatacccatggcataccgcaaaatgccattacgaaagagatt

SEQ ID NO: 427155 - DNA, 55 bp, Artificial
  Synthetic oligonucleotide
gggcatgccatctggttgctcagggacttccatcttcaacagtatgatcaacaac

SEQ ID NO: 427156 - DNA, 55 bp, Artificial
  Synthetic oligonucleotide
gggcatgcggaagacaatcaagatagtgtagcgtcgctaccgtacaagtatctac

SEQ ID NO: 427157 - DNA, 60 bp, Artificial
  Synthetic oligonucleotide
gggcatgctactcacagggtctaacgctaagagcatggatttgggcacaactcctggcga

SEQ ID NO: 427158 - DNA, 55 bp, Artificial
  Synthetic oligonucleotide
gggcatgcttaccgggaactgtaaaatgtacccttgcattgaaggaaccgcgaag

SEQ ID NO: 427159 - DNA, 58 bp, Artificial
  Synthetic oligonucleotide
gggcatggcaacgggatccgacttcccatctcctactaccctgatctactcaggtggg

SEQ ID NO: 427160 - DNA, 60 bp, Artificial
  Synthetic oligonucleotide
gggcatggcatcagtcttagataagggagctggcaagtaccaattcgccagggactttat

SEQ ID NO: 427161 - DNA, 60 bp, Artificial
  Synthetic oligonucleotide
gggcatgtaaaaatgtcagctcactacaatgcacacctgggattaaacctgtggtatcaa

SEQ ID NO: 427162 - DNA, 60 bp, Artificial
  Synthetic oligonucleotide
gggcatgtacgatatgatttaccgctgtgtattcgttctggcattgacctatatcttaac

SEQ ID NO: 427163 - DNA, 60 bp, Artificial
  Synthetic oligonucleotide
gggcatgtatgatgatcacgttgctggtatattgttgtacagcatatcaacgttgaagca

SEQ ID NO: 427164 - DNA, 58 bp, Artificial
  Synthetic oligonucleotide
gggcatgtgttctcctccacctgaagttccgcgtcgagattcgagcagggtgtgtata

SEQ ID NO: 427165 - DNA, 58 bp, Artificial
  Synthetic oligonucleotide
gggcatgttactcacagggtccaatgccaaaaacatggatcttggcactatccccggg

SEQ ID NO: 427166 - DNA, 56 bp, Artificial
  Synthetic oligonucleotide
gggcatgttcgattcttcggtcctgtgtgagtgctatgacgcgggctgtgcttggt

SEQ ID NO: 427167 - DNA, 60 bp, Artificial
  Synthetic oligonucleotide
gggcattaagcagctccagacaagagtcttggctatagaaagatacctaaaggatcaaca

SEQ ID NO: 427168 - DNA, 55 bp, Artificial
  Synthetic oligonucleotide
gggcattataacaaaagaagttcaaagagttcaccattctgggggcatcaaaacc

SEQ ID NO: 427169 - DNA, 57 bp, Artificial
  Synthetic oligonucleotide
gggcattatatataaccagggtaatgggcactaatcaaagtttattgcactagggtg

SEQ ID NO: 427170 - DNA, 55 bp, Artificial
  Synthetic oligonucleotide
gggcattcacagtgagatcagcagtgacctagctgcagggtccataacagcatgc

SEQ ID NO: 427171 - DNA, 55 bp, Artificial
  Synthetic oligonucleotide
gggcattcccagccgaagtgatctattccccaagaagggacgacatccatcacag

SEQ ID NO: 427172 - DNA, 55 bp, Artificial
  Synthetic oligonucleotide
gggcattccgattgattgagttggctaaagaggcaatgtatgatcgagaaactgt

SEQ ID NO: 427173 - DNA, 59 bp, Artificial
  Synthetic oligonucleotide
gggcattcgtgcattgatgtctaatgggttggcctcgagaaaacaaggtgattttgacg

SEQ ID NO: 427174 - DNA, 52 bp, Artificial
  Synthetic oligonucleotide
gggcattgaaatttgtagaggccaacctttaggaataggggtgactggacac

SEQ ID NO: 427175 - DNA, 60 bp, Artificial
  Synthetic oligonucleotide
gggcattggaggcttacactcgaacaatgataagcagcgataaagaaatgcgtagcctat

SEQ ID NO: 427176 - DNA, 55 bp, Artificial
  Synthetic oligonucleotide
gggcattgtgcttgtggattgggataaatgccagagaccactcgatagccgtaac

SEQ ID NO: 427177 - DNA, 60 bp, Artificial
  Synthetic oligonucleotide
gggcatttctgattcgagtttagatgctactgaattaagcctgaaactagccatgttaca

SEQ ID NO: 427178 - DNA, 55 bp, Artificial
  Synthetic oligonucleotide
gggcatttgccatgcttagtgtataaggacaggaaaatgtaccgtcattatggtg

SEQ ID NO: 427179 - DNA, 53 bp, Artificial
  Synthetic oligonucleotide
gggcatttggggcggcactaccgaacgagcacggcgacggatcaagcgcggac

SEQ ID NO: 427180 - DNA, 55 bp, Artificial
  Synthetic oligonucleotide
gggcattttgtcaacaaccacacaggatgcatacaggtttcaaagcttggacacc

SEQ ID NO: 427181 - DNA, 55 bp, Artificial
  Synthetic oligonucleotide
gggccaaacagaacatccagttgatttataccaacggcagctggcacgtcaacag

SEQ ID NO: 427182 - DNA, 50 bp, Artificial
  Synthetic oligonucleotide
gggccaaacctatacaatatccggaatctccacattcaggaggtctgctt

SEQ ID NO: 427183 - DNA, 56 bp, Artificial
  Synthetic oligonucleotide
gggccaaagactgtaggcttgcgacaccatcattgtgtgactaccagcagcataac

SEQ ID NO: 427184 - DNA, 60 bp, Artificial
  Synthetic oligonucleotide
gggccaaagaggtagcactcggttattctactggtgcacttgctagttgcatgggcctta

SEQ ID NO: 427185 - DNA, 55 bp, Artificial
  Synthetic oligonucleotide
gggccaaagatcacatttaaaggggtgtgccagatagggaataaagtctacaaac

SEQ ID NO: 427186 - DNA, 53 bp, Artificial
  Synthetic oligonucleotide
gggccaaataaccttaaataagcacttgcaaccaggtcaaggggtaaataatc

SEQ ID NO: 427187 - DNA, 51 bp, Artificial
  Synthetic oligonucleotide
gggccaaatcactctcactacgttcctaacagctatggtgctagtgacact

SEQ ID NO: 427188 - DNA, 55 bp, Artificial
  Synthetic oligonucleotide
gggccaaatttcactagtacagcagtaaaggctgcatgttggtgggcgcaaatcc

SEQ ID NO: 427189 - DNA, 55 bp, Artificial
  Synthetic oligonucleotide
gggccaacccgcactaagctcgaacctagtgtgttctatgacgtctttgagggca

SEQ ID NO: 427190 - DNA, 60 bp, Artificial
  Synthetic oligonucleotide
gggccaacgcagtggcaacgtacaacgcatggtacggtggcactgacggtggccgtgctc

SEQ ID NO: 427191 - DNA, 52 bp, Artificial
  Synthetic oligonucleotide
gggccaacggaaaacaacgtcaatggccagcctactcggtaagtacataagt

SEQ ID NO: 427192 - DNA, 55 bp, Artificial
  Synthetic oligonucleotide
gggccaagaacatctggggctcagtggagaaggtcaggaagctcattggaccaga

SEQ ID NO: 427193 - DNA, 60 bp, Artificial
  Synthetic oligonucleotide
gggccaagattattcaatgtgacatcgaggacagcgcatatattggatagagcctgtagc

SEQ ID NO: 427194 - DNA, 55 bp, Artificial
  Synthetic oligonucleotide
gggccaaggccgctcgtaaggggacaacaggggagaatggattactactgggctg

SEQ ID NO: 427195 - DNA, 55 bp, Artificial
  Synthetic oligonucleotide
gggccaataacagcaaaagttcctagcagtagttcaactgaaactttacaaggca

SEQ ID NO: 427196 - DNA, 55 bp, Artificial
  Synthetic oligonucleotide
gggccaatagcaccaggacaaatgaggcagccaacagggtcagatatagcagggg

SEQ ID NO: 427197 - DNA, 60 bp, Artificial
  Synthetic oligonucleotide
gggccaatgaaaccaccattgactgccgctaacataggctgcttgaatgaagccacaacc

SEQ ID NO: 427198 - DNA, 55 bp, Artificial
  Synthetic oligonucleotide
gggccaatgagcagcctgggactaaatattataaaatgcgcggcgaatggtggga

SEQ ID NO: 427199 - DNA, 55 bp, Artificial
  Synthetic oligonucleotide
gggccaatgttttaatcctgcacacactctgacacttgctcagcctgctcacaca

SEQ ID NO: 427200 - DNA, 55 bp, Artificial
  Synthetic oligonucleotide
gggccaattggaggtattaaatcaatgggaattactaccttagttcagtatgcgg

SEQ ID NO: 427201 - DNA, 55 bp, Artificial
  Synthetic oligonucleotide
gggccacaaagcaagagatgccagatgacatactgaccaagtttggggcttcttt

SEQ ID NO: 427202 - DNA, 60 bp, Artificial
  Synthetic oligonucleotide
gggccacaatgataacagtcccctccggaggtatttgcgacctcatcagcacctatgccc

SEQ ID NO: 427203 - DNA, 55 bp, Artificial
  Synthetic oligonucleotide
gggccacactcaaaaacttttctcgtgaaacttacgagcaaatctatggatttac

SEQ ID NO: 427204 - DNA, 55 bp, Artificial
  Synthetic oligonucleotide
gggccacactgcggccacgactcaaaacgacagaatgccaggccctgagctttcg

SEQ ID NO: 427205 - DNA, 55 bp, Artificial
  Synthetic oligonucleotide
gggccacagacaagcgcgttgtggattctcttcgcgccatttgtgctgacctaga

SEQ ID NO: 427206 - DNA, 55 bp, Artificial
  Synthetic oligonucleotide
gggccaccacgtacgtgccaatcaccgtgacagtggcgccgatgtgcgctgaata

SEQ ID NO: 427207 - DNA, 60 bp, Artificial
  Synthetic oligonucleotide
gggccaccatccgcactcgcagcggagccgcaataggcagccaggtacatttctacagag

SEQ ID NO: 427208 - DNA, 58 bp, Artificial
  Synthetic oligonucleotide
gggccacctaacacaggaaagtcgtggttctgcatgagccttatgcacttcctggggg

SEQ ID NO: 427209 - DNA, 60 bp, Artificial
  Synthetic oligonucleotide
gggccacctaatcagtcataggctggcccactaagtcacaatggtgactaggtgatcatt

SEQ ID NO: 427210 - DNA, 55 bp, Artificial
  Synthetic oligonucleotide
gggccacgaccatccacgagcttctcgtgcgcatgaaacgtgccgagctctactg

SEQ ID NO: 427211 - DNA, 60 bp, Artificial
  Synthetic oligonucleotide
gggccacgcttacgctgttcacttttatgccgctgattggaagactgactgtcgacttgt

SEQ ID NO: 427212 - DNA, 54 bp, Artificial
  Synthetic oligonucleotide
gggccactattttaccaggactataagggtcccgtctatcacagggccccgctg

SEQ ID NO: 427213 - DNA, 55 bp, Artificial
  Synthetic oligonucleotide
gggccactgaatacataatgaagggagtctacataaatacagctctgctcaacgc

SEQ ID NO: 427214 - DNA, 60 bp, Artificial
  Synthetic oligonucleotide
gggccactgacatcgttatgttggactgtgccctctgggccccaactatcgaagcagatt

SEQ ID NO: 427215 - DNA, 60 bp, Artificial
  Synthetic oligonucleotide
gggccactgctaattccaagtcacagaccaatagacaagtcatagttgacaataacaatt

SEQ ID NO: 427216 - DNA, 59 bp, Artificial
  Synthetic oligonucleotide
gggccactgtcatgcttctatcaacattctgctttgggtgggtcttgattcctgcggtc

SEQ ID NO: 427217 - DNA, 55 bp, Artificial
  Synthetic oligonucleotide
gggccactgtggatgctaaggaaataaataaccccaagtttattataacgcgata

SEQ ID NO: 427218 - DNA, 55 bp, Artificial
  Synthetic oligonucleotide
gggccactgtttctgagcaggtaacttttgagagtgcacaggaggtgggccccat

SEQ ID NO: 427219 - DNA, 55 bp, Artificial
  Synthetic oligonucleotide
gggccacttctctcgctagcgctctcaaggtcaaattaacaggcgaggtcatgca

SEQ ID NO: 427220 - DNA, 55 bp, Artificial
  Synthetic oligonucleotide
gggccacttgaccgctggagtcccaaagagccctcttttgacggctagtgtaact

SEQ ID NO: 427221 - DNA, 52 bp, Artificial
  Synthetic oligonucleotide
gggccagaaaaaactcaaaacgtaactgtaaatccaggtccatttgcccaaa

SEQ ID NO: 427222 - DNA, 55 bp, Artificial
  Synthetic oligonucleotide
gggccagaatcaaaactagactattcaccataagacaagaaatggccagcagagg

SEQ ID NO: 427223 - DNA, 60 bp, Artificial
  Synthetic oligonucleotide
gggccagatcagcgtgcaacctacattctcggtgcaaagaaatctcccttttgagagagc

SEQ ID NO: 427224 - DNA, 56 bp, Artificial
  Synthetic oligonucleotide
gggccagcacttccgaaacacccattaaaaagggcacagacgcgaggttagcctca

SEQ ID NO: 427225 - DNA, 60 bp, Artificial
  Synthetic oligonucleotide
gggccagctgaggatgttttcattctacccgcaatgtatgagtctgtgcgacatgagaca

SEQ ID NO: 427226 - DNA, 55 bp, Artificial
  Synthetic oligonucleotide
gggccaggaagtgatgctgtgggacgattacggcatggccaacatagccgcggac

SEQ ID NO: 427227 - DNA, 60 bp, Artificial
  Synthetic oligonucleotide
gggccaggagtcagatatccactgacctttggatggtgcttcaagctagtaccacttgac

SEQ ID NO: 427228 - DNA, 57 bp, Artificial
  Synthetic oligonucleotide
gggccaggagtcccgcgtctgcactcagtgcggaaaggtgttcgacaattaccaccg

SEQ ID NO: 427229 - DNA, 60 bp, Artificial
  Synthetic oligonucleotide
gggccagggatcagatacccactgtgttttggatggtgcttcaagctaataccagttgac

SEQ ID NO: 427230 - DNA, 55 bp, Artificial
  Synthetic oligonucleotide
gggccagggctcacgcgaatgattataaggttcttgttggtttgggtatagtaaa

SEQ ID NO: 427231 - DNA, 55 bp, Artificial
  Synthetic oligonucleotide
gggccagggttggaggtcaggcaattccctcatgtcgtcatcgacgcccgttcac

SEQ ID NO: 427232 - DNA, 52 bp, Artificial
  Synthetic oligonucleotide
gggccaggtacacggtacccgaagacatttgggttctgctttaaactagtac

SEQ ID NO: 427233 - DNA, 55 bp, Artificial
  Synthetic oligonucleotide
gggccagtctgtcggcgcgttgacttcctcgtgtactgtaactcccaggaagttg

SEQ ID NO: 427234 - DNA, 55 bp, Artificial
  Synthetic oligonucleotide
gggccagtgatcacgtgaccgaggtggcgcatgagttttacgtcagaaagggcgg

SEQ ID NO: 427235 - DNA, 60 bp, Artificial
  Synthetic oligonucleotide
gggccagtgccgtccaggcattgcatagaagggtgtcctcaattgtgtcaactgctgatg

SEQ ID NO: 427236 - DNA, 55 bp, Artificial
  Synthetic oligonucleotide
gggccagttgaatccattgggatccgatacatggacgttatacaacaaccggtcc

SEQ ID NO: 427237 - DNA, 59 bp, Artificial
  Synthetic oligonucleotide
gggccataacacagccatttcaacgttcatcacattccctagcctcggtaagaccgagc

SEQ ID NO: 427238 - DNA, 60 bp, Artificial
  Synthetic oligonucleotide
gggccatagaggcgcaacagcatatgttgcaactcacggtctggggaattaagcaactcc

SEQ ID NO: 427239 - DNA, 55 bp, Artificial
  Synthetic oligonucleotide
gggccatatttaggcggtagaaagaaggatcacatgaccaacggtgaacctgaca

SEQ ID NO: 427240 - DNA, 52 bp, Artificial
  Synthetic oligonucleotide
gggccatcccgttcagtggcacgactattccgactggcgcctgggttgggtt

SEQ ID NO: 427241 - DNA, 50 bp, Artificial
  Synthetic oligonucleotide
gggccatcggctacgcctagtgagcttgataaagcatcgaagcagttact

SEQ ID NO: 427242 - DNA, 60 bp, Artificial
  Synthetic oligonucleotide
gggccatcttcgaggtgtagaagaccttgctggcttcactcgtagtgtgtcagctgaaat

SEQ ID NO: 427243 - DNA, 55 bp, Artificial
  Synthetic oligonucleotide
gggccatgccacaggcctcctattgggttgttccgaaggttgttgtggtttatat

SEQ ID NO: 427244 - DNA, 52 bp, Artificial
  Synthetic oligonucleotide
gggccatgctagtgtcatagcgtatggcccacaggagccggtctgcatctcc

SEQ ID NO: 427245 - DNA, 55 bp, Artificial
  Synthetic oligonucleotide
gggccatggaacggtggtgatggaactccaatacacaggaacggacggtccctgc

SEQ ID NO: 427246 - DNA, 55 bp, Artificial
  Synthetic oligonucleotide
gggccattacagtgcgagacatggtgcagcttcgtaggaagtgtgagatgttcac

SEQ ID NO: 427247 - DNA, 55 bp, Artificial
  Synthetic oligonucleotide
gggccattataaatttccagcacttgtcgacatatgaacctgagcagtttgaggt

SEQ ID NO: 427248 - DNA, 57 bp, Artificial
  Synthetic oligonucleotide
gggccattattaaagcagctttagaaccatttcaaacagaagaagatagtgtttcag

SEQ ID NO: 427249 - DNA, 58 bp, Artificial
  Synthetic oligonucleotide
gggccattgccgaacttggcgggacctgtgttcgatgctcgaccacggacgaacttca

SEQ ID NO: 427250 - DNA, 55 bp, Artificial
  Synthetic oligonucleotide
gggccattttgcgattcttaggtgccggaatggtgatgactgcgactggagttgc

SEQ ID NO: 427251 - DNA, 52 bp, Artificial
  Synthetic oligonucleotide
gggcccaacgggcccgttaagatgggttttgggcttctgggctaaatccaga

SEQ ID NO: 427252 - DNA, 53 bp, Artificial
  Synthetic oligonucleotide
gggcccaactaccagagttcaggctactatcgccacgtcgctgtgacccccaa

SEQ ID NO: 427253 - DNA, 57 bp, Artificial
  Synthetic oligonucleotide
gggcccaatccaagtacgccctgctaggtcatacctgtaaggagtactacccatgta

SEQ ID NO: 427254 - DNA, 56 bp, Artificial
  Synthetic oligonucleotide
gggcccacccgtgtgtcctggccaaaattcgcagtccccaacctccaatcactcac

SEQ ID NO: 427255 - DNA, 55 bp, Artificial
  Synthetic oligonucleotide
gggcccacctcaggtcacacagcacccaccagctatgttagatcactgcactcct

SEQ ID NO: 427256 - DNA, 56 bp, Artificial
  Synthetic oligonucleotide
gggcccaccttccaatatatggaggctaatgactactacccggccaggtaccaatc

SEQ ID NO: 427257 - DNA, 59 bp, Artificial
  Synthetic oligonucleotide
gggcccactgtgcttaagggatatactgttagcgaaatagggaatattatgcatttaca

SEQ ID NO: 427258 - DNA, 58 bp, Artificial
  Synthetic oligonucleotide
gggcccagaaccatcgggcccagaaatccacaaactagacgcatgggagtccctgcgc

SEQ ID NO: 427259 - DNA, 60 bp, Artificial
  Synthetic oligonucleotide
gggcccagagagcacccggccatatgcctgtagtgagctcccagctctatataaggactc

SEQ ID NO: 427260 - DNA, 55 bp, Artificial
  Synthetic oligonucleotide
gggcccagagatcgggcccacatcgtcttcccggttcggctatcaccttcgagaa

SEQ ID NO: 427261 - DNA, 55 bp, Artificial
  Synthetic oligonucleotide
gggcccagcagtcttgagtaaatcagatcctaggcttgaagaacctgtcgagtgt

SEQ ID NO: 427262 - DNA, 52 bp, Artificial
  Synthetic oligonucleotide
gggcccagcgatcctaacgagtcatctcactaacatggccctccgtcgccgt

SEQ ID NO: 427263 - DNA, 55 bp, Artificial
  Synthetic oligonucleotide
gggcccaggtccagtatcatgcgtacctggcagacgagactcatggctcagggga

SEQ ID NO: 427264 - DNA, 60 bp, Artificial
  Synthetic oligonucleotide
gggcccatcagctcagctaggactgtccctgctcgtgaacagcattgaagagggggttcc

SEQ ID NO: 427265 - DNA, 53 bp, Artificial
  Synthetic oligonucleotide
gggcccatgctaaaccgggccccgagcggtcctttgctgctttgtgtggggcg

SEQ ID NO: 427266 - DNA, 55 bp, Artificial
  Synthetic oligonucleotide
gggcccatggttctgagacagtgccacaatgtaactgcacatctggtgtctacta

SEQ ID NO: 427267 - DNA, 55 bp, Artificial
  Synthetic oligonucleotide
gggcccattagtactgagaataagtaatgcttaattttctccacctgcattgctc

SEQ ID NO: 427268 - DNA, 54 bp, Artificial
  Synthetic oligonucleotide
gggcccatttaaatgggctcaatggaacccgtaggtccagtatatggttttgta

SEQ ID NO: 427269 - DNA, 55 bp, Artificial
  Synthetic oligonucleotide
gggcccatttgtccttacgtatgtgcagcgattacttgtatcgtcagaacgtctc

SEQ ID NO: 427270 - DNA, 51 bp, Artificial
  Synthetic oligonucleotide
gggccccaagcgacaacttttgaaggcaattccggccggaagggtgaaacc

SEQ ID NO: 427271 - DNA, 55 bp, Artificial
  Synthetic oligonucleotide
gggccccacttactatgatccatgctataagacacatgtgccaatgaaacattca

SEQ ID NO: 427272 - DNA, 59 bp, Artificial
  Synthetic oligonucleotide
gggccccagatgatcgcactatcttctgggtgtatggtcccacaggtggtgaagggaaa

SEQ ID NO: 427273 - DNA, 56 bp, Artificial
  Synthetic oligonucleotide
gggccccatcacttacgatgggcctagcagtccggaccagaggccctactgctggc

SEQ ID NO: 427274 - DNA, 55 bp, Artificial
  Synthetic oligonucleotide
gggccccatcttttggaacgattgattaaagctcttattatcttgaccgtcccca

SEQ ID NO: 427275 - DNA, 57 bp, Artificial
  Synthetic oligonucleotide
gggccccccagtccgcggctttgccgcggactggggaggcactgcttacagtgcgaa

SEQ ID NO: 427276 - DNA, 51 bp, Artificial
  Synthetic oligonucleotide
gggccccccgcggggagtccccggggtggtgtggtttactcaatgtcttca

SEQ ID NO: 427277 - DNA, 54 bp, Artificial
  Synthetic oligonucleotide
gggccccggatgaccgcactatcttctgggtttacgggcccactggtggtgagg

SEQ ID NO: 427278 - DNA, 55 bp, Artificial
  Synthetic oligonucleotide
gggcccctctcataaagccagagtattggcagaagcaatgagtcaggcaaacacc

SEQ ID NO: 427279 - DNA, 60 bp, Artificial
  Synthetic oligonucleotide
gggcccctgcaatagaatgccatggcaagaggagatcaaatgctagtgtgacagctcaac

SEQ ID NO: 427280 - DNA, 57 bp, Artificial
  Synthetic oligonucleotide
gggcccgaacatgtgaaactgagctatccctttccttttcaccactatctctcttac

SEQ ID NO: 427281 - DNA, 55 bp, Artificial
  Synthetic oligonucleotide
gggcccgaatcaaaaccaggctgtacaccataaggcaggaaatggccagtagggg

SEQ ID NO: 427282 - DNA, 52 bp, Artificial
  Synthetic oligonucleotide
gggcccgaggcttccaactccgttggttgcaccgcacatgtgctaacacccg

SEQ ID NO: 427283 - DNA, 50 bp, Artificial
  Synthetic oligonucleotide
gggcccgccggggtggaatgtggcgtttataacacccgcgttgggtaatt

SEQ ID NO: 427284 - DNA, 51 bp, Artificial
  Synthetic oligonucleotide
gggcccgctagcacgcgtaagcttaccggtcttaagctgcaggcggccgct

SEQ ID NO: 427285 - DNA, 55 bp, Artificial
  Synthetic oligonucleotide
gggcccggactctagggaacagtgggcaaagctggatgccaccccgtacctcaaa

SEQ ID NO: 427286 - DNA, 54 bp, Artificial
  Synthetic oligonucleotide
gggcccggatggtagatacacccgccctacccccccgcatgacgttagtcattg

SEQ ID NO: 427287 - DNA, 55 bp, Artificial
  Synthetic oligonucleotide
gggccctactttaaatataggtgcgagtaataagtagccgccgtccagaagaaga

SEQ ID NO: 427288 - DNA, 55 bp, Artificial
  Synthetic oligonucleotide
gggccctagagaacccctttccatttgaattaaaggagtggcaggagcgtctgtc

SEQ ID NO: 427289 - DNA, 60 bp, Artificial
  Synthetic oligonucleotide
gggccctatatgtggatatctaaccgcatattgtgtgaatggattaaacgtggcaagatc

SEQ ID NO: 427290 - DNA, 55 bp, Artificial
  Synthetic oligonucleotide
gggccctatgccgtgcaaacccaaagaaatcgtctctagtgagggacctgtgagg

SEQ ID NO: 427291 - DNA, 55 bp, Artificial
  Synthetic oligonucleotide
gggccctatgggctgcgacaacagatgctgaatcacccgggtccaggatcggtgt

SEQ ID NO: 427292 - DNA, 55 bp, Artificial
  Synthetic oligonucleotide
gggccctcatgcataggtattaggtttccccttagtctgcctagcaaccccggcc

SEQ ID NO: 427293 - DNA, 55 bp, Artificial
  Synthetic oligonucleotide
gggccctctatatcgacctgtcatgaatagagaggcgttagaagcaatgttgtca

SEQ ID NO: 427294 - DNA, 55 bp, Artificial
  Synthetic oligonucleotide
gggccctctcactactacctatatagcgaccaaccatatgaactagatggcctcg

SEQ ID NO: 427295 - DNA, 55 bp, Artificial
  Synthetic oligonucleotide
gggccctcttacagtaaatgagaaacgaaggttgaaattaattatgcctgctaga

SEQ ID NO: 427296 - DNA, 53 bp, Artificial
  Synthetic oligonucleotide
gggccctcttcgccgggggttctccctctccatccttatccttctttccgaga

SEQ ID NO: 427297 - DNA, 60 bp, Artificial
  Synthetic oligonucleotide
gggccctgcatcatcaataggttagtccaattcatcaataatagagtaagtgcagttaaa

SEQ ID NO: 427298 - DNA, 54 bp, Artificial
  Synthetic oligonucleotide
gggccctgccctttgcaacagaagggttgtcgggtccacccattggggagctga

SEQ ID NO: 427299 - DNA, 56 bp, Artificial
  Synthetic oligonucleotide
gggccctggaggctaaacatatagaaccttatcaaggaccaggcaataaccctatc

SEQ ID NO: 427300 - DNA, 55 bp, Artificial
  Synthetic oligonucleotide
gggccctggtctggttcacgtgcaagcaaatgaatactaccctgaacggtatcag

SEQ ID NO: 427301 - DNA, 58 bp, Artificial
  Synthetic oligonucleotide
gggcccttcgttccccgagaccagatcaccaaatccctagatatcactatagggtgca

SEQ ID NO: 427302 - DNA, 58 bp, Artificial
  Synthetic oligonucleotide
gggccctttgtaacccgacttgtgatgctgaatcacctgggtctagcacgcttggtcc

SEQ ID NO: 427303 - DNA, 60 bp, Artificial
  Synthetic oligonucleotide
gggccgaactggttccataccgtgaggttgtgaatctgtttgtcgttgagcacagagcgc

SEQ ID NO: 427304 - DNA, 55 bp, Artificial
  Synthetic oligonucleotide
gggccgaacttgaggtggcactaacatctaggtatgaggtagagggctgcaaaag

SEQ ID NO: 427305 - DNA, 55 bp, Artificial
  Synthetic oligonucleotide
gggccgaatcggatggtccaggaaactcggacatcgtgacagaggaacagggcac

SEQ ID NO: 427306 - DNA, 55 bp, Artificial
  Synthetic oligonucleotide
gggccgacgcagaagatgtcgtgtgctgctcaatgtcttacacatggacaggcgc

SEQ ID NO: 427307 - DNA, 55 bp, Artificial
  Synthetic oligonucleotide
gggccgacgcggaaattcgccaagcattcctgacaggtgatattgacttgagctc

SEQ ID NO: 427308 - DNA, 58 bp, Artificial
  Synthetic oligonucleotide
gggccgactcactcgtagcttggttgactattccgagctactgatttccaatttagtg

SEQ ID NO: 427309 - DNA, 55 bp, Artificial
  Synthetic oligonucleotide
gggccgaggatgtagaggctaagctttcttgtacctgtattgttctggatgtgga

SEQ ID NO: 427310 - DNA, 50 bp, Artificial
  Synthetic oligonucleotide
gggccgagggtgcgagtttagacgcgcttgcgacttgttgtctccgcgtt

SEQ ID NO: 427311 - DNA, 55 bp, Artificial
  Synthetic oligonucleotide
gggccgagtctatcagtctgcccagcattctctgatggaatactcaaggcctacc

SEQ ID NO: 427312 - DNA, 55 bp, Artificial
  Synthetic oligonucleotide
gggccgatacggaggatgtggtatgttgctccatgtcttattcctggacaggcgc

SEQ ID NO: 427313 - DNA, 53 bp, Artificial
  Synthetic oligonucleotide
gggccgatgggtaaatcgaggttgcgtcgggttaccgaaatggcagctgatgg

SEQ ID NO: 427314 - DNA, 60 bp, Artificial
  Synthetic oligonucleotide
gggccgatgttgtatcgcctgaattgattgcttcggcatatgcgtcatttgcacattgag

SEQ ID NO: 427315 - DNA, 55 bp, Artificial
  Synthetic oligonucleotide
gggccgattacatggcgtacgatttgactaaggtcggcctgtgtggtgcaatgta

SEQ ID NO: 427316 - DNA, 55 bp, Artificial
  Synthetic oligonucleotide
gggccgcaggcccgtcaagttggatgaacggttagatttgattgcttagccacga

SEQ ID NO: 427317 - DNA, 60 bp, Artificial
  Synthetic oligonucleotide
gggccgccagctcacaaatgcagctgagcgcttcgagactatataccctagacaccgcgc

SEQ ID NO: 427318 - DNA, 54 bp, Artificial
  Synthetic oligonucleotide
gggccgccagttaaggatgttccggcccattaatcttcggcccgttacgctgaa

SEQ ID NO: 427319 - DNA, 53 bp, Artificial
  Synthetic oligonucleotide
gggccgccattgcgctctggtcttttgctaacggcacagtgcctcgcggcaat

SEQ ID NO: 427320 - DNA, 59 bp, Artificial
  Synthetic oligonucleotide
gggccgccgtgacgttagcagcatcagtgtcggtcacgcttagttgtggtcttggttta

SEQ ID NO: 427321 - DNA, 57 bp, Artificial
  Synthetic oligonucleotide
gggccgcctcgtgcgagttggtcgtgtggtgtgctttggctgtcacccgaacccgtg

SEQ ID NO: 427322 - DNA, 55 bp, Artificial
  Synthetic oligonucleotide
gggccgcgatagatttaatccgcacccatgttataagaggcaaaatacgctgtgt

SEQ ID NO: 427323 - DNA, 55 bp, Artificial
  Synthetic oligonucleotide
gggccgcgtatgaatcgcactataagtagagccctaggtgcgatctctgcatgga

SEQ ID NO: 427324 - DNA, 55 bp, Artificial
  Synthetic oligonucleotide
gggccgctcgacgcttcacggtctcccccgtgtgacggactacggtgatggggcc

SEQ ID NO: 427325 - DNA, 55 bp, Artificial
  Synthetic oligonucleotide
gggccgctcgggaacgtcaggttgtgatacggacactgcttgtcggcttcggtga

SEQ ID NO: 427326 - DNA, 60 bp, Artificial
  Synthetic oligonucleotide
gggccgctgcaaatgacttcgaagatctaatgcttactgatcaagtttatatgcaccgag

SEQ ID NO: 427327 - DNA, 54 bp, Artificial
  Synthetic oligonucleotide
gggccggaacggcgacttccagggtgagccaaccctatgttggaatggtggacc

SEQ ID NO: 427328 - DNA, 60 bp, Artificial
  Synthetic oligonucleotide
gggccggacaacgctataacgggccgtcgcgcatgagtgtgacctcaatcaagaggtgac

SEQ ID NO: 427329 - DNA, 57 bp, Artificial
  Synthetic oligonucleotide
gggccgggaagcccaaatctagaagtggatgcggatcttatcaatttcctctcccac

SEQ ID NO: 427330 - DNA, 52 bp, Artificial
  Synthetic oligonucleotide
gggccgggaatatgggcgtggacggttctatttgggattttgaaaccgcacc

SEQ ID NO: 427331 - DNA, 58 bp, Artificial
  Synthetic oligonucleotide
gggccggtgagactctcgtgcaaacgggtggcactcattggaaattgcaacgatcggc

SEQ ID NO: 427332 - DNA, 55 bp, Artificial
  Synthetic oligonucleotide
gggccgtatgaagatctagcgagtaggatctcttcagcacaaacggctataaagc

SEQ ID NO: 427333 - DNA, 54 bp, Artificial
  Synthetic oligonucleotide
gggccgtcgggccaaagagttgctggggccggggattgctccgcccggcagttc

SEQ ID NO: 427334 - DNA, 55 bp, Artificial
  Synthetic oligonucleotide
gggccgtggattggatcatgaccaaagtcagggatgcccgccattcttccatgtg

SEQ ID NO: 427335 - DNA, 60 bp, Artificial
  Synthetic oligonucleotide
gggccgtgtgaaatctcgacaacatgcatcacagaaggcagcgaaataaaacccggagtc

SEQ ID NO: 427336 - DNA, 53 bp, Artificial
  Synthetic oligonucleotide
gggccgttttagggaaagatgccatactgtgggttggtgttggacgttagggc

SEQ ID NO: 427337 - DNA, 55 bp, Artificial
  Synthetic oligonucleotide
gggcctaaggttattccagcacagggagtggataacagagagtgtgtatccatgg

SEQ ID NO: 427338 - DNA, 59 bp, Artificial
  Synthetic oligonucleotide
gggcctaatgcaccaggccaaatgagggagccaaggggaagtgacatagcaggaactac

SEQ ID NO: 427339 - DNA, 55 bp, Artificial
  Synthetic oligonucleotide
gggcctaccaacacgccctaaacgaactcccggagtcactggaaacactcatgct

SEQ ID NO: 427340 - DNA, 60 bp, Artificial
  Synthetic oligonucleotide
gggcctaccgtgcttaagggatatactgtcagcgagattggaagtattatgcactcgcat

SEQ ID NO: 427341 - DNA, 59 bp, Artificial
  Synthetic oligonucleotide
gggcctacctcacttcttcgagtggattcacctaagactgatggacactacaatgttcg

SEQ ID NO: 427342 - DNA, 55 bp, Artificial
  Synthetic oligonucleotide
gggcctacctcatgaaccggcaggctgtcttggatgaaacacatctgcctgatat

SEQ ID NO: 427343 - DNA, 60 bp, Artificial
  Synthetic oligonucleotide
gggcctacgagaaagttggacttgctgctacttgggacgcccctgcgattcaaagcatga

SEQ ID NO: 427344 - DNA, 55 bp, Artificial
  Synthetic oligonucleotide
gggcctacggaagggcggaacagcatacgttactcggagctggcgcctctatacg

SEQ ID NO: 427345 - DNA, 51 bp, Artificial
  Synthetic oligonucleotide
gggcctacgtgtcctctggcaagatctacagccggagaattaatgcgcgca

SEQ ID NO: 427346 - DNA, 54 bp, Artificial
  Synthetic oligonucleotide
gggcctagaagccttacaattactattaatacactcttggaccgtattcctaac

SEQ ID NO: 427347 - DNA, 55 bp, Artificial
  Synthetic oligonucleotide
gggcctagtcccgcaaggtcaaggcttccacttccgctacatcgcttcggtccag

SEQ ID NO: 427348 - DNA, 55 bp, Artificial
  Synthetic oligonucleotide
gggcctatcactgcaaaagtgccatccactgagactacagaggcgatgcagggga

SEQ ID NO: 427349 - DNA, 54 bp, Artificial
  Synthetic oligonucleotide
gggcctatcgggcaggcggtaatcctgcggaaccgggcccccctccatggaaga

SEQ ID NO: 427350 - DNA, 60 bp, Artificial
  Synthetic oligonucleotide
gggcctatgccttgcaggcctaaagagatcatatctagtgagggccccatcagtaagacc

SEQ ID NO: 427351 - DNA, 58 bp, Artificial
  Synthetic oligonucleotide
gggcctcagaaccgagctgaaatagctctctgggataccattccttcgaaacccggca

SEQ ID NO: 427352 - DNA, 60 bp, Artificial
  Synthetic oligonucleotide
gggcctcatatacaacaggatgggggctgtgaccactgaatcggcatttggcctagtatg

SEQ ID NO: 427353 - DNA, 58 bp, Artificial
  Synthetic oligonucleotide
gggcctcatcccacgcaatggcgtcgaccactgggatgcgtacaagggggagagggtc

SEQ ID NO: 427354 - DNA, 55 bp, Artificial
  Synthetic oligonucleotide
gggcctcatcgtcaaccaacattgctaaattgtcgaggggaatggaactgtgccc

SEQ ID NO: 427355 - DNA, 55 bp, Artificial
  Synthetic oligonucleotide
gggcctcccagtctgagaaatagcgacgaatcaccttgacgattaacgactcatc

SEQ ID NO: 427356 - DNA, 52 bp, Artificial
  Synthetic oligonucleotide
gggcctcccgatccgagggtcccggtggccaagtttggaggacactccggcc

SEQ ID NO: 427357 - DNA, 52 bp, Artificial
  Synthetic oligonucleotide
gggcctccctgagaccgggtgcacacgcacaggaggtaaatgggttaatcag

SEQ ID NO: 427358 - DNA, 55 bp, Artificial
  Synthetic oligonucleotide
gggcctccgtaggcgcgctttaatgacgtcgcaggcgccatcttggctgtgacgt

SEQ ID NO: 427359 - DNA, 55 bp, Artificial
  Synthetic oligonucleotide
gggcctcctacccgagtcaaaatggcttcttcataccacatgcctcaatgggttg

SEQ ID NO: 427360 - DNA, 55 bp, Artificial
  Synthetic oligonucleotide
gggcctcctttgtgttgtatggtccctatgccttacttttgtggctgggcgtgat

SEQ ID NO: 427361 - DNA, 55 bp, Artificial
  Synthetic oligonucleotide
gggcctcgggaggattaagaagctcaattaacgcagtaaggggaacctatggtgc

SEQ ID NO: 427362 - DNA, 59 bp, Artificial
  Synthetic oligonucleotide
gggcctcgggattaatgctgtagcatattaccggggccttgatgtgtccgtcataccaa

SEQ ID NO: 427363 - DNA, 60 bp, Artificial
  Synthetic oligonucleotide
gggcctctaagcccaagtctggacatagacgcgcatctaatgggcttcctctcccattta

SEQ ID NO: 427364 - DNA, 55 bp, Artificial
  Synthetic oligonucleotide
gggcctctaagcccatatctggaaagtgatgcggatttgaccagtcttctctccc

SEQ ID NO: 427365 - DNA, 55 bp, Artificial
  Synthetic oligonucleotide
gggcctctagccagggaaaagatagaggctctcagggaaatagtgggaaagatgg

SEQ ID NO: 427366 - DNA, 54 bp, Artificial
  Synthetic oligonucleotide
gggcctctgaccttatgattcactggaatgaatttgtgtttaaggtcatgccgg

SEQ ID NO: 427367 - DNA, 55 bp, Artificial
  Synthetic oligonucleotide
gggcctctgagcccaacacgagacatggacgcgcatctcaatgtcttcctttccc

SEQ ID NO: 427368 - DNA, 60 bp, Artificial
  Synthetic oligonucleotide
gggcctctgcggcagcgtcgttagctgtttgctgacctcctctagcagatctgccgtcga

SEQ ID NO: 427369 - DNA, 55 bp, Artificial
  Synthetic oligonucleotide
gggcctctttatggagtttacacgtgctaacgctgcgcgggtcgcgagtgacatc

SEQ ID NO: 427370 - DNA, 55 bp, Artificial
  Synthetic oligonucleotide
gggcctgaaattacagggatcatgactgctaccctaacaccagaactggcttcag

SEQ ID NO: 427371 - DNA, 55 bp, Artificial
  Synthetic oligonucleotide
gggcctgacaaccccaatccttatcgaggacgagactcaaccaatcagagtggtc

SEQ ID NO: 427372 - DNA, 57 bp, Artificial
  Synthetic oligonucleotide
gggcctgacattatattacccacctcagcgcagtggccttatgtgcccttaacacct

SEQ ID NO: 427373 - DNA, 60 bp, Artificial
  Synthetic oligonucleotide
gggcctgacattttgtatgaggagttggaggatgctttgttagcgtctaacacctctgtg

SEQ ID NO: 427374 - DNA, 50 bp, Artificial
  Synthetic oligonucleotide
gggcctggctccccatagactcccatgtaagcctgcctcgagtaggtgcc

SEQ ID NO: 427375 - DNA, 54 bp, Artificial
  Synthetic oligonucleotide
gggcctggtggttggggttctgttacggttatagatcaagatggtacgtactgg

SEQ ID NO: 427376 - DNA, 55 bp, Artificial
  Synthetic oligonucleotide
gggcctgtcctacaaatccatccatatatttccggctgaaagctgcacctgcgtc

SEQ ID NO: 427377 - DNA, 55 bp, Artificial
  Synthetic oligonucleotide
gggcctgtcgcaataagcgcagcggtgttcccacgcttcgaggatcgactgtctg

SEQ ID NO: 427378 - DNA, 58 bp, Artificial
  Synthetic oligonucleotide
gggcctgtctccgtcggaggctacgtcagagccccccgcgacaactggtatgggcatc

SEQ ID NO: 427379 - DNA, 58 bp, Artificial
  Synthetic oligonucleotide
gggcctgtgggcgatgggtctttgactatgggctgttggagttggatttagtaatctc

SEQ ID NO: 427380 - DNA, 55 bp, Artificial
  Synthetic oligonucleotide
gggcctgtgtatctcatgcttgtagagcgcccaatcgtggattttgtagcccatg

SEQ ID NO: 427381 - DNA, 55 bp, Artificial
  Synthetic oligonucleotide
gggcctgttaccttcggtttcaggcacagtgaagagttgtgttactcccactcag

SEQ ID NO: 427382 - DNA, 58 bp, Artificial
  Synthetic oligonucleotide
gggcctgttagcccaagacgtgacatggatgtggaccttattgtcttccgttcccatg

SEQ ID NO: 427383 - DNA, 55 bp, Artificial
  Synthetic oligonucleotide
gggcctgttgggtagaatacttgagtctggacctatcactgacacaatagatctg

SEQ ID NO: 427384 - DNA, 56 bp, Artificial
  Synthetic oligonucleotide
gggcctgttgtcactctcccaccaccataactacgtctacataaccgacgcctacc

SEQ ID NO: 427385 - DNA, 54 bp, Artificial
  Synthetic oligonucleotide
gggccttaaccccctgaggcgtaaggttgaaagctgtctgccaatttccaagag

SEQ ID NO: 427386 - DNA, 60 bp, Artificial
  Synthetic oligonucleotide
gggccttacaagcgacaaaactaacatggggaagcgtgagtaccgtgagctgcaagcagc

SEQ ID NO: 427387 - DNA, 55 bp, Artificial
  Synthetic oligonucleotide
gggccttacatctgctttgaagacgaatccggccctggttttgctgaaccttgtc

SEQ ID NO: 427388 - DNA, 50 bp, Artificial
  Synthetic oligonucleotide
gggccttactacttattgggccttacccgggtaaagcggccctcgtataa

SEQ ID NO: 427389 - DNA, 57 bp, Artificial
  Synthetic oligonucleotide
gggccttactgattcgtacatggatagttagttggcccagtagcttcgtaactgggc

SEQ ID NO: 427390 - DNA, 55 bp, Artificial
  Synthetic oligonucleotide
gggccttatagagtacaagtggtttacgagaggacatattgcatgacaggggtcc

SEQ ID NO: 427391 - DNA, 56 bp, Artificial
  Synthetic oligonucleotide
gggccttatgtggtgtttgcctctgaggtactcaggggcatttaggtttttcctca

SEQ ID NO: 427392 - DNA, 56 bp, Artificial
  Synthetic oligonucleotide
gggccttattgtgggtttcgtgccttatgtagagtaatgttatgttctctacctcg

SEQ ID NO: 427393 - DNA, 53 bp, Artificial
  Synthetic oligonucleotide
gggccttccctttattcgggtatcggcgggaaacatccgggaagatgccctgc

SEQ ID NO: 427394 - DNA, 60 bp, Artificial
  Synthetic oligonucleotide
gggccttctacggaaggagtgcctgagtcaatgagggaagagtatcgacaggaacagcag

SEQ ID NO: 427395 - DNA, 50 bp, Artificial
  Synthetic oligonucleotide
gggccttctacggaaggtgtgcctgaatctatgagggaagaatatcggca

SEQ ID NO: 427396 - DNA, 57 bp, Artificial
  Synthetic oligonucleotide
gggccttcttgcagggatggaaactaaggagtcaaaaggtataagagaccatgcaag

SEQ ID NO: 427397 - DNA, 54 bp, Artificial
  Synthetic oligonucleotide
gggccttgaagcttgtattcaaccagtaaaggcacctaacctgttacattttaa

SEQ ID NO: 427398 - DNA, 60 bp, Artificial
  Synthetic oligonucleotide
gggccttgacgggaggcatggagctgacgagagaccccacagtctcggagcatgcatctt

SEQ ID NO: 427399 - DNA, 55 bp, Artificial
  Synthetic oligonucleotide
gggccttgtaaggttcagtcttacgagtctcgtcatgatgtttcccatgtcggga

SEQ ID NO: 427400 - DNA, 55 bp, Artificial
  Synthetic oligonucleotide
gggccttgtagtccatactttgataatgatgcggatcgtatcaatttcctttccc

SEQ ID NO: 427401 - DNA, 53 bp, Artificial
  Synthetic oligonucleotide
gggcctttagcagcttcgatcatggtaagcccaccagttagcgggactcataa

SEQ ID NO: 427402 - DNA, 55 bp, Artificial
  Synthetic oligonucleotide
gggcctttctcctcctcatgatggtactgggaacacggaagatgcagctcaccgc

SEQ ID NO: 427403 - DNA, 58 bp, Artificial
  Synthetic oligonucleotide
gggcctttgcacttccagcgtcgagccattctaggggcgctgaaatttggagttcaaa

SEQ ID NO: 427404 - DNA, 55 bp, Artificial
  Synthetic oligonucleotide
gggcctttgcctccagggacagctggattgctcttgggacgcagcagtgcatctt

SEQ ID NO: 427405 - DNA, 55 bp, Artificial
  Synthetic oligonucleotide
gggccttttgttccaggaaagaagattgaccatgtaaaagatggagtgatggacc

SEQ ID NO: 427406 - DNA, 60 bp, Artificial
  Synthetic oligonucleotide
gggcgaaactcatcgggactgacaattctgtcgtgctctcccgcaagtacacatcatttc

SEQ ID NO: 427407 - DNA, 59 bp, Artificial
  Synthetic oligonucleotide
gggcgaaagatagagagggagtctggaagaatgactcagggacaattgagtattattgg

SEQ ID NO: 427408 - DNA, 55 bp, Artificial
  Synthetic oligonucleotide
gggcgaaagtaggttggtgtcggagacttggcaatgtccgagtttagaccttgtg

SEQ ID NO: 427409 - DNA, 55 bp, Artificial
  Synthetic oligonucleotide
gggcgaacaggcccatgaatcggaagcccagaatgtacaggatgtatagaagccc

SEQ ID NO: 427410 - DNA, 60 bp, Artificial
  Synthetic oligonucleotide
gggcgaacaggggttggagtcacgcgcacacaagctatctgataaggtcacaagtgaaat

SEQ ID NO: 427411 - DNA, 55 bp, Artificial
  Synthetic oligonucleotide
gggcgaacttgtatacgcgaaggacgaagacaagctttacatgatagagggcggc

SEQ ID NO: 427412 - DNA, 55 bp, Artificial
  Synthetic oligonucleotide
gggcgaaggaagcagaaggacgtatcctagtaatggatgcggaggctaaaggctt

SEQ ID NO: 427413 - DNA, 57 bp, Artificial
  Synthetic oligonucleotide
gggcgaaggatgtccgaagccattccagtaaggctatacgccacatcaactccgtgt

SEQ ID NO: 427414 - DNA, 60 bp, Artificial
  Synthetic oligonucleotide
gggcgaatacatccgatggtgcaaatcatatgatggcattcatggtatatcggaagcact

SEQ ID NO: 427415 - DNA, 59 bp, Artificial
  Synthetic oligonucleotide
gggcgaatccgcgcctcctgactatgggcaggtttacggaccaagctgtatcgagatac

SEQ ID NO: 427416 - DNA, 59 bp, Artificial
  Synthetic oligonucleotide
gggcgaattggttcggacatccctccttcgaatgcaagttggaagccgtgcaagcgcaa

SEQ ID NO: 427417 - DNA, 55 bp, Artificial
  Synthetic oligonucleotide
gggcgaattgtttacgtagggatcggcaggcagtgaaccccagctcggcgtcagg

SEQ ID NO: 427418 - DNA, 55 bp, Artificial
  Synthetic oligonucleotide
gggcgacaacaacgcggataatcagaccaatgatacagggaggaaaatgctgggg

SEQ ID NO: 427419 - DNA, 55 bp, Artificial
  Synthetic oligonucleotide
gggcgacaagatagctaaattccttagcactcagtttattgagacgatggcatct

SEQ ID NO: 427420 - DNA, 60 bp, Artificial
  Synthetic oligonucleotide
gggcgacagcccattcaatgaagggtgtacactccaacttgatcttgtgacttgatcatc

SEQ ID NO: 427421 - DNA, 55 bp, Artificial
  Synthetic oligonucleotide
gggcgacagttggtgctgaggtacacttctttcaggatgttagctccatagcacc

SEQ ID NO: 427422 - DNA, 54 bp, Artificial
  Synthetic oligonucleotide
gggcgaccaaagcgaggaggaaaagtaaagagagcaacggggctagcaggtggg

SEQ ID NO: 427423 - DNA, 55 bp, Artificial
  Synthetic oligonucleotide
gggcgaccaaaggattggactggtgcccagaaacggtgtagaccactgggacgcc

SEQ ID NO: 427424 - DNA, 54 bp, Artificial
  Synthetic oligonucleotide
gggcgacccccttaacgacgggtaacgacgtggcaccatgttaggtcatggatg

SEQ ID NO: 427425 - DNA, 55 bp, Artificial
  Synthetic oligonucleotide
gggcgacgaaagagacacagacagactctagtagtgaggcagtggcaacctgacg

SEQ ID NO: 427426 - DNA, 52 bp, Artificial
  Synthetic oligonucleotide
gggcgacgactgccaaccggactggtaaatgactaccacccagcacaagcac

SEQ ID NO: 427427 - DNA, 55 bp, Artificial
  Synthetic oligonucleotide
gggcgacgatgacctctggggcgacgatgacctctggggcgaagcagattgtttg

SEQ ID NO: 427428 - DNA, 55 bp, Artificial
  Synthetic oligonucleotide
gggcgacgatggacgccccacccagttgcctaatgaagtcaattccgccttcccc

SEQ ID NO: 427429 - DNA, 59 bp, Artificial
  Synthetic oligonucleotide
gggcgactagaccgggcatccattgaaaggcagatctattggaccagagggcccaacca

SEQ ID NO: 427430 - DNA, 55 bp, Artificial
  Synthetic oligonucleotide
gggcgactcttcaacaccgtcgcctagggaaggaacttacaatcatccatttccc

SEQ ID NO: 427431 - DNA, 55 bp, Artificial
  Synthetic oligonucleotide
gggcgagactcaatgaggaaagtctctccaggtcagtggtacccagtagttccac

SEQ ID NO: 427432 - DNA, 55 bp, Artificial
  Synthetic oligonucleotide
gggcgagagcaaacgagagtgccacaatacttatgacagccactccaccaggcac

SEQ ID NO: 427433 - DNA, 55 bp, Artificial
  Synthetic oligonucleotide
gggcgagagcctgcgagtcgtactccatttgtgagtcctgcaggcagaactctcc

SEQ ID NO: 427434 - DNA, 55 bp, Artificial
  Synthetic oligonucleotide
gggcgagagttggtttgttttccgagatgtttgatcggcggggagttgtagccca

SEQ ID NO: 427435 - DNA, 55 bp, Artificial
  Synthetic oligonucleotide
gggcgagcgagctactaacgctgcatggcatatccgagctagcgcagtacgaact

SEQ ID NO: 427436 - DNA, 60 bp, Artificial
  Synthetic oligonucleotide
gggcgagcgatgcaaccctagttatcaatactgagcacatgccctcaatgtttgtaccag

SEQ ID NO: 427437 - DNA, 60 bp, Artificial
  Synthetic oligonucleotide
gggcgagcgctcaacatcaattgatagctcaggaacttgctcgtaagtatgcggagtggc

SEQ ID NO: 427438 - DNA, 51 bp, Artificial
  Synthetic oligonucleotide
gggcgaggaggacacgggacacagctccaccgagtcagagcccacgcaatc

SEQ ID NO: 427439 - DNA, 53 bp, Artificial
  Synthetic oligonucleotide
gggcgaggccggactataaccccccgctagtggagacgtggaaaaagcctgac

SEQ ID NO: 427440 - DNA, 52 bp, Artificial
  Synthetic oligonucleotide
gggcgaggtttttgcgggccctgccctgtcgtggtgtttgggcctccccacc

SEQ ID NO: 427441 - DNA, 55 bp, Artificial
  Synthetic oligonucleotide
gggcgagtagacattcctaaatactagcctggatctgacgtcaacactatgcttc

SEQ ID NO: 427442 - DNA, 55 bp, Artificial
  Synthetic oligonucleotide
gggcgagtcgcctgtgggttaaggggatgatggcgtgagcggcaatgcagcgttt

SEQ ID NO: 427443 - DNA, 55 bp, Artificial
  Synthetic oligonucleotide
gggcgataaagcccgacaaagttggtctcttgctcgcaggcaagatgcagatggc

SEQ ID NO: 427444 - DNA, 57 bp, Artificial
  Synthetic oligonucleotide
gggcgataacaggaggtaggccatgcgtaaggtgaaaattggtgagctaatcaattc

SEQ ID NO: 427445 - DNA, 56 bp, Artificial
  Synthetic oligonucleotide
gggcgatattccctacgacgaggtcacggcacgaagctccttctataaggccttcg

SEQ ID NO: 427446 - DNA, 55 bp, Artificial
  Synthetic oligonucleotide
gggcgatcctgggagcgttaaagtttggctgtaaggttttaggagatcgtctgga

SEQ ID NO: 427447 - DNA, 55 bp, Artificial
  Synthetic oligonucleotide
gggcgatcgatgctgcacaccgtgtctcaagatccattgaggaaacggtttctgc

SEQ ID NO: 427448 - DNA, 60 bp, Artificial
  Synthetic oligonucleotide
gggcgatggagaagcaacgatgctccaattgcctttgttgtgtgagtatgtgggccataa

SEQ ID NO: 427449 - DNA, 55 bp, Artificial
  Synthetic oligonucleotide
gggcgattagaagatcagttcgattggcaaaagatgttgtggtgacccaagctct

SEQ ID NO: 427450 - DNA, 60 bp, Artificial
  Synthetic oligonucleotide
gggcgattctacatccaaatgtgcaccgagcttaaactcaatgattatgagggaagactg

SEQ ID NO: 427451 - DNA, 55 bp, Artificial
  Synthetic oligonucleotide
gggcgattgttcttatctcaatactgccacttcacagctcatgagagagagaacg

SEQ ID NO: 427452 - DNA, 56 bp, Artificial
  Synthetic oligonucleotide
gggcgatttcaacaaggctacccataatattaccgggtatatatgccttaatcatt

SEQ ID NO: 427453 - DNA, 54 bp, Artificial
  Synthetic oligonucleotide
gggcgattttcgttaatttccctggtaccaacgaatgaagattatcaaacacca

SEQ ID NO: 427454 - DNA, 55 bp, Artificial
  Synthetic oligonucleotide
gggcgcaaatgatcacgaaggaaacacaggaacacatgagcaacgattcgtacgg

SEQ ID NO: 427455 - DNA, 55 bp, Artificial
  Synthetic oligonucleotide
gggcgcacaggtatccagacagaatgttgggactcactctacacaaaactctgta

SEQ ID NO: 427456 - DNA, 56 bp, Artificial
  Synthetic oligonucleotide
gggcgcacctctctttacgcggtctccccgtctgtgccttctcgtctgccggaccg

SEQ ID NO: 427457 - DNA, 55 bp, Artificial
  Synthetic oligonucleotide
gggcgcacgacccggacacaattgggtgccttggactcgtgtcattaactgtcgc

SEQ ID NO: 427458 - DNA, 55 bp, Artificial
  Synthetic oligonucleotide
gggcgcactatgaaattgaacactggtcctataaacatgatcggccactctggaa

SEQ ID NO: 427459 - DNA, 55 bp, Artificial
  Synthetic oligonucleotide
gggcgcactggctacgttcccctgggtgctcgtccgtcagtagttcccgaagttc

SEQ ID NO: 427460 - DNA, 55 bp, Artificial
  Synthetic oligonucleotide
gggcgcatgccactcgatcgactcaccagcgaaagggctgaaccattgaatccag

SEQ ID NO: 427461 - DNA, 60 bp, Artificial
  Synthetic oligonucleotide
gggcgccaaagtgctttgtcacctcatgcagcgcgagtgcgtagcctccattttaagctg

SEQ ID NO: 427462 - DNA, 55 bp, Artificial
  Synthetic oligonucleotide
gggcgccaactagtccccaaccgtgacaggattctcgcggcccttgcctaccata

SEQ ID NO: 427463 - DNA, 55 bp, Artificial
  Synthetic oligonucleotide
gggcgcccctacaattttctggacccgccttgactgctagtttgcaaggcagtgg

SEQ ID NO: 427464 - DNA, 53 bp, Artificial
  Synthetic oligonucleotide
gggcgcccgaacctgggaccccgaagcgaaagtaagaccagagaagttctctc

SEQ ID NO: 427465 - DNA, 53 bp, Artificial
  Synthetic oligonucleotide
gggcgccgaaagggcttttctataagatgggtaacaagtggtcaaaaggatgg

SEQ ID NO: 427466 - DNA, 60 bp, Artificial
  Synthetic oligonucleotide
gggcgcctcaaggcaactggttcggctgtacatggatgaatggcactgggttcaccaaga

SEQ ID NO: 427467 - DNA, 55 bp, Artificial
  Synthetic oligonucleotide
gggcgccttgctgtctgttttactccagctgctgggacacctcccacctctcttc

SEQ ID NO: 427468 - DNA, 52 bp, Artificial
  Synthetic oligonucleotide
gggcgcgaaaatgcttcttccggctaaacagcccggccgtaacgggtacaag

SEQ ID NO: 427469 - DNA, 60 bp, Artificial
  Synthetic oligonucleotide
gggcgcgaacggtacacctcaccttcagggattcctgaatctccgaagcaatgcgagagc

SEQ ID NO: 427470 - DNA, 55 bp, Artificial
  Synthetic oligonucleotide
gggcgcgaattatgtatgagtcagttccttctcatcttcgtgatgtcgaagtggt

SEQ ID NO: 427471 - DNA, 54 bp, Artificial
  Synthetic oligonucleotide
gggcgcgacctgttctaaccgcaaattactcgccgcggccctgcctccctactt

SEQ ID NO: 427472 - DNA, 55 bp, Artificial
  Synthetic oligonucleotide
gggcgcgacgctatcatcctactcatgtgtgttgtccacccggctttggtatttg

SEQ ID NO: 427473 - DNA, 52 bp, Artificial
  Synthetic oligonucleotide
gggcgcgagagtcgaaggacccaatttcgagatgtatagcaacgctactaga

SEQ ID NO: 427474 - DNA, 60 bp, Artificial
  Synthetic oligonucleotide
gggcgcgcaagtctccacgcagaagaccggtgctcatgagactgggttgaatgccagtgg

SEQ ID NO: 427475 - DNA, 55 bp, Artificial
  Synthetic oligonucleotide
gggcgcgcagcgcaacacccactaaaacgcagaaagaggaacgacgaagctagaa

SEQ ID NO: 427476 - DNA, 55 bp, Artificial
  Synthetic oligonucleotide
gggcgcgcttgcgcacaaaacatgtatggtagtatgacaaacttacaaatagagt

SEQ ID NO: 427477 - DNA, 57 bp, Artificial
  Synthetic oligonucleotide
gggcgcggacattaaaaaacctaggtgacttcaaacagggcatagacagtcgcagga

SEQ ID NO: 427478 - DNA, 60 bp, Artificial
  Synthetic oligonucleotide
gggcgcggagcgcttagatagggtcactgccaatgggtcgatcaattagccgctggcgcc

SEQ ID NO: 427479 - DNA, 55 bp, Artificial
  Synthetic oligonucleotide
gggcgcgtcttcctgtttgtctggtcggctttgttcgtgaaacccatgtgttgtg

SEQ ID NO: 427480 - DNA, 55 bp, Artificial
  Synthetic oligonucleotide
gggcgcgtggtgataattagtttgatcggcttcgtagtaggcgaggcggcgggtc

SEQ ID NO: 427481 - DNA, 51 bp, Artificial
  Synthetic oligonucleotide
gggcgctaacgtacgagctgaggggctacgaatcgacttcggcggtcgaac

SEQ ID NO: 427482 - DNA, 55 bp, Artificial
  Synthetic oligonucleotide
gggcgctaatctgagacgccgccgacgggaattggaggactatctcggtcaggtc

SEQ ID NO: 427483 - DNA, 55 bp, Artificial
  Synthetic oligonucleotide
gggcgctaccgcctcataatgagcgtttccttggtggaccaactggtagcccggg

SEQ ID NO: 427484 - DNA, 56 bp, Artificial
  Synthetic oligonucleotide
gggcgctagcacactggtatcacggtacctttgtgcgcctgttttataccccctcc

SEQ ID NO: 427485 - DNA, 55 bp, Artificial
  Synthetic oligonucleotide
gggcgctatttgaaagtataagcactgcattttcatgggtaggtgataggggctc

SEQ ID NO: 427486 - DNA, 55 bp, Artificial
  Synthetic oligonucleotide
gggcgctcaagtgtctagacaaaatgttggcacacactcaacacagaatacggtc

SEQ ID NO: 427487 - DNA, 55 bp, Artificial
  Synthetic oligonucleotide
gggcgctcaggtatccagacagaatgttggtacacacagtacacaaaatgcagtg

SEQ ID NO: 427488 - DNA, 55 bp, Artificial
  Synthetic oligonucleotide
gggcgctcaggtatctagacaaaatgttggaactcactctactcaaaatgctgtg

SEQ ID NO: 427489 - DNA, 58 bp, Artificial
  Synthetic oligonucleotide
gggcgctcccttctaatgacaagacaccaagcgttggccattcctgtcggaaatgaag

SEQ ID NO: 427490 - DNA, 55 bp, Artificial
  Synthetic oligonucleotide
gggcgctgctacgaatgctacagtgatggtcgtgggtccgaagacttctaaggac

SEQ ID NO: 427491 - DNA, 60 bp, Artificial
  Synthetic oligonucleotide
gggcgctgttcagaatgagatcaccctgacgcacccagtcaccaagtatatcatgacatg

SEQ ID NO: 427492 - DNA, 60 bp, Artificial
  Synthetic oligonucleotide
gggcgcttactggcacctatgtctacaaccatctcactccccttagggactgggcgcaca

SEQ ID NO: 427493 - DNA, 53 bp, Artificial
  Synthetic oligonucleotide
gggcggaacccaaaattctggggccagggtgcagagcaatgggtctaatagat

SEQ ID NO: 427494 - DNA, 55 bp, Artificial
  Synthetic oligonucleotide
gggcggaacttcagatatggtacactggttataacgggcacatcgaggtatgtca

SEQ ID NO: 427495 - DNA, 56 bp, Artificial
  Synthetic oligonucleotide
gggcggacaggtacccttttactgctgagactaagggaggacaccttgctgttgaa

SEQ ID NO: 427496 - DNA, 59 bp, Artificial
  Synthetic oligonucleotide
gggcggacagtatgcttgtaaggagcaggcgttggtgaagagatttatccgtcttaata

SEQ ID NO: 427497 - DNA, 55 bp, Artificial
  Synthetic oligonucleotide
gggcggacttccaataatcatatgcggagagcacagggcagcctttaactatggc

SEQ ID NO: 427498 - DNA, 55 bp, Artificial
  Synthetic oligonucleotide
gggcggagagcaacagctatcctaaggaaagcgaccagaagattgattcagctga

SEQ ID NO: 427499 - DNA, 55 bp, Artificial
  Synthetic oligonucleotide
gggcggagcatatcaccgaacgtaaccccgaagtgggttcaatatgggagcaact

SEQ ID NO: 427500 - DNA, 55 bp, Artificial
  Synthetic oligonucleotide
gggcggaggacaagaattgcttatgagagaatgtgcaacatcctcaaggggaagt

SEQ ID NO: 427501 - DNA, 59 bp, Artificial
  Synthetic oligonucleotide
gggcggaggcatgttgacttggtcaatcgggtcctctcaaacttagctatgcaatcggg

SEQ ID NO: 427502 - DNA, 49 bp, Artificial
  Synthetic oligonucleotide
gggcggagggaactaacccaacgtataaatccgtccccgttccaaggcc

SEQ ID NO: 427503 - DNA, 55 bp, Artificial
  Synthetic oligonucleotide
gggcggagggaagggcgtgccctgctaaactgcttgtataaaagtcagagcctcg

SEQ ID NO: 427504 - DNA, 51 bp, Artificial
  Synthetic oligonucleotide
gggcggagtacgacagcgcagcgggttggtacaatctgttcatgaacggat

SEQ ID NO: 427505 - DNA, 53 bp, Artificial
  Synthetic oligonucleotide
gggcggagtcctatcggacgcaagctttcgctgacgggtggcttgttcgtcaa

SEQ ID NO: 427506 - DNA, 51 bp, Artificial
  Synthetic oligonucleotide
gggcggatcccccggaaagcctagacaactggtcatttaaaacacacccct

SEQ ID NO: 427507 - DNA, 51 bp, Artificial
  Synthetic oligonucleotide
gggcggcatatgtcggcaactacagggtcgtcaatagacacctcgctacgc

SEQ ID NO: 427508 - DNA, 60 bp, Artificial
  Synthetic oligonucleotide
gggcggcattatttcttatagcgcggttgacaattctaagtgcgctctcatgaagcttgc

SEQ ID NO: 427509 - DNA, 60 bp, Artificial
  Synthetic oligonucleotide
gggcggcccaaagagagcacaatttggactagtgggagcagcatatccttttgtggtgta

SEQ ID NO: 427510 - DNA, 54 bp, Artificial
  Synthetic oligonucleotide
gggcggccgtcggaagcataggcctgggtaagatactggtggacgttttggccg

SEQ ID NO: 427511 - DNA, 53 bp, Artificial
  Synthetic oligonucleotide
gggcggccttcccattccaagggccccaagcgacaacttttgaaggcaattcc

SEQ ID NO: 427512 - DNA, 55 bp, Artificial
  Synthetic oligonucleotide
gggcggcgctaaaacctatcaagcgcggatgataaacggggtagaatggcacgat

SEQ ID NO: 427513 - DNA, 60 bp, Artificial
  Synthetic oligonucleotide
gggcggcgggtgcacttcaggcaatctgactgctttcgaaattccaagtggcagtatccc

SEQ ID NO: 427514 - DNA, 55 bp, Artificial
  Synthetic oligonucleotide
gggcggcggtgtttatccttcagagggtaggacccctacgcagcacccttagtca

SEQ ID NO: 427515 - DNA, 60 bp, Artificial
  Synthetic oligonucleotide
gggcggctcttgcccctatgcagggagacccggacattaatcttgctgtcattaagctac

SEQ ID NO: 427516 - DNA, 55 bp, Artificial
  Synthetic oligonucleotide
gggcggctgattggagagttgcccgcagactgatagaaactcaatactctacccc

SEQ ID NO: 427517 - DNA, 55 bp, Artificial
  Synthetic oligonucleotide
gggcggctgtggctgacggtgaacgagaacacgtttgaaaagtgtgtgtacgcgg

SEQ ID NO: 427518 - DNA, 60 bp, Artificial
  Synthetic oligonucleotide
gggcggcttgaggactcttgagttggagtatctcatgatgcaagttccgtttggttctct

SEQ ID NO: 427519 - DNA, 55 bp, Artificial
  Synthetic oligonucleotide
gggcgggaacctgtgtgggaacgtggggttcttcgataatacgcagtgtacatac

SEQ ID NO: 427520 - DNA, 60 bp, Artificial
  Synthetic oligonucleotide
gggcgggacgcattatagcgtgggatggacaggccgcgctgcatgtacataacccaacac

SEQ ID NO: 427521 - DNA, 55 bp, Artificial
  Synthetic oligonucleotide
gggcgggagatgagtcccgacgtgtgtatatcccgcacaccgacagttggttagg

SEQ ID NO: 427522 - DNA, 53 bp, Artificial
  Synthetic oligonucleotide
gggcgggagcttacattcggggttgtgagtttgtgggctgttaccggggaatc

SEQ ID NO: 427523 - DNA, 55 bp, Artificial
  Synthetic oligonucleotide
gggcgggaggttatctctatgttcgatgaacttttccctggaactattgaccaac

SEQ ID NO: 427524 - DNA, 55 bp, Artificial
  Synthetic oligonucleotide
gggcgggccgagtgactatatatataagtgtgcttcctgcttcgtgtcattctgc

SEQ ID NO: 427525 - DNA, 55 bp, Artificial
  Synthetic oligonucleotide
gggcggggcttagagcgtctacgtcagctgatcgttgaaaccgctcgtgattgga

SEQ ID NO: 427526 - DNA, 55 bp, Artificial
  Synthetic oligonucleotide
gggcggggcttgcacaacctttcactattggttggttcccacccacgtgacttca

SEQ ID NO: 427527 - DNA, 60 bp, Artificial
  Synthetic oligonucleotide
gggcgggtaccattccaaggagatgcgctacatcatgccgcactgcgtggtgatgcgcca

SEQ ID NO: 427528 - DNA, 55 bp, Artificial
  Synthetic oligonucleotide
gggcgggtcatgggcggtacggggagtggctttaccctcagagctgcataaaagc

SEQ ID NO: 427529 - DNA, 58 bp, Artificial
  Synthetic oligonucleotide
gggcgggtctccgcctatttttgagagaagtggttggaccactaagtcacacacatga

SEQ ID NO: 427530 - DNA, 55 bp, Artificial
  Synthetic oligonucleotide
gggcgggttatgttaactcgtctaatgtcactattcctgactactgcgcaggcag

SEQ ID NO: 427531 - DNA, 54 bp, Artificial
  Synthetic oligonucleotide
gggcggtaaactgaaaatgaggcgtaactcaattcccgcttgcgggttagatgg

SEQ ID NO: 427532 - DNA, 55 bp, Artificial
  Synthetic oligonucleotide
gggcggtactgggagtggcttaccctcagattccgcataaaagcagacgctctgt

SEQ ID NO: 427533 - DNA, 52 bp, Artificial
  Synthetic oligonucleotide
gggcggtagggtcgggtctatggcaaccacacgtaaacggcgagggaccaac

SEQ ID NO: 427534 - DNA, 55 bp, Artificial
  Synthetic oligonucleotide
gggcggtatcgcctgatgtgacgtctgcggtagcgtgggcgggctattcgtctta

SEQ ID NO: 427535 - DNA, 60 bp, Artificial
  Synthetic oligonucleotide
gggcggtgcgttctccagtgcgttgatcaaacacagaataccgaattcaagggatgaata

SEQ ID NO: 427536 - DNA, 57 bp, Artificial
  Synthetic oligonucleotide
gggcggtggcaacaacacgttggtatgccctactgattgcttccgcaaacacccaga

SEQ ID NO: 427537 - DNA, 57 bp, Artificial
  Synthetic oligonucleotide
gggcggtgtcttcgtctgcggtaacgcctccttggatacgtcatagctgaaaacgaa

SEQ ID NO: 427538 - DNA, 56 bp, Artificial
  Synthetic oligonucleotide
gggcggtgtgtacccctgggagggtaggtaccactacgctacagcagccttagcta

SEQ ID NO: 427539 - DNA, 55 bp, Artificial
  Synthetic oligonucleotide
gggcggttactgcatcctcaaaatccctttgtaggacatttgtctattgagggca

SEQ ID NO: 427540 - DNA, 55 bp, Artificial
  Synthetic oligonucleotide
gggcggttgacattacctctagatccaagcattgaccttcaacttaacatctcgt

SEQ ID NO: 427541 - DNA, 55 bp, Artificial
  Synthetic oligonucleotide
gggcggttgactcacttgttatttaggcgcataacatctaaggggccgcatccga

SEQ ID NO: 427542 - DNA, 55 bp, Artificial
  Synthetic oligonucleotide
gggcgtaagtttatgttacaggccggcatacaacggcggccgaaactaggcacca

SEQ ID NO: 427543 - DNA, 59 bp, Artificial
  Synthetic oligonucleotide
gggcgtacgtgatggtattcggaccaaatcgctatccgcaggcgtaagatccgtctaca

SEQ ID NO: 427544 - DNA, 55 bp, Artificial
  Synthetic oligonucleotide
gggcgtacttaatctctatagtggcctccaaactagagcaaatcgggcagcttgg

SEQ ID NO: 427545 - DNA, 53 bp, Artificial
  Synthetic oligonucleotide
gggcgtagacgtgcgttataatggctggagctttctttgctggattggcatct

SEQ ID NO: 427546 - DNA, 51 bp, Artificial
  Synthetic oligonucleotide
gggcgtagtgttgtgggataccctagagtacacgtaaaacacccaccggtt

SEQ ID NO: 427547 - DNA, 53 bp, Artificial
  Synthetic oligonucleotide
gggcgtagtttcagatccagcagtgtctttcataatgtgtgcacttctagcag

SEQ ID NO: 427548 - DNA, 58 bp, Artificial
  Synthetic oligonucleotide
gggcgtatatttctatcttgaccggtctttgtgacgacaaagtttctgacacattgta

SEQ ID NO: 427549 - DNA, 57 bp, Artificial
  Synthetic oligonucleotide
gggcgtccaacggactatgtgccgggaagcactgtcgcccggcccatccgatgaccc

SEQ ID NO: 427550 - DNA, 55 bp, Artificial
  Synthetic oligonucleotide
gggcgtccaagttcgtggacgtaggagtcaacttcgctcgggccacgggagacca

SEQ ID NO: 427551 - DNA, 58 bp, Artificial
  Synthetic oligonucleotide
gggcgtctccatcctgaatcttggacaaaagagatacaccaagaccacttactggtgg

SEQ ID NO: 427552 - DNA, 55 bp, Artificial
  Synthetic oligonucleotide
gggcgtcttattcggtggtcattggagatggtaactcgcttgagactaaccaggg

SEQ ID NO: 427553 - DNA, 57 bp, Artificial
  Synthetic oligonucleotide
gggcgtcttcaaacacctgggtgcgtgagagagagaagtaccacgccgaggaacgtc

SEQ ID NO: 427554 - DNA, 60 bp, Artificial
  Synthetic oligonucleotide
gggcgtgatcttgtgtcttccgtgtactccgcgactggtatgtctgccgcagctcgaaac

SEQ ID NO: 427555 - DNA, 51 bp, Artificial
  Synthetic oligonucleotide
gggcgtgccccctcgagtgagcacgcgaggcggcgagctagaccccaacac

SEQ ID NO: 427556 - DNA, 55 bp, Artificial
  Synthetic oligonucleotide
gggcgtgcctaaacccggaagcatccctggtcacgtgactctgacgtcacggcgg

SEQ ID NO: 427557 - DNA, 55 bp, Artificial
  Synthetic oligonucleotide
gggcgtgctacggtataacaactacacactcagcacgttcatctactctaacgac

SEQ ID NO: 427558 - DNA, 60 bp, Artificial
  Synthetic oligonucleotide
gggcgtggatgcttgatttagcaattgacaaacgcatgtcgtcagatcgccatcttagta

SEQ ID NO: 427559 - DNA, 55 bp, Artificial
  Synthetic oligonucleotide
gggcgtggatgttaaaagcatattaccggtgctaacggctgagcatagagcgatg

SEQ ID NO: 427560 - DNA, 56 bp, Artificial
  Synthetic oligonucleotide
gggcgtggggtgacggcactcaatacggcattgaatttaagggcactacgcttggg

SEQ ID NO: 427561 - DNA, 55 bp, Artificial
  Synthetic oligonucleotide
gggcgtgggtagacgagaacgtctggacaccgtttctaggattcctcgataccgc

SEQ ID NO: 427562 - DNA, 59 bp, Artificial
  Synthetic oligonucleotide
gggcgtgtcgtggccatagtacttggaggtgtgaacgagggctctagaactgccctgtc

SEQ ID NO: 427563 - DNA, 60 bp, Artificial
  Synthetic oligonucleotide
gggcgtgtgatgaggcgagcgttcaggagtttagagactatagatctagaaactacctaa

SEQ ID NO: 427564 - DNA, 50 bp, Artificial
  Synthetic oligonucleotide
gggcgttaaaagcgtttgtcccgctagtccccgggatgggggcaagacat

SEQ ID NO: 427565 - DNA, 55 bp, Artificial
  Synthetic oligonucleotide
gggcgttatgtccacctttgcctcccgttatgatggcttctattcattccagaca

SEQ ID NO: 427566 - DNA, 55 bp, Artificial
  Synthetic oligonucleotide
gggcgttctatgtatatctgacgtcacacgcggcaatggtatcacgcatagagtg

SEQ ID NO: 427567 - DNA, 55 bp, Artificial
  Synthetic oligonucleotide
gggcgttcttacgcggtttctaccgagtctctgtcgtgtgacgacatgctggcgt

SEQ ID NO: 427568 - DNA, 55 bp, Artificial
  Synthetic oligonucleotide
gggcgttgcaccatcgctcgcccttctagcattcactatacttctatcgaaatcg

SEQ ID NO: 427569 - DNA, 59 bp, Artificial
  Synthetic oligonucleotide
gggctaaatggtacatactttggcgaacatgttgctatgctactcgacttaaagcgtta

SEQ ID NO: 427570 - DNA, 56 bp, Artificial
  Synthetic oligonucleotide
gggctaacccattttcatacagtgcacacgaagaaactaatgacgtccaaatattt

SEQ ID NO: 427571 - DNA, 55 bp, Artificial
  Synthetic oligonucleotide
gggctaaccctaagcgtaaggcgttagctgaacgatgtatcccgtacttacaagc

SEQ ID NO: 427572 - DNA, 55 bp, Artificial
  Synthetic oligonucleotide
gggctaagacgatgtcaagtcttttaacgatactaagtgtagtagcgagtcttgt

SEQ ID NO: 427573 - DNA, 58 bp, Artificial
  Synthetic oligonucleotide
gggctaaggaatatcccatctattcaatctagaggtctgtttggggccattgctggtt

SEQ ID NO: 427574 - DNA, 55 bp, Artificial
  Synthetic oligonucleotide
gggctaaggatgtcctacaggtacccgcacgtaaccttcagagagtgtggatctg

SEQ ID NO: 427575 - DNA, 55 bp, Artificial
  Synthetic oligonucleotide
gggctaaggtcacatcaatcatcccctggctaagggagagtccacaagaaaccct

SEQ ID NO: 427576 - DNA, 55 bp, Artificial
  Synthetic oligonucleotide
gggctaaggtctagatgaccacacagataattatgtgaacccaatgacctggccc

SEQ ID NO: 427577 - DNA, 53 bp, Artificial
  Synthetic oligonucleotide
gggctaaggtctagatgaccgcacaaataattgtgtgggcccaaagacctagc

SEQ ID NO: 427578 - DNA, 55 bp, Artificial
  Synthetic oligonucleotide
gggctaatagatatagttctgcaactgctatagccgattacgttgtaactaaccc

SEQ ID NO: 427579 - DNA, 59 bp, Artificial
  Synthetic oligonucleotide
gggctaatgatagtgggtgttccgaggtccgcctgtctatcgcttctggtattaatgaa

SEQ ID NO: 427580 - DNA, 59 bp, Artificial
  Synthetic oligonucleotide
gggctacaaggtgctagtgctcaatccctccgttgctgcaacactgggctttggctctt

SEQ ID NO: 427581 - DNA, 52 bp, Artificial
  Synthetic oligonucleotide
gggctacaatatcgcatgtacatgtggtagtaagctcgtgcattgcactcaa

SEQ ID NO: 427582 - DNA, 59 bp, Artificial
  Synthetic oligonucleotide
gggctacaatgctatacaggtcggccactgggtggcgaccgtgctctctaagaaggccg

SEQ ID NO: 427583 - DNA, 51 bp, Artificial
  Synthetic oligonucleotide
gggctacagtagatataaccttaactacaggtggagattgtggtttgccct

SEQ ID NO: 427584 - DNA, 54 bp, Artificial
  Synthetic oligonucleotide
gggctacccctatcgatacggctctctgttcgttgccttaagttaccaaaggta

SEQ ID NO: 427585 - DNA, 55 bp, Artificial
  Synthetic oligonucleotide
gggctaccccttatgatttaaatactatgcttaatgctattggggatcatcaagc

SEQ ID NO: 427586 - DNA, 58 bp, Artificial
  Synthetic oligonucleotide
gggctacggctagcaggacatcaaggcttgccaactatgaacactcccgggagcacac

SEQ ID NO: 427587 - DNA, 51 bp, Artificial
  Synthetic oligonucleotide
gggctacgggacgctaagaccaaacatgttcgggaagttgtcatgaaggaa

SEQ ID NO: 427588 - DNA, 55 bp, Artificial
  Synthetic oligonucleotide
gggctacggtgattccactactatctatatcggacgtagaacttcttctgcggtc

SEQ ID NO: 427589 - DNA, 55 bp, Artificial
  Synthetic oligonucleotide
gggctactggttgattgtgaaaagacgtcgtgctgtaccgttcgtgatgcggtcg

SEQ ID NO: 427590 - DNA, 54 bp, Artificial
  Synthetic oligonucleotide
gggctagattaagaggcgataccccacccctcctcttagagtacttgtagaggg

SEQ ID NO: 427591 - DNA, 60 bp, Artificial
  Synthetic oligonucleotide
gggctagcttcggtgctaaaggtgacatcacatgttatcaatgatctagttcatgacaca

SEQ ID NO: 427592 - DNA, 55 bp, Artificial
  Synthetic oligonucleotide
gggctagggtttgtgtgagggtaaatgctgacaaacccagcgtgtatctggcccg

SEQ ID NO: 427593 - DNA, 60 bp, Artificial
  Synthetic oligonucleotide
gggctaggtatttatacccccagcacattctgatcgattctagacgcctccaggagactg

SEQ ID NO: 427594 - DNA, 55 bp, Artificial
  Synthetic oligonucleotide
gggctaggttataaatggtcagaaatttcgtttaaagcggctaattatcagtaca

SEQ ID NO: 427595 - DNA, 60 bp, Artificial
  Synthetic oligonucleotide
gggctagtcccccagtgtgagacgagtattaagttgatgaattctagagatagataagtc

SEQ ID NO: 427596 - DNA, 60 bp, Artificial
  Synthetic oligonucleotide
gggctagtgtgtgtgcactactgtccccattggtgggtgaattgtcaagcaaagctaaac

SEQ ID NO: 427597 - DNA, 55 bp, Artificial
  Synthetic oligonucleotide
gggctagttccctaatgactctaagagcttccgacttacttcctgcgttaatagc

SEQ ID NO: 427598 - DNA, 55 bp, Artificial
  Synthetic oligonucleotide
gggctataccggtgactttgactcagtgatcgactgtaacacgtgtgtcactcag

SEQ ID NO: 427599 - DNA, 55 bp, Artificial
  Synthetic oligonucleotide
gggctatactacgaactggagggccacagacactactatgtagtatttgcagacg

SEQ ID NO: 427600 - DNA, 60 bp, Artificial
  Synthetic oligonucleotide
gggctatatacagcaaggacaatagcataaggattggttccaaaggagacatttttgtca

SEQ ID NO: 427601 - DNA, 51 bp, Artificial
  Synthetic oligonucleotide
gggctatcaccgccgtcctacctcctggggtcaacccagctaacgtgcaaa

SEQ ID NO: 427602 - DNA, 59 bp, Artificial
  Synthetic oligonucleotide
gggctatcagcataagttctcgatcctaaaacagtatctcaccgtcaatgcgggggttg

SEQ ID NO: 427603 - DNA, 55 bp, Artificial
  Synthetic oligonucleotide
gggctatcattaacccctggagactgtttaacatgggactcagcagtagccacct

SEQ ID NO: 427604 - DNA, 55 bp, Artificial
  Synthetic oligonucleotide
gggctatccatcacccacccacttctgacgagcaggtgaagctctacaagaatcc

SEQ ID NO: 427605 - DNA, 54 bp, Artificial
  Synthetic oligonucleotide
gggctatcctcaactaacacatgagattagaagattctatagttggttgctgga

SEQ ID NO: 427606 - DNA, 58 bp, Artificial
  Synthetic oligonucleotide
gggctatcgagttcgctaagaccacgctcccgtacctgatggtcgatcccatgtccgg

SEQ ID NO: 427607 - DNA, 60 bp, Artificial
  Synthetic oligonucleotide
gggctatgacagaagatggttatgtgagtcttcaatggactaatgatggaaagtccttta

SEQ ID NO: 427608 - DNA, 55 bp, Artificial
  Synthetic oligonucleotide
gggctatgagtattatagtcaacgccaaaacccaaatggcattcgaagaattgca

SEQ ID NO: 427609 - DNA, 55 bp, Artificial
  Synthetic oligonucleotide
gggctatgattaagagttcttgggaaatcaaccagccgacaacctgtcttgaagc

SEQ ID NO: 427610 - DNA, 55 bp, Artificial
  Synthetic oligonucleotide
gggctatgcctcagctgttaagctcgagaaaggccagacgggtatcgtccttccc

SEQ ID NO: 427611 - DNA, 55 bp, Artificial
  Synthetic oligonucleotide
gggctatgctgatccgtgtttacgggaagtagccaagtatggtgggtactcaacc

SEQ ID NO: 427612 - DNA, 60 bp, Artificial
  Synthetic oligonucleotide
gggctatgcttaaggctattgctagcctagctctgcgagctgacagggaggtacaggatg

SEQ ID NO: 427613 - DNA, 55 bp, Artificial
  Synthetic oligonucleotide
gggctatgggttgtccccaacggctccagacaaagggatgaacattgagatcaag

SEQ ID NO: 427614 - DNA, 58 bp, Artificial
  Synthetic oligonucleotide
gggctatgtgccattaggctctggacagggggtgcgtttggggactcgggtgactaca

SEQ ID NO: 427615 - DNA, 60 bp, Artificial
  Synthetic oligonucleotide
gggctatgttttcgtgcctgaatatcgtcgtgacctagttgattgcgatcgtaagaatca

SEQ ID NO: 427616 - DNA, 52 bp, Artificial
  Synthetic oligonucleotide
gggctattaggtccaccctttgttacgcgttgtacaaacactttgaaataag

SEQ ID NO: 427617 - DNA, 55 bp, Artificial
  Synthetic oligonucleotide
gggctattcggaaaaggtagcttaataacgtgtgctaagtttaagtgcgtgacaa

SEQ ID NO: 427618 - DNA, 55 bp, Artificial
  Synthetic oligonucleotide
gggctattctccatatacctacaagaatcagacagggactcgaaagggctttgct

SEQ ID NO: 427619 - DNA, 56 bp, Artificial
  Synthetic oligonucleotide
gggctatttccgatagggagctggaccgcgagggtcgcttcccttgcgggtgtcta

SEQ ID NO: 427620 - DNA, 55 bp, Artificial
  Synthetic oligonucleotide
gggctcaaattgaagttacggttctacgccaagcctaagcatgttaagtgctgga

SEQ ID NO: 427621 - DNA, 60 bp, Artificial
  Synthetic oligonucleotide
gggctcaatgatccccaagattgggtgggtctgagagagtttgtctaagtcagacatgtt

SEQ ID NO: 427622 - DNA, 60 bp, Artificial
  Synthetic oligonucleotide
gggctcacaagcacgatttcggatcgcaactattttgtgccattcacggataacttcgaa

SEQ ID NO: 427623 - DNA, 55 bp, Artificial
  Synthetic oligonucleotide
gggctcaccaggctttaattcagaatgtcgaagcgggaagccccttggcgttcga

SEQ ID NO: 427624 - DNA, 55 bp, Artificial
  Synthetic oligonucleotide
gggctcacgacggtgtctgggcctgagtggaatatgtgcccgctaccaccagttg

SEQ ID NO: 427625 - DNA, 60 bp, Artificial
  Synthetic oligonucleotide
gggctcactggaattaatgtggccgtgtctgcccttagccatcagagactcacctccctg

SEQ ID NO: 427626 - DNA, 54 bp, Artificial
  Synthetic oligonucleotide
gggctcacttggccccccctacacactatctagccctccccctcccttggataa

SEQ ID NO: 427627 - DNA, 55 bp, Artificial
  Synthetic oligonucleotide
gggctcagaatatctcgataggctcggacctggggcacaaaggtcggggtcttgg

SEQ ID NO: 427628 - DNA, 55 bp, Artificial
  Synthetic oligonucleotide
gggctcagacatcaccgtagtcctgccgaccaatgaactgcggctagattggagt

SEQ ID NO: 427629 - DNA, 56 bp, Artificial
  Synthetic oligonucleotide
gggctcaggactggccgggctttgggcaaggctcttaaaaatgcacttttctcgaa

SEQ ID NO: 427630 - DNA, 55 bp, Artificial
  Synthetic oligonucleotide
gggctcagtatgccaactgagtctggatcaagcacttctgttaccccggaccgag

SEQ ID NO: 427631 - DNA, 60 bp, Artificial
  Synthetic oligonucleotide
gggctcatacacgagggagaagttcaagcctactgagatggcggcggcttacggagaaga

SEQ ID NO: 427632 - DNA, 53 bp, Artificial
  Synthetic oligonucleotide
gggctcatccgtgtatgcatgttggtgcggaaagccattgggggccattacgt

SEQ ID NO: 427633 - DNA, 55 bp, Artificial
  Synthetic oligonucleotide
gggctcatgaaaacccgctgctaatcgttatcagtacgcaggcagcaaacgatgc

SEQ ID NO: 427634 - DNA, 55 bp, Artificial
  Synthetic oligonucleotide
gggctcatgacacaaagacatctggtcgctgtccatcatggcttgatagtatttc

SEQ ID NO: 427635 - DNA, 55 bp, Artificial
  Synthetic oligonucleotide
gggctcattactcaatgacaaacattctaacggcacagtgaaggaccgaagtcca

SEQ ID NO: 427636 - DNA, 55 bp, Artificial
  Synthetic oligonucleotide
gggctcattctcagccctacaaaatacaagatcggagtaaaggtagtagacttcc

SEQ ID NO: 427637 - DNA, 54 bp, Artificial
  Synthetic oligonucleotide
gggctcattgatctcctctcgtcgagacgaatccaacgagcccatatgcgtccc

SEQ ID NO: 427638 - DNA, 60 bp, Artificial
  Synthetic oligonucleotide
gggctcattgtatgtagtggctcccatttcctatttcctagcagatgtggtgtgatcacc

SEQ ID NO: 427639 - DNA, 57 bp, Artificial
  Synthetic oligonucleotide
gggctccaaacctcgaacgtgttaagtacatgcgtgaaagaggtgtattgcctggaa

SEQ ID NO: 427640 - DNA, 55 bp, Artificial
  Synthetic oligonucleotide
gggctccaaaccttctaccaggatcccagcacctccgatgctgatcactcggatt

SEQ ID NO: 427641 - DNA, 55 bp, Artificial
  Synthetic oligonucleotide
gggctccagttattgaaagcgacgtttataaacaagtggccacgattgcgccacg

SEQ ID NO: 427642 - DNA, 55 bp, Artificial
  Synthetic oligonucleotide
gggctccatatgaagacgtggaaattggacccaatggagttctgaggaccagttc

SEQ ID NO: 427643 - DNA, 55 bp, Artificial
  Synthetic oligonucleotide
gggctccatgagaatcacagggcctaaaacctgcatgaacacttggcaggggacc

SEQ ID NO: 427644 - DNA, 59 bp, Artificial
  Synthetic oligonucleotide
gggctcccacactcggttgtgctgttcacaggttgtgtaccagttggagtcacgtcgcc

SEQ ID NO: 427645 - DNA, 60 bp, Artificial
  Synthetic oligonucleotide
gggctcccctccgtcattggctagttcctctgcaagccagctttccgccccatcactgaa

SEQ ID NO: 427646 - DNA, 55 bp, Artificial
  Synthetic oligonucleotide
gggctcccgcaccttttagttgtgactggacccctagtgatgagagaattaggct

SEQ ID NO: 427647 - DNA, 57 bp, Artificial
  Synthetic oligonucleotide
gggctcccggatccagagtcggtgcccactacaggtggaatctgaaccagacggaac

SEQ ID NO: 427648 - DNA, 50 bp, Artificial
  Synthetic oligonucleotide
gggctcccgggctcgtaaacgagtcgtctgtcgatcatgagcgtttcccc

SEQ ID NO: 427649 - DNA, 57 bp, Artificial
  Synthetic oligonucleotide
gggctcctccctttttagtcgtcaacgaccaaattgggttagagatgctcagcgctg

SEQ ID NO: 427650 - DNA, 51 bp, Artificial
  Synthetic oligonucleotide
gggctcctgcgggtactgtttggtcaaaacgtggtcgtacaccgaaccgga

SEQ ID NO: 427651 - DNA, 55 bp, Artificial
  Synthetic oligonucleotide
gggctcctgttctttagaggatgagcatacaccgtatgatattggccgtcaaatg

SEQ ID NO: 427652 - DNA, 60 bp, Artificial
  Synthetic oligonucleotide
gggctccttcatgaagccgacgccagcgagtcatcaaggcagttgcattatctccatcca

SEQ ID NO: 427653 - DNA, 55 bp, Artificial
  Synthetic oligonucleotide
gggctcgacgggactacccgctatcttcaaatgaccaacgtatcgcgagcgctgt

SEQ ID NO: 427654 - DNA, 55 bp, Artificial
  Synthetic oligonucleotide
gggctcggaagcaatgtaaggggcctgtgtggacttgtgcaacatcagatgatgc

SEQ ID NO: 427655 - DNA, 58 bp, Artificial
  Synthetic oligonucleotide
gggctcgtcccgcttgactgccatttatggcctacgttgaccgtgtagttgtcacaac

SEQ ID NO: 427656 - DNA, 59 bp, Artificial
  Synthetic oligonucleotide
gggctcgtccctggacctcagtgcacaaacaaaggacggagtgtgtgtgcacctaacac

SEQ ID NO: 427657 - DNA, 59 bp, Artificial
  Synthetic oligonucleotide
gggctcgtgattatggcgaagcgaccaggagatatagtcatttccactcccgtttcgaa

SEQ ID NO: 427658 - DNA, 53 bp, Artificial
  Synthetic oligonucleotide
gggctcgttaataatcaggaggggcaaatacctttacgtccttgacgtaatcg

SEQ ID NO: 427659 - DNA, 56 bp, Artificial
  Synthetic oligonucleotide
gggctcgttggattcgtctcggcgagcgttattcaatgagtccaatcacaatcgtt

SEQ ID NO: 427660 - DNA, 59 bp, Artificial
  Synthetic oligonucleotide
gggctcgttggattcgtctcggcgagctaaatcaaatgaaaccagtctcaaaggtatca

SEQ ID NO: 427661 - DNA, 55 bp, Artificial
  Synthetic oligonucleotide
gggctctcaaatttctgcccatgtagtgtatactagttttcttactatgcggtcg

SEQ ID NO: 427662 - DNA, 59 bp, Artificial
  Synthetic oligonucleotide
gggctctcagatataatattacctgagagccccgcgaccggtgtatcggttttagagca

SEQ ID NO: 427663 - DNA, 55 bp, Artificial
  Synthetic oligonucleotide
gggctctcagatttatattgcaccgagacaatacatcttgcaactacagtaccgg

SEQ ID NO: 427664 - DNA, 59 bp, Artificial
  Synthetic oligonucleotide
gggctctctccggagggtcccgccgccgtgtcgctacctggaggtagacatgactgctc

SEQ ID NO: 427665 - DNA, 55 bp, Artificial
  Synthetic oligonucleotide
gggctctctccggagggtcccgccgccgtgtcgctacctggaggttttcatgacc

SEQ ID NO: 427666 - DNA, 55 bp, Artificial
  Synthetic oligonucleotide
gggctctctgagctccaacaattgacgcagaatctcccgggtccaaaacactggt

SEQ ID NO: 427667 - DNA, 60 bp, Artificial
  Synthetic oligonucleotide
gggctctgacggggggtatggagttgacgagagaccccactgtgtctgagcatgcgtcct

SEQ ID NO: 427668 - DNA, 55 bp, Artificial
  Synthetic oligonucleotide
gggctctgcatcctatagctgatgcatctcccacaatggcaaaacacctatggtc

SEQ ID NO: 427669 - DNA, 50 bp, Artificial
  Synthetic oligonucleotide
gggctctgcttatataccctaggacagcccatggtccgcccacgaaccgc

SEQ ID NO: 427670 - DNA, 55 bp, Artificial
  Synthetic oligonucleotide
gggctcttgagagagtgagaccaagtcaaactatgtcaatattggcttatgagag

SEQ ID NO: 427671 - DNA, 56 bp, Artificial
  Synthetic oligonucleotide
gggctctttggaaaggggagcattgtggcatgtgctaagttcacgtgtgccaaatc

SEQ ID NO: 427672 - DNA, 54 bp, Artificial
  Synthetic oligonucleotide
gggctctttgggctataaacctttaggaaccacccgcattggacaagcagctcc

SEQ ID NO: 427673 - DNA, 55 bp, Artificial
  Synthetic oligonucleotide
gggctgaaccttccaatggtgacatatatcaaggatgagttaagatctgccgaga

SEQ ID NO: 427674 - DNA, 60 bp, Artificial
  Synthetic oligonucleotide
gggctgaagccaacccgccctgacaagactgagggacctctgatcatttctgaggatctg

SEQ ID NO: 427675 - DNA, 55 bp, Artificial
  Synthetic oligonucleotide
gggctgaatatgttgtgtggaaatgggtatattattgtggggaggatgggtggtg

SEQ ID NO: 427676 - DNA, 55 bp, Artificial
  Synthetic oligonucleotide
gggctgaatcataggaccaataacgtcagctctgttggccaatttcggcccggtc

SEQ ID NO: 427677 - DNA, 60 bp, Artificial
  Synthetic oligonucleotide
gggctgaatgcttatcgtaatcttagtaaaatagcgatatcgcatagagcatctgagcgg

SEQ ID NO: 427678 - DNA, 58 bp, Artificial
  Synthetic oligonucleotide
gggctgacacacagggtcggaaagaggttttgtatcaagtccatatacattcttggta

SEQ ID NO: 427679 - DNA, 57 bp, Artificial
  Synthetic oligonucleotide
gggctgagaacatgaaagcggtcgcttccgttttgtcggcaaaatcttccaccgtca

SEQ ID NO: 427680 - DNA, 55 bp, Artificial
  Synthetic oligonucleotide
gggctgagctccaggctcgccatgactattgccagatcgcaagggctgagcttag

SEQ ID NO: 427681 - DNA, 55 bp, Artificial
  Synthetic oligonucleotide
gggctgaggtgccacaagaggatgaggaggtaggctttccagtcaggccacaggt

SEQ ID NO: 427682 - DNA, 60 bp, Artificial
  Synthetic oligonucleotide
gggctgataaagagtgcttcaacccttgcttttatgtggaattgatcagaggcaggccaa

SEQ ID NO: 427683 - DNA, 60 bp, Artificial
  Synthetic oligonucleotide
gggctgatctttgattagctcctccaggaggatcaaccttagttacataggtagctgaga

SEQ ID NO: 427684 - DNA, 55 bp, Artificial
  Synthetic oligonucleotide
gggctgatgaatcagagtttcaatcaaaagtttatgcggttgaagatgggttgcc

SEQ ID NO: 427685 - DNA, 55 bp, Artificial
  Synthetic oligonucleotide
gggctgatgcatgggaatgtcggtcagctaccaagagccactgatgccgctcccc

SEQ ID NO: 427686 - DNA, 53 bp, Artificial
  Synthetic oligonucleotide
gggctgattccatcacatgtcattggttagatcaacgcagtggtttttatgta

SEQ ID NO: 427687 - DNA, 55 bp, Artificial
  Synthetic oligonucleotide
gggctgattccgtgagttcccctaaatagcgctaatttgacttttgccaaatctc

SEQ ID NO: 427688 - DNA, 55 bp, Artificial
  Synthetic oligonucleotide
gggctgcagaagtgtgtgcaggtctacaaccctgtttctatcttagacataaaac

SEQ ID NO: 427689 - DNA, 55 bp, Artificial
  Synthetic oligonucleotide
gggctgcagcggaagctttagcaccggcggacgatggcatggactgtgaatcgga

SEQ ID NO: 427690 - DNA, 53 bp, Artificial
  Synthetic oligonucleotide
gggctgcatactccacagtcacgctgctcacacaattagcgtaaaacaaacgg

SEQ ID NO: 427691 - DNA, 55 bp, Artificial
  Synthetic oligonucleotide
gggctgccaatcctccagttaacatagatgcagatcaactattaggaataggtca

SEQ ID NO: 427692 - DNA, 55 bp, Artificial
  Synthetic oligonucleotide
gggctgccatattgacttggtcaatcggtgtctctcaactatctctatgtatcgg

SEQ ID NO: 427693 - DNA, 60 bp, Artificial
  Synthetic oligonucleotide
gggctgccatgttgacttagtcaatcggtgtctctcagtttgttctatgtatcggtgtac

SEQ ID NO: 427694 - DNA, 55 bp, Artificial
  Synthetic oligonucleotide
gggctgccccagagctatcagcatagggaaacttattttgagcaattcctggagc

SEQ ID NO: 427695 - DNA, 55 bp, Artificial
  Synthetic oligonucleotide
gggctgccgcttccagaacattacagaaaacactaccacgcaaccctagataacg

SEQ ID NO: 427696 - DNA, 52 bp, Artificial
  Synthetic oligonucleotide
gggctgcctccgaaaaaaagggactatcgccgtcggagtggggagagaggct

SEQ ID NO: 427697 - DNA, 53 bp, Artificial
  Synthetic oligonucleotide
gggctgcctccgatacaaaacacaagaaacatagtgccagtaagtatatcgtc

SEQ ID NO: 427698 - DNA, 54 bp, Artificial
  Synthetic oligonucleotide
gggctgccttgaccggtcgggaccctgactttcctccagggaacgtcatggtgt

SEQ ID NO: 427699 - DNA, 55 bp, Artificial
  Synthetic oligonucleotide
gggctgctagtgcagatacccctctaatggagtcaggttggtcagatacagcaca

SEQ ID NO: 427700 - DNA, 55 bp, Artificial
  Synthetic oligonucleotide
gggctgctagtgcatcagaacttgtactggagccaaattggaatgacaatgcaca

SEQ ID NO: 427701 - DNA, 55 bp, Artificial
  Synthetic oligonucleotide
gggctgctatgtaccgcaggatcgtatgatgattatctcgtcagaaaggaggaag

SEQ ID NO: 427702 - DNA, 60 bp, Artificial
  Synthetic oligonucleotide
gggctgctattaacaagagatggtggtaaccagactgagtttaataatactgagatcttc

SEQ ID NO: 427703 - DNA, 60 bp, Artificial
  Synthetic oligonucleotide
gggctgctattaacaagagatggtggtactgacaataagaccgagaccttcagacctgga

SEQ ID NO: 427704 - DNA, 59 bp, Artificial
  Synthetic oligonucleotide
gggctgctattaacaagagatggtggtaggaacacgagtgacaccgagaccttcagacc

SEQ ID NO: 427705 - DNA, 59 bp, Artificial
  Synthetic oligonucleotide
gggctgctattaacaagagatggtggtattaacaacagtaccaatgagaccttcagacc

SEQ ID NO: 427706 - DNA, 58 bp, Artificial
  Synthetic oligonucleotide
gggctgctattaacaagagatggtggtgttgacaatggtactaatgggaccgagacct

SEQ ID NO: 427707 - DNA, 55 bp, Artificial
  Synthetic oligonucleotide
gggctgctcattcgcccaggtatgccacacacatgtaccatggccaaatgactct

SEQ ID NO: 427708 - DNA, 60 bp, Artificial
  Synthetic oligonucleotide
gggctggaacgcctccgaagacgcattgactgccgtcatcaccgcggcttatcttactat

SEQ ID NO: 427709 - DNA, 55 bp, Artificial
  Synthetic oligonucleotide
gggctggaaggcttacggcagaaaggttggagtctggtcagccttttaatgatag

SEQ ID NO: 427710 - DNA, 60 bp, Artificial
  Synthetic oligonucleotide
gggctggacatcaaagggtcagatcacagtgctggacatgcacccaggctcggggaagac

SEQ ID NO: 427711 - DNA, 57 bp, Artificial
  Synthetic oligonucleotide
gggctggaggcacaaggccgtgatctataggacgtggtgtaaggggtaccaggctgt

SEQ ID NO: 427712 - DNA, 55 bp, Artificial
  Synthetic oligonucleotide
gggctggatatctgacgcaatggatacccagacagccatgattgctttaaagaac

SEQ ID NO: 427713 - DNA, 60 bp, Artificial
  Synthetic oligonucleotide
gggctggcccgcccctcatggtacccgctcactgacaccctgcacttgcggctcctcgga

SEQ ID NO: 427714 - DNA, 51 bp, Artificial
  Synthetic oligonucleotide
gggctggcgaaacaacgtgcaaacgagccgcgcatcacgtctacggtagtc

SEQ ID NO: 427715 - DNA, 60 bp, Artificial
  Synthetic oligonucleotide
gggctggctcctacgcatctgatatcaagaacaatcggaccggcaagttgctgcctcaga

SEQ ID NO: 427716 - DNA, 55 bp, Artificial
  Synthetic oligonucleotide
gggctgggaaagtgtttattcgggatcggcttctgccaatcaggcagaatcccgg

SEQ ID NO: 427717 - DNA, 55 bp, Artificial
  Synthetic oligonucleotide
gggctggggcaaaatagacaagttaaaacggctgctcccactacaagtatgcgag

SEQ ID NO: 427718 - DNA, 55 bp, Artificial
  Synthetic oligonucleotide
gggctggggcaagctaggggtgtctgatgtctctggaccatctgaacacaggcct

SEQ ID NO: 427719 - DNA, 55 bp, Artificial
  Synthetic oligonucleotide
gggctggggccctattagttatgccaatggaagcggccctgaccaacggccttac

SEQ ID NO: 427720 - DNA, 55 bp, Artificial
  Synthetic oligonucleotide
gggctggggtcaatccgcaacgaatatggacgaagtacgcaagcatagacagtcg

SEQ ID NO: 427721 - DNA, 55 bp, Artificial
  Synthetic oligonucleotide
gggctggtggtcacgcatttcactcaggcgttgtttgtggacggctaccgggctg

SEQ ID NO: 427722 - DNA, 57 bp, Artificial
  Synthetic oligonucleotide
gggctggttgacagtgttggcaactccttcttccctggactgtccatttgcaaaacg

SEQ ID NO: 427723 - DNA, 55 bp, Artificial
  Synthetic oligonucleotide
gggctgtatccagctcaggtgaaagccagaaatatggtaagccctgttatgagtg

SEQ ID NO: 427724 - DNA, 55 bp, Artificial
  Synthetic oligonucleotide
gggctgtgaaacccaagagtgtccgccttatagaagatcagttaggcttaggaca

SEQ ID NO: 427725 - DNA, 55 bp, Artificial
  Synthetic oligonucleotide
gggctgtgaaagctacccaatgatgtatcctaagaatcttcccgcaggggcagat

SEQ ID NO: 427726 - DNA, 56 bp, Artificial
  Synthetic oligonucleotide
gggctgtgaagccttacaattactgtttatacactcgtgtaccgtagtcctaacta

SEQ ID NO: 427727 - DNA, 60 bp, Artificial
  Synthetic oligonucleotide
gggctgtgaaggcccatgtaaggtccaatcgtttgagcagagggatgatgtgaagcacct

SEQ ID NO: 427728 - DNA, 55 bp, Artificial
  Synthetic oligonucleotide
gggctgtgcagtacgagaacggaaggttcactgtcccgaaaggagtaggagcgaa

SEQ ID NO: 427729 - DNA, 55 bp, Artificial
  Synthetic oligonucleotide
gggctgtgtgtgtactgtgattggaggtttcgtgagttatgtgacagccgtgatt

SEQ ID NO: 427730 - DNA, 55 bp, Artificial
  Synthetic oligonucleotide
gggctgttaaacccaaagcagtacgacaaatagaagaccaattaggcatgaacca

SEQ ID NO: 427731 - DNA, 55 bp, Artificial
  Synthetic oligonucleotide
gggctgttacgggagttgggctggaacgttcgaagtgaaaaggctgacctggtgc

SEQ ID NO: 427732 - DNA, 55 bp, Artificial
  Synthetic oligonucleotide
gggctgttctcaacgtacctagaaggataagacaaggctttgaaagagcattgct

SEQ ID NO: 427733 - DNA, 60 bp, Artificial
  Synthetic oligonucleotide
gggctgttgcctaccaacacacacactcaactaactacataccactcaatggtgaggcca

SEQ ID NO: 427734 - DNA, 55 bp, Artificial
  Synthetic oligonucleotide
gggctgttttcatggtgaaaatacggtggtatataaccatttattaacagagtcg

SEQ ID NO: 427735 - DNA, 56 bp, Artificial
  Synthetic oligonucleotide
gggcttaaagtataaattaggagagatggcgagtaccgcctcgctcaataccgccc

SEQ ID NO: 427736 - DNA, 56 bp, Artificial
  Synthetic oligonucleotide
gggcttaacccgatgctgatgaacaagacccagagggtggttgtcactaaccttaa

SEQ ID NO: 427737 - DNA, 59 bp, Artificial
  Synthetic oligonucleotide
gggcttaagtatgatttcacacagaggcatcggaataaacaggatttgtggtttatgtc

SEQ ID NO: 427738 - DNA, 54 bp, Artificial
  Synthetic oligonucleotide
gggcttaataaggaaagtgttaaacggacgctattcaaagcgatttcaatgggc

SEQ ID NO: 427739 - DNA, 60 bp, Artificial
  Synthetic oligonucleotide
gggcttacttacagaggctgatgtacagcaatggctaacttggtgtaatgcacagagctg

SEQ ID NO: 427740 - DNA, 57 bp, Artificial
  Synthetic oligonucleotide
gggcttagactataacgccaatggggctatcattgctaaacttggcactgggttaac

SEQ ID NO: 427741 - DNA, 55 bp, Artificial
  Synthetic oligonucleotide
gggcttagatcaagatgtccacaaagataattgtgacgacccaaacttctggccc

SEQ ID NO: 427742 - DNA, 55 bp, Artificial
  Synthetic oligonucleotide
gggcttagatctaaatgcccacacaagtaattatgtggtcccaatgacctggccc

SEQ ID NO: 427743 - DNA, 59 bp, Artificial
  Synthetic oligonucleotide
gggcttaggtctagatgtccacataaataattatgtgggcctagagacctggcccacat

SEQ ID NO: 427744 - DNA, 60 bp, Artificial
  Synthetic oligonucleotide
gggcttaggttctgagattgaggtcgccctagcctccagatataggttggagggcagcta

SEQ ID NO: 427745 - DNA, 60 bp, Artificial
  Synthetic oligonucleotide
gggcttagttgcatctacatgcattgtggctttgattgaaaaatttcttgtgactatgtc

SEQ ID NO: 427746 - DNA, 59 bp, Artificial
  Synthetic oligonucleotide
gggcttatagtattggagattggggacaatatatatgcgagaagatatttgggttagat

SEQ ID NO: 427747 - DNA, 60 bp, Artificial
  Synthetic oligonucleotide
gggcttatcatgtccgcaacaacccttccgctccaccctaggtaatgcgtgatttctgca

SEQ ID NO: 427748 - DNA, 55 bp, Artificial
  Synthetic oligonucleotide
gggcttatccaaagctgagaaactgctagtgcggacaagttcactcagaagggaa

SEQ ID NO: 427749 - DNA, 55 bp, Artificial
  Synthetic oligonucleotide
gggcttatcccctatccatgtccaatatatggctatataaactctgcctatcccc

SEQ ID NO: 427750 - DNA, 56 bp, Artificial
  Synthetic oligonucleotide
gggcttatggtttggtgcattgaaaatggaacctcgccaaatgtcaacggagtttg

SEQ ID NO: 427751 - DNA, 60 bp, Artificial
  Synthetic oligonucleotide
gggcttatttatcgttgagaaattgactgagcgtagaactgggtatggccctgcaatagc

SEQ ID NO: 427752 - DNA, 55 bp, Artificial
  Synthetic oligonucleotide
gggcttcaaccccttcgcaataaactaggcctacgaatttcacttgagtggagtc

SEQ ID NO: 427753 - DNA, 55 bp, Artificial
  Synthetic oligonucleotide
gggcttcaacctcttgggataaattagcgagattaatcgcaaatgctatcgaccc

SEQ ID NO: 427754 - DNA, 55 bp, Artificial
  Synthetic oligonucleotide
gggcttcactgcgcaaccatgcttggagaattagcaggtgagcgctatagccatg

SEQ ID NO: 427755 - DNA, 55 bp, Artificial
  Synthetic oligonucleotide
gggcttcagctcctttatcgcaccccaggacattaccctcgcttgctcgcagagc

SEQ ID NO: 427756 - DNA, 55 bp, Artificial
  Synthetic oligonucleotide
gggcttcatttgaagccgcgttttcggtagtctggtcagaggctaccacctcgaa

SEQ ID NO: 427757 - DNA, 58 bp, Artificial
  Synthetic oligonucleotide
gggcttccaaagagatggagaggtttggcctgagtgacgccctgttagagaccaaaga

SEQ ID NO: 427758 - DNA, 55 bp, Artificial
  Synthetic oligonucleotide
gggcttccacgactgttttcctatatccatgcgcaaattggcacaacgccagctt

SEQ ID NO: 427759 - DNA, 54 bp, Artificial
  Synthetic oligonucleotide
gggcttccatatgtcaagaaaggtctacgccggactgacctgtggaacccaaaa

SEQ ID NO: 427760 - DNA, 57 bp, Artificial
  Synthetic oligonucleotide
gggcttcccaagaggccacgaaagagcttctctcagattgggttctgaccattttaa

SEQ ID NO: 427761 - DNA, 60 bp, Artificial
  Synthetic oligonucleotide
gggcttccgatagcaatgaatgtatctcagtgagtctggttgatagattgccagctcaac

SEQ ID NO: 427762 - DNA, 60 bp, Artificial
  Synthetic oligonucleotide
gggcttcgcatatgacacccgctgttttgactcaacggtcaccgagaatgatatccgtgt

SEQ ID NO: 427763 - DNA, 55 bp, Artificial
  Synthetic oligonucleotide
gggcttctcgtctgccacaaatcccaccagaactgcattgaacatgatgcaatcc

SEQ ID NO: 427764 - DNA, 55 bp, Artificial
  Synthetic oligonucleotide
gggcttctggactggctaggtgggcctatgaaggccatactgaagatactgggct

SEQ ID NO: 427765 - DNA, 50 bp, Artificial
  Synthetic oligonucleotide
gggcttcttagtgggacctctccagagtctcctttgctagctgatcgttt

SEQ ID NO: 427766 - DNA, 53 bp, Artificial
  Synthetic oligonucleotide
gggcttcttccgtggaacgaaagtacccttctcccactgacacaatgggtcct

SEQ ID NO: 427767 - DNA, 55 bp, Artificial
  Synthetic oligonucleotide
gggcttctttatcgtccttagcgacggtataagggtttgcagtcaatgcataacg

SEQ ID NO: 427768 - DNA, 51 bp, Artificial
  Synthetic oligonucleotide
gggcttgaacacaggttccaagcggcgtgtaactggacccgtggggacaga

SEQ ID NO: 427769 - DNA, 55 bp, Artificial
  Synthetic oligonucleotide
gggcttgagcaaggagaactctcgcaccactgagttcatgataaagctacgatca

SEQ ID NO: 427770 - DNA, 54 bp, Artificial
  Synthetic oligonucleotide
gggcttgatccgtaaaatattgggcctgttaaggtctgggtacgtcgcgcgatt

SEQ ID NO: 427771 - DNA, 55 bp, Artificial
  Synthetic oligonucleotide
gggcttgatgcttcccgctttgaccagcactgtagtgctgatgcgttaaggtggg

SEQ ID NO: 427772 - DNA, 55 bp, Artificial
  Synthetic oligonucleotide
gggcttgcagcctatactttaactccccggcctattattcatgctgtcgctcctg

SEQ ID NO: 427773 - DNA, 55 bp, Artificial
  Synthetic oligonucleotide
gggcttgccctggaatgttgtgcgtattaagatcgtacaaatgctcagtgacacg

SEQ ID NO: 427774 - DNA, 55 bp, Artificial
  Synthetic oligonucleotide
gggcttgcggcttacaccttgactccccggcctattatccatgctgttgcccctg

SEQ ID NO: 427775 - DNA, 60 bp, Artificial
  Synthetic oligonucleotide
gggcttgctaggagtaacagagttcacaataacctgatcccagatcaactgcacagaccg

SEQ ID NO: 427776 - DNA, 55 bp, Artificial
  Synthetic oligonucleotide
gggcttggaagcccaaatcttaatgttgaggcggatctgataagcttcctctccc

SEQ ID NO: 427777 - DNA, 53 bp, Artificial
  Synthetic oligonucleotide
gggcttggcaccatacattgcagaaacagcacttcggaatctctatcttggag

SEQ ID NO: 427778 - DNA, 55 bp, Artificial
  Synthetic oligonucleotide
gggcttggccagaacatgatggagacacaatgtcctgcaccacatcaatagaaga

SEQ ID NO: 427779 - DNA, 55 bp, Artificial
  Synthetic oligonucleotide
gggcttgggttcttgcaacccgagctccttccaatactcccagccctgacggctg

SEQ ID NO: 427780 - DNA, 55 bp, Artificial
  Synthetic oligonucleotide
gggcttggtagtgaattgggctgttatacaatcaacagagtaagatcctacaagc

SEQ ID NO: 427781 - DNA, 55 bp, Artificial
  Synthetic oligonucleotide
gggcttgtgccggctgtactattagccctggggtagtccgctaccaatttaccgc

SEQ ID NO: 427782 - DNA, 55 bp, Artificial
  Synthetic oligonucleotide
gggcttgttcgctcaatggtggtcgcggacaacggtgaattacttagtgagggag

SEQ ID NO: 427783 - DNA, 59 bp, Artificial
  Synthetic oligonucleotide
gggcttgttgacacaacaaacaccgtgattaagattgcgctgactaggaggccactcgg

SEQ ID NO: 427784 - DNA, 60 bp, Artificial
  Synthetic oligonucleotide
gggctttaatcccagatctctcgacctccagcctccatctgccacatcaatggtcatcgc

SEQ ID NO: 427785 - DNA, 53 bp, Artificial
  Synthetic oligonucleotide
gggctttacaggtacgaaaacggtgagtataagcgtctttttgagtacgtgat

SEQ ID NO: 427786 - DNA, 59 bp, Artificial
  Synthetic oligonucleotide
gggctttacccttgaactggatgagagcatggaggtgcagagacccatcctggtgtttt

SEQ ID NO: 427787 - DNA, 55 bp, Artificial
  Synthetic oligonucleotide
gggctttactggtgacttcgattcagtcatcgactgtaacacatgtgtcacccag

SEQ ID NO: 427788 - DNA, 55 bp, Artificial
  Synthetic oligonucleotide
gggctttcaacagccatgaaaagtctgggtgcaaactcggtccaggaaggtgcag

SEQ ID NO: 427789 - DNA, 51 bp, Artificial
  Synthetic oligonucleotide
gggctttccgctgaatacaacgatgcgcgctaacccgtttgtggccacacc

SEQ ID NO: 427790 - DNA, 55 bp, Artificial
  Synthetic oligonucleotide
gggctttgctataatgggtggcaagtggtcaaaatgtggtatgggtggatggcct

SEQ ID NO: 427791 - DNA, 55 bp, Artificial
  Synthetic oligonucleotide
gggctttgtacttcctggctataagtatgttgggcctggtaacggccttgataaa

SEQ ID NO: 427792 - DNA, 55 bp, Artificial
  Synthetic oligonucleotide
gggctttgtgtcatgtggcctggtggatttgaagtacacgtacaaccgtacgtgt

SEQ ID NO: 427793 - DNA, 51 bp, Artificial
  Synthetic oligonucleotide
ggggaaaaggaagcctgtagatactgctaaggaagacacaaactcaaggca

SEQ ID NO: 427794 - DNA, 53 bp, Artificial
  Synthetic oligonucleotide
ggggaaaatctatacgtataatggagagacaccaaacgctaataccgggtatt

SEQ ID NO: 427795 - DNA, 60 bp, Artificial
  Synthetic oligonucleotide
ggggaaaattgtccacattagcccattgtcaggaagtgctcagcatatagaagaatgttc

SEQ ID NO: 427796 - DNA, 54 bp, Artificial
  Synthetic oligonucleotide
ggggaaacaatacctgcagagttatatttaaagggtagcaatggtagagaaccc

SEQ ID NO: 427797 - DNA, 55 bp, Artificial
  Synthetic oligonucleotide
ggggaaacagaggagaatgcagcagcatttctaaagtctaacaaccaggcaaagc

SEQ ID NO: 427798 - DNA, 50 bp, Artificial
  Synthetic oligonucleotide
ggggaaacggtgctcagggcttctgcgcagcacttaagagaagctatttc

SEQ ID NO: 427799 - DNA, 55 bp, Artificial
  Synthetic oligonucleotide
ggggaaactacgcttagagactactttgtctttcaaatatgactactccctctca

SEQ ID NO: 427800 - DNA, 55 bp, Artificial
  Synthetic oligonucleotide
ggggaaactcgtcccgctggtgacctacagcctgacgggtctttggtccctagca

SEQ ID NO: 427801 - DNA, 52 bp, Artificial
  Synthetic oligonucleotide
ggggaaactttacggggctttagtcttctacggcacctaacttcactcctga

SEQ ID NO: 427802 - DNA, 55 bp, Artificial
  Synthetic oligonucleotide
ggggaaagaagttactagcactctttgctgatgacagcttcactgccaatcggat

SEQ ID NO: 427803 - DNA, 51 bp, Artificial
  Synthetic oligonucleotide
ggggaaagacatatctgatttacgattgaccgaaggcttgatagcgaaaat

SEQ ID NO: 427804 - DNA, 55 bp, Artificial
  Synthetic oligonucleotide
ggggaaagaggtccgtggttattccaacacatgcacaaaaggacatggttgggcg

SEQ ID NO: 427805 - DNA, 60 bp, Artificial
  Synthetic oligonucleotide
ggggaaagctactcacgccaccgctgcgcacatttggctcagacaccccctacattcaga

SEQ ID NO: 427806 - DNA, 54 bp, Artificial
  Synthetic oligonucleotide
ggggaaagggacatgaagaaccccggatgattactagcttgggatggaacctcg

SEQ ID NO: 427807 - DNA, 51 bp, Artificial
  Synthetic oligonucleotide
ggggaaatagatcgttaaaggtagatttctccgtattgttaaccttagtta

SEQ ID NO: 427808 - DNA, 52 bp, Artificial
  Synthetic oligonucleotide
ggggaaatatgtcctgcttgcgttagctataattattggtgtcctgatcctt

SEQ ID NO: 427809 - DNA, 53 bp, Artificial
  Synthetic oligonucleotide
ggggaaatcttgttacaacaaggacatgtcgcacctaaccttccaggtttacc

SEQ ID NO: 427810 - DNA, 55 bp, Artificial
  Synthetic oligonucleotide
ggggaaatgaaagactataatgtaggtggacgaaatcgattagttagcgttagag

SEQ ID NO: 427811 - DNA, 55 bp, Artificial
  Synthetic oligonucleotide
ggggaaatgcattctactctattttaggatacgaagcaacaaaactacaggggca

SEQ ID NO: 427812 - DNA, 60 bp, Artificial
  Synthetic oligonucleotide
ggggaaatgccaatcaacagaaggcatccgcaggccagatcagtgtgcaacctacattct

SEQ ID NO: 427813 - DNA, 55 bp, Artificial
  Synthetic oligonucleotide
ggggaaatggtcgcacccgacgcatcatccatgaagcaacacttcgtgagacccc

SEQ ID NO: 427814 - DNA, 53 bp, Artificial
  Synthetic oligonucleotide
ggggaaattcctggttggggagaaccataagcaaagactcaaggtcgggatac

SEQ ID NO: 427815 - DNA, 55 bp, Artificial
  Synthetic oligonucleotide
ggggaaatttcgaagatacgataagcctatgtgcatattatgatttaatcggctg

SEQ ID NO: 427816 - DNA, 54 bp, Artificial
  Synthetic oligonucleotide
ggggaacaaagtcgttaatattaaatctcatcctgtccaccgcccaggagggcg

SEQ ID NO: 427817 - DNA, 58 bp, Artificial
  Synthetic oligonucleotide
ggggaacaaatgctgataatttggggaatacatcaccccaatgatgataccgaacaaa

SEQ ID NO: 427818 - DNA, 54 bp, Artificial
  Synthetic oligonucleotide
ggggaacaaatgttgcgaaatttgtacactgaaattgtgtatacaccaatcgca

SEQ ID NO: 427819 - DNA, 55 bp, Artificial
  Synthetic oligonucleotide
ggggaacaccagtcaacagagagcatctgcaggacagataagtgtgcaacccact

SEQ ID NO: 427820 - DNA, 55 bp, Artificial
  Synthetic oligonucleotide
ggggaacaccatcacatgctatgtaaaagccctagcggcttgcaaggctgcgggg

SEQ ID NO: 427821 - DNA, 54 bp, Artificial
  Synthetic oligonucleotide
ggggaacactgggatgttgccccacgctgtaaggatcaggagcctcaatacaat

SEQ ID NO: 427822 - DNA, 52 bp, Artificial
  Synthetic oligonucleotide
ggggaacagtacctttggtgtagacacccagaaggacactacccatacaggc

SEQ ID NO: 427823 - DNA, 55 bp, Artificial
  Synthetic oligonucleotide
ggggaacagtccacgcgacgtggtgatcttgccacccttgcacaaggggtgagca

SEQ ID NO: 427824 - DNA, 57 bp, Artificial
  Synthetic oligonucleotide
ggggaaccccggggggcgttgatcctgtctggtctactctatctccatcactgtgcc

SEQ ID NO: 427825 - DNA, 53 bp, Artificial
  Synthetic oligonucleotide
ggggaacccggagcacgcacccaaaaacactaaacacacaaacccagaatatc

SEQ ID NO: 427826 - DNA, 53 bp, Artificial
  Synthetic oligonucleotide
ggggaacctacctagtggaaaagcctaatctgaacagtaaagggtcagagttg

SEQ ID NO: 427827 - DNA, 58 bp, Artificial
  Synthetic oligonucleotide
ggggaaccttgtggaatagtgatgtctctaccaacaagtgggaccgctgtggtggata

SEQ ID NO: 427828 - DNA, 55 bp, Artificial
  Synthetic oligonucleotide
ggggaacgagtgaaagacgcgaaggaattggtgtggatggatctttcgctggcga

SEQ ID NO: 427829 - DNA, 57 bp, Artificial
  Synthetic oligonucleotide
ggggaacgctattgagaagaagatccttaaagtttctgccacaccacctgggcgtga

SEQ ID NO: 427830 - DNA, 53 bp, Artificial
  Synthetic oligonucleotide
ggggaacgctgctgaagtcgtaaacctattgcttgagtcgtgcgaacaagtct

SEQ ID NO: 427831 - DNA, 50 bp, Artificial
  Synthetic oligonucleotide
ggggaacggctgatgaggcagcgctaattcagcgctatgagtcattacaa

SEQ ID NO: 427832 - DNA, 57 bp, Artificial
  Synthetic oligonucleotide
ggggaacgggatatgggtggtcgccccatgagaacatatgtcccattcaccacctcg

SEQ ID NO: 427833 - DNA, 58 bp, Artificial
  Synthetic oligonucleotide
ggggaacgggttgtccatccagcttacggctaaaatggtcagtcatgcttcaaaggca

SEQ ID NO: 427834 - DNA, 55 bp, Artificial
  Synthetic oligonucleotide
ggggaactacattaacgccaattatgtagatggcttcgaacgtagcaagaagttc

SEQ ID NO: 427835 - DNA, 54 bp, Artificial
  Synthetic oligonucleotide
ggggaactagaaggaggctggattcagttggactcaagagtataatgtacgaac

SEQ ID NO: 427836 - DNA, 52 bp, Artificial
  Synthetic oligonucleotide
ggggaactagagatcacgaattatggcggaacatatacagcgcataccaatg

SEQ ID NO: 427837 - DNA, 54 bp, Artificial
  Synthetic oligonucleotide
ggggaactcgtgtttcaaacaagcgtccaaggccttatactgggcgctaccatc

SEQ ID NO: 427838 - DNA, 50 bp, Artificial
  Synthetic oligonucleotide
ggggaactctttacgaatcatagagaggtactcttgctttgaagtggagt

SEQ ID NO: 427839 - DNA, 50 bp, Artificial
  Synthetic oligonucleotide
ggggaactgacaaggaattgcctccagcagaaacctattatctacaaccc

SEQ ID NO: 427840 - DNA, 55 bp, Artificial
  Synthetic oligonucleotide
ggggaactgagacttccgtggagtgcaccatccgctggacatctcaactggtcgt

SEQ ID NO: 427841 - DNA, 54 bp, Artificial
  Synthetic oligonucleotide
ggggaactgccggccgtaccacggctggttttgctagtctcttcacacgaggcg

SEQ ID NO: 427842 - DNA, 55 bp, Artificial
  Synthetic oligonucleotide
ggggaactgtacaaggcgccagaaggaccaggtggactcggcccaagagttggaa

SEQ ID NO: 427843 - DNA, 51 bp, Artificial
  Synthetic oligonucleotide
ggggaactgtcggccacaccgtgtctgggattgctggtctcttcaaatcag

SEQ ID NO: 427844 - DNA, 58 bp, Artificial
  Synthetic oligonucleotide
ggggaagaaatgcaccatattctattgttggcccaacagatggaaaggttcctcatag

SEQ ID NO: 427845 - DNA, 53 bp, Artificial
  Synthetic oligonucleotide
ggggaagacccatcgggtcctccctgagctcatccgtcaatgtgtggagcggc

SEQ ID NO: 427846 - DNA, 55 bp, Artificial
  Synthetic oligonucleotide
ggggaagagatagcctcccctccgaagcaggagaagaaagacagggaaccttcaa

SEQ ID NO: 427847 - DNA, 58 bp, Artificial
  Synthetic oligonucleotide
ggggaagagtgtgtgttctgagatgcttgctagaatgctttcctataccctggttggt

SEQ ID NO: 427848 - DNA, 60 bp, Artificial
  Synthetic oligonucleotide
ggggaagatacacactagtagagaattcgcgagcggatttcaagcactctcaaaactctc

SEQ ID NO: 427849 - DNA, 52 bp, Artificial
  Synthetic oligonucleotide
ggggaagatcaggtgatttgttggacagaagaacatctagacgcggtttcac

SEQ ID NO: 427850 - DNA, 55 bp, Artificial
  Synthetic oligonucleotide
ggggaagatcatgacctcccaggtgaagagatagcaacataccagatctcaggtc

SEQ ID NO: 427851 - DNA, 55 bp, Artificial
  Synthetic oligonucleotide
ggggaagatgttagtttggagtttgcacacaatactatacatcagcctccagatg

SEQ ID NO: 427852 - DNA, 55 bp, Artificial
  Synthetic oligonucleotide
ggggaagccaacccctcctgtgctgccggtcactgtaacccactagaactaataa

SEQ ID NO: 427853 - DNA, 60 bp, Artificial
  Synthetic oligonucleotide
ggggaagccatgcatggacaagtggattgtagtccagggatgtggcaattagattgcaca

SEQ ID NO: 427854 - DNA, 58 bp, Artificial
  Synthetic oligonucleotide
ggggaagccggaagaaaagacgatatggacctcaagtagctccattgtgatgtgtgga

SEQ ID NO: 427855 - DNA, 55 bp, Artificial
  Synthetic oligonucleotide
ggggaagcctcatgaaacacacgtgaggattgataggcgaaagaacctggatagg

SEQ ID NO: 427856 - DNA, 55 bp, Artificial
  Synthetic oligonucleotide
ggggaagcctttggtagtggatttgtagatagtgttaaggatcaaattaatgcta

SEQ ID NO: 427857 - DNA, 52 bp, Artificial
  Synthetic oligonucleotide
ggggaagctaaaagttcacgctaatccctttgaactcctgaggaagatccaa

SEQ ID NO: 427858 - DNA, 50 bp, Artificial
  Synthetic oligonucleotide
ggggaagctatgcttgcaaaaggggacctgataacagtttcttcagtaga

SEQ ID NO: 427859 - DNA, 52 bp, Artificial
  Synthetic oligonucleotide
ggggaagctgaaggcaatgccgtagtgccggacctttgttcccgctgcgttg

SEQ ID NO: 427860 - DNA, 53 bp, Artificial
  Synthetic oligonucleotide
ggggaaggactagaggttagtggagaccccgtgccacaaaacaccacaacaaa

SEQ ID NO: 427861 - DNA, 55 bp, Artificial
  Synthetic oligonucleotide
ggggaaggaggcggaacacgtcactaagaatcggaaagaatgggctgtccaacga

SEQ ID NO: 427862 - DNA, 54 bp, Artificial
  Synthetic oligonucleotide
ggggaaggccgctatatgcggcaggtacctctttaactgggccgttaagaccaa

SEQ ID NO: 427863 - DNA, 51 bp, Artificial
  Synthetic oligonucleotide
ggggaagggtcgcccagaccgtgagaagcttcactagcatcttcgaaccgg

SEQ ID NO: 427864 - DNA, 59 bp, Artificial
  Synthetic oligonucleotide
ggggaaggtatctcgatggatcaggtctttacaccgccgcgttctatacgggcagatca

SEQ ID NO: 427865 - DNA, 51 bp, Artificial
  Synthetic oligonucleotide
ggggaaggtgtggtctgtatatgtggctaagtttatagatggtacagaaaa

SEQ ID NO: 427866 - DNA, 58 bp, Artificial
  Synthetic oligonucleotide
ggggaaggttactaaatcaatagagttgaatgcacccaattctcattatgaggaatgt

SEQ ID NO: 427867 - DNA, 60 bp, Artificial
  Synthetic oligonucleotide
ggggaagtaagaaatgatgatgttgatcagagtctaatcatcgctgcaaggaacattgta

SEQ ID NO: 427868 - DNA, 57 bp, Artificial
  Synthetic oligonucleotide
ggggaagtactgctcgcgttcctgtcagtctgccgacgtcgcgaggattaccttcag

SEQ ID NO: 427869 - DNA, 55 bp, Artificial
  Synthetic oligonucleotide
ggggaagtgaacctgattggacgaaaccagaagacctcatttgcataccacgcaa

SEQ ID NO: 427870 - DNA, 58 bp, Artificial
  Synthetic oligonucleotide
ggggaagtggaaagcagccaagggaacatgttttgcgagccagagctgttttggcttg

SEQ ID NO: 427871 - DNA, 51 bp, Artificial
  Synthetic oligonucleotide
ggggaagtggaacaaacaattatggagtaaagggattcggttttagacaag

SEQ ID NO: 427872 - DNA, 56 bp, Artificial
  Synthetic oligonucleotide
ggggaagtggactatctaggtgctttttataaggatgggccacataaacattacta

SEQ ID NO: 427873 - DNA, 60 bp, Artificial
  Synthetic oligonucleotide
ggggaagtgtttaacatgtttgacaatgaaccgagcacagcaacggtgaagaacatgcat

SEQ ID NO: 427874 - DNA, 55 bp, Artificial
  Synthetic oligonucleotide
ggggaataaccacagattcaaatacaggatggaatctgaccgcattgaatactcc

SEQ ID NO: 427875 - DNA, 55 bp, Artificial
  Synthetic oligonucleotide
ggggaatactgtcctgctggttctcacaaacgccgacaaagggaaagcgtaattc

SEQ ID NO: 427876 - DNA, 55 bp, Artificial
  Synthetic oligonucleotide
ggggaataggaggatatattaatgttcaggcatacccagggatagaaattaagct

SEQ ID NO: 427877 - DNA, 55 bp, Artificial
  Synthetic oligonucleotide
ggggaatatgaatccgtgtacggcatgcctaggttgaaggaaaacgtccgtcacc

SEQ ID NO: 427878 - DNA, 60 bp, Artificial
  Synthetic oligonucleotide
ggggaatccttgaggatgaacagatgtatcaaaagtgctgcaatctattcgagaaattct

SEQ ID NO: 427879 - DNA, 55 bp, Artificial
  Synthetic oligonucleotide
ggggaatcggagaccagatagagcagctcgtcgaggaccgagccgacgagatcat

SEQ ID NO: 427880 - DNA, 60 bp, Artificial
  Synthetic oligonucleotide
ggggaatctcgtgtagttattcaggattatgacaaccaacatgagcaggaccgaccgaca

SEQ ID NO: 427881 - DNA, 55 bp, Artificial
  Synthetic oligonucleotide
ggggaatgaaagaccccaccataaggcttagcaagctagctgcagtaacgccatt

SEQ ID NO: 427882 - DNA, 55 bp, Artificial
  Synthetic oligonucleotide
ggggaatgaagtaggtggagacggagggtctggccaaataagttgcagcccagtg

SEQ ID NO: 427883 - DNA, 60 bp, Artificial
  Synthetic oligonucleotide
ggggaatgagcacagtgactttctctctgaaagccttatatgatcagtacctcaaacacc

SEQ ID NO: 427884 - DNA, 60 bp, Artificial
  Synthetic oligonucleotide
ggggaatgcaacgtccgttgtgcagaacttcaatattcagggtgatggtaatcacttctc

SEQ ID NO: 427885 - DNA, 54 bp, Artificial
  Synthetic oligonucleotide
ggggaatgggtccttatttatagttgaggacctaaatggcatattcgtaattat

SEQ ID NO: 427886 - DNA, 55 bp, Artificial
  Synthetic oligonucleotide
ggggaatgggtctcaatatataggtgaggacctaaatggcatggattgtaatttc

SEQ ID NO: 427887 - DNA, 52 bp, Artificial
  Synthetic oligonucleotide
ggggaatggtactcaatttataggtgagtaccgaatggcactttggtaattc

SEQ ID NO: 427888 - DNA, 57 bp, Artificial
  Synthetic oligonucleotide
ggggaatgtcttggatcacacaagggctaatgggggccctactactctggatgggcg

SEQ ID NO: 427889 - DNA, 55 bp, Artificial
  Synthetic oligonucleotide
ggggaatgtgaaagctgcctgtgcagcctgatcatcgcttaatcttgtgtcacgt

SEQ ID NO: 427890 - DNA, 60 bp, Artificial
  Synthetic oligonucleotide
ggggaatgtggcaactagcgaggagttctcagatgcgacaacacagttgttagaagtaac

SEQ ID NO: 427891 - DNA, 55 bp, Artificial
  Synthetic oligonucleotide
ggggaattcaacttgttgggaatgatccagttgattaaagcttgtgaaacatgcc

SEQ ID NO: 427892 - DNA, 55 bp, Artificial
  Synthetic oligonucleotide
ggggaattcatcacccttcaagcacacaagaaaagaatgatctgtatggaacaca

SEQ ID NO: 427893 - DNA, 55 bp, Artificial
  Synthetic oligonucleotide
ggggaattcatcattctggatcgactactgaacagaccaaactctatgggagtgg

SEQ ID NO: 427894 - DNA, 53 bp, Artificial
  Synthetic oligonucleotide
ggggaattcatggtaaagaatcccccgatcttcccccggtcatgtaattcgct

SEQ ID NO: 427895 - DNA, 53 bp, Artificial
  Synthetic oligonucleotide
ggggaattctagtgccccaaatcctataactgcttctagttggataaattccg

SEQ ID NO: 427896 - DNA, 60 bp, Artificial
  Synthetic oligonucleotide
ggggaattgaacatatcgacaatgtgatgggaatgattgggatattaccagacatgaccc

SEQ ID NO: 427897 - DNA, 60 bp, Artificial
  Synthetic oligonucleotide
ggggaattgaacccatcgacaatgtgatgggaatgatcggaatattgcccgacatgaccc

SEQ ID NO: 427898 - DNA, 58 bp, Artificial
  Synthetic oligonucleotide
ggggaattgacgagtctaggcacctgggtgggtaataatttggacgatcaagcatcca

SEQ ID NO: 427899 - DNA, 50 bp, Artificial
  Synthetic oligonucleotide
ggggaattgcaatattgccattggccccattaaatttcgctagtgagtcc

SEQ ID NO: 427900 - DNA, 55 bp, Artificial
  Synthetic oligonucleotide
ggggaatttggttgccactggatatccacgaatgatggtgactgtggtaatccac

SEQ ID NO: 427901 - DNA, 60 bp, Artificial
  Synthetic oligonucleotide
ggggaatttttctactgcaatacatcaggattgtttaataatagtgtatggagcaatgat

SEQ ID NO: 427902 - DNA, 53 bp, Artificial
  Synthetic oligonucleotide
ggggaatttttctactgtaactcaacaccactgtttaatagtacttggaatag

SEQ ID NO: 427903 - DNA, 55 bp, Artificial
  Synthetic oligonucleotide
ggggacaacaagcagagtgtgcaccatgaaacaaatgaacaagctatgattgctc

SEQ ID NO: 427904 - DNA, 53 bp, Artificial
  Synthetic oligonucleotide
ggggacaaccaagtgttgtgtcccacttatatgctgtcttctggcctcaataa

SEQ ID NO: 427905 - DNA, 60 bp, Artificial
  Synthetic oligonucleotide
ggggacaagaacttaagcaaagtgctattagcttgctagactgtgttgctgtatggactg

SEQ ID NO: 427906 - DNA, 60 bp, Artificial
  Synthetic oligonucleotide
ggggacaagaataagatttaaggatgacacatcatttgaggatatcaatggcattaggag

SEQ ID NO: 427907 - DNA, 60 bp, Artificial
  Synthetic oligonucleotide
ggggacaagaattcgattcaaagatgattcatcctatgaggaagtcaatggaatacgtaa

SEQ ID NO: 427908 - DNA, 57 bp, Artificial
  Synthetic oligonucleotide
ggggacaagagtagttcctagaggacaactatccaccagaggagttcaaattgcttc

SEQ ID NO: 427909 - DNA, 55 bp, Artificial
  Synthetic oligonucleotide
ggggacaaggagcagttttaataaaacatccagagcatgggtatatgctcatccc

SEQ ID NO: 427910 - DNA, 55 bp, Artificial
  Synthetic oligonucleotide
ggggacaatcccaggcctgtggatggcataggctcatgtaacagtccagtcaaca

SEQ ID NO: 427911 - DNA, 59 bp, Artificial
  Synthetic oligonucleotide
ggggacaatgaagagtcagctagtgacaaagcacgtggccaaaggggagtgtcggcact

SEQ ID NO: 427912 - DNA, 50 bp, Artificial
  Synthetic oligonucleotide
ggggacaatgggggccaacgcgtaaacgtctctgccgttgtgggtgcaca

SEQ ID NO: 427913 - DNA, 58 bp, Artificial
  Synthetic oligonucleotide
ggggacacaccctaacatgatcgaggtcagaaggaacgccctcgtgagacctaggaga

SEQ ID NO: 427914 - DNA, 55 bp, Artificial
  Synthetic oligonucleotide
ggggacacagaccaaaactggcaggatgcagttgaattggcacaaactcgtacag

SEQ ID NO: 427915 - DNA, 51 bp, Artificial
  Synthetic oligonucleotide
ggggacaccaaaatgggtatacaggatggcacacaccaacgggaccctcca

SEQ ID NO: 427916 - DNA, 55 bp, Artificial
  Synthetic oligonucleotide
ggggacacggtgaattgtccgattcaacattagttcaaccaacgctagatggacc

SEQ ID NO: 427917 - DNA, 56 bp, Artificial
  Synthetic oligonucleotide
ggggacactccgcatgacatactggttgtgtcgaactagaagagccgtgcaaggct

SEQ ID NO: 427918 - DNA, 55 bp, Artificial
  Synthetic oligonucleotide
ggggacactttgacactaccttgaaaatgtcgtccgtgctcaaagcatttgagcg

SEQ ID NO: 427919 - DNA, 59 bp, Artificial
  Synthetic oligonucleotide
ggggacaggcatagctgggggtatcacaggatctatgtccctcgcttcaggacgaagcc

SEQ ID NO: 427920 - DNA, 55 bp, Artificial
  Synthetic oligonucleotide
ggggacaggcatccttcgttgactttcttcgtgatgcattctataaattgatctg

SEQ ID NO: 427921 - DNA, 58 bp, Artificial
  Synthetic oligonucleotide
ggggacagtcacacccttcagaacccaagtatgctaaagctgaagtgtcacctttcca

SEQ ID NO: 427922 - DNA, 55 bp, Artificial
  Synthetic oligonucleotide
ggggacagtcatcccatatggtgaaatcaatctaagtggtaatcccacctgcaga

SEQ ID NO: 427923 - DNA, 53 bp, Artificial
  Synthetic oligonucleotide
ggggacataaattactcgaagaaaaggcttcctttattgatttctacgacgaa

SEQ ID NO: 427924 - DNA, 60 bp, Artificial
  Synthetic oligonucleotide
ggggacatagatgggatttgtgcaaatcctgtgctcagggagaaataataaagcatacta

SEQ ID NO: 427925 - DNA, 55 bp, Artificial
  Synthetic oligonucleotide
ggggacatctactccgcagtcgaggtggagaaggcatgcattcagttcaaccggc

SEQ ID NO: 427926 - DNA, 55 bp, Artificial
  Synthetic oligonucleotide
ggggacatctatttcgggtgtcctttggacagtataccatggggctggcaataag

SEQ ID NO: 427927 - DNA, 55 bp, Artificial
  Synthetic oligonucleotide
ggggacatgcgtcctgaccccaccaatccatacaacaggccatccattgaagccc

SEQ ID NO: 427928 - DNA, 55 bp, Artificial
  Synthetic oligonucleotide
ggggacatggaagggcgatggtgtctgccatactacgtgcccatgtggagcgggt

SEQ ID NO: 427929 - DNA, 55 bp, Artificial
  Synthetic oligonucleotide
ggggacatggcaacggggataacctatgcatcatacgggtacttctgccaaatgc

SEQ ID NO: 427930 - DNA, 55 bp, Artificial
  Synthetic oligonucleotide
ggggacatggttgatacagggtatggcgctatggactttaatgcactacaggcca

SEQ ID NO: 427931 - DNA, 55 bp, Artificial
  Synthetic oligonucleotide
ggggacatttatcacagcgtgtcccgagctcgaccccgcatattactcctgtgcc

SEQ ID NO: 427932 - DNA, 55 bp, Artificial
  Synthetic oligonucleotide
ggggaccaaactcaaatgacccatctatctaaaatgccgacgggctacgcgcccc

SEQ ID NO: 427933 - DNA, 53 bp, Artificial
  Synthetic oligonucleotide
ggggaccaaacttatacaacatccggaatcttcacattcccgaagtctgctta

SEQ ID NO: 427934 - DNA, 55 bp, Artificial
  Synthetic oligonucleotide
ggggaccacatctggactaccaaggtatgttgcccgtttgtcctctacttccagg

SEQ ID NO: 427935 - DNA, 57 bp, Artificial
  Synthetic oligonucleotide
ggggaccacggagctcgacgacttctacatgactctgtctatttcaagaatcaaaga

SEQ ID NO: 427936 - DNA, 54 bp, Artificial
  Synthetic oligonucleotide
ggggaccagatatgcattggataccatgccaataattccacagaaaaggtcgac

SEQ ID NO: 427937 - DNA, 55 bp, Artificial
  Synthetic oligonucleotide
ggggaccaggtgaaacgcctgattctacgttagtgcagccagtacttgatggacc

SEQ ID NO: 427938 - DNA, 55 bp, Artificial
  Synthetic oligonucleotide
ggggaccatagtctcagaccaatttacagatgaccattccaagcaaaggggtgga

SEQ ID NO: 427939 - DNA, 55 bp, Artificial
  Synthetic oligonucleotide
ggggaccatcccatgtgcaacctgtggagggaagtggtcacctctgcaaatctag

SEQ ID NO: 427940 - DNA, 57 bp, Artificial
  Synthetic oligonucleotide
ggggacccaacaccgccagattctataaagtcaccacaggcaccatgggtgtttgct

SEQ ID NO: 427941 - DNA, 54 bp, Artificial
  Synthetic oligonucleotide
ggggacccagtggagccatgggatgctcctcccgattccgtccaaccccacccc

SEQ ID NO: 427942 - DNA, 54 bp, Artificial
  Synthetic oligonucleotide
ggggacccattgtatattattaaccggctctgtattaaccggctctgtattaac

SEQ ID NO: 427943 - DNA, 59 bp, Artificial
  Synthetic oligonucleotide
ggggaccccaagggacagagatggcacacccttgttccgctcggcacagagaccatcac

SEQ ID NO: 427944 - DNA, 55 bp, Artificial
  Synthetic oligonucleotide
ggggaccccagactgtacaggcgttgtccgtgcttctctcctatgtactccaagg

SEQ ID NO: 427945 - DNA, 52 bp, Artificial
  Synthetic oligonucleotide
ggggaccccgatatgcacctcaaagtccgttatgttgccgttaaacctaaaa

SEQ ID NO: 427946 - DNA, 50 bp, Artificial
  Synthetic oligonucleotide
ggggacccggagtcaaagggtttggcttcaagacaggtgatgatgtatgg

SEQ ID NO: 427947 - DNA, 51 bp, Artificial
  Synthetic oligonucleotide
ggggaccctcattgtgatggtttccaagatgagacatgggacctcttcgtt

SEQ ID NO: 427948 - DNA, 60 bp, Artificial
  Synthetic oligonucleotide
ggggaccctgcaccgaatatggagaacatcgcatcaggactcctaggacccctgctcgtg

SEQ ID NO: 427949 - DNA, 52 bp, Artificial
  Synthetic oligonucleotide
ggggacctaataggcatggcccactacatgatggtcaatttcaagttggtga

SEQ ID NO: 427950 - DNA, 52 bp, Artificial
  Synthetic oligonucleotide
ggggacctaattaatttatccacctgggtgggtagtaatttagaagatccaa

SEQ ID NO: 427951 - DNA, 53 bp, Artificial
  Synthetic oligonucleotide
ggggacctctgtggtggcgtgtttctagtgggacaacttttcacgtttcgacc

SEQ ID NO: 427952 - DNA, 51 bp, Artificial
  Synthetic oligonucleotide
ggggaccttaatgacaacgggcaccacacccgttattgaaagggtagaacc

SEQ ID NO: 427953 - DNA, 55 bp, Artificial
  Synthetic oligonucleotide
ggggaccttcatacgtcgagtgtatgacctttgggccaacatgctgaagcgcgta

SEQ ID NO: 427954 - DNA, 53 bp, Artificial
  Synthetic oligonucleotide
ggggaccttccttgattgtcacaatctccatcatgatgtggttacatatcatc

SEQ ID NO: 427955 - DNA, 57 bp, Artificial
  Synthetic oligonucleotide
ggggacgaatctttctgttcccaacccatcatggggattctttccctgcatacatca

SEQ ID NO: 427956 - DNA, 55 bp, Artificial
  Synthetic oligonucleotide
ggggacgaggatggagaatctagccaggcgcctagatttgtgccaggaacagttg

SEQ ID NO: 427957 - DNA, 55 bp, Artificial
  Synthetic oligonucleotide
ggggacgatgtatggagaaaagtatccagtggtgttgatgctgtaggagtgtact

SEQ ID NO: 427958 - DNA, 60 bp, Artificial
  Synthetic oligonucleotide
ggggacgcaaacacactgcattctccagcaaagggcttagtgatgaggaatatgacgaat

SEQ ID NO: 427959 - DNA, 55 bp, Artificial
  Synthetic oligonucleotide
ggggacgcctgaagtaaggtaagagagacacctactggagagagtagggaagggc

SEQ ID NO: 427960 - DNA, 51 bp, Artificial
  Synthetic oligonucleotide
ggggacgcggagagagaaataattcccggattccccaaaataccctttatc

SEQ ID NO: 427961 - DNA, 55 bp, Artificial
  Synthetic oligonucleotide
ggggacgggagacaggttactaaatctagtacagggagcttaccaggcactcaac

SEQ ID NO: 427962 - DNA, 53 bp, Artificial
  Synthetic oligonucleotide
ggggacgggagctttattaaacagactccaggttgccattggacactggagct

SEQ ID NO: 427963 - DNA, 53 bp, Artificial
  Synthetic oligonucleotide
ggggacggtcagtcatcggaatgacagttccccatcctctagagatgttcggg

SEQ ID NO: 427964 - DNA, 54 bp, Artificial
  Synthetic oligonucleotide
ggggacgtaccttacacttacaatggcgggagtcacaaatctcagggttgggat

SEQ ID NO: 427965 - DNA, 52 bp, Artificial
  Synthetic oligonucleotide
ggggacgtagacggcgactttgaggttgaagattaccttcccaaaatcaacc

SEQ ID NO: 427966 - DNA, 53 bp, Artificial
  Synthetic oligonucleotide
ggggacgtccgcctgtggatggggatttgtccatgacgctgttgggcatctgc

SEQ ID NO: 427967 - DNA, 55 bp, Artificial
  Synthetic oligonucleotide
ggggacgtcgtggtttgtgccacggatgctcttatgacaggctacactggtgact

SEQ ID NO: 427968 - DNA, 55 bp, Artificial
  Synthetic oligonucleotide
ggggacgtgttgcactcctgtacggtcgaaaagagggtgcagcgtaagtttgttg

SEQ ID NO: 427969 - DNA, 52 bp, Artificial
  Synthetic oligonucleotide
ggggacgtgttgggaatgctgtcacagtcggcacagggacacgtgttgtccg

SEQ ID NO: 427970 - DNA, 54 bp, Artificial
  Synthetic oligonucleotide
ggggacgttaaggcgggatggctgagttagataggcggcgggctgcaaccccgt

SEQ ID NO: 427971 - DNA, 55 bp, Artificial
  Synthetic oligonucleotide
ggggacgttcgtatatacagcacaacagaagggtatcgtacaaaacacgctatgt

SEQ ID NO: 427972 - DNA, 60 bp, Artificial
  Synthetic oligonucleotide
ggggactaagagcactgtgtatactgagagataacatgactttaggaactcaagaattag

SEQ ID NO: 427973 - DNA, 55 bp, Artificial
  Synthetic oligonucleotide
ggggactagtgtgatgccagccacagcaaggtcctctttgatgcttgacaatttg

SEQ ID NO: 427974 - DNA, 54 bp, Artificial
  Synthetic oligonucleotide
ggggactatggctcacaccacggccgggctcaccgggatgttctcaactggctc

SEQ ID NO: 427975 - DNA, 54 bp, Artificial
  Synthetic oligonucleotide
ggggactcaattccagatcctttaagcccgggagaacgaggtatgcaagttaaa

SEQ ID NO: 427976 - DNA, 55 bp, Artificial
  Synthetic oligonucleotide
ggggactcactatgggcggaattgccgctggaattggaacagggactaccgccct

SEQ ID NO: 427977 - DNA, 52 bp, Artificial
  Synthetic oligonucleotide
ggggactcactgtagaacaacagtctggaaaactgagtgtggatactaaggc

SEQ ID NO: 427978 - DNA, 55 bp, Artificial
  Synthetic oligonucleotide
ggggactcagagcactatgtatactcagagataacatgcacctaggaactcaaga

SEQ ID NO: 427979 - DNA, 49 bp, Artificial
  Synthetic oligonucleotide
ggggactcataaattacctttcctaaaatacccccgtttttgtgtgtaa

SEQ ID NO: 427980 - DNA, 60 bp, Artificial
  Synthetic oligonucleotide
ggggactctagtgccgggtacaaccatgatgtgtctatcctgcgtgcttggatccggact

SEQ ID NO: 427981 - DNA, 60 bp, Artificial
  Synthetic oligonucleotide
ggggactgacaacagggcaacatgcttggcacctgggacatggagtgtccatagaatgga

SEQ ID NO: 427982 - DNA, 55 bp, Artificial
  Synthetic oligonucleotide
ggggactgatattgttaatcactttcacttgggtgatgatatggaccctgagcta

SEQ ID NO: 427983 - DNA, 55 bp, Artificial
  Synthetic oligonucleotide
ggggactgggtgattgcagcatttggggtgcaccatagtgtatcggaggcgtttc

SEQ ID NO: 427984 - DNA, 53 bp, Artificial
  Synthetic oligonucleotide
ggggactgtagcattgcaggttggctccttgggaatccagagtgtgacctcct

SEQ ID NO: 427985 - DNA, 56 bp, Artificial
  Synthetic oligonucleotide
ggggacttaacgaatctagccacctgggtgggtggtaatttggatgatccaacatc

SEQ ID NO: 427986 - DNA, 55 bp, Artificial
  Synthetic oligonucleotide
ggggacttccactacgtgacgggcatgactactgacaaccttaaatgcccgtgcc

SEQ ID NO: 427987 - DNA, 54 bp, Artificial
  Synthetic oligonucleotide
ggggacttctctaaattttctggtgggagcacccgtgtgtcttgaccaaaattc

SEQ ID NO: 427988 - DNA, 54 bp, Artificial
  Synthetic oligonucleotide
ggggactttccacagattctgaccaacttataaagcgtgttagacggaaatact

SEQ ID NO: 427989 - DNA, 55 bp, Artificial
  Synthetic oligonucleotide
ggggagaaagaattcctgtatgaacggagaaatatgaaaagggagcgcagaaaaa

SEQ ID NO: 427990 - DNA, 54 bp, Artificial
  Synthetic oligonucleotide
ggggagaaatcccacccagttgaggtagacatcgaggatgattggatcctcgtg

SEQ ID NO: 427991 - DNA, 60 bp, Artificial
  Synthetic oligonucleotide
ggggagaaattacgcaactcaacaggataagaacagaatggataggcgcgtcatatgata

SEQ ID NO: 427992 - DNA, 60 bp, Artificial
  Synthetic oligonucleotide
ggggagaacaatcagtaaagattcgcgctcaggttatgagacattcagggtcattggtgg

SEQ ID NO: 427993 - DNA, 57 bp, Artificial
  Synthetic oligonucleotide
ggggagaacacggcaccgaaagattcaaaacagacatcggtgaccccagcaccatac

SEQ ID NO: 427994 - DNA, 56 bp, Artificial
  Synthetic oligonucleotide
ggggagaagcaaatctccacctagaaagaatggtcacggcaaggctgtccagtaca

SEQ ID NO: 427995 - DNA, 55 bp, Artificial
  Synthetic oligonucleotide
ggggagaagctcaagttactaactatatttctcgtttgcgtacttggttgtcaac

SEQ ID NO: 427996 - DNA, 55 bp, Artificial
  Synthetic oligonucleotide
ggggagaagtagacagattaattttgatttcaagtggggattacacatttgggaa

SEQ ID NO: 427997 - DNA, 56 bp, Artificial
  Synthetic oligonucleotide
ggggagaattcgccgccaagtaaggacagagcaaaggtgttccaaggtctcacacg

SEQ ID NO: 427998 - DNA, 51 bp, Artificial
  Synthetic oligonucleotide
ggggagaatttcgcatacttggtagcctatcaagccacagtgtgcgctaga

SEQ ID NO: 427999 - DNA, 54 bp, Artificial
  Synthetic oligonucleotide
ggggagaatttggaatccatttgtcacacacagatgactccttgagtttgcaca

SEQ ID NO: 428000 - DNA, 57 bp, Artificial
  Synthetic oligonucleotide
ggggagacacggatgttgtaacagttgtgactttcgaatttagtagtacagatccca

SEQ ID NO: 428001 - DNA, 50 bp, Artificial
  Synthetic oligonucleotide
ggggagaccacaggagactagggtatggtggacctcaaacagtattgttg

SEQ ID NO: 428002 - DNA, 56 bp, Artificial
  Synthetic oligonucleotide
ggggagaccaggtcgaataatctgttattcgtgcagacgaatttcccttcgaactg

SEQ ID NO: 428003 - DNA, 55 bp, Artificial
  Synthetic oligonucleotide
ggggagaccatcaaatgagccaccgcctgatctccgacctgcaaacccgcgtgga

SEQ ID NO: 428004 - DNA, 55 bp, Artificial
  Synthetic oligonucleotide
ggggagacccaattcatgcaactctgccaagcgctagagatgacggaggtggacc

SEQ ID NO: 428005 - DNA, 55 bp, Artificial
  Synthetic oligonucleotide
ggggagacgctctcgatgatccatccgtgtacatcgggatgcctggtcccgatag

SEQ ID NO: 428006 - DNA, 54 bp, Artificial
  Synthetic oligonucleotide
ggggagactactcttcagcctgcacaagtagatatttcaacatcacatgaccct

SEQ ID NO: 428007 - DNA, 51 bp, Artificial
  Synthetic oligonucleotide
ggggagactcagttctcctcatgggctgtgacgcccaaccatcgcatgcgt

SEQ ID NO: 428008 - DNA, 55 bp, Artificial
  Synthetic oligonucleotide
ggggagactcttgtctggcagtttgatcccgtcctggcatattcatatgaggcct

SEQ ID NO: 428009 - DNA, 54 bp, Artificial
  Synthetic oligonucleotide
ggggagacttcctgtggcaccccagcctttacactccacgtcgcaaacgtaaac

SEQ ID NO: 428010 - DNA, 55 bp, Artificial
  Synthetic oligonucleotide
ggggagagaaagctcacttctctaggagttgatgtcagcggagaaagaatagtgc

SEQ ID NO: 428011 - DNA, 55 bp, Artificial
  Synthetic oligonucleotide
ggggagagacaacaactctatctcagaagcaggagccaatagacaaggaactaca

SEQ ID NO: 428012 - DNA, 60 bp, Artificial
  Synthetic oligonucleotide
ggggagagcagtgtaacaggtaaggtggaattaccaccccttctgctcacagatgcagag

SEQ ID NO: 428013 - DNA, 55 bp, Artificial
  Synthetic oligonucleotide
ggggagagcggaggaggccccaacttgataaggaccaatgcgcctactgcaaaga

SEQ ID NO: 428014 - DNA, 55 bp, Artificial
  Synthetic oligonucleotide
ggggagagcttttgcctccctagggaaacttctgagagaagtggagccaaagacc

SEQ ID NO: 428015 - DNA, 55 bp, Artificial
  Synthetic oligonucleotide
ggggagaggacgcgacttgtctcggactccttcggctttaagctcgaattcggaa

SEQ ID NO: 428016 - DNA, 56 bp, Artificial
  Synthetic oligonucleotide
ggggagagttagataatgtacctttaactatggccacatcgtcgtttaaatcatcc

SEQ ID NO: 428017 - DNA, 55 bp, Artificial
  Synthetic oligonucleotide
ggggagatactgtgtggggataggagagggattactgagtaaagatgtgcagctg

SEQ ID NO: 428018 - DNA, 60 bp, Artificial
  Synthetic oligonucleotide
ggggagatataggaattcacgtgtcacacacgggagactcactcagcctacacatcaagg

SEQ ID NO: 428019 - DNA, 55 bp, Artificial
  Synthetic oligonucleotide
ggggagatcaggtgcaattcagaatcttcagttctgagtgcccacgaatcatgcc

SEQ ID NO: 428020 - DNA, 55 bp, Artificial
  Synthetic oligonucleotide
ggggagatcgtaaacctgactgacataatgcttcaaacgcataaggacacgctgg

SEQ ID NO: 428021 - DNA, 55 bp, Artificial
  Synthetic oligonucleotide
ggggagatgaacgatactcctcaagacgacgaggcagagaagaaagatgtcgaaa

SEQ ID NO: 428022 - DNA, 55 bp, Artificial
  Synthetic oligonucleotide
ggggagatgctgacatagcgctattccatatatgggcatgtggtatttcgagtgc

SEQ ID NO: 428023 - DNA, 50 bp, Artificial
  Synthetic oligonucleotide
ggggagatggaaatgctattagacgggatgacattgataaaattccaact

SEQ ID NO: 428024 - DNA, 55 bp, Artificial
  Synthetic oligonucleotide
ggggagatggagatttatatttagagttaggaggtcagcaggatataactatacc

SEQ ID NO: 428025 - DNA, 57 bp, Artificial
  Synthetic oligonucleotide
ggggagatgttaatgtttacacaaaagttgtttacatgcatcccactaaggatatag

SEQ ID NO: 428026 - DNA, 60 bp, Artificial
  Synthetic oligonucleotide
ggggagcaagtcgacgtacgatatcatacagtatggcaataacattctagtgtacgtcgc

SEQ ID NO: 428027 - DNA, 54 bp, Artificial
  Synthetic oligonucleotide
ggggagcaagttgtcaaaaggatgggccgaggtaagggaaagaatgagacgaac

SEQ ID NO: 428028 - DNA, 58 bp, Artificial
  Synthetic oligonucleotide
ggggagcaatccacccacaatcgacgctaaagctcccacacaagagaggggaacgcaa

SEQ ID NO: 428029 - DNA, 55 bp, Artificial
  Synthetic oligonucleotide
ggggagcaatcctcatgcaagaaaccacttgtacgatggaaggatccatttacga

SEQ ID NO: 428030 - DNA, 57 bp, Artificial
  Synthetic oligonucleotide
ggggagcaatgtcatgctggccgtctgcaaacgcatgtgctttagggcaaccataga

SEQ ID NO: 428031 - DNA, 55 bp, Artificial
  Synthetic oligonucleotide
ggggagcattgtcgatatcaattgacgcccttttcagaaagaatgctggagtctc

SEQ ID NO: 428032 - DNA, 60 bp, Artificial
  Synthetic oligonucleotide
ggggagccatatgctgcatgccaaaaatgtattaaatttcatgctaaagtaagggaacta

SEQ ID NO: 428033 - DNA, 55 bp, Artificial
  Synthetic oligonucleotide
ggggagcccagatcctggtgtaaaaggatttgcattcctagatggagagaactca

SEQ ID NO: 428034 - DNA, 58 bp, Artificial
  Synthetic oligonucleotide
ggggagcccccctgactcgttttcgctcgggcttcttgtatccatgatcatggtacag

SEQ ID NO: 428035 - DNA, 54 bp, Artificial
  Synthetic oligonucleotide
ggggagccctactgcagggggctgagataccctaccgagagctcagacagtcgt

SEQ ID NO: 428036 - DNA, 52 bp, Artificial
  Synthetic oligonucleotide
ggggagccgaaggagtcaaccccaatggagttctttaagcataacccatgtg

SEQ ID NO: 428037 - DNA, 55 bp, Artificial
  Synthetic oligonucleotide
ggggagcctcggttgagcttcaagtatgaaggattgaccacgtggattggctcaa

SEQ ID NO: 428038 - DNA, 60 bp, Artificial
  Synthetic oligonucleotide
ggggagcctggggatcctgacttgagtgacgggtcgtggtccacaatgagtgacgagcca

SEQ ID NO: 428039 - DNA, 55 bp, Artificial
  Synthetic oligonucleotide
ggggagcgaatccaaaggcttggtagagttggtcgttgcaaacccggatttgcac

SEQ ID NO: 428040 - DNA, 56 bp, Artificial
  Synthetic oligonucleotide
ggggagcggggagtgatatttacgtcgaagaaccaaaggaatgatcaggatcgatt

SEQ ID NO: 428041 - DNA, 52 bp, Artificial
  Synthetic oligonucleotide
ggggagcgtgaatttttattgaggtattcggaacgagtcgaccttgttgttg

SEQ ID NO: 428042 - DNA, 51 bp, Artificial
  Synthetic oligonucleotide
ggggagctatgcgctacagtcttaggagggtaatccaaaaggaacccctcg

SEQ ID NO: 428043 - DNA, 51 bp, Artificial
  Synthetic oligonucleotide
ggggagctcattaacaccatgttcgaaaacgcatccacctggacatttact

SEQ ID NO: 428044 - DNA, 55 bp, Artificial
  Synthetic oligonucleotide
ggggagctgaagtgccagctcatcgccagtatgaactcgaagtcaaaatgcgtgg

SEQ ID NO: 428045 - DNA, 55 bp, Artificial
  Synthetic oligonucleotide
ggggaggagttgaaggcttaggactgcagaagcttgggtacatcttgaaggaagt

SEQ ID NO: 428046 - DNA, 53 bp, Artificial
  Synthetic oligonucleotide
ggggaggattagtcagagtgccattgtgtcgcaactccacacatgagatgtac

SEQ ID NO: 428047 - DNA, 60 bp, Artificial
  Synthetic oligonucleotide
ggggaggcaagaaagctagtgagagcatctaaaatatcggacctggatgcagcacaggtg

SEQ ID NO: 428048 - DNA, 54 bp, Artificial
  Synthetic oligonucleotide
ggggaggcaagctcgtgaccttttccatgtttgacaacccgagattttccaacg

SEQ ID NO: 428049 - DNA, 55 bp, Artificial
  Synthetic oligonucleotide
ggggaggcaggccacactatcctaggaccaaacccaagtaatgcacggggggcta

SEQ ID NO: 428050 - DNA, 50 bp, Artificial
  Synthetic oligonucleotide
ggggaggcatgttgactggtcaatcggaggctctcaatctttctatgcaa

SEQ ID NO: 428051 - DNA, 56 bp, Artificial
  Synthetic oligonucleotide
ggggaggccacggaaccgaaagattcaaaacaaccatcggagatcccagcaccata

SEQ ID NO: 428052 - DNA, 55 bp, Artificial
  Synthetic oligonucleotide
ggggaggcccagaaattacagaccaagatgttgaagatccaaaaaccaaaggtca

SEQ ID NO: 428053 - DNA, 58 bp, Artificial
  Synthetic oligonucleotide
ggggaggcgcgggtagaggtctccccgactggcttatcaacatgcttcgtgaagtgcc

SEQ ID NO: 428054 - DNA, 58 bp, Artificial
  Synthetic oligonucleotide
ggggaggctacacttgaaggtggtgacagtaagggaacatactgtggtgcaccaatcc

SEQ ID NO: 428055 - DNA, 55 bp, Artificial
  Synthetic oligonucleotide
ggggaggctattgccaaaccctcactgactctccttaatctagtcgtcgaagagc

SEQ ID NO: 428056 - DNA, 51 bp, Artificial
  Synthetic oligonucleotide
ggggagggaactaaaaactagtgctattagtttggttgatcacatagcagt

SEQ ID NO: 428057 - DNA, 53 bp, Artificial
  Synthetic oligonucleotide
ggggagggacagaggtatcccgaacaaacgtgtcgatcccggggcctgtgtaa

SEQ ID NO: 428058 - DNA, 53 bp, Artificial
  Synthetic oligonucleotide
ggggagggccgccacttgcggcaaatacctcttcaactgggcagtaaggacca

SEQ ID NO: 428059 - DNA, 55 bp, Artificial
  Synthetic oligonucleotide
ggggaggggagttttcgagctctcagacgagaaggcaacgaacccgatcgtgccc

SEQ ID NO: 428060 - DNA, 55 bp, Artificial
  Synthetic oligonucleotide
ggggagggtatgccccaagctattacccaagtgtgaaactcccgcacgacaccac

SEQ ID NO: 428061 - DNA, 52 bp, Artificial
  Synthetic oligonucleotide
ggggagggttggcgtttaacccggaagccaatcctcttacgtggcctgtcac

SEQ ID NO: 428062 - DNA, 52 bp, Artificial
  Synthetic oligonucleotide
ggggaggtaaccacaagcttgacgccgtctgtcccgacgttaaagggaggta

SEQ ID NO: 428063 - DNA, 55 bp, Artificial
  Synthetic oligonucleotide
ggggaggtattatgaacacgctccgatagagttgatttacgcatgcagatcggca

SEQ ID NO: 428064 - DNA, 51 bp, Artificial
  Synthetic oligonucleotide
ggggaggtcaacaaaatgccaccgcacattcaacaaatgctattcgacttt

SEQ ID NO: 428065 - DNA, 56 bp, Artificial
  Synthetic oligonucleotide
ggggaggtgaaagacgtgaggaggccacacgtgcgcgggagacttcggttatgtta

SEQ ID NO: 428066 - DNA, 56 bp, Artificial
  Synthetic oligonucleotide
ggggaggtgagaccaaaaagttgctcgatataacgagccttcgatagaggttccca

SEQ ID NO: 428067 - DNA, 55 bp, Artificial
  Synthetic oligonucleotide
ggggaggtgcaagtggtttccaccgctacacaatctttcctggcgacctgcgtca

SEQ ID NO: 428068 - DNA, 50 bp, Artificial
  Synthetic oligonucleotide
ggggaggttaaagggcatactgtttggttgaagcacgattggtttattgt

SEQ ID NO: 428069 - DNA, 53 bp, Artificial
  Synthetic oligonucleotide
ggggaggttaaggatatcttagagttctacgagatcggaatggagaagtttga

SEQ ID NO: 428070 - DNA, 55 bp, Artificial
  Synthetic oligonucleotide
ggggaggttacagggcatgtgcttgttagcactgccacatcagggtcccacggct

SEQ ID NO: 428071 - DNA, 52 bp, Artificial
  Synthetic oligonucleotide
ggggaggtttgcccacttgctgcatataagcagctgctcttcgcctgttcgg

SEQ ID NO: 428072 - DNA, 55 bp, Artificial
  Synthetic oligonucleotide
ggggagtactgcagatctataaatgttcataaagttacctattgccatgaagaag

SEQ ID NO: 428073 - DNA, 53 bp, Artificial
  Synthetic oligonucleotide
ggggagtaggaagtctgcaagtgccgctaaggaagaaacaagtgcaaggcaga

SEQ ID NO: 428074 - DNA, 55 bp, Artificial
  Synthetic oligonucleotide
ggggagtatccagactggattgttcagcaaacgatgattagtcaccatgagggcg

SEQ ID NO: 428075 - DNA, 60 bp, Artificial
  Synthetic oligonucleotide
ggggagtatcctgcgtatccatttgagcgtagagacggcacatttactgaggatgagtcg

SEQ ID NO: 428076 - DNA, 56 bp, Artificial
  Synthetic oligonucleotide
ggggagtattcctaatgatttagtgcaggaggtggagagccttaaaacacggataa

SEQ ID NO: 428077 - DNA, 55 bp, Artificial
  Synthetic oligonucleotide
ggggagtcaaactactaggaattcccaaacagtacaaagagttagaggatcgatc

SEQ ID NO: 428078 - DNA, 51 bp, Artificial
  Synthetic oligonucleotide
ggggagtcacccggggacaggccgtcaaggctttgttccaggatggaactc

SEQ ID NO: 428079 - DNA, 55 bp, Artificial
  Synthetic oligonucleotide
ggggagtcagtgagaattacgggctgccatttgagcgcagaacatataaaagctt

SEQ ID NO: 428080 - DNA, 53 bp, Artificial
  Synthetic oligonucleotide
ggggagtcctctctaaaacctattttcgtggtgtcctggtgtcccatttatac

SEQ ID NO: 428081 - DNA, 51 bp, Artificial
  Synthetic oligonucleotide
ggggagtcgaggaagacgaatttagcattatggagagtccagttcttgaga

SEQ ID NO: 428082 - DNA, 54 bp, Artificial
  Synthetic oligonucleotide
ggggagtcttccccaagtcctgacgtcgaagaacaacgcactttgcgagttttg

SEQ ID NO: 428083 - DNA, 55 bp, Artificial
  Synthetic oligonucleotide
ggggagtgagacttgcagattcactgtcgtcacccactattgagacgagaactcg

SEQ ID NO: 428084 - DNA, 53 bp, Artificial
  Synthetic oligonucleotide
ggggagtgatgagcatcgggctagcgctgaggttggcagggttcagcgcgagg

SEQ ID NO: 428085 - DNA, 51 bp, Artificial
  Synthetic oligonucleotide
ggggagtgcatctataacagcactggtcaagcccggttgtgcagcaaagag

SEQ ID NO: 428086 - DNA, 55 bp, Artificial
  Synthetic oligonucleotide
ggggagtggacaggaaagtgctgcaactgtagggtatcatgcacggccacgcagc

SEQ ID NO: 428087 - DNA, 55 bp, Artificial
  Synthetic oligonucleotide
ggggagtggacaggtggtcacttatgcacttaacactttcacgaatatcgctgtc

SEQ ID NO: 428088 - DNA, 55 bp, Artificial
  Synthetic oligonucleotide
ggggagtggtctgccctcagctgcagcataaaagcagcttgcttactgcatgtaa

SEQ ID NO: 428089 - DNA, 55 bp, Artificial
  Synthetic oligonucleotide
ggggagtgtccattcggagatgcgtgtgcggcgtacggtgccgtttgcgagatca

SEQ ID NO: 428090 - DNA, 55 bp, Artificial
  Synthetic oligonucleotide
ggggagttcaccacccaagcacaaaccaggagcaaaccaacctatatgttcaggc

SEQ ID NO: 428091 - DNA, 60 bp, Artificial
  Synthetic oligonucleotide
ggggagttcactatgcttggagtgcatgataatgtggctgtgcttccaacacatgcatca

SEQ ID NO: 428092 - DNA, 58 bp, Artificial
  Synthetic oligonucleotide
ggggagttctggactggaactgaccttcaccaatgattctattctcagccacaatttt

SEQ ID NO: 428093 - DNA, 50 bp, Artificial
  Synthetic oligonucleotide
ggggagttcttagaaaaggggggagtacctcggagtgactcgagtattaa

SEQ ID NO: 428094 - DNA, 55 bp, Artificial
  Synthetic oligonucleotide
ggggagttggggatacactgttggagcaacaattgctgccagatatgcaggctct

SEQ ID NO: 428095 - DNA, 55 bp, Artificial
  Synthetic oligonucleotide
ggggagttgttggcatgcacacgggttttgaaaacattggcaagatgaaccgtgg

SEQ ID NO: 428096 - DNA, 52 bp, Artificial
  Synthetic oligonucleotide
ggggagtttctccttaataatagccaacgcagcttcagcggaacctgcgttt

SEQ ID NO: 428097 - DNA, 54 bp, Artificial
  Synthetic oligonucleotide
ggggataaagtatacggtattgtctcttcacttgagagttttgtttacgcccaa

SEQ ID NO: 428098 - DNA, 54 bp, Artificial
  Synthetic oligonucleotide
ggggataacacatgagcgggattcttggaaccaaatgctgcgaaatcaccaagg

SEQ ID NO: 428099 - DNA, 58 bp, Artificial
  Synthetic oligonucleotide
ggggataacagcgaagaagacgtcctcgggctgttaaagcgtggtgcagcaaaaatga

SEQ ID NO: 428100 - DNA, 55 bp, Artificial
  Synthetic oligonucleotide
ggggataacattcctatagcgcccggttggtggattataactagcaggaaagatg

SEQ ID NO: 428101 - DNA, 55 bp, Artificial
  Synthetic oligonucleotide
ggggataagttctgtggaccatgtaacagcagggaaagacctactggtctgtgac

SEQ ID NO: 428102 - DNA, 55 bp, Artificial
  Synthetic oligonucleotide
ggggataatcaatcccagcttacggtgtgtgccgacttatatggaagtgtccata

SEQ ID NO: 428103 - DNA, 56 bp, Artificial
  Synthetic oligonucleotide
ggggataccgactttaatgtggaggaatcttttgccaatatgtggggaacacagaa

SEQ ID NO: 428104 - DNA, 55 bp, Artificial
  Synthetic oligonucleotide
ggggatacgcaaatccaaacgaggagatcattcgagctaaagaagctgtgggagc

SEQ ID NO: 428105 - DNA, 54 bp, Artificial
  Synthetic oligonucleotide
ggggatactgttactgttcctaaggtcagtcctaatcaatacagggtgttccgt

SEQ ID NO: 428106 - DNA, 55 bp, Artificial
  Synthetic oligonucleotide
ggggatacttggacaggagtagaagccctaataagaatgttgcaacaactgctgt

SEQ ID NO: 428107 - DNA, 56 bp, Artificial
  Synthetic oligonucleotide
ggggatacttggacgggagttgaagctataataagaatactgcaacaactactgtt

SEQ ID NO: 428108 - DNA, 55 bp, Artificial
  Synthetic oligonucleotide
ggggatacttgggcaggagtggaggccttaataagaactctgcaacgaatgctgt

SEQ ID NO: 428109 - DNA, 55 bp, Artificial
  Synthetic oligonucleotide
ggggatacttgggcaggagttgaagctctactgagaatattgcaacaactactgt

SEQ ID NO: 428110 - DNA, 56 bp, Artificial
  Synthetic oligonucleotide
ggggatagaaaaacgctgccaaacccgccacattcgtcacacgggcacttccagta

SEQ ID NO: 428111 - DNA, 55 bp, Artificial
  Synthetic oligonucleotide
ggggatagagctgtagaatatgtagtgttccaggaaaagggaaagcctttatggg

SEQ ID NO: 428112 - DNA, 56 bp, Artificial
  Synthetic oligonucleotide
ggggatagatctagatgaattgaacatggtagcctacggagacgatgtgttagcta

SEQ ID NO: 428113 - DNA, 60 bp, Artificial
  Synthetic oligonucleotide
ggggatagatctgctactccatcttcctgtttacctacatctggtatttcatctatttga

SEQ ID NO: 428114 - DNA, 55 bp, Artificial
  Synthetic oligonucleotide
ggggatagccccgttgcacctgggcaaatgtaacattgccggatggcttttagga

SEQ ID NO: 428115 - DNA, 59 bp, Artificial
  Synthetic oligonucleotide
ggggatagggctttctgtcttcctgctcacgagaaacactttacctcacacaggcgaca

SEQ ID NO: 428116 - DNA, 55 bp, Artificial
  Synthetic oligonucleotide
ggggatagtataacctctagtagcgatgaaagacatgatgagactccaacgcgag

SEQ ID NO: 428117 - DNA, 60 bp, Artificial
  Synthetic oligonucleotide
ggggatatcattttctgtgatcttagcgatgaaggtactcaacaggccatgaatcgcctg

SEQ ID NO: 428118 - DNA, 57 bp, Artificial
  Synthetic oligonucleotide
ggggatatctgggggttgatctgatatcacagaacggtagagtacaaattaggacgg

SEQ ID NO: 428119 - DNA, 51 bp, Artificial
  Synthetic oligonucleotide
ggggatatgactcctgcagaaagaatagtaaatatgatcaccacagaacta

SEQ ID NO: 428120 - DNA, 51 bp, Artificial
  Synthetic oligonucleotide
ggggatatgccgagtccggttccaatacccaggcgcccatttatcgtcaca

SEQ ID NO: 428121 - DNA, 55 bp, Artificial
  Synthetic oligonucleotide
ggggatatgtattctatgctgtcttctttaccaagggatctgttcttctttagtg

SEQ ID NO: 428122 - DNA, 52 bp, Artificial
  Synthetic oligonucleotide
ggggatatgtgtccagcagaagcactcataaacatgatctacacagaactac

SEQ ID NO: 428123 - DNA, 55 bp, Artificial
  Synthetic oligonucleotide
ggggatatgtgtgttaaatatgcattgctggtttgtgtttggaatttaaacggtg

SEQ ID NO: 428124 - DNA, 55 bp, Artificial
  Synthetic oligonucleotide
ggggatcaaacaggacagtcttactcaagacagggtccaggtttcaccaactgaa

SEQ ID NO: 428125 - DNA, 55 bp, Artificial
  Synthetic oligonucleotide
ggggatcaaagagaccagggaacttcctggaaaacaggaaggagcccacagctcc

SEQ ID NO: 428126 - DNA, 55 bp, Artificial
  Synthetic oligonucleotide
ggggatcaaatgtgtgtgtgacgaggagtgctcggcagcagaggtagcccttatc

SEQ ID NO: 428127 - DNA, 55 bp, Artificial
  Synthetic oligonucleotide
ggggatcaacgcgtgcacatgcacagaccctgacggagacaaacacacaagctgc

SEQ ID NO: 428128 - DNA, 55 bp, Artificial
  Synthetic oligonucleotide
ggggatcaagagtcagtacttcagtcctccatcagtgagcttctgacaagaatgg

SEQ ID NO: 428129 - DNA, 58 bp, Artificial
  Synthetic oligonucleotide
ggggatcactgctatgtcagttctcacgaaacgaccattaatggtgacaactaccatc

SEQ ID NO: 428130 - DNA, 60 bp, Artificial
  Synthetic oligonucleotide
ggggatcatttctcagggcactgtaagtgactcaggggaggtggtattaacatgcaagag

SEQ ID NO: 428131 - DNA, 55 bp, Artificial
  Synthetic oligonucleotide
ggggatccaatgttccataatgtcgctatagtcgtccgacatatcctcgtcgcgc

SEQ ID NO: 428132 - DNA, 59 bp, Artificial
  Synthetic oligonucleotide
ggggatccatggacacagaaactctttgcctcattacagctgactccggaaaggtgtac

SEQ ID NO: 428133 - DNA, 50 bp, Artificial
  Synthetic oligonucleotide
ggggatccattagtaaacgagtttcccgaaaccgttcacggttttacatg

SEQ ID NO: 428134 - DNA, 55 bp, Artificial
  Synthetic oligonucleotide
ggggatcccttgtagtgaccaaagattttgtctattctcagagcgccaactgtct

SEQ ID NO: 428135 - DNA, 51 bp, Artificial
  Synthetic oligonucleotide
ggggatccgaaatacttggatctaccaggtgaaattagcaatcttatgtac

SEQ ID NO: 428136 - DNA, 59 bp, Artificial
  Synthetic oligonucleotide
ggggatccgcttcaaagtgattatgatagtatgaacgacaggcacgttttcctcggcta

SEQ ID NO: 428137 - DNA, 51 bp, Artificial
  Synthetic oligonucleotide
ggggatcctccaatgcagggttaacgatcatgccgagtggagtgaatgcga

SEQ ID NO: 428138 - DNA, 55 bp, Artificial
  Synthetic oligonucleotide
ggggatcgaacacagttaaagtcgtagggaaaggtgggcattctggctcactgtt

SEQ ID NO: 428139 - DNA, 60 bp, Artificial
  Synthetic oligonucleotide
ggggatcgacgtcatcaatgacgttataccaagcatcgttggaatagatcttactgttaa

SEQ ID NO: 428140 - DNA, 55 bp, Artificial
  Synthetic oligonucleotide
ggggatcgagataccacgcggttggtgtgggctgttcgtggcatccaggtcaata

SEQ ID NO: 428141 - DNA, 52 bp, Artificial
  Synthetic oligonucleotide
ggggatcgccatctgttcagcgtgtcattaggatgtatgatacgacggtcta

SEQ ID NO: 428142 - DNA, 55 bp, Artificial
  Synthetic oligonucleotide
ggggatcggccacttgggatcaaactagattcccaattccgtctattccggtgcc

SEQ ID NO: 428143 - DNA, 55 bp, Artificial
  Synthetic oligonucleotide
ggggatcgggctggccctaggcttcaccaaggacagggccacaaaactcttgaag

SEQ ID NO: 428144 - DNA, 53 bp, Artificial
  Synthetic oligonucleotide
ggggatcggtgaatcgtcccgggatggggtctccgaggacccttccgaagcga

SEQ ID NO: 428145 - DNA, 60 bp, Artificial
  Synthetic oligonucleotide
ggggatcgtctctgtatacagagcggagaaacgagtgatctcaatactcttccttgcagc

SEQ ID NO: 428146 - DNA, 60 bp, Artificial
  Synthetic oligonucleotide
ggggatctaatgactctagctacctgggtgggtgctaatttggaagatccagcatctaga

SEQ ID NO: 428147 - DNA, 54 bp, Artificial
  Synthetic oligonucleotide
ggggatctcgaagcaacagggtctcgcgtgattgatgcggcagattgtttcagg

SEQ ID NO: 428148 - DNA, 55 bp, Artificial
  Synthetic oligonucleotide
ggggatctgcctggtctagagcgtcgtttcttttcaaatttcgaggccacaggcg

SEQ ID NO: 428149 - DNA, 55 bp, Artificial
  Synthetic oligonucleotide
ggggatctgggtcaacacttaaatcagcattctctacacctgaaataactggacc

SEQ ID NO: 428150 - DNA, 55 bp, Artificial
  Synthetic oligonucleotide
ggggatctggtaagacaatttaaaagcgataaatcaatatgtggggattgggtag

SEQ ID NO: 428151 - DNA, 51 bp, Artificial
  Synthetic oligonucleotide
ggggatctttgcgatgacactgccagttgcatatatgccgtgggccatgtc

SEQ ID NO: 428152 - DNA, 60 bp, Artificial
  Synthetic oligonucleotide
ggggatgacaaactcactctgtggactaccccagatccctctcctaactgcagaattcac

SEQ ID NO: 428153 - DNA, 60 bp, Artificial
  Synthetic oligonucleotide
ggggatgagagagggagcctcgattgattcgtggctagaattactgcgtcacttataatg

SEQ ID NO: 428154 - DNA, 51 bp, Artificial
  Synthetic oligonucleotide
ggggatgagattccagatccgttaagcccaggtgagcgtggcattcagatg

SEQ ID NO: 428155 - DNA, 60 bp, Artificial
  Synthetic oligonucleotide
ggggatgaggatcagattcaaggatgacagctcatatgaggatgtcaatggaatcagaaa

SEQ ID NO: 428156 - DNA, 60 bp, Artificial
  Synthetic oligonucleotide
ggggatgatagaaatgcaactgctagtttcatttacaatgggatgcttgttgacagtatt

SEQ ID NO: 428157 - DNA, 55 bp, Artificial
  Synthetic oligonucleotide
ggggatgatatgtgtgctaatagaaggttgcggcttaaaacagagcatgagggtt

SEQ ID NO: 428158 - DNA, 60 bp, Artificial
  Synthetic oligonucleotide
ggggatgatggtttcctgatcacagaaagagccctcggtgagaaattcgcaagcaaggga

SEQ ID NO: 428159 - DNA, 55 bp, Artificial
  Synthetic oligonucleotide
ggggatgcatgattacgaagtttcatacgagcagatcaaaatgaacgcgatggca

SEQ ID NO: 428160 - DNA, 50 bp, Artificial
  Synthetic oligonucleotide
ggggatgccaacaaccccagagctccataaacgtaagctacaaaggagta

SEQ ID NO: 428161 - DNA, 55 bp, Artificial
  Synthetic oligonucleotide
ggggatgcgaagaatttgggtgccttgctgtaaatacaggctgtgtctttggttc

SEQ ID NO: 428162 - DNA, 55 bp, Artificial
  Synthetic oligonucleotide
ggggatgcgacgttggtgtcagcacagtctgcgctgctgccttcaaacgcgtctc

SEQ ID NO: 428163 - DNA, 53 bp, Artificial
  Synthetic oligonucleotide
ggggatggcctggactgatcaatggatggtatgggttccaacacaggaacgaa

SEQ ID NO: 428164 - DNA, 57 bp, Artificial
  Synthetic oligonucleotide
ggggatggcttggtatactaaattatgccaggacatacatacccaacctgtctacgt

SEQ ID NO: 428165 - DNA, 55 bp, Artificial
  Synthetic oligonucleotide
ggggatggggtgttcaaaaccacactgtttggagaaattgcacagtactataccc

SEQ ID NO: 428166 - DNA, 57 bp, Artificial
  Synthetic oligonucleotide
ggggatggtaaccaatggattcgtgctagagtgccacatttgagtagaccaaaaccg

SEQ ID NO: 428167 - DNA, 59 bp, Artificial
  Synthetic oligonucleotide
ggggatgtagactcatacataaggaacaccgggcttaccgcattcttcctgacactcaa

SEQ ID NO: 428168 - DNA, 54 bp, Artificial
  Synthetic oligonucleotide
ggggatgtctctttctcccgagggaggcttatctttccgtttagttccagagcg

SEQ ID NO: 428169 - DNA, 56 bp, Artificial
  Synthetic oligonucleotide
ggggatgtgaggtcgaagaatcgtggatttttgcattggaatttaccttcgaattg

SEQ ID NO: 428170 - DNA, 55 bp, Artificial
  Synthetic oligonucleotide
ggggatgttctcaatttcgcaagacttcatgaattatacaacaatcctgtgacct

SEQ ID NO: 428171 - DNA, 50 bp, Artificial
  Synthetic oligonucleotide
ggggatgttggtgatataaaggaaggagccctttacattgtaggtgctcc

SEQ ID NO: 428172 - DNA, 55 bp, Artificial
  Synthetic oligonucleotide
ggggatgtttgtggtgcgattatgatagcggcccaggcaaccatcatttcgccgc

SEQ ID NO: 428173 - DNA, 55 bp, Artificial
  Synthetic oligonucleotide
ggggattaatgccaggagagcatgaatggcacctaggacatggagtgtccataga

SEQ ID NO: 428174 - DNA, 51 bp, Artificial
  Synthetic oligonucleotide
ggggattacattaccagtttaggaagggctttcggtgtggggtttacagac

SEQ ID NO: 428175 - DNA, 53 bp, Artificial
  Synthetic oligonucleotide
ggggattagaaagaaagatcttattccacccaagggacaatctttatcccctc

SEQ ID NO: 428176 - DNA, 55 bp, Artificial
  Synthetic oligonucleotide
ggggattagcggcccagattttgaggcataggagcttcacatttcaggagttttc

SEQ ID NO: 428177 - DNA, 54 bp, Artificial
  Synthetic oligonucleotide
ggggattatccgtctggttagtttaacataccctacggggtacacagatgctag

SEQ ID NO: 428178 - DNA, 58 bp, Artificial
  Synthetic oligonucleotide
ggggattattgccctagtggatctcacaaacgccggcaacgagaatctgtaattcgaa

SEQ ID NO: 428179 - DNA, 55 bp, Artificial
  Synthetic oligonucleotide
ggggattcaccatccttctagcacacaagagaagaatgatctgtatgggacccaa

SEQ ID NO: 428180 - DNA, 54 bp, Artificial
  Synthetic oligonucleotide
ggggattcctcaattaccactcgatctagacttctggaccggttggttaggtta

SEQ ID NO: 428181 - DNA, 55 bp, Artificial
  Synthetic oligonucleotide
ggggattctacagatctttaaagggcgcttgcaagctgacattgtgtggaagacc

SEQ ID NO: 428182 - DNA, 52 bp, Artificial
  Synthetic oligonucleotide
ggggattctagtgcaggatataatcatgatgtgtccattctgcgggcatgga

SEQ ID NO: 428183 - DNA, 58 bp, Artificial
  Synthetic oligonucleotide
ggggattcttgacacactacaaagatcacttggagaattggggctcaagtatgatttt

SEQ ID NO: 428184 - DNA, 55 bp, Artificial
  Synthetic oligonucleotide
ggggattgaggtagtaaatgctacggagacagtggaaactgcgaatatcgagaaa

SEQ ID NO: 428185 - DNA, 53 bp, Artificial
  Synthetic oligonucleotide
ggggattgcctactttcgatgagctatttggcgctaggatccacagtcatggt

SEQ ID NO: 428186 - DNA, 51 bp, Artificial
  Synthetic oligonucleotide
ggggattgctgcctccgaagttacgttgctagaatcgacggctggggacga

SEQ ID NO: 428187 - DNA, 55 bp, Artificial
  Synthetic oligonucleotide
ggggattgcttttggcatgccgtgggctatctaattggtttaaatggcgtcgaag

SEQ ID NO: 428188 - DNA, 54 bp, Artificial
  Synthetic oligonucleotide
ggggattggctttattttggaaccactatggaatgagttaggcttgtggggaaa

SEQ ID NO: 428189 - DNA, 58 bp, Artificial
  Synthetic oligonucleotide
ggggattgtctcaagggttgcagacaccgttggtgcggtggcaaatgtagtagatggg

SEQ ID NO: 428190 - DNA, 60 bp, Artificial
  Synthetic oligonucleotide
ggggattgtgacgggcagtgcagtcggttgtgatcccgatctgttctggagcaaaatacc

SEQ ID NO: 428191 - DNA, 55 bp, Artificial
  Synthetic oligonucleotide
ggggattgttgattgtccaggtatatacgccattctctgcttgagccgcagtgat

SEQ ID NO: 428192 - DNA, 55 bp, Artificial
  Synthetic oligonucleotide
ggggatttaacatcatgggctaactggtttgatttcacttggtggtctaaatata

SEQ ID NO: 428193 - DNA, 52 bp, Artificial
  Synthetic oligonucleotide
ggggatttagacggggttcgtgttttaatttgatacaatatgtttaatgtac

SEQ ID NO: 428194 - DNA, 55 bp, Artificial
  Synthetic oligonucleotide
ggggatttaggtttggaagggtctttgcgtgttgcctgaaggcggcctgtgcgaa

SEQ ID NO: 428195 - DNA, 55 bp, Artificial
  Synthetic oligonucleotide
ggggatttcactctccttggctcgtgtagtctagattcacccttcactgatgtgg

SEQ ID NO: 428196 - DNA, 50 bp, Artificial
  Synthetic oligonucleotide
ggggatttccattacgtgacgggtatgaccacagacaatctaaaatgccc

SEQ ID NO: 428197 - DNA, 55 bp, Artificial
  Synthetic oligonucleotide
ggggatttctagtaaatccggtccctatcacctcgagtgatctggagaaacgact

SEQ ID NO: 428198 - DNA, 55 bp, Artificial
  Synthetic oligonucleotide
ggggatttgcgcaaggtagtagaatccggtcacagcttggccgtagccaccggca

SEQ ID NO: 428199 - DNA, 60 bp, Artificial
  Synthetic oligonucleotide
ggggatttggaacctcccagatatagacgccattccttgcttgagctgcaacgatgcttt

SEQ ID NO: 428200 - DNA, 55 bp, Artificial
  Synthetic oligonucleotide
ggggatttgggaagagcagccaagggctgttcagatttgaatgtagtgctcaatc

SEQ ID NO: 428201 - DNA, 60 bp, Artificial
  Synthetic oligonucleotide
ggggatttgttatctcgaaggtataaacgccactcgttgcttgatgcgcagtgatgtact

SEQ ID NO: 428202 - DNA, 55 bp, Artificial
  Synthetic oligonucleotide
ggggatttgttgattagtacagaggaaactgagtctaagaaaatgagaggcatag

SEQ ID NO: 428203 - DNA, 54 bp, Artificial
  Synthetic oligonucleotide
ggggatttttcataacttcgaattataagtacatacgttccacttcctcatact

SEQ ID NO: 428204 - DNA, 55 bp, Artificial
  Synthetic oligonucleotide
ggggcaaaaacagtctggaaagtgcaccctaggagtgccctaggtcctagacaag

SEQ ID NO: 428205 - DNA, 55 bp, Artificial
  Synthetic oligonucleotide
ggggcaaaatcttcatctgaatccagcttttggagcaacgctttcaatgcttcgc

SEQ ID NO: 428206 - DNA, 51 bp, Artificial
  Synthetic oligonucleotide
ggggcaaacattaacgcggttacgaaaatcggaaatacgccgttacacact

SEQ ID NO: 428207 - DNA, 54 bp, Artificial
  Synthetic oligonucleotide
ggggcaaactcccaccgtgttagcgacgtacgccgaacaagtgcgtataggaga

SEQ ID NO: 428208 - DNA, 58 bp, Artificial
  Synthetic oligonucleotide
ggggcaaactgacggaattgaacatacaaggtaagttgacagacataagtgatcgtta

SEQ ID NO: 428209 - DNA, 55 bp, Artificial
  Synthetic oligonucleotide
ggggcaaagaagcagttgacagtttccatctaggcgatgatatggacccagagct

SEQ ID NO: 428210 - DNA, 54 bp, Artificial
  Synthetic oligonucleotide
ggggcaaaggaggtgcgcagcttatccaggggggccgttaaccacatccggtcc

SEQ ID NO: 428211 - DNA, 58 bp, Artificial
  Synthetic oligonucleotide
ggggcaaagtttcagtgaaggtcacagagtgtaagaatgttgatccatcacaaagcaa

SEQ ID NO: 428212 - DNA, 58 bp, Artificial
  Synthetic oligonucleotide
ggggcaaatacttatcccagctatatggttttagttggagttcaccaacctatgcatg

SEQ ID NO: 428213 - DNA, 52 bp, Artificial
  Synthetic oligonucleotide
ggggcaaatgctatgagccagtcaatgatgtgtatttcaacgggatcattcg

SEQ ID NO: 428214 - DNA, 55 bp, Artificial
  Synthetic oligonucleotide
ggggcaacaatcacactgctctcagccaacaccgatgccaccacaagcctcagtg

SEQ ID NO: 428215 - DNA, 52 bp, Artificial
  Synthetic oligonucleotide
ggggcaacatcccggctctcctcgacgtggcggcctatgaaggtagtctgca

SEQ ID NO: 428216 - DNA, 56 bp, Artificial
  Synthetic oligonucleotide
ggggcaaccagcgtagtcacccggatgaacaccagcctcacgccgaagttcttccg

SEQ ID NO: 428217 - DNA, 55 bp, Artificial
  Synthetic oligonucleotide
ggggcaacccaccccactaaaatggaagatgcaatgcagggccactacgtaattt

SEQ ID NO: 428218 - DNA, 51 bp, Artificial
  Synthetic oligonucleotide
ggggcaaccggtgactttcctggtggacacgggagcccagcactcagtact

SEQ ID NO: 428219 - DNA, 51 bp, Artificial
  Synthetic oligonucleotide
ggggcaacctcgggcgagcagtcttccaggccaagaagagggttctcgaac

SEQ ID NO: 428220 - DNA, 60 bp, Artificial
  Synthetic oligonucleotide
ggggcaactctcggagtggaaggaaagtcacacaagaataatgcacaagtagaggagtca

SEQ ID NO: 428221 - DNA, 55 bp, Artificial
  Synthetic oligonucleotide
ggggcaagacctcaggtcaatggacaaagtgggcgaattgactttcactggacac

SEQ ID NO: 428222 - DNA, 55 bp, Artificial
  Synthetic oligonucleotide
ggggcaagatatgttcaagaggagttgcacaagctcccatatgagacagccctta

SEQ ID NO: 428223 - DNA, 55 bp, Artificial
  Synthetic oligonucleotide
ggggcaagcaccgagcccatacaatatcagggtagaatgtgtgggatggtccagc

SEQ ID NO: 428224 - DNA, 60 bp, Artificial
  Synthetic oligonucleotide
ggggcaagccagaagaaaagacaatatggacttcaagcagctccattgtgatgtgtggag

SEQ ID NO: 428225 - DNA, 55 bp, Artificial
  Synthetic oligonucleotide
ggggcaagcgtggtggaggtgtactttggcggggacaagggaaatggtatgcatt

SEQ ID NO: 428226 - DNA, 52 bp, Artificial
  Synthetic oligonucleotide
ggggcaagctttattacacttacatgcccgtcatggtttacgttgacgcaac

SEQ ID NO: 428227 - DNA, 54 bp, Artificial
  Synthetic oligonucleotide
ggggcaagggtggactgcgacggggccgaatggtccgtatttcgattctgcggg

SEQ ID NO: 428228 - DNA, 56 bp, Artificial
  Synthetic oligonucleotide
ggggcaagtctgttgctttggctttagactttccatagtcttaaaactatggcgtg

SEQ ID NO: 428229 - DNA, 55 bp, Artificial
  Synthetic oligonucleotide
ggggcaagtggtcaaaatgttccatagtaggatggtctgaggtaagggaaagaat

SEQ ID NO: 428230 - DNA, 54 bp, Artificial
  Synthetic oligonucleotide
ggggcaataaatacaacactgcctttccacaacattcacccattgacaataggt

SEQ ID NO: 428231 - DNA, 53 bp, Artificial
  Synthetic oligonucleotide
ggggcaatacccagtaacgccgaacttcccagcacaagtggtgccagacaaga

SEQ ID NO: 428232 - DNA, 55 bp, Artificial
  Synthetic oligonucleotide
ggggcaatacctagcaacgccgaacttcccagcacgagtgatgccaagcaagaac

SEQ ID NO: 428233 - DNA, 55 bp, Artificial
  Synthetic oligonucleotide
ggggcaatagttgaggtagatacaagcgacagagttgcttttagatgtcgaatgc

SEQ ID NO: 428234 - DNA, 59 bp, Artificial
  Synthetic oligonucleotide
ggggcaatcagttatttgttactgtggtagataccacacgtagtaccaatatgtctgtg

SEQ ID NO: 428235 - DNA, 55 bp, Artificial
  Synthetic oligonucleotide
ggggcaatgggactgctttgcatatccctaatgaagcatcgagagttctctgctc

SEQ ID NO: 428236 - DNA, 55 bp, Artificial
  Synthetic oligonucleotide
ggggcaatgtctgttactgagccccacacggaggagccgcgtaccctagctgatt

SEQ ID NO: 428237 - DNA, 54 bp, Artificial
  Synthetic oligonucleotide
ggggcaattctgtcactttggttaaagagtttcacactctttaaaaatgacgcg

SEQ ID NO: 428238 - DNA, 52 bp, Artificial
  Synthetic oligonucleotide
ggggcacaatggacacggacaatgacccaggtactagcccaagggaggggac

SEQ ID NO: 428239 - DNA, 55 bp, Artificial
  Synthetic oligonucleotide
ggggcacatactcgcctgcactgtacttacccttgacaagtatgccttgcagcac

SEQ ID NO: 428240 - DNA, 55 bp, Artificial
  Synthetic oligonucleotide
ggggcaccagggcactctgcatactaagacaaaacatgaaactaggcccacaacc

SEQ ID NO: 428241 - DNA, 58 bp, Artificial
  Synthetic oligonucleotide
ggggcaccccaatgtggaatcgcttgctggttcataaagtctggagaatgggtgaagg

SEQ ID NO: 428242 - DNA, 53 bp, Artificial
  Synthetic oligonucleotide
ggggcacccctatatagattatcggaagggtctgtcgaaactatatgatcaag

SEQ ID NO: 428243 - DNA, 57 bp, Artificial
  Synthetic oligonucleotide
ggggcacctaaaatgttcacagataagtggtacccccaaacagacctctgtgacatg

SEQ ID NO: 428244 - DNA, 50 bp, Artificial
  Synthetic oligonucleotide
ggggcaccttgctccttgggatattaatgatctgtagtgctgtagaaaag

SEQ ID NO: 428245 - DNA, 50 bp, Artificial
  Synthetic oligonucleotide
ggggcaccttgctccttgggatgttaatgatcagtagtgttgcaggaaac

SEQ ID NO: 428246 - DNA, 55 bp, Artificial
  Synthetic oligonucleotide
ggggcacgaggccaggcaattatgtgcagagaccagcacacccatcagccccacc

SEQ ID NO: 428247 - DNA, 58 bp, Artificial
  Synthetic oligonucleotide
ggggcacgctgtgggcatcttccgggccgctgtgtgcacccgaggggttgcaaaggcg

SEQ ID NO: 428248 - DNA, 53 bp, Artificial
  Synthetic oligonucleotide
ggggcactcccgagccccttcgtgcggagattcgtttggatcagagtgggttg

SEQ ID NO: 428249 - DNA, 52 bp, Artificial
  Synthetic oligonucleotide
ggggcactccggcccgtaaggtggaactatccccagagggaggaaaccacac

SEQ ID NO: 428250 - DNA, 56 bp, Artificial
  Synthetic oligonucleotide
ggggcactgccaggaagaatcaatcccaggattcctacccccgctcggggctcctc

SEQ ID NO: 428251 - DNA, 60 bp, Artificial
  Synthetic oligonucleotide
ggggcactgcgaacacgcatgctccggtcgcgcggttgggccgagctggctaggggcttg

SEQ ID NO: 428252 - DNA, 55 bp, Artificial
  Synthetic oligonucleotide
ggggcactggtgttccggagattcagtgggagacgactactgccgccgatacgaa

SEQ ID NO: 428253 - DNA, 55 bp, Artificial
  Synthetic oligonucleotide
ggggcacttagagggcttcccagtgaaaggtgcaccgcctatgtgcaccatgcaa

SEQ ID NO: 428254 - DNA, 56 bp, Artificial
  Synthetic oligonucleotide
ggggcacttccgtcgcctcaacaagtaccgcaaagatattataagacacgtcggcc

SEQ ID NO: 428255 - DNA, 55 bp, Artificial
  Synthetic oligonucleotide
ggggcagaaatataacctacatcgctcagttgccaaatggcgacggcactggcag

SEQ ID NO: 428256 - DNA, 55 bp, Artificial
  Synthetic oligonucleotide
ggggcagaagtggtgccaggatttcaggcgctgtcagaaggctgcctaccatatg

SEQ ID NO: 428257 - DNA, 55 bp, Artificial
  Synthetic oligonucleotide
ggggcagactggtacaacagataggtttgtctttgttcaacccacgcagagtcag

SEQ ID NO: 428258 - DNA, 55 bp, Artificial
  Synthetic oligonucleotide
ggggcagagtacccggcggacaatacttgcgacctcaggttttcgcacgacgcga

SEQ ID NO: 428259 - DNA, 55 bp, Artificial
  Synthetic oligonucleotide
ggggcagatcgcgagctacgcacggtgtggtctgacgcgctgtcgaacgaaaaca

SEQ ID NO: 428260 - DNA, 55 bp, Artificial
  Synthetic oligonucleotide
ggggcagcagttcaatcagcagctccaagccaactctttcaagcatgacctcgag

SEQ ID NO: 428261 - DNA, 55 bp, Artificial
  Synthetic oligonucleotide
ggggcagcatagtcagagcaatgggtaatgggaactctgccttgttagggactga

SEQ ID NO: 428262 - DNA, 56 bp, Artificial
  Synthetic oligonucleotide
ggggcagcgatacatccatttgccctattactggtcctaggaggttgggttttaca

SEQ ID NO: 428263 - DNA, 51 bp, Artificial
  Synthetic oligonucleotide
ggggcagctaaaggaagctctaatagatacaggagcagatgatacagtaat

SEQ ID NO: 428264 - DNA, 60 bp, Artificial
  Synthetic oligonucleotide
ggggcagctaaatatgcgatgcctcattataacccactgcaactatctcacgctctacat

SEQ ID NO: 428265 - DNA, 56 bp, Artificial
  Synthetic oligonucleotide
ggggcagctctattttggtataaaaaggctatgtccaatgggaccatagcttttgg

SEQ ID NO: 428266 - DNA, 53 bp, Artificial
  Synthetic oligonucleotide
ggggcagggctgtgtcgtggtacgcgactggatggcggtcttcgccacgatgc

SEQ ID NO: 428267 - DNA, 54 bp, Artificial
  Synthetic oligonucleotide
ggggcagtacgggattgaaatctttaacattgtcaagaaatacctctttgggga

SEQ ID NO: 428268 - DNA, 55 bp, Artificial
  Synthetic oligonucleotide
ggggcagtgggtacaagcagagggaatagtttatagtatgtttgataggaacgtt

SEQ ID NO: 428269 - DNA, 54 bp, Artificial
  Synthetic oligonucleotide
ggggcatataaatgttatagaggtgggagatgacctaacactgcatacagaggc

SEQ ID NO: 428270 - DNA, 55 bp, Artificial
  Synthetic oligonucleotide
ggggcatataggattcctatgattactgctgaggatgctaagtttgttagtatga

SEQ ID NO: 428271 - DNA, 55 bp, Artificial
  Synthetic oligonucleotide
ggggcatcactttgacgagaagatcggaaacgttcggttatactgggtcaggatc

SEQ ID NO: 428272 - DNA, 50 bp, Artificial
  Synthetic oligonucleotide
ggggcatcatgacgcgtgctacctaccggttccgcgaacacaccatgagc

SEQ ID NO: 428273 - DNA, 57 bp, Artificial
  Synthetic oligonucleotide
ggggcatccattgatgttgagcactattgatgtttaattaactactcaacgaataac

SEQ ID NO: 428274 - DNA, 55 bp, Artificial
  Synthetic oligonucleotide
ggggcatcgtcaaacactagtgacgagagcatgattgaaacacgatgcgttctta

SEQ ID NO: 428275 - DNA, 54 bp, Artificial
  Synthetic oligonucleotide
ggggcatcgtccgcgatctgttgcgctgtggtggtttcggtctgcctttcggag

SEQ ID NO: 428276 - DNA, 60 bp, Artificial
  Synthetic oligonucleotide
ggggcatgatgccagtactgtgggccggcatgggtacggggggcaaaaactatgcagtga

SEQ ID NO: 428277 - DNA, 52 bp, Artificial
  Synthetic oligonucleotide
ggggcatgctgtttatcgagaagctcgtcatagtgttcgttccgcacgtgcc

SEQ ID NO: 428278 - DNA, 50 bp, Artificial
  Synthetic oligonucleotide
ggggcatggaaacatgcccagagagtggagagctggatacttagaaatcc

SEQ ID NO: 428279 - DNA, 55 bp, Artificial
  Synthetic oligonucleotide
ggggcatggagaaatgcctggtggctaatgcaaagacaggcatcaggtgacatgg

SEQ ID NO: 428280 - DNA, 54 bp, Artificial
  Synthetic oligonucleotide
ggggcatggcacataacctaacatccttgacaaccctgtgcacagaaatggttg

SEQ ID NO: 428281 - DNA, 55 bp, Artificial
  Synthetic oligonucleotide
ggggcatggggttcaggagttggattcaatcttgtctgtactgttagcttaacag

SEQ ID NO: 428282 - DNA, 55 bp, Artificial
  Synthetic oligonucleotide
ggggcatggtgaattgtctgattcaacattagttcagccaacgcttgatggaccg

SEQ ID NO: 428283 - DNA, 52 bp, Artificial
  Synthetic oligonucleotide
ggggcatgtagtggatggatttgaggaaatcccgcttcaggagtttggcccc

SEQ ID NO: 428284 - DNA, 55 bp, Artificial
  Synthetic oligonucleotide
ggggcatgtccggccctgcaatataataaagtctgtccaacatcacgatgaagtg

SEQ ID NO: 428285 - DNA, 60 bp, Artificial
  Synthetic oligonucleotide
ggggcatgttacatatataagttttcagatcatataaggcgaacaagaatgaagcatggt

SEQ ID NO: 428286 - DNA, 55 bp, Artificial
  Synthetic oligonucleotide
ggggcatgttgggcgtttgcgggtttaggcgcgctcgagagtcagtacgccatca

SEQ ID NO: 428287 - DNA, 55 bp, Artificial
  Synthetic oligonucleotide
ggggcattaaacagctccaagcaaaagtccttgctatagaaagataccttaggga

SEQ ID NO: 428288 - DNA, 54 bp, Artificial
  Synthetic oligonucleotide
ggggcattatcctcatgaggtatgcttgctttaactcatcatacgatagttcaa

SEQ ID NO: 428289 - DNA, 58 bp, Artificial
  Synthetic oligonucleotide
ggggcattcatcacccgccaactgacactgaacaaaacgatttgtacaaaaagactga

SEQ ID NO: 428290 - DNA, 55 bp, Artificial
  Synthetic oligonucleotide
ggggcattctgcgttgccagcacgggtgcatgggaattctcactgccggtggcaa

SEQ ID NO: 428291 - DNA, 51 bp, Artificial
  Synthetic oligonucleotide
ggggcattgggttcgcgattgccccaaacgaccccggaagaaacccgccaa

SEQ ID NO: 428292 - DNA, 54 bp, Artificial
  Synthetic oligonucleotide
ggggcattttgacactacctggaaaatgtcatctgtgctcaaggcatttgagcg

SEQ ID NO: 428293 - DNA, 55 bp, Artificial
  Synthetic oligonucleotide
ggggccaaacctgtacaatatccggaatctccacgtcccggaagtctgcctgaaa

SEQ ID NO: 428294 - DNA, 55 bp, Artificial
  Synthetic oligonucleotide
ggggccaacatgaatcaagaggatggctggacactttggatactatagttgaatc

SEQ ID NO: 428295 - DNA, 60 bp, Artificial
  Synthetic oligonucleotide
ggggccaaggagataaagcccggacagaccatagcatccttccagcagcacgcagtcatg

SEQ ID NO: 428296 - DNA, 55 bp, Artificial
  Synthetic oligonucleotide
ggggccaatgcaaaggggatggatcttggcactataccaggagactgcggggcac

SEQ ID NO: 428297 - DNA, 55 bp, Artificial
  Synthetic oligonucleotide
ggggccaatggcctagtggttactggaagcctaatccagacgtgcaccacacgac

SEQ ID NO: 428298 - DNA, 53 bp, Artificial
  Synthetic oligonucleotide
ggggccaattttgatgagggttgcgttctgattacttcagttgcgatctttgc

SEQ ID NO: 428299 - DNA, 55 bp, Artificial
  Synthetic oligonucleotide
ggggccacaacccttgcggaaatcaacgataactaccagtttgcctgccagcagg

SEQ ID NO: 428300 - DNA, 58 bp, Artificial
  Synthetic oligonucleotide
ggggccacaattattcagagagtcaagtcagtaagcctagtggaggtactatcaaacc

SEQ ID NO: 428301 - DNA, 60 bp, Artificial
  Synthetic oligonucleotide
ggggccacagagggagccatacaatgaatggacactagagcttttagaggagcttaagaa

SEQ ID NO: 428302 - DNA, 59 bp, Artificial
  Synthetic oligonucleotide
ggggccacgtaaaattatctagaggctcagaggttgtcttggacgcttgcgactcaagc

SEQ ID NO: 428303 - DNA, 55 bp, Artificial
  Synthetic oligonucleotide
ggggccactgataagaagtcgcgagagcccgaactcgcggctccgagtaagccaa

SEQ ID NO: 428304 - DNA, 55 bp, Artificial
  Synthetic oligonucleotide
ggggccacttactctgtcactccgctggatttaccagcaatcattggaagactcc

SEQ ID NO: 428305 - DNA, 55 bp, Artificial
  Synthetic oligonucleotide
ggggccagacaaaggaggcgctcttagacacaggagcagatgatacggtattaga

SEQ ID NO: 428306 - DNA, 52 bp, Artificial
  Synthetic oligonucleotide
ggggccaggagagacgaatgactcaactttagttgaaccaactttggatgga

SEQ ID NO: 428307 - DNA, 53 bp, Artificial
  Synthetic oligonucleotide
ggggccagtcccaaaaccctactcccgaagcccagtccatacaagtaccagga

SEQ ID NO: 428308 - DNA, 60 bp, Artificial
  Synthetic oligonucleotide
ggggccagtctgcagcgataccgtctgtcgcgttgcatcgtagaccaggaaccgacgcac

SEQ ID NO: 428309 - DNA, 59 bp, Artificial
  Synthetic oligonucleotide
ggggccagtctggcagagtaagcatctattggacaatagtcaaacctggggacgtactg

SEQ ID NO: 428310 - DNA, 53 bp, Artificial
  Synthetic oligonucleotide
ggggccataccgttttacgctggatggtaccgaggccaaagaaagttttgcta

SEQ ID NO: 428311 - DNA, 55 bp, Artificial
  Synthetic oligonucleotide
ggggccatagctggattcatagaaggaggttggtcagggctagtcgctggttggt

SEQ ID NO: 428312 - DNA, 53 bp, Artificial
  Synthetic oligonucleotide
ggggccatcaggcacccagatgctataaagcttgctccccgtagctttcctaa

SEQ ID NO: 428313 - DNA, 55 bp, Artificial
  Synthetic oligonucleotide
ggggccatctgcaacaagactacgggcaaagccactgtggagtcagaactggagg

SEQ ID NO: 428314 - DNA, 54 bp, Artificial
  Synthetic oligonucleotide
ggggccatctgtcttccacaagttatggaaggtcccaaagactgggttttacac

SEQ ID NO: 428315 - DNA, 60 bp, Artificial
  Synthetic oligonucleotide
ggggccatgcatcacaaggttaatgtgaaaacacagcgagaagtccatttcccaatggac

SEQ ID NO: 428316 - DNA, 54 bp, Artificial
  Synthetic oligonucleotide
ggggccatgtggtggcgcatgtaccactcgtcgtgcttgagtttcagaccgtga

SEQ ID NO: 428317 - DNA, 59 bp, Artificial
  Synthetic oligonucleotide
ggggccattaccaccagggcagatgagggaaccaacaggaagtgacattgctgggacaa

SEQ ID NO: 428318 - DNA, 55 bp, Artificial
  Synthetic oligonucleotide
ggggcccaacactccgtgctgacccaaaatcctggacccctaagtgacaggtctg

SEQ ID NO: 428319 - DNA, 55 bp, Artificial
  Synthetic oligonucleotide
ggggcccatgccactccctactcatacaacgaggcctccctccaagaccatccct

SEQ ID NO: 428320 - DNA, 55 bp, Artificial
  Synthetic oligonucleotide
ggggcccccgcttgtcgtgcgttactcgggacccatgggcgtggtccgtgagtgc

SEQ ID NO: 428321 - DNA, 59 bp, Artificial
  Synthetic oligonucleotide
ggggccccgcgcgtagaccttcggcctcgctgctaccgctctcgctacctctcgagctc

SEQ ID NO: 428322 - DNA, 52 bp, Artificial
  Synthetic oligonucleotide
ggggccccggttcctgaggggatgaactgggtttataagataaggcgcaccc

SEQ ID NO: 428323 - DNA, 55 bp, Artificial
  Synthetic oligonucleotide
ggggcccctgctatttaggcaagcttaccatgttagcacctaaccatacagatat

SEQ ID NO: 428324 - DNA, 55 bp, Artificial
  Synthetic oligonucleotide
ggggcccggtcacacagatgtattcaagtgccgaaggggacttggtagggtggcc

SEQ ID NO: 428325 - DNA, 59 bp, Artificial
  Synthetic oligonucleotide
ggggccctatcagctatgccaacgtaagtggctccgaccaacgcccctactgctggcac

SEQ ID NO: 428326 - DNA, 55 bp, Artificial
  Synthetic oligonucleotide
ggggccctcataacaccatgtgggcccgaggaggagaagttgccgattaaccctc

SEQ ID NO: 428327 - DNA, 54 bp, Artificial
  Synthetic oligonucleotide
ggggccctcccattgtggaaagtccaatttcatggacgtgcttgggatggcgct

SEQ ID NO: 428328 - DNA, 54 bp, Artificial
  Synthetic oligonucleotide
ggggccctttcttacctcaatgctttcccctgtggaattcttggggcagatccg

SEQ ID NO: 428329 - DNA, 56 bp, Artificial
  Synthetic oligonucleotide
ggggccgaaagccacgtcctaaccgacccaccatgtgtgcgaccctggcacggcaa

SEQ ID NO: 428330 - DNA, 54 bp, Artificial
  Synthetic oligonucleotide
ggggccgacccctctcctttacaggctggggtccgtgcaaaatgaggtgacact

SEQ ID NO: 428331 - DNA, 55 bp, Artificial
  Synthetic oligonucleotide
ggggccgacggagatctggtgcggtttaaaacgcctggcggctcagaacgtgtct

SEQ ID NO: 428332 - DNA, 55 bp, Artificial
  Synthetic oligonucleotide
ggggccgagtagttcatcctattgttaaatggtctgtcttgaaaccctcccatac

SEQ ID NO: 428333 - DNA, 55 bp, Artificial
  Synthetic oligonucleotide
ggggccgcaatacagcaggtgggagctccacatactacaacttggtcggggatgt

SEQ ID NO: 428334 - DNA, 55 bp, Artificial
  Synthetic oligonucleotide
ggggccgcagctagtctctgtgggtgtgtttattcaacagtctataacacaaagg

SEQ ID NO: 428335 - DNA, 52 bp, Artificial
  Synthetic oligonucleotide
ggggccgcccaccaaacactccacctggcccggccgagggtagtagctctgc

SEQ ID NO: 428336 - DNA, 55 bp, Artificial
  Synthetic oligonucleotide
ggggccgcggactctgttgctgtaaataagaggaagttgccataacaacgaggag

SEQ ID NO: 428337 - DNA, 56 bp, Artificial
  Synthetic oligonucleotide
ggggccgcttaacttttgaacatgcggaataaacctaggcaaagcatgccgttcca

SEQ ID NO: 428338 - DNA, 55 bp, Artificial
  Synthetic oligonucleotide
ggggccgcttacggcttccaatattcacctaatcagagagtggaatatctcctca

SEQ ID NO: 428339 - DNA, 56 bp, Artificial
  Synthetic oligonucleotide
ggggccggaacgaagaccatcgcatcacccaagggccctgttactcaaatgtatac

SEQ ID NO: 428340 - DNA, 57 bp, Artificial
  Synthetic oligonucleotide
ggggccggcagatagtttcggaggacaagggtggcgactccttgcgcctatcacggc

SEQ ID NO: 428341 - DNA, 54 bp, Artificial
  Synthetic oligonucleotide
ggggccgggcccactattgttgtgggctccgagttcctctagggatggccgaaa

SEQ ID NO: 428342 - DNA, 50 bp, Artificial
  Synthetic oligonucleotide
ggggccgtaaaggccccaagaatcctttcaggtgagtgcccggaacccgt

SEQ ID NO: 428343 - DNA, 52 bp, Artificial
  Synthetic oligonucleotide
ggggccgtaacacggcaggtgggacctctacctactacaacttggtagggga

SEQ ID NO: 428344 - DNA, 54 bp, Artificial
  Synthetic oligonucleotide
ggggccgtaagcgcaagtcaaacggtagccagggccgttgctcaaacaatcccg

SEQ ID NO: 428345 - DNA, 53 bp, Artificial
  Synthetic oligonucleotide
ggggccgtccccggggtcgtttaccattcccctgaagcatgtccacttgatcc

SEQ ID NO: 428346 - DNA, 57 bp, Artificial
  Synthetic oligonucleotide
ggggccgttccaggtacaacttcgaatgaagctgaaattatcaacgtcatttcaaga

SEQ ID NO: 428347 - DNA, 52 bp, Artificial
  Synthetic oligonucleotide
ggggccgttcgacgctccacgggcttcccctgcgcgacaactacggtgatgg

SEQ ID NO: 428348 - DNA, 60 bp, Artificial
  Synthetic oligonucleotide
ggggcctacttggctgcatcatcactagcctcacaggccgggataagaaccaggtcgagg

SEQ ID NO: 428349 - DNA, 51 bp, Artificial
  Synthetic oligonucleotide
ggggcctatggtggtcggttgttaataggaatctttccaccagggattaat

SEQ ID NO: 428350 - DNA, 60 bp, Artificial
  Synthetic oligonucleotide
ggggcctccgaccagatagtatcaataagtgttgcgcaatgtcgttgtctgaatcggtaa

SEQ ID NO: 428351 - DNA, 55 bp, Artificial
  Synthetic oligonucleotide
ggggcctcgccattgaatgctggacatttctttggggccttatgttttgtttgcc

SEQ ID NO: 428352 - DNA, 51 bp, Artificial
  Synthetic oligonucleotide
ggggcctctaacttcgactggcgttcaactaactgccgcatgtgcattcgc

SEQ ID NO: 428353 - DNA, 53 bp, Artificial
  Synthetic oligonucleotide
ggggcctgagaacaacgagactgagatcttcagacctggaggaggcgatatga

SEQ ID NO: 428354 - DNA, 55 bp, Artificial
  Synthetic oligonucleotide
ggggcctgatgaaccgttctcagaattcgttcatagacttatgacaacagctggc

SEQ ID NO: 428355 - DNA, 55 bp, Artificial
  Synthetic oligonucleotide
ggggcctgccttcaacgcactacagaggagaatctatgccaacccttccgagagg

SEQ ID NO: 428356 - DNA, 60 bp, Artificial
  Synthetic oligonucleotide
ggggcctgctgattttacaaagatctgcaaagcgattcagtggactaatctcgacctcac

SEQ ID NO: 428357 - DNA, 55 bp, Artificial
  Synthetic oligonucleotide
ggggcctggaaacatgtccagagaattgaaacttggatcttgagacatccaggct

SEQ ID NO: 428358 - DNA, 55 bp, Artificial
  Synthetic oligonucleotide
ggggcctgtggttggtatgtttcagatgacttgagagcgtctttatgtaaatgca

SEQ ID NO: 428359 - DNA, 58 bp, Artificial
  Synthetic oligonucleotide
ggggcctgtttggtgcaatagcagggttcatagagaacggatgggaaggaatggtaga

SEQ ID NO: 428360 - DNA, 52 bp, Artificial
  Synthetic oligonucleotide
ggggccttggattagtccttggcttcaccacggaaaaggttgggcgtatgct

SEQ ID NO: 428361 - DNA, 55 bp, Artificial
  Synthetic oligonucleotide
ggggcctttagatgactatgcagatgaggacgtggatgttgtattcacttcggac

SEQ ID NO: 428362 - DNA, 55 bp, Artificial
  Synthetic oligonucleotide
ggggcgaaaccttttagcctcatccagggagcttttcaagctcttaactccacga

SEQ ID NO: 428363 - DNA, 55 bp, Artificial
  Synthetic oligonucleotide
ggggcgaaagcatagtaatagagccggaggtcccagcaccacctactgaggactt

SEQ ID NO: 428364 - DNA, 60 bp, Artificial
  Synthetic oligonucleotide
ggggcgaagtatcctctcagataccatctgaggacaggatgaagtaattggtatccttgc

SEQ ID NO: 428365 - DNA, 54 bp, Artificial
  Synthetic oligonucleotide
ggggcgacaaactaccaaagataataagggaaccagaattcgcttcaaagacga

SEQ ID NO: 428366 - DNA, 55 bp, Artificial
  Synthetic oligonucleotide
ggggcgacacagacatcaaccaatccacagtacgcgcgtggtccggttactgttg

SEQ ID NO: 428367 - DNA, 60 bp, Artificial
  Synthetic oligonucleotide
ggggcgacccataggacgctctaatgtggacatggtgcgaagagtctattgagctagtta

SEQ ID NO: 428368 - DNA, 53 bp, Artificial
  Synthetic oligonucleotide
ggggcgagaaggatcgtatctagcggaggaaggtgcttgatagtccaatcccc

SEQ ID NO: 428369 - DNA, 55 bp, Artificial
  Synthetic oligonucleotide
ggggcgagacgttggtagtgctgtgtatagccccacacccagtgggtccatggta

SEQ ID NO: 428370 - DNA, 55 bp, Artificial
  Synthetic oligonucleotide
ggggcgaggcaaagagacataggaagctccacaacccagtggaaggatcgccacg

SEQ ID NO: 428371 - DNA, 60 bp, Artificial
  Synthetic oligonucleotide
ggggcgagggcacaagcagcgaagtgcaacgtgttctcaatcggtgagttcttgcgcgta

SEQ ID NO: 428372 - DNA, 55 bp, Artificial
  Synthetic oligonucleotide
ggggcgatcaaaacctgtgagcgtgccctggcagggaatacgcttatccatgcag

SEQ ID NO: 428373 - DNA, 59 bp, Artificial
  Synthetic oligonucleotide
ggggcgatcaacaaacgtattacctacacactactctagaatccacaaagatctaatca

SEQ ID NO: 428374 - DNA, 51 bp, Artificial
  Synthetic oligonucleotide
ggggcgatcggggtgaactgttacgacccgtgtgcgaaattaaaccgtttc

SEQ ID NO: 428375 - DNA, 52 bp, Artificial
  Synthetic oligonucleotide
ggggcgatgacaggaaactgttgtcattaggcgaaagcctctttgttgttaa

SEQ ID NO: 428376 - DNA, 55 bp, Artificial
  Synthetic oligonucleotide
ggggcgcaacatcaacaccacatataagtgtaatatcaggcacgaccgaattcgg

SEQ ID NO: 428377 - DNA, 59 bp, Artificial
  Synthetic oligonucleotide
ggggcgccatgtcgcacgctgtaccgttcacgctcgctctgtccgtctgggtcccgtcg

SEQ ID NO: 428378 - DNA, 60 bp, Artificial
  Synthetic oligonucleotide
ggggcgcctgcctacattgccggagaccatgcacggacgacagccaactgtgaaggacat

SEQ ID NO: 428379 - DNA, 59 bp, Artificial
  Synthetic oligonucleotide
ggggcgcgacgccgtcatcttactcacgtgtgttgtacacccgactctggtatttgaca

SEQ ID NO: 428380 - DNA, 53 bp, Artificial
  Synthetic oligonucleotide
ggggcgcgacgccgttatcttactcatgtgtgctgtgcacccgactttgatat

SEQ ID NO: 428381 - DNA, 55 bp, Artificial
  Synthetic oligonucleotide
ggggcgcgaggagatgtacaacaaatgttccagggtcgtaatgatcccatgatga

SEQ ID NO: 428382 - DNA, 53 bp, Artificial
  Synthetic oligonucleotide
ggggcgcgatgccgtcatcttactcatgtgtgtcatacacccgaccctgatat

SEQ ID NO: 428383 - DNA, 55 bp, Artificial
  Synthetic oligonucleotide
ggggcgcgtcaccaatgggcgggatgccgagtattgcttcaagctcaagtgctga

SEQ ID NO: 428384 - DNA, 55 bp, Artificial
  Synthetic oligonucleotide
ggggcgctagggtttcacccctagcataccaacgacagctcctgcgttgcactcc

SEQ ID NO: 428385 - DNA, 53 bp, Artificial
  Synthetic oligonucleotide
ggggcggaatggaagtcgggaaagtgaagaccggggacgcaccaagttatggc

SEQ ID NO: 428386 - DNA, 55 bp, Artificial
  Synthetic oligonucleotide
ggggcggcaaaagtacacccggtggtaatggtgcagctaatgctagacgagctat

SEQ ID NO: 428387 - DNA, 53 bp, Artificial
  Synthetic oligonucleotide
ggggcggcaagcgtaagggtgacaacaccgccggctttgtcgatgaccccggc

SEQ ID NO: 428388 - DNA, 51 bp, Artificial
  Synthetic oligonucleotide
ggggcggcgtcctcagtactctcttactttctcaagaaaagaggagactgc

SEQ ID NO: 428389 - DNA, 58 bp, Artificial
  Synthetic oligonucleotide
ggggcggctctcccctgccttcacaggcaatcgacgacccctgccagaagtccaccca

SEQ ID NO: 428390 - DNA, 55 bp, Artificial
  Synthetic oligonucleotide
ggggcggctgctctctgttccgctatgtacgttggggatctctgcggatccgttt

SEQ ID NO: 428391 - DNA, 53 bp, Artificial
  Synthetic oligonucleotide
ggggcgggatcttttataagaaaacgccttcgctccgtcggtatagatcttaa

SEQ ID NO: 428392 - DNA, 55 bp, Artificial
  Synthetic oligonucleotide
ggggcggggataccctatcacgctgacgatgaaacgtgttacaaggagcctagtg

SEQ ID NO: 428393 - DNA, 55 bp, Artificial
  Synthetic oligonucleotide
ggggcggggcaggtgacgttttgatgacgtgactatgaggaggagttagtttgca

SEQ ID NO: 428394 - DNA, 51 bp, Artificial
  Synthetic oligonucleotide
ggggcggtgatggtcgggatcgtggcgatgaatgcccatgaggtcgccgac

SEQ ID NO: 428395 - DNA, 54 bp, Artificial
  Synthetic oligonucleotide
ggggcggtgttggtgcctctaaatttggtgatggttggtctaagtatggtaaag

SEQ ID NO: 428396 - DNA, 55 bp, Artificial
  Synthetic oligonucleotide
ggggcgtaccgcatggttcgtcccctcgattgcaaaaggtggcatcatagcacgt

SEQ ID NO: 428397 - DNA, 60 bp, Artificial
  Synthetic oligonucleotide
ggggcgtacctgggtgagaaacctaaccacagacatctgatagagagagactgtgcaacg

SEQ ID NO: 428398 - DNA, 55 bp, Artificial
  Synthetic oligonucleotide
ggggcgtacgggtttaacacacttaacaagatggggcacatatacgttcggcatg

SEQ ID NO: 428399 - DNA, 56 bp, Artificial
  Synthetic oligonucleotide
ggggcgtactgggtacattcctgtaggttcgcgacccaccactgtagttgacattg

SEQ ID NO: 428400 - DNA, 55 bp, Artificial
  Synthetic oligonucleotide
ggggcgtatagctaaatttcatcggcacaaaataaacagggctaagttgttggag

SEQ ID NO: 428401 - DNA, 55 bp, Artificial
  Synthetic oligonucleotide
ggggcgtatatgtctaaggcacatggtgtcgaccccaatattagaaccggggtaa

SEQ ID NO: 428402 - DNA, 53 bp, Artificial
  Synthetic oligonucleotide
ggggcgtatcatccgagacgcccgacgtcgggaaccaagaaaagcagctgcta

SEQ ID NO: 428403 - DNA, 55 bp, Artificial
  Synthetic oligonucleotide
ggggcgtatgccagaaccaggtctcttggaggccgcagttgagactgtgacctca

SEQ ID NO: 428404 - DNA, 55 bp, Artificial
  Synthetic oligonucleotide
ggggcgtatggatcgaatcgctaaatcaatccgtacttttggaactatcggcgct

SEQ ID NO: 428405 - DNA, 55 bp, Artificial
  Synthetic oligonucleotide
ggggcgtcaagttataccagcgaccaaacaaacctctagcacttgtagacaataa

SEQ ID NO: 428406 - DNA, 55 bp, Artificial
  Synthetic oligonucleotide
ggggcgtcaatactgttcgaagtcatgcaaggctgaccataagcttcaatccagg

SEQ ID NO: 428407 - DNA, 55 bp, Artificial
  Synthetic oligonucleotide
ggggcgtcccgagaactcttatcttcctgcttagaagaggagtctcctggacgcc

SEQ ID NO: 428408 - DNA, 51 bp, Artificial
  Synthetic oligonucleotide
ggggcgtcgaggaagatgaattttgcattgtggagtgtccaagcacggagt

SEQ ID NO: 428409 - DNA, 55 bp, Artificial
  Synthetic oligonucleotide
ggggcgtgacgccgtcatcttactcacgtgtgccatacacccgaccttggtgttc

SEQ ID NO: 428410 - DNA, 52 bp, Artificial
  Synthetic oligonucleotide
ggggcgtgacgctatcatcttactcgtgtgtgctgtacacccggctttgata

SEQ ID NO: 428411 - DNA, 59 bp, Artificial
  Synthetic oligonucleotide
ggggcgtgactccattgttgagaagatcgtagtgccccacatcgaggaaaaggttgaca

SEQ ID NO: 428412 - DNA, 51 bp, Artificial
  Synthetic oligonucleotide
ggggcgtggacgtcaagcggcctctggtcgtcacttatatgacagccgcgt

SEQ ID NO: 428413 - DNA, 55 bp, Artificial
  Synthetic oligonucleotide
ggggcgttaacgacagtgatccaccaaggcctcgacgaaacagcgaattgtttgc

SEQ ID NO: 428414 - DNA, 53 bp, Artificial
  Synthetic oligonucleotide
ggggcgttacaggaggtgtggtttgggcggaactagggagtggccaaccctca

SEQ ID NO: 428415 - DNA, 50 bp, Artificial
  Synthetic oligonucleotide
ggggcgttccagggggtgtggtcggggcgggactagggagtggtcaaccc

SEQ ID NO: 428416 - DNA, 54 bp, Artificial
  Synthetic oligonucleotide
ggggcgttcggctaccagttcccaacagactcgccgggcgttaagtacctcgca

SEQ ID NO: 428417 - DNA, 55 bp, Artificial
  Synthetic oligonucleotide
ggggcgtttgattttcccacagggaacggaaactacaatgcagcggatgccctta

SEQ ID NO: 428418 - DNA, 54 bp, Artificial
  Synthetic oligonucleotide
ggggcgtttgctaaatcgccggacaaaagtcatcataatacgaactgtggttta

SEQ ID NO: 428419 - DNA, 54 bp, Artificial
  Synthetic oligonucleotide
ggggcgtttgtgaacttcttggtaccttctcccgtggctctgacgaggggaaca

SEQ ID NO: 428420 - DNA, 55 bp, Artificial
  Synthetic oligonucleotide
ggggctaaagttctcaccgtcaatttaaatggccagtgctacttctctttctcga

SEQ ID NO: 428421 - DNA, 55 bp, Artificial
  Synthetic oligonucleotide
ggggctacaccttccagagctacgcgtaccagagccgtctccagagacagacgga

SEQ ID NO: 428422 - DNA, 55 bp, Artificial
  Synthetic oligonucleotide
ggggctacattagaagaaatgatgacatcatgccagggagtgggaggacccggac

SEQ ID NO: 428423 - DNA, 55 bp, Artificial
  Synthetic oligonucleotide
ggggctacccaatctgacaaagccttttacattgtatgtgtcagagagagaaaag

SEQ ID NO: 428424 - DNA, 55 bp, Artificial
  Synthetic oligonucleotide
ggggctacgaacccagaagttattgcggccatccaccattggcagaagtaccctt

SEQ ID NO: 428425 - DNA, 57 bp, Artificial
  Synthetic oligonucleotide
ggggctacgctttatggaatagggttgtcacagccgctggcttgactccttctccgg

SEQ ID NO: 428426 - DNA, 55 bp, Artificial
  Synthetic oligonucleotide
ggggctactgataaaggagtagtaatgagccaggacgccgtacatcgaaggcaac

SEQ ID NO: 428427 - DNA, 55 bp, Artificial
  Synthetic oligonucleotide
ggggctagaagtaggtcgtggacagcctttgggcgttggtattagtggccatccg

SEQ ID NO: 428428 - DNA, 54 bp, Artificial
  Synthetic oligonucleotide
ggggctagaatccctatactgtaaagaatggagttgtgagaccacgggtaccgt

SEQ ID NO: 428429 - DNA, 53 bp, Artificial
  Synthetic oligonucleotide
ggggctagcgggtggatgttccaccccccggcggggccgagtgaggcttatcc

SEQ ID NO: 428430 - DNA, 55 bp, Artificial
  Synthetic oligonucleotide
ggggctagtacgccccgcgacctcgtaggcatatcaactgtggtctctaaggtgg

SEQ ID NO: 428431 - DNA, 60 bp, Artificial
  Synthetic oligonucleotide
ggggctagttccctaatgactctaagagcctctgacttactgcctgagttaagtgctgcg

SEQ ID NO: 428432 - DNA, 55 bp, Artificial
  Synthetic oligonucleotide
ggggctatagcaggctttatagaaggagggtggcaaggaatggtagacggttggt

SEQ ID NO: 428433 - DNA, 55 bp, Artificial
  Synthetic oligonucleotide
ggggctatgcatacagcactcacaggggctacggaaatccagatgtcatcaggaa

SEQ ID NO: 428434 - DNA, 55 bp, Artificial
  Synthetic oligonucleotide
ggggctatggacaactttaaatcagcactagaaggtttgggtatagcagcgtacg

SEQ ID NO: 428435 - DNA, 55 bp, Artificial
  Synthetic oligonucleotide
ggggctatggattttgctgctttacagcaagacaagtctgatgtccctttagatg

SEQ ID NO: 428436 - DNA, 60 bp, Artificial
  Synthetic oligonucleotide
ggggctatgtcaataatggaactggctacagctgggatagggatgtcagataaaaaccta

SEQ ID NO: 428437 - DNA, 59 bp, Artificial
  Synthetic oligonucleotide
ggggctattgaaacgtctgggatatattgcacgctaattcatatcgggttataagtata

SEQ ID NO: 428438 - DNA, 55 bp, Artificial
  Synthetic oligonucleotide
ggggctatttgggcaaaatatgcagtaccactaccttgggagagccgggtacacg

SEQ ID NO: 428439 - DNA, 56 bp, Artificial
  Synthetic oligonucleotide
ggggctcaaggactgaggaagctaagggcaagaccaagcatggacgcggcatgcgc

SEQ ID NO: 428440 - DNA, 55 bp, Artificial
  Synthetic oligonucleotide
ggggctcacgacttatggctatgggcaccagaacaaggcagtgtacacagctggg

SEQ ID NO: 428441 - DNA, 56 bp, Artificial
  Synthetic oligonucleotide
ggggctcacttggccccccacttgcttactttagcctgtatgcctcaaggaagtta

SEQ ID NO: 428442 - DNA, 50 bp, Artificial
  Synthetic oligonucleotide
ggggctcatagctgcttcgaatgaatttcgtgtcgttcgagtacgagatc

SEQ ID NO: 428443 - DNA, 56 bp, Artificial
  Synthetic oligonucleotide
ggggctccagttccggaacagtaaaccctgttccgactactgtctctcacatatcg

SEQ ID NO: 428444 - DNA, 60 bp, Artificial
  Synthetic oligonucleotide
ggggctccctgtagcagtggatgtagttgccgctctcaggctggaatattgctaattcca

SEQ ID NO: 428445 - DNA, 55 bp, Artificial
  Synthetic oligonucleotide
ggggctcctcacgctgtcaagatggacgtgtacaacctcggagaccagactggag

SEQ ID NO: 428446 - DNA, 57 bp, Artificial
  Synthetic oligonucleotide
ggggctccttaaagtataccttcacatattgtggatctagcatggtgaccggaaaat

SEQ ID NO: 428447 - DNA, 53 bp, Artificial
  Synthetic oligonucleotide
ggggctcggctgctcaaaccactagcggcctggttagcatgttcgcccctgga

SEQ ID NO: 428448 - DNA, 55 bp, Artificial
  Synthetic oligonucleotide
ggggctcgtatccaacatctacaatagtacgggacaccttagtattgataaagcc

SEQ ID NO: 428449 - DNA, 52 bp, Artificial
  Synthetic oligonucleotide
ggggctcgtttgctaggaatttctgggcagagtaccatggtacagcagcttg

SEQ ID NO: 428450 - DNA, 57 bp, Artificial
  Synthetic oligonucleotide
ggggctctcaaaactctacggaatggggtgctcggggtgcctatatatgttgagccc

SEQ ID NO: 428451 - DNA, 52 bp, Artificial
  Synthetic oligonucleotide
ggggctctgtacattgtagttgcgcctggcaacgggttggaattcacggtgc

SEQ ID NO: 428452 - DNA, 55 bp, Artificial
  Synthetic oligonucleotide
ggggctgacctgtcaaccgtcatacgatctgcacgggcttttggccccttctgtg

SEQ ID NO: 428453 - DNA, 57 bp, Artificial
  Synthetic oligonucleotide
ggggctgatacggaggaagttgatctccgtgagcgcgaacgcgctcgaaattaaggt

SEQ ID NO: 428454 - DNA, 57 bp, Artificial
  Synthetic oligonucleotide
ggggctgatcccatgaaggaaccagtagactgccgtctttcgacgccagccggtttc

SEQ ID NO: 428455 - DNA, 55 bp, Artificial
  Synthetic oligonucleotide
ggggctgcattcttggtgggtccgcgaacttttaagttcgtgttggcctatctgc

SEQ ID NO: 428456 - DNA, 55 bp, Artificial
  Synthetic oligonucleotide
ggggctgcggcatgatttcatccccatattgtagtttatgtttaaatagtttaac

SEQ ID NO: 428457 - DNA, 51 bp, Artificial
  Synthetic oligonucleotide
ggggctggcaccaagatggtgactgaccgctcgatcttacagagttctcgt

SEQ ID NO: 428458 - DNA, 53 bp, Artificial
  Synthetic oligonucleotide
ggggctggcacctgttccgacacattgaaacccgctttcagctccttgccact

SEQ ID NO: 428459 - DNA, 55 bp, Artificial
  Synthetic oligonucleotide
ggggctgtacaaagacgggaacaagtgtatgcacatcaacggcccgcacaaacca

SEQ ID NO: 428460 - DNA, 60 bp, Artificial
  Synthetic oligonucleotide
ggggctgtattatgaggtgcagggatgcaaacattactatgtggcgtttgcaaaggaggc

SEQ ID NO: 428461 - DNA, 55 bp, Artificial
  Synthetic oligonucleotide
ggggctgtctggacatgctcaacctcagacgatgctagaaagtggaatcaaggac

SEQ ID NO: 428462 - DNA, 55 bp, Artificial
  Synthetic oligonucleotide
ggggctgtgaccactgaagtggcctttggcctggtatgtgcaacctgtgaacaga

SEQ ID NO: 428463 - DNA, 52 bp, Artificial
  Synthetic oligonucleotide
ggggctgtgagggtgacgaagatcgcattatgaatagtccagttgtgtaaag

SEQ ID NO: 428464 - DNA, 55 bp, Artificial
  Synthetic oligonucleotide
ggggctgttcgacgctccacggtctctcccgtgtaacagactacggtgttggggc

SEQ ID NO: 428465 - DNA, 54 bp, Artificial
  Synthetic oligonucleotide
ggggcttaacggccccggctccctgtgagccaaaccgaaaggaccacatgagga

SEQ ID NO: 428466 - DNA, 53 bp, Artificial
  Synthetic oligonucleotide
ggggcttaatttcgattttgaatcacgaacgaaagacaaatcagaactttggt

SEQ ID NO: 428467 - DNA, 55 bp, Artificial
  Synthetic oligonucleotide
ggggcttaccccaagatccagactaccagccgcgtgctgcgatccctgttctgga

SEQ ID NO: 428468 - DNA, 55 bp, Artificial
  Synthetic oligonucleotide
ggggcttagtttagcagttaaacagacgccatccagtattcatcaagaattggcg

SEQ ID NO: 428469 - DNA, 54 bp, Artificial
  Synthetic oligonucleotide
ggggcttattattacccccagctgctcaggacgggacatgggctttttaaatgg

SEQ ID NO: 428470 - DNA, 54 bp, Artificial
  Synthetic oligonucleotide
ggggcttcacctaccacaaataggggggcctatcttacctcgagggtgtgtgta

SEQ ID NO: 428471 - DNA, 52 bp, Artificial
  Synthetic oligonucleotide
ggggcttcacgttttcccaggtcagaagcggttttcgggagtagtgccccaa

SEQ ID NO: 428472 - DNA, 55 bp, Artificial
  Synthetic oligonucleotide
ggggcttcataactggctggcaagattacaccaaagggcctggagtgagatatcc

SEQ ID NO: 428473 - DNA, 52 bp, Artificial
  Synthetic oligonucleotide
ggggcttccatcagagatttgggacgtcaattgcaacgttgcgtaagtggaa

SEQ ID NO: 428474 - DNA, 51 bp, Artificial
  Synthetic oligonucleotide
ggggcttcccaggatctcaaaggtccttgttttctacccgtccaaggaagg

SEQ ID NO: 428475 - DNA, 55 bp, Artificial
  Synthetic oligonucleotide
ggggcttccctcacggcaccctgcccatgtttctcccaacattccttcatccaat

SEQ ID NO: 428476 - DNA, 55 bp, Artificial
  Synthetic oligonucleotide
ggggcttcgcgactataatggtatctcgagtttggtttgtcagcttacaaacatc

SEQ ID NO: 428477 - DNA, 52 bp, Artificial
  Synthetic oligonucleotide
ggggcttcttctttaaaactgtatgggcctttggcctcattaaccctaccca

SEQ ID NO: 428478 - DNA, 55 bp, Artificial
  Synthetic oligonucleotide
ggggcttcttgcatcatcagtatatcgatagtttcgaccatgtcctcttgtcgga

SEQ ID NO: 428479 - DNA, 51 bp, Artificial
  Synthetic oligonucleotide
ggggcttgctaaaaccgcattcttaggtaaattcccagattacgttgaggt

SEQ ID NO: 428480 - DNA, 52 bp, Artificial
  Synthetic oligonucleotide
ggggcttgtgaggctctttacgcctgggccgtcccaaaacatccagcttata

SEQ ID NO: 428481 - DNA, 60 bp, Artificial
  Synthetic oligonucleotide
ggggcttgtgccatatgtttaatcatctcaggggctgtctactgtgattaacagggtgat

SEQ ID NO: 428482 - DNA, 51 bp, Artificial
  Synthetic oligonucleotide
ggggctttacttggacgaattcactgagattaacgaggaatggctgagcgg

SEQ ID NO: 428483 - DNA, 55 bp, Artificial
  Synthetic oligonucleotide
ggggctttgcagataggatatctttatggactagggaagacacaaaggatatcgg

SEQ ID NO: 428484 - DNA, 55 bp, Artificial
  Synthetic oligonucleotide
ggggctttgcggtggtgctttgagcttgaggaggttgacaatcctagggagctac

SEQ ID NO: 428485 - DNA, 58 bp, Artificial
  Synthetic oligonucleotide
ggggcttttgctctttcgttctgtggaggtgtagggtcctttggagtcatatcaatga

SEQ ID NO: 428486 - DNA, 54 bp, Artificial
  Synthetic oligonucleotide
ggggcttttgtagctccagaccgtgtaagcttctttaaagggaaatctatggga

SEQ ID NO: 428487 - DNA, 54 bp, Artificial
  Synthetic oligonucleotide
ggggctttttgaacgcgggaacaacttgaatttcgcagacacctatatatacac

SEQ ID NO: 428488 - DNA, 53 bp, Artificial
  Synthetic oligonucleotide
gggggaaacctctactatgactacaggggagaccccgacgacatttaccagct

SEQ ID NO: 428489 - DNA, 56 bp, Artificial
  Synthetic oligonucleotide
gggggaaagaaaaaatatcgcttaaaacatatagtatgggcaagcagggagctaga

SEQ ID NO: 428490 - DNA, 51 bp, Artificial
  Synthetic oligonucleotide
gggggaaaggtgggccccacctttctgcataagtttgggtttattgcagtt

SEQ ID NO: 428491 - DNA, 59 bp, Artificial
  Synthetic oligonucleotide
gggggaacgtattattgtcacctgaagaagtcagcgagacacaaggaacagagaggctg

SEQ ID NO: 428492 - DNA, 55 bp, Artificial
  Synthetic oligonucleotide
gggggaactgttttgcgtgctggctgcttttagcgggtgcagacaggggtagggg

SEQ ID NO: 428493 - DNA, 60 bp, Artificial
  Synthetic oligonucleotide
gggggaagggataccgctatatgatgcgatcaaatgcatgaaaacattctatggctggaa

SEQ ID NO: 428494 - DNA, 50 bp, Artificial
  Synthetic oligonucleotide
gggggaagtccccttttacggtaaggcgattcccctagagctaatcaagg

SEQ ID NO: 428495 - DNA, 52 bp, Artificial
  Synthetic oligonucleotide
gggggaagtgccggccacaccgtggctgggcttgctagtcttttctcaccag

SEQ ID NO: 428496 - DNA, 51 bp, Artificial
  Synthetic oligonucleotide
gggggaatggtataactcaccgggtagggaagcgtttttgtgttaagtctg

SEQ ID NO: 428497 - DNA, 60 bp, Artificial
  Synthetic oligonucleotide
gggggacaatgaggagcatgcacggttattaaacctgcagcggctagaacgagacttgtc

SEQ ID NO: 428498 - DNA, 55 bp, Artificial
  Synthetic oligonucleotide
gggggacaccttggatggtgtccgagtgaaacctgtgctcactagtgtggatggt

SEQ ID NO: 428499 - DNA, 51 bp, Artificial
  Synthetic oligonucleotide
gggggacccaaacgaactctatccgtttgcctccctcaaatccctctttgg

SEQ ID NO: 428500 - DNA, 56 bp, Artificial
  Synthetic oligonucleotide
gggggaccccgaagaccccaagactcatgaattcagcagatcctacctcaaagaag

SEQ ID NO: 428501 - DNA, 57 bp, Artificial
  Synthetic oligonucleotide
gggggagaagatgggtgcgagagcgtcagttctaacagggggaaaattagatcgctg

SEQ ID NO: 428502 - DNA, 56 bp, Artificial
  Synthetic oligonucleotide
gggggagaatggtcagcgggatacagtaacgggacaaactgttcctccagtgacac

SEQ ID NO: 428503 - DNA, 53 bp, Artificial
  Synthetic oligonucleotide
gggggagatacccttttatggcaaggcgatccccctagagctaatcaaggggg

SEQ ID NO: 428504 - DNA, 58 bp, Artificial
  Synthetic oligonucleotide
gggggagccattgactttggtcaattggagacaactgattggattttactctggcaat

SEQ ID NO: 428505 - DNA, 56 bp, Artificial
  Synthetic oligonucleotide
gggggagcgttcctaaactcgccggcaacagaccgttcacatttggccatcgagaa

SEQ ID NO: 428506 - DNA, 60 bp, Artificial
  Synthetic oligonucleotide
gggggaggatttggatgtgaacaattctccttagacagtttgtatgcagattataagcta

SEQ ID NO: 428507 - DNA, 48 bp, Artificial
  Synthetic oligonucleotide
gggggaggcccggtgcccgggccccccccccctgtgacgtcacttcct

SEQ ID NO: 428508 - DNA, 59 bp, Artificial
  Synthetic oligonucleotide
gggggagggagtactgcggtacatatggttacagattctggaaactgtataattgctca

SEQ ID NO: 428509 - DNA, 54 bp, Artificial
  Synthetic oligonucleotide
gggggataccacgtacggtactataccgacttgcaatacccttccagagagaac

SEQ ID NO: 428510 - DNA, 60 bp, Artificial
  Synthetic oligonucleotide
gggggatactgcctagaaaaatggatgctagtggccagtcaactgaagtgctttggcaac

SEQ ID NO: 428511 - DNA, 55 bp, Artificial
  Synthetic oligonucleotide
gggggatccttccggcagtccggttgcgggagggatcaatactgaccgtctcacg

SEQ ID NO: 428512 - DNA, 60 bp, Artificial
  Synthetic oligonucleotide
gggggatgataaaaatgcaactgctagcttcatttacaatgggaggcttgtagatagtat

SEQ ID NO: 428513 - DNA, 54 bp, Artificial
  Synthetic oligonucleotide
gggggatgattcaacaccaggattcattgtggatctccttagtgcctccaagga

SEQ ID NO: 428514 - DNA, 58 bp, Artificial
  Synthetic oligonucleotide
gggggatgcatacttttcagtccccttagatgaggctttcaggaagtacactgcattc

SEQ ID NO: 428515 - DNA, 54 bp, Artificial
  Synthetic oligonucleotide
gggggatgttatcaaccgtggtataacatattgtacataactccagttctctaa

SEQ ID NO: 428516 - DNA, 58 bp, Artificial
  Synthetic oligonucleotide
gggggattatacgtcctacgtgacactcccatgtcgaggcatcgatggtaatggggga

SEQ ID NO: 428517 - DNA, 53 bp, Artificial
  Synthetic oligonucleotide
gggggattggggctaaatttgtcttagtcccgcgtgatatgtgttcgggttta

SEQ ID NO: 428518 - DNA, 52 bp, Artificial
  Synthetic oligonucleotide
gggggcaacgcctgtaaaactactgcacgggcggtagcaacacgcaacatcg

SEQ ID NO: 428519 - DNA, 60 bp, Artificial
  Synthetic oligonucleotide
gggggcaagcgcttaacagggaggtgcgcgcactgatagacgcgatagagcgagattacc

SEQ ID NO: 428520 - DNA, 60 bp, Artificial
  Synthetic oligonucleotide
gggggcaatcagtttctggatgtgttctaatgggtcattgcaatgcagaatatgcattta

SEQ ID NO: 428521 - DNA, 59 bp, Artificial
  Synthetic oligonucleotide
gggggcacagtaattagttatgtaaattcaagtagccatttttggctgcagccattatg

SEQ ID NO: 428522 - DNA, 55 bp, Artificial
  Synthetic oligonucleotide
gggggcaggtagctttctccactcacggctttacgcgtctctttgcacgtgggcc

SEQ ID NO: 428523 - DNA, 59 bp, Artificial
  Synthetic oligonucleotide
gggggcataatgacaacctgggaatcctacgggcgtccaataggatagcgtgcatgttg

SEQ ID NO: 428524 - DNA, 52 bp, Artificial
  Synthetic oligonucleotide
gggggccaaactcaagggtgcaagaaaagagaggatttaggtccctctcggc

SEQ ID NO: 428525 - DNA, 57 bp, Artificial
  Synthetic oligonucleotide
gggggccaaactggagcgcaaccaaaacactccaataactgtcaatgtgaggacctc

SEQ ID NO: 428526 - DNA, 60 bp, Artificial
  Synthetic oligonucleotide
gggggccaacggtcatgaaaggatacactacagaggaggtagcacagcacatttggagcg

SEQ ID NO: 428527 - DNA, 52 bp, Artificial
  Synthetic oligonucleotide
gggggccttttcctagttagggatgtagggtaaaggaccaatagagtcgcat

SEQ ID NO: 428528 - DNA, 57 bp, Artificial
  Synthetic oligonucleotide
gggggcgccctttcggttgggatctctgaaggtgtcattgtaggtgagagtatgacc

SEQ ID NO: 428529 - DNA, 59 bp, Artificial
  Synthetic oligonucleotide
gggggcgcgacgccatcatcttactcacgtgtgcagtacacccgactttggtattcgat

SEQ ID NO: 428530 - DNA, 60 bp, Artificial
  Synthetic oligonucleotide
gggggcgctacaaacagcttacgtgacgcctccttctagtagagcatctagtaatggcac

SEQ ID NO: 428531 - DNA, 51 bp, Artificial
  Synthetic oligonucleotide
gggggcgtcttaggcttttggatgttaatgaattgtaatgtgggaggaaac

SEQ ID NO: 428532 - DNA, 60 bp, Artificial
  Synthetic oligonucleotide
gggggcgtttgacagcagcctagcacgcagacacatggcccgtgagaaacatccggagtt

SEQ ID NO: 428533 - DNA, 60 bp, Artificial
  Synthetic oligonucleotide
gggggctactacacatccgtcagcagcctaatcactatcgccgctagtgaccgtcacggc

SEQ ID NO: 428534 - DNA, 54 bp, Artificial
  Synthetic oligonucleotide
gggggctctccaaaacttgtatgaatggggtgctatgggagcccttatatacct

SEQ ID NO: 428535 - DNA, 60 bp, Artificial
  Synthetic oligonucleotide
gggggctgaacagattgacaatgtaatgggaatgattgggatactgcctgacatgactcc

SEQ ID NO: 428536 - DNA, 53 bp, Artificial
  Synthetic oligonucleotide
gggggcttacaattgacactactgacgggacattagaagaggacataaacatc

SEQ ID NO: 428537 - DNA, 60 bp, Artificial
  Synthetic oligonucleotide
ggggggaaaagtcccaaatatgccataggcaatatcagatgggctatgagatttgccttg

SEQ ID NO: 428538 - DNA, 55 bp, Artificial
  Synthetic oligonucleotide
ggggggaaccccaattgagagctcgctctataagtcatatgaattggggtaaagg

SEQ ID NO: 428539 - DNA, 55 bp, Artificial
  Synthetic oligonucleotide
ggggggacctagcgccccccaaaccataacacctataacagattctctcagtgag

SEQ ID NO: 428540 - DNA, 55 bp, Artificial
  Synthetic oligonucleotide
ggggggacgagcaacaactccttggtctgccccaccgattgtttccgcaaacatc

SEQ ID NO: 428541 - DNA, 56 bp, Artificial
  Synthetic oligonucleotide
ggggggagaccggtaagacggaggctgaacttcgagacagctatcgtgccctacac

SEQ ID NO: 428542 - DNA, 54 bp, Artificial
  Synthetic oligonucleotide
ggggggagagcctgtttctggaggggttggcatctcgcctgacaaggtgggatc

SEQ ID NO: 428543 - DNA, 57 bp, Artificial
  Synthetic oligonucleotide
ggggggagatgctaggagtcggaggagaccgaagcgaggaggaaagcaaagaaagca

SEQ ID NO: 428544 - DNA, 49 bp, Artificial
  Synthetic oligonucleotide
ggggggaggactaacctccccccgaaccatactacccctgatacctttg

SEQ ID NO: 428545 - DNA, 54 bp, Artificial
  Synthetic oligonucleotide
ggggggatctaataactctatctacctgggtgggtggtaatttggaagatccaa

SEQ ID NO: 428546 - DNA, 51 bp, Artificial
  Synthetic oligonucleotide
ggggggatgttttaagtgtggaaaacggggtcattttgcaaaagactgtcg

SEQ ID NO: 428547 - DNA, 59 bp, Artificial
  Synthetic oligonucleotide
ggggggcaagtggtcaaaaagcagtgtagttggatggcctgctgtaagagaaagactga

SEQ ID NO: 428548 - DNA, 54 bp, Artificial
  Synthetic oligonucleotide
ggggggcacctctcagaatttgtcctattgtccgtggtggttctgtctgacttt

SEQ ID NO: 428549 - DNA, 57 bp, Artificial
  Synthetic oligonucleotide
ggggggccaatccgctaatgtttagggcgaacgtgttgcacatgttgctagagtttg

SEQ ID NO: 428550 - DNA, 56 bp, Artificial
  Synthetic oligonucleotide
ggggggccaccacttacagacatcctcgtgacagttacctagtacacgttgaggtg

SEQ ID NO: 428551 - DNA, 55 bp, Artificial
  Synthetic oligonucleotide
ggggggccagtggagccatgggatgctcctcccgattccgcccaaactccttccc

SEQ ID NO: 428552 - DNA, 52 bp, Artificial
  Synthetic oligonucleotide
ggggggcgacatgtattacccacaggtcgttaaaaacccctgtggagactcc

SEQ ID NO: 428553 - DNA, 54 bp, Artificial
  Synthetic oligonucleotide
ggggggcgattatagtttcgcgctaccagttggaaactatccggtcatgaccgg

SEQ ID NO: 428554 - DNA, 49 bp, Artificial
  Synthetic oligonucleotide
gggggggacttcctgtggcaccccagttggtactccccccgccgaaaac

SEQ ID NO: 428555 - DNA, 54 bp, Artificial
  Synthetic oligonucleotide
gggggggagatctaatctccccccatcccgatcaagacatctcgatactcccac

SEQ ID NO: 428556 - DNA, 50 bp, Artificial
  Synthetic oligonucleotide
gggggggcccccccgatccgaaaggcccgacgcccaagtttggagagcac

SEQ ID NO: 428557 - DNA, 51 bp, Artificial
  Synthetic oligonucleotide
gggggggcccccgatccgagggtcccggctaccgagtttggagagcactcc

SEQ ID NO: 428558 - DNA, 49 bp, Artificial
  Synthetic oligonucleotide
ggggggggaaattaggccggccccgatagggaaatgggaccccgatata

SEQ ID NO: 428559 - DNA, 59 bp, Artificial
  Synthetic oligonucleotide
ggggggggcgcgatgccgtcatcttactcatgtgtgttgcacacccgatcttggtattc

SEQ ID NO: 428560 - DNA, 51 bp, Artificial
  Synthetic oligonucleotide
gggggggggcaacaacacgccagggcccttgcggtcccgtccgcagacccc

SEQ ID NO: 428561 - DNA, 53 bp, Artificial
  Synthetic oligonucleotide
gggggggtcggaaacgacaccttgatctgtcctacggactgcttccggaaaca

SEQ ID NO: 428562 - DNA, 56 bp, Artificial
  Synthetic oligonucleotide
gggggggttgggcgtcctgtatggtagctacatgttgtttgagggcctctaggtca

SEQ ID NO: 428563 - DNA, 52 bp, Artificial
  Synthetic oligonucleotide
ggggggtaatggaaccatggaagggggtaatgacactatcatactcccatgt

SEQ ID NO: 428564 - DNA, 50 bp, Artificial
  Synthetic oligonucleotide
ggggggtacgtcacaaagaggcgttcccgtacaggggggtacgtcacgcg

SEQ ID NO: 428565 - DNA, 53 bp, Artificial
  Synthetic oligonucleotide
ggggggtcgcgcctgcggcgctatttactaaacatacaccgaggggggaggcc

SEQ ID NO: 428566 - DNA, 56 bp, Artificial
  Synthetic oligonucleotide
ggggggtgatccaccaggagatgaaacggagaaatcacctccagaggaccccttca

SEQ ID NO: 428567 - DNA, 56 bp, Artificial
  Synthetic oligonucleotide
ggggggtgcttgacagaggtcccagtttcaaaccctactctgggacagcatacaat

SEQ ID NO: 428568 - DNA, 58 bp, Artificial
  Synthetic oligonucleotide
ggggggtggattccgtatctagagaggatatgttcagaggagaaagctcagagaaggt

SEQ ID NO: 428569 - DNA, 58 bp, Artificial
  Synthetic oligonucleotide
ggggggtggtgttcctgacattccttcaagcgcagacacatttaatgttgttacaagc

SEQ ID NO: 428570 - DNA, 55 bp, Artificial
  Synthetic oligonucleotide
ggggggttaactctgtgtcctattatcgggggaaagactcgtcctgcatcgtaga

SEQ ID NO: 428571 - DNA, 60 bp, Artificial
  Synthetic oligonucleotide
ggggggttcatcatccgagcactgacagggaacaaaccaacttatatgttcaagcatcag

SEQ ID NO: 428572 - DNA, 55 bp, Artificial
  Synthetic oligonucleotide
ggggggttgcccacgtatggcgcatggctaaccctcagcggggtgacgcccgtcg

SEQ ID NO: 428573 - DNA, 60 bp, Artificial
  Synthetic oligonucleotide
ggggggttgctccaatcgactggggtcgtgagatcccctctcggtgtacagatgcagtgc

SEQ ID NO: 428574 - DNA, 56 bp, Artificial
  Synthetic oligonucleotide
ggggggttgctgctagggctacgaacatgttcaccagttttctcagtccgggcgcc

SEQ ID NO: 428575 - DNA, 50 bp, Artificial
  Synthetic oligonucleotide
gggggtaaggttgagaagccttccctccagatacagactttactccactc

SEQ ID NO: 428576 - DNA, 53 bp, Artificial
  Synthetic oligonucleotide
gggggtaagtacatgcaagccttttgcctcaggctaggggcgcttggaggtac

SEQ ID NO: 428577 - DNA, 51 bp, Artificial
  Synthetic oligonucleotide
gggggtaatctctaccgacttaaccccgctaattcctccctattcacctgg

SEQ ID NO: 428578 - DNA, 59 bp, Artificial
  Synthetic oligonucleotide
gggggtaggggctattgctgcgcacaacgccattgaatccagcgagcagaaaaggaccc

SEQ ID NO: 428579 - DNA, 52 bp, Artificial
  Synthetic oligonucleotide
gggggtagggtcacggcggcacgattcactcggccgtggacccaagtcccaa

SEQ ID NO: 428580 - DNA, 60 bp, Artificial
  Synthetic oligonucleotide
gggggtatacattaatactgctttgcttaatgcatcctgtgcagcaatggatgattttca

SEQ ID NO: 428581 - DNA, 59 bp, Artificial
  Synthetic oligonucleotide
gggggtatttctgatggtattgtctggtatttaccgatcacacatccgaacaaatgcat

SEQ ID NO: 428582 - DNA, 54 bp, Artificial
  Synthetic oligonucleotide
gggggtcaatggttataccccaagaaatacgattatgaagtgggttacaatgat

SEQ ID NO: 428583 - DNA, 55 bp, Artificial
  Synthetic oligonucleotide
gggggtcatcccccaagtccacttgctgttgaaaggttttaagcctggcgtcata

SEQ ID NO: 428584 - DNA, 57 bp, Artificial
  Synthetic oligonucleotide
gggggtcctatacatctattggcaaccggtccagcctacccagcaatgccaccgtcc

SEQ ID NO: 428585 - DNA, 58 bp, Artificial
  Synthetic oligonucleotide
gggggtcgacgtcatcaatgacgttataccaagcactgttgctgtatacttttgggct

SEQ ID NO: 428586 - DNA, 52 bp, Artificial
  Synthetic oligonucleotide
gggggtcgggggctttactaaacagactccgaggtgccattggacaccgagg

SEQ ID NO: 428587 - DNA, 55 bp, Artificial
  Synthetic oligonucleotide
gggggtcgtaagccagctcgtctcatcgtgtttcccgacttgggtgtacgcgtat

SEQ ID NO: 428588 - DNA, 57 bp, Artificial
  Synthetic oligonucleotide
gggggtcttcaatcacccctacgttttagacgatgggacatcattggcatgttctct

SEQ ID NO: 428589 - DNA, 53 bp, Artificial
  Synthetic oligonucleotide
gggggtgccccctctccatccttatccttctttccgagaattcctttgatgtt

SEQ ID NO: 428590 - DNA, 57 bp, Artificial
  Synthetic oligonucleotide
gggggtggccttataactccgtcagttggagcgtgagtatagccttggcggtggtca

SEQ ID NO: 428591 - DNA, 57 bp, Artificial
  Synthetic oligonucleotide
gggggtggcgactccttgctcccatcacagcctattcccaacagacgcggggcctgt

SEQ ID NO: 428592 - DNA, 53 bp, Artificial
  Synthetic oligonucleotide
gggggtgggtggctgctcagctcgcagcccccggtgccgctacagcctttgtg

SEQ ID NO: 428593 - DNA, 54 bp, Artificial
  Synthetic oligonucleotide
gggggtgtacagattcgtctcccaaggggagaggccttcgggtatgttcgacac

SEQ ID NO: 428594 - DNA, 52 bp, Artificial
  Synthetic oligonucleotide
gggggtgtgcaggatgatatagctgttctaaaccccgctttctaatacccag

SEQ ID NO: 428595 - DNA, 48 bp, Artificial
  Synthetic oligonucleotide
gggggttacgataaaccctagagtttttccctcctcttaaatcgaagg

SEQ ID NO: 428596 - DNA, 47 bp, Artificial
  Synthetic oligonucleotide
gggggttatacccttgcccccgcccccccctaaggcttccgtggttg

SEQ ID NO: 428597 - DNA, 52 bp, Artificial
  Synthetic oligonucleotide
gggggttctattgagtcatggctggcggccattaaatctgactcctccttcc

SEQ ID NO: 428598 - DNA, 52 bp, Artificial
  Synthetic oligonucleotide
gggggttgattgggctatcttaacgattaagagccgaaggcccgtttaaata

SEQ ID NO: 428599 - DNA, 56 bp, Artificial
  Synthetic oligonucleotide
gggggttgattggtctatcctaacgattaagagccgcaggcccgtcaagatggacg

SEQ ID NO: 428600 - DNA, 58 bp, Artificial
  Synthetic oligonucleotide
gggggttgctcgacgcttcgcaggtttccctgtgcggcacacatggcggtggggttgc

SEQ ID NO: 428601 - DNA, 54 bp, Artificial
  Synthetic oligonucleotide
gggggttggaaaaccctcaccactacccaaaagaggatggctagacaagcgctg

SEQ ID NO: 428602 - DNA, 60 bp, Artificial
  Synthetic oligonucleotide
gggggttggaatggctgcagacagagaatcgactcaagaggcagtcgacaaaataacatc

SEQ ID NO: 428603 - DNA, 51 bp, Artificial
  Synthetic oligonucleotide
gggggtttacctaaagctctataaagctctaaaggtttaataacagcttta

SEQ ID NO: 428604 - DNA, 56 bp, Artificial
  Synthetic oligonucleotide
gggggtttgaaacgtatgtccgtggaatgtttggccgatgataatcggagcttggc

SEQ ID NO: 428605 - DNA, 48 bp, Artificial
  Synthetic oligonucleotide
gggggttttcccctgtcccccccctacatgggggtggttcaccaattg

SEQ ID NO: 428606 - DNA, 51 bp, Artificial
  Synthetic oligonucleotide
ggggtaaaaaagagagaccccgataggtaaatgagaccccaatatattggg

SEQ ID NO: 428607 - DNA, 50 bp, Artificial
  Synthetic oligonucleotide
ggggtaaaacccttagataagggccaaagggctctgtagttttatggaaa

SEQ ID NO: 428608 - DNA, 53 bp, Artificial
  Synthetic oligonucleotide
ggggtaaatatctgagtcccccaataggtaaatgagccccccaattgagcccc

SEQ ID NO: 428609 - DNA, 55 bp, Artificial
  Synthetic oligonucleotide
ggggtaagagcacggcaatgagattaacgggacaagctacaaccgcactaggaaa

SEQ ID NO: 428610 - DNA, 50 bp, Artificial
  Synthetic oligonucleotide
ggggtaagagctgatgtccacttactcgagcagccagggaacctttggat

SEQ ID NO: 428611 - DNA, 57 bp, Artificial
  Synthetic oligonucleotide
ggggtaataataagccccagcgcttacgtggcgcactaactcgggacatctggccca

SEQ ID NO: 428612 - DNA, 58 bp, Artificial
  Synthetic oligonucleotide
ggggtaatcggggcagagtcttgcttcataataaagggaccaatggacaaccagcaca

SEQ ID NO: 428613 - DNA, 55 bp, Artificial
  Synthetic oligonucleotide
ggggtaatgaaagacccgattaagctccatgtcagcttaaaattggccgaagcta

SEQ ID NO: 428614 - DNA, 52 bp, Artificial
  Synthetic oligonucleotide
ggggtaatgacgtggtcaacgcccgagccggaaagacaaccggttgaacaaa

SEQ ID NO: 428615 - DNA, 55 bp, Artificial
  Synthetic oligonucleotide
ggggtaatttggaagatccagtatccagggacctagtagtcagttatgtcaacac

SEQ ID NO: 428616 - DNA, 54 bp, Artificial
  Synthetic oligonucleotide
ggggtacaaatgacagtgaggtcgaggtcttcagacctggaggaggagatatga

SEQ ID NO: 428617 - DNA, 55 bp, Artificial
  Synthetic oligonucleotide
ggggtacaagaacaaattacagtagagaatacttcacagacgcaatggaggtttg

SEQ ID NO: 428618 - DNA, 53 bp, Artificial
  Synthetic oligonucleotide
ggggtacaaggtactcgtcttgaacccgtctgtcgccgccacattagggtttg

SEQ ID NO: 428619 - DNA, 60 bp, Artificial
  Synthetic oligonucleotide
ggggtacaatctaagcttgtctgctgcagtcaaggcggatgcttgtatgattgatggtgg

SEQ ID NO: 428620 - DNA, 49 bp, Artificial
  Synthetic oligonucleotide
ggggtacaattggggactcataaattacctttcctaaaatacccctatt

SEQ ID NO: 428621 - DNA, 53 bp, Artificial
  Synthetic oligonucleotide
ggggtacaccacccgagcacaaaccaagagcaaaccagcctgtatgttcaagc

SEQ ID NO: 428622 - DNA, 57 bp, Artificial
  Synthetic oligonucleotide
ggggtacagcaacgggacagattgttccagcaacacgacggattgcggtggtaattg

SEQ ID NO: 428623 - DNA, 56 bp, Artificial
  Synthetic oligonucleotide
ggggtacagttactgttaatgcattcctgggccgttgccctgactagttcgcttaa

SEQ ID NO: 428624 - DNA, 55 bp, Artificial
  Synthetic oligonucleotide
ggggtacatgtgatgttagagtaacgcgtaatgccgcattcctaacgcagataga

SEQ ID NO: 428625 - DNA, 54 bp, Artificial
  Synthetic oligonucleotide
ggggtaccgagctcccctgcaaccccaccaagcgagtgcgactcagtgccgtgg

SEQ ID NO: 428626 - DNA, 51 bp, Artificial
  Synthetic oligonucleotide
ggggtaccgcggaaccgttatggccgtggtcgtagcgcctaaaaggacgcg

SEQ ID NO: 428627 - DNA, 53 bp, Artificial
  Synthetic oligonucleotide
ggggtaccttcaagaagtcgggggctattagggtcctgagaggcttcaagaag

SEQ ID NO: 428628 - DNA, 55 bp, Artificial
  Synthetic oligonucleotide
ggggtacgcctgcataggttcgcccccccttgcaagcctttgctacgagacgagg

SEQ ID NO: 428629 - DNA, 55 bp, Artificial
  Synthetic oligonucleotide
ggggtacgctcggtgtacaataacgttaccgccactcaatctgtgcaaacgtgga

SEQ ID NO: 428630 - DNA, 54 bp, Artificial
  Synthetic oligonucleotide
ggggtacgtcacagccaatcagaagctgccacgttgcgaaagtgacgtttcgaa

SEQ ID NO: 428631 - DNA, 54 bp, Artificial
  Synthetic oligonucleotide
ggggtacgtcacagccaatcagaattgagcacgcccagaaacgcccctgggcgg

SEQ ID NO: 428632 - DNA, 58 bp, Artificial
  Synthetic oligonucleotide
ggggtacgtcacgcgtacaggggggtacgtcacagccaatcagaagctgccacgttgc

SEQ ID NO: 428633 - DNA, 55 bp, Artificial
  Synthetic oligonucleotide
ggggtactacttccatctactcgtgaatttattcactccctgttccacaaaagga

SEQ ID NO: 428634 - DNA, 56 bp, Artificial
  Synthetic oligonucleotide
ggggtactagcttctctgattcattagtcattacttctcatactagaacttctatg

SEQ ID NO: 428635 - DNA, 50 bp, Artificial
  Synthetic oligonucleotide
ggggtactccaattgcgaatctaccctcaagttttatctacaatgatgtc

SEQ ID NO: 428636 - DNA, 52 bp, Artificial
  Synthetic oligonucleotide
ggggtactgatcgacaacacccagcccgctctcacagggccatcccaaactc

SEQ ID NO: 428637 - DNA, 55 bp, Artificial
  Synthetic oligonucleotide
ggggtactgtgcggtatagcaggcttgggcaacgggccaccttaaccacccgcag

SEQ ID NO: 428638 - DNA, 55 bp, Artificial
  Synthetic oligonucleotide
ggggtactgttataaggcctaatgtagcagtggatcctttggggcctacagatat

SEQ ID NO: 428639 - DNA, 55 bp, Artificial
  Synthetic oligonucleotide
ggggtacttgatatcagccaccccttgactatcaactggacgcctcatgaggcct

SEQ ID NO: 428640 - DNA, 55 bp, Artificial
  Synthetic oligonucleotide
ggggtactttgactacaaccgattccactgccacttttctccgcgagactggcaa

SEQ ID NO: 428641 - DNA, 52 bp, Artificial
  Synthetic oligonucleotide
ggggtagaagcactccaatgggagcactcgatttacaacggtgcatttaaag

SEQ ID NO: 428642 - DNA, 53 bp, Artificial
  Synthetic oligonucleotide
ggggtagacggagctcgaattcatgctcccagggtacatgatatggccgcttg

SEQ ID NO: 428643 - DNA, 56 bp, Artificial
  Synthetic oligonucleotide
ggggtagagaacaaaagcctcaagtccaaggttgggatcgagcaagcatacaaagt

SEQ ID NO: 428644 - DNA, 53 bp, Artificial
  Synthetic oligonucleotide
ggggtagatgagtactcaagcacagagagggtagtagtgagcattgaccgatt

SEQ ID NO: 428645 - DNA, 55 bp, Artificial
  Synthetic oligonucleotide
ggggtagatgagtccatcgtacgtacagtaaccatacacaactccgagttcgtcc

SEQ ID NO: 428646 - DNA, 56 bp, Artificial
  Synthetic oligonucleotide
ggggtagcagactagcggttagaggagacccctcccaaaacataacgcagcagcgg

SEQ ID NO: 428647 - DNA, 55 bp, Artificial
  Synthetic oligonucleotide
ggggtagcataaatctggtgacggcaataaaagataacttcagcaatggactagt

SEQ ID NO: 428648 - DNA, 53 bp, Artificial
  Synthetic oligonucleotide
ggggtagcgtatgcagcatgtagcccatgttgtgcagctacagcggcctatga

SEQ ID NO: 428649 - DNA, 54 bp, Artificial
  Synthetic oligonucleotide
ggggtagctactttctgctccgctatgtatgtgggggatctctgcggatccgtc

SEQ ID NO: 428650 - DNA, 58 bp, Artificial
  Synthetic oligonucleotide
ggggtaggaacaatggtgatggagctgattcggatgataaaacgagggatcaacgacc

SEQ ID NO: 428651 - DNA, 55 bp, Artificial
  Synthetic oligonucleotide
ggggtaggagtacctattctgtccacaatcgccaagcctgtttcctgggtgtcgg

SEQ ID NO: 428652 - DNA, 55 bp, Artificial
  Synthetic oligonucleotide
ggggtaggcaacgacaccttgcattgtcccaccgattgtttccgcaagcatccgg

SEQ ID NO: 428653 - DNA, 53 bp, Artificial
  Synthetic oligonucleotide
ggggtaggccagtaacagaaattccatcatgggcgggaaacattctcagaact

SEQ ID NO: 428654 - DNA, 57 bp, Artificial
  Synthetic oligonucleotide
ggggtaggccccgtaaggggcctgccttcaccgcactacagaggagaatctatgcca

SEQ ID NO: 428655 - DNA, 57 bp, Artificial
  Synthetic oligonucleotide
ggggtaggcttcccagtcaggccgcaggtacctttgagaccaatgacatataaagga

SEQ ID NO: 428656 - DNA, 55 bp, Artificial
  Synthetic oligonucleotide
ggggtagggtcaagcatcgcgtcctgggccattaagtgggaatacgtcgttctcc

SEQ ID NO: 428657 - DNA, 54 bp, Artificial
  Synthetic oligonucleotide
ggggtaggtgttttgaccacatcaaactgttgaacttacgcgtctctgggaccg

SEQ ID NO: 428658 - DNA, 52 bp, Artificial
  Synthetic oligonucleotide
ggggtagtcttttcgactgggatggaattcatggtcactatgataaggttac

SEQ ID NO: 428659 - DNA, 53 bp, Artificial
  Synthetic oligonucleotide
ggggtagtggcgaagttgtgagtcccctcttcctccctaggttcgtccagagg

SEQ ID NO: 428660 - DNA, 55 bp, Artificial
  Synthetic oligonucleotide
ggggtagtttcgaaatattcatccgagacattcgaagttgcggtcgagtttgtag

SEQ ID NO: 428661 - DNA, 51 bp, Artificial
  Synthetic oligonucleotide
ggggtataacctttctcgagggtgtgtgtacaaaaatagccaggggggcac

SEQ ID NO: 428662 - DNA, 57 bp, Artificial
  Synthetic oligonucleotide
ggggtatagtctacgctaatcgcgaaggctacgccacatttgacaacggttccattc

SEQ ID NO: 428663 - DNA, 55 bp, Artificial
  Synthetic oligonucleotide
ggggtatatacagttaagggctactattctaacttagaggtattacattgtagcg

SEQ ID NO: 428664 - DNA, 60 bp, Artificial
  Synthetic oligonucleotide
ggggtatatggatacacacatgaggaacttattagatggtaacccaaccagcatagatag

SEQ ID NO: 428665 - DNA, 55 bp, Artificial
  Synthetic oligonucleotide
ggggtatcactactgcctcttccagaaccctcagtgcagatacacccacggaagc

SEQ ID NO: 428666 - DNA, 53 bp, Artificial
  Synthetic oligonucleotide
ggggtatcattgcacgcccactttattactttcctattaccggggacacgatc

SEQ ID NO: 428667 - DNA, 60 bp, Artificial
  Synthetic oligonucleotide
ggggtatccatggcccctattgctcaggggactatggtgcgtcttcgtgagccgtcaatg

SEQ ID NO: 428668 - DNA, 56 bp, Artificial
  Synthetic oligonucleotide
ggggtatccgacgacattaacaagggccactactgggaaaatgtcaagtagatctc

SEQ ID NO: 428669 - DNA, 54 bp, Artificial
  Synthetic oligonucleotide
ggggtatccgcgtggagcaagaccttctgtgccctgtttggtccatggttccgc

SEQ ID NO: 428670 - DNA, 51 bp, Artificial
  Synthetic oligonucleotide
ggggtatcctgtttatgtgaaaaagacgtaacccagacgaaaagtacccac

SEQ ID NO: 428671 - DNA, 52 bp, Artificial
  Synthetic oligonucleotide
ggggtatcgatgcttggatgttcatgagcattctgcgtggggagagagatgt

SEQ ID NO: 428672 - DNA, 60 bp, Artificial
  Synthetic oligonucleotide
ggggtatgaggaattcacaatggttgggcggagagcaacagctatcttgaggaaagcaac

SEQ ID NO: 428673 - DNA, 52 bp, Artificial
  Synthetic oligonucleotide
ggggtatgatcaccaacgatcaacgtttgtttgtcgagtttctcgacagcca

SEQ ID NO: 428674 - DNA, 59 bp, Artificial
  Synthetic oligonucleotide
ggggtatggcaattagattgcacacatttagaagggaaagttatcctggtagcagtcca

SEQ ID NO: 428675 - DNA, 53 bp, Artificial
  Synthetic oligonucleotide
ggggtatgttcgggtgtgataacaaagtgaacttcccaaatagaccttgttag

SEQ ID NO: 428676 - DNA, 55 bp, Artificial
  Synthetic oligonucleotide
ggggtattacctgttgatccagaaattcagtgtttagggctattagtgtatgatc

SEQ ID NO: 428677 - DNA, 55 bp, Artificial
  Synthetic oligonucleotide
ggggtattcggagataatcccaggcctgtggatggtactgggtcatgcgacagtc

SEQ ID NO: 428678 - DNA, 55 bp, Artificial
  Synthetic oligonucleotide
ggggtattgtcaagggaaaggtgcatgtttgtagcccttgcacttatggcatagt

SEQ ID NO: 428679 - DNA, 55 bp, Artificial
  Synthetic oligonucleotide
ggggtcaaagcactaacagacatagtaccactaactgaggaagcagaattagaat

SEQ ID NO: 428680 - DNA, 55 bp, Artificial
  Synthetic oligonucleotide
ggggtcaagcgacaagtttggcgacccagaataggctgcgccactccaaagttac

SEQ ID NO: 428681 - DNA, 55 bp, Artificial
  Synthetic oligonucleotide
ggggtcaagggcctgatcagaatcaaaacgttctcaatcttttgaaacaccaagt

SEQ ID NO: 428682 - DNA, 50 bp, Artificial
  Synthetic oligonucleotide
ggggtcaattgtagttataggagaaacagaagacggaactgcgtatttag

SEQ ID NO: 428683 - DNA, 60 bp, Artificial
  Synthetic oligonucleotide
ggggtcacacagaattcaacagccaatagtcaagttagcaagttagcatagcgtgtaggc

SEQ ID NO: 428684 - DNA, 54 bp, Artificial
  Synthetic oligonucleotide
ggggtcacctacgggtactccactggggaagaccacaccgcagggcccaacaca

SEQ ID NO: 428685 - DNA, 53 bp, Artificial
  Synthetic oligonucleotide
ggggtcactaacaactggaatcaactgtttaaataccccgggtgttacatcga

SEQ ID NO: 428686 - DNA, 55 bp, Artificial
  Synthetic oligonucleotide
ggggtcactgggcatcctttgttcaatcggtacacagataatgaaaatccaggca

SEQ ID NO: 428687 - DNA, 55 bp, Artificial
  Synthetic oligonucleotide
ggggtcaggaactgaaaactagtgctattactttgcttgatgctacagcaataac

SEQ ID NO: 428688 - DNA, 51 bp, Artificial
  Synthetic oligonucleotide
ggggtcaggtctgtctataacaacgtcaccgctacacaatcagtacaggcg

SEQ ID NO: 428689 - DNA, 53 bp, Artificial
  Synthetic oligonucleotide
ggggtcatataaatgttatagaagttggagatgacttaacgctgcatacagag

SEQ ID NO: 428690 - DNA, 55 bp, Artificial
  Synthetic oligonucleotide
ggggtcatcaattacagtgtattggatctgactacagaggaattagaggcaatca

SEQ ID NO: 428691 - DNA, 60 bp, Artificial
  Synthetic oligonucleotide
ggggtcatccgaccaagcaaaagcaggcaccgaacagcggcattcatcacctattcgggc

SEQ ID NO: 428692 - DNA, 55 bp, Artificial
  Synthetic oligonucleotide
ggggtcatgctggggcagcgtacatccacaaatacgagcaactcgagtggattaa

SEQ ID NO: 428693 - DNA, 55 bp, Artificial
  Synthetic oligonucleotide
ggggtcatggagaaataaacgactcaacgactgtagaacctaccttggatggacc

SEQ ID NO: 428694 - DNA, 55 bp, Artificial
  Synthetic oligonucleotide
ggggtcattatatccaaatggcccttgtaaagctggccgcactgacaggtacgta

SEQ ID NO: 428695 - DNA, 49 bp, Artificial
  Synthetic oligonucleotide
ggggtcattattataagggtggtagttgggtttacactaattacgggtt

SEQ ID NO: 428696 - DNA, 55 bp, Artificial
  Synthetic oligonucleotide
ggggtccaaaggacagaaaggaagcaatgttgggcactcatgtagtgtgggatgt

SEQ ID NO: 428697 - DNA, 53 bp, Artificial
  Synthetic oligonucleotide
ggggtccaaatccacaggttcgctcccactccaaagccgttcattagggatga

SEQ ID NO: 428698 - DNA, 55 bp, Artificial
  Synthetic oligonucleotide
ggggtccaaatttacaaacaagagcccaggaactcctaacatcaaagaatgccaa

SEQ ID NO: 428699 - DNA, 51 bp, Artificial
  Synthetic oligonucleotide
ggggtccaccagaccgtaccagacccgttgaacccggcggaaattgagact

SEQ ID NO: 428700 - DNA, 56 bp, Artificial
  Synthetic oligonucleotide
ggggtccataacgtacaatggtacgctgttcggcaactacactctccaggtcaccc

SEQ ID NO: 428701 - DNA, 51 bp, Artificial
  Synthetic oligonucleotide
ggggtccatgcagagaaagagtaaccggcaacggccaaaatctcgtaagac

SEQ ID NO: 428702 - DNA, 55 bp, Artificial
  Synthetic oligonucleotide
ggggtcccagctcccttgcgagccagagcccgacgtgtctgtgttaacatccatg

SEQ ID NO: 428703 - DNA, 50 bp, Artificial
  Synthetic oligonucleotide
ggggtccccggcctcccattggacgggccctatatggtcctaccggtcat

SEQ ID NO: 428704 - DNA, 55 bp, Artificial
  Synthetic oligonucleotide
ggggtcccgggtttgcgagaagagagcacttcacgacgtcatcagcacaattgcc

SEQ ID NO: 428705 - DNA, 53 bp, Artificial
  Synthetic oligonucleotide
ggggtccgagtggcgtactgggtagggttcgacacaaccccgttcatgtacaa

SEQ ID NO: 428706 - DNA, 54 bp, Artificial
  Synthetic oligonucleotide
ggggtccgctgcatttccaaagacgcgcaatactaggcgcgttaaagtttgggg

SEQ ID NO: 428707 - DNA, 51 bp, Artificial
  Synthetic oligonucleotide
ggggtccggtgagggtgaacgccacaccaacgagactctgacgtacaaggt

SEQ ID NO: 428708 - DNA, 57 bp, Artificial
  Synthetic oligonucleotide
ggggtcctatatatatggagactccaaatggcataattgtaattaccacgaaagttc

SEQ ID NO: 428709 - DNA, 55 bp, Artificial
  Synthetic oligonucleotide
ggggtcctcgaattcagcaaatttgaagccttcacctcaaccggatggggagctg

SEQ ID NO: 428710 - DNA, 55 bp, Artificial
  Synthetic oligonucleotide
ggggtcctcttcaacggaattatcaagggtccggatggacaaatattgattccag

SEQ ID NO: 428711 - DNA, 50 bp, Artificial
  Synthetic oligonucleotide
ggggtcctggacgttggttatcctgaaataaaggggatttgtaatctccc

SEQ ID NO: 428712 - DNA, 55 bp, Artificial
  Synthetic oligonucleotide
ggggtcctgttagactcttgctacacttcattgaacaacatgatttgctctgatg

SEQ ID NO: 428713 - DNA, 52 bp, Artificial
  Synthetic oligonucleotide
ggggtccttcttacaactgaactcatagtttgggcagctagtgctgacaccc

SEQ ID NO: 428714 - DNA, 57 bp, Artificial
  Synthetic oligonucleotide
ggggtccttttccctgaccacatttaacctcagagcgctgtacgacgaacacatgaa

SEQ ID NO: 428715 - DNA, 55 bp, Artificial
  Synthetic oligonucleotide
ggggtcgaaagaccggttctgcattacatagatacggatcatcacgtcagagttc

SEQ ID NO: 428716 - DNA, 53 bp, Artificial
  Synthetic oligonucleotide
ggggtcgaaggaccagtgatgttccgcggggttgtgaaggaccgtgtaaggtc

SEQ ID NO: 428717 - DNA, 55 bp, Artificial
  Synthetic oligonucleotide
ggggtcgaagttcgtgattataaatacagagagaactgtggttgttgcggaaaga

SEQ ID NO: 428718 - DNA, 57 bp, Artificial
  Synthetic oligonucleotide
ggggtcgaatacaaatggttcagttacagaatcaaccgatttgttgccaggcaatta

SEQ ID NO: 428719 - DNA, 53 bp, Artificial
  Synthetic oligonucleotide
ggggtcgaatcccttctacctagagttctgtttgataagggtagaaccaaaga

SEQ ID NO: 428720 - DNA, 54 bp, Artificial
  Synthetic oligonucleotide
ggggtcgagtccaactattggtcgatttgacgtggaatgaccctattgggaaat

SEQ ID NO: 428721 - DNA, 55 bp, Artificial
  Synthetic oligonucleotide
ggggtcgatgcttttatggtggcgacatgtttcgccagatcaattcaacatcacc

SEQ ID NO: 428722 - DNA, 60 bp, Artificial
  Synthetic oligonucleotide
ggggtcgcccaggagtggcgcatgacgtacttgcgggaacggatcgacctcactgatgtc

SEQ ID NO: 428723 - DNA, 60 bp, Artificial
  Synthetic oligonucleotide
ggggtcgcgcgtgatggacgcagctgattgtttccgtaactctgccgatcgcaacatatt

SEQ ID NO: 428724 - DNA, 55 bp, Artificial
  Synthetic oligonucleotide
ggggtcgctgctcagggcgcgtctatactcgccaaccttctccaagcgggcccca

SEQ ID NO: 428725 - DNA, 54 bp, Artificial
  Synthetic oligonucleotide
ggggtcgcttgggaagaccccaacactcttatctcttattatgcaagtcttgag

SEQ ID NO: 428726 - DNA, 59 bp, Artificial
  Synthetic oligonucleotide
ggggtcggcatagacagaattgtgttgcggtgcactaactgcttgaagccccttgcctt

SEQ ID NO: 428727 - DNA, 55 bp, Artificial
  Synthetic oligonucleotide
ggggtcgggaaatttactaaacagactccgagttgccattggactcaggagctat

SEQ ID NO: 428728 - DNA, 55 bp, Artificial
  Synthetic oligonucleotide
ggggtcggtgaagaggtcagacttctttgcgaaagtagaaagtctggcatcctgg

SEQ ID NO: 428729 - DNA, 55 bp, Artificial
  Synthetic oligonucleotide
ggggtcgtaagccagcccgcctgattgtgtatcctgacctgggagtgcgtatctg

SEQ ID NO: 428730 - DNA, 55 bp, Artificial
  Synthetic oligonucleotide
ggggtcgtctccactcaggaagtgtgacctcaatctatctgttctgccaccccag

SEQ ID NO: 428731 - DNA, 55 bp, Artificial
  Synthetic oligonucleotide
ggggtcgttatttagatgttcactcccctaggtatatattgaaaacgtgccatcg

SEQ ID NO: 428732 - DNA, 55 bp, Artificial
  Synthetic oligonucleotide
ggggtctaatctaccaaaatggagaaaatagtgcttcttcttgcaatagtcagtc

SEQ ID NO: 428733 - DNA, 55 bp, Artificial
  Synthetic oligonucleotide
ggggtctactactgtcagtctaagggtaagcactacccagtcaattttgagggac

SEQ ID NO: 428734 - DNA, 54 bp, Artificial
  Synthetic oligonucleotide
ggggtctataacattacattgactggtacatccaacaacaggatactagccata

SEQ ID NO: 428735 - DNA, 60 bp, Artificial
  Synthetic oligonucleotide
ggggtctatgtaagacccaataggccactgagatcaatgacatacaagatggcaatagac

SEQ ID NO: 428736 - DNA, 55 bp, Artificial
  Synthetic oligonucleotide
ggggtctatgtatactcgaagcggcaagcatataggtggaagggtccatttcttt

SEQ ID NO: 428737 - DNA, 50 bp, Artificial
  Synthetic oligonucleotide
ggggtctatgtccggtctagcgatgaacgtgaacccgagagcggcagcgt

SEQ ID NO: 428738 - DNA, 57 bp, Artificial
  Synthetic oligonucleotide
ggggtctcaatattgaaccttgggcaaaagagatacaccaagaccacatactggtgg

SEQ ID NO: 428739 - DNA, 55 bp, Artificial
  Synthetic oligonucleotide
ggggtctcctagagagcttgcctagggccttataacccgacttgctgagcttcta

SEQ ID NO: 428740 - DNA, 55 bp, Artificial
  Synthetic oligonucleotide
ggggtctcctcacacagcagtatttcactgagtataagaggacatatgcctaaat

SEQ ID NO: 428741 - DNA, 52 bp, Artificial
  Synthetic oligonucleotide
ggggtctcctgtttatagagaagctagtagtggcattcctgccacacgtgcc

SEQ ID NO: 428742 - DNA, 55 bp, Artificial
  Synthetic oligonucleotide
ggggtctgaccaatgaacgttcgagtgtgcacgttcctagaccacggagtgacgg

SEQ ID NO: 428743 - DNA, 53 bp, Artificial
  Synthetic oligonucleotide
ggggtctgcacagaatctgattatgaagcgttcgatgcaagccaagaccaata

SEQ ID NO: 428744 - DNA, 51 bp, Artificial
  Synthetic oligonucleotide
ggggtctgcagacaggagaaagggactggcaattgggtcatggggtctcca

SEQ ID NO: 428745 - DNA, 55 bp, Artificial
  Synthetic oligonucleotide
ggggtctgcgtgtacacaatgcctcaaggctttcaatccacccacaaacatgcgg

SEQ ID NO: 428746 - DNA, 55 bp, Artificial
  Synthetic oligonucleotide
ggggtctgctaagctccgtggcgtctctcctggtgaagtgggagggtcacttcga

SEQ ID NO: 428747 - DNA, 52 bp, Artificial
  Synthetic oligonucleotide
ggggtctgggagcccaccggaatatggaatatggagcatgtgaatctcccca

SEQ ID NO: 428748 - DNA, 50 bp, Artificial
  Synthetic oligonucleotide
ggggtctgtattaatggaatacggggcttttactaacctcaggtgtgcga

SEQ ID NO: 428749 - DNA, 55 bp, Artificial
  Synthetic oligonucleotide
ggggtctgtccggtagtcatgacagatggtccagcaaacaatagggcagcaacta

SEQ ID NO: 428750 - DNA, 51 bp, Artificial
  Synthetic oligonucleotide
ggggtctgtctctatatccatagacgaagtgaatcagacggcgtcagcgag

SEQ ID NO: 428751 - DNA, 55 bp, Artificial
  Synthetic oligonucleotide
ggggtctgtgagtaggcctgtattcttcgcgaaagtggttagcctggcatcttgg

SEQ ID NO: 428752 - DNA, 53 bp, Artificial
  Synthetic oligonucleotide
ggggtctgtgataccgagtcccctgggtccaattcgggtgtgtgtaatctgtg

SEQ ID NO: 428753 - DNA, 53 bp, Artificial
  Synthetic oligonucleotide
ggggtcttagaggcatagaaatcggtaggggtcaaccattaggtgtgggtatt

SEQ ID NO: 428754 - DNA, 54 bp, Artificial
  Synthetic oligonucleotide
ggggtcttatccaatcctctcgtgcacatgccatcgttgcacttactcgccata

SEQ ID NO: 428755 - DNA, 55 bp, Artificial
  Synthetic oligonucleotide
ggggtcttcattgccaggcattgtgctgacgtcggttcatccaatcagtcaaggc

SEQ ID NO: 428756 - DNA, 51 bp, Artificial
  Synthetic oligonucleotide
ggggtcttgtataagaactgcccccagtgaggttgccttcaatgtgttccc

SEQ ID NO: 428757 - DNA, 53 bp, Artificial
  Synthetic oligonucleotide
ggggtctttaagattaaattccctgaattgtacatacagggttacacggatat

SEQ ID NO: 428758 - DNA, 55 bp, Artificial
  Synthetic oligonucleotide
ggggtctttcagtatgtaatacgggctgtattgaaagaccccttcataaggctta

SEQ ID NO: 428759 - DNA, 60 bp, Artificial
  Synthetic oligonucleotide
ggggtctttgactgcatctttgatgttgtcctgttctgttaccataatagttctagcgac

SEQ ID NO: 428760 - DNA, 54 bp, Artificial
  Synthetic oligonucleotide
ggggtgaaattagactccagtgggaatgtgtataaaatactgtcaatttacagc

SEQ ID NO: 428761 - DNA, 53 bp, Artificial
  Synthetic oligonucleotide
ggggtgaagagggtaataatgaacttgctggacggcagagggccaatacgatt

SEQ ID NO: 428762 - DNA, 58 bp, Artificial
  Synthetic oligonucleotide
ggggtgaagggctgggccttcgacgacggaaatgatgtatggatgggaagaacgatca

SEQ ID NO: 428763 - DNA, 55 bp, Artificial
  Synthetic oligonucleotide
ggggtgaaggtctgtgttaagttgtcgggtagctcgaaatacaatgaacgaagag

SEQ ID NO: 428764 - DNA, 60 bp, Artificial
  Synthetic oligonucleotide
ggggtgaatcagtaattgttgagtctggtgatccgaatgccctcttgaaacacagatttg

SEQ ID NO: 428765 - DNA, 55 bp, Artificial
  Synthetic oligonucleotide
ggggtgaatcctccgccactaggtttcaagtggattcgacctggagaatacgaga

SEQ ID NO: 428766 - DNA, 55 bp, Artificial
  Synthetic oligonucleotide
ggggtgacaccaccatcacatcacaagatatagcaaatgcagttgttgcctatgg

SEQ ID NO: 428767 - DNA, 60 bp, Artificial
  Synthetic oligonucleotide
ggggtgacacccaccgctagctgccacgttagtggctcctcttcttgatgattctgccac

SEQ ID NO: 428768 - DNA, 55 bp, Artificial
  Synthetic oligonucleotide
ggggtgacaccttcgtgcacattgaaggtggaatgccatcaggttgctccggaac

SEQ ID NO: 428769 - DNA, 60 bp, Artificial
  Synthetic oligonucleotide
ggggtgacatatggatgagcttctaagtctccaagagcccgtgataatgataagtccgca

SEQ ID NO: 428770 - DNA, 55 bp, Artificial
  Synthetic oligonucleotide
ggggtgacgcaaccgtgcatggcactcgcacgagtgccggatggagcactcaacc

SEQ ID NO: 428771 - DNA, 54 bp, Artificial
  Synthetic oligonucleotide
ggggtgactttgaacattggggaccagtggagccatgggatgctcttcccgatt

SEQ ID NO: 428772 - DNA, 60 bp, Artificial
  Synthetic oligonucleotide
ggggtgagaaatgatgatgttgatcagagtttaattattgctgctagaaatattgttagg

SEQ ID NO: 428773 - DNA, 56 bp, Artificial
  Synthetic oligonucleotide
ggggtgagacaccgtatgttaggcacgctggcaagcgggcacagagggacatcatt

SEQ ID NO: 428774 - DNA, 55 bp, Artificial
  Synthetic oligonucleotide
ggggtgagacttcaccgttacgcccctccatgcaggcccctgttgagggatgaga

SEQ ID NO: 428775 - DNA, 55 bp, Artificial
  Synthetic oligonucleotide
ggggtgagcagcttaatgatgttgtccaagcactgagtgcacttggtttgcttta

SEQ ID NO: 428776 - DNA, 57 bp, Artificial
  Synthetic oligonucleotide
ggggtgagcgagttactattcttgaatcttcaatattcaacgtagtttcgaccactc

SEQ ID NO: 428777 - DNA, 55 bp, Artificial
  Synthetic oligonucleotide
ggggtgagctctattcgccatcgtgtagcattccgcagtcagctaccgacatgtt

SEQ ID NO: 428778 - DNA, 50 bp, Artificial
  Synthetic oligonucleotide
ggggtgagggtatgcgagaagagagccctctacgaccttacgcaaaaact

SEQ ID NO: 428779 - DNA, 55 bp, Artificial
  Synthetic oligonucleotide
ggggtgagttaatgaatctagccacctgggtgggaagtaatttggacgatcccgc

SEQ ID NO: 428780 - DNA, 54 bp, Artificial
  Synthetic oligonucleotide
ggggtgataagacttttgttcgtttgaatagatttgttataaagtggaagccca

SEQ ID NO: 428781 - DNA, 55 bp, Artificial
  Synthetic oligonucleotide
ggggtgatagaattgagcagtggctgagtgaaccctgtaaactccttcctgacac

SEQ ID NO: 428782 - DNA, 50 bp, Artificial
  Synthetic oligonucleotide
ggggtgatgacaacgaaaacttggtcacatctataacagactggacggta

SEQ ID NO: 428783 - DNA, 55 bp, Artificial
  Synthetic oligonucleotide
ggggtgatgcttgagaatgacgccgacggaatagtaaagaacattgaagttttat

SEQ ID NO: 428784 - DNA, 59 bp, Artificial
  Synthetic oligonucleotide
ggggtgattaccagatagtttctactactcctactggctcttatgtttctgctgtcaca

SEQ ID NO: 428785 - DNA, 53 bp, Artificial
  Synthetic oligonucleotide
ggggtgcaagtgtttattttgatcagctaagggagactgttgaaaagatcgtt

SEQ ID NO: 428786 - DNA, 53 bp, Artificial
  Synthetic oligonucleotide
ggggtgcaatgactgggttttattagaggcagcagaggcaggcggtagtggga

SEQ ID NO: 428787 - DNA, 55 bp, Artificial
  Synthetic oligonucleotide
ggggtgcaccaccctccaactaccagtgagcaacaaagtctataccagaacgctg

SEQ ID NO: 428788 - DNA, 55 bp, Artificial
  Synthetic oligonucleotide
ggggtgcagcggtggaggccctttgcagcctcaaaggacgactgttgtttcaggc

SEQ ID NO: 428789 - DNA, 55 bp, Artificial
  Synthetic oligonucleotide
ggggtgcatacgcctctgatcctcctgtgggacacaactgaccaaggtaggtctg

SEQ ID NO: 428790 - DNA, 60 bp, Artificial
  Synthetic oligonucleotide
ggggtgcatccactgctcctgcgactcccccgactgcgtccacactctgatcaagaccct

SEQ ID NO: 428791 - DNA, 55 bp, Artificial
  Synthetic oligonucleotide
ggggtgccacccagcgtatgctaatgaagtcacatggtgcgattcagagcccgcg

SEQ ID NO: 428792 - DNA, 50 bp, Artificial
  Synthetic oligonucleotide
ggggtgccatgttctttagtagacgccattacagagttattaaaacctca

SEQ ID NO: 428793 - DNA, 55 bp, Artificial
  Synthetic oligonucleotide
ggggtgcccgtgggcgagaggtactgtaggtcctctggagtgcttaccactagtg

SEQ ID NO: 428794 - DNA, 50 bp, Artificial
  Synthetic oligonucleotide
ggggtgccctatgcgtacccggtgtctcgactgtagggactgggctactc

SEQ ID NO: 428795 - DNA, 55 bp, Artificial
  Synthetic oligonucleotide
ggggtgccggtattggtgctaattgtgaatgtaaccgtcagctagttaattacat

SEQ ID NO: 428796 - DNA, 60 bp, Artificial
  Synthetic oligonucleotide
ggggtgcgcactgccagattaaacgtgaagtggaaagacagatcacgacgtgtccctata

SEQ ID NO: 428797 - DNA, 54 bp, Artificial
  Synthetic oligonucleotide
ggggtgcgcatggaaacagatctgctacacctcggtaccgtggaacaaaacatg

SEQ ID NO: 428798 - DNA, 55 bp, Artificial
  Synthetic oligonucleotide
ggggtgcgcatggtatgagctaactcctgcagagacaacggttagactacgtgcc

SEQ ID NO: 428799 - DNA, 60 bp, Artificial
  Synthetic oligonucleotide
ggggtgcgcctgcataggtttgcgcccccttgcaagcccttgctacgagatgaggtgtcg

SEQ ID NO: 428800 - DNA, 54 bp, Artificial
  Synthetic oligonucleotide
ggggtgctgttatgattgagggacgtggattcagacaggcttatagtgagttta

SEQ ID NO: 428801 - DNA, 55 bp, Artificial
  Synthetic oligonucleotide
ggggtgcttatgcggtagttaatatttctagcgaatctaataatgcaggctcttc

SEQ ID NO: 428802 - DNA, 60 bp, Artificial
  Synthetic oligonucleotide
ggggtgcttgttgacagtatcggttcgtggtctcaaaatatcctcagaactcaggagtca

SEQ ID NO: 428803 - DNA, 57 bp, Artificial
  Synthetic oligonucleotide
ggggtgctttgggtgcctatttatagtgagctcccaaatggcattgacgtaattacg

SEQ ID NO: 428804 - DNA, 55 bp, Artificial
  Synthetic oligonucleotide
ggggtggaagctgataatgataacgagaaacggaagacaacctgacggtacgcca

SEQ ID NO: 428805 - DNA, 60 bp, Artificial
  Synthetic oligonucleotide
ggggtggacagatagggtaatagaagtagtgcagagagcttggagagctatcctccacat

SEQ ID NO: 428806 - DNA, 53 bp, Artificial
  Synthetic oligonucleotide
ggggtggagcgggaccaccatcctgccgctgtggctcacacaaccggagctag

SEQ ID NO: 428807 - DNA, 55 bp, Artificial
  Synthetic oligonucleotide
ggggtggaggaaggatccattggaaaggtctgcaggactctgttggcaaagtctg

SEQ ID NO: 428808 - DNA, 55 bp, Artificial
  Synthetic oligonucleotide
ggggtggaggcagaattcacgcagagggttcacaaggcattcttttcgggaatgg

SEQ ID NO: 428809 - DNA, 53 bp, Artificial
  Synthetic oligonucleotide
ggggtggagggcctaagcttctttgtgccccataagaataaacacggggcctg

SEQ ID NO: 428810 - DNA, 52 bp, Artificial
  Synthetic oligonucleotide
ggggtggcaaccccgtgtcccaacaggttgttagaaacccctgcaagaccac

SEQ ID NO: 428811 - DNA, 59 bp, Artificial
  Synthetic oligonucleotide
ggggtggcattggcttggttgggcctgaacatgagaaaccctacaatgtccatgagctt

SEQ ID NO: 428812 - DNA, 54 bp, Artificial
  Synthetic oligonucleotide
ggggtggccagccactgaagttctcacagcggtgggactgatgtttgctatagt

SEQ ID NO: 428813 - DNA, 55 bp, Artificial
  Synthetic oligonucleotide
ggggtggctatgaagtggatattgtaatatgcgaaatgggaaattctatttcagc

SEQ ID NO: 428814 - DNA, 53 bp, Artificial
  Synthetic oligonucleotide
ggggtggctcggatacagttgggaggacttattcgaggatacgtggggtacgg

SEQ ID NO: 428815 - DNA, 58 bp, Artificial
  Synthetic oligonucleotide
ggggtggcttagcgaaacactcgctgaggtaaactcattgatttcaatctagtagtac

SEQ ID NO: 428816 - DNA, 60 bp, Artificial
  Synthetic oligonucleotide
ggggtggcttcagaaagaggcgctcgacgttagctttgacgttatgataattcacgatga

SEQ ID NO: 428817 - DNA, 55 bp, Artificial
  Synthetic oligonucleotide
ggggtgggaagccctcaaatatctggggaatcttctgttatactggggtcaggaa

SEQ ID NO: 428818 - DNA, 55 bp, Artificial
  Synthetic oligonucleotide
ggggtgggaagcccttaagtatctggcaagtcttgggcaatattggggtctggaa

SEQ ID NO: 428819 - DNA, 60 bp, Artificial
  Synthetic oligonucleotide
ggggtgggcaataacaccttgcactgccccactgactgcttccgcaaacatccagaggcc

SEQ ID NO: 428820 - DNA, 55 bp, Artificial
  Synthetic oligonucleotide
ggggtgggctttcacggagcgctcaagattcttgatcatcgacttttcgcgctct

SEQ ID NO: 428821 - DNA, 58 bp, Artificial
  Synthetic oligonucleotide
ggggtggggccccttgacagatgctaacatcaccggtccttctgatgatagaccgtat

SEQ ID NO: 428822 - DNA, 55 bp, Artificial
  Synthetic oligonucleotide
ggggtggggctctctcaccactaagcagaagattgcagcacgagctgcgttgcag

SEQ ID NO: 428823 - DNA, 51 bp, Artificial
  Synthetic oligonucleotide
ggggtggggtgattagccatggtcgcacagatcaagctcagattgcttaca

SEQ ID NO: 428824 - DNA, 53 bp, Artificial
  Synthetic oligonucleotide
ggggtggtagaccctctgttgtggatatcggccctacccgtccgcccattatt

SEQ ID NO: 428825 - DNA, 53 bp, Artificial
  Synthetic oligonucleotide
ggggtggtaggcaaagcgtagatataacgcaaaactttataagcatgcctacg

SEQ ID NO: 428826 - DNA, 59 bp, Artificial
  Synthetic oligonucleotide
ggggtggtagtcttcgatgtcgaagaacctttcatcatgggtgtagacaggcttgacgc

SEQ ID NO: 428827 - DNA, 52 bp, Artificial
  Synthetic oligonucleotide
ggggtggtatgcagatggaggacgttaccgttcctcctacaggtaaggttgt

SEQ ID NO: 428828 - DNA, 50 bp, Artificial
  Synthetic oligonucleotide
ggggtggttacctaacggcaaattaccacttgccaaaaagcccttggtta

SEQ ID NO: 428829 - DNA, 55 bp, Artificial
  Synthetic oligonucleotide
ggggtggttcatcaattggatttcacagcccagcggagtcgctggcggtggttgg

SEQ ID NO: 428830 - DNA, 54 bp, Artificial
  Synthetic oligonucleotide
ggggtgtaacgcctcagctaagtcagattccacatctgaatgattgggccctat

SEQ ID NO: 428831 - DNA, 55 bp, Artificial
  Synthetic oligonucleotide
ggggtgtaatggtctacgattattcagaactggaacgtgatccatcgaagggtcg

SEQ ID NO: 428832 - DNA, 60 bp, Artificial
  Synthetic oligonucleotide
ggggtgtacaccatcctcctgacaccaatgcgcaaaataacctgtacggctctggtgata

SEQ ID NO: 428833 - DNA, 59 bp, Artificial
  Synthetic oligonucleotide
ggggtgtacaccgattggggctctctcaaactggctgattgtatcggtgtattggtatc

SEQ ID NO: 428834 - DNA, 55 bp, Artificial
  Synthetic oligonucleotide
ggggtgtacatcatcctccagatgatgttgagcaagctaacctgtatggacttgg

SEQ ID NO: 428835 - DNA, 56 bp, Artificial
  Synthetic oligonucleotide
ggggtgtaccaggtgctccatatatttgttcctgttcctccctgttggatggttgg

SEQ ID NO: 428836 - DNA, 56 bp, Artificial
  Synthetic oligonucleotide
ggggtgtaccatgtcacgaacgactgctccaactcaagcatagtatatgaggcagc

SEQ ID NO: 428837 - DNA, 52 bp, Artificial
  Synthetic oligonucleotide
ggggtgtacctgttactattgcttagattcaagtgtggaaagaacaggttaa

SEQ ID NO: 428838 - DNA, 60 bp, Artificial
  Synthetic oligonucleotide
ggggtgtatatagcattagcgaatcgggattggatacatatggcttgtattaaatttcga

SEQ ID NO: 428839 - DNA, 59 bp, Artificial
  Synthetic oligonucleotide
ggggtgtcagtagtggctagctctccactgtcgatcgtgaattcgaccctaaacatccg

SEQ ID NO: 428840 - DNA, 55 bp, Artificial
  Synthetic oligonucleotide
ggggtgtctagaccttgaagttgttggagagtttcctcttttgatagagagcatt

SEQ ID NO: 428841 - DNA, 55 bp, Artificial
  Synthetic oligonucleotide
ggggtgtctccaagaactttctcccagcaatgaagagcttcttgggttaagtcac

SEQ ID NO: 428842 - DNA, 57 bp, Artificial
  Synthetic oligonucleotide
ggggtgtcttgcccaatagtacacttggagttagatcagcaagagaatttttccggc

SEQ ID NO: 428843 - DNA, 54 bp, Artificial
  Synthetic oligonucleotide
ggggtgtgaaccaaggttacggttccaactaccaggagtctagccacaaaatgc

SEQ ID NO: 428844 - DNA, 55 bp, Artificial
  Synthetic oligonucleotide
ggggtgtgacagttctatgctagccgaggtcttttcaggtagagtgctcgggcgt

SEQ ID NO: 428845 - DNA, 55 bp, Artificial
  Synthetic oligonucleotide
ggggtgtgatcggtgaacgttcgagtgtgtacgtttctagaccacggagtgacgg

SEQ ID NO: 428846 - DNA, 55 bp, Artificial
  Synthetic oligonucleotide
ggggtgtgcatggtatgagttgacaccacctgagactaccgtcaggttacgtgca

SEQ ID NO: 428847 - DNA, 55 bp, Artificial
  Synthetic oligonucleotide
ggggtgtgtgctcatgtaaagtgtcagtcggatttgccccgacatattctatgaa

SEQ ID NO: 428848 - DNA, 55 bp, Artificial
  Synthetic oligonucleotide
ggggtgttatgtggtgtcgtgtagatgtacccgaggatatgtatatacctgtatt

SEQ ID NO: 428849 - DNA, 54 bp, Artificial
  Synthetic oligonucleotide
ggggtgttcacacaccccctcctatgatttttattaagctccgttcacagcccg

SEQ ID NO: 428850 - DNA, 60 bp, Artificial
  Synthetic oligonucleotide
ggggtgttcaccatcccccagacaccagggtgcaagataccctgtatggctctggtgata

SEQ ID NO: 428851 - DNA, 56 bp, Artificial
  Synthetic oligonucleotide
ggggtgttcatcacccgcctaacataggggaccaacagggcctctatagtaatgga

SEQ ID NO: 428852 - DNA, 55 bp, Artificial
  Synthetic oligonucleotide
ggggtgttttccctagggacctctgattctcctgtgacacatgccgaccccattg

SEQ ID NO: 428853 - DNA, 55 bp, Artificial
  Synthetic oligonucleotide
ggggttaacacttggctagggaggacaataagcacagcttcaaggtctggatacg

SEQ ID NO: 428854 - DNA, 54 bp, Artificial
  Synthetic oligonucleotide
ggggttaacgactctcgtatgagtgaggctctgatcgtaaatcgtgaattacct

SEQ ID NO: 428855 - DNA, 51 bp, Artificial
  Synthetic oligonucleotide
ggggttaagtggggggtctttaagattaaattccctgaattgtacatacag

SEQ ID NO: 428856 - DNA, 55 bp, Artificial
  Synthetic oligonucleotide
ggggttaatccttacagcagaaggcggaaatgaaactataacacctacattctcc

SEQ ID NO: 428857 - DNA, 53 bp, Artificial
  Synthetic oligonucleotide
ggggttaattggcagaacgaccccagaaccaacagggaccgctggtccaccac

SEQ ID NO: 428858 - DNA, 51 bp, Artificial
  Synthetic oligonucleotide
ggggttaccataacgatctaggagacagtttatccgagtactctgtgtctg

SEQ ID NO: 428859 - DNA, 55 bp, Artificial
  Synthetic oligonucleotide
ggggttagcgtgcatggatatctcatatggatgtgaggtagatgctaacaaccga

SEQ ID NO: 428860 - DNA, 55 bp, Artificial
  Synthetic oligonucleotide
ggggttaggatctatgtaagacctgtaaacattgaggcatatatgcccaggccat

SEQ ID NO: 428861 - DNA, 55 bp, Artificial
  Synthetic oligonucleotide
ggggttagttttatatgacaaaatgacgccagcgttactaagcgccacaaacgga

SEQ ID NO: 428862 - DNA, 52 bp, Artificial
  Synthetic oligonucleotide
ggggttataccttgaatttcatgggttatgttattggcagttggggatcatt

SEQ ID NO: 428863 - DNA, 60 bp, Artificial
  Synthetic oligonucleotide
ggggttatagctaaggatgctatagacatgagatggtactcttatgttacaccgtataga

SEQ ID NO: 428864 - DNA, 53 bp, Artificial
  Synthetic oligonucleotide
ggggttatccttctggagagagatttggctgagttccaatgaatcctggattc

SEQ ID NO: 428865 - DNA, 59 bp, Artificial
  Synthetic oligonucleotide
ggggttatgctgctatcaacctgctcagccgatgtgtggctaagctgatcagtgagtgc

SEQ ID NO: 428866 - DNA, 58 bp, Artificial
  Synthetic oligonucleotide
ggggttatggtgagctaacacaccagattcgcagattttaccaatgggttcttgaaca

SEQ ID NO: 428867 - DNA, 51 bp, Artificial
  Synthetic oligonucleotide
ggggttatgttggccatggccagtggactactacgacattcatcccaagag

SEQ ID NO: 428868 - DNA, 54 bp, Artificial
  Synthetic oligonucleotide
ggggttattcccttcactttatggggtatgtgattggaagttggggtacattgc

SEQ ID NO: 428869 - DNA, 51 bp, Artificial
  Synthetic oligonucleotide
ggggttcaaattagcgagaacctcaaatagaggcgtaccgtcacatattga

SEQ ID NO: 428870 - DNA, 51 bp, Artificial
  Synthetic oligonucleotide
ggggttcaaccgacaaccgagaggggaagtctgaaagtgagcgtcgagaca

SEQ ID NO: 428871 - DNA, 53 bp, Artificial
  Synthetic oligonucleotide
ggggttcaccacccgagctcggaccaagagcaaaccaatctgtatgttcaagc

SEQ ID NO: 428872 - DNA, 59 bp, Artificial
  Synthetic oligonucleotide
ggggttcaccacccgagtacggacagtgaccaaatcagcctatatgcccaagcatcagg

SEQ ID NO: 428873 - DNA, 51 bp, Artificial
  Synthetic oligonucleotide
ggggttcaccacccgggtacggacagggaccaaaccaacctatatgttcaa

SEQ ID NO: 428874 - DNA, 58 bp, Artificial
  Synthetic oligonucleotide
ggggttcagaaactgtgtcgagtcggagttcgtggccccaacgttgaagatgaatgca

SEQ ID NO: 428875 - DNA, 59 bp, Artificial
  Synthetic oligonucleotide
ggggttcatcacccgagcacagccagggaacaaaccaacctatatgttcaagcatcagg

SEQ ID NO: 428876 - DNA, 60 bp, Artificial
  Synthetic oligonucleotide
ggggttcattgggaaagtgacaggcatagatgagaagcttaaactgaatgaatcagagtg

SEQ ID NO: 428877 - DNA, 55 bp, Artificial
  Synthetic oligonucleotide
ggggttcattgtaggtatggctgtagtggccatggcacgccaggtcaaccaccat

SEQ ID NO: 428878 - DNA, 53 bp, Artificial
  Synthetic oligonucleotide
ggggttccacgccccctaacatggcgcccggctcccgtgtatgagtgggggtc

SEQ ID NO: 428879 - DNA, 55 bp, Artificial
  Synthetic oligonucleotide
ggggttccgttaatgaaggccggtctatgattgacaagcgtgataaagctgtgtt

SEQ ID NO: 428880 - DNA, 55 bp, Artificial
  Synthetic oligonucleotide
ggggttcgatcgatgaggcacgctgctgatttgctggacgggaagatcaaccctc

SEQ ID NO: 428881 - DNA, 55 bp, Artificial
  Synthetic oligonucleotide
ggggttcgcgtatttccgcgcagaggtcgcggttggagcgcaacccacaacgttc

SEQ ID NO: 428882 - DNA, 55 bp, Artificial
  Synthetic oligonucleotide
ggggttcggatgcatacggtgatctgagagttggaacatattttaatccagtgcc

SEQ ID NO: 428883 - DNA, 52 bp, Artificial
  Synthetic oligonucleotide
ggggttcgtgtgtgcgagaaaatggccctttatgacgtggtctccactcttc

SEQ ID NO: 428884 - DNA, 55 bp, Artificial
  Synthetic oligonucleotide
ggggttctcagctgaatcaagaaaattgctactcattgttcaggcgcttagggac

SEQ ID NO: 428885 - DNA, 59 bp, Artificial
  Synthetic oligonucleotide
ggggttctcttatgacaccagatgctttgactcaacagtcacggagcgcgatatacgca

SEQ ID NO: 428886 - DNA, 54 bp, Artificial
  Synthetic oligonucleotide
ggggttcttcacatctgtgggaaaaggaatccataccgtgtttggctcggcctt

SEQ ID NO: 428887 - DNA, 50 bp, Artificial
  Synthetic oligonucleotide
ggggttgaaccccagcgatgctcattgggacggcggactatcaagccctc

SEQ ID NO: 428888 - DNA, 55 bp, Artificial
  Synthetic oligonucleotide
ggggttgaatctctcccagacagtgtcctcatacactctggcttgttcactagtg

SEQ ID NO: 428889 - DNA, 55 bp, Artificial
  Synthetic oligonucleotide
ggggttgacaatgaggcagaatttcagcaatggtccttacccaactattctggtc

SEQ ID NO: 428890 - DNA, 58 bp, Artificial
  Synthetic oligonucleotide
ggggttgacgatgtactccttctgacagccaattaactgcttccaacaaggacagtac

SEQ ID NO: 428891 - DNA, 60 bp, Artificial
  Synthetic oligonucleotide
ggggttgacgtgttctacaaacccactgagcaggtggacaccctgctctgtgacattgga

SEQ ID NO: 428892 - DNA, 57 bp, Artificial
  Synthetic oligonucleotide
ggggttgagactggggtgggaaggcctcaagtatctgtggaatctcctggtatattg

SEQ ID NO: 428893 - DNA, 55 bp, Artificial
  Synthetic oligonucleotide
ggggttgatctgatatcacagaacggtagagtacaaattaggacgggactagatg

SEQ ID NO: 428894 - DNA, 53 bp, Artificial
  Synthetic oligonucleotide
ggggttgattactcgagccaactaaaggaaataaaatcccttttagaagctca

SEQ ID NO: 428895 - DNA, 55 bp, Artificial
  Synthetic oligonucleotide
ggggttgattatgtgtgggacggtgtaaggggtttacctgtgtgttgtgtgcaac

SEQ ID NO: 428896 - DNA, 55 bp, Artificial
  Synthetic oligonucleotide
ggggttgcacccaccatcggggacattgtgctgacagagcagtcaccagaaacgg

SEQ ID NO: 428897 - DNA, 55 bp, Artificial
  Synthetic oligonucleotide
ggggttgcccgttatttcacttgcgtgcgggtcattctggtgttcacgtttgcag

SEQ ID NO: 428898 - DNA, 55 bp, Artificial
  Synthetic oligonucleotide
ggggttgcgcgcacaatggaatgataaaatcctgtccaaagaagttcgtgagttc

SEQ ID NO: 428899 - DNA, 53 bp, Artificial
  Synthetic oligonucleotide
ggggttgctaaggcagtggacttcatacccgttgaacacatggaaactactat

SEQ ID NO: 428900 - DNA, 60 bp, Artificial
  Synthetic oligonucleotide
ggggttgctctagaaaactcatttgcaccactactgtgccttagaacactagctggagta

SEQ ID NO: 428901 - DNA, 55 bp, Artificial
  Synthetic oligonucleotide
ggggttggaataatggtctgattgtacgtaatgaccgtggagatgttatacggga

SEQ ID NO: 428902 - DNA, 55 bp, Artificial
  Synthetic oligonucleotide
ggggttggccaggtttaatcaatggttggtatggattccaacataggaatgaaga

SEQ ID NO: 428903 - DNA, 60 bp, Artificial
  Synthetic oligonucleotide
ggggttggcgattatactgcattcctgaaaactaacttttccgagatagctgatgctatc

SEQ ID NO: 428904 - DNA, 55 bp, Artificial
  Synthetic oligonucleotide
ggggttggctgcgaaaacttccgaaaccactagcgcagcgattcaaaacagttgc

SEQ ID NO: 428905 - DNA, 53 bp, Artificial
  Synthetic oligonucleotide
ggggttggtacggatgatggcgggatgacgctaatcgtgttctggatcgtgtc

SEQ ID NO: 428906 - DNA, 60 bp, Artificial
  Synthetic oligonucleotide
ggggttggtgtcgaattcgactgctctcgtagtctgagcatgatttagtgattcccctgt

SEQ ID NO: 428907 - DNA, 54 bp, Artificial
  Synthetic oligonucleotide
ggggttgttaccgtaccttaggtgtatttagatacaagagtagatgttatgttg

SEQ ID NO: 428908 - DNA, 54 bp, Artificial
  Synthetic oligonucleotide
ggggttgttcctgagacctcagcttatgaccacgttcctttaaactgccagggg

SEQ ID NO: 428909 - DNA, 55 bp, Artificial
  Synthetic oligonucleotide
ggggtttaatgttgagactcgccttattgcagccgaaacccaatcggactttgga

SEQ ID NO: 428910 - DNA, 53 bp, Artificial
  Synthetic oligonucleotide
ggggtttacgggtacaatacactaaatcacatgggtaggttgtacgtaaggca

SEQ ID NO: 428911 - DNA, 54 bp, Artificial
  Synthetic oligonucleotide
ggggtttacttctgcgtcggacgaggctatgtagttctgaccggcccaggaccc

SEQ ID NO: 428912 - DNA, 53 bp, Artificial
  Synthetic oligonucleotide
ggggtttataggtacgtctcgcagggcgaacggccgtcgggtatcttcgacac

SEQ ID NO: 428913 - DNA, 52 bp, Artificial
  Synthetic oligonucleotide
ggggtttcccgctccttggactggtctaaggtcacccttgatgggcgtccgt

SEQ ID NO: 428914 - DNA, 54 bp, Artificial
  Synthetic oligonucleotide
ggggtttctagggttcgcagttgggaaagtgcgtcctccttagttagagagcac

SEQ ID NO: 428915 - DNA, 55 bp, Artificial
  Synthetic oligonucleotide
ggggtttctagggtttgcaattgggagagtgcctcttctttagttagagagcact

SEQ ID NO: 428916 - DNA, 55 bp, Artificial
  Synthetic oligonucleotide
ggggtttgaatcggatacagcgtacttgtacgagttcactggaaacggtgaggac

SEQ ID NO: 428917 - DNA, 55 bp, Artificial
  Synthetic oligonucleotide
ggggtttgacgtgggaactcgacaccgctattacaagtcagaaccagcgcgtctg

SEQ ID NO: 428918 - DNA, 52 bp, Artificial
  Synthetic oligonucleotide
ggggtttgaggtaacaacatccgaaaccagcacacccgctatattggacgtt

SEQ ID NO: 428919 - DNA, 55 bp, Artificial
  Synthetic oligonucleotide
ggggtttgccatttgctcggcagtccctaaggactgggttcctactggtcggaca

SEQ ID NO: 428920 - DNA, 51 bp, Artificial
  Synthetic oligonucleotide
ggggtttgccgtaaccaccatcaagcgtgaaattgccaagtgtgaggtccg

SEQ ID NO: 428921 - DNA, 50 bp, Artificial
  Synthetic oligonucleotide
ggggtttggaagtatcactgtcatgcattcatcataatgcttgcattaag

SEQ ID NO: 428922 - DNA, 57 bp, Artificial
  Synthetic oligonucleotide
ggggtttgtaatttatatatgcagtatggtaggcaaaatggtgtacttgaatcagac

SEQ ID NO: 428923 - DNA, 55 bp, Artificial
  Synthetic oligonucleotide
ggggtttgtagggtataatttgggaaagtgcttcttctgtagtgagagagcagtg

SEQ ID NO: 428924 - DNA, 50 bp, Artificial
  Synthetic oligonucleotide
ggggtttgtgtacgggggcccgcccggtaattcaggctagcccttgttgg

SEQ ID NO: 428925 - DNA, 55 bp, Artificial
  Synthetic oligonucleotide
ggggttttagtaagtcaatttctatatcagatacatttgaaagtgactccccaaa

SEQ ID NO: 428926 - DNA, 55 bp, Artificial
  Synthetic oligonucleotide
ggggttttatggcggtaacggacaagatacaggcatagacatatcttatagcgag

SEQ ID NO: 428927 - DNA, 55 bp, Artificial
  Synthetic oligonucleotide
ggggttttcagccgaatcaagaaaattgcttcttattgttcaagcacttagggac

SEQ ID NO: 428928 - DNA, 55 bp, Artificial
  Synthetic oligonucleotide
ggggttttcgtatgatacccgatgctttgactcaaccgtcactgagagagacatc

SEQ ID NO: 428929 - DNA, 54 bp, Artificial
  Synthetic oligonucleotide
ggggttttgatccggtggagcgcctctcttctctttcgggcgcgttggataggt

SEQ ID NO: 428930 - DNA, 55 bp, Artificial
  Synthetic oligonucleotide
gggtaaaacagaaaacggataaacgcagaaccacacactggatggctcactgatg

SEQ ID NO: 428931 - DNA, 50 bp, Artificial
  Synthetic oligonucleotide
gggtaaaagggtggaagggtggttggttggtattcccttagacttgatgt

SEQ ID NO: 428932 - DNA, 55 bp, Artificial
  Synthetic oligonucleotide
gggtaaaccttttgattccaggtttgtattgtgcagtactaatcataatttgtta

SEQ ID NO: 428933 - DNA, 55 bp, Artificial
  Synthetic oligonucleotide
gggtaaactaatcaaagtgtccgccacaccaccaggcagagaagtggaattcagc

SEQ ID NO: 428934 - DNA, 55 bp, Artificial
  Synthetic oligonucleotide
gggtaaagacatttggtgaggcggacaattggggtttgcactatactgttgctgg

SEQ ID NO: 428935 - DNA, 51 bp, Artificial
  Synthetic oligonucleotide
gggtaaaggtagtagaagagaagggtttcaaaccagaagtaatacccatgt

SEQ ID NO: 428936 - DNA, 58 bp, Artificial
  Synthetic oligonucleotide
gggtaaagtgctctgtgtaatgagttagatgtggtttaggttatatagactctcccat

SEQ ID NO: 428937 - DNA, 56 bp, Artificial
  Synthetic oligonucleotide
gggtaaagttggaatcaatgggaacttaccagatactgtcaatttattcaacagta

SEQ ID NO: 428938 - DNA, 57 bp, Artificial
  Synthetic oligonucleotide
gggtaaatatcggagacaccaataggtaaatgagcccccaattgaggcaccgatata

SEQ ID NO: 428939 - DNA, 51 bp, Artificial
  Synthetic oligonucleotide
gggtaaatggttgattactccgacagggaaattacatgcttggggtgtggt

SEQ ID NO: 428940 - DNA, 58 bp, Artificial
  Synthetic oligonucleotide
gggtaaattagacagacaccgataggtaaatgagacaccgataaatgagacaccgata

SEQ ID NO: 428941 - DNA, 55 bp, Artificial
  Synthetic oligonucleotide
gggtaaattagacagacaccgatcggtaaatgagacaccggtagatcggttttca

SEQ ID NO: 428942 - DNA, 57 bp, Artificial
  Synthetic oligonucleotide
gggtaaattagacagaccctgataggtaaatgagacaccgataggtaaatgagacac

SEQ ID NO: 428943 - DNA, 57 bp, Artificial
  Synthetic oligonucleotide
gggtaaattagacaggcaccgataggtaaatgagacaccgatatatcggtactcaat

SEQ ID NO: 428944 - DNA, 54 bp, Artificial
  Synthetic oligonucleotide
gggtaaatttcccgtagtctttgctacgggtgctggtgagccaactcgggacgc

SEQ ID NO: 428945 - DNA, 60 bp, Artificial
  Synthetic oligonucleotide
gggtaacattgcagaggcgctaaagccgaatggaagagatgaggtattgactctggagaa

SEQ ID NO: 428946 - DNA, 51 bp, Artificial
  Synthetic oligonucleotide
gggtaaccgataatacttatcctcgacccaaatgccaacagtcagaggcgc

SEQ ID NO: 428947 - DNA, 55 bp, Artificial
  Synthetic oligonucleotide
gggtaacgcgacgtctgtagtacagaacttcaatatacaaggtgatggcaatcac

SEQ ID NO: 428948 - DNA, 56 bp, Artificial
  Synthetic oligonucleotide
gggtaacgtttacacagctaataagaccatttaaaagtgacaggacaagctgtaca

SEQ ID NO: 428949 - DNA, 57 bp, Artificial
  Synthetic oligonucleotide
gggtaactagaactgatatagccgattatctattacctggatggaaattaacgtatg

SEQ ID NO: 428950 - DNA, 55 bp, Artificial
  Synthetic oligonucleotide
gggtaactaggaacatgtcatataggtcactaccggtccagattagttatcagtc

SEQ ID NO: 428951 - DNA, 53 bp, Artificial
  Synthetic oligonucleotide
gggtaacttaccgttttagtaaactaacgtcgtcatgattatgactggtagcg

SEQ ID NO: 428952 - DNA, 54 bp, Artificial
  Synthetic oligonucleotide
gggtaacttatatactagaaccctctatagaactattaatcttgttcctacacg

SEQ ID NO: 428953 - DNA, 54 bp, Artificial
  Synthetic oligonucleotide
gggtaagacaaaatccacccgggccgaatgtcctcacggtggatcaaataatgg

SEQ ID NO: 428954 - DNA, 56 bp, Artificial
  Synthetic oligonucleotide
gggtaagacgcaacccaatcgatccaggtcgtatatcaagctgaaacgcctacgtt

SEQ ID NO: 428955 - DNA, 55 bp, Artificial
  Synthetic oligonucleotide
gggtaagatctggatggatgagaacatcaagaccaagaatcatacgaacactgtt

SEQ ID NO: 428956 - DNA, 54 bp, Artificial
  Synthetic oligonucleotide
gggtaagattgaacctaacccgaagcaggtcgtatattaagttgaaacgactca

SEQ ID NO: 428957 - DNA, 55 bp, Artificial
  Synthetic oligonucleotide
gggtaagcagactaggaactcgaggcaccattcgcactcgttctggtgcacaaat

SEQ ID NO: 428958 - DNA, 56 bp, Artificial
  Synthetic oligonucleotide
gggtaagcagatggtcgtaaaggaccaggacgtgtttagcgaggcgcctggaacga

SEQ ID NO: 428959 - DNA, 50 bp, Artificial
  Synthetic oligonucleotide
gggtaagctgctgaatgcttatctctggttgctctcaccatgggaatcct

SEQ ID NO: 428960 - DNA, 57 bp, Artificial
  Synthetic oligonucleotide
gggtaagctggcgggcaaacctacactctatcttacttacattatatatcctaacca

SEQ ID NO: 428961 - DNA, 55 bp, Artificial
  Synthetic oligonucleotide
gggtaaggagtcaaaatgatagactgagcccctttatgggaggcgcgcttcagac

SEQ ID NO: 428962 - DNA, 56 bp, Artificial
  Synthetic oligonucleotide
gggtaaggatagatcttataataactatggactggcaaacttaggagtaaagatcc

SEQ ID NO: 428963 - DNA, 55 bp, Artificial
  Synthetic oligonucleotide
gggtaaggtaatttgtctttctgatgttactaggggtattgggctgacccatcga

SEQ ID NO: 428964 - DNA, 54 bp, Artificial
  Synthetic oligonucleotide
gggtaaggttcggcggtgttttacgcactgtacgcgttaagttcttcgatgcgc

SEQ ID NO: 428965 - DNA, 55 bp, Artificial
  Synthetic oligonucleotide
gggtaagtacttatagtggtttggggacggtaacattatactatcccatgagcgc

SEQ ID NO: 428966 - DNA, 54 bp, Artificial
  Synthetic oligonucleotide
gggtaagtggtaaaagtggtgttggtagtatgaagacgaaaatcgctagtaagc

SEQ ID NO: 428967 - DNA, 58 bp, Artificial
  Synthetic oligonucleotide
gggtaagttatcaagcctataagatcataccacaagaacagaggcttagtagtcttat

SEQ ID NO: 428968 - DNA, 55 bp, Artificial
  Synthetic oligonucleotide
gggtaagttcaggggtgtacataccagtaggccccgctgaaattatagtgaccac

SEQ ID NO: 428969 - DNA, 50 bp, Artificial
  Synthetic oligonucleotide
gggtaataaaacaacggccctcgatccggggaggtaccagtcccgtcgag

SEQ ID NO: 428970 - DNA, 55 bp, Artificial
  Synthetic oligonucleotide
gggtaatacaacctttagtacaaagagtctttagtggcattaggatgcaatcatc

SEQ ID NO: 428971 - DNA, 60 bp, Artificial
  Synthetic oligonucleotide
gggtaatacattggttaccctgatgtgtttagctagagtgtatgactcatgtgatcctaa

SEQ ID NO: 428972 - DNA, 55 bp, Artificial
  Synthetic oligonucleotide
gggtaatactataccgtccacttcgttacagaatggctaacagtacagttcgccg

SEQ ID NO: 428973 - DNA, 54 bp, Artificial
  Synthetic oligonucleotide
gggtaatactctagtaactttgagtgttctaagttacgtgtacgatttatccaa

SEQ ID NO: 428974 - DNA, 55 bp, Artificial
  Synthetic oligonucleotide
gggtaatagatacaatgggctttgttcaacagagacgcaagttagagctgttcac

SEQ ID NO: 428975 - DNA, 55 bp, Artificial
  Synthetic oligonucleotide
gggtaatagtagttctgacaacgagaccttcagacctggtggaggaaatatgagg

SEQ ID NO: 428976 - DNA, 60 bp, Artificial
  Synthetic oligonucleotide
gggtaatccgcaatcgaaggcccatcaattgagcttgcagaggcccatgtctctcctggg

SEQ ID NO: 428977 - DNA, 52 bp, Artificial
  Synthetic oligonucleotide
gggtaatctcgtctgactgggcagtggcgtctatgagcttcgccgcagggtc

SEQ ID NO: 428978 - DNA, 60 bp, Artificial
  Synthetic oligonucleotide
gggtaatgaatatccggtgcttgtcaagattactctcgacgaaggtcagccagcgtatgc

SEQ ID NO: 428979 - DNA, 55 bp, Artificial
  Synthetic oligonucleotide
gggtaatgactgtcacgttgaacttgccaaggaggaccttgacgttgttctaggc

SEQ ID NO: 428980 - DNA, 55 bp, Artificial
  Synthetic oligonucleotide
gggtaatgattcagtgtttaagacaaagctggttcgtgatgagcagattggtcgg

SEQ ID NO: 428981 - DNA, 53 bp, Artificial
  Synthetic oligonucleotide
gggtaatgcctcgggtgattggcattgcgattccacctggtctgagggccacg

SEQ ID NO: 428982 - DNA, 55 bp, Artificial
  Synthetic oligonucleotide
gggtaatggatggaaagcaggtgcaaatcgagcttgataatgcagtaggcagccc

SEQ ID NO: 428983 - DNA, 55 bp, Artificial
  Synthetic oligonucleotide
gggtaatggcccgagcaatggtagttgtggcagctatggtagccatctctgtcct

SEQ ID NO: 428984 - DNA, 60 bp, Artificial
  Synthetic oligonucleotide
gggtaattacaggctcatcaacaatggtgacgattgtgttctcataacagagcgcaacaa

SEQ ID NO: 428985 - DNA, 56 bp, Artificial
  Synthetic oligonucleotide
gggtacaaaacagtaaagagcagatcaaaaggcaagttgtagtcgataatttgaat

SEQ ID NO: 428986 - DNA, 55 bp, Artificial
  Synthetic oligonucleotide
gggtacaaaacccactgcccctcatgttcgtaataagaaggtgatattatttgac

SEQ ID NO: 428987 - DNA, 55 bp, Artificial
  Synthetic oligonucleotide
gggtacaaaagagtatagggtctcaaacaataaccagagacatgagactcatggt

SEQ ID NO: 428988 - DNA, 60 bp, Artificial
  Synthetic oligonucleotide
gggtacaaagcacggatgaatacattcagaggacagacatctactatcatgctaatagtg

SEQ ID NO: 428989 - DNA, 55 bp, Artificial
  Synthetic oligonucleotide
gggtacaagaggccgctatcctcatggatgataaactaccatcagcaggccgtgc

SEQ ID NO: 428990 - DNA, 53 bp, Artificial
  Synthetic oligonucleotide
gggtacaagagtttacgaattgccagacttttgtgtaaatctaaagggtcatc

SEQ ID NO: 428991 - DNA, 55 bp, Artificial
  Synthetic oligonucleotide
gggtacaagggaccctgacaagtttgaccaatatccactacgattctcggacgga

SEQ ID NO: 428992 - DNA, 60 bp, Artificial
  Synthetic oligonucleotide
gggtacaagggagtctggcggggagacggcatcatgcagaccacttgcccatgtggagca

SEQ ID NO: 428993 - DNA, 55 bp, Artificial
  Synthetic oligonucleotide
gggtacaatccagtaccaccatgaacaagcacttctgtttccccggtgaggctac

SEQ ID NO: 428994 - DNA, 55 bp, Artificial
  Synthetic oligonucleotide
gggtacaatgtatataaaggatacacagaacggtgcctcttcctttttatttgga

SEQ ID NO: 428995 - DNA, 60 bp, Artificial
  Synthetic oligonucleotide
gggtacaatgtggctgaacgcgggatcagaaattcaggtcgctggattcgactattcatg

SEQ ID NO: 428996 - DNA, 52 bp, Artificial
  Synthetic oligonucleotide
gggtacaatttatacttgtaccccaaatggcattctcgtaattttagaaagt

SEQ ID NO: 428997 - DNA, 55 bp, Artificial
  Synthetic oligonucleotide
gggtacacaagcattgaaaataagtggttaggtattgacttcctagccgaagcac

SEQ ID NO: 428998 - DNA, 55 bp, Artificial
  Synthetic oligonucleotide
gggtacacattcacccaagagaagaacatgttaaagacaggaaaatttgccaaag

SEQ ID NO: 428999 - DNA, 55 bp, Artificial
  Synthetic oligonucleotide
gggtacacctattaaaatgtataatgagtctggacaacctttgtttgatgtggga

SEQ ID NO: 429000 - DNA, 59 bp, Artificial
  Synthetic oligonucleotide
gggtacacctttgagagcattgcccagctacttgacatcactctaccggtaggcccacc

SEQ ID NO: 429001 - DNA, 55 bp, Artificial
  Synthetic oligonucleotide
gggtacacggatgcatacgttgcaaatagagctatctcgaccacacatacggagc

SEQ ID NO: 429002 - DNA, 54 bp, Artificial
  Synthetic oligonucleotide
gggtacactcgaggagtggaaggcggggagggggggatggagcttgtccctatg

SEQ ID NO: 429003 - DNA, 57 bp, Artificial
  Synthetic oligonucleotide
gggtacacttttaccatgacatcagccctatacccagtaccaccactggtgacattg

SEQ ID NO: 429004 - DNA, 53 bp, Artificial
  Synthetic oligonucleotide
gggtacaggaactggttggataagctagttggtcataattacccggtttatgt

SEQ ID NO: 429005 - DNA, 53 bp, Artificial
  Synthetic oligonucleotide
gggtacagggtactcaaggtattccgggtccaactggtccacaagggatccaa

SEQ ID NO: 429006 - DNA, 54 bp, Artificial
  Synthetic oligonucleotide
gggtacatagagttaacgtcgaaaaccattccaccataaactgtctcaccttgg

SEQ ID NO: 429007 - DNA, 60 bp, Artificial
  Synthetic oligonucleotide
gggtacatgaaggatatgaggaattcacgatggttgggcgaagagcaacagcaatcataa

SEQ ID NO: 429008 - DNA, 55 bp, Artificial
  Synthetic oligonucleotide
gggtaccaattgagaggatttcattctactcagggtatcggtacattggtaccca

SEQ ID NO: 429009 - DNA, 54 bp, Artificial
  Synthetic oligonucleotide
gggtaccacacccaccttcaccccccggaattcagcctgagctggcccctcgag

SEQ ID NO: 429010 - DNA, 56 bp, Artificial
  Synthetic oligonucleotide
gggtaccacccttgcgagcctggaaacatcgggccagaggtgtccgcgctaggcta

SEQ ID NO: 429011 - DNA, 57 bp, Artificial
  Synthetic oligonucleotide
gggtaccacccttgcgagtctggagacaccgggccagaagtgttcgcgctaagctac

SEQ ID NO: 429012 - DNA, 57 bp, Artificial
  Synthetic oligonucleotide
gggtaccacccttgcgagtctggagacatcgggccagaagcgtccgcgctaaactac

SEQ ID NO: 429013 - DNA, 55 bp, Artificial
  Synthetic oligonucleotide
gggtaccacgttctgctggtgagtgagtacaacctggctttgcctcgacgcaggg

SEQ ID NO: 429014 - DNA, 60 bp, Artificial
  Synthetic oligonucleotide
gggtaccactatcatatgatctgcgctggaccaagctagctctgctcgagtcgaccacgc

SEQ ID NO: 429015 - DNA, 60 bp, Artificial
  Synthetic oligonucleotide
gggtaccactctgtgtcgcttgagcacctgacacatttggttccaagtctgaacgtccga

SEQ ID NO: 429016 - DNA, 55 bp, Artificial
  Synthetic oligonucleotide
gggtaccagcacataaaggaataggaggtaatgaggaggaggacaaactagttag

SEQ ID NO: 429017 - DNA, 55 bp, Artificial
  Synthetic oligonucleotide
gggtaccagcccacaaaggtataggagggaatgatcaggtagacaaattggtaag

SEQ ID NO: 429018 - DNA, 56 bp, Artificial
  Synthetic oligonucleotide
gggtaccagtgacttgtgtaacaaaagaattcgcaaaatggggatgtcaaccacta

SEQ ID NO: 429019 - DNA, 55 bp, Artificial
  Synthetic oligonucleotide
gggtaccagttcagtatccacaacaattcgtaccaaaacctcaggagaggtctca

SEQ ID NO: 429020 - DNA, 59 bp, Artificial
  Synthetic oligonucleotide
gggtacccgcccatagataaatctcccgttccatctcttacatctgatgaggcgtatct

SEQ ID NO: 429021 - DNA, 59 bp, Artificial
  Synthetic oligonucleotide
gggtaccctctgcagctccgtccgccggaggcctgccgtggagtcgcgtcggtgagata

SEQ ID NO: 429022 - DNA, 60 bp, Artificial
  Synthetic oligonucleotide
gggtaccgatcgaatctgcactgggataacatcttcaaactcacctcatgtggtcaaaac

SEQ ID NO: 429023 - DNA, 55 bp, Artificial
  Synthetic oligonucleotide
gggtaccgcttgcgggtcttgccaattcaaacggtgaggttcgcaagctggggag

SEQ ID NO: 429024 - DNA, 55 bp, Artificial
  Synthetic oligonucleotide
gggtaccgtgaactccgcagtagtttccataggactatataatttggttgcctcg

SEQ ID NO: 429025 - DNA, 51 bp, Artificial
  Synthetic oligonucleotide
gggtacctacctcggtaccgcgttcggccccgactccgtccgcgcgcatga

SEQ ID NO: 429026 - DNA, 55 bp, Artificial
  Synthetic oligonucleotide
gggtacctcgcgagtcttacctctcaacacccgttacacgcggggagcagactgt

SEQ ID NO: 429027 - DNA, 54 bp, Artificial
  Synthetic oligonucleotide
gggtaccttcgaaggacccttcaggcaggaatatagtgggtttgtacaatacgc

SEQ ID NO: 429028 - DNA, 60 bp, Artificial
  Synthetic oligonucleotide
gggtacgaatggatcactgagtacgtaggcaaaactgtctggtttgtgcccagcgtgcgc

SEQ ID NO: 429029 - DNA, 55 bp, Artificial
  Synthetic oligonucleotide
gggtacgcaagtgtttggatttccattgcaaccaggctactcaagtgtgttcagc

SEQ ID NO: 429030 - DNA, 55 bp, Artificial
  Synthetic oligonucleotide
gggtacgcagcagtcggaaactcggaatggagctcccgtcaatggctcacctgag

SEQ ID NO: 429031 - DNA, 60 bp, Artificial
  Synthetic oligonucleotide
gggtacgccagtgatggaatgatcaaatataaggttgacgggtgtcgtatgagtggtgat

SEQ ID NO: 429032 - DNA, 53 bp, Artificial
  Synthetic oligonucleotide
gggtacgccgtaggctaccgcctagacaggaatattctcttcccgggaaacaa

SEQ ID NO: 429033 - DNA, 52 bp, Artificial
  Synthetic oligonucleotide
gggtacggccaagttggtacaggccaacggcatgaatgtcatccacgcggta

SEQ ID NO: 429034 - DNA, 55 bp, Artificial
  Synthetic oligonucleotide
gggtacgggcaggtgtggtgcaacaataccggaaaagttgtctactgtcatcgcg

SEQ ID NO: 429035 - DNA, 51 bp, Artificial
  Synthetic oligonucleotide
gggtacgggtggggcctttgtatcacctgcgtcagtcgttcagcactattg

SEQ ID NO: 429036 - DNA, 55 bp, Artificial
  Synthetic oligonucleotide
gggtacggtgccatggattttagctctctgcaggccaacaagtcagatgtgcctc

SEQ ID NO: 429037 - DNA, 53 bp, Artificial
  Synthetic oligonucleotide
gggtacggtgtgcgagccgtgtcctaacggtacgtacagtttaaacggccagc

SEQ ID NO: 429038 - DNA, 55 bp, Artificial
  Synthetic oligonucleotide
gggtacggttgagggaggcttcaccaaacccacacttattgggccaggaatcagc

SEQ ID NO: 429039 - DNA, 55 bp, Artificial
  Synthetic oligonucleotide
gggtacgtactgaacgttccaggacctggtgcatacagaattcaggatgggcaag

SEQ ID NO: 429040 - DNA, 59 bp, Artificial
  Synthetic oligonucleotide
gggtacgtcaccatgtacaggggggtacgtcacagccaatcagaattgagcacgcccag

SEQ ID NO: 429041 - DNA, 58 bp, Artificial
  Synthetic oligonucleotide
gggtactacaactggcaccacggagcagtacagtactcaggaggccggttcaccatcc

SEQ ID NO: 429042 - DNA, 52 bp, Artificial
  Synthetic oligonucleotide
gggtactacccgatatgggacgggtatgagacaaataatctcggaaacccgg

SEQ ID NO: 429043 - DNA, 55 bp, Artificial
  Synthetic oligonucleotide
gggtactcacacaaggaaacgaattatattgactacttgtgcaactcccaccacc

SEQ ID NO: 429044 - DNA, 60 bp, Artificial
  Synthetic oligonucleotide
gggtactcaggagcgttcatcgattattgggctgatagagagtgcttcaacccttgcttt

SEQ ID NO: 429045 - DNA, 55 bp, Artificial
  Synthetic oligonucleotide
gggtactcccaaaagacattgcttggtaataacaggccctcctgatactggaaag

SEQ ID NO: 429046 - DNA, 58 bp, Artificial
  Synthetic oligonucleotide
gggtactctgaacatcgtgtgaaggtgcagagaactctgtgactccaaaaccccggaa

SEQ ID NO: 429047 - DNA, 51 bp, Artificial
  Synthetic oligonucleotide
gggtactgagagatttgatcttagttctgaaggcaagacaagggagatcca

SEQ ID NO: 429048 - DNA, 55 bp, Artificial
  Synthetic oligonucleotide
gggtactgtcactaccgaagtggcatttggtctagtgtgcgcaacctgtgaacag

SEQ ID NO: 429049 - DNA, 55 bp, Artificial
  Synthetic oligonucleotide
gggtactgtttgaccaggtggatgctgattgaagctgagttaaagtgctttggca

SEQ ID NO: 429050 - DNA, 55 bp, Artificial
  Synthetic oligonucleotide
gggtacttaagcaccaactcatcagaaaaggttgacacactgttagaaaacgatg

SEQ ID NO: 429051 - DNA, 55 bp, Artificial
  Synthetic oligonucleotide
gggtacttcacatgtaataagagcgtgattcttaagaagaaccatactgacgatg

SEQ ID NO: 429052 - DNA, 60 bp, Artificial
  Synthetic oligonucleotide
gggtagaaaagtggtaggcaccaccgtgcctcatccagcagagatgctggttctagtgcc

SEQ ID NO: 429053 - DNA, 55 bp, Artificial
  Synthetic oligonucleotide
gggtagaaggggcatatacaggtttgtgactccaggggaacgaccctcgggcatg

SEQ ID NO: 429054 - DNA, 54 bp, Artificial
  Synthetic oligonucleotide
gggtagaagtaccgtttgtggccactgtaccgtttatggccatttattgttcaa

SEQ ID NO: 429055 - DNA, 56 bp, Artificial
  Synthetic oligonucleotide
gggtagactttgatttagagttttactgtaatggtaggcataaagtcataagaaca

SEQ ID NO: 429056 - DNA, 60 bp, Artificial
  Synthetic oligonucleotide
gggtagagatctacccgatagagcatctaaatctcatgtcatccctgaaactaatacaca

SEQ ID NO: 429057 - DNA, 53 bp, Artificial
  Synthetic oligonucleotide
gggtagaggaaatgttctaatctcctatcttaaagggttgcttcatttaaggt

SEQ ID NO: 429058 - DNA, 55 bp, Artificial
  Synthetic oligonucleotide
gggtagaggatagggatgtaactacccagaggccaaaggaacggcatagaaggaa

SEQ ID NO: 429059 - DNA, 55 bp, Artificial
  Synthetic oligonucleotide
gggtagagttcaaggattcacacttggaaacgaacaagctttgatgggtctaacg

SEQ ID NO: 429060 - DNA, 57 bp, Artificial
  Synthetic oligonucleotide
gggtagatgaatactccagcacagaaagggtggtagtgagcattgaccggtttttaa

SEQ ID NO: 429061 - DNA, 59 bp, Artificial
  Synthetic oligonucleotide
gggtagatggcaaaactgatgctgagcccggccattaccagaggaacttgcttcgtgtg

SEQ ID NO: 429062 - DNA, 55 bp, Artificial
  Synthetic oligonucleotide
gggtagattagcaataccagttaaggctaattggggagaagttggcaaggttgta

SEQ ID NO: 429063 - DNA, 55 bp, Artificial
  Synthetic oligonucleotide
gggtagatttgattaatgtttataccctagagtcatacacctgagagattcggag

SEQ ID NO: 429064 - DNA, 60 bp, Artificial
  Synthetic oligonucleotide
gggtagattttatgcgcttatcgcaatagctgcgacggatactcagaaaggtcgagtttg

SEQ ID NO: 429065 - DNA, 55 bp, Artificial
  Synthetic oligonucleotide
gggtagcaaccaaccagttttacccattgtcaggtactacttctgttacgtatgc

SEQ ID NO: 429066 - DNA, 55 bp, Artificial
  Synthetic oligonucleotide
gggtagcacgtttgctattagttctttgtgcaagtatcttagtaataagcagttg

SEQ ID NO: 429067 - DNA, 50 bp, Artificial
  Synthetic oligonucleotide
gggtagccattttgtgttgccgaccgttttcggtctcccgccttttttgt

SEQ ID NO: 429068 - DNA, 55 bp, Artificial
  Synthetic oligonucleotide
gggtagcgaacctccaccccaacttgatctgaggagttaacataggacttgtcta

SEQ ID NO: 429069 - DNA, 53 bp, Artificial
  Synthetic oligonucleotide
gggtagcgagtaaaggttatattaacgtaatacatttcttgttagatatcggg

SEQ ID NO: 429070 - DNA, 50 bp, Artificial
  Synthetic oligonucleotide
gggtagcggaagtaactgcgacgtgatctcaaaaggagacaacatccttg

SEQ ID NO: 429071 - DNA, 57 bp, Artificial
  Synthetic oligonucleotide
gggtagctaaagtcaagaaagctattgttaaccagtgtaagcgtggtgtcgcatact

SEQ ID NO: 429072 - DNA, 52 bp, Artificial
  Synthetic oligonucleotide
gggtagctacaaaattaagggagtactttggtaacaccacagcaataaggtt

SEQ ID NO: 429073 - DNA, 60 bp, Artificial
  Synthetic oligonucleotide
gggtagctatcatatctattgaaccaaatgttaattcagagagcagacaatactctctat

SEQ ID NO: 429074 - DNA, 60 bp, Artificial
  Synthetic oligonucleotide
gggtagctctgctgccctacctcgtttccgacgctctacgagctacagggaacgcagcaa

SEQ ID NO: 429075 - DNA, 55 bp, Artificial
  Synthetic oligonucleotide
gggtaggacgagcaatgtatgcccctcctattgcaggaaacataacctgtgtatc

SEQ ID NO: 429076 - DNA, 55 bp, Artificial
  Synthetic oligonucleotide
gggtaggatcactccgaaacacacacaggatacaccgaaacattgaaggccccac

SEQ ID NO: 429077 - DNA, 55 bp, Artificial
  Synthetic oligonucleotide
gggtaggatccctacagtacttggcactagcagcattaataacaccaagaagggt

SEQ ID NO: 429078 - DNA, 55 bp, Artificial
  Synthetic oligonucleotide
gggtaggcggtcgatagcccgtttgagggggtagtaatactcctgattctggtga

SEQ ID NO: 429079 - DNA, 59 bp, Artificial
  Synthetic oligonucleotide
gggtaggcttccaaccttcatgactcagaaagcaaggaacgcactggacaacttagcag

SEQ ID NO: 429080 - DNA, 58 bp, Artificial
  Synthetic oligonucleotide
gggtagggctagagtgtcacaaggtgccgaatggagcctgagagaaactgcatgcctg

SEQ ID NO: 429081 - DNA, 52 bp, Artificial
  Synthetic oligonucleotide
gggtaggtcttcgccagaatatatgtataaaccaagtccaaacatagctaag

SEQ ID NO: 429082 - DNA, 55 bp, Artificial
  Synthetic oligonucleotide
gggtaggtgcccacattttgaacagtacctgaatcaaatgccagaggcagcagca

SEQ ID NO: 429083 - DNA, 56 bp, Artificial
  Synthetic oligonucleotide
gggtaggtgcgttagccctgccccgtatcctcacagcgtcccctgacccgtatcat

SEQ ID NO: 429084 - DNA, 54 bp, Artificial
  Synthetic oligonucleotide
gggtaggttctaacagtacacctatacaagtaagtgatggtttgaaacgtgttg

SEQ ID NO: 429085 - DNA, 52 bp, Artificial
  Synthetic oligonucleotide
gggtaggtttagaacaatcgtttgtggacttttccctgcacaaattatgcac

SEQ ID NO: 429086 - DNA, 55 bp, Artificial
  Synthetic oligonucleotide
gggtaggtttgttgactcagttgtctcctacacaccctgccggctatttggtgat

SEQ ID NO: 429087 - DNA, 55 bp, Artificial
  Synthetic oligonucleotide
gggtagtaagattgacccacaagatacccatgaataagttagatagatggtgtag

SEQ ID NO: 429088 - DNA, 55 bp, Artificial
  Synthetic oligonucleotide
gggtagtatagctttcagaatagtcaatgatcatgatgtacacacaaccctcgtc

SEQ ID NO: 429089 - DNA, 57 bp, Artificial
  Synthetic oligonucleotide
gggtagtatgatgtttgatgtgaacatagcgggtaaagattataagaagggcacttt

SEQ ID NO: 429090 - DNA, 57 bp, Artificial
  Synthetic oligonucleotide
gggtagtccatcacggaggatcgggtgtgaccaatacgtgttgtgcggttcgtgtcc

SEQ ID NO: 429091 - DNA, 57 bp, Artificial
  Synthetic oligonucleotide
gggtagtcggtgaatttagattggagagaaaatggttggatgtggtgaggaatagga

SEQ ID NO: 429092 - DNA, 56 bp, Artificial
  Synthetic oligonucleotide
gggtagtggaaatcgcacgtctgtagggagtagtatatatgttaacaccccgagcg

SEQ ID NO: 429093 - DNA, 55 bp, Artificial
  Synthetic oligonucleotide
gggtagttaaagcagctaaaggtgtagcagaacgtgcagtaaatgcagcgaaaag

SEQ ID NO: 429094 - DNA, 57 bp, Artificial
  Synthetic oligonucleotide
gggtagttactttgctggaggaccaagacagtggagtgacacaaccaaaggtgcagg

SEQ ID NO: 429095 - DNA, 57 bp, Artificial
  Synthetic oligonucleotide
gggtataaagttctctcccggtggtgctgcttatcttgtgagcaattttccacaggg

SEQ ID NO: 429096 - DNA, 55 bp, Artificial
  Synthetic oligonucleotide
gggtataactcaggttactactatagtggtgaggacccagcaaatcttagggtgg

SEQ ID NO: 429097 - DNA, 55 bp, Artificial
  Synthetic oligonucleotide
gggtataagacacaaaaccagggaccttgggacgagaatggcatagtcttggact

SEQ ID NO: 429098 - DNA, 55 bp, Artificial
  Synthetic oligonucleotide
gggtatacaataggtgaactcaatgacaaccaagagttagttgaacagcaacttt

SEQ ID NO: 429099 - DNA, 50 bp, Artificial
  Synthetic oligonucleotide
gggtatacgggtggttttcatatggggaacagggtgggcttagggccggg

SEQ ID NO: 429100 - DNA, 56 bp, Artificial
  Synthetic oligonucleotide
gggtatactgggtccttatttatactagaaggtcctatagaactttcaatcgcatc

SEQ ID NO: 429101 - DNA, 56 bp, Artificial
  Synthetic oligonucleotide
gggtatactgttgtaattggcgatgtggcgtactttgttagtgacggctacttccg

SEQ ID NO: 429102 - DNA, 51 bp, Artificial
  Synthetic oligonucleotide
gggtatagcttcaactttcgccctaactttcatgaatttcttaccgctttt

SEQ ID NO: 429103 - DNA, 54 bp, Artificial
  Synthetic oligonucleotide
gggtataggcacgggttccggcactgggggtcgtactggctatgttcccttaca

SEQ ID NO: 429104 - DNA, 55 bp, Artificial
  Synthetic oligonucleotide
gggtatatagtgagctcggtcaatacactgcatcccgttagtcaactagggatcc

SEQ ID NO: 429105 - DNA, 55 bp, Artificial
  Synthetic oligonucleotide
gggtatatataggtttgtgactccaggggaacggccctcgggcatgttcgattct

SEQ ID NO: 429106 - DNA, 55 bp, Artificial
  Synthetic oligonucleotide
gggtatatggacccactggtggggaaggagaatccacctttgccagggacctgta

SEQ ID NO: 429107 - DNA, 55 bp, Artificial
  Synthetic oligonucleotide
gggtatcaaagaagcagatataacacctgcacatggcccaataaagaaaatggac

SEQ ID NO: 429108 - DNA, 52 bp, Artificial
  Synthetic oligonucleotide
gggtatcatcacagcaacgatcaaggatccgggtatgcagcagacaaagagt

SEQ ID NO: 429109 - DNA, 54 bp, Artificial
  Synthetic oligonucleotide
gggtatcattgagggtatcgttgagggtatcgttgaggttaaccactagatata

SEQ ID NO: 429110 - DNA, 55 bp, Artificial
  Synthetic oligonucleotide
gggtatccagaacaccgaggacagtttcggcaggaaggagttgccatcacagggg

SEQ ID NO: 429111 - DNA, 55 bp, Artificial
  Synthetic oligonucleotide
gggtatccccgtccttgtcaacgtaggacttgacatcggacgaggatttagctcc

SEQ ID NO: 429112 - DNA, 55 bp, Artificial
  Synthetic oligonucleotide
gggtatcgaacggccctcaatgtattcgaccgaatcaagggagtcactccagaca

SEQ ID NO: 429113 - DNA, 59 bp, Artificial
  Synthetic oligonucleotide
gggtatcgtgatgcagtcctcacccctttttttgagtgctatgtcaagattgttttatg

SEQ ID NO: 429114 - DNA, 59 bp, Artificial
  Synthetic oligonucleotide
gggtatctaaagaacaaagatgaggaggtcgaagacaatggcatgggtcaactattgac

SEQ ID NO: 429115 - DNA, 60 bp, Artificial
  Synthetic oligonucleotide
gggtatctaccctacagtgatgctgcgtctatgagtaagaccaccaactcgagaaacatc

SEQ ID NO: 429116 - DNA, 55 bp, Artificial
  Synthetic oligonucleotide
gggtatctcttaggcgtttgcccaaagactactctcttgcttcggaaagcgtgtt

SEQ ID NO: 429117 - DNA, 57 bp, Artificial
  Synthetic oligonucleotide
gggtatctgaatgggttatcttaacgatctaggggcgtaggcccgtgagcaatggac

SEQ ID NO: 429118 - DNA, 55 bp, Artificial
  Synthetic oligonucleotide
gggtatctgagcaccaattcatcagaaagggtcgacacgctcctggaaaatgggg

SEQ ID NO: 429119 - DNA, 60 bp, Artificial
  Synthetic oligonucleotide
gggtatctgtatcataatgattatggttattacgaaggtgagaagacattcaatctcgac

SEQ ID NO: 429120 - DNA, 55 bp, Artificial
  Synthetic oligonucleotide
gggtatctgtgtgcagggctgccaagcgacaccccgagaggggaagatgcccaat

SEQ ID NO: 429121 - DNA, 55 bp, Artificial
  Synthetic oligonucleotide
gggtatcttcgacaccgttgttctgtgcgaggcgtacgacacaggttgcgcatgg

SEQ ID NO: 429122 - DNA, 55 bp, Artificial
  Synthetic oligonucleotide
gggtatgactgttggtgcgcttactgtgcaaccaatgcgctctatccggagtaca

SEQ ID NO: 429123 - DNA, 59 bp, Artificial
  Synthetic oligonucleotide
gggtatgaggaattcacaatgattggacggagggcaacagctatcctaaggaaagcaac

SEQ ID NO: 429124 - DNA, 58 bp, Artificial
  Synthetic oligonucleotide
gggtatgaggaattcacaatggttgggcggagagcaaccgccatcctaagaaaagcaa

SEQ ID NO: 429125 - DNA, 60 bp, Artificial
  Synthetic oligonucleotide
gggtatgcacagacagattgtgtcttagaagcaatggctttccttgaagaatcccaccca

SEQ ID NO: 429126 - DNA, 55 bp, Artificial
  Synthetic oligonucleotide
gggtatgcatcccacacagctttgttcgagaaaccaaccacactaactgacatca

SEQ ID NO: 429127 - DNA, 55 bp, Artificial
  Synthetic oligonucleotide
gggtatgcgcaattgaatactcgcgctagtgtgttcgtcgggcctggctcgaccc

SEQ ID NO: 429128 - DNA, 55 bp, Artificial
  Synthetic oligonucleotide
gggtatgcgttacctgggaacgataatcctggctgcctagactaagcctcgcgcg

SEQ ID NO: 429129 - DNA, 60 bp, Artificial
  Synthetic oligonucleotide
gggtatggacatttcatggtgaaacaccaagagctactactgatagctcaaacactgcaa

SEQ ID NO: 429130 - DNA, 55 bp, Artificial
  Synthetic oligonucleotide
gggtatggaccatatttaataactaaccagcacttgttcggagataacaatggcg

SEQ ID NO: 429131 - DNA, 59 bp, Artificial
  Synthetic oligonucleotide
gggtatggctcgtatatcatcacaaatggacatttgttcaggcgcaataatggtgtgct

SEQ ID NO: 429132 - DNA, 55 bp, Artificial
  Synthetic oligonucleotide
gggtatgtaatcaagcccataagatcataccagagaaagagaggtttagtcgtct

SEQ ID NO: 429133 - DNA, 55 bp, Artificial
  Synthetic oligonucleotide
gggtatgtatcttgaaggatttatgtccgaggaatctggagaaacacttctaacg

SEQ ID NO: 429134 - DNA, 59 bp, Artificial
  Synthetic oligonucleotide
gggtatgtcgagaatcgcccaagcggttatcccagctggcaccggcacggacggataca

SEQ ID NO: 429135 - DNA, 53 bp, Artificial
  Synthetic oligonucleotide
gggtatgtttacgggtgcacctatcatgtactcgtacaccaacccaattgcag

SEQ ID NO: 429136 - DNA, 58 bp, Artificial
  Synthetic oligonucleotide
gggtatgtttcgcttcaatggaattctgaagcgattaccgacggttgtagacgtgaga

SEQ ID NO: 429137 - DNA, 55 bp, Artificial
  Synthetic oligonucleotide
gggtattaattgtagctatttaaatgggagcagccgcaagtatacaaactacagt

SEQ ID NO: 429138 - DNA, 55 bp, Artificial
  Synthetic oligonucleotide
gggtattacacttgggcagctcggttaaggttaggcacttggcagggtattacac

SEQ ID NO: 429139 - DNA, 55 bp, Artificial
  Synthetic oligonucleotide
gggtattacagtaagcacgtatcaagctctctcgctgcaaacactcaacattgtg

SEQ ID NO: 429140 - DNA, 57 bp, Artificial
  Synthetic oligonucleotide
gggtattacatcttacatcgagtcccttggtgctgcctttggaagtgggttcacaag

SEQ ID NO: 429141 - DNA, 57 bp, Artificial
  Synthetic oligonucleotide
gggtattacctacaatgaaagcatagctaacgaaatgaaaaattgctctttcaatgc

SEQ ID NO: 429142 - DNA, 53 bp, Artificial
  Synthetic oligonucleotide
gggtattacctggaaattccacaatggattcacacttcgacgggtacgaagtt

SEQ ID NO: 429143 - DNA, 57 bp, Artificial
  Synthetic oligonucleotide
gggtattactacccttatgcgccattaggcgtggtgaagcaaactaaacccgcagca

SEQ ID NO: 429144 - DNA, 55 bp, Artificial
  Synthetic oligonucleotide
gggtattatagtcaccctgagttacttacaccaacaaccatctatgctcctgttg

SEQ ID NO: 429145 - DNA, 55 bp, Artificial
  Synthetic oligonucleotide
gggtattattagacccctagtacctgggcaagcagcagtagctatgcttcaggga

SEQ ID NO: 429146 - DNA, 55 bp, Artificial
  Synthetic oligonucleotide
gggtattctgtacacctcaccttttatgattgcctcaactaaccacgggtccatc

SEQ ID NO: 429147 - DNA, 57 bp, Artificial
  Synthetic oligonucleotide
gggtattgcgattaacaggtataatggattaacgctccgcggagttacgatgcgccc

SEQ ID NO: 429148 - DNA, 60 bp, Artificial
  Synthetic oligonucleotide
gggtattgctatcatatcatagagttaagtcctgctactctaggcatattccaaccggtc

SEQ ID NO: 429149 - DNA, 57 bp, Artificial
  Synthetic oligonucleotide
gggtattggcctataggaaaccctagggctctataagcagcatacatatgttgtgac

SEQ ID NO: 429150 - DNA, 57 bp, Artificial
  Synthetic oligonucleotide
gggtattggtcgaggaggctaaatcccacatcgcaaaagagaaacgtctgctaattc

SEQ ID NO: 429151 - DNA, 60 bp, Artificial
  Synthetic oligonucleotide
gggtattgtgacaacccacgctatgtcacaatttgagaagctgcggatggcctgtgaatt

SEQ ID NO: 429152 - DNA, 54 bp, Artificial
  Synthetic oligonucleotide
gggtattgttaacgagtaaaactccaataagactcacaccacaaagtcctaatc

SEQ ID NO: 429153 - DNA, 54 bp, Artificial
  Synthetic oligonucleotide
gggtatttacgcgtgtcgcatcgcggggatgtgactggttgtaatcgcgaagac

SEQ ID NO: 429154 - DNA, 54 bp, Artificial
  Synthetic oligonucleotide
gggtatttacggcctatattcttacagggctctccccctagaacggcggagcga

SEQ ID NO: 429155 - DNA, 55 bp, Artificial
  Synthetic oligonucleotide
gggtatttcactgtataaagaaggcctaaagaggtcaatgcttgaactacattgt

SEQ ID NO: 429156 - DNA, 55 bp, Artificial
  Synthetic oligonucleotide
gggtcaaaacacagctaattacaagaccaatgtggcagataggatggagcagatc

SEQ ID NO: 429157 - DNA, 51 bp, Artificial
  Synthetic oligonucleotide
gggtcaaaacgttcatgttccatgttccaaaatttccggggtttggagacc

SEQ ID NO: 429158 - DNA, 55 bp, Artificial
  Synthetic oligonucleotide
gggtcaaaatgaaacggacgtcttcgtcctcaacaataccagaccaccgctgggc

SEQ ID NO: 429159 - DNA, 55 bp, Artificial
  Synthetic oligonucleotide
gggtcaaaatgatctaataccacggctacaataaccgctgcacctttcttcctaa

SEQ ID NO: 429160 - DNA, 53 bp, Artificial
  Synthetic oligonucleotide
gggtcaaacaaaactcaccaaaacgataggtacgcgaattatggaagaatcca

SEQ ID NO: 429161 - DNA, 52 bp, Artificial
  Synthetic oligonucleotide
gggtcaaaccatagcctgcttcgcccactccgtgctttgtagattcggccct

SEQ ID NO: 429162 - DNA, 60 bp, Artificial
  Synthetic oligonucleotide
gggtcaaagatttattcccaagataaatataggatactagagtcatatgtgtataatctg

SEQ ID NO: 429163 - DNA, 60 bp, Artificial
  Synthetic oligonucleotide
gggtcaaatcagatcattaaacgctacagttatccaaagttgtgccccgcatgagatgtc

SEQ ID NO: 429164 - DNA, 55 bp, Artificial
  Synthetic oligonucleotide
gggtcaaattagatctctaaatgccacagttattcagacgtgtgcgccacatgag

SEQ ID NO: 429165 - DNA, 55 bp, Artificial
  Synthetic oligonucleotide
gggtcaacagctatacaggaccaggcctatagagaccttgaaaggcttcagtgcc

SEQ ID NO: 429166 - DNA, 55 bp, Artificial
  Synthetic oligonucleotide
gggtcaacaggcccatgtataggaagcccaggatatatcggatgtacagaagccc

SEQ ID NO: 429167 - DNA, 55 bp, Artificial
  Synthetic oligonucleotide
gggtcaactgtctactacccaaatgagaaggactgtgaaacaaggggagatcatg

SEQ ID NO: 429168 - DNA, 58 bp, Artificial
  Synthetic oligonucleotide
gggtcaagaattgttgtccccaatctgtttaggtctctatatggatctagttgatcgt

SEQ ID NO: 429169 - DNA, 55 bp, Artificial
  Synthetic oligonucleotide
gggtcaaggcacggtggtgcaatggtgctgcgcacgaaagtcaacagtgccctcc

SEQ ID NO: 429170 - DNA, 60 bp, Artificial
  Synthetic oligonucleotide
gggtcaagtgaacaagcagcagaggctatggaggttgctagccaggctagacaaatggta

SEQ ID NO: 429171 - DNA, 56 bp, Artificial
  Synthetic oligonucleotide
gggtcaataaacaagaaaggtgtattcaaccctcaatgtggttcagtccagtcatt

SEQ ID NO: 429172 - DNA, 54 bp, Artificial
  Synthetic oligonucleotide
gggtcaatgggccagtttatgtcgcgactgttattcagtttcggcaactgttta

SEQ ID NO: 429173 - DNA, 55 bp, Artificial
  Synthetic oligonucleotide
gggtcacaatgtacaaaatagtgcttgtactcgcgctccttggagcagtgaacgg

SEQ ID NO: 429174 - DNA, 55 bp, Artificial
  Synthetic oligonucleotide
gggtcacacactatcttcgcggacacaacgtacattgctgctccccatgtttggg

SEQ ID NO: 429175 - DNA, 55 bp, Artificial
  Synthetic oligonucleotide
gggtcacacattacctccgcggacataacgtacactgctgttccccttgcttggg

SEQ ID NO: 429176 - DNA, 59 bp, Artificial
  Synthetic oligonucleotide
gggtcacagctttggtgattccaccatgactggtgtggcaaatgtgattgaagatgctg

SEQ ID NO: 429177 - DNA, 55 bp, Artificial
  Synthetic oligonucleotide
gggtcacaggagggaggcctccatcaagcgttagcaggagccatcgtggtggagt

SEQ ID NO: 429178 - DNA, 53 bp, Artificial
  Synthetic oligonucleotide
gggtcacatatacagatggagacaagaaccctatacatatgagtaagccgtat

SEQ ID NO: 429179 - DNA, 60 bp, Artificial
  Synthetic oligonucleotide
gggtcacatctcaagcttgggacaatctccaaacctacgccctcttgacagcctcttaca

SEQ ID NO: 429180 - DNA, 55 bp, Artificial
  Synthetic oligonucleotide
gggtcaccactagtgcttgatgactgttcactagaaggtctcattctgggcaatc

SEQ ID NO: 429181 - DNA, 55 bp, Artificial
  Synthetic oligonucleotide
gggtcaccactggttcaccttccaatccctggtggacagggccgaagcacgtctc

SEQ ID NO: 429182 - DNA, 55 bp, Artificial
  Synthetic oligonucleotide
gggtcacccttacttcaatgtcctcaattccactggtgataaggttgaagtgccg

SEQ ID NO: 429183 - DNA, 55 bp, Artificial
  Synthetic oligonucleotide
gggtcaccttattcttgggaacaagagctacatcatgggtctttcttggacggtc

SEQ ID NO: 429184 - DNA, 60 bp, Artificial
  Synthetic oligonucleotide
gggtcacgcagaaaattgtcacaggacagtcaagctactggtcatacacggcgccggagg

SEQ ID NO: 429185 - DNA, 55 bp, Artificial
  Synthetic oligonucleotide
gggtcacgtacctttcctacgtagagaatcagctactacactcgactgcgtaatt

SEQ ID NO: 429186 - DNA, 55 bp, Artificial
  Synthetic oligonucleotide
gggtcacgtgtcagacgtgtacgaacatacatacattgtgacctggtttaataca

SEQ ID NO: 429187 - DNA, 56 bp, Artificial
  Synthetic oligonucleotide
gggtcactatcaactaagtcactcaatctcttgtcaaataaagtgatctgatcatc

SEQ ID NO: 429188 - DNA, 55 bp, Artificial
  Synthetic oligonucleotide
gggtcactgaatgaaattcttgacgcacccgcgggacgatccctatcatatagac

SEQ ID NO: 429189 - DNA, 50 bp, Artificial
  Synthetic oligonucleotide
gggtcactgataccaccaataccacaggaatggcaaactgctctttcaat

SEQ ID NO: 429190 - DNA, 59 bp, Artificial
  Synthetic oligonucleotide
gggtcactgattatgactactactagcccctctctcattcggctactcacgcctagggt

SEQ ID NO: 429191 - DNA, 55 bp, Artificial
  Synthetic oligonucleotide
gggtcactggtcagggactttgtgattactcgagagtcacatatgctttccatct

SEQ ID NO: 429192 - DNA, 55 bp, Artificial
  Synthetic oligonucleotide
gggtcacttacgggtacgcaacaaccgaggactttgtgagcgggccaaacacatc

SEQ ID NO: 429193 - DNA, 51 bp, Artificial
  Synthetic oligonucleotide
gggtcagaaaaaactcaaaacgtaacagtaaatccaggtccgttcgcccaa

SEQ ID NO: 429194 - DNA, 60 bp, Artificial
  Synthetic oligonucleotide
gggtcagaaagcctgcagtcactctagaacgctatagcagtgctctggtgtgttcataac

SEQ ID NO: 429195 - DNA, 55 bp, Artificial
  Synthetic oligonucleotide
gggtcagaatttgaccttattaactgttatggtccgaatgaactctatgagttcg

SEQ ID NO: 429196 - DNA, 55 bp, Artificial
  Synthetic oligonucleotide
gggtcagactatacagcagaagagcatgagaaagctatagtagaattaagggctt

SEQ ID NO: 429197 - DNA, 55 bp, Artificial
  Synthetic oligonucleotide
gggtcagatacccactgacccttggatggtgctacaaactagtgccagtggaccc

SEQ ID NO: 429198 - DNA, 55 bp, Artificial
  Synthetic oligonucleotide
gggtcagatttgcctttgtctgaacatagacagcgggtagagaaacttagggaac

SEQ ID NO: 429199 - DNA, 60 bp, Artificial
  Synthetic oligonucleotide
gggtcagcattcaaagaatgttatcacgtcattttcctcaagagtctatgctcgaataga

SEQ ID NO: 429200 - DNA, 58 bp, Artificial
  Synthetic oligonucleotide
gggtcagcccagtgcatttaggagattgtagctttgaaggatggattgtaggaaaccc

SEQ ID NO: 429201 - DNA, 55 bp, Artificial
  Synthetic oligonucleotide
gggtcaggccactgccacgtttgttgtactgatctacagtgtagcagcatggcac

SEQ ID NO: 429202 - DNA, 60 bp, Artificial
  Synthetic oligonucleotide
gggtcaggtgactataatattgcgccattacactttttattgcatactgagcaccgttct

SEQ ID NO: 429203 - DNA, 55 bp, Artificial
  Synthetic oligonucleotide
gggtcagtattcttgtcttctcgtggcgttgcgaccgtgggtgcccagagcacct

SEQ ID NO: 429204 - DNA, 55 bp, Artificial
  Synthetic oligonucleotide
gggtcagtatttgatttctgaccaattcggttactttaagtcgaagataggtgtc

SEQ ID NO: 429205 - DNA, 56 bp, Artificial
  Synthetic oligonucleotide
gggtcagtcttcctctgtggaaataacatggcatacacctatttaccccaaaactg

SEQ ID NO: 429206 - DNA, 60 bp, Artificial
  Synthetic oligonucleotide
gggtcagtggcttgttaaatgtgaaccagaccacttgcctaaagacatatttgtatgcac

SEQ ID NO: 429207 - DNA, 55 bp, Artificial
  Synthetic oligonucleotide
gggtcagttatttcgtccattgaatggtacttacgatccatggagctatcagacg

SEQ ID NO: 429208 - DNA, 58 bp, Artificial
  Synthetic oligonucleotide
gggtcataattggccgcgacgccctacagcaatgccaaggggccctatacctccctga

SEQ ID NO: 429209 - DNA, 58 bp, Artificial
  Synthetic oligonucleotide
gggtcataccactacataacaggactcaccactgataacttgaaagtcccctgccaac

SEQ ID NO: 429210 - DNA, 55 bp, Artificial
  Synthetic oligonucleotide
gggtcatcaccagtatcagtcatgacaagtggatttgcacttcattattttgcaa

SEQ ID NO: 429211 - DNA, 55 bp, Artificial
  Synthetic oligonucleotide
gggtcatcagaggacagcacactctaggggattgtgaacatccagacgcacacac

SEQ ID NO: 429212 - DNA, 57 bp, Artificial
  Synthetic oligonucleotide
gggtcatccatgacgtacagatacttgcccagtttcgggattcgggtgttgcaactt

SEQ ID NO: 429213 - DNA, 55 bp, Artificial
  Synthetic oligonucleotide
gggtcatcgtaaggtcccttgtgaacagaagatatggctccatcagaatccagga

SEQ ID NO: 429214 - DNA, 58 bp, Artificial
  Synthetic oligonucleotide
gggtcatgaatcaagagcctggtgattctagttttctagattgggcttcagatcctta

SEQ ID NO: 429215 - DNA, 55 bp, Artificial
  Synthetic oligonucleotide
gggtcatgcactggaggacgcgcagtttagcctttcagagatgatacagtgggca

SEQ ID NO: 429216 - DNA, 55 bp, Artificial
  Synthetic oligonucleotide
gggtcatgcagcaccgcaatgcagggcccgtaggcctccaagccagggaaataac

SEQ ID NO: 429217 - DNA, 55 bp, Artificial
  Synthetic oligonucleotide
gggtcatgccgaaaatcggctctttacggaaggattcggcccatgcgttccagtc

SEQ ID NO: 429218 - DNA, 60 bp, Artificial
  Synthetic oligonucleotide
gggtcatggggtctccatagaatggaggcaaagaacatatagcacacaaataactcctga

SEQ ID NO: 429219 - DNA, 55 bp, Artificial
  Synthetic oligonucleotide
gggtcattccaacgtaggataggtacacaaaagacggtccttaccgcgctgaaga

SEQ ID NO: 429220 - DNA, 55 bp, Artificial
  Synthetic oligonucleotide
gggtcattgcaatgcagaatatgcatttagagcttggatttcaaaatgtgtggaa

SEQ ID NO: 429221 - DNA, 60 bp, Artificial
  Synthetic oligonucleotide
gggtcattggtggttgggccactgctaattccaagtcacagaccaatagacaagtcatag

SEQ ID NO: 429222 - DNA, 55 bp, Artificial
  Synthetic oligonucleotide
gggtccaagaagaacgattaagtgcttcaactgtggcaaggaaggacacctagct

SEQ ID NO: 429223 - DNA, 52 bp, Artificial
  Synthetic oligonucleotide
gggtccaagaggatctcggggtctctgaatcacacgggcgttccactagcga

SEQ ID NO: 429224 - DNA, 55 bp, Artificial
  Synthetic oligonucleotide
gggtccaatgaaactctatatcaagaccctttgcagagccagagtgggagtcgcg

SEQ ID NO: 429225 - DNA, 52 bp, Artificial
  Synthetic oligonucleotide
gggtccacaacaagctaaactgccccctatgggtttcaagctcctccgacgc

SEQ ID NO: 429226 - DNA, 55 bp, Artificial
  Synthetic oligonucleotide
gggtccacacaacagtgcatgcatacttgataaaagattggtcaaatgaagcact

SEQ ID NO: 429227 - DNA, 53 bp, Artificial
  Synthetic oligonucleotide
gggtccaccaagtcctgtgctcgtacactcgtatccgggtcttttggtaaccg

SEQ ID NO: 429228 - DNA, 55 bp, Artificial
  Synthetic oligonucleotide
gggtccaccattcatttctcatcctacgattactttggtgcaaggatgttgcgag

SEQ ID NO: 429229 - DNA, 54 bp, Artificial
  Synthetic oligonucleotide
gggtccaccgcagtaaagactaggtaaactggtcacagttagcatttcgggtcg

SEQ ID NO: 429230 - DNA, 56 bp, Artificial
  Synthetic oligonucleotide
gggtccacgaatggaccttcaacgggtcttacataggctccttccagtgctccaac

SEQ ID NO: 429231 - DNA, 51 bp, Artificial
  Synthetic oligonucleotide
gggtccagagtcagtcccctctttatttacctagagattcctctaggaatt

SEQ ID NO: 429232 - DNA, 60 bp, Artificial
  Synthetic oligonucleotide
gggtccagattgcttcaagtgagactgtggaagctatggattctagtaccctggaactaa

SEQ ID NO: 429233 - DNA, 55 bp, Artificial
  Synthetic oligonucleotide
gggtccagtctgttaactctatgacgttttgaaggacaatttctatcaacaacca

SEQ ID NO: 429234 - DNA, 56 bp, Artificial
  Synthetic oligonucleotide
gggtccatcatgacacgatggataagagaggtgcaattcctccccttaacccccgg

SEQ ID NO: 429235 - DNA, 59 bp, Artificial
  Synthetic oligonucleotide
gggtccatggtaacatctgaggctcaattgtttaataagccatattggctacggcgggc

SEQ ID NO: 429236 - DNA, 59 bp, Artificial
  Synthetic oligonucleotide
gggtccatgtctataccttatcagcatgtgaatgtaccgaaagttgatcgtaaagttgt

SEQ ID NO: 429237 - DNA, 55 bp, Artificial
  Synthetic oligonucleotide
gggtccattcgctcaaaccagttacgcaccagtaaattggggacacggagaaata

SEQ ID NO: 429238 - DNA, 55 bp, Artificial
  Synthetic oligonucleotide
gggtccatttcatcttcgtaatcggcacacatgcggaaacaaccgaatccgcccg

SEQ ID NO: 429239 - DNA, 57 bp, Artificial
  Synthetic oligonucleotide
gggtcccacttatgaaattgtgccataaatggtccaaaaagggttactgggcatgca

SEQ ID NO: 429240 - DNA, 55 bp, Artificial
  Synthetic oligonucleotide
gggtcccaggcacacttctaccatgacattagttccatcaccgaaggggagtgga

SEQ ID NO: 429241 - DNA, 55 bp, Artificial
  Synthetic oligonucleotide
gggtcccatgttctccggctgcttgttgatccgtatgggtcaatggcccatcctg

SEQ ID NO: 429242 - DNA, 54 bp, Artificial
  Synthetic oligonucleotide
gggtccccaggagtgaaagggtgggcctttgacgttggaaatgatctttggatg

SEQ ID NO: 429243 - DNA, 55 bp, Artificial
  Synthetic oligonucleotide
gggtccccatgaccctcaatctaccacagggcctgtatggcaggttcaactgcaa

SEQ ID NO: 429244 - DNA, 54 bp, Artificial
  Synthetic oligonucleotide
gggtccccgaccgattcatccgaccttttactgagcggaaagaagcaacgccca

SEQ ID NO: 429245 - DNA, 60 bp, Artificial
  Synthetic oligonucleotide
gggtcccgatacatagccatgtggatgaaaatgacgagagctcatctgactccgacttct

SEQ ID NO: 429246 - DNA, 55 bp, Artificial
  Synthetic oligonucleotide
gggtcccgctgaaccaggtgattgtggtggtatcttaagatgcattcatggacca

SEQ ID NO: 429247 - DNA, 50 bp, Artificial
  Synthetic oligonucleotide
gggtcccgtttgttggggtgcccccaccaaatgtacattccaatgccccc

SEQ ID NO: 429248 - DNA, 55 bp, Artificial
  Synthetic oligonucleotide
gggtccctaggcatggtacaacaaaggagaggaccccctggttctagaagacaga

SEQ ID NO: 429249 - DNA, 52 bp, Artificial
  Synthetic oligonucleotide
gggtccctgagaggagggtggtcgcacagggtcctgaggaagaatttggtcg

SEQ ID NO: 429250 - DNA, 56 bp, Artificial
  Synthetic oligonucleotide
gggtccctggttctattcacgtggcggctctgcggataatgttagttatcagtatg

SEQ ID NO: 429251 - DNA, 54 bp, Artificial
  Synthetic oligonucleotide
gggtccgactgatatattatattcgttgtgactcagcagtcttccacgcttgat

SEQ ID NO: 429252 - DNA, 53 bp, Artificial
  Synthetic oligonucleotide
gggtccggactccttactacggtcttatgaccgcaatttgggtctggttggga

SEQ ID NO: 429253 - DNA, 55 bp, Artificial
  Synthetic oligonucleotide
gggtccggcgtcgtggccggatacacctcgtccggcctgaccaacctcaatatct

SEQ ID NO: 429254 - DNA, 55 bp, Artificial
  Synthetic oligonucleotide
gggtccgggcagtgggttgtcattttgtgctcctccttacagctgcacctgaacc

SEQ ID NO: 429255 - DNA, 53 bp, Artificial
  Synthetic oligonucleotide
gggtccggttccttccccgatggggcacagatccaatacttttcgtaaaatgc

SEQ ID NO: 429256 - DNA, 56 bp, Artificial
  Synthetic oligonucleotide
gggtccgtggacaagcgactggcaagacgataatattcgtccccacacagcaccaa

SEQ ID NO: 429257 - DNA, 55 bp, Artificial
  Synthetic oligonucleotide
gggtcctaccttaacgagacacacttttcttctgacatagaacaggaagccaaca

SEQ ID NO: 429258 - DNA, 55 bp, Artificial
  Synthetic oligonucleotide
gggtcctacgggtagtacggtaggtggcttaacgcctgtgcaacctcagcaggtc

SEQ ID NO: 429259 - DNA, 55 bp, Artificial
  Synthetic oligonucleotide
gggtcctactggtaataaaactagagcgatgggtggacacataactagcccagag

SEQ ID NO: 429260 - DNA, 54 bp, Artificial
  Synthetic oligonucleotide
gggtcctatcagctacgccaacgggagtggccccgaacaccgcccctactgctg

SEQ ID NO: 429261 - DNA, 51 bp, Artificial
  Synthetic oligonucleotide
gggtcctattatttcactttcctaaaatacccccgcttttgtgtctaagag

SEQ ID NO: 429262 - DNA, 55 bp, Artificial
  Synthetic oligonucleotide
gggtcctccgcagtaaaggttgggtaaactgaccacagttagcatctcgcgtcgc

SEQ ID NO: 429263 - DNA, 55 bp, Artificial
  Synthetic oligonucleotide
gggtcctctacgctgattatcttgaaatagaggggattggtaatttcccaaataa

SEQ ID NO: 429264 - DNA, 56 bp, Artificial
  Synthetic oligonucleotide
gggtcctctcaaactatcccatgcaatcggggaatgggtccttatttataggtgag

SEQ ID NO: 429265 - DNA, 55 bp, Artificial
  Synthetic oligonucleotide
gggtcctctgatgaacattcgtgtcgctaaccctgtaatatagtttccatgggac

SEQ ID NO: 429266 - DNA, 55 bp, Artificial
  Synthetic oligonucleotide
gggtcctctggaccaactaatgctcactacaatcagaacgctaatggcgatcgat

SEQ ID NO: 429267 - DNA, 54 bp, Artificial
  Synthetic oligonucleotide
gggtcctggagaaccacttccctgggccgttggattctctgttccggacttctc

SEQ ID NO: 429268 - DNA, 55 bp, Artificial
  Synthetic oligonucleotide
gggtcctggtctaccgtgagcgaggaggctagtgaggacgtcgtctgttgctcga

SEQ ID NO: 429269 - DNA, 56 bp, Artificial
  Synthetic oligonucleotide
gggtcctggtgcaccattgtgtagacgctttgctacaagactttggtccattaggt

SEQ ID NO: 429270 - DNA, 55 bp, Artificial
  Synthetic oligonucleotide
gggtcctgtagaaagttcctttgtagacattaatattgatgaaccagggcctttg

SEQ ID NO: 429271 - DNA, 55 bp, Artificial
  Synthetic oligonucleotide
gggtcctgtgattggcatattgaaatgagtaaaatcccaaattccagcacccaga

SEQ ID NO: 429272 - DNA, 56 bp, Artificial
  Synthetic oligonucleotide
gggtccttatttatagttcaggacctaaatggcataattgtaaatatgtgttagat

SEQ ID NO: 429273 - DNA, 55 bp, Artificial
  Synthetic oligonucleotide
gggtccttcagggagaagaacgaagccgagaagtagtggagatctatgttacacc

SEQ ID NO: 429274 - DNA, 59 bp, Artificial
  Synthetic oligonucleotide
gggtccttcagtgaaaagaatgacgacgagaagtaatggagatctatgttgcaccttat

SEQ ID NO: 429275 - DNA, 55 bp, Artificial
  Synthetic oligonucleotide
gggtccttcatggactattgggccgagggggaatgctaccgagcgtgtttttatg

SEQ ID NO: 429276 - DNA, 57 bp, Artificial
  Synthetic oligonucleotide
gggtccttgaaatggttgaggactggctgcaccgagggccgaaggaattttgtgtga

SEQ ID NO: 429277 - DNA, 50 bp, Artificial
  Synthetic oligonucleotide
gggtcgaagacggaagcgagtttagccccggctttgctcccgcagaacac

SEQ ID NO: 429278 - DNA, 53 bp, Artificial
  Synthetic oligonucleotide
gggtcgaagtgttttggacaggtacgccttgcatttacgtaagggtgccggaa

SEQ ID NO: 429279 - DNA, 53 bp, Artificial
  Synthetic oligonucleotide
gggtcgaatctaaggcttggaaagaccttttgaagaagttacatagcgttaag

SEQ ID NO: 429280 - DNA, 55 bp, Artificial
  Synthetic oligonucleotide
gggtcgaattacccagttgccaaaggatcatacaataatacaagtggggaacaaa

SEQ ID NO: 429281 - DNA, 55 bp, Artificial
  Synthetic oligonucleotide
gggtcgacaaaatgaagcgatcaaggatgattccagtacatctgatcaaatcaac

SEQ ID NO: 429282 - DNA, 55 bp, Artificial
  Synthetic oligonucleotide
gggtcgacgtcatcaatgacgttataccaggcattattgctatataccttttgac

SEQ ID NO: 429283 - DNA, 57 bp, Artificial
  Synthetic oligonucleotide
gggtcgagaagcctaaatttcttccggatctgtatgattacaaggagaaccgattca

SEQ ID NO: 429284 - DNA, 55 bp, Artificial
  Synthetic oligonucleotide
gggtcgagaattcgactcctctcacgtgtatcaccgccaggctacagaagagtac

SEQ ID NO: 429285 - DNA, 57 bp, Artificial
  Synthetic oligonucleotide
gggtcgagcgtaacggcctagccgttagcatggtttcatggcagagctttgtcgcct

SEQ ID NO: 429286 - DNA, 55 bp, Artificial
  Synthetic oligonucleotide
gggtcgatctcccttatgagaatggcgcccaaaccctcagcgttatagcacccaa

SEQ ID NO: 429287 - DNA, 52 bp, Artificial
  Synthetic oligonucleotide
gggtcgattaaccgacggtaaccctttgcactgcaaaccattagaccgttac

SEQ ID NO: 429288 - DNA, 55 bp, Artificial
  Synthetic oligonucleotide
gggtcgcaagtgatgatcgatcattgatggaggttaagaccgaattcattgaatc

SEQ ID NO: 429289 - DNA, 55 bp, Artificial
  Synthetic oligonucleotide
gggtcgcacgggaagaggtaggcacggcatatatcggtatgtctcgtctggggag

SEQ ID NO: 429290 - DNA, 50 bp, Artificial
  Synthetic oligonucleotide
gggtcgccgtaaattcaaccctgggaagggtctgtgggcgttgcctggtg

SEQ ID NO: 429291 - DNA, 52 bp, Artificial
  Synthetic oligonucleotide
gggtcgcctttctggctccgggtggggtaccctggtggtggctgctttaccc

SEQ ID NO: 429292 - DNA, 52 bp, Artificial
  Synthetic oligonucleotide
gggtcgcgcatacccacgggggagcgggtttgggaccgagggaacgtcacac

SEQ ID NO: 429293 - DNA, 55 bp, Artificial
  Synthetic oligonucleotide
gggtcgcgggcaggagcggccattgggttccttgggggattcgcaggctccatca

SEQ ID NO: 429294 - DNA, 55 bp, Artificial
  Synthetic oligonucleotide
gggtcgcgtgattcgcttgcctggcgccctcactgaccttggtatgttcggtcag

SEQ ID NO: 429295 - DNA, 55 bp, Artificial
  Synthetic oligonucleotide
gggtcgctagtcaccaagctgatacttctattccctccgatgtttcggcaaggga

SEQ ID NO: 429296 - DNA, 55 bp, Artificial
  Synthetic oligonucleotide
gggtcgctgcggtccgaaagcttccttcactgacgtcggtaacggcagactctga

SEQ ID NO: 429297 - DNA, 59 bp, Artificial
  Synthetic oligonucleotide
gggtcgctgggagtttgcaaattacaacagcaaacctgcattaggcatgttggagaggg

SEQ ID NO: 429298 - DNA, 55 bp, Artificial
  Synthetic oligonucleotide
gggtcgcttcgatacttcgcgtgtattttgcgattgtatgtcattttcttctgtc

SEQ ID NO: 429299 - DNA, 55 bp, Artificial
  Synthetic oligonucleotide
gggtcggagcgagctcagcgcttgaaaatccacgggatcggagaaccgttccagg

SEQ ID NO: 429300 - DNA, 55 bp, Artificial
  Synthetic oligonucleotide
gggtcggagtttattcccacctgtttatctgtcacggctacaggcgacgtggttg

SEQ ID NO: 429301 - DNA, 56 bp, Artificial
  Synthetic oligonucleotide
gggtcggcgcaccaaggctgtctcccgccgtttccagcggacgtcttcatggtccc

SEQ ID NO: 429302 - DNA, 53 bp, Artificial
  Synthetic oligonucleotide
gggtcggctgggaagagtatatcctatgggaatcccccggttccccttatgtc

SEQ ID NO: 429303 - DNA, 55 bp, Artificial
  Synthetic oligonucleotide
gggtcgggagctttattaaacagactccgagtctgtcttggacactgagggggtg

SEQ ID NO: 429304 - DNA, 53 bp, Artificial
  Synthetic oligonucleotide
gggtcgggcattctcggagaacggttggccctacgtcgaccaagggtcgtgta

SEQ ID NO: 429305 - DNA, 55 bp, Artificial
  Synthetic oligonucleotide
gggtcggggacgtgttatgacttggaggatcatatacagctgagaacgataggag

SEQ ID NO: 429306 - DNA, 55 bp, Artificial
  Synthetic oligonucleotide
gggtcggtttcgtccacgcaggttggttcaaatagccagagctataattccgagg

SEQ ID NO: 429307 - DNA, 54 bp, Artificial
  Synthetic oligonucleotide
gggtcgtaagggctacagtaccactgacgggtcgctgtactcgtacttggaagg

SEQ ID NO: 429308 - DNA, 55 bp, Artificial
  Synthetic oligonucleotide
gggtcgtacaatcaaatgtacagcgcatatacttccaacatggttcgaacatcgg

SEQ ID NO: 429309 - DNA, 53 bp, Artificial
  Synthetic oligonucleotide
gggtcgtacaggctatataccgttgggtacccgtcctcccacggtggtagatg

SEQ ID NO: 429310 - DNA, 55 bp, Artificial
  Synthetic oligonucleotide
gggtcgtagtgtgtgaagtctaagacggagttgtagtagttatggcgacctaggc

SEQ ID NO: 429311 - DNA, 53 bp, Artificial
  Synthetic oligonucleotide
gggtcgtcagatggtaatggcatgtattctgatggacaccagtattgttttgt

SEQ ID NO: 429312 - DNA, 56 bp, Artificial
  Synthetic oligonucleotide
gggtcgtcgggtccacccattggggagctgacctcgcagtcaccccttatgactac

SEQ ID NO: 429313 - DNA, 55 bp, Artificial
  Synthetic oligonucleotide
gggtcgtctagttgctcctctcctagttagtggtgtgataatagaactaccagtg

SEQ ID NO: 429314 - DNA, 56 bp, Artificial
  Synthetic oligonucleotide
gggtcgtctcggtagtacctgacgacgaatttgtgaatgttatggagggcaaagcc

SEQ ID NO: 429315 - DNA, 51 bp, Artificial
  Synthetic oligonucleotide
gggtcgtgacccaagggtaaaaggtggaccttccctacaacaagtcctgcg

SEQ ID NO: 429316 - DNA, 55 bp, Artificial
  Synthetic oligonucleotide
gggtcgtgatgcgaaacatcttgatatttatatgacccctaagtacgcgtggtcg

SEQ ID NO: 429317 - DNA, 55 bp, Artificial
  Synthetic oligonucleotide
gggtcgtggtctagccaccggaaaatgactagctctgtcgaactagctcagacga

SEQ ID NO: 429318 - DNA, 57 bp, Artificial
  Synthetic oligonucleotide
gggtcgttaggtggaattcacgcatatgatttgctcatacgaagcactttcgatcat

SEQ ID NO: 429319 - DNA, 52 bp, Artificial
  Synthetic oligonucleotide
gggtcgttcagaacgtgcctaaggtcctcggtcttctcacttttataccggt

SEQ ID NO: 429320 - DNA, 55 bp, Artificial
  Synthetic oligonucleotide
gggtctaaattgtcttgatttgtggtcgatgactaagagcccttggcgctgaggg

SEQ ID NO: 429321 - DNA, 53 bp, Artificial
  Synthetic oligonucleotide
gggtctaacccgcctccacctgatatatctgagggcgtttcgaattctgcaca

SEQ ID NO: 429322 - DNA, 59 bp, Artificial
  Synthetic oligonucleotide
gggtctaatactggtgtgcttaatctatatagtccttgatatgggtattcggttgagtc

SEQ ID NO: 429323 - DNA, 53 bp, Artificial
  Synthetic oligonucleotide
gggtctaccggtagtcggattccgtgaaggatcccttcgaaactcgtcgcatt

SEQ ID NO: 429324 - DNA, 55 bp, Artificial
  Synthetic oligonucleotide
gggtctacctcactttagccgtacaggcgatattgttctacgttccgcattacat

SEQ ID NO: 429325 - DNA, 60 bp, Artificial
  Synthetic oligonucleotide
gggtctactatctaccatgagaaacgagagttgctgagaagctggcacttaccttcagtg

SEQ ID NO: 429326 - DNA, 55 bp, Artificial
  Synthetic oligonucleotide
gggtctagaccctgggtaaggggtcagtctggtagaataagcatctattggacga

SEQ ID NO: 429327 - DNA, 55 bp, Artificial
  Synthetic oligonucleotide
gggtctagacgtaccagaaattgtccatcggctaaccgagtaacagggtcgccgc

SEQ ID NO: 429328 - DNA, 55 bp, Artificial
  Synthetic oligonucleotide
gggtctagcgtggctgtttgtagtctttgcagccctgcatatggcgtgtcgtcgg

SEQ ID NO: 429329 - DNA, 60 bp, Artificial
  Synthetic oligonucleotide
gggtctaggtcccaaaatggatagtgagctatacatagtcaatgctgactgtgtgatatg

SEQ ID NO: 429330 - DNA, 51 bp, Artificial
  Synthetic oligonucleotide
gggtctatagaatctctactgagatcggtggaggttaaaagcctacgatac

SEQ ID NO: 429331 - DNA, 55 bp, Artificial
  Synthetic oligonucleotide
gggtctatcaaggtgacactgagccacctgattaccatgagatgtactttatgtc

SEQ ID NO: 429332 - DNA, 55 bp, Artificial
  Synthetic oligonucleotide
gggtctatcgaactgccgagagaggcccctttactcgacagcgactaccggccgt

SEQ ID NO: 429333 - DNA, 54 bp, Artificial
  Synthetic oligonucleotide
gggtctatcggccagtagccgagaaccccgcatcaatgttggagtattgcccga

SEQ ID NO: 429334 - DNA, 51 bp, Artificial
  Synthetic oligonucleotide
gggtctatgatggccacaggcaagcttcttgtggcttactcaccaccgggc

SEQ ID NO: 429335 - DNA, 55 bp, Artificial
  Synthetic oligonucleotide
gggtctatggtatccaatgccaagaccagaggaggatgagcctcctaggtggaaa

SEQ ID NO: 429336 - DNA, 60 bp, Artificial
  Synthetic oligonucleotide
gggtctcacacaaccagctagccgggatgcaacttgcacgcccactacaatacccttgct

SEQ ID NO: 429337 - DNA, 55 bp, Artificial
  Synthetic oligonucleotide
gggtctcagcggttgggagtattgagtagtgcattcccaaatctcgctaatcggt

SEQ ID NO: 429338 - DNA, 53 bp, Artificial
  Synthetic oligonucleotide
gggtctcagcttccctgtgaccctgaacccgacacagacgtattgacgtccat

SEQ ID NO: 429339 - DNA, 51 bp, Artificial
  Synthetic oligonucleotide
gggtctcaggtcccagcgctgggttacgtagggaacgtcattgcgaccgct

SEQ ID NO: 429340 - DNA, 60 bp, Artificial
  Synthetic oligonucleotide
gggtctcatgcccacaatcccaatgcccttattgtttcacccactgtgagcccacagaag

SEQ ID NO: 429341 - DNA, 60 bp, Artificial
  Synthetic oligonucleotide
gggtctccaacattttggatgggaagccatgaggtgaatgggacatggatgatccacacc

SEQ ID NO: 429342 - DNA, 55 bp, Artificial
  Synthetic oligonucleotide
gggtctcctatgatttcaggaccttgccctaaggcagggcagccatccttggtag

SEQ ID NO: 429343 - DNA, 60 bp, Artificial
  Synthetic oligonucleotide
gggtctcgaacgctcgaagaggtgctcgagatgcatcgggtgagaataactagaacagag

SEQ ID NO: 429344 - DNA, 57 bp, Artificial
  Synthetic oligonucleotide
gggtctcgacgtgtctgtcataccggctagcggtaacgtcgttgttgtggcgacgga

SEQ ID NO: 429345 - DNA, 54 bp, Artificial
  Synthetic oligonucleotide
gggtctcgcttcgtcgtctggacgaaacgactcttcttacttctgaaaacgtgt

SEQ ID NO: 429346 - DNA, 60 bp, Artificial
  Synthetic oligonucleotide
gggtctcggatcaccacgtgatcccgcagtcacactcgtgcgctcgccgggcaatgtgcc

SEQ ID NO: 429347 - DNA, 60 bp, Artificial
  Synthetic oligonucleotide
gggtctcgggctcaatgctgtagcgtactaccggggccttgatgtgtccgtcataccatc

SEQ ID NO: 429348 - DNA, 59 bp, Artificial
  Synthetic oligonucleotide
gggtctctacctatgcactatgtttcataatgtgcgaggatttcaaaataacaaggcct

SEQ ID NO: 429349 - DNA, 58 bp, Artificial
  Synthetic oligonucleotide
gggtctctacgtagtaaacagcctcacgtccactacgatgacgctgaattacgataac

SEQ ID NO: 429350 - DNA, 54 bp, Artificial
  Synthetic oligonucleotide
gggtctctattaggtcctcaataattacattccaaaaatacccttatccctgtg

SEQ ID NO: 429351 - DNA, 51 bp, Artificial
  Synthetic oligonucleotide
gggtctctcatctttgactgggtcaattggagacacccctgagcaagtctc

SEQ ID NO: 429352 - DNA, 55 bp, Artificial
  Synthetic oligonucleotide
gggtctctttggtcagaacatgctataccactacttaggtagggcggggtacact

SEQ ID NO: 429353 - DNA, 55 bp, Artificial
  Synthetic oligonucleotide
gggtctctttggtgcaggataggacacgatcgatgctcggaggacgatcacgacg

SEQ ID NO: 429354 - DNA, 50 bp, Artificial
  Synthetic oligonucleotide
gggtctgaagcacgcactcttccgttgaaggacggggtgggaaagcggat

SEQ ID NO: 429355 - DNA, 54 bp, Artificial
  Synthetic oligonucleotide
gggtctgacggtaagctgtacccacggctgaagtatgacctaccgttaaccggc

SEQ ID NO: 429356 - DNA, 54 bp, Artificial
  Synthetic oligonucleotide
gggtctgacgtccctccgtccaacacagcttggcccccctgtaagaaggacttg

SEQ ID NO: 429357 - DNA, 55 bp, Artificial
  Synthetic oligonucleotide
gggtctgactggcccacgccgcatcaaggatctgtacctcctggtgcgtaccatc

SEQ ID NO: 429358 - DNA, 52 bp, Artificial
  Synthetic oligonucleotide
gggtctgccccactataccaaaccctacagggaaacttgtggttgccctggt

SEQ ID NO: 429359 - DNA, 58 bp, Artificial
  Synthetic oligonucleotide
gggtctgctaacaccactcttaaacttttaatagcatacacaccaccaggtattagca

SEQ ID NO: 429360 - DNA, 55 bp, Artificial
  Synthetic oligonucleotide
gggtctgctcatgtgactgatgacgcggaagtacagaggatttgggaccgtccag

SEQ ID NO: 429361 - DNA, 57 bp, Artificial
  Synthetic oligonucleotide
gggtctgctctaagcctcccgctgtgaagcgttaaatcaggttggtgtcctaaacac

SEQ ID NO: 429362 - DNA, 55 bp, Artificial
  Synthetic oligonucleotide
gggtctgctggaataatcagctatttgttactgcagttgatagtaccagaggtac

SEQ ID NO: 429363 - DNA, 52 bp, Artificial
  Synthetic oligonucleotide
gggtctgctgtccgggtagaccagaaatgtaaaggatctgtttgtactgaac

SEQ ID NO: 429364 - DNA, 55 bp, Artificial
  Synthetic oligonucleotide
gggtctgggcagggtggcaagtcacccggaaatcacagcttcaacggctcgacgt

SEQ ID NO: 429365 - DNA, 55 bp, Artificial
  Synthetic oligonucleotide
gggtctggggagccggtgttcggtgcgtcgtacaccaatatctggcactctacgc

SEQ ID NO: 429366 - DNA, 60 bp, Artificial
  Synthetic oligonucleotide
gggtctgggtgtgatttctatactggatattccgatgattgagaagatgccagatgaaat

SEQ ID NO: 429367 - DNA, 55 bp, Artificial
  Synthetic oligonucleotide
gggtctgtcacgaaacaaaataacaatgtctacgacgggactaattcaacaggtg

SEQ ID NO: 429368 - DNA, 55 bp, Artificial
  Synthetic oligonucleotide
gggtcttaaaggtatgtcagactctactacacctgataatcgagagacggcaggc

SEQ ID NO: 429369 - DNA, 55 bp, Artificial
  Synthetic oligonucleotide
gggtcttaacgaggagtggacgtccgaagagaacttcctctaagtctcttaagca

SEQ ID NO: 429370 - DNA, 55 bp, Artificial
  Synthetic oligonucleotide
gggtcttaaggggaggctacggtccctcttgcgcatatggaggaaaagcgcacgg

SEQ ID NO: 429371 - DNA, 55 bp, Artificial
  Synthetic oligonucleotide
gggtcttatatcacaaggggcggaggaacagctgcatcaatgctaaatggggtgg

SEQ ID NO: 429372 - DNA, 55 bp, Artificial
  Synthetic oligonucleotide
gggtcttatttatacttggacactaaatggcattaatgtaattacattaatttac

SEQ ID NO: 429373 - DNA, 57 bp, Artificial
  Synthetic oligonucleotide
gggtcttgagacatagagaggtccgccaaggtggtaaggcaggcggagacgtgggat

SEQ ID NO: 429374 - DNA, 55 bp, Artificial
  Synthetic oligonucleotide
gggtcttgccctaacattaccaatggaaacggattcttcgcaacaatggcttggg

SEQ ID NO: 429375 - DNA, 59 bp, Artificial
  Synthetic oligonucleotide
gggtcttgctgcatacactctgagcccacgcccgatcattcatgccgtggcccctgatt

SEQ ID NO: 429376 - DNA, 55 bp, Artificial
  Synthetic oligonucleotide
gggtcttggccagaatagtggcacgttgaataatgcacataggggaatcgctcca

SEQ ID NO: 429377 - DNA, 57 bp, Artificial
  Synthetic oligonucleotide
gggtcttgtacctttttctgtgccttctgtacatcctgttattcctggcactgtgtt

SEQ ID NO: 429378 - DNA, 56 bp, Artificial
  Synthetic oligonucleotide
gggtcttgtagcggctgcaccgcatttggacagagtcacaggttataatcagatag

SEQ ID NO: 429379 - DNA, 55 bp, Artificial
  Synthetic oligonucleotide
gggtctttataggttctttaagggtggtgacgcatctattaagggtatgagacgc

SEQ ID NO: 429380 - DNA, 55 bp, Artificial
  Synthetic oligonucleotide
gggtctttgcattttacgttgtgaagagcagcagcaacgaatttggttaaaaggg

SEQ ID NO: 429381 - DNA, 60 bp, Artificial
  Synthetic oligonucleotide
gggtctttggatgtgttcaaatggttcgatgcaatgcaggatatgtatataattgagaaa

SEQ ID NO: 429382 - DNA, 58 bp, Artificial
  Synthetic oligonucleotide
gggtcttttccgctctaaatccaagtcttgcacatgtcgtgcacatatgccttctgaa

SEQ ID NO: 429383 - DNA, 53 bp, Artificial
  Synthetic oligonucleotide
gggtgaaaatcaaaagtcgaagctacataacctatggaggggtaagggagcga

SEQ ID NO: 429384 - DNA, 60 bp, Artificial
  Synthetic oligonucleotide
gggtgaaacaaaacgcttgacactgagtaacaacgctgtagaatacgccacatcagctac

SEQ ID NO: 429385 - DNA, 51 bp, Artificial
  Synthetic oligonucleotide
gggtgaaacgcgaaagtggaaggttccttacctatggaggggtaagggagc

SEQ ID NO: 429386 - DNA, 53 bp, Artificial
  Synthetic oligonucleotide
gggtgaaacgcgaaagtgtcggctacataacctatggaggggtaagggagcga

SEQ ID NO: 429387 - DNA, 54 bp, Artificial
  Synthetic oligonucleotide
gggtgaaaggtataggaaggtaggtaatttgatccccaatatccccgattgagc

SEQ ID NO: 429388 - DNA, 55 bp, Artificial
  Synthetic oligonucleotide
gggtgaaagtgagtttgaggagttgttgaaagcattgtcaagtctaagtttgtca

SEQ ID NO: 429389 - DNA, 58 bp, Artificial
  Synthetic oligonucleotide
gggtgaaatctaacaaggaaactggtagactgaacatcaatggaccgacacgcactaa

SEQ ID NO: 429390 - DNA, 60 bp, Artificial
  Synthetic oligonucleotide
gggtgaaatctaatgtaaattatggtgccattttagaatatgatacatatttagcgccat

SEQ ID NO: 429391 - DNA, 55 bp, Artificial
  Synthetic oligonucleotide
gggtgaagaaagtggagaagctaggacaaccgagaatcaaagctggccagaccat

SEQ ID NO: 429392 - DNA, 51 bp, Artificial
  Synthetic oligonucleotide
gggtgaagaatgttagtaccgatttcgagaaacagttaaggccgggtcccg

SEQ ID NO: 429393 - DNA, 59 bp, Artificial
  Synthetic oligonucleotide
gggtgaaggaaccagcagtcctcactaaaaatgatcccagactcaagacagactttgag

SEQ ID NO: 429394 - DNA, 55 bp, Artificial
  Synthetic oligonucleotide
gggtgaaggcttgcaactctacggggcgttcgtaactgctttcaacgaccgagcg

SEQ ID NO: 429395 - DNA, 55 bp, Artificial
  Synthetic oligonucleotide
gggtgaaggtaacaactttcatcgtgcgaaaagcattgcaaatgctgcagtacgc

SEQ ID NO: 429396 - DNA, 59 bp, Artificial
  Synthetic oligonucleotide
gggtgaaggtgtctccttttggtggtgagcatgacatctccaaatgtgggaggaaagga

SEQ ID NO: 429397 - DNA, 55 bp, Artificial
  Synthetic oligonucleotide
gggtgaatcagacatacatcaacataagtaataccaatttaattgcaggacaggc

SEQ ID NO: 429398 - DNA, 57 bp, Artificial
  Synthetic oligonucleotide
gggtgaattggccacgaatttctcgtttgaaaggtcaattgttgtgttctcccatgc

SEQ ID NO: 429399 - DNA, 57 bp, Artificial
  Synthetic oligonucleotide
gggtgacaatatcttctccgcgcttgacgcgaccgagactgagttttttgccggttg

SEQ ID NO: 429400 - DNA, 60 bp, Artificial
  Synthetic oligonucleotide
gggtgacagactcaatgctatcgaaccaagaattgatgacttggatacactcacgtctaa

SEQ ID NO: 429401 - DNA, 53 bp, Artificial
  Synthetic oligonucleotide
gggtgacagtatattatggagtgcccgtatggcacaatgccactgttggctta

SEQ ID NO: 429402 - DNA, 60 bp, Artificial
  Synthetic oligonucleotide
gggtgacagtgggatcgttctgttagcacgcagactctctgggtggcacagcggtagttg

SEQ ID NO: 429403 - DNA, 58 bp, Artificial
  Synthetic oligonucleotide
gggtgaccgcacttgttctgccgactctaagtgggcattcaagaacgtggtcattact

SEQ ID NO: 429404 - DNA, 57 bp, Artificial
  Synthetic oligonucleotide
gggtgaccgcgcaacaccggaatattggctaaacgtcgctctagctagaggtacgat

SEQ ID NO: 429405 - DNA, 60 bp, Artificial
  Synthetic oligonucleotide
gggtgacctgtccggagccgtgctgcccggatgatgtcttggcctctgtttgctctagct

SEQ ID NO: 429406 - DNA, 55 bp, Artificial
  Synthetic oligonucleotide
gggtgacgaatcacccctgatattaaacgattgtgttatatagacctaatcaaac

SEQ ID NO: 429407 - DNA, 55 bp, Artificial
  Synthetic oligonucleotide
gggtgacgatatggatcctgagcttagaggtcttgcccaggcactgattgatcag

SEQ ID NO: 429408 - DNA, 60 bp, Artificial
  Synthetic oligonucleotide
gggtgactacggcgaagtaacaattgactgtgagccacgatctggaattgacactggtgc

SEQ ID NO: 429409 - DNA, 55 bp, Artificial
  Synthetic oligonucleotide
gggtgactcccctaggtcacccttgattggtgcctaccacataggccacttccaa

SEQ ID NO: 429410 - DNA, 52 bp, Artificial
  Synthetic oligonucleotide
gggtgactcttacaagtccgttatttcttgaacgggtgtccttaaatagagt

SEQ ID NO: 429411 - DNA, 57 bp, Artificial
  Synthetic oligonucleotide
gggtgactgtgccagttggtcaaactgtccactaccccttgcaaagcaccgtcaaac

SEQ ID NO: 429412 - DNA, 56 bp, Artificial
  Synthetic oligonucleotide
gggtgactgttagcattgaccgtttcttaagggtccgagatcagcgggggaacata

SEQ ID NO: 429413 - DNA, 55 bp, Artificial
  Synthetic oligonucleotide
gggtgactttccctggtgttcttgaagatctagcttattcaagatcttacctggt

SEQ ID NO: 429414 - DNA, 55 bp, Artificial
  Synthetic oligonucleotide
gggtgagaaacctgttgatccgactgggctggagccagacgaccaccttaaggaa

SEQ ID NO: 429415 - DNA, 60 bp, Artificial
  Synthetic oligonucleotide
gggtgagaacaaggacgtcatagtcacaagggagccctatgttagctgcgataatgacaa

SEQ ID NO: 429416 - DNA, 55 bp, Artificial
  Synthetic oligonucleotide
gggtgagaagcgtgatgaaacaatacgcgcaagggaaacatcaataatgctagtg

SEQ ID NO: 429417 - DNA, 57 bp, Artificial
  Synthetic oligonucleotide
gggtgagaattcagttttgcatggtaatcgtgcaaagaaactaaaaataatggacac

SEQ ID NO: 429418 - DNA, 55 bp, Artificial
  Synthetic oligonucleotide
gggtgagacccaatagagaggacccgatagctctcgtttcaacttggtgaaatga

SEQ ID NO: 429419 - DNA, 55 bp, Artificial
  Synthetic oligonucleotide
gggtgagcaagtttacttgccgtatccagacccttctagaattttgggagctggt

SEQ ID NO: 429420 - DNA, 59 bp, Artificial
  Synthetic oligonucleotide
gggtgagcaccgtaacatcgtgtcgattgtgccctttgcaacttgccgttcaaacctgc

SEQ ID NO: 429421 - DNA, 60 bp, Artificial
  Synthetic oligonucleotide
gggtgagctgcacctagagtttcagagagagatactccttgcgctgggctttccagcgcc

SEQ ID NO: 429422 - DNA, 55 bp, Artificial
  Synthetic oligonucleotide
gggtgaggaaacacctctgttaaccaagtttgtatctgcagcattgcataatgtc

SEQ ID NO: 429423 - DNA, 51 bp, Artificial
  Synthetic oligonucleotide
gggtgaggaattgtggggccgctgcttcacggacttccacagaatcgcata

SEQ ID NO: 429424 - DNA, 55 bp, Artificial
  Synthetic oligonucleotide
gggtgaggctccttccccatataactcaagatttgagtctgttgcttggtcggca

SEQ ID NO: 429425 - DNA, 60 bp, Artificial
  Synthetic oligonucleotide
gggtgaggtgttgccgcaggaggcgctagcggctgataactacagcgagtgggccagggt

SEQ ID NO: 429426 - DNA, 54 bp, Artificial
  Synthetic oligonucleotide
gggtgagtaatgatgtctgaccacacctgtctcatgtttagagaagtccagtta

SEQ ID NO: 429427 - DNA, 55 bp, Artificial
  Synthetic oligonucleotide
gggtgagtgttatgcatatgtgagaggctgcctgagaggacggtgctacgagtgt

SEQ ID NO: 429428 - DNA, 55 bp, Artificial
  Synthetic oligonucleotide
gggtgagttccctttctaccatactcacgacactctttggtgcccttttagcagg

SEQ ID NO: 429429 - DNA, 60 bp, Artificial
  Synthetic oligonucleotide
gggtgagttgagagaggaatttaacgcactctcgcaagaaatagcgttatcgcaactgat

SEQ ID NO: 429430 - DNA, 59 bp, Artificial
  Synthetic oligonucleotide
gggtgagttgatgaatctggccacctgggtgggaagtaatttggaagacccagcatcca

SEQ ID NO: 429431 - DNA, 55 bp, Artificial
  Synthetic oligonucleotide
gggtgatccattgcaagccaactacttcaatgagcgtgattgcaacttgctcgga

SEQ ID NO: 429432 - DNA, 51 bp, Artificial
  Synthetic oligonucleotide
gggtgatcgtggcacggcacggacactttcgggtcattccccacgagagat

SEQ ID NO: 429433 - DNA, 58 bp, Artificial
  Synthetic oligonucleotide
gggtgatgaatggcaggaaggagtttatctattggctagggtgttactgcgttgggaa

SEQ ID NO: 429434 - DNA, 53 bp, Artificial
  Synthetic oligonucleotide
gggtgatgactggatattacggtgttactgttaaccgttccgttttatcttta

SEQ ID NO: 429435 - DNA, 56 bp, Artificial
  Synthetic oligonucleotide
gggtgatgatataggacatattgtgatgcaatacatgtatgtaccacctggagccc

SEQ ID NO: 429436 - DNA, 55 bp, Artificial
  Synthetic oligonucleotide
gggtgatggatttctttaggcatgttgcggaacatgtgcgcggagtcgcttcgat

SEQ ID NO: 429437 - DNA, 56 bp, Artificial
  Synthetic oligonucleotide
gggtgatggtgtcccccctagctgtaacttggtggaacagaaatgggccgacgaca

SEQ ID NO: 429438 - DNA, 60 bp, Artificial
  Synthetic oligonucleotide
gggtgatgtctcctcccgcgagtctcgatggtacgaggcgattcgaggaagccacgatgc

SEQ ID NO: 429439 - DNA, 55 bp, Artificial
  Synthetic oligonucleotide
gggtgattaagtcttttcgccagaagagtcacgaagcgccgaatcccgttgtccg

SEQ ID NO: 429440 - DNA, 52 bp, Artificial
  Synthetic oligonucleotide
gggtgattactcaactgtcctggataaatcacgttaactttatgagcaccat

SEQ ID NO: 429441 - DNA, 55 bp, Artificial
  Synthetic oligonucleotide
gggtgattaggtgtcgcaagcaagactgtaccgttatccgtaacgagctcggtca

SEQ ID NO: 429442 - DNA, 60 bp, Artificial
  Synthetic oligonucleotide
gggtgattcaaatgattgctgtactgttgtagtacccactgtagaactcagaaatgactg

SEQ ID NO: 429443 - DNA, 55 bp, Artificial
  Synthetic oligonucleotide
gggtgattcagaagtgtcatacaacgaaggaagcgattaccgtaactgcaattca

SEQ ID NO: 429444 - DNA, 60 bp, Artificial
  Synthetic oligonucleotide
gggtgattccactatggtgcgttgtgatagggcagtgggtaagtccctcagagaataagc

SEQ ID NO: 429445 - DNA, 55 bp, Artificial
  Synthetic oligonucleotide
gggtgatttatacagcagaacgtcatttagttctacaccttacgattgcacaggg

SEQ ID NO: 429446 - DNA, 59 bp, Artificial
  Synthetic oligonucleotide
gggtgcaaaacgagtgctgtgccaaggagactcacaacagattccttttataaatcgtg

SEQ ID NO: 429447 - DNA, 52 bp, Artificial
  Synthetic oligonucleotide
gggtgcaaccgttttcggttgttactcatcacccacatcctgtaaccaattt

SEQ ID NO: 429448 - DNA, 58 bp, Artificial
  Synthetic oligonucleotide
gggtgcaactacctgatcctaataagtttggactgcctgatcctagtttatataatcc

SEQ ID NO: 429449 - DNA, 55 bp, Artificial
  Synthetic oligonucleotide
gggtgcaataagtggtgggataactaccaaggccaggaagttgcgatcatcgaag

SEQ ID NO: 429450 - DNA, 52 bp, Artificial
  Synthetic oligonucleotide
gggtgcacaatctctaattataaaacatcagactccaatgtccctggtcatc

SEQ ID NO: 429451 - DNA, 55 bp, Artificial
  Synthetic oligonucleotide
gggtgcacccacattcccaacaacgaagctgacacgataaccattgataacactg

SEQ ID NO: 429452 - DNA, 55 bp, Artificial
  Synthetic oligonucleotide
gggtgcagatgcaacgattcaagtaaccctcttgttgttgctgcgagtatcattg

SEQ ID NO: 429453 - DNA, 56 bp, Artificial
  Synthetic oligonucleotide
gggtgcagatttccaaattggcatttgccctgacgggtacatgcgcacaggatctc

SEQ ID NO: 429454 - DNA, 60 bp, Artificial
  Synthetic oligonucleotide
gggtgcagcccattcagcctgtttctcatgtggagtccacgcatcgaagcagtgacccac

SEQ ID NO: 429455 - DNA, 55 bp, Artificial
  Synthetic oligonucleotide
gggtgcagcgtaagtttgttggtcgagagcagtatcaatttccaccattgcacgg

SEQ ID NO: 429456 - DNA, 52 bp, Artificial
  Synthetic oligonucleotide
gggtgcagcttgtactctacgccacagctacaccacccggttctcctatgac

SEQ ID NO: 429457 - DNA, 51 bp, Artificial
  Synthetic oligonucleotide
gggtgcaggtaagacctcatttttgtccacgtacgcggaacggttgagtgt

SEQ ID NO: 429458 - DNA, 54 bp, Artificial
  Synthetic oligonucleotide
gggtgcatacagtgggactcctgttccgaaaccacggaaaaaggatctcccaaa

SEQ ID NO: 429459 - DNA, 58 bp, Artificial
  Synthetic oligonucleotide
gggtgcatagaagtggatcgaatggttaggcatagtgaggcttgacattatccagtca

SEQ ID NO: 429460 - DNA, 58 bp, Artificial
  Synthetic oligonucleotide
gggtgcatcgttgtcatttatcaccaatcaaaagaggctcttagtaaacgactcggtc

SEQ ID NO: 429461 - DNA, 55 bp, Artificial
  Synthetic oligonucleotide
gggtgccaacttcaacgacgaaagtgtataaacaagttccacagcaatttgattt

SEQ ID NO: 429462 - DNA, 51 bp, Artificial
  Synthetic oligonucleotide
gggtgccacctgtggcctcacttatcaaccctctgctttcggtgtgagggg

SEQ ID NO: 429463 - DNA, 55 bp, Artificial
  Synthetic oligonucleotide
gggtgccagaagtggaccttggtgtaggaactagatgtgtggttctagctgagga

SEQ ID NO: 429464 - DNA, 60 bp, Artificial
  Synthetic oligonucleotide
gggtgccatcgatcgtatcacagacaccaccgtacgcacgacactacaggaggaggcttg

SEQ ID NO: 429465 - DNA, 60 bp, Artificial
  Synthetic oligonucleotide
gggtgccattgtgacagaactcatccctgtggatgacgacatcaagaaacattttgaagc

SEQ ID NO: 429466 - DNA, 55 bp, Artificial
  Synthetic oligonucleotide
gggtgcccactatgagggcgcaagtactaggcgcgtggataaaagcagcgtccag

SEQ ID NO: 429467 - DNA, 56 bp, Artificial
  Synthetic oligonucleotide
gggtgcccaggctgtttcccgatcccttgattggtccaaggtcaccttggatggcc

SEQ ID NO: 429468 - DNA, 55 bp, Artificial
  Synthetic oligonucleotide
gggtgccccaccattccttattgggatatgctctttgggtgcgatgctatcaaac

SEQ ID NO: 429469 - DNA, 51 bp, Artificial
  Synthetic oligonucleotide
gggtgcccctaagtttgagaccttgactatggcccagatgtataagcagta

SEQ ID NO: 429470 - DNA, 54 bp, Artificial
  Synthetic oligonucleotide
gggtgccctgtatttagtaacctgtactcgtggaggtataactggggacagttc

SEQ ID NO: 429471 - DNA, 55 bp, Artificial
  Synthetic oligonucleotide
gggtgccgatttcctaaagtttccaattgctgagaccgagccagtccgcgatctc

SEQ ID NO: 429472 - DNA, 55 bp, Artificial
  Synthetic oligonucleotide
gggtgcctcatgctatgagcgttaccctctctgctactttactaatctagataag

SEQ ID NO: 429473 - DNA, 56 bp, Artificial
  Synthetic oligonucleotide
gggtgcctcctggctacaagtacctgggaccagggaacagccttgaccaaggagaa

SEQ ID NO: 429474 - DNA, 54 bp, Artificial
  Synthetic oligonucleotide
gggtgcgagagcgtcaatattaagcgggggaaaattagacaaatgggagaaaat

SEQ ID NO: 429475 - DNA, 55 bp, Artificial
  Synthetic oligonucleotide
gggtgcgagcaagttcgagatgccaaagctgacaggcggccagctcataggtgcc

SEQ ID NO: 429476 - DNA, 52 bp, Artificial
  Synthetic oligonucleotide
gggtgcgatgttatagccaggtgccagtgcacaacaggggtgtatttctgcc

SEQ ID NO: 429477 - DNA, 55 bp, Artificial
  Synthetic oligonucleotide
gggtgcgattaaagtgggcctaagcttaattggagagattgacttgcccgagttt

SEQ ID NO: 429478 - DNA, 60 bp, Artificial
  Synthetic oligonucleotide
gggtgcgcacaactccttcaacaagaatgttcgtggtgtcaggggtcaggcagcattcgt

SEQ ID NO: 429479 - DNA, 58 bp, Artificial
  Synthetic oligonucleotide
gggtgcgcattcacttatgacctaactctatctaacttaaccaggttgattgaactgg

SEQ ID NO: 429480 - DNA, 55 bp, Artificial
  Synthetic oligonucleotide
gggtgcgcgatgtagtcactgaacaactaaaggagtggccaacaatgatccaggt

SEQ ID NO: 429481 - DNA, 55 bp, Artificial
  Synthetic oligonucleotide
gggtgcggggtaggtgcgttagccctgccccgtatcctcacagcgtcccctgacc

SEQ ID NO: 429482 - DNA, 51 bp, Artificial
  Synthetic oligonucleotide
gggtgcgtacacaggactccctaatgcaaaaccaaaagttcccacaatcag

SEQ ID NO: 429483 - DNA, 55 bp, Artificial
  Synthetic oligonucleotide
gggtgcgtatcaaccaagccgattgaacaaggacgcattcaaacgagacttcttc

SEQ ID NO: 429484 - DNA, 55 bp, Artificial
  Synthetic oligonucleotide
gggtgcgttaaagtttggatgcaaaatacttggagatcgattggacgtacccctc

SEQ ID NO: 429485 - DNA, 55 bp, Artificial
  Synthetic oligonucleotide
gggtgcgtttattttaacaattgacgatttgaagcttaaatatcgaatacaaatg

SEQ ID NO: 429486 - DNA, 55 bp, Artificial
  Synthetic oligonucleotide
gggtgctacaagtggtggaggaagtattgaaatagtacctgatataagagactta

SEQ ID NO: 429487 - DNA, 53 bp, Artificial
  Synthetic oligonucleotide
gggtgctagtgctattttggaagttgcccctgaaccaacccccccatcccgtg

SEQ ID NO: 429488 - DNA, 55 bp, Artificial
  Synthetic oligonucleotide
gggtgctataataggaaatgagttgaaaacgaacacgcgttttatagatgttcgg

SEQ ID NO: 429489 - DNA, 60 bp, Artificial
  Synthetic oligonucleotide
gggtgctatagaaacagacaaagaggttgggagtctgctgctcggcctatggccctacat

SEQ ID NO: 429490 - DNA, 55 bp, Artificial
  Synthetic oligonucleotide
gggtgctatctggcactcaccagattaccttcaatgtagcactaccagcagggac

SEQ ID NO: 429491 - DNA, 51 bp, Artificial
  Synthetic oligonucleotide
gggtgctcaccaccagcttgggtaacaccatgacctgctttataaaagctg

SEQ ID NO: 429492 - DNA, 55 bp, Artificial
  Synthetic oligonucleotide
gggtgctcatcttgacctgccagacacggttaagttagccttccacatcaaggat

SEQ ID NO: 429493 - DNA, 60 bp, Artificial
  Synthetic oligonucleotide
gggtgctcccttcaagtattccacgagcatctggaatagttcgtattcgcgcgacgtgcc

SEQ ID NO: 429494 - DNA, 55 bp, Artificial
  Synthetic oligonucleotide
gggtgctctgctagacaccgtcagaggacaaaactctctggtgaatgatctagcc

SEQ ID NO: 429495 - DNA, 55 bp, Artificial
  Synthetic oligonucleotide
gggtgctgatcgatcccatcgtgcgagaagagggctggcctagcaacgtcaccac

SEQ ID NO: 429496 - DNA, 55 bp, Artificial
  Synthetic oligonucleotide
gggtgctgttagggcgattcagggtgagacgaagccgaccgacatgtctggggtc

SEQ ID NO: 429497 - DNA, 51 bp, Artificial
  Synthetic oligonucleotide
gggtgcttaagtgcctgaagattgccccaaggaaagttctgaatccactaa

SEQ ID NO: 429498 - DNA, 55 bp, Artificial
  Synthetic oligonucleotide
gggtgctttaatcgtggcagccattcctgagtttatgatgggcagtaacacggcc

SEQ ID NO: 429499 - DNA, 55 bp, Artificial
  Synthetic oligonucleotide
gggtggaaacactgcatatgactatgggaatggttacagaggtgtttatgtgatt

SEQ ID NO: 429500 - DNA, 55 bp, Artificial
  Synthetic oligonucleotide
gggtggaaaccgtacagtgggcgactgagtctcataatgcaacacttacagggat

SEQ ID NO: 429501 - DNA, 55 bp, Artificial
  Synthetic oligonucleotide
gggtggaaagacagtagtgcgagtgacctgtggttagagttccgatacggactga

SEQ ID NO: 429502 - DNA, 54 bp, Artificial
  Synthetic oligonucleotide
gggtggaaaggcctcaaatatctggggaaccttctgtggtattggggccaggaa

SEQ ID NO: 429503 - DNA, 55 bp, Artificial
  Synthetic oligonucleotide
gggtggaacgtgtcctcgctgtgacacaactgacccattttgtcatggcgcaagg

SEQ ID NO: 429504 - DNA, 55 bp, Artificial
  Synthetic oligonucleotide
gggtggaagatgatcccataggggactggtttacgcgcacgtttggtgatctagg

SEQ ID NO: 429505 - DNA, 57 bp, Artificial
  Synthetic oligonucleotide
gggtggaatccttctatgtcgaaaatcctggcatcggtcgtcctcactggtttatcc

SEQ ID NO: 429506 - DNA, 55 bp, Artificial
  Synthetic oligonucleotide
gggtggaatttatcgccatgacactaacgaagggcctagttattgtacgctcccc

SEQ ID NO: 429507 - DNA, 55 bp, Artificial
  Synthetic oligonucleotide
gggtggacaaactaacccaaggtcgccagacttatgattggacattaaacagaaa

SEQ ID NO: 429508 - DNA, 55 bp, Artificial
  Synthetic oligonucleotide
gggtggacaccctgacgccttaagttgtgctcttatggcatactatgctgacgaa

SEQ ID NO: 429509 - DNA, 55 bp, Artificial
  Synthetic oligonucleotide
gggtggacattggcacacatggaatacccagtcaaggttagactacttgacgtcg

SEQ ID NO: 429510 - DNA, 55 bp, Artificial
  Synthetic oligonucleotide
gggtggacccggggagtggcttgccctctcgtttcacataaaagcagacgccctg

SEQ ID NO: 429511 - DNA, 54 bp, Artificial
  Synthetic oligonucleotide
gggtggagacttttaaactatataagtaagtggggtgtcgaatggctgagttta

SEQ ID NO: 429512 - DNA, 59 bp, Artificial
  Synthetic oligonucleotide
gggtggagagcctcttgaacttcaaggcctagttgctagctctactactacctatccta

SEQ ID NO: 429513 - DNA, 60 bp, Artificial
  Synthetic oligonucleotide
gggtggagccctcaggctcaaggcatgctaaaaacattgccagtagatccacctcctgcc

SEQ ID NO: 429514 - DNA, 50 bp, Artificial
  Synthetic oligonucleotide
gggtggagctttacccgtcttaagaccaaagaaaccccttccctgggctc

SEQ ID NO: 429515 - DNA, 58 bp, Artificial
  Synthetic oligonucleotide
gggtggaggacactacaacgaggatcaatgggatacacaagttgtggaagccggagta

SEQ ID NO: 429516 - DNA, 55 bp, Artificial
  Synthetic oligonucleotide
gggtggatacacacaagaatgaaggagttcgacgacagcggggactggagggaca

SEQ ID NO: 429517 - DNA, 55 bp, Artificial
  Synthetic oligonucleotide
gggtggataggtcaagggacacatctaggcatcagaaatccgagtcaatctgcac

SEQ ID NO: 429518 - DNA, 59 bp, Artificial
  Synthetic oligonucleotide
gggtggatcaactcccctaatcatgccaaatcagttacacaaacattagtgtcaaacaa

SEQ ID NO: 429519 - DNA, 54 bp, Artificial
  Synthetic oligonucleotide
gggtggatccctttctgtgagttgctccgcctaaccgaccggtacccgcataaa

SEQ ID NO: 429520 - DNA, 55 bp, Artificial
  Synthetic oligonucleotide
gggtggatcgagaaagaaggattgtcgcagattataaaggaggaagtccggttag

SEQ ID NO: 429521 - DNA, 54 bp, Artificial
  Synthetic oligonucleotide
gggtggatgaatattccagtacggagagggtagtggtaagcattgaccgttttt

SEQ ID NO: 429522 - DNA, 55 bp, Artificial
  Synthetic oligonucleotide
gggtggattcggacttaaacaccctcctccacagattctcatcaagaacaccccg

SEQ ID NO: 429523 - DNA, 58 bp, Artificial
  Synthetic oligonucleotide
gggtggattcgtaccaggccgcaggatgaggcgtcgaccttcgctttgatcccaacca

SEQ ID NO: 429524 - DNA, 55 bp, Artificial
  Synthetic oligonucleotide
gggtggcaaatggtcaaaacgtagtaagaatgattgggctaatgtaagggaaaga

SEQ ID NO: 429525 - DNA, 60 bp, Artificial
  Synthetic oligonucleotide
gggtggcaagagtacctggatgttgtatccgatccagagtctataaatcatagaccccta

SEQ ID NO: 429526 - DNA, 58 bp, Artificial
  Synthetic oligonucleotide
gggtggcaaggaatggtagacggttggtatggataccaccatagcaacgagcagggaa

SEQ ID NO: 429527 - DNA, 50 bp, Artificial
  Synthetic oligonucleotide
gggtggcacgtgtcagccgacgaggtccaattccacgtccccgaagggca

SEQ ID NO: 429528 - DNA, 54 bp, Artificial
  Synthetic oligonucleotide
gggtggcagaagaactagcggagtacattacctcagagaaaatgcgttttgatg

SEQ ID NO: 429529 - DNA, 55 bp, Artificial
  Synthetic oligonucleotide
gggtggcagcatgttgcaacttgcccgaagtagagacattggtcgctagacaaga

SEQ ID NO: 429530 - DNA, 56 bp, Artificial
  Synthetic oligonucleotide
gggtggcataaatttacatggaaaacacaagatacaacagttccatttaatagagt

SEQ ID NO: 429531 - DNA, 55 bp, Artificial
  Synthetic oligonucleotide
gggtggccaaagttcatggaccaaattctgaactctacaggtggacgtaactact

SEQ ID NO: 429532 - DNA, 52 bp, Artificial
  Synthetic oligonucleotide
gggtggcctatcaagcactgctccaaaagtcaaagttcccctgactgtctca

SEQ ID NO: 429533 - DNA, 53 bp, Artificial
  Synthetic oligonucleotide
gggtggccttaaataggggaatgttctgattagtgcgggaactggacttgggg

SEQ ID NO: 429534 - DNA, 60 bp, Artificial
  Synthetic oligonucleotide
gggtggcgaggttgcttgctgtcttcaaggaagcttatggggtgtcatacaaagagctta

SEQ ID NO: 429535 - DNA, 55 bp, Artificial
  Synthetic oligonucleotide
gggtggcggcggggttaccagtggaggtgggaccaatactagctcaacacaagcc

SEQ ID NO: 429536 - DNA, 55 bp, Artificial
  Synthetic oligonucleotide
gggtggcgggaactgcttccaatctgttgatcacatttcttgacgagcaccaaag

SEQ ID NO: 429537 - DNA, 55 bp, Artificial
  Synthetic oligonucleotide
gggtggctgaagactctgaaccggaccatgaaaatttactcatcactgtatcaac

SEQ ID NO: 429538 - DNA, 59 bp, Artificial
  Synthetic oligonucleotide
gggtggctgcccttctgtgaaatgttgagattaatggacaggtatccacataaagttcc

SEQ ID NO: 429539 - DNA, 56 bp, Artificial
  Synthetic oligonucleotide
gggtggcttaacacattggtcggtgctagggcgattaccttgcgccaagttgaacc

SEQ ID NO: 429540 - DNA, 51 bp, Artificial
  Synthetic oligonucleotide
gggtggcttgttcgtcaatcccaatcccctatcactgttcccgtcctctac

SEQ ID NO: 429541 - DNA, 55 bp, Artificial
  Synthetic oligonucleotide
gggtgggaaccgagctccttgttagtgtctaatagcagagaggtcgcctcgcgtc

SEQ ID NO: 429542 - DNA, 50 bp, Artificial
  Synthetic oligonucleotide
gggtgggaagtaatttggaagaccctgcctccagggatttagtagtcaga

SEQ ID NO: 429543 - DNA, 57 bp, Artificial
  Synthetic oligonucleotide
gggtgggactttcttggaattcacacgcgcgacttcagtacaagtggctaacacgat

SEQ ID NO: 429544 - DNA, 60 bp, Artificial
  Synthetic oligonucleotide
gggtgggagttgaagctctcataaggatactgcaacaactactgtttgtccatttcagag

SEQ ID NO: 429545 - DNA, 55 bp, Artificial
  Synthetic oligonucleotide
gggtgggatagactgttaacatcgttgcctgaagattggatttattgtgatgcgg

SEQ ID NO: 429546 - DNA, 55 bp, Artificial
  Synthetic oligonucleotide
gggtgggatgaagatgagattgacaagcgtctcgtcttctttgcaaatggggatg

SEQ ID NO: 429547 - DNA, 53 bp, Artificial
  Synthetic oligonucleotide
gggtgggccttggacctccgggagccatgggatccgtggagtacccggggcca

SEQ ID NO: 429548 - DNA, 55 bp, Artificial
  Synthetic oligonucleotide
gggtgggcgtggggtttagccttcatctgtcttgcttggcatgtccgaggtcgac

SEQ ID NO: 429549 - DNA, 55 bp, Artificial
  Synthetic oligonucleotide
gggtgggcgttccaatacagttgtgaatgttggtcctacacgtcctccagtggtt

SEQ ID NO: 429550 - DNA, 55 bp, Artificial
  Synthetic oligonucleotide
gggtgggctatatacagtaaagacaatagtgtaagaattggttccaagggagatg

SEQ ID NO: 429551 - DNA, 52 bp, Artificial
  Synthetic oligonucleotide
gggtgggctgggcataggtactggcagagggagtggggggtcttctgggtat

SEQ ID NO: 429552 - DNA, 55 bp, Artificial
  Synthetic oligonucleotide
gggtggggacgaaactgtccattggaacaagaagtggtgtcagaataggcggaca

SEQ ID NO: 429553 - DNA, 59 bp, Artificial
  Synthetic oligonucleotide
gggtggggagccttggaatacgagactaatgtcaccaacgatgaggacatgaggccgta

SEQ ID NO: 429554 - DNA, 57 bp, Artificial
  Synthetic oligonucleotide
gggtgggtacaggctgtacagcatgtggactttaccttgaccagctaaaacctgttg

SEQ ID NO: 429555 - DNA, 53 bp, Artificial
  Synthetic oligonucleotide
gggtgggtacgcgggcgggagtcggcaccagaagcggtgtagtccttagggaa

SEQ ID NO: 429556 - DNA, 60 bp, Artificial
  Synthetic oligonucleotide
gggtgggtgagcagcgggatagtctgagtggcattgccaaccgcagtgcccaacagtttt

SEQ ID NO: 429557 - DNA, 56 bp, Artificial
  Synthetic oligonucleotide
gggtgggtttgcatcttcctcgtggtccttactactgcaactgctgggttaacacg

SEQ ID NO: 429558 - DNA, 52 bp, Artificial
  Synthetic oligonucleotide
gggtggtaaacccatggatttggctattcttaagtgtaaactacctttcagg

SEQ ID NO: 429559 - DNA, 55 bp, Artificial
  Synthetic oligonucleotide
gggtggtacatcatctgccagtagtacaaacgaacatgctactgttaacggtagg

SEQ ID NO: 429560 - DNA, 55 bp, Artificial
  Synthetic oligonucleotide
gggtggtacgggtatcatcatcagaatgagcagggatcaggatatgctgctgatc

SEQ ID NO: 429561 - DNA, 60 bp, Artificial
  Synthetic oligonucleotide
gggtggtagggactccatcatcttacttacctgcttgctacatccacagctggggtttga

SEQ ID NO: 429562 - DNA, 55 bp, Artificial
  Synthetic oligonucleotide
gggtggtagtaatcagaagccaatgtctactaggatagctgaggcgacatctgct

SEQ ID NO: 429563 - DNA, 60 bp, Artificial
  Synthetic oligonucleotide
gggtggtcaggtaatattatgtcctacatctgtgtttagcagcgacgaagtatcctctgc

SEQ ID NO: 429564 - DNA, 58 bp, Artificial
  Synthetic oligonucleotide
gggtggtgcattttccagcgcattgattaaacacaggataccgaattcaaaagacgaa

SEQ ID NO: 429565 - DNA, 55 bp, Artificial
  Synthetic oligonucleotide
gggtggtgcgagggcggtacttgggagtggcttcccctcagagctgcataaaagc

SEQ ID NO: 429566 - DNA, 54 bp, Artificial
  Synthetic oligonucleotide
gggtggtgctcgtgctagccccgttacctgtatcaacgcctaagaccgtaggct

SEQ ID NO: 429567 - DNA, 55 bp, Artificial
  Synthetic oligonucleotide
gggtggtgctttaagttagtccctctcacagaagaggaagtagagcaggccaata

SEQ ID NO: 429568 - DNA, 55 bp, Artificial
  Synthetic oligonucleotide
gggtggtgggggtgtgcttccaaaacgcgtccgagttatctcgaagcgtagggca

SEQ ID NO: 429569 - DNA, 55 bp, Artificial
  Synthetic oligonucleotide
gggtggtggtagaaacggctcgtgccgctgtgaaggagttctctgagaagtacga

SEQ ID NO: 429570 - DNA, 60 bp, Artificial
  Synthetic oligonucleotide
gggtggtggtggaaactgccagatgcgctatcgcaaatgggattatttgggcagaacatg

SEQ ID NO: 429571 - DNA, 60 bp, Artificial
  Synthetic oligonucleotide
gggtggtgtattgaatgttgtcaactcactgaattgactttttgtcacggatgttcatta

SEQ ID NO: 429572 - DNA, 59 bp, Artificial
  Synthetic oligonucleotide
gggtggtgtgcctgtgtattggcaagagggcgggatgcctgagaaggtaaatgctcggg

SEQ ID NO: 429573 - DNA, 55 bp, Artificial
  Synthetic oligonucleotide
gggtggtgtttcaagctagtaccagttgagccagaaagggtagaagaggccactg

SEQ ID NO: 429574 - DNA, 58 bp, Artificial
  Synthetic oligonucleotide
gggtggttctggactgagttcagctcctttaaaatgtcaaaactgactaatgttgtga

SEQ ID NO: 429575 - DNA, 60 bp, Artificial
  Synthetic oligonucleotide
gggtggtttcataaagaggtgctcgacgttagctttgacgttatgatgactcacgatgaa

SEQ ID NO: 429576 - DNA, 55 bp, Artificial
  Synthetic oligonucleotide
gggtggtttgctcgatcttgatcaagcgtgattcaggtgagctgctaccattggc

SEQ ID NO: 429577 - DNA, 60 bp, Artificial
  Synthetic oligonucleotide
gggtgtaacacacgaggctaaatcaatgatggcaggattgattgatttcacaccaatctc

SEQ ID NO: 429578 - DNA, 56 bp, Artificial
  Synthetic oligonucleotide
gggtgtaatatcttttagtgaaaccaatgcaataggatcttgccttctaggtaaac

SEQ ID NO: 429579 - DNA, 55 bp, Artificial
  Synthetic oligonucleotide
gggtgtacagaatgtacaggagctctgatgtacctaaggggtgtgaaggcccgtg

SEQ ID NO: 429580 - DNA, 57 bp, Artificial
  Synthetic oligonucleotide
gggtgtacagcaacgaaagtgagtggggccagacttcgccataaggcctttatcttc

SEQ ID NO: 429581 - DNA, 58 bp, Artificial
  Synthetic oligonucleotide
gggtgtacaggatcaccatggcagtatcttaaaggtaaattatgcaattggttaggag

SEQ ID NO: 429582 - DNA, 55 bp, Artificial
  Synthetic oligonucleotide
gggtgtaccagcactactcggaggagagaatactcagcactggtgagcaagtgga

SEQ ID NO: 429583 - DNA, 56 bp, Artificial
  Synthetic oligonucleotide
gggtgtacccctgggagggtaggtaccactacgctacgctacgcagcagccttagc

SEQ ID NO: 429584 - DNA, 57 bp, Artificial
  Synthetic oligonucleotide
gggtgtaccttgataagctccgttcggttgggaaagcgtacaagatagtatcactca

SEQ ID NO: 429585 - DNA, 55 bp, Artificial
  Synthetic oligonucleotide
gggtgtactgcgatgccgatggttcacaattcgatagttcactcaccccatacct

SEQ ID NO: 429586 - DNA, 55 bp, Artificial
  Synthetic oligonucleotide
gggtgtacttgctacaaatggctttcagttagcgacacgtttggatagatatccg

SEQ ID NO: 429587 - DNA, 55 bp, Artificial
  Synthetic oligonucleotide
gggtgtagataaaccccgaagatgcgtttgtgatagtgggaaccgtatagaggtg

SEQ ID NO: 429588 - DNA, 55 bp, Artificial
  Synthetic oligonucleotide
gggtgtataggtttgttggaggccccgatctacaattagtggccagagtccaaaa

SEQ ID NO: 429589 - DNA, 60 bp, Artificial
  Synthetic oligonucleotide
gggtgtatcaggcacttgatagatgggatttggactcagcaagaggagacgacgtttcag

SEQ ID NO: 429590 - DNA, 55 bp, Artificial
  Synthetic oligonucleotide
gggtgtatcttggcttacctccaagattcgtgcgaacgtattcaacctgttctac

SEQ ID NO: 429591 - DNA, 54 bp, Artificial
  Synthetic oligonucleotide
gggtgtattgcagtgcccgttcatatatgataacgaccttaatgcctatttacc

SEQ ID NO: 429592 - DNA, 55 bp, Artificial
  Synthetic oligonucleotide
gggtgtattgggacagttactccattagaggcgtacagacaatactgggataggg

SEQ ID NO: 429593 - DNA, 60 bp, Artificial
  Synthetic oligonucleotide
gggtgtcaaccgctgagactggggtattttgtctggcatccataccagccgcaactacat

SEQ ID NO: 429594 - DNA, 55 bp, Artificial
  Synthetic oligonucleotide
gggtgtcaagtcgtcagtcagcaaacttcagcggagcccgactctggtcgacccg

SEQ ID NO: 429595 - DNA, 57 bp, Artificial
  Synthetic oligonucleotide
gggtgtcaagtttcatccggggcacacgagtgctaccaaggggacaactgtcgacca

SEQ ID NO: 429596 - DNA, 60 bp, Artificial
  Synthetic oligonucleotide
gggtgtcaccctattgcgcattgagaattttgtgggcataggcagaaatcctggaataca

SEQ ID NO: 429597 - DNA, 60 bp, Artificial
  Synthetic oligonucleotide
gggtgtcacctagcctcttcataacatcaacacatgtcatacctcaaggcataactgagg

SEQ ID NO: 429598 - DNA, 55 bp, Artificial
  Synthetic oligonucleotide
gggtgtcatattaaccgccactgtatgggccatttatgtttatcgagtctaaaag

SEQ ID NO: 429599 - DNA, 55 bp, Artificial
  Synthetic oligonucleotide
gggtgtcattccatcctagtaatcctttcgtacgacctccttcacccgagaggcc

SEQ ID NO: 429600 - DNA, 55 bp, Artificial
  Synthetic oligonucleotide
gggtgtccatagcaataagtcattggatgacctctctaacatacaatatgctacc

SEQ ID NO: 429601 - DNA, 60 bp, Artificial
  Synthetic oligonucleotide
gggtgtccatttacaggacaacctttggtgtgctcatcctaaagaccagatccttgctca

SEQ ID NO: 429602 - DNA, 51 bp, Artificial
  Synthetic oligonucleotide
gggtgtccccgacccccttaattcaacgtctagcccacgatacgggcaccc

SEQ ID NO: 429603 - DNA, 55 bp, Artificial
  Synthetic oligonucleotide
gggtgtcccggagtcttacatcaggcacatttcccgagcgggcgagcctgtagag

SEQ ID NO: 429604 - DNA, 54 bp, Artificial
  Synthetic oligonucleotide
gggtgtccctttcctctcatgccaacgtgggtacaagggagtttggcggggaga

SEQ ID NO: 429605 - DNA, 54 bp, Artificial
  Synthetic oligonucleotide
gggtgtccggtttcgcgaaggaattacccggcgtctagccaatacatacgacgc

SEQ ID NO: 429606 - DNA, 60 bp, Artificial
  Synthetic oligonucleotide
gggtgtcctaacaactagcgcgagcaactgcttgacctgctacatcaaggtgaaagctgc

SEQ ID NO: 429607 - DNA, 55 bp, Artificial
  Synthetic oligonucleotide
gggtgtcgaaccgtgttagagcacacctctttattccgtcttcattggtggctcg

SEQ ID NO: 429608 - DNA, 60 bp, Artificial
  Synthetic oligonucleotide
gggtgtcgacatagcagaataggaatcattcaacagaggagagcaagaaatggagccagt

SEQ ID NO: 429609 - DNA, 55 bp, Artificial
  Synthetic oligonucleotide
gggtgtcgattggaaacggtcgtgcggtttgggatgttacgcaaacagtagagcg

SEQ ID NO: 429610 - DNA, 53 bp, Artificial
  Synthetic oligonucleotide
gggtgtcggaataggagtggcaatcgggtttggtatagctaacgcaaatctgg

SEQ ID NO: 429611 - DNA, 55 bp, Artificial
  Synthetic oligonucleotide
gggtgtcgtttcggagcactctgtcgaacgcgagtaccatactgaggacggctac

SEQ ID NO: 429612 - DNA, 54 bp, Artificial
  Synthetic oligonucleotide
gggtgtctacttgtccccttttgcttacgttaaccactctcaccctggttgcaa

SEQ ID NO: 429613 - DNA, 55 bp, Artificial
  Synthetic oligonucleotide
gggtgtctgaaatacattgttaaatccggaaggtgcgttgttcacgacagatgtg

SEQ ID NO: 429614 - DNA, 60 bp, Artificial
  Synthetic oligonucleotide
gggtgtctgctatggagaggtgtatgaagagaggtcaaagtaagacagtagtggcaagtg

SEQ ID NO: 429615 - DNA, 60 bp, Artificial
  Synthetic oligonucleotide
gggtgtctgttatgggctacgtcggactctgtctcgttaatgtccactccaactgagctc

SEQ ID NO: 429616 - DNA, 55 bp, Artificial
  Synthetic oligonucleotide
gggtgtcttggtcctgagacatcttggtgtcactggaacctgctctaggggctca

SEQ ID NO: 429617 - DNA, 60 bp, Artificial
  Synthetic oligonucleotide
gggtgtcttgtcatccaaatcaagtaccatagtcatcaacggtatggctatgcaggccgg

SEQ ID NO: 429618 - DNA, 51 bp, Artificial
  Synthetic oligonucleotide
gggtgtgaacgttcctaggttagctgcgtaaattacaagcgtaccaaagta

SEQ ID NO: 429619 - DNA, 60 bp, Artificial
  Synthetic oligonucleotide
gggtgtgaagccaaagattggacaaggtgtgaagagccacgtgtgctcaccttgagtcct

SEQ ID NO: 429620 - DNA, 58 bp, Artificial
  Synthetic oligonucleotide
gggtgtgaagggccttgtaaggtccaatcgtttgaatcacgacatgatgttacccatg

SEQ ID NO: 429621 - DNA, 58 bp, Artificial
  Synthetic oligonucleotide
gggtgtgactgttagtgttggtggggtagacatgagggcgggacgcattatagcgtgg

SEQ ID NO: 429622 - DNA, 55 bp, Artificial
  Synthetic oligonucleotide
gggtgtgatgttggagttgctaccgtatgcgcagctgctttcaaaggtgttagtg

SEQ ID NO: 429623 - DNA, 60 bp, Artificial
  Synthetic oligonucleotide
gggtgtgctagcgggtcaggcctctcagttgaatgctgtggtcgacttgcaagacagaaa

SEQ ID NO: 429624 - DNA, 60 bp, Artificial
  Synthetic oligonucleotide
gggtgtggatgaatattctagcactgagaggatagtagtgagcattgatcgcttcttaag

SEQ ID NO: 429625 - DNA, 56 bp, Artificial
  Synthetic oligonucleotide
gggtgtgggttacatatgcggtgtgtcggttgtgggaaatatgtgacccatttaaa

SEQ ID NO: 429626 - DNA, 55 bp, Artificial
  Synthetic oligonucleotide
gggtgtggtcacctcccaatgtcacaacaacgttgcacttgcgttaaacctagtg

SEQ ID NO: 429627 - DNA, 55 bp, Artificial
  Synthetic oligonucleotide
gggtgtggtcgcgaacccagacgggaatgcgagccaagctttactgcacgcattc

SEQ ID NO: 429628 - DNA, 59 bp, Artificial
  Synthetic oligonucleotide
gggtgtggtgtttgacataaccaagtggctcttggcggtgcttgggcctgcttatctcc

SEQ ID NO: 429629 - DNA, 55 bp, Artificial
  Synthetic oligonucleotide
gggtgtgtacctcgaaatgcatctccaaggtagtcgtagccggtcattgggagac

SEQ ID NO: 429630 - DNA, 59 bp, Artificial
  Synthetic oligonucleotide
gggtgtgtaggataggaaaggtgcccactgtgagcgacaggttatggtagagtggatac

SEQ ID NO: 429631 - DNA, 56 bp, Artificial
  Synthetic oligonucleotide
gggtgtgtcccttgtgtccgcgagggtaacgtctcgacatgttgggtgccggtggc

SEQ ID NO: 429632 - DNA, 54 bp, Artificial
  Synthetic oligonucleotide
gggtgtgtctgactacattaagggcctcggggacgcttttgggactggtttcac

SEQ ID NO: 429633 - DNA, 55 bp, Artificial
  Synthetic oligonucleotide
gggtgtgtgacactcgacgtgcattccccgtctggcctccaagtgaccctgactg

SEQ ID NO: 429634 - DNA, 55 bp, Artificial
  Synthetic oligonucleotide
gggtgtgtgggtccctgtaaggtacaggattacgagttcaagatggatgtcccgc

SEQ ID NO: 429635 - DNA, 53 bp, Artificial
  Synthetic oligonucleotide
gggtgtgtttacaattggcccagacaccacaaccaaccaagtccttttagaac

SEQ ID NO: 429636 - DNA, 55 bp, Artificial
  Synthetic oligonucleotide
gggtgttagaggttctcagtacgttaggaaaacgctaagaccaggtcatattagc

SEQ ID NO: 429637 - DNA, 55 bp, Artificial
  Synthetic oligonucleotide
gggtgttagtcccgacgggcgcagcgatccccgtcagcgaatttcaagcactcag

SEQ ID NO: 429638 - DNA, 51 bp, Artificial
  Synthetic oligonucleotide
gggtgttatatgcgctgagaaagcacgttacaacacaggaagcacattccg

SEQ ID NO: 429639 - DNA, 59 bp, Artificial
  Synthetic oligonucleotide
gggtgttcaccatcctcctaacaccgggttgcaagacaccctgtatggctctggtgata

SEQ ID NO: 429640 - DNA, 55 bp, Artificial
  Synthetic oligonucleotide
gggtgttcagggtggttccatgtagaggcaatagtaaagacacgaacgggggatg

SEQ ID NO: 429641 - DNA, 55 bp, Artificial
  Synthetic oligonucleotide
gggtgttcatagtgtgtatgatatgactttgcaggatttggttaatggtttggag

SEQ ID NO: 429642 - DNA, 60 bp, Artificial
  Synthetic oligonucleotide
gggtgttcatcatcctcctagcaccgggctgcaagactccttgtatggatccggtgatag

SEQ ID NO: 429643 - DNA, 60 bp, Artificial
  Synthetic oligonucleotide
gggtgttcatcatcctcctgacaccacagtgcaggataatctgtatgggtctggtgatag

SEQ ID NO: 429644 - DNA, 55 bp, Artificial
  Synthetic oligonucleotide
gggtgttcccctgccctcggtgaacactggtctgctgctaggccttgcaatggag

SEQ ID NO: 429645 - DNA, 57 bp, Artificial
  Synthetic oligonucleotide
gggtgttcgatcaggtggtatcccccactagtctggtcgatgaggctaggaattccc

SEQ ID NO: 429646 - DNA, 60 bp, Artificial
  Synthetic oligonucleotide
gggtgttgaacccattgataatgttatgggaatgatcggaatattgcctgacatgactcc

SEQ ID NO: 429647 - DNA, 56 bp, Artificial
  Synthetic oligonucleotide
gggtgttgaggatttgaaagaccctggaatttcaaaagaactgatttcattgtgta

SEQ ID NO: 429648 - DNA, 55 bp, Artificial
  Synthetic oligonucleotide
gggtgttgattgagagtgaggatactgggttcgaggacaatgctcaccctttggc

SEQ ID NO: 429649 - DNA, 55 bp, Artificial
  Synthetic oligonucleotide
gggtgttgtcaccgctgtaccaccatatcgaacacgtcaactatggagccatatc

SEQ ID NO: 429650 - DNA, 57 bp, Artificial
  Synthetic oligonucleotide
gggtgttgttaacgactctgatattgagttatcgaaccgagggaagtcattcagacc

SEQ ID NO: 429651 - DNA, 52 bp, Artificial
  Synthetic oligonucleotide
gggtgtttacggggaacgtgatgaacccctcaaagtgacctgcagtagtcac

SEQ ID NO: 429652 - DNA, 55 bp, Artificial
  Synthetic oligonucleotide
gggtgtttagggtgcaactaccagatcctaataagtttggtttgcctgatcctag

SEQ ID NO: 429653 - DNA, 58 bp, Artificial
  Synthetic oligonucleotide
gggtgtttcgaaatattccacaagtgtgattacaactgcattgaaagtattcggaatg

SEQ ID NO: 429654 - DNA, 60 bp, Artificial
  Synthetic oligonucleotide
gggttaaattgagcaatatgggggtttatcaaatccttgccatctatgctacagtagcag

SEQ ID NO: 429655 - DNA, 52 bp, Artificial
  Synthetic oligonucleotide
gggttaacaggcaagggagttcttgggtttcgggctgtctaacgccgagact

SEQ ID NO: 429656 - DNA, 55 bp, Artificial
  Synthetic oligonucleotide
gggttaacaggcccatgtacagaaagcccaggatctaccggatgaggaggactcc

SEQ ID NO: 429657 - DNA, 52 bp, Artificial
  Synthetic oligonucleotide
gggttaaccctggaatttggaacgttgacttagatgaccaaagttggaacac

SEQ ID NO: 429658 - DNA, 55 bp, Artificial
  Synthetic oligonucleotide
gggttaacgaatgttgcgcaggtttgtgttgatgttgtgccccgtgtttacggag

SEQ ID NO: 429659 - DNA, 55 bp, Artificial
  Synthetic oligonucleotide
gggttaacggttgtgtggggaggagtcgtggtcttggcgctgcttgtcactggca

SEQ ID NO: 429660 - DNA, 58 bp, Artificial
  Synthetic oligonucleotide
gggttaagtggtctgattgggctgatgaggaaaccagctggataggaaggaaaatgaa

SEQ ID NO: 429661 - DNA, 55 bp, Artificial
  Synthetic oligonucleotide
gggttacacggatattgtagtcctggtcgtatttactgttttcgaacgcagtgcc

SEQ ID NO: 429662 - DNA, 55 bp, Artificial
  Synthetic oligonucleotide
gggttacagcgcgtgccatctttgcaggtgtcagagtcgaaataccgagaggccg

SEQ ID NO: 429663 - DNA, 60 bp, Artificial
  Synthetic oligonucleotide
gggttacatggaatgattggcaaacatctcgtcacttggacatgggttcaattaatctaa

SEQ ID NO: 429664 - DNA, 56 bp, Artificial
  Synthetic oligonucleotide
gggttaccgcactaactccctgcaagggaggagtgagtgcgggacatcccgtgtaa

SEQ ID NO: 429665 - DNA, 55 bp, Artificial
  Synthetic oligonucleotide
gggttacgctcaaactctattgtatcggggttactggggttgtatatatagtgtg

SEQ ID NO: 429666 - DNA, 58 bp, Artificial
  Synthetic oligonucleotide
gggttacgtacgacagaggaagcgacacagcttgctaaggcaataaggagtaatgttg

SEQ ID NO: 429667 - DNA, 55 bp, Artificial
  Synthetic oligonucleotide
gggttacgtgcaagacctaaacttacagcagtaaaacgaacagcatcttccagtc

SEQ ID NO: 429668 - DNA, 54 bp, Artificial
  Synthetic oligonucleotide
gggttactactccattttatatctctaaccggtttcggttgctgttggcatagg

SEQ ID NO: 429669 - DNA, 54 bp, Artificial
  Synthetic oligonucleotide
gggttactataaagttgacggaggtttagcactatacgactccctaacaggcga

SEQ ID NO: 429670 - DNA, 52 bp, Artificial
  Synthetic oligonucleotide
gggttactcctcatcccgaagttagctggattcaaaatccagactatgttcc

SEQ ID NO: 429671 - DNA, 59 bp, Artificial
  Synthetic oligonucleotide
gggttactcgagagttaccgtctgacatcgagcggcgtcacagcgtacttcaacgcacc

SEQ ID NO: 429672 - DNA, 52 bp, Artificial
  Synthetic oligonucleotide
gggttactgactctcccctgacgtattcaacctacggtaggtttttagccaa

SEQ ID NO: 429673 - DNA, 55 bp, Artificial
  Synthetic oligonucleotide
gggttactgcctagagcagtgggccatagtttgggcaggcatcaagtgctttggg

SEQ ID NO: 429674 - DNA, 55 bp, Artificial
  Synthetic oligonucleotide
gggttactttcaaatcagggcttaggtaaacagcatcaaggtatcgtcttgcccc

SEQ ID NO: 429675 - DNA, 60 bp, Artificial
  Synthetic oligonucleotide
gggttagacataatattctgtgagcatgaaatgagcctagttgtgaggaaaccaggtgtg

SEQ ID NO: 429676 - DNA, 55 bp, Artificial
  Synthetic oligonucleotide
gggttagagtagatgaatgtataatcctttaatgtgacgggtggtttaacagggc

SEQ ID NO: 429677 - DNA, 54 bp, Artificial
  Synthetic oligonucleotide
gggttagcaaacctggtgttgtactttagatggttgggtccccaacgcctcatg

SEQ ID NO: 429678 - DNA, 53 bp, Artificial
  Synthetic oligonucleotide
gggttagccatacccttagtaggactagcggacggggggactagccatcgtgg

SEQ ID NO: 429679 - DNA, 58 bp, Artificial
  Synthetic oligonucleotide
gggttagccctgaccaacagttggccttggaggctatatactctcgcaagtcgctact

SEQ ID NO: 429680 - DNA, 55 bp, Artificial
  Synthetic oligonucleotide
gggttagcgcggccatggaaattatgtcacaaaacccagtatctgtgggtatagc

SEQ ID NO: 429681 - DNA, 55 bp, Artificial
  Synthetic oligonucleotide
gggttagctgaattcctaatggatcgtagaataattctcccaagagttgcacatg

SEQ ID NO: 429682 - DNA, 55 bp, Artificial
  Synthetic oligonucleotide
gggttaggttggcacttgtgtacttcatctacaacaggtcaaacaccgaatgtac

SEQ ID NO: 429683 - DNA, 55 bp, Artificial
  Synthetic oligonucleotide
gggttagtgtccataaatgactttggagccctagctgttagagtggtcaatgagt

SEQ ID NO: 429684 - DNA, 50 bp, Artificial
  Synthetic oligonucleotide
gggttataaacactcaagccagagtactcatggtatgtccctacacttac

SEQ ID NO: 429685 - DNA, 53 bp, Artificial
  Synthetic oligonucleotide
gggttataaggtgttagtgcttaacccctcggttgcggccacactgggatttg

SEQ ID NO: 429686 - DNA, 57 bp, Artificial
  Synthetic oligonucleotide
gggttataatggacgcattcccaccctcctggaacgaaagcgatgtggacacgcgac

SEQ ID NO: 429687 - DNA, 55 bp, Artificial
  Synthetic oligonucleotide
gggttatactccgatgcaccgaccagtttggagaccatgtgggctatgcctcagc

SEQ ID NO: 429688 - DNA, 60 bp, Artificial
  Synthetic oligonucleotide
gggttatatcctgctcagattaaagccagacagatggtaagcccagttatgagtgtaatt

SEQ ID NO: 429689 - DNA, 56 bp, Artificial
  Synthetic oligonucleotide
gggttatcatggtcgctaattgacatcggtactacaaattttgaattgaaaccaac

SEQ ID NO: 429690 - DNA, 59 bp, Artificial
  Synthetic oligonucleotide
gggttatccatccagcttacggctaaaatggtcagtcatgccccaaaggcacgccgaca

SEQ ID NO: 429691 - DNA, 60 bp, Artificial
  Synthetic oligonucleotide
gggttatcctgcgttgatgcctttggatgcatggattcaatctaagcagctttcactttt

SEQ ID NO: 429692 - DNA, 55 bp, Artificial
  Synthetic oligonucleotide
gggttatctccattagatgacgttgtgactattagattgaaagatttgctgcgtg

SEQ ID NO: 429693 - DNA, 55 bp, Artificial
  Synthetic oligonucleotide
gggttatgagtactatagtcaacgccagaacccaaatggcactcgaaaggttgcc

SEQ ID NO: 429694 - DNA, 55 bp, Artificial
  Synthetic oligonucleotide
gggttatgcacgtcctttgagctcgtcccgattgtccattcgaacactgtccaag

SEQ ID NO: 429695 - DNA, 57 bp, Artificial
  Synthetic oligonucleotide
gggttatgtactgtttaacattctggtatgtattccagtctgttacttcattacttc

SEQ ID NO: 429696 - DNA, 55 bp, Artificial
  Synthetic oligonucleotide
gggttatgtagcacataatcaccgagaggtgacgacgacagaggcagtgaagtac

SEQ ID NO: 429697 - DNA, 59 bp, Artificial
  Synthetic oligonucleotide
gggttatgtgcacaagcgagaagtgttgcaggattggataacgacaacgggagtgtccg

SEQ ID NO: 429698 - DNA, 55 bp, Artificial
  Synthetic oligonucleotide
gggttattagctcctacacggtatctagctgcaaagtcgttaacagtacccatat

SEQ ID NO: 429699 - DNA, 52 bp, Artificial
  Synthetic oligonucleotide
gggttcaaaggtactactaaacgggatatacggtatccctgccttacgtgct

SEQ ID NO: 429700 - DNA, 60 bp, Artificial
  Synthetic oligonucleotide
gggttcaagagcaaagggagatttctaaatctctgcatgatcagaagcctagtatacact

SEQ ID NO: 429701 - DNA, 55 bp, Artificial
  Synthetic oligonucleotide
gggttcaagcgcagtcgccgagatacagaagcactccaatccagccaagaagagc

SEQ ID NO: 429702 - DNA, 55 bp, Artificial
  Synthetic oligonucleotide
gggttcaaggagcgaacctgctaatcacaaggggtatggtaggaaggttatccaa

SEQ ID NO: 429703 - DNA, 55 bp, Artificial
  Synthetic oligonucleotide
gggttcaatgttatggatggatgacttactttgacatgccagcgtcttggatagc

SEQ ID NO: 429704 - DNA, 55 bp, Artificial
  Synthetic oligonucleotide
gggttcaattcccttacgcagtgacccctaggtgtgaggtcctatcaggccatag

SEQ ID NO: 429705 - DNA, 55 bp, Artificial
  Synthetic oligonucleotide
gggttcactggcatttgcacagagtcagactacgaagcctttgatgcctcccagg

SEQ ID NO: 429706 - DNA, 55 bp, Artificial
  Synthetic oligonucleotide
gggttcactttttgtgaaaccagtgcgcgttcccattcaagattttccacttagc

SEQ ID NO: 429707 - DNA, 57 bp, Artificial
  Synthetic oligonucleotide
gggttcagactccggtgcagacctcaccaccccaactgagaccacagactcgggccc

SEQ ID NO: 429708 - DNA, 60 bp, Artificial
  Synthetic oligonucleotide
gggttcaggtttatgaattacattcttacagcagaacatgtagttcagggatcggacata

SEQ ID NO: 429709 - DNA, 54 bp, Artificial
  Synthetic oligonucleotide
gggttcagttctcggttcgtagggggaaacccataataccacataatgcagtaa

SEQ ID NO: 429710 - DNA, 51 bp, Artificial
  Synthetic oligonucleotide
gggttcatattggtctcccatcatttgccttccttaatcctatgggttggt

SEQ ID NO: 429711 - DNA, 53 bp, Artificial
  Synthetic oligonucleotide
gggttcatcataaagggaagatcccatctacggaatgacacagacgtggtaaa

SEQ ID NO: 429712 - DNA, 55 bp, Artificial
  Synthetic oligonucleotide
gggttcatcggataccaagcttgcgcaatcatttcccaacactggttggtggaca

SEQ ID NO: 429713 - DNA, 60 bp, Artificial
  Synthetic oligonucleotide
gggttccaacaggtgaatttccactacaccagatgatgctaatgagacgtgatttcccaa

SEQ ID NO: 429714 - DNA, 55 bp, Artificial
  Synthetic oligonucleotide
gggttccaacccagcgattctcctattaacaacaccggtgtctgcgcctcctcta

SEQ ID NO: 429715 - DNA, 60 bp, Artificial
  Synthetic oligonucleotide
gggttccaatgcaatggaagatggaaaaggatgtttcgagctataccacaaatgtgatga

SEQ ID NO: 429716 - DNA, 55 bp, Artificial
  Synthetic oligonucleotide
gggttccacacccacccgatagcgttgagcagtagtaacacgatcagtgatggga

SEQ ID NO: 429717 - DNA, 55 bp, Artificial
  Synthetic oligonucleotide
gggttccatgtcccgcaagtacgaaaatgtatacaagtggtattgtaggaaccta

SEQ ID NO: 429718 - DNA, 51 bp, Artificial
  Synthetic oligonucleotide
gggttcccaatgggtgatgaatctgtgcctcaggaccccaatgcgtcccaa

SEQ ID NO: 429719 - DNA, 53 bp, Artificial
  Synthetic oligonucleotide
gggttcccactcaggcccgaccctctcaaaatcaagggacctaattccgtcca

SEQ ID NO: 429720 - DNA, 56 bp, Artificial
  Synthetic oligonucleotide
gggttcccagtaagacctcaagtgcctctaaggccaatgacctataaaggagcatt

SEQ ID NO: 429721 - DNA, 55 bp, Artificial
  Synthetic oligonucleotide
gggttcccctgaatagtaggcacaatgagtcgatgatgagtgaggccgttcacgc

SEQ ID NO: 429722 - DNA, 52 bp, Artificial
  Synthetic oligonucleotide
gggttcccgaaactcaaacaagttattactacaagggcagtgacggacacgt

SEQ ID NO: 429723 - DNA, 52 bp, Artificial
  Synthetic oligonucleotide
gggttcccgccaattccaccgcgtcacccaaggcaatccttcgaacctacgg

SEQ ID NO: 429724 - DNA, 57 bp, Artificial
  Synthetic oligonucleotide
gggttccctcaaagtgggcggaaccgccgcacaatcaatgatttctctctggttata

SEQ ID NO: 429725 - DNA, 60 bp, Artificial
  Synthetic oligonucleotide
gggttccgcagtcatgtggaccttctggttggttcagcggccgcttgctcagcactttac

SEQ ID NO: 429726 - DNA, 56 bp, Artificial
  Synthetic oligonucleotide
gggttccgtggcataactgtaaatataagccaggacaccaggggagtcctctctaa

SEQ ID NO: 429727 - DNA, 53 bp, Artificial
  Synthetic oligonucleotide
gggttccgttggagtacggcaacatgggccataaagtcttaatcttgaacccg

SEQ ID NO: 429728 - DNA, 60 bp, Artificial
  Synthetic oligonucleotide
gggttcctctgtgcgaaaatccctgattacattcatgatgaattgtgaaatgacacttac

SEQ ID NO: 429729 - DNA, 55 bp, Artificial
  Synthetic oligonucleotide
gggttcctgtcgttggcccagctgtcggtgcctcaggatggacgtcctttgttgg

SEQ ID NO: 429730 - DNA, 55 bp, Artificial
  Synthetic oligonucleotide
gggttcgactggataacagactaccaagggagaactgtgtggtttgttcctagca

SEQ ID NO: 429731 - DNA, 55 bp, Artificial
  Synthetic oligonucleotide
gggttcgcccctttctccaaggacaactcaattaggctttctgcaggcggggata

SEQ ID NO: 429732 - DNA, 53 bp, Artificial
  Synthetic oligonucleotide
gggttcgcctacaacatctcccgagttgcggactacttaaagtccaaaggcgt

SEQ ID NO: 429733 - DNA, 55 bp, Artificial
  Synthetic oligonucleotide
gggttcgcttcagatgacacgccaatttattgtcgcggactggacagtagtcgaa

SEQ ID NO: 429734 - DNA, 59 bp, Artificial
  Synthetic oligonucleotide
gggttcggattggttgctaggaagtctgacaatgcaaaggttatgtagtcagaattcca

SEQ ID NO: 429735 - DNA, 59 bp, Artificial
  Synthetic oligonucleotide
gggttcggcacaactgaacgcttctctttatgcaatcgggttcttgtatcttgagaaca

SEQ ID NO: 429736 - DNA, 60 bp, Artificial
  Synthetic oligonucleotide
gggttcggtcgtgcatgaagagaatatacctgcatataaccgaggccatgttgtgaaatc

SEQ ID NO: 429737 - DNA, 52 bp, Artificial
  Synthetic oligonucleotide
gggttcgtacatctgtcgatcattgtcctccaagagttatgtgtcggagttc

SEQ ID NO: 429738 - DNA, 55 bp, Artificial
  Synthetic oligonucleotide
gggttcgtacggtgattcttttgaagggaaaatcttggatgatttgtctcaacca

SEQ ID NO: 429739 - DNA, 60 bp, Artificial
  Synthetic oligonucleotide
gggttcgtggcacagtaactgatagcaacgatgttgattgcgaacctatcataacctatt

SEQ ID NO: 429740 - DNA, 55 bp, Artificial
  Synthetic oligonucleotide
gggttcgtgggcgttcgaggtcgtgcagaccaacgtcaagacgattgcagagtgg

SEQ ID NO: 429741 - DNA, 51 bp, Artificial
  Synthetic oligonucleotide
gggttctattaagatatccccaaagaagacaacagtttctccaactaatgc

SEQ ID NO: 429742 - DNA, 54 bp, Artificial
  Synthetic oligonucleotide
gggttctattgggttaatcctagattcagaagggataacagggactaacgcgta

SEQ ID NO: 429743 - DNA, 53 bp, Artificial
  Synthetic oligonucleotide
gggttctcacccgttaggcaggaaagacccgaaccacataacccactgacatt

SEQ ID NO: 429744 - DNA, 55 bp, Artificial
  Synthetic oligonucleotide
gggttctcgccagtggtactggaccaaggacgttaacgctgcgaatcgcaacgat

SEQ ID NO: 429745 - DNA, 59 bp, Artificial
  Synthetic oligonucleotide
gggttctcggggacaatccgcgccctaatgatagaacaggcagttgtggtccagtatca

SEQ ID NO: 429746 - DNA, 58 bp, Artificial
  Synthetic oligonucleotide
gggttctctgtcgatttccaaagaagaactggagatgctaatacgtatctgggtaata

SEQ ID NO: 429747 - DNA, 55 bp, Artificial
  Synthetic oligonucleotide
gggttctggacctaaacgactcgtggttgtgcaggagaatgatccagagaacaac

SEQ ID NO: 429748 - DNA, 55 bp, Artificial
  Synthetic oligonucleotide
gggttctggcgggagtcaaagtgacccgcgggcagggatacgttgcggaactgta

SEQ ID NO: 429749 - DNA, 53 bp, Artificial
  Synthetic oligonucleotide
gggttctggctccgacggaaggcagaaacagtatcagctataatccgttagct

SEQ ID NO: 429750 - DNA, 52 bp, Artificial
  Synthetic oligonucleotide
gggttctgggtcagccctacagtgttcattactactacccatgttataccaa

SEQ ID NO: 429751 - DNA, 57 bp, Artificial
  Synthetic oligonucleotide
gggttctggtgtagggtttacactcacatgtactgtcggattaacagagtgcccaag

SEQ ID NO: 429752 - DNA, 55 bp, Artificial
  Synthetic oligonucleotide
gggttcttaaaagacacctatcgcgtttacaattctatgaagtcgcttgccgtag

SEQ ID NO: 429753 - DNA, 51 bp, Artificial
  Synthetic oligonucleotide
gggttcttcaccacctcgaggagtgccctcgccccgacgcaatcctgtcga

SEQ ID NO: 429754 - DNA, 54 bp, Artificial
  Synthetic oligonucleotide
gggttcttcatgtacaattaaagtatgtccactaaacacacaaaccttaggaat

SEQ ID NO: 429755 - DNA, 55 bp, Artificial
  Synthetic oligonucleotide
gggttgaaagcgggacacctggaattatggttaggaatgatgattcatggggagg

SEQ ID NO: 429756 - DNA, 55 bp, Artificial
  Synthetic oligonucleotide
gggttgaaccaagaagtggtcaggcaactatcccgcaggtaccctcaactaccac

SEQ ID NO: 429757 - DNA, 56 bp, Artificial
  Synthetic oligonucleotide
gggttgaacttctacgcagtaatttagtaatatatacgtaagctattgtggtgagg

SEQ ID NO: 429758 - DNA, 51 bp, Artificial
  Synthetic oligonucleotide
gggttgaaggttgttcctgagttggacgcagatagcagggtgatgcgctat

SEQ ID NO: 429759 - DNA, 55 bp, Artificial
  Synthetic oligonucleotide
gggttgaattgcttagggaacatttatataagtggggattcactacccctgataa

SEQ ID NO: 429760 - DNA, 55 bp, Artificial
  Synthetic oligonucleotide
gggttgacgctgactgattccgatttcaacttcgtggaaggtacacccgcgagtt

SEQ ID NO: 429761 - DNA, 60 bp, Artificial
  Synthetic oligonucleotide
gggttgacggctcttgaatgcacagctgaagaaattttccgaatgcaccagtgttgcaag

SEQ ID NO: 429762 - DNA, 55 bp, Artificial
  Synthetic oligonucleotide
gggttgactgggctatcctaacgattaagggccgcaggcccgtcaagatggacgg

SEQ ID NO: 429763 - DNA, 55 bp, Artificial
  Synthetic oligonucleotide
gggttgacttagagtccccacaagccctctcggtcatgggagaggattcactgtc

SEQ ID NO: 429764 - DNA, 58 bp, Artificial
  Synthetic oligonucleotide
gggttgagtagcactcagagggaggaatccactcggagttgaggagaaaaatcacctc

SEQ ID NO: 429765 - DNA, 53 bp, Artificial
  Synthetic oligonucleotide
gggttgagttcctcgtgcaagcgtggaagtccaagaaaaccccaatggggttc

SEQ ID NO: 429766 - DNA, 55 bp, Artificial
  Synthetic oligonucleotide
gggttgataaaacaatgacatagagacacaatttcagctacatgaactgcaaggt

SEQ ID NO: 429767 - DNA, 55 bp, Artificial
  Synthetic oligonucleotide
gggttgataagattgaggactttctaaaggctgagtgccctttcctcccaaagcc

SEQ ID NO: 429768 - DNA, 57 bp, Artificial
  Synthetic oligonucleotide
gggttgatagatctagaggagtacaaacggatggtgtctgcacaaccaactaggcag

SEQ ID NO: 429769 - DNA, 54 bp, Artificial
  Synthetic oligonucleotide
gggttgatcccacccaaaccacccacgtggtgtagtacactgttatctcggtaa

SEQ ID NO: 429770 - DNA, 60 bp, Artificial
  Synthetic oligonucleotide
gggttgatggtcctgtcacatctagtggacattggcaaagaaatttgttacgtgttgaga

SEQ ID NO: 429771 - DNA, 55 bp, Artificial
  Synthetic oligonucleotide
gggttgatggtctttgagaattccagcatgaacagcccatgtgcgtcagccagca

SEQ ID NO: 429772 - DNA, 59 bp, Artificial
  Synthetic oligonucleotide
gggttgattgtgctatcctaacgattaagggccgcaggcccgtcaagatggacgatgga

SEQ ID NO: 429773 - DNA, 55 bp, Artificial
  Synthetic oligonucleotide
gggttgcacccacccacactgtctacggacgtagtgctctcatattacggtatgt

SEQ ID NO: 429774 - DNA, 55 bp, Artificial
  Synthetic oligonucleotide
gggttgcatgtggacgttaaccgtgtctacgtgccgggtaaagcagatccttggc

SEQ ID NO: 429775 - DNA, 60 bp, Artificial
  Synthetic oligonucleotide
gggttgccataataatggtgggaaaagttttatattgcatgtgttgcgcatcttactgat

SEQ ID NO: 429776 - DNA, 56 bp, Artificial
  Synthetic oligonucleotide
gggttgccatcaggggttttcctttcgagagtgggtgtcaaggtagagctgataat

SEQ ID NO: 429777 - DNA, 55 bp, Artificial
  Synthetic oligonucleotide
gggttgcctttggaaatctttacgctacatttcatagtaatccaggtacagcaac

SEQ ID NO: 429778 - DNA, 55 bp, Artificial
  Synthetic oligonucleotide
gggttgcgaaagcggtggactttatacccgttgagtctatggaaaccactatgcg

SEQ ID NO: 429779 - DNA, 55 bp, Artificial
  Synthetic oligonucleotide
gggttgctagaatccaatcaagaaacccagttgatagcgcggaagggtctgttct

SEQ ID NO: 429780 - DNA, 56 bp, Artificial
  Synthetic oligonucleotide
gggttgctatttccacttacaccactagcctgggtgctggtcccgtctctatttcc

SEQ ID NO: 429781 - DNA, 55 bp, Artificial
  Synthetic oligonucleotide
gggttgctcatctggctgggtctcaactctcggagtagttcaatgtcaatgggct

SEQ ID NO: 429782 - DNA, 55 bp, Artificial
  Synthetic oligonucleotide
gggttgctcccacccagattacccaagtggtgtagtactctgttattacggtagc

SEQ ID NO: 429783 - DNA, 55 bp, Artificial
  Synthetic oligonucleotide
gggttgctgcctcacgtatcatcattgcttcggaacggacgaggttcccggagct

SEQ ID NO: 429784 - DNA, 60 bp, Artificial
  Synthetic oligonucleotide
gggttgcttcccagtgtcagtggtacggtgaaatcctgtgtcacagagacgcagactaca

SEQ ID NO: 429785 - DNA, 55 bp, Artificial
  Synthetic oligonucleotide
gggttgctttaggtgagacggcttagcattgcctcatgaacttggtcacctgagt

SEQ ID NO: 429786 - DNA, 55 bp, Artificial
  Synthetic oligonucleotide
gggttggaaaatgtttcaataactgtagtggagggtcttgcagactaacaaactg

SEQ ID NO: 429787 - DNA, 59 bp, Artificial
  Synthetic oligonucleotide
gggttggacttgacccttcattaatcagcacttttgcagggagcacgctccccagaaga

SEQ ID NO: 429788 - DNA, 54 bp, Artificial
  Synthetic oligonucleotide
gggttggagatgccacaggtattaatggggaatacccgtttacacgcacccctc

SEQ ID NO: 429789 - DNA, 55 bp, Artificial
  Synthetic oligonucleotide
gggttggaggcgagattttcggctatccggatttctcgtacgatagacggctcgc

SEQ ID NO: 429790 - DNA, 55 bp, Artificial
  Synthetic oligonucleotide
gggttggatcgtaggaaatcctgcctgtactagcaactttgggatcagagagtgg

SEQ ID NO: 429791 - DNA, 60 bp, Artificial
  Synthetic oligonucleotide
gggttggcagttagctacgttgagggcaatgagagcgcaaatctgggctcaagtttggga

SEQ ID NO: 429792 - DNA, 57 bp, Artificial
  Synthetic oligonucleotide
gggttgggaattggcacaggccgtggaacaggcggtgccacaggatatgtccctttg

SEQ ID NO: 429793 - DNA, 57 bp, Artificial
  Synthetic oligonucleotide
gggttgggagtgagaacgcagtggaagaatgtaacggacggaggagttggtgccatc

SEQ ID NO: 429794 - DNA, 55 bp, Artificial
  Synthetic oligonucleotide
gggttggggccctatttcatatgacaacatcactggcccatctgaggacaggcct

SEQ ID NO: 429795 - DNA, 58 bp, Artificial
  Synthetic oligonucleotide
gggttgggtagcgccgttggtggacacagtgtcttatgtggagcaaaactatcgccta

SEQ ID NO: 429796 - DNA, 55 bp, Artificial
  Synthetic oligonucleotide
gggttggtaacatgcgagtcagggtcatcctggcaggtaacgcatttaccgccgg

SEQ ID NO: 429797 - DNA, 57 bp, Artificial
  Synthetic oligonucleotide
gggttggtcttggggtattagtgatcagtttgtcacctgacaggtcaatggttgtgt

SEQ ID NO: 429798 - DNA, 53 bp, Artificial
  Synthetic oligonucleotide
gggttggtggggtcaaccgatcatggagaagcttgttaccggtcctcaacggg

SEQ ID NO: 429799 - DNA, 57 bp, Artificial
  Synthetic oligonucleotide
gggttggttatttcgctaattcaacttataatgatttattctcatggtacattccta

SEQ ID NO: 429800 - DNA, 55 bp, Artificial
  Synthetic oligonucleotide
gggttgtaagaatcttcaatcacgcgagcattgcgaagaactacgtcgtagtctc

SEQ ID NO: 429801 - DNA, 54 bp, Artificial
  Synthetic oligonucleotide
gggttgtacccacccctgggacccacgtggtgtcagtactctggtacgctagta

SEQ ID NO: 429802 - DNA, 55 bp, Artificial
  Synthetic oligonucleotide
gggttgtacgtcatgcgtagcttagactgcgaagcatgtaccgtagtgccaggcg

SEQ ID NO: 429803 - DNA, 55 bp, Artificial
  Synthetic oligonucleotide
gggttgtagagaggcttcggtggttgctcttgaagcttatggatggactgaggac

SEQ ID NO: 429804 - DNA, 55 bp, Artificial
  Synthetic oligonucleotide
gggttgtcagaataggggatccacccaaacatggatctagatatttggatgtctt

SEQ ID NO: 429805 - DNA, 55 bp, Artificial
  Synthetic oligonucleotide
gggttgtcgagcgttcgattcgttcctggggctcgtaatcttccgtccatggtct

SEQ ID NO: 429806 - DNA, 58 bp, Artificial
  Synthetic oligonucleotide
gggttgtcgtcataatatatctaacagggttaactgttgttataattcatatcaaaga

SEQ ID NO: 429807 - DNA, 53 bp, Artificial
  Synthetic oligonucleotide
gggttgtctcacctaacaagcagaagaaagtttgggtgaagaaggaaacccaa

SEQ ID NO: 429808 - DNA, 60 bp, Artificial
  Synthetic oligonucleotide
gggttgtctctgtttatgcagtccatgatgatctatttgaaagttcaaagcagttgttgc

SEQ ID NO: 429809 - DNA, 57 bp, Artificial
  Synthetic oligonucleotide
gggttgtgatccaacccgatttctggcctcttttacggtctgcgataaatatagatc

SEQ ID NO: 429810 - DNA, 56 bp, Artificial
  Synthetic oligonucleotide
gggttgtgcaaattacgcggcaagtttgtacaagtgcctgtaggtataaaagatcc

SEQ ID NO: 429811 - DNA, 56 bp, Artificial
  Synthetic oligonucleotide
gggttgtgcggacgaacaccgcttgcgcttctcgcgtgaccggttagtactcttac

SEQ ID NO: 429812 - DNA, 51 bp, Artificial
  Synthetic oligonucleotide
gggttgtggattggatgtggactcaggacaccgcgcggagctgcggctttc

SEQ ID NO: 429813 - DNA, 55 bp, Artificial
  Synthetic oligonucleotide
gggttgttacaacatagacgaacatccattaccaggaggtattagatggagtggt

SEQ ID NO: 429814 - DNA, 56 bp, Artificial
  Synthetic oligonucleotide
gggttgttcaacaaacaagaattgacaaattgacccagggtcgtcagacctatgac

SEQ ID NO: 429815 - DNA, 55 bp, Artificial
  Synthetic oligonucleotide
gggttgttcccacaataccagactctaaaggattcgtcaaagcaactatcattga

SEQ ID NO: 429816 - DNA, 54 bp, Artificial
  Synthetic oligonucleotide
gggttgttcccacccactccacccatgcggtgttgtactctgttattacggtaa

SEQ ID NO: 429817 - DNA, 53 bp, Artificial
  Synthetic oligonucleotide
gggttgttcccaccctgagggcccacgtggcgtagtactctggtattacggta

SEQ ID NO: 429818 - DNA, 55 bp, Artificial
  Synthetic oligonucleotide
gggttgttcccactcacagggcccaagtggcgtagaactctggtatcacggtacc

SEQ ID NO: 429819 - DNA, 53 bp, Artificial
  Synthetic oligonucleotide
gggttgttcctcactacaacaactacggtcccgcaaacggtgctaattcaccc

SEQ ID NO: 429820 - DNA, 50 bp, Artificial
  Synthetic oligonucleotide
gggttgttgcactccttctgggatgattcctcattaaatagtctaagccg

SEQ ID NO: 429821 - DNA, 55 bp, Artificial
  Synthetic oligonucleotide
gggttgttgcgacaactgtgttcccaattgaactgcttcttggggataaggtttc

SEQ ID NO: 429822 - DNA, 55 bp, Artificial
  Synthetic oligonucleotide
gggttgttgtagtatacgcagcgaaggatgaacttttagaaagctctaaacttct

SEQ ID NO: 429823 - DNA, 55 bp, Artificial
  Synthetic oligonucleotide
gggttgttgttccggctggtccgatggctgacttctcccgtgtttggcctagctt

SEQ ID NO: 429824 - DNA, 55 bp, Artificial
  Synthetic oligonucleotide
gggttgtttgcgcatatcaatcgtggcgttgggcatgtacgtatgaacgttgatt

SEQ ID NO: 429825 - DNA, 55 bp, Artificial
  Synthetic oligonucleotide
gggtttaaatagccgtactatttgtcgttgctagatgttgcagtgtgggcctccc

SEQ ID NO: 429826 - DNA, 56 bp, Artificial
  Synthetic oligonucleotide
gggtttaagaatatatatgattggacctttctaccaacagattttactacaactga

SEQ ID NO: 429827 - DNA, 53 bp, Artificial
  Synthetic oligonucleotide
gggtttaatttctattgggccgtttagtccaaacctggttgttgacgcgcatc

SEQ ID NO: 429828 - DNA, 55 bp, Artificial
  Synthetic oligonucleotide
gggtttacaatccattaaggacattgttggaaaagcatgtgtggcggaaaaggac

SEQ ID NO: 429829 - DNA, 55 bp, Artificial
  Synthetic oligonucleotide
gggtttacacaaagcccagacggagttctgacactaaattgtgttgctcccctta

SEQ ID NO: 429830 - DNA, 55 bp, Artificial
  Synthetic oligonucleotide
gggtttaccaaatacttgctatatatgctacggtggcaggttccttgtcactggc

SEQ ID NO: 429831 - DNA, 55 bp, Artificial
  Synthetic oligonucleotide
gggtttaccaaattcttgccatttatgctacagttgcaggttctctgtcattggc

SEQ ID NO: 429832 - DNA, 50 bp, Artificial
  Synthetic oligonucleotide
gggtttacggacccactggtggggaaggtaaatcccagtttgccaagtac

SEQ ID NO: 429833 - DNA, 57 bp, Artificial
  Synthetic oligonucleotide
gggtttactgcccttcagatggggagacaagatgggtaattctagggtgacacgtga

SEQ ID NO: 429834 - DNA, 60 bp, Artificial
  Synthetic oligonucleotide
gggtttactggtagttctatctgctatgggttgtattacaaagatgagttgatgtgccta

SEQ ID NO: 429835 - DNA, 55 bp, Artificial
  Synthetic oligonucleotide
gggtttagacggcaacatagaagcgtgtaaacgaaaactatatactatagtcagc

SEQ ID NO: 429836 - DNA, 50 bp, Artificial
  Synthetic oligonucleotide
gggtttaggcgactatttcttttcgaggtaccccggcaactcaatagggg

SEQ ID NO: 429837 - DNA, 52 bp, Artificial
  Synthetic oligonucleotide
gggtttaggtaacaggacacaagcgattgaaatacttatcggggtttgctgt

SEQ ID NO: 429838 - DNA, 54 bp, Artificial
  Synthetic oligonucleotide
gggtttagtacaatacgtagtggagtatattactagacgacgggtatggacacg

SEQ ID NO: 429839 - DNA, 50 bp, Artificial
  Synthetic oligonucleotide
gggtttatgaacccgcctacctcgggggccgggaccctagggtgactgtc

SEQ ID NO: 429840 - DNA, 56 bp, Artificial
  Synthetic oligonucleotide
gggtttatggaggggaccttccaccagagccaatttcactcttgatttcaggctta

SEQ ID NO: 429841 - DNA, 53 bp, Artificial
  Synthetic oligonucleotide
gggtttattggatacgggaggggagaatagtgaagtatgaaaatgtccctaaa

SEQ ID NO: 429842 - DNA, 60 bp, Artificial
  Synthetic oligonucleotide
gggtttatttccatgcgatgtcacaggaataccaccatgtactgtagcacggtcaccaag

SEQ ID NO: 429843 - DNA, 51 bp, Artificial
  Synthetic oligonucleotide
gggtttcaaaagtgatgagcattgatttaaacaggctattggcattaaata

SEQ ID NO: 429844 - DNA, 50 bp, Artificial
  Synthetic oligonucleotide
gggtttcaatctaatcgtacctacccggtacccttaccgcgactgcggtt

SEQ ID NO: 429845 - DNA, 55 bp, Artificial
  Synthetic oligonucleotide
gggtttcaatggaggttcttcaagccgtatgtgaaacctccttgcccactcatgt

SEQ ID NO: 429846 - DNA, 53 bp, Artificial
  Synthetic oligonucleotide
gggtttcaattactaactttgggtatgggaacactactatcctttgcactagg

SEQ ID NO: 429847 - DNA, 59 bp, Artificial
  Synthetic oligonucleotide
gggtttcaccaccctgttctgccatacaagaaatagtgagtgcaggcattgaaccaaac

SEQ ID NO: 429848 - DNA, 55 bp, Artificial
  Synthetic oligonucleotide
gggtttcaccccgaggactatggtgtgccctgatgcactgaaccgtaggtttcac

SEQ ID NO: 429849 - DNA, 54 bp, Artificial
  Synthetic oligonucleotide
gggtttcacccctagcggaccaacgacagtccctgcgttgtactccacacctac

SEQ ID NO: 429850 - DNA, 60 bp, Artificial
  Synthetic oligonucleotide
gggtttcacttggacaggagtcactcagaatgggggaagcaatgcttgcaagagaggacc

SEQ ID NO: 429851 - DNA, 60 bp, Artificial
  Synthetic oligonucleotide
gggtttcagcagttggcagcggaggccgcgtaatgaatgatggggtaccagtgctcaaat

SEQ ID NO: 429852 - DNA, 59 bp, Artificial
  Synthetic oligonucleotide
gggtttcatcgcctggtgcgggcgctcaatgctgctaacacgttcctgaaggaagaaag

SEQ ID NO: 429853 - DNA, 56 bp, Artificial
  Synthetic oligonucleotide
gggtttcattctccatatcatgctttttactcgttgcactacttttaaccttcatt

SEQ ID NO: 429854 - DNA, 52 bp, Artificial
  Synthetic oligonucleotide
gggtttcccgctccttggactggtctaaagttaccctcgatgggcgcccgct

SEQ ID NO: 429855 - DNA, 54 bp, Artificial
  Synthetic oligonucleotide
gggtttcccgtatttcgtgtttgattgccagtccctctgggccccaatgaattc

SEQ ID NO: 429856 - DNA, 55 bp, Artificial
  Synthetic oligonucleotide
gggtttcccttataaccccaatatcacattatggctgcaaccaagatgaatcccg

SEQ ID NO: 429857 - DNA, 59 bp, Artificial
  Synthetic oligonucleotide
gggtttccgagctgaagaatttcgttaaaatgcacactcatttgaatcagtgctcggga

SEQ ID NO: 429858 - DNA, 55 bp, Artificial
  Synthetic oligonucleotide
gggtttccgcgttgaggcccactaccaggacgataggaatgccgagttagtcgcc

SEQ ID NO: 429859 - DNA, 55 bp, Artificial
  Synthetic oligonucleotide
gggtttcctgaccgaccaaatccaagcgagcttaatccaagtacctcgtctcaaa

SEQ ID NO: 429860 - DNA, 52 bp, Artificial
  Synthetic oligonucleotide
gggtttcgcgcgaatcctgtaggaggttcgagtccttccccggggcaaactg

SEQ ID NO: 429861 - DNA, 55 bp, Artificial
  Synthetic oligonucleotide
gggtttcgtaatgggcacaataggttttctagtgtttgtgagtaatcagacagac

SEQ ID NO: 429862 - DNA, 51 bp, Artificial
  Synthetic oligonucleotide
gggtttcgttccccggtcgcgtccacgttcggtctaaagacgccattccaa

SEQ ID NO: 429863 - DNA, 55 bp, Artificial
  Synthetic oligonucleotide
gggtttctaggagcagcaggaagcactatgggcgcagcatcagtggtgctgacgg

SEQ ID NO: 429864 - DNA, 57 bp, Artificial
  Synthetic oligonucleotide
gggtttctcgtaagggatcccagcctgcttctaagcaggacgtgaaacaagttgtca

SEQ ID NO: 429865 - DNA, 55 bp, Artificial
  Synthetic oligonucleotide
gggtttcttcacctgggacatttcagactcaacaggcaatcatgtccctggagga

SEQ ID NO: 429866 - DNA, 53 bp, Artificial
  Synthetic oligonucleotide
gggtttcttcgtaaaattctcgcgtggcggtatttatagggtcaccattatca

SEQ ID NO: 429867 - DNA, 55 bp, Artificial
  Synthetic oligonucleotide
gggtttgaaatggcatttgttcccacgaagaccgcacttactttctcggctgaag

SEQ ID NO: 429868 - DNA, 55 bp, Artificial
  Synthetic oligonucleotide
gggtttgagaacccagcctatgaaggtgacagctttactgtaagtgatgaggccc

SEQ ID NO: 429869 - DNA, 55 bp, Artificial
  Synthetic oligonucleotide
gggtttgagccattgattagaaagttctttgagcgaccgtttaaaagtgcactag

SEQ ID NO: 429870 - DNA, 55 bp, Artificial
  Synthetic oligonucleotide
gggtttgataatcccatgtttgactggtagtgatcagttgtgggcaacagtgtac

SEQ ID NO: 429871 - DNA, 55 bp, Artificial
  Synthetic oligonucleotide
gggtttgatgggagagagagtgtttgaatgaatgacagtaagtgttctttgggta

SEQ ID NO: 429872 - DNA, 55 bp, Artificial
  Synthetic oligonucleotide
gggtttgattctaggtaatcccaaatgcgatctttatctgaatggcagagagtgg

SEQ ID NO: 429873 - DNA, 55 bp, Artificial
  Synthetic oligonucleotide
gggtttgccaacttgccagaagggaaagtcaaatacacccgccgagggtgcagga

SEQ ID NO: 429874 - DNA, 60 bp, Artificial
  Synthetic oligonucleotide
gggtttgctacaacaccaacatgtgagtatcaaggcaacacagtgtctggattccaacgc

SEQ ID NO: 429875 - DNA, 55 bp, Artificial
  Synthetic oligonucleotide
gggtttggacaaacccctggtagaagcagcgatcgtcctcctcagccttagggga

SEQ ID NO: 429876 - DNA, 52 bp, Artificial
  Synthetic oligonucleotide
gggtttggagaccgcccgtcgaaacaaacgtactctacgtggtgtaagcgag

SEQ ID NO: 429877 - DNA, 55 bp, Artificial
  Synthetic oligonucleotide
gggtttggaggagctggatgcgtgggtcaagaaagggaagtttgaccggatttgc

SEQ ID NO: 429878 - DNA, 56 bp, Artificial
  Synthetic oligonucleotide
gggtttggatagaggaaaacccatggatggaggacaaaactcatgtgtccagttgg

SEQ ID NO: 429879 - DNA, 55 bp, Artificial
  Synthetic oligonucleotide
gggtttggattgagattgtacgatgtgaacggtgaaaacgtggtactacacaggt

SEQ ID NO: 429880 - DNA, 60 bp, Artificial
  Synthetic oligonucleotide
gggtttggctgagcagcccttgtcatatcctattgaggctaggcatcttacagatctaaa

SEQ ID NO: 429881 - DNA, 59 bp, Artificial
  Synthetic oligonucleotide
gggtttgggactcatatacggtacggagtgcacgatcactcattgggcaatgttcggag

SEQ ID NO: 429882 - DNA, 59 bp, Artificial
  Synthetic oligonucleotide
gggtttggtaatatgaattttgcagctttgcaagccagcaaatcaggagcccctttgga

SEQ ID NO: 429883 - DNA, 55 bp, Artificial
  Synthetic oligonucleotide
gggtttggtgccatggattttaggaccctgcagcaaaacaggtctgcagtgcctt

SEQ ID NO: 429884 - DNA, 55 bp, Artificial
  Synthetic oligonucleotide
gggtttgtacccacccacagggcccactgggcgctagcactctggcactgaggta

SEQ ID NO: 429885 - DNA, 53 bp, Artificial
  Synthetic oligonucleotide
gggtttgtcacagtttgtcaagcctagagacctgtagggtggagtttttaaag

SEQ ID NO: 429886 - DNA, 56 bp, Artificial
  Synthetic oligonucleotide
gggtttgtgaaacggagtcccctggatctagggaagcttcaggtagctggtgtagc

SEQ ID NO: 429887 - DNA, 60 bp, Artificial
  Synthetic oligonucleotide
gggtttgtgcatatgcgagtggaaagtttgatccaccaaagggcacaattgatgcagagc

SEQ ID NO: 429888 - DNA, 55 bp, Artificial
  Synthetic oligonucleotide
gggtttgtgggagaaaatccttctcaaacatctactgcaaaacagctgaacacac

SEQ ID NO: 429889 - DNA, 56 bp, Artificial
  Synthetic oligonucleotide
gggtttgttccgctcagcaggttgcagtctccacctcggctaacccagcccctgtt

SEQ ID NO: 429890 - DNA, 57 bp, Artificial
  Synthetic oligonucleotide
gggtttgtttcgtactcatctggttctcagcactcctcgcgatggaaacctaaggtg

SEQ ID NO: 429891 - DNA, 57 bp, Artificial
  Synthetic oligonucleotide
gggttttacaaacctgtgatggcgtcgaagaccctcgaagctatcctctcctttgca

SEQ ID NO: 429892 - DNA, 56 bp, Artificial
  Synthetic oligonucleotide
gggttttatgttttaaaaccctcactatataatggagccatgtcaaacttagcaga

SEQ ID NO: 429893 - DNA, 54 bp, Artificial
  Synthetic oligonucleotide
gggttttattctcattgggtacactccttaacaggatatacatcccgtacccaa

SEQ ID NO: 429894 - DNA, 54 bp, Artificial
  Synthetic oligonucleotide
gggttttccaaagtaccactgaaggaccagtcggcagtactaggtgactccctc

SEQ ID NO: 429895 - DNA, 54 bp, Artificial
  Synthetic oligonucleotide
gggttttccggtcagacctcaggtgcctttaagaccaatgactttcaagggagc

SEQ ID NO: 429896 - DNA, 53 bp, Artificial
  Synthetic oligonucleotide
gggttttcctgcggcgtccccgcctctgtgtcgtggcggcagtagatcgttag

SEQ ID NO: 429897 - DNA, 59 bp, Artificial
  Synthetic oligonucleotide
gggttttcggagacaatccgcgccccaatgatggggcaggcagctgtggtccagtatct

SEQ ID NO: 429898 - DNA, 50 bp, Artificial
  Synthetic oligonucleotide
gggttttctataacagtgaatgaacttctgtgactctggctggtaaattg

SEQ ID NO: 429899 - DNA, 51 bp, Artificial
  Synthetic oligonucleotide
gggttttgcacctttttccaaagacaacggaataagaattgggtcgagagg

SEQ ID NO: 429900 - DNA, 59 bp, Artificial
  Synthetic oligonucleotide
gggttttgcttaatgcatcctggttcaactccttcctcacacatgcactgaagtagttg

SEQ ID NO: 429901 - DNA, 55 bp, Artificial
  Synthetic oligonucleotide
gggttttgggacaagcaccatacagtgaattagcacgaactggaaaagctccata

SEQ ID NO: 429902 - DNA, 50 bp, Artificial
  Synthetic oligonucleotide
gggttttgggtaatattgagcgattctctgtggaggctattatcaattcc

SEQ ID NO: 429903 - DNA, 55 bp, Artificial
  Synthetic oligonucleotide
gggttttgggtgttgcacgaacatttggtgcatcgcttactgctgcacttggtcc

SEQ ID NO: 429904 - DNA, 54 bp, Artificial
  Synthetic oligonucleotide
gggttttgtcctcgtgtgttgcgagggaaagatttcgagttcttcgaaatgtcg

SEQ ID NO: 429905 - DNA, 60 bp, Artificial
  Synthetic oligonucleotide
ggtaaaaagaggacatcactcaaacagtgcacaagacagatcctagaggtcacaatactg

SEQ ID NO: 429906 - DNA, 54 bp, Artificial
  Synthetic oligonucleotide
ggtaaaaccgaccgagacccaggagacgagtgagcccgagaaggaaactgccca

SEQ ID NO: 429907 - DNA, 52 bp, Artificial
  Synthetic oligonucleotide
ggtaaaacgctctgcggctttcggttgggattggtattttggtgtaaagtta

SEQ ID NO: 429908 - DNA, 55 bp, Artificial
  Synthetic oligonucleotide
ggtaaaactaagcaaagcactcggatgaagaaaccgttatatctgccattcgaaa

SEQ ID NO: 429909 - DNA, 55 bp, Artificial
  Synthetic oligonucleotide
ggtaaaactcgatacatatataactgcgatacggtctcgtacctatacttcgact

SEQ ID NO: 429910 - DNA, 59 bp, Artificial
  Synthetic oligonucleotide
ggtaaaactgttgtacttaacgcagaacacttgttggcatataggccagagcaaattga

SEQ ID NO: 429911 - DNA, 51 bp, Artificial
  Synthetic oligonucleotide
ggtaaaaggacgttgaaccaggtgaaatcattatttggggatctaaaaccc

SEQ ID NO: 429912 - DNA, 55 bp, Artificial
  Synthetic oligonucleotide
ggtaaaaggatatcacaatttgacatcggacaatataaaaacatgttaaatgtgg

SEQ ID NO: 429913 - DNA, 55 bp, Artificial
  Synthetic oligonucleotide
ggtaaaaggccgaaacattccattttcaatgcccggagaccgagttattatgcta

SEQ ID NO: 429914 - DNA, 60 bp, Artificial
  Synthetic oligonucleotide
ggtaaaattagattgatcacatagaatttactaatcaacaagttattcacaaatcatatc

SEQ ID NO: 429915 - DNA, 54 bp, Artificial
  Synthetic oligonucleotide
ggtaaaattagtggaggaaaagaagttcggggcagaagtagtgccaggatttca

SEQ ID NO: 429916 - DNA, 55 bp, Artificial
  Synthetic oligonucleotide
ggtaaaattcttcccaactaatcactctgcacaccttactacaactggtatgttg

SEQ ID NO: 429917 - DNA, 57 bp, Artificial
  Synthetic oligonucleotide
ggtaaaattggaatctgaaggaacttacaagatcctcactatttattcgactgtcgc

SEQ ID NO: 429918 - DNA, 55 bp, Artificial
  Synthetic oligonucleotide
ggtaaacaacattgttggactcgtctgccacaaggattcttaaacagtcctgctc

SEQ ID NO: 429919 - DNA, 55 bp, Artificial
  Synthetic oligonucleotide
ggtaaacaacggggacgactgcgtgcttatatgtgagtctggagattgccgcgct

SEQ ID NO: 429920 - DNA, 60 bp, Artificial
  Synthetic oligonucleotide
ggtaaacacaccatcgaactgattcaggcagaagcgagagatttatttcaatatgactca

SEQ ID NO: 429921 - DNA, 54 bp, Artificial
  Synthetic oligonucleotide
ggtaaacacttggcagggattaaacacttgggcagctcggttaaggttaggcac

SEQ ID NO: 429922 - DNA, 56 bp, Artificial
  Synthetic oligonucleotide
ggtaaacagggtagtgtgtggagttgtcccccagaccctacatattttgatggata

SEQ ID NO: 429923 - DNA, 58 bp, Artificial
  Synthetic oligonucleotide
ggtaaacattttacatcagagtatgttttagctagcaccaaccactctattctaaatc

SEQ ID NO: 429924 - DNA, 55 bp, Artificial
  Synthetic oligonucleotide
ggtaaaccaggagattgatgaggccatagagcgggccatggaagatcgtggtgag

SEQ ID NO: 429925 - DNA, 55 bp, Artificial
  Synthetic oligonucleotide
ggtaaacccattgacactgacagcagcggtgttgatgctagtggctcactatgcc

SEQ ID NO: 429926 - DNA, 51 bp, Artificial
  Synthetic oligonucleotide
ggtaaacgacatatacgaagttgatcaagctggtgaaggggtatacctttt

SEQ ID NO: 429927 - DNA, 54 bp, Artificial
  Synthetic oligonucleotide
ggtaaacgccttgcggacagcccgaacttccataaacccttatctctcacctgg

SEQ ID NO: 429928 - DNA, 55 bp, Artificial
  Synthetic oligonucleotide
ggtaaacgcgtggaatctttgggtccatcgccgactgcaacgtacagaagcagtc

SEQ ID NO: 429929 - DNA, 57 bp, Artificial
  Synthetic oligonucleotide
ggtaaacgggaacaatgttatgctcgtcatctttttgcaagagctggccaaatgggg

SEQ ID NO: 429930 - DNA, 55 bp, Artificial
  Synthetic oligonucleotide
ggtaaacggtctgtgagtggaagaatactgcaggaagaggaaaacgagtatgtga

SEQ ID NO: 429931 - DNA, 49 bp, Artificial
  Synthetic oligonucleotide
ggtaaacgtaacctacggacttgggacccggcaactgggaataagaacg

SEQ ID NO: 429932 - DNA, 59 bp, Artificial
  Synthetic oligonucleotide
ggtaaacgtcgttctgacgcttctgatgaacgtctaattcaagactttcatgaattcga

SEQ ID NO: 429933 - DNA, 55 bp, Artificial
  Synthetic oligonucleotide
ggtaaacgtgcgactattcgaacccggtcaggagcacaggttggatcccaagtac

SEQ ID NO: 429934 - DNA, 51 bp, Artificial
  Synthetic oligonucleotide
ggtaaactaggggttctggcccatttgtttgatttactttcgctagggacc

SEQ ID NO: 429935 - DNA, 59 bp, Artificial
  Synthetic oligonucleotide
ggtaaactgctactggcatactccccacctggtgcatcggtgccaaagagtcgtaagga

SEQ ID NO: 429936 - DNA, 55 bp, Artificial
  Synthetic oligonucleotide
ggtaaacttcttggacacaccggatggataccaggttttatacggcgggcagaca

SEQ ID NO: 429937 - DNA, 55 bp, Artificial
  Synthetic oligonucleotide
ggtaaagaaagagagctcagtgtaggtagaatgtttgctatgcaaccaggtatgt

SEQ ID NO: 429938 - DNA, 55 bp, Artificial
  Synthetic oligonucleotide
ggtaaagacattgattttcttgtagatactggtgctgaacattcggtagtaaccg

SEQ ID NO: 429939 - DNA, 49 bp, Artificial
  Synthetic oligonucleotide
ggtaaagaccggttttcatacaggacgtttagaaattttctttgacccg

SEQ ID NO: 429940 - DNA, 59 bp, Artificial
  Synthetic oligonucleotide
ggtaaagagaggacatcatgcggtgcatttactcatgcagaaagtcctagatctgcaca

SEQ ID NO: 429941 - DNA, 54 bp, Artificial
  Synthetic oligonucleotide
ggtaaagagataggagctgtaaatttggacttccctagtggaacttctgggtcc

SEQ ID NO: 429942 - DNA, 55 bp, Artificial
  Synthetic oligonucleotide
ggtaaagaggttgttggattcgtgcgcaaaggggttgacatcatccatagccatg

SEQ ID NO: 429943 - DNA, 55 bp, Artificial
  Synthetic oligonucleotide
ggtaaagatagtgcaaccctgtggtaatagttcagacagtagtgactgccctgtc

SEQ ID NO: 429944 - DNA, 54 bp, Artificial
  Synthetic oligonucleotide
ggtaaagatatctatacttacttaataggtgaaaagattaattatccgggtctc

SEQ ID NO: 429945 - DNA, 55 bp, Artificial
  Synthetic oligonucleotide
ggtaaagccagcaaattgacactagctcaacgcaagcgtgcttgctactgcagtg

SEQ ID NO: 429946 - DNA, 55 bp, Artificial
  Synthetic oligonucleotide
ggtaaagcggccatccgtctaatattaccggatggccgcgcgaaatttcgtggtg

SEQ ID NO: 429947 - DNA, 56 bp, Artificial
  Synthetic oligonucleotide
ggtaaagcgtatgaaagcgcctgaacccgtagttatcgatggcgtcctgtggaaac

SEQ ID NO: 429948 - DNA, 52 bp, Artificial
  Synthetic oligonucleotide
ggtaaaggtagctgtcgtcggttagccacgtagaacggtaaacgtggaggcc

SEQ ID NO: 429949 - DNA, 60 bp, Artificial
  Synthetic oligonucleotide
ggtaaaggtcactatagagttgtgaagtactcatcagttgcgaatcacgcagaccgagtc

SEQ ID NO: 429950 - DNA, 55 bp, Artificial
  Synthetic oligonucleotide
ggtaaagtataggaccaggtgtcgcatgtcgggcgacattaacacaggactgggt

SEQ ID NO: 429951 - DNA, 60 bp, Artificial
  Synthetic oligonucleotide
ggtaaagtcatgtgtgtcagtgatgttacgcgtggaactgggatgacccatcgagtgggt

SEQ ID NO: 429952 - DNA, 55 bp, Artificial
  Synthetic oligonucleotide
ggtaaagtcctcttaataccctcttattctgttctgagacgcagatggcttgatc

SEQ ID NO: 429953 - DNA, 58 bp, Artificial
  Synthetic oligonucleotide
ggtaaagtggatagaccaaagaaaatattcagacaattgtatggagtgaatccattgg

SEQ ID NO: 429954 - DNA, 53 bp, Artificial
  Synthetic oligonucleotide
ggtaaagttaactgacaactcaggtaacccaactaacaaagaggcagtcaaaa

SEQ ID NO: 429955 - DNA, 53 bp, Artificial
  Synthetic oligonucleotide
ggtaaagttatacatttaccgttggacaaggtaagattaccgacatcctaata

SEQ ID NO: 429956 - DNA, 53 bp, Artificial
  Synthetic oligonucleotide
ggtaaagttgccggaccccaattatttcgctattactagtcccatctataacc

SEQ ID NO: 429957 - DNA, 51 bp, Artificial
  Synthetic oligonucleotide
ggtaaagtttaccattcgttgtctaaagaactgttgatggcaatcgaagct

SEQ ID NO: 429958 - DNA, 58 bp, Artificial
  Synthetic oligonucleotide
ggtaaatagacaggtcatagttgacaataataactggtctggttattctggcattttc

SEQ ID NO: 429959 - DNA, 52 bp, Artificial
  Synthetic oligonucleotide
ggtaaatatccgaggcctcctccctacgttctcccgaagccccgcttatccc

SEQ ID NO: 429960 - DNA, 60 bp, Artificial
  Synthetic oligonucleotide
ggtaaatatgagaatcataccgagaatgcattgatgttatacatggcgtgtacccacgcc

SEQ ID NO: 429961 - DNA, 59 bp, Artificial
  Synthetic oligonucleotide
ggtaaatattatcagccctggcatacaacctggataccgcctcggctcggccttgctct

SEQ ID NO: 429962 - DNA, 53 bp, Artificial
  Synthetic oligonucleotide
ggtaaatcgccggggactgattggaaggcggaggcccgtaagtgggagtctcg

SEQ ID NO: 429963 - DNA, 56 bp, Artificial
  Synthetic oligonucleotide
ggtaaatctgatgagggttaatgactggttggtcctaagtttctcgagatttacca

SEQ ID NO: 429964 - DNA, 55 bp, Artificial
  Synthetic oligonucleotide
ggtaaatgaagcgaatatgctgattgattttgtcctggctgatacaggcaaaggg

SEQ ID NO: 429965 - DNA, 53 bp, Artificial
  Synthetic oligonucleotide
ggtaaatgggacaccaatacccccaaagcccccaattgagaccccgatatatc

SEQ ID NO: 429966 - DNA, 54 bp, Artificial
  Synthetic oligonucleotide
ggtaaatgtaacattgccggtaggcttttgggaaacccagaatgtgaattacta

SEQ ID NO: 429967 - DNA, 56 bp, Artificial
  Synthetic oligonucleotide
ggtaaattctactaagcagacctgttcatttactaccgtgcttccgatggagaacc

SEQ ID NO: 429968 - DNA, 58 bp, Artificial
  Synthetic oligonucleotide
ggtaaattgagcagtatttcaacattgttgttggagttataatgttcaagagcgggtc

SEQ ID NO: 429969 - DNA, 57 bp, Artificial
  Synthetic oligonucleotide
ggtaaattgctagtgtcctatgcacctcctggtgcggaagcccctaaaagccgcaaa

SEQ ID NO: 429970 - DNA, 55 bp, Artificial
  Synthetic oligonucleotide
ggtaacaacaccttggtcaatgatcttgcaaagcgtcgcctgtacgacacagcgg

SEQ ID NO: 429971 - DNA, 54 bp, Artificial
  Synthetic oligonucleotide
ggtaacaacataaccgttgtgcgtgacgggaaatccaataccgctaggtttcta

SEQ ID NO: 429972 - DNA, 55 bp, Artificial
  Synthetic oligonucleotide
ggtaacaaccctatgatgtagctaaggagtccaggttgggccgattccaagtcct

SEQ ID NO: 429973 - DNA, 55 bp, Artificial
  Synthetic oligonucleotide
ggtaacaacgtatccaataacgattacaatgggctcagtcaaatgagacgcgcag

SEQ ID NO: 429974 - DNA, 59 bp, Artificial
  Synthetic oligonucleotide
ggtaacaagatggaatctggacatagccggattgctgttgcagtgtgtcccaacccttt

SEQ ID NO: 429975 - DNA, 60 bp, Artificial
  Synthetic oligonucleotide
ggtaacaaggcaaaccatgctacatcaccaaacagcggaagagcagaaatttacactgtc

SEQ ID NO: 429976 - DNA, 55 bp, Artificial
  Synthetic oligonucleotide
ggtaacaaggcgccaaactcatatttgcctccagagggtgcatgaaagtgatcct

SEQ ID NO: 429977 - DNA, 60 bp, Artificial
  Synthetic oligonucleotide
ggtaacacaatggcacaacaccaatgtcattgagtatatagagaggccagatagtgatca

SEQ ID NO: 429978 - DNA, 60 bp, Artificial
  Synthetic oligonucleotide
ggtaacacacgcgatcatgtaaatttagtattgaatagagatgtttcatttcaggatcta

SEQ ID NO: 429979 - DNA, 56 bp, Artificial
  Synthetic oligonucleotide
ggtaacacattggtcacgttaagtgtcctaagttacgtgtatgatttatccaatcc

SEQ ID NO: 429980 - DNA, 56 bp, Artificial
  Synthetic oligonucleotide
ggtaacaccctgcatgaacctgatgagtacgtgacacaggctgctctccactacgc

SEQ ID NO: 429981 - DNA, 54 bp, Artificial
  Synthetic oligonucleotide
ggtaacaccggcggatattggtgagttgttaagacaaaaaccattcaacgccga

SEQ ID NO: 429982 - DNA, 57 bp, Artificial
  Synthetic oligonucleotide
ggtaacacctaggtgtctggtggattacgcttacaggttgtggcactacccctgcac

SEQ ID NO: 429983 - DNA, 53 bp, Artificial
  Synthetic oligonucleotide
ggtaacacggttgcttgcccgcgtgtgcttccgggttcggtttcgaccgttca

SEQ ID NO: 429984 - DNA, 55 bp, Artificial
  Synthetic oligonucleotide
ggtaacacgttaagcgaaagtacgtatatgagtgcgttattgcagttgttgatga

SEQ ID NO: 429985 - DNA, 55 bp, Artificial
  Synthetic oligonucleotide
ggtaacactgaatggcgtgactgggattcacggctcagatataccacgttccgcg

SEQ ID NO: 429986 - DNA, 53 bp, Artificial
  Synthetic oligonucleotide
ggtaacagaatggtttcaaagggaggaaaggataaagtgatcattactgatta

SEQ ID NO: 429987 - DNA, 57 bp, Artificial
  Synthetic oligonucleotide
ggtaacagatatgattatggtcgtacagactaaacgattagtaaaagagtatgcgtt

SEQ ID NO: 429988 - DNA, 60 bp, Artificial
  Synthetic oligonucleotide
ggtaacaggggaaatgggtgcgagagcgtcagtgttgaggggagataagctggatacatg

SEQ ID NO: 429989 - DNA, 55 bp, Artificial
  Synthetic oligonucleotide
ggtaacaggggatacgccagaatggatacaacgattaactgttatacaacatgga

SEQ ID NO: 429990 - DNA, 60 bp, Artificial
  Synthetic oligonucleotide
ggtaacataatgacagcaccatcactacacccagcagaagccatgcttacgagaaacaaa

SEQ ID NO: 429991 - DNA, 51 bp, Artificial
  Synthetic oligonucleotide
ggtaacattcaactttggtatagattgtgcacgactggagattttttggga

SEQ ID NO: 429992 - DNA, 54 bp, Artificial
  Synthetic oligonucleotide
ggtaacattcatgtaggttttaggaggtccggctatctgaggcacgtacacagc

SEQ ID NO: 429993 - DNA, 59 bp, Artificial
  Synthetic oligonucleotide
ggtaacattgacatgaaacccactgagaacatgcttgtggcagtagaccactatgctgg

SEQ ID NO: 429994 - DNA, 53 bp, Artificial
  Synthetic oligonucleotide
ggtaaccacaaacggacagggaaaccgcaaaatttgcattgccgaccacaaac

SEQ ID NO: 429995 - DNA, 53 bp, Artificial
  Synthetic oligonucleotide
ggtaaccacgaggtgctaattgacccgttaccaaacgtactgcccatataaaa

SEQ ID NO: 429996 - DNA, 51 bp, Artificial
  Synthetic oligonucleotide
ggtaaccactcggggtccacatccgctttaactcttgacccttaaacccga

SEQ ID NO: 429997 - DNA, 58 bp, Artificial
  Synthetic oligonucleotide
ggtaaccagacgtgaagggacgtacgagcaagcgagttgcatgctactgatgggtgat

SEQ ID NO: 429998 - DNA, 57 bp, Artificial
  Synthetic oligonucleotide
ggtaacccaccctcctggcagatgaggattctgctactcgcaaccgtgttcatattc

SEQ ID NO: 429999 - DNA, 58 bp, Artificial
  Synthetic oligonucleotide
ggtaaccccctcgtccgagtgcgccttgcattagcgcgacggtagaccatccgcttgc

SEQ ID NO: 430000 - DNA, 53 bp, Artificial
  Synthetic oligonucleotide
ggtaaccggctaagtgaccggttggaaagcgtgccatttccacccttggcaaa

SEQ ID NO: 430001 - DNA, 52 bp, Artificial
  Synthetic oligonucleotide
ggtaaccggctaagtgaccggttggagagcgtgcctttcccacccctggtaa

SEQ ID NO: 430002 - DNA, 52 bp, Artificial
  Synthetic oligonucleotide
ggtaaccgtaaacacaaatataaatagagaacatggcggcagtttatgtagt

SEQ ID NO: 430003 - DNA, 55 bp, Artificial
  Synthetic oligonucleotide
ggtaacctgcaggccagtaccggctacgtgtcaggcgatgcgttcctagagttcc

SEQ ID NO: 430004 - DNA, 59 bp, Artificial
  Synthetic oligonucleotide
ggtaacctggcgatatcaccgtctctcaaggatcggttctacataagacacgtgttcaa

SEQ ID NO: 430005 - DNA, 60 bp, Artificial
  Synthetic oligonucleotide
ggtaaccttggcattagaacaatggcaagtgaattcttgactaatcttgagtatatatct

SEQ ID NO: 430006 - DNA, 55 bp, Artificial
  Synthetic oligonucleotide
ggtaacgacaaggcagcgtatcacaatgagactaaccaattgggcttcatttcgc

SEQ ID NO: 430007 - DNA, 56 bp, Artificial
  Synthetic oligonucleotide
ggtaacgacctgattcgggtcgtaaacttcgtgaagtcggcacgcatcggctacac

SEQ ID NO: 430008 - DNA, 55 bp, Artificial
  Synthetic oligonucleotide
ggtaacgcaaagttgcgctatcaggattcggctggtaacctgcaggaagtacctc

SEQ ID NO: 430009 - DNA, 58 bp, Artificial
  Synthetic oligonucleotide
ggtaacggagtagagtggagaaaatgaaagtaatgggaccgcggactctgctgctgta

SEQ ID NO: 430010 - DNA, 58 bp, Artificial
  Synthetic oligonucleotide
ggtaacggatttactgctggagtattgtaatgccttagcaagcacgctagacgtaaac

SEQ ID NO: 430011 - DNA, 55 bp, Artificial
  Synthetic oligonucleotide
ggtaacgggttctgtcgctttcggagctgtagacttgcaatctcgtttgttccgt

SEQ ID NO: 430012 - DNA, 55 bp, Artificial
  Synthetic oligonucleotide
ggtaacggtaacgggaggcccgtcaggatgcaaggaggctgctatcgttaagaga

SEQ ID NO: 430013 - DNA, 55 bp, Artificial
  Synthetic oligonucleotide
ggtaacgtggcaacaaccagcgagaatactgaaaggcacactgcacgggacgtca

SEQ ID NO: 430014 - DNA, 55 bp, Artificial
  Synthetic oligonucleotide
ggtaacgttggtacaacggtagagaacacggagagacacaccaccgaggacgtga

SEQ ID NO: 430015 - DNA, 55 bp, Artificial
  Synthetic oligonucleotide
ggtaacgttttcttcctacttttattcagtctcacacacttcccaccagtccagc

SEQ ID NO: 430016 - DNA, 59 bp, Artificial
  Synthetic oligonucleotide
ggtaactactaccaacccactaataaggcatgaaaacagaatggtgctggccagccata

SEQ ID NO: 430017 - DNA, 60 bp, Artificial
  Synthetic oligonucleotide
ggtaactattcgcaacatgggccattgctctccactccaaagttgtatggagtgatgaag

SEQ ID NO: 430018 - DNA, 54 bp, Artificial
  Synthetic oligonucleotide
ggtaactcccctgtgtttaactataacaaggcaaccaagaggcttacagtcctc

SEQ ID NO: 430019 - DNA, 58 bp, Artificial
  Synthetic oligonucleotide
ggtaactctctagcatccagtaactttgtcaatgtcgttagtaacttccacgattaca

SEQ ID NO: 430020 - DNA, 52 bp, Artificial
  Synthetic oligonucleotide
ggtaactgaacagacgttggggggaagaaaggttaaggtcggcacatcaccg

SEQ ID NO: 430021 - DNA, 54 bp, Artificial
  Synthetic oligonucleotide
ggtaactgcgttaaaatgctaactccccataccggtactgggttggctattaca

SEQ ID NO: 430022 - DNA, 55 bp, Artificial
  Synthetic oligonucleotide
ggtaactgctacgtcttaaatgatggacgtactacgttactacttgaggcaggta

SEQ ID NO: 430023 - DNA, 55 bp, Artificial
  Synthetic oligonucleotide
ggtaactggcctcgtgccgggtgtggtatctgttcgccactcgacagatactgct

SEQ ID NO: 430024 - DNA, 56 bp, Artificial
  Synthetic oligonucleotide
ggtaactggttagtcgtttattgtcattggtggcctgacggttcaacgacgataca

SEQ ID NO: 430025 - DNA, 59 bp, Artificial
  Synthetic oligonucleotide
ggtaactgtgaagcttcaccgggaagcgcttgcaatccaactggatgaagtaggttcca

SEQ ID NO: 430026 - DNA, 55 bp, Artificial
  Synthetic oligonucleotide
ggtaacttcttccactttggcctatgttatattagctccaattgatattccctgg

SEQ ID NO: 430027 - DNA, 53 bp, Artificial
  Synthetic oligonucleotide
ggtaactttgccagaccctaataaatttgggttacctgactctactatttaca

SEQ ID NO: 430028 - DNA, 54 bp, Artificial
  Synthetic oligonucleotide
ggtaagaaaaggctttcaattgggaaagggcctcttcctttgttaatgagcatc

SEQ ID NO: 430029 - DNA, 60 bp, Artificial
  Synthetic oligonucleotide
ggtaagaaaatgggagacagggagaacgcatgcatggaacgtatggaagaggtggacaga

SEQ ID NO: 430030 - DNA, 55 bp, Artificial
  Synthetic oligonucleotide
ggtaagaaagagaaggtgggtgatctgacacatttagctgcaatgagactatgta

SEQ ID NO: 430031 - DNA, 55 bp, Artificial
  Synthetic oligonucleotide
ggtaagaagctaaatgtttacactgatagccgctatgccttcgccacggcccatg

SEQ ID NO: 430032 - DNA, 55 bp, Artificial
  Synthetic oligonucleotide
ggtaagaagtggtacccgtacaagactagcactgactacacgaccgcagtaggtg

SEQ ID NO: 430033 - DNA, 52 bp, Artificial
  Synthetic oligonucleotide
ggtaagaatttaccaaatcgaagcaggtcttatattaagttgaaacgtttac

SEQ ID NO: 430034 - DNA, 55 bp, Artificial
  Synthetic oligonucleotide
ggtaagagagaactcaagaaccggaagatttcccgagaacgctggaggcatctcg

SEQ ID NO: 430035 - DNA, 59 bp, Artificial
  Synthetic oligonucleotide
ggtaagagattgtcgcagtttgacattggtcaatacaaaaatatgttgaatgtgttaac

SEQ ID NO: 430036 - DNA, 50 bp, Artificial
  Synthetic oligonucleotide
ggtaagagcttcctctttagtgagcgagcagtgtgggtatgtaacgaaat

SEQ ID NO: 430037 - DNA, 60 bp, Artificial
  Synthetic oligonucleotide
ggtaagaggtcctccgggatgtgctcagcacctagcttaagccaagtccatatgcccacc

SEQ ID NO: 430038 - DNA, 57 bp, Artificial
  Synthetic oligonucleotide
ggtaagatagtcgaagtgtactcgacacaatttaactttgctatagctttaggtgta

SEQ ID NO: 430039 - DNA, 60 bp, Artificial
  Synthetic oligonucleotide
ggtaagatctggatggatgagaacattaagacgaagaatcacacgaatagtgtgatgttt

SEQ ID NO: 430040 - DNA, 60 bp, Artificial
  Synthetic oligonucleotide
ggtaagatgggttgctcacgaagtggtttatatgatgcatttagagtgcttgagcgtgaa

SEQ ID NO: 430041 - DNA, 60 bp, Artificial
  Synthetic oligonucleotide
ggtaagatgttgagcatccaaggaatctcatcgaggtgtatgctccacaatacaaccagc

SEQ ID NO: 430042 - DNA, 56 bp, Artificial
  Synthetic oligonucleotide
ggtaagatttggtggtgtcttacgaacagttcgcgttaaattttatgatgcgcgac

SEQ ID NO: 430043 - DNA, 55 bp, Artificial
  Synthetic oligonucleotide
ggtaagcaactcaccaatgcggcggagcgctttgaagcaatataccctaggcaca

SEQ ID NO: 430044 - DNA, 55 bp, Artificial
  Synthetic oligonucleotide
ggtaagcccaatatcccttgtattgtgtttaggaattgtgcattacgtactgggc

SEQ ID NO: 430045 - DNA, 55 bp, Artificial
  Synthetic oligonucleotide
ggtaagcctaagggctcaagactcatcatgtatctggacctggttgaaagattct

SEQ ID NO: 430046 - DNA, 55 bp, Artificial
  Synthetic oligonucleotide
ggtaagcctagagcataaattgtaactaccgcgaataaggtcatggccacccagc

SEQ ID NO: 430047 - DNA, 54 bp, Artificial
  Synthetic oligonucleotide
ggtaagcgacaggcctagctcaatctcagctgtcgactttctccatgatcagtg

SEQ ID NO: 430048 - DNA, 55 bp, Artificial
  Synthetic oligonucleotide
ggtaagcgtgcagtaactgaggtgcagaacctatggagcaacgtggtgcatgagg

SEQ ID NO: 430049 - DNA, 57 bp, Artificial
  Synthetic oligonucleotide
ggtaagctgttagggttctcaaagatgtgtacgttggtcgacctcaccatcacaaag

SEQ ID NO: 430050 - DNA, 53 bp, Artificial
  Synthetic oligonucleotide
ggtaagcttcggaaaaattggtcgtgcgtaaagtatgcgtaaaccttgcgttc

SEQ ID NO: 430051 - DNA, 55 bp, Artificial
  Synthetic oligonucleotide
ggtaagcttcttctatgatagatctgtacccctcggacttctccgacccgcacaa

SEQ ID NO: 430052 - DNA, 55 bp, Artificial
  Synthetic oligonucleotide
ggtaaggagatgccatcgatacttgactaattttacagtcacctgataacctaac

SEQ ID NO: 430053 - DNA, 60 bp, Artificial
  Synthetic oligonucleotide
ggtaaggcaagtgcaagctgattatatgacagcaacacgagaagttgacttcacagtacc

SEQ ID NO: 430054 - DNA, 56 bp, Artificial
  Synthetic oligonucleotide
ggtaaggcgactatggtttaccgctggaaggactctaagtcctctaagaatcacac

SEQ ID NO: 430055 - DNA, 58 bp, Artificial
  Synthetic oligonucleotide
ggtaaggctgacaagccttccctccagatccaaactctactccactcagggactacca

SEQ ID NO: 430056 - DNA, 60 bp, Artificial
  Synthetic oligonucleotide
ggtaaggctgagcggccttccctccagatacagactctcctgcactccgcgtccaccatg

SEQ ID NO: 430057 - DNA, 55 bp, Artificial
  Synthetic oligonucleotide
ggtaagggcatactcgtttctgcgtgactcaatgtatctgttcgacacgactgag

SEQ ID NO: 430058 - DNA, 55 bp, Artificial
  Synthetic oligonucleotide
ggtaaggggcttcgtgctggtcaagataaacggggttgtctttctcgagcttgac

SEQ ID NO: 430059 - DNA, 55 bp, Artificial
  Synthetic oligonucleotide
ggtaaggtagcacctttgcacaatatattaactgcattgtcatataaagcacctg

SEQ ID NO: 430060 - DNA, 55 bp, Artificial
  Synthetic oligonucleotide
ggtaaggtatatctaccaccttcaacacctgtggcaagggtacaaagcacggatg

SEQ ID NO: 430061 - DNA, 60 bp, Artificial
  Synthetic oligonucleotide
ggtaaggtctggatggatgacaacgtcgctaagagggatcacactaacatcattacttac

SEQ ID NO: 430062 - DNA, 60 bp, Artificial
  Synthetic oligonucleotide
ggtaaggtgatgtgcatatctgacgtgacccgtggtaacggtataacacatcgtgtaggc

SEQ ID NO: 430063 - DNA, 55 bp, Artificial
  Synthetic oligonucleotide
ggtaaggtggagctgccaccccttctgcttacagatgcagaggccttggtcccgg

SEQ ID NO: 430064 - DNA, 55 bp, Artificial
  Synthetic oligonucleotide
ggtaaggtgtaccttccaccatctacaccagttgccagggtccaaagtacggatg

SEQ ID NO: 430065 - DNA, 53 bp, Artificial
  Synthetic oligonucleotide
ggtaaggtgtcgggcgagcctagaggggtggcagacctctaggtgggcgggta

SEQ ID NO: 430066 - DNA, 50 bp, Artificial
  Synthetic oligonucleotide
ggtaaggtgtggatggatgaaaacatcaagacgaagaaccatacgaacac

SEQ ID NO: 430067 - DNA, 54 bp, Artificial
  Synthetic oligonucleotide
ggtaaggttgggaataatagtggtggttttagtaagtataatcgtcatcagccg

SEQ ID NO: 430068 - DNA, 53 bp, Artificial
  Synthetic oligonucleotide
ggtaagtaccacgccccaggatatggttagctcaaaaccgtcagtggttaacg

SEQ ID NO: 430069 - DNA, 54 bp, Artificial
  Synthetic oligonucleotide
ggtaagtacctcaaagttatcacgaagcacgaactgggcgttagggcacgaaag

SEQ ID NO: 430070 - DNA, 60 bp, Artificial
  Synthetic oligonucleotide
ggtaagtccagcggaaaaggcaatgattcaacatcgaggtccgacgatggctcaagtcaa

SEQ ID NO: 430071 - DNA, 58 bp, Artificial
  Synthetic oligonucleotide
ggtaagtgcggcaagtacgtactacatcttagacataatcaacttcccaagtgcggaa

SEQ ID NO: 430072 - DNA, 56 bp, Artificial
  Synthetic oligonucleotide
ggtaagttcacatcctttttgaagcgcgcgggtagcgcgaccaagaaagcactaac

SEQ ID NO: 430073 - DNA, 54 bp, Artificial
  Synthetic oligonucleotide
ggtaagtttattgatacgggcgcggttagaagttactcattcggtgcttgttgt

SEQ ID NO: 430074 - DNA, 52 bp, Artificial
  Synthetic oligonucleotide
ggtaataactttaccaaattttcgtccaaggcgagacagccgaaaacgtcta

SEQ ID NO: 430075 - DNA, 55 bp, Artificial
  Synthetic oligonucleotide
ggtaataagtatgtcaaagggaaatcggctatcaaatcagtggattgctcaaact

SEQ ID NO: 430076 - DNA, 52 bp, Artificial
  Synthetic oligonucleotide
ggtaataattggattgttccagctgaatgctctattgagagagacttaggga

SEQ ID NO: 430077 - DNA, 55 bp, Artificial
  Synthetic oligonucleotide
ggtaataccaagtgaactttatacctaggaggggctaagacgtcatagttgacgc

SEQ ID NO: 430078 - DNA, 55 bp, Artificial
  Synthetic oligonucleotide
ggtaataccataaccttctacaagcagatcacaagtatcaacaccagacttgctg

SEQ ID NO: 430079 - DNA, 52 bp, Artificial
  Synthetic oligonucleotide
ggtaatacccctctcagaagacctggtgaaggaaaccctaatggcgggccgg

SEQ ID NO: 430080 - DNA, 58 bp, Artificial
  Synthetic oligonucleotide
ggtaatactcgctgtgcttttccacgcttctctaacttctccagtcttttcatttaca

SEQ ID NO: 430081 - DNA, 55 bp, Artificial
  Synthetic oligonucleotide
ggtaatactgccctgttccagggatgcctttagctccattacgtttacccagtat

SEQ ID NO: 430082 - DNA, 55 bp, Artificial
  Synthetic oligonucleotide
ggtaatacttctactattagagatatagatttacatttggaggagttggttttac

SEQ ID NO: 430083 - DNA, 51 bp, Artificial
  Synthetic oligonucleotide
ggtaatagtattgttaaactagggggactaggttataaatggtccgaaata

SEQ ID NO: 430084 - DNA, 55 bp, Artificial
  Synthetic oligonucleotide
ggtaatagttctagctttgagcaccaagaacccctagaggaacgcatgtttatgt

SEQ ID NO: 430085 - DNA, 60 bp, Artificial
  Synthetic oligonucleotide
ggtaatatagcgacccgtgatgtcgatgtgtatttgggtgcttgttcggaatcagtgtat

SEQ ID NO: 430086 - DNA, 60 bp, Artificial
  Synthetic oligonucleotide
ggtaatatccagactcccttccagatagcttgggctgcccaatcttcattggttagcaca

SEQ ID NO: 430087 - DNA, 60 bp, Artificial
  Synthetic oligonucleotide
ggtaatatgaacaaccgcactgcagatcaattcttttacgtctcgtctgcctctttgcga

SEQ ID NO: 430088 - DNA, 57 bp, Artificial
  Synthetic oligonucleotide
ggtaatatgaacgaagaggcaaaaatccatttagagacagtagaatgggctcttaaa

SEQ ID NO: 430089 - DNA, 55 bp, Artificial
  Synthetic oligonucleotide
ggtaatatgcggacacaccagagcaggtagaaactatgcccttcacagcgaggac

SEQ ID NO: 430090 - DNA, 60 bp, Artificial
  Synthetic oligonucleotide
ggtaatcaagtctacgatgtcgtatcactaatggagggatttgcatacggagctgtccag

SEQ ID NO: 430091 - DNA, 60 bp, Artificial
  Synthetic oligonucleotide
ggtaatcagttacatggctttcaagtaaggcgaatggtgactgagttctgcgataggcta

SEQ ID NO: 430092 - DNA, 55 bp, Artificial
  Synthetic oligonucleotide
ggtaatcattgtagatgggctaactatgggtttaccaccgtgtgggctggtgatg

SEQ ID NO: 430093 - DNA, 52 bp, Artificial
  Synthetic oligonucleotide
ggtaatccctcacacaccaaactaaaaccgcctactttacgacaagtggtgg

SEQ ID NO: 430094 - DNA, 55 bp, Artificial
  Synthetic oligonucleotide
ggtaatcctaggataattgtcaggaaacccatgtcgataccttacactaagactg

SEQ ID NO: 430095 - DNA, 60 bp, Artificial
  Synthetic oligonucleotide
ggtaatcgagaagaagattacatcatagagctgatgaagttaggagcccccaaatatatg

SEQ ID NO: 430096 - DNA, 56 bp, Artificial
  Synthetic oligonucleotide
ggtaatctacaaaccgtctgaagtcactaaacacatcgtgtggtgaacgggttgtc

SEQ ID NO: 430097 - DNA, 51 bp, Artificial
  Synthetic oligonucleotide
ggtaatctacaaaccgtctgaagtcactaaacgttaacggtcgcgtttacg

SEQ ID NO: 430098 - DNA, 55 bp, Artificial
  Synthetic oligonucleotide
ggtaatgaaacgaaaacgggactctagcatacttactgatatccggacagtgacc

SEQ ID NO: 430099 - DNA, 60 bp, Artificial
  Synthetic oligonucleotide
ggtaatgactgacggccctgccaataggcaggcacagtatagaatatacaaagcaaatca

SEQ ID NO: 430100 - DNA, 56 bp, Artificial
  Synthetic oligonucleotide
ggtaatgagtggtgcaactccttaactatccggttcacgagctttggaaaacaggc

SEQ ID NO: 430101 - DNA, 55 bp, Artificial
  Synthetic oligonucleotide
ggtaatgatatactcggcgttttgtctgattatccttatcaaaactggcgaaccg

SEQ ID NO: 430102 - DNA, 55 bp, Artificial
  Synthetic oligonucleotide
ggtaatgccgattgtccattaacttcgcacatgaaggtggctgtagcgcactatg

SEQ ID NO: 430103 - DNA, 60 bp, Artificial
  Synthetic oligonucleotide
ggtaatgcggatctacgtcatcaatgacgttgaaccaagcatcattactgtacacctttg

SEQ ID NO: 430104 - DNA, 60 bp, Artificial
  Synthetic oligonucleotide
ggtaatgcggtgatacgtcatcaatgacgttataggcaacattattcgagtacactcgat

SEQ ID NO: 430105 - DNA, 55 bp, Artificial
  Synthetic oligonucleotide
ggtaatggaatcaaggcccgatagtgacatggaagacgaggaggttacagagcca

SEQ ID NO: 430106 - DNA, 57 bp, Artificial
  Synthetic oligonucleotide
ggtaatggcagaagggatcctagctgaccagattgcacccttcttccagggaaacgg

SEQ ID NO: 430107 - DNA, 56 bp, Artificial
  Synthetic oligonucleotide
ggtaatgggattgacaacagagcgggtgaaactattcttcgaatggtttctgttta

SEQ ID NO: 430108 - DNA, 55 bp, Artificial
  Synthetic oligonucleotide
ggtaatggggttccaaaatttgactacttgtgccatctagctagcaggaaagagg

SEQ ID NO: 430109 - DNA, 55 bp, Artificial
  Synthetic oligonucleotide
ggtaatggttgcttctactgtcagaggcgatgcggtgtcctcggcttgtcttagt

SEQ ID NO: 430110 - DNA, 60 bp, Artificial
  Synthetic oligonucleotide
ggtaatgtagactgcacattgaatgaacacatgagggtggctatagcgcattattcagcc

SEQ ID NO: 430111 - DNA, 55 bp, Artificial
  Synthetic oligonucleotide
ggtaatgtagcggtcggaactggatggcgatgggaaatcgacttcagtgacctgc

SEQ ID NO: 430112 - DNA, 56 bp, Artificial
  Synthetic oligonucleotide
ggtaatgtcactgactttaatttactagaccaaagaataatttggcagaattggta

SEQ ID NO: 430113 - DNA, 58 bp, Artificial
  Synthetic oligonucleotide
ggtaatgtctctgaggggtcgtcttttgggcatgttgtcttatagaacggtggtcaca

SEQ ID NO: 430114 - DNA, 55 bp, Artificial
  Synthetic oligonucleotide
ggtaatgtgagtgttggctacagacatacacacccaggagaaaatggacgaacac

SEQ ID NO: 430115 - DNA, 55 bp, Artificial
  Synthetic oligonucleotide
ggtaatgtgtttcgtccgacggcggatcaacgatctagtgctgttccaacgttgc

SEQ ID NO: 430116 - DNA, 56 bp, Artificial
  Synthetic oligonucleotide
ggtaattaagaaattgatggatttaaatcgcatgagtgtacgtcgtctagagaacc

SEQ ID NO: 430117 - DNA, 52 bp, Artificial
  Synthetic oligonucleotide
ggtaattaattgggacaccaaaggtaaatgggacaccgatacactggttccc

SEQ ID NO: 430118 - DNA, 60 bp, Artificial
  Synthetic oligonucleotide
ggtaattatgacgtggatgtatagacctggcccacatagtcttccctgtcctgctatccc

SEQ ID NO: 430119 - DNA, 54 bp, Artificial
  Synthetic oligonucleotide
ggtaattcaacggtggattcttacttcgacgggtatgaggttgcgacaactgat

SEQ ID NO: 430120 - DNA, 55 bp, Artificial
  Synthetic oligonucleotide
ggtaattcagtgtcagtacaaagcagaaaggatagatgggtattggaggctttgg

SEQ ID NO: 430121 - DNA, 55 bp, Artificial
  Synthetic oligonucleotide
ggtaattccatcaggtcagcaaactgttcttgtggtagtctgtagtgttctccaa

SEQ ID NO: 430122 - DNA, 52 bp, Artificial
  Synthetic oligonucleotide
ggtaattcccgggtggagatttgacctttagagtgtgaactttacccgctaa

SEQ ID NO: 430123 - DNA, 54 bp, Artificial
  Synthetic oligonucleotide
ggtaattctagagttactatttaactcgggttaatatatagggtaaatgagaca

SEQ ID NO: 430124 - DNA, 55 bp, Artificial
  Synthetic oligonucleotide
ggtaattgccacccgatagggatggtaatagggactcctgcttgtgacctacacc

SEQ ID NO: 430125 - DNA, 55 bp, Artificial
  Synthetic oligonucleotide
ggtaattgcgacacatatggttcaaacacatggtccgcggcgttagcattgttgg

SEQ ID NO: 430126 - DNA, 54 bp, Artificial
  Synthetic oligonucleotide
ggtaattggcccattaagaacgtaaagctttctggtttacttgtccatcgttca

SEQ ID NO: 430127 - DNA, 52 bp, Artificial
  Synthetic oligonucleotide
ggtaattgggtttggggcaggagaccggttaggttgggccacgcttacgctg

SEQ ID NO: 430128 - DNA, 53 bp, Artificial
  Synthetic oligonucleotide
ggtaattgtcgggagggtcgttctatcgggccaacccgccgtcatcccagacc

SEQ ID NO: 430129 - DNA, 58 bp, Artificial
  Synthetic oligonucleotide
ggtaatttactgcgacaagttctaaagtctcaaaagtatgaggagtcattacatgtcc

SEQ ID NO: 430130 - DNA, 55 bp, Artificial
  Synthetic oligonucleotide
ggtaatttcatatcttcacacgctttaacctctagaccctcggggatatccgtac

SEQ ID NO: 430131 - DNA, 56 bp, Artificial
  Synthetic oligonucleotide
ggtaatttccatgcctatatgcaaaaatgggcctcctctggtttaacctacgacga

SEQ ID NO: 430132 - DNA, 56 bp, Artificial
  Synthetic oligonucleotide
ggtaatttctgacgggacctctctgcactacggaatctccgattctcccgtccaaa

SEQ ID NO: 430133 - DNA, 55 bp, Artificial
  Synthetic oligonucleotide
ggtaatttgctagatgctagattgcaaatgagcacgaccggagatgtatcctcaa

SEQ ID NO: 430134 - DNA, 57 bp, Artificial
  Synthetic oligonucleotide
ggtacaaaaggtggccatggaaagcatagtaatatggggaaagactcctagatctaa

SEQ ID NO: 430135 - DNA, 54 bp, Artificial
  Synthetic oligonucleotide
ggtacaaacagcaagtggttacagtcatggatgatctgtgtcagaatcccgacg

SEQ ID NO: 430136 - DNA, 52 bp, Artificial
  Synthetic oligonucleotide
ggtacaaagtactagtgcttaacccctcggtagctgccaccctggggtttgg

SEQ ID NO: 430137 - DNA, 59 bp, Artificial
  Synthetic oligonucleotide
ggtacaaatgtttatcataggttgtactccttgtatgggtgagtactgggacgctgcta

SEQ ID NO: 430138 - DNA, 55 bp, Artificial
  Synthetic oligonucleotide
ggtacaacagtaataactctagaacctgatcctactaaccttacaggtgggaata

SEQ ID NO: 430139 - DNA, 60 bp, Artificial
  Synthetic oligonucleotide
ggtacaacatgcatttcccaatctgtatagtgataaaggctgattctccgaggttcgttc

SEQ ID NO: 430140 - DNA, 58 bp, Artificial
  Synthetic oligonucleotide
ggtacaaccagcttgtccttatttcgcgtctcgctacttgattaggagaggtgacgaa

SEQ ID NO: 430141 - DNA, 59 bp, Artificial
  Synthetic oligonucleotide
ggtacaaccattatacaatttaatagcctcagcaaaaggcaaatatattgagtggtctg

SEQ ID NO: 430142 - DNA, 51 bp, Artificial
  Synthetic oligonucleotide
ggtacaaccgagcggttaatcaccatcggcaacccatattttgcacttact

SEQ ID NO: 430143 - DNA, 56 bp, Artificial
  Synthetic oligonucleotide
ggtacaaccgatttagctttatgctctgaggctttattgcttaattttgctaactc

SEQ ID NO: 430144 - DNA, 56 bp, Artificial
  Synthetic oligonucleotide
ggtacaacgcagtgaaagacgagtatggtctcaacgacgagagtatggctctcgca

SEQ ID NO: 430145 - DNA, 54 bp, Artificial
  Synthetic oligonucleotide
ggtacaacgggtgattgtactaggtggggatttaagacgactgccatgcgagcg

SEQ ID NO: 430146 - DNA, 55 bp, Artificial
  Synthetic oligonucleotide
ggtacaacttcagataatttgttacatgtgtctagggttcatgggttgtgttact

SEQ ID NO: 430147 - DNA, 60 bp, Artificial
  Synthetic oligonucleotide
ggtacaagaagggaagctcgattgggaagatgttcgaggctactgccagaggtgcaaggc

SEQ ID NO: 430148 - DNA, 55 bp, Artificial
  Synthetic oligonucleotide
ggtacaagacaagtactctcgctggcaaggatacctatcccacaagccgaaatgg

SEQ ID NO: 430149 - DNA, 56 bp, Artificial
  Synthetic oligonucleotide
ggtacaagatggcggacaattacgtcatttccggaattagggttggctctgggcca

SEQ ID NO: 430150 - DNA, 59 bp, Artificial
  Synthetic oligonucleotide
ggtacaaggatgatttcacacgaccacctggtggcattgtaaatctatggggtgaagac

SEQ ID NO: 430151 - DNA, 56 bp, Artificial
  Synthetic oligonucleotide
ggtacaaggtgctcgtgcttaacccgtcggtggctgcaaccctgtcctttggttca

SEQ ID NO: 430152 - DNA, 60 bp, Artificial
  Synthetic oligonucleotide
ggtacaatgtgctttacatcaagaatatagaccaaatgatatatataaaaacgaatcaga

SEQ ID NO: 430153 - DNA, 60 bp, Artificial
  Synthetic oligonucleotide
ggtacacagcacggtcgtctacatttccacgcagtgcatcttatgcgcacacttcctttg

SEQ ID NO: 430154 - DNA, 58 bp, Artificial
  Synthetic oligonucleotide
ggtacacagcctggcaaaattggtaaacagatatcaaaagtatcgtccccagtcgcac

SEQ ID NO: 430155 - DNA, 55 bp, Artificial
  Synthetic oligonucleotide
ggtacacaggtaagagacaattggagatagtcagtgcaatttgtgctgatagtgg

SEQ ID NO: 430156 - DNA, 55 bp, Artificial
  Synthetic oligonucleotide
ggtacacagtggatgagtttcgcagtaagctggaatcactaaacccagaactcct

SEQ ID NO: 430157 - DNA, 57 bp, Artificial
  Synthetic oligonucleotide
ggtacacataagtctttggccttgatgcggagtgacaaaaccctcctattgctgggg

SEQ ID NO: 430158 - DNA, 55 bp, Artificial
  Synthetic oligonucleotide
ggtacacatataaaagacatctcacaaacccagttaatgaccaacagagtgtctc

SEQ ID NO: 430159 - DNA, 58 bp, Artificial
  Synthetic oligonucleotide
ggtacaccaaacatggagggcctggacatgggacaggctgcagggtacccctggaaca

SEQ ID NO: 430160 - DNA, 60 bp, Artificial
  Synthetic oligonucleotide
ggtacaccaagaccacatactggtgggacggtctccaatcctctgatgatttcgccctca

SEQ ID NO: 430161 - DNA, 60 bp, Artificial
  Synthetic oligonucleotide
ggtacacccaagaccttgcattccaggacaggtcagccgactacagagacagggattatg

SEQ ID NO: 430162 - DNA, 60 bp, Artificial
  Synthetic oligonucleotide
ggtacacctttgagagtattgcgcagttacttgacatcactctaccagttggcccacctg

SEQ ID NO: 430163 - DNA, 60 bp, Artificial
  Synthetic oligonucleotide
ggtacactcgagcattgaaatccaggtgtccactaagataattatgtgggcccaaagcac

SEQ ID NO: 430164 - DNA, 57 bp, Artificial
  Synthetic oligonucleotide
ggtacactggagtttaatttgcttgaccaaaggataatatggcaaaattggtacgca

SEQ ID NO: 430165 - DNA, 56 bp, Artificial
  Synthetic oligonucleotide
ggtacacttcgcccgacgagttcgtcagttacgctacccgcgtaattgagtctgaa

SEQ ID NO: 430166 - DNA, 55 bp, Artificial
  Synthetic oligonucleotide
ggtacagagagttcaccactctggtggcattaagaccagagaaggcaccgagagt

SEQ ID NO: 430167 - DNA, 56 bp, Artificial
  Synthetic oligonucleotide
ggtacagatattacaaaaccccaatcagctcctacagtccccttgtaggggctcta

SEQ ID NO: 430168 - DNA, 55 bp, Artificial
  Synthetic oligonucleotide
ggtacagcaattgcagtcgatacgattttacccgggataccagatgggtggcctg

SEQ ID NO: 430169 - DNA, 60 bp, Artificial
  Synthetic oligonucleotide
ggtacagcatggaagtagaacgaaacaagacagccgccactcccaggacagcttattgca

SEQ ID NO: 430170 - DNA, 55 bp, Artificial
  Synthetic oligonucleotide
ggtacagccgtgagtgccggtgcacatgcgcatacagttggtattggtgcgcacc

SEQ ID NO: 430171 - DNA, 52 bp, Artificial
  Synthetic oligonucleotide
ggtacagccgttgggaagaaacagtctccggggtcggaggatttccccgtga

SEQ ID NO: 430172 - DNA, 55 bp, Artificial
  Synthetic oligonucleotide
ggtacagcctgaccggtccttcccacttcaaccattggcacgcgctgacaatcct

SEQ ID NO: 430173 - DNA, 60 bp, Artificial
  Synthetic oligonucleotide
ggtacagcgaggaaaagtgctgtgtccaagcgctcttccggcggatcaacaagtggctgg

SEQ ID NO: 430174 - DNA, 60 bp, Artificial
  Synthetic oligonucleotide
ggtacagcgtggacacggtagtctccgagcttgttagagagtacaacaacagatccgcta

SEQ ID NO: 430175 - DNA, 59 bp, Artificial
  Synthetic oligonucleotide
ggtacaggacgaattttccaaagtggagtgagaatggccaaatgcaacacaaagtgtca

SEQ ID NO: 430176 - DNA, 58 bp, Artificial
  Synthetic oligonucleotide
ggtacaggcgtccgtggatctaccctccgtaagtagggtgtcatgagtcctgccagct

SEQ ID NO: 430177 - DNA, 55 bp, Artificial
  Synthetic oligonucleotide
ggtacaggtaaagacgaagttgctaagatcgacgcatataccgaagtgtcttcgg

SEQ ID NO: 430178 - DNA, 55 bp, Artificial
  Synthetic oligonucleotide
ggtacagtacccgagacagatcagcttgcacagatgccgcatgttgatgtagaag

SEQ ID NO: 430179 - DNA, 59 bp, Artificial
  Synthetic oligonucleotide
ggtacagtgacagggtgagatccataacactaggtaattccacaatcacaacccaagag

SEQ ID NO: 430180 - DNA, 55 bp, Artificial
  Synthetic oligonucleotide
ggtacagtgaggttgaacttttgcctaaggaggcattgcacgatttaggacagtt

SEQ ID NO: 430181 - DNA, 50 bp, Artificial
  Synthetic oligonucleotide
ggtacagtgatgaattcccctgtgcgtgaatccataccccgtgcagccta

SEQ ID NO: 430182 - DNA, 55 bp, Artificial
  Synthetic oligonucleotide
ggtacagtgtggaccaaatcaccaccatgatcattaatgaaaggaatagaagatc

SEQ ID NO: 430183 - DNA, 55 bp, Artificial
  Synthetic oligonucleotide
ggtacagtttagagacagaacctataccaaccacagatacttattatgtagatgg

SEQ ID NO: 430184 - DNA, 60 bp, Artificial
  Synthetic oligonucleotide
ggtacagtttgtcagtgacagagccttactaagtgcctctgaattgctctccctttcact

SEQ ID NO: 430185 - DNA, 56 bp, Artificial
  Synthetic oligonucleotide
ggtacatcatcaataggttttctaaaacaacacaagctgttagatttgttgctgcg

SEQ ID NO: 430186 - DNA, 57 bp, Artificial
  Synthetic oligonucleotide
ggtacatctggtcagagcatttcatccattctattctgtgaggatgtcatgctttgg

SEQ ID NO: 430187 - DNA, 55 bp, Artificial
  Synthetic oligonucleotide
ggtacatgcttggacagtcccatttaacaccacaggattttagttcagtgcgctt

SEQ ID NO: 430188 - DNA, 55 bp, Artificial
  Synthetic oligonucleotide
ggtacatgtacgattatgttgatgtaggtaccgccattaatgaaactttagctgg

SEQ ID NO: 430189 - DNA, 59 bp, Artificial
  Synthetic oligonucleotide
ggtacatgttcgcgataatagctgtccgctttgtaccgggcagacaaagtcaccgctaa

SEQ ID NO: 430190 - DNA, 60 bp, Artificial
  Synthetic oligonucleotide
ggtacattatattccaatgttagcgatctcattcaacaatttaatcaaatgatagtaact

SEQ ID NO: 430191 - DNA, 53 bp, Artificial
  Synthetic oligonucleotide
ggtacattcacggccgctatacagtcccctacactgcgagaaacatcatgcgc

SEQ ID NO: 430192 - DNA, 55 bp, Artificial
  Synthetic oligonucleotide
ggtacattcgcgaaacagggtccatgcgcggaggcgtttcccgctctctagtaaa

SEQ ID NO: 430193 - DNA, 55 bp, Artificial
  Synthetic oligonucleotide
ggtacattcgtgacgccatggcatgtactagtggtattttcttggtgagaacgcc

SEQ ID NO: 430194 - DNA, 55 bp, Artificial
  Synthetic oligonucleotide
ggtaccaaactgcggttgtatttgcgcccaactgtccttcatccgctgtggtttt

SEQ ID NO: 430195 - DNA, 55 bp, Artificial
  Synthetic oligonucleotide
ggtaccaagcagcgtgaggagcgggagtgagaggtctccggttgcaggtaagtgc

SEQ ID NO: 430196 - DNA, 55 bp, Artificial
  Synthetic oligonucleotide
ggtaccaagtggtaaggtgtaaagaggcatattgccaagagttcttcttgagggg

SEQ ID NO: 430197 - DNA, 56 bp, Artificial
  Synthetic oligonucleotide
ggtaccaagttcaggttgccaatgttaaacaagctctttacgacatgtacactaag

SEQ ID NO: 430198 - DNA, 58 bp, Artificial
  Synthetic oligonucleotide
ggtaccacaagttatggagcatcaccaatcactataatgactagtgggtacgcattac

SEQ ID NO: 430199 - DNA, 54 bp, Artificial
  Synthetic oligonucleotide
ggtaccacatcacccgctggttgaacatgcagccctggataatcctgcggaacc

SEQ ID NO: 430200 - DNA, 56 bp, Artificial
  Synthetic oligonucleotide
ggtaccactgttcctaagaccattagtaagaaggcacctagtactagtgtacactc

SEQ ID NO: 430201 - DNA, 60 bp, Artificial
  Synthetic oligonucleotide
ggtaccagactccacgtgtcgcccgcacacgttgacgattacgaggagtgcacacatcag

SEQ ID NO: 430202 - DNA, 59 bp, Artificial
  Synthetic oligonucleotide
ggtaccagatgacttatggccctggtatcggtacattggtaccaatatatagtgtggta

SEQ ID NO: 430203 - DNA, 55 bp, Artificial
  Synthetic oligonucleotide
ggtaccatcgagcaaggccgaccacacaaggccatcgggtcccacgttaagggtc

SEQ ID NO: 430204 - DNA, 60 bp, Artificial
  Synthetic oligonucleotide
ggtaccatctgagggcccaatatgttcgagttagagataatctaattccgaaggtcatgc

SEQ ID NO: 430205 - DNA, 55 bp, Artificial
  Synthetic oligonucleotide
ggtaccatgctctatagatggctcaatctatttagatgaacatcctctcgatcgg

SEQ ID NO: 430206 - DNA, 53 bp, Artificial
  Synthetic oligonucleotide
ggtacccaaaaaacagtccttaccgctcttaagaaacgtaatgctgatgtacc

SEQ ID NO: 430207 - DNA, 53 bp, Artificial
  Synthetic oligonucleotide
ggtacccaaggaaagcgttccactattcccaaggtgtctgggtatcagtaccg

SEQ ID NO: 430208 - DNA, 55 bp, Artificial
  Synthetic oligonucleotide
ggtacccactctaagacgatctttaagttaggactcgggccgtgtggtctgcacg

SEQ ID NO: 430209 - DNA, 53 bp, Artificial
  Synthetic oligonucleotide
ggtacccatattttgctttccccaaaatacccctatttatgtgtctggaaggc

SEQ ID NO: 430210 - DNA, 55 bp, Artificial
  Synthetic oligonucleotide
ggtaccccattgacccattccttttgaattgcgagacagatgttagagactgggt

SEQ ID NO: 430211 - DNA, 52 bp, Artificial
  Synthetic oligonucleotide
ggtaccccgaggtaacaagcgacactcgggatctgagaaggggaccgggact

SEQ ID NO: 430212 - DNA, 51 bp, Artificial
  Synthetic oligonucleotide
ggtacccgggaagtaggttaaggatcatatccccctggtttcacaaactta

SEQ ID NO: 430213 - DNA, 53 bp, Artificial
  Synthetic oligonucleotide
ggtacccgtgacggtaaatctgatgagggttaatgactggttggtcctaagtt

SEQ ID NO: 430214 - DNA, 56 bp, Artificial
  Synthetic oligonucleotide
ggtacccgttggccgaaccctcgaagagcgttgcagttcctctctctatcacctcc

SEQ ID NO: 430215 - DNA, 58 bp, Artificial
  Synthetic oligonucleotide
ggtaccctacgcgtgaacgctttatatggtaggctaatagccgggctagcatatagtg

SEQ ID NO: 430216 - DNA, 52 bp, Artificial
  Synthetic oligonucleotide
ggtaccctccattttaccttgcaaccggtttcggtcgttgggacatatcctg

SEQ ID NO: 430217 - DNA, 55 bp, Artificial
  Synthetic oligonucleotide
ggtaccctctctctaatggagaacagactcttgcccagtgccagaactctgtgtt

SEQ ID NO: 430218 - DNA, 52 bp, Artificial
  Synthetic oligonucleotide
ggtacccttgtacgcctgttttatactcccttcccgtaacttagacgcacga

SEQ ID NO: 430219 - DNA, 55 bp, Artificial
  Synthetic oligonucleotide
ggtaccgaagtttgttgcggaatggcttgataaacataagtattccactgatata

SEQ ID NO: 430220 - DNA, 60 bp, Artificial
  Synthetic oligonucleotide
ggtaccgatcgatgtcaaagtacctctcatccctagttgtgactggcttgatgcattgca

SEQ ID NO: 430221 - DNA, 60 bp, Artificial
  Synthetic oligonucleotide
ggtaccgatctatgtcaaagtacctctcgtcacgagtagtgacaggcttgatgcactgga

SEQ ID NO: 430222 - DNA, 58 bp, Artificial
  Synthetic oligonucleotide
ggtaccgcctgtcaggggcgatcaaaacctgtgagcgtgccctggcagggaatacgct

SEQ ID NO: 430223 - DNA, 55 bp, Artificial
  Synthetic oligonucleotide
ggtaccgcggatccttctcacactcttgaaaatttgcctggtaagccaattgcgc

SEQ ID NO: 430224 - DNA, 57 bp, Artificial
  Synthetic oligonucleotide
ggtaccggaaccgacacttacgatcgggttcgagctcacgaagactatctggcggca

SEQ ID NO: 430225 - DNA, 55 bp, Artificial
  Synthetic oligonucleotide
ggtaccggtgtggccacagactatattgtgcctggcatccccgatgggtggcctg

SEQ ID NO: 430226 - DNA, 60 bp, Artificial
  Synthetic oligonucleotide
ggtaccgtccagatatacgcgccactctgcgcctgagctgcagtaatgatggtccctgtg

SEQ ID NO: 430227 - DNA, 56 bp, Artificial
  Synthetic oligonucleotide
ggtaccgttgagttcggaattgccgcagttaacactgtcagcgatttcgtacaaag

SEQ ID NO: 430228 - DNA, 55 bp, Artificial
  Synthetic oligonucleotide
ggtacctaagatctatggaattgtcggacgatataaagactgacattgaacagca

SEQ ID NO: 430229 - DNA, 55 bp, Artificial
  Synthetic oligonucleotide
ggtacctatgactatcccaaataccaggatgagagtaaattaaacaggcaggaaa

SEQ ID NO: 430230 - DNA, 60 bp, Artificial
  Synthetic oligonucleotide
ggtacctctgcttacacatcactgaatgtgctggctagatttactgatttggaactccat

SEQ ID NO: 430231 - DNA, 54 bp, Artificial
  Synthetic oligonucleotide
ggtacctctgctttgttgttgaacgaagcgaattccaataggaagtcgttttcg

SEQ ID NO: 430232 - DNA, 55 bp, Artificial
  Synthetic oligonucleotide
ggtacctctgtggaccccactacaggaaaagaggtcaaaggcaaggagaggatgg

SEQ ID NO: 430233 - DNA, 55 bp, Artificial
  Synthetic oligonucleotide
ggtacctgttgtctgtattctattacgcaatggtcgattttcatacagctacgac

SEQ ID NO: 430234 - DNA, 58 bp, Artificial
  Synthetic oligonucleotide
ggtaccttcgagctgcaaggtccgcaggagtccaccgctccgctgaaactcacgccgg

SEQ ID NO: 430235 - DNA, 55 bp, Artificial
  Synthetic oligonucleotide
ggtaccttctcccgtggctctgacgaggggaacaggcacaccaacgagactgtca

SEQ ID NO: 430236 - DNA, 54 bp, Artificial
  Synthetic oligonucleotide
ggtacctttaagtcctgtatggaatgataacgcccatggggtagggtctatccc

SEQ ID NO: 430237 - DNA, 54 bp, Artificial
  Synthetic oligonucleotide
ggtaccttttataggaagacccctcccctggattgcaaagcacgatagcgggaa

SEQ ID NO: 430238 - DNA, 57 bp, Artificial
  Synthetic oligonucleotide
ggtacgaaagtggtgatacgtacgccgccctgtgtgctattcattgtattcgttcaa

SEQ ID NO: 430239 - DNA, 51 bp, Artificial
  Synthetic oligonucleotide
ggtacgaatattgagaattcggtgtctggacatgtgtataatgcattgatt

SEQ ID NO: 430240 - DNA, 55 bp, Artificial
  Synthetic oligonucleotide
ggtacgacaaattttgaattaaagccgactaagaaactagctggctcatacgtta

SEQ ID NO: 430241 - DNA, 55 bp, Artificial
  Synthetic oligonucleotide
ggtacgacgtcagcgaagaatcttacggacaacgtttgacagcagttaccgaaag

SEQ ID NO: 430242 - DNA, 60 bp, Artificial
  Synthetic oligonucleotide
ggtacgactgcacaggtacgctccggcgtgcaaacctctcctgcgggatgaggtcacatt

SEQ ID NO: 430243 - DNA, 58 bp, Artificial
  Synthetic oligonucleotide
ggtacgagttggtccgcagatgtagaggctggggactctagctccagtccttctcggt

SEQ ID NO: 430244 - DNA, 55 bp, Artificial
  Synthetic oligonucleotide
ggtacgatccgcagtacgcggcctccgtcttcctgggctgggcgcaaaagaagtt

SEQ ID NO: 430245 - DNA, 60 bp, Artificial
  Synthetic oligonucleotide
ggtacgatgtcgctaagggtgcgatcgtagatttagcgagaccatttccatcaggtgatt

SEQ ID NO: 430246 - DNA, 55 bp, Artificial
  Synthetic oligonucleotide
ggtacgatgttactgaattagactacttgcctctgtgtacagaacagactgacaa

SEQ ID NO: 430247 - DNA, 54 bp, Artificial
  Synthetic oligonucleotide
ggtacgatttcggagatttcgtacgagtagcacccaggctgcggagttcctatt

SEQ ID NO: 430248 - DNA, 55 bp, Artificial
  Synthetic oligonucleotide
ggtacgcaatcgtcgctgtgatctgttggtgtcttgatcgcaagcacgacgcgat

SEQ ID NO: 430249 - DNA, 60 bp, Artificial
  Synthetic oligonucleotide
ggtacgcacgcggataatcagccatctgtcatcaagcctttactaaatgggtcacttccg

SEQ ID NO: 430250 - DNA, 57 bp, Artificial
  Synthetic oligonucleotide
ggtacgcatatagagatgaaagatatagactttatgggaggtcgttttttcaggttc

SEQ ID NO: 430251 - DNA, 58 bp, Artificial
  Synthetic oligonucleotide
ggtacgccagcatgaattttggtttgtaccctacttgcaactccacgcagtataatgg

SEQ ID NO: 430252 - DNA, 53 bp, Artificial
  Synthetic oligonucleotide
ggtacgcccaatacgtcaacgcgatttcaagactgaggttttttattactggg

SEQ ID NO: 430253 - DNA, 51 bp, Artificial
  Synthetic oligonucleotide
ggtacgcgccgtagacagtccctagaccgtcgaccaacacgtacgcttcgc

SEQ ID NO: 430254 - DNA, 55 bp, Artificial
  Synthetic oligonucleotide
ggtacgcggacttaagagttgatggaaagctaaggcaaatgccaatgcgacattg

SEQ ID NO: 430255 - DNA, 54 bp, Artificial
  Synthetic oligonucleotide
ggtacgcgtttacgtcttccatgaaacaaggcaatactctcgatgtatgcaaga

SEQ ID NO: 430256 - DNA, 51 bp, Artificial
  Synthetic oligonucleotide
ggtacgctactcaaccaaaagagtaaagagcaaatgcgggtaatcttttcg

SEQ ID NO: 430257 - DNA, 55 bp, Artificial
  Synthetic oligonucleotide
ggtacgctgtacatacatgatctgaacacgttggagcacgccaatgcgggcacag

SEQ ID NO: 430258 - DNA, 54 bp, Artificial
  Synthetic oligonucleotide
ggtacgctgtgcaaacggcggaaattaatcctaccgttaaccgcccatctactc

SEQ ID NO: 430259 - DNA, 55 bp, Artificial
  Synthetic oligonucleotide
ggtacgcttcgcgctggattgaagggagtaggaggaaatgctgaaaccggagtgc

SEQ ID NO: 430260 - DNA, 57 bp, Artificial
  Synthetic oligonucleotide
ggtacggaatggaacctgacctgacagctaacctattgagactttacgacgactgcc

SEQ ID NO: 430261 - DNA, 55 bp, Artificial
  Synthetic oligonucleotide
ggtacggcgactactgcaaacataaccattacggtgcagattgcgtataacggcc

SEQ ID NO: 430262 - DNA, 54 bp, Artificial
  Synthetic oligonucleotide
ggtacgggcgaaaagcctccagtccaggaggaggagaacgaggatactcgcccc

SEQ ID NO: 430263 - DNA, 53 bp, Artificial
  Synthetic oligonucleotide
ggtacgggtcttgctacggcggattccggtaacgcggcagtaacgaaccaagc

SEQ ID NO: 430264 - DNA, 51 bp, Artificial
  Synthetic oligonucleotide
ggtacggtcttattcgcaacttacgtgatgcaagtctcgctcggtacgctt

SEQ ID NO: 430265 - DNA, 58 bp, Artificial
  Synthetic oligonucleotide
ggtacggtgaagtttatagctgtgtatatggcttattctgggaaacaatacaagtgtg

SEQ ID NO: 430266 - DNA, 55 bp, Artificial
  Synthetic oligonucleotide
ggtacggttaaacggtatgtaactacagatgaagcgcatgtacaaaagccggtga

SEQ ID NO: 430267 - DNA, 59 bp, Artificial
  Synthetic oligonucleotide
ggtacgtaatcctcgcgtgcaccaggtcaatgacgagctcaaacgtatgggcttagacg

SEQ ID NO: 430268 - DNA, 58 bp, Artificial
  Synthetic oligonucleotide
ggtacgtctgggacctgtgggagtggatcatgcgtcaagtgcgcatggtcatggctag

SEQ ID NO: 430269 - DNA, 58 bp, Artificial
  Synthetic oligonucleotide
ggtacgtggcacgacctggaggttatgctgctattgggggtggtaggcaaagcgtaga

SEQ ID NO: 430270 - DNA, 58 bp, Artificial
  Synthetic oligonucleotide
ggtacgtttgcgcgttggcattttgcaattgtcgctgattgaagggacacaccggctg

SEQ ID NO: 430271 - DNA, 55 bp, Artificial
  Synthetic oligonucleotide
ggtactaagggcacaatgcgtacacgcagtggcctggtcatagggccgcagagcc

SEQ ID NO: 430272 - DNA, 58 bp, Artificial
  Synthetic oligonucleotide
ggtactaataggacctgtgacaaagggaagccaggaccaggaccatgtgttcagagaa

SEQ ID NO: 430273 - DNA, 58 bp, Artificial
  Synthetic oligonucleotide
ggtactaatgtggaaaattcagtttcaggacatgtttataacgcattgatttattaca

SEQ ID NO: 430274 - DNA, 57 bp, Artificial
  Synthetic oligonucleotide
ggtactaatgtggagaattcagtttcaggacatgtctataatgcgttgatttactac

SEQ ID NO: 430275 - DNA, 60 bp, Artificial
  Synthetic oligonucleotide
ggtactacatccgccatgtattcaagcgcgtaatatctgtcgagaaagacacaatgatgg

SEQ ID NO: 430276 - DNA, 55 bp, Artificial
  Synthetic oligonucleotide
ggtactacgcggcatagacgcagtttagtgtactacacacgtgctgaggacattc

SEQ ID NO: 430277 - DNA, 54 bp, Artificial
  Synthetic oligonucleotide
ggtactacgtaacaggtcgtactttgagtggtatgtacgctaaagatatacctt

SEQ ID NO: 430278 - DNA, 60 bp, Artificial
  Synthetic oligonucleotide
ggtactactgtgaagtcaggatggttcaaaagcacgacatatataactctagatcagacc

SEQ ID NO: 430279 - DNA, 51 bp, Artificial
  Synthetic oligonucleotide
ggtactataaaggtaacggtcccttcggatacgcttaacacttggtaccca

SEQ ID NO: 430280 - DNA, 56 bp, Artificial
  Synthetic oligonucleotide
ggtactatgtgatttaccttacggtacaactgcatgtaagtgggatagtattattc

SEQ ID NO: 430281 - DNA, 51 bp, Artificial
  Synthetic oligonucleotide
ggtactattacaaaacccctggacttaccaaccagcgatggaaagggcccg

SEQ ID NO: 430282 - DNA, 60 bp, Artificial
  Synthetic oligonucleotide
ggtactcaagcgatgtggtttgtgaaccagatagcaccactagcactcgcaacaatagct

SEQ ID NO: 430283 - DNA, 55 bp, Artificial
  Synthetic oligonucleotide
ggtactcaccagccccctgggcaaactaggctctaaaaggaccatagtggttgga

SEQ ID NO: 430284 - DNA, 55 bp, Artificial
  Synthetic oligonucleotide
ggtactcagcacaagaagttacccgcacactccgtaagtattgcttctgagccta

SEQ ID NO: 430285 - DNA, 55 bp, Artificial
  Synthetic oligonucleotide
ggtactcagcgatgcggtccgttgggccaaagaccacaagattccggttgggccc

SEQ ID NO: 430286 - DNA, 55 bp, Artificial
  Synthetic oligonucleotide
ggtactcagtcattgcgaattctgaaagcaaatactcctgtaaagcaaggtaatc

SEQ ID NO: 430287 - DNA, 60 bp, Artificial
  Synthetic oligonucleotide
ggtactccgtgcgataatgttcatgctggagcgagcttaatgtggaatttttcagccaag

SEQ ID NO: 430288 - DNA, 56 bp, Artificial
  Synthetic oligonucleotide
ggtactctgatgcaatggggtactgacgcggacgggcttacccagctttggtcccc

SEQ ID NO: 430289 - DNA, 51 bp, Artificial
  Synthetic oligonucleotide
ggtactcttcacgagtacaattctacgaagaaccaaacatgtgctccgtct

SEQ ID NO: 430290 - DNA, 60 bp, Artificial
  Synthetic oligonucleotide
ggtactgaacttagctcccgagctagttcacctggcagtggctgagaggctcgtcgcttt

SEQ ID NO: 430291 - DNA, 52 bp, Artificial
  Synthetic oligonucleotide
ggtactgaagggcttctgttaaaccaaccttaggtccatatccctttaggac

SEQ ID NO: 430292 - DNA, 60 bp, Artificial
  Synthetic oligonucleotide
ggtactgaatgatgaagagaatttggatctagtgaaccaagtcatgagtcaggaagagga

SEQ ID NO: 430293 - DNA, 55 bp, Artificial
  Synthetic oligonucleotide
ggtactgacaatttggatggattagacctaaccacatcagcaggatacccctaca

SEQ ID NO: 430294 - DNA, 55 bp, Artificial
  Synthetic oligonucleotide
ggtactgacggaaatgatattgccaatcacaatgatagcatgtctatgcctgctg

SEQ ID NO: 430295 - DNA, 55 bp, Artificial
  Synthetic oligonucleotide
ggtactgatagggaacttaataacccacacggacaatgaggtggtggtatacttc

SEQ ID NO: 430296 - DNA, 50 bp, Artificial
  Synthetic oligonucleotide
ggtactgatgaggaggtgaacaactatgcctggtctgattgggtcccatc

SEQ ID NO: 430297 - DNA, 60 bp, Artificial
  Synthetic oligonucleotide
ggtactgcaaacaccagtcttaaattattgattgcatatacaccaccaggagttgcgaaa

SEQ ID NO: 430298 - DNA, 60 bp, Artificial
  Synthetic oligonucleotide
ggtactgcacaatgcacaccaaccagaatggagcacggttcaatgaccgtagtgcattct

SEQ ID NO: 430299 - DNA, 59 bp, Artificial
  Synthetic oligonucleotide
ggtactgctatatatgttgcagtatcctaataagggaagggaactgaagaagactgtta

SEQ ID NO: 430300 - DNA, 55 bp, Artificial
  Synthetic oligonucleotide
ggtactgctgagagctacaccgagacaggagttgagcagtgttcgtactgcccga

SEQ ID NO: 430301 - DNA, 55 bp, Artificial
  Synthetic oligonucleotide
ggtactggaaggacttatcgactaatggcagactaccagaagatctacttgcgga

SEQ ID NO: 430302 - DNA, 53 bp, Artificial
  Synthetic oligonucleotide
ggtactggacatatagtttccccgggaaggaggacccaagaatggacaagaag

SEQ ID NO: 430303 - DNA, 55 bp, Artificial
  Synthetic oligonucleotide
ggtactggctagcttttcgaaatgcacaccgcttcataaggcacgttcagcctgg

SEQ ID NO: 430304 - DNA, 55 bp, Artificial
  Synthetic oligonucleotide
ggtactggtattgagcgcatatcagaggagaccttgtacctccatgttgcggcca

SEQ ID NO: 430305 - DNA, 56 bp, Artificial
  Synthetic oligonucleotide
ggtactggtgggcgacttgactaatccgccctaccacgaattcgcatacgaagggc

SEQ ID NO: 430306 - DNA, 55 bp, Artificial
  Synthetic oligonucleotide
ggtactgtactatgatgtttaatacgtcgtttatggcacttccaagactggatag

SEQ ID NO: 430307 - DNA, 55 bp, Artificial
  Synthetic oligonucleotide
ggtactgttcagacatgagtgacgattttatcgttaagttagctgagtgtgtcaa

SEQ ID NO: 430308 - DNA, 57 bp, Artificial
  Synthetic oligonucleotide
ggtacttaccaactacttactgtcggatgctgtgaaaccactacttaggtccgagca

SEQ ID NO: 430309 - DNA, 55 bp, Artificial
  Synthetic oligonucleotide
ggtacttagaggcagtgcagttccagtccggaacacaagtgtcagacttcttagg

SEQ ID NO: 430310 - DNA, 55 bp, Artificial
  Synthetic oligonucleotide
ggtacttcaacaaatgacggagttatagatacaattgcctatgctaacagagcag

SEQ ID NO: 430311 - DNA, 60 bp, Artificial
  Synthetic oligonucleotide
ggtacttcaatagctggtgtgactgctacaacagtacctggtgaggcggcgactaatgtg

SEQ ID NO: 430312 - DNA, 57 bp, Artificial
  Synthetic oligonucleotide
ggtacttcccaagcttcatgacgctggacagtgacctcctcggcccaaacgatggtt

SEQ ID NO: 430313 - DNA, 55 bp, Artificial
  Synthetic oligonucleotide
ggtacttcgacgaaggcaagttggtcacgccattaggtcatcggttaggcgcagc

SEQ ID NO: 430314 - DNA, 58 bp, Artificial
  Synthetic oligonucleotide
ggtacttgctaacaaagataaaatctcacgagttagaacaaacctctgagtcacctca

SEQ ID NO: 430315 - DNA, 57 bp, Artificial
  Synthetic oligonucleotide
ggtacttgtgcaaaaactgtctcgaaaaatgtagagttgagatagatgcatccaggt

SEQ ID NO: 430316 - DNA, 56 bp, Artificial
  Synthetic oligonucleotide
ggtacttgttatactacattcgtgacgttcaatctagggacgtgggattttacata

SEQ ID NO: 430317 - DNA, 57 bp, Artificial
  Synthetic oligonucleotide
ggtactttagaaaagatcccaatatagtattgcaatcttcaataggaaacgatctta

SEQ ID NO: 430318 - DNA, 57 bp, Artificial
  Synthetic oligonucleotide
ggtactttctccatttgtgactcattgtgagtagttgttttcgttctattccattcg

SEQ ID NO: 430319 - DNA, 50 bp, Artificial
  Synthetic oligonucleotide
ggtactttctcggcaatttgcattgttgtgcttttagtcttcgcgattca

SEQ ID NO: 430320 - DNA, 51 bp, Artificial
  Synthetic oligonucleotide
ggtactttggtgtgttcataaaagaattccagtggaagacacacagcaggc

SEQ ID NO: 430321 - DNA, 58 bp, Artificial
  Synthetic oligonucleotide
ggtactttttggaacatattccccgatgcctacaccaggtctggaatccagatctatc

SEQ ID NO: 430322 - DNA, 51 bp, Artificial
  Synthetic oligonucleotide
ggtagaaaacttaacaatccggaattagagtcggtaattgttaacgaattc

SEQ ID NO: 430323 - DNA, 51 bp, Artificial
  Synthetic oligonucleotide
ggtagaaacggtccgggcgcactttgctcacgagacagtagagccagcgcg

SEQ ID NO: 430324 - DNA, 55 bp, Artificial
  Synthetic oligonucleotide
ggtagaaatcctagtcagataggtgatgagtaccactatggaggaggcacaagcg

SEQ ID NO: 430325 - DNA, 59 bp, Artificial
  Synthetic oligonucleotide
ggtagaagcacgaaagacagatgttattaccatcgacaaaacactatcgataaccacac

SEQ ID NO: 430326 - DNA, 55 bp, Artificial
  Synthetic oligonucleotide
ggtagaagcactccaatgggagcactcaatctataacggtgcattcaatgatccc

SEQ ID NO: 430327 - DNA, 55 bp, Artificial
  Synthetic oligonucleotide
ggtagaaggttggggaaatgctttctactcggtattaggatatgaagccacaaaa

SEQ ID NO: 430328 - DNA, 60 bp, Artificial
  Synthetic oligonucleotide
ggtagaagtacatctaaacgaagactgtttgaggagcaggacagtggatatggcaatact

SEQ ID NO: 430329 - DNA, 60 bp, Artificial
  Synthetic oligonucleotide
ggtagaagtatctcctagaagaaccgagagcatctcagatgaaggagatctcccaaacgc

SEQ ID NO: 430330 - DNA, 55 bp, Artificial
  Synthetic oligonucleotide
ggtagaatccgtgacaggtattgcgtttcgggacatcaatgtgcgttgttctgca

SEQ ID NO: 430331 - DNA, 60 bp, Artificial
  Synthetic oligonucleotide
ggtagaatctcaattagataagttcacacaatgcacctacgaaaagacatcatatcacat

SEQ ID NO: 430332 - DNA, 55 bp, Artificial
  Synthetic oligonucleotide
ggtagaatctttcaactgttgatgcgcttaggcgttaaacagggtgcagcaagtg

SEQ ID NO: 430333 - DNA, 51 bp, Artificial
  Synthetic oligonucleotide
ggtagaatttataacctttttgtgtgcatttaaggagtttttaaagggcac

SEQ ID NO: 430334 - DNA, 55 bp, Artificial
  Synthetic oligonucleotide
ggtagacaaattacatattctcgtgcttgtcccatagttgtaggtactgtatttg

SEQ ID NO: 430335 - DNA, 55 bp, Artificial
  Synthetic oligonucleotide
ggtagacacactcttccacaatgttggttggtatcagatggttcgtacttgaatg

SEQ ID NO: 430336 - DNA, 55 bp, Artificial
  Synthetic oligonucleotide
ggtagacacaggactgaagtgtgagaaaagagtcaggatatcatctaagatgccc

SEQ ID NO: 430337 - DNA, 57 bp, Artificial
  Synthetic oligonucleotide
ggtagacagtgggtaaatgcaagagtaccacacttaagtagaccaaaaccaggctca

SEQ ID NO: 430338 - DNA, 55 bp, Artificial
  Synthetic oligonucleotide
ggtagaccaaatgcaagaagatctcattagcctatgggatcaaagcctaaagcca

SEQ ID NO: 430339 - DNA, 55 bp, Artificial
  Synthetic oligonucleotide
ggtagacctcagacacgaagaagagcgaaagtaaacctagacagtagacaagtag

SEQ ID NO: 430340 - DNA, 55 bp, Artificial
  Synthetic oligonucleotide
ggtagacgcaatcccacctcagctgaaccaaactatgggtgtagcaggttttggg

SEQ ID NO: 430341 - DNA, 60 bp, Artificial
  Synthetic oligonucleotide
ggtagacggctggtacggtttcagacatcaaaattctgagggcacgggacaagcagcaga

SEQ ID NO: 430342 - DNA, 55 bp, Artificial
  Synthetic oligonucleotide
ggtagacgtggaaggatccacttggctctcgaacagacgtttcaattcctgggct

SEQ ID NO: 430343 - DNA, 55 bp, Artificial
  Synthetic oligonucleotide
ggtagactgaacaaagctttgcagtcaaagtcggtagcagatattgatactctgc

SEQ ID NO: 430344 - DNA, 53 bp, Artificial
  Synthetic oligonucleotide
ggtagactgaacatcaatggaccaactcgcaccaagttggagcctagtgtatt

SEQ ID NO: 430345 - DNA, 60 bp, Artificial
  Synthetic oligonucleotide
ggtagactgcagacatggaccaccgctgaatcagatagggtaatcggctctctcactgac

SEQ ID NO: 430346 - DNA, 55 bp, Artificial
  Synthetic oligonucleotide
ggtagacttgacagctggttcccagctagtttatgtggtacctgacattttgctg

SEQ ID NO: 430347 - DNA, 60 bp, Artificial
  Synthetic oligonucleotide
ggtagagacatacgcgggcatgttatcgcccctgttagcgatgatgtcgtatatcctgtt

SEQ ID NO: 430348 - DNA, 53 bp, Artificial
  Synthetic oligonucleotide
ggtagagactccggtgaaggaaaacgagtgtgaaactgtaaataggggaggcg

SEQ ID NO: 430349 - DNA, 55 bp, Artificial
  Synthetic oligonucleotide
ggtagagcatatacatgatgccgatagttcgcctttaaacgtgatctcagaatcg

SEQ ID NO: 430350 - DNA, 51 bp, Artificial
  Synthetic oligonucleotide
ggtagagcttatgtgttaggatacaaggtagataaaccaacatctacacgt

SEQ ID NO: 430351 - DNA, 60 bp, Artificial
  Synthetic oligonucleotide
ggtagaggatcattcgctcaattcagagcgtgctctcatgagtactataacataccatga

SEQ ID NO: 430352 - DNA, 60 bp, Artificial
  Synthetic oligonucleotide
ggtagaggtggccccccgctctggaagctacaatctgcgccgctctagacgcctcactcc

SEQ ID NO: 430353 - DNA, 60 bp, Artificial
  Synthetic oligonucleotide
ggtagaggttgttctcaagccaggtatttattgccgtaggatcgaggagtgctggtgtgc

SEQ ID NO: 430354 - DNA, 55 bp, Artificial
  Synthetic oligonucleotide
ggtagagtagcggagggtacaaacacaactgatagatggttcgcttgcgtacttg

SEQ ID NO: 430355 - DNA, 60 bp, Artificial
  Synthetic oligonucleotide
ggtagagtctgccgttttgagaggattcctcatcttgggcaaagaggacaagagatatgg

SEQ ID NO: 430356 - DNA, 56 bp, Artificial
  Synthetic oligonucleotide
ggtagataatcactcaccgagtgacatccacatcatggcgtcccaaggcaccaaac

SEQ ID NO: 430357 - DNA, 55 bp, Artificial
  Synthetic oligonucleotide
ggtagatacgcagttgagccttaccacggaaaagtagtagtacctgaagggcagg

SEQ ID NO: 430358 - DNA, 55 bp, Artificial
  Synthetic oligonucleotide
ggtagatagtgtgagtgcatagcaattacaggtaagcggtgtgtacctagcggag

SEQ ID NO: 430359 - DNA, 54 bp, Artificial
  Synthetic oligonucleotide
ggtagatattctttaaacttagacgccaccttgtaatttaagaagtgtggatcg

SEQ ID NO: 430360 - DNA, 55 bp, Artificial
  Synthetic oligonucleotide
ggtagatcaagaagtacgacacgcggcaaagacgatgacgtgcgagtatagtccc

SEQ ID NO: 430361 - DNA, 55 bp, Artificial
  Synthetic oligonucleotide
ggtagatctaaaaagatcaagactctaagccttaaaaatcttagatgttacgaaa

SEQ ID NO: 430362 - DNA, 60 bp, Artificial
  Synthetic oligonucleotide
ggtagatgagtattccagcgcggagaagatagtggtgagcattgaccgttttttgagagt

SEQ ID NO: 430363 - DNA, 60 bp, Artificial
  Synthetic oligonucleotide
ggtagatggcgaattcaacagggtcatttggtggtccctcaatgtcgatccatgttgtat

SEQ ID NO: 430364 - DNA, 59 bp, Artificial
  Synthetic oligonucleotide
ggtagatgtaacgcccttttacatacgccgaccaattcgttgccttgctgatatgatac

SEQ ID NO: 430365 - DNA, 60 bp, Artificial
  Synthetic oligonucleotide
ggtagattaatacagagtgagatattggtgactgatacacggtactaatgtcatctagca

SEQ ID NO: 430366 - DNA, 58 bp, Artificial
  Synthetic oligonucleotide
ggtagattaccattcacaattagttcttcgttcaatccatgatgggcttcttaataaa

SEQ ID NO: 430367 - DNA, 55 bp, Artificial
  Synthetic oligonucleotide
ggtagattgagtgaacctttgttcgaacctggtaagacagacatacgaccttccc

SEQ ID NO: 430368 - DNA, 55 bp, Artificial
  Synthetic oligonucleotide
ggtagcaaagcagatagtcaatgaatgtgcacaatgtcaacagaaaggggaagcc

SEQ ID NO: 430369 - DNA, 56 bp, Artificial
  Synthetic oligonucleotide
ggtagcaaccgttgaagagatacgaccgcgcaggctttctaacttctcctgcatag

SEQ ID NO: 430370 - DNA, 55 bp, Artificial
  Synthetic oligonucleotide
ggtagcaaggatgattgaggcagtagaaaagaaagggctgaagtcgccattgacg

SEQ ID NO: 430371 - DNA, 55 bp, Artificial
  Synthetic oligonucleotide
ggtagcaccagtcgtgagtccatagcgatcatggtttcgcgcatgttactgcccg

SEQ ID NO: 430372 - DNA, 59 bp, Artificial
  Synthetic oligonucleotide
ggtagcactaggttccggtatggctatgggtggcgttattggagctgtagcgcgtggta

SEQ ID NO: 430373 - DNA, 55 bp, Artificial
  Synthetic oligonucleotide
ggtagcagactttgcactagaaaacaaccttgatgatcccttgctaattatgggg

SEQ ID NO: 430374 - DNA, 55 bp, Artificial
  Synthetic oligonucleotide
ggtagcagcttcatccgtaacggagaaagaaaagccggagccgcagtaacaaccg

SEQ ID NO: 430375 - DNA, 60 bp, Artificial
  Synthetic oligonucleotide
ggtagcataaccatcacatttatgtgtgtctgtgatgcatttagtactggaaaattctta

SEQ ID NO: 430376 - DNA, 57 bp, Artificial
  Synthetic oligonucleotide
ggtagcatacatgttggagagagaacttgttcgaaaaacaaggttcctcccagtggc

SEQ ID NO: 430377 - DNA, 55 bp, Artificial
  Synthetic oligonucleotide
ggtagcataccctttattgtgttctgcgtatcagtggagtcctacgcaaacgaca

SEQ ID NO: 430378 - DNA, 55 bp, Artificial
  Synthetic oligonucleotide
ggtagcatatgaagcgataaggttttctgacacattgtactatgcctaagacgtg

SEQ ID NO: 430379 - DNA, 50 bp, Artificial
  Synthetic oligonucleotide
ggtagcattgagtatatgctcaatgattgaacttggattgctgcataagc

SEQ ID NO: 430380 - DNA, 60 bp, Artificial
  Synthetic oligonucleotide
ggtagcatttgctggaacaccaatgtatagttctttctcaacactactaagaaaggctga

SEQ ID NO: 430381 - DNA, 55 bp, Artificial
  Synthetic oligonucleotide
ggtagccaagacggtaacgttcatggcttgaatcctaactacatgtacgccctag

SEQ ID NO: 430382 - DNA, 55 bp, Artificial
  Synthetic oligonucleotide
ggtagccatgtgttttaccccacgcctagtgggtccatggtaacctcagaggccc

SEQ ID NO: 430383 - DNA, 60 bp, Artificial
  Synthetic oligonucleotide
ggtagcccagccgatgaactttgaggccatctatccaaggcacaggatggacgatgacat

SEQ ID NO: 430384 - DNA, 60 bp, Artificial
  Synthetic oligonucleotide
ggtagcccgagtacaaaacacggacgagtatgtggagaggactgacatctattaccatgc

SEQ ID NO: 430385 - DNA, 50 bp, Artificial
  Synthetic oligonucleotide
ggtagccggtatgttaggatgggaactgaaagtatgaattttgccaaagg

SEQ ID NO: 430386 - DNA, 55 bp, Artificial
  Synthetic oligonucleotide
ggtagcctgattgagctcctgagttctggtagccaggagtttaatataccccatc

SEQ ID NO: 430387 - DNA, 55 bp, Artificial
  Synthetic oligonucleotide
ggtagcgaaaaatccacttgggctgtaggacgaaatgggtcacgtgactacgttc

SEQ ID NO: 430388 - DNA, 60 bp, Artificial
  Synthetic oligonucleotide
ggtagcgaacctcaacctcaacttgatctgaggggttcacataagacttatctataatgc

SEQ ID NO: 430389 - DNA, 60 bp, Artificial
  Synthetic oligonucleotide
ggtagcgaattggctgcattttgtcaataacaatcaatttagacaagtagttattgatgg

SEQ ID NO: 430390 - DNA, 55 bp, Artificial
  Synthetic oligonucleotide
ggtagcgatagagaaggaagtagcggacagtttcaaattactcgcaaaagcggtg

SEQ ID NO: 430391 - DNA, 60 bp, Artificial
  Synthetic oligonucleotide
ggtagcgcgcatgagaactctcagtgcggctgtaagcgagggacctgtcaagggggcgac

SEQ ID NO: 430392 - DNA, 55 bp, Artificial
  Synthetic oligonucleotide
ggtagcggaaggtaagctaccgatggaagggctgatcggcgattgctcgtcgtca

SEQ ID NO: 430393 - DNA, 56 bp, Artificial
  Synthetic oligonucleotide
ggtagcgggatacaaggcgaaataactcaaggaggatagcacgggtaggacatggc

SEQ ID NO: 430394 - DNA, 58 bp, Artificial
  Synthetic oligonucleotide
ggtagcgggttttgtagcgctaggagtagttgcgggtgggctggtgcttatcctctgc

SEQ ID NO: 430395 - DNA, 59 bp, Artificial
  Synthetic oligonucleotide
ggtagctaaattagacgctactgtctttgcacaaattgttaagctcaggaaggttgata

SEQ ID NO: 430396 - DNA, 56 bp, Artificial
  Synthetic oligonucleotide
ggtagctaactatgattgggtgccaacttcaactacaaaagtatacaaacaagtcc

SEQ ID NO: 430397 - DNA, 56 bp, Artificial
  Synthetic oligonucleotide
ggtagctactcccttcgcctgggttgcataatataatactaggaataccaccttta

SEQ ID NO: 430398 - DNA, 55 bp, Artificial
  Synthetic oligonucleotide
ggtagctagtgatcttgtgttgctcgtacttttccttggaattgtgatcgtgctc

SEQ ID NO: 430399 - DNA, 55 bp, Artificial
  Synthetic oligonucleotide
ggtagctagtggcttgctctgggtagcagaaatccagccccagtggatagcggcc

SEQ ID NO: 430400 - DNA, 52 bp, Artificial
  Synthetic oligonucleotide
ggtagctgacaagcgggcgtctagggtctgtaagtttaaaagggtcgtaggt

SEQ ID NO: 430401 - DNA, 59 bp, Artificial
  Synthetic oligonucleotide
ggtagctgctctaaaactcatatcaattggtagttatggtagctcttatatagtagaag

SEQ ID NO: 430402 - DNA, 53 bp, Artificial
  Synthetic oligonucleotide
ggtagctggcacatcaatcgtacggccctaaactgcaacgagagccttaacac

SEQ ID NO: 430403 - DNA, 59 bp, Artificial
  Synthetic oligonucleotide
ggtagcttatggagatgacgtgttggccagctacccgtttcctattgattgcttggaat

SEQ ID NO: 430404 - DNA, 55 bp, Artificial
  Synthetic oligonucleotide
ggtagcttctacctcagctcgtatgaaacttgagaactccatagtgtagtactag

SEQ ID NO: 430405 - DNA, 54 bp, Artificial
  Synthetic oligonucleotide
ggtaggaaccactgacaggcggggcatccctacttacacttggggggagaatga

SEQ ID NO: 430406 - DNA, 55 bp, Artificial
  Synthetic oligonucleotide
ggtaggaatgaattgtatgtttcaccagatgcagaagcgttcaacaaatacatgc

SEQ ID NO: 430407 - DNA, 60 bp, Artificial
  Synthetic oligonucleotide
ggtaggaatttctagcatggtggaggccatggtgtctagggcccggattgatgccaggat

SEQ ID NO: 430408 - DNA, 55 bp, Artificial
  Synthetic oligonucleotide
ggtaggacagttaaattgggcaagtcagatatactcaggaataaagaccaaacac

SEQ ID NO: 430409 - DNA, 55 bp, Artificial
  Synthetic oligonucleotide
ggtaggaccgtcggtggccagatggggatgcttctcacaggggcaaacgcgaaga

SEQ ID NO: 430410 - DNA, 53 bp, Artificial
  Synthetic oligonucleotide
ggtaggacgccggttaccgttgtattacccatggccgtgaaatctggttatac

SEQ ID NO: 430411 - DNA, 54 bp, Artificial
  Synthetic oligonucleotide
ggtaggagacacagaaccagacttataataagacaatggcagccagaaatagtg

SEQ ID NO: 430412 - DNA, 60 bp, Artificial
  Synthetic oligonucleotide
ggtaggagtggatacacaatacatgtgcagtgtaatgctagtaaatttcaccagggtaca

SEQ ID NO: 430413 - DNA, 55 bp, Artificial
  Synthetic oligonucleotide
ggtaggcagggaatccgtttagtggatggaacttggatgtcttttagatactcag

SEQ ID NO: 430414 - DNA, 52 bp, Artificial
  Synthetic oligonucleotide
ggtaggccacatctgatgcgtgaggtgataaggagaacgagcgacaggacgg

SEQ ID NO: 430415 - DNA, 55 bp, Artificial
  Synthetic oligonucleotide
ggtaggccactaatgggtttattttctaggatgggacaccatgggagcccttctc

SEQ ID NO: 430416 - DNA, 55 bp, Artificial
  Synthetic oligonucleotide
ggtaggccttcattgcacaggaatggtaaactgaagataagtaattcagattgcc

SEQ ID NO: 430417 - DNA, 55 bp, Artificial
  Synthetic oligonucleotide
ggtaggcgacctatgggagagaaggttggctcagcaaaactgaatagggctcaag

SEQ ID NO: 430418 - DNA, 55 bp, Artificial
  Synthetic oligonucleotide
ggtaggcgcccgtgttgatggtgtaggtgcagttggccaggacggaccagttaag

SEQ ID NO: 430419 - DNA, 56 bp, Artificial
  Synthetic oligonucleotide
ggtaggcgccttacaaaccgccgggtccctcgtggacatggctggaaccatctctg

SEQ ID NO: 430420 - DNA, 59 bp, Artificial
  Synthetic oligonucleotide
ggtaggcgggttgattgatctgactagagcattaaaggtgggctttgcacgcttatttg

SEQ ID NO: 430421 - DNA, 58 bp, Artificial
  Synthetic oligonucleotide
ggtaggcgtctaatccacgctggcgtagccgctgataggggatgggatttacacttac

SEQ ID NO: 430422 - DNA, 52 bp, Artificial
  Synthetic oligonucleotide
ggtaggcgtggttttgttgatactgattaccctctttacactcaccccgggg

SEQ ID NO: 430423 - DNA, 55 bp, Artificial
  Synthetic oligonucleotide
ggtaggctgtactataaccaggtgtttagaggttgtgtgcaggcatattacaccc

SEQ ID NO: 430424 - DNA, 55 bp, Artificial
  Synthetic oligonucleotide
ggtaggcttaccccacctactagtttggccgatgaggctgggagtccctcacagg

SEQ ID NO: 430425 - DNA, 57 bp, Artificial
  Synthetic oligonucleotide
ggtaggctttccagtcaagccgcaggtacctttgagaccgatgacatttaaggcagc

SEQ ID NO: 430426 - DNA, 57 bp, Artificial
  Synthetic oligonucleotide
ggtaggctttgtggagacccaacgctttcctcaggttgtggttgaatcttatctgta

SEQ ID NO: 430427 - DNA, 59 bp, Artificial
  Synthetic oligonucleotide
ggtaggctttgtggagatccaacgctctcctgaggttgtggttgaatctgatttggagg

SEQ ID NO: 430428 - DNA, 59 bp, Artificial
  Synthetic oligonucleotide
ggtaggctttgtggagatgcaacgctctcctgaggttgtggttgaaccgtatctgaacg

SEQ ID NO: 430429 - DNA, 60 bp, Artificial
  Synthetic oligonucleotide
ggtagggatcgcacaatggcctggacagtggtgaacagtatctgcaatactgcagtggtt

SEQ ID NO: 430430 - DNA, 52 bp, Artificial
  Synthetic oligonucleotide
ggtagggcgttcttgcccatggaggtcaagtgaaagagatcgtactctggat

SEQ ID NO: 430431 - DNA, 51 bp, Artificial
  Synthetic oligonucleotide
ggtagggctatgcctggacgaatgggaaatagagtgcaccggcttctgtag

SEQ ID NO: 430432 - DNA, 60 bp, Artificial
  Synthetic oligonucleotide
ggtagggctcaatggatctcggagcgccgcagtgctctgaggagaagagagcaggctaat

SEQ ID NO: 430433 - DNA, 55 bp, Artificial
  Synthetic oligonucleotide
ggtagggctgttctcaatatacctagaagaatacgacaaggcttggaaagagctc

SEQ ID NO: 430434 - DNA, 55 bp, Artificial
  Synthetic oligonucleotide
ggtagggtggtccccttggctgcttattcccttactggcctgtggccgttctgcc

SEQ ID NO: 430435 - DNA, 47 bp, Artificial
  Synthetic oligonucleotide
ggtaggtaaaacccgggagtcttaattaattccctttcgtgccccct

SEQ ID NO: 430436 - DNA, 60 bp, Artificial
  Synthetic oligonucleotide
ggtaggtagcacgatgttagttgctggtacatcactaccaagacaattcgtaccatacaa

SEQ ID NO: 430437 - DNA, 55 bp, Artificial
  Synthetic oligonucleotide
ggtaggtagttcctacagctactactccatgttaacgtcatagcgtctatccacc

SEQ ID NO: 430438 - DNA, 57 bp, Artificial
  Synthetic oligonucleotide
ggtaggtcgagaactcgaattctgttcacacatcttcagaaatccgaccctcgccgt

SEQ ID NO: 430439 - DNA, 56 bp, Artificial
  Synthetic oligonucleotide
ggtaggtctaaggccctactaatagattgtattacgcatcatttgtcggtcacgac

SEQ ID NO: 430440 - DNA, 55 bp, Artificial
  Synthetic oligonucleotide
ggtaggtctgtctttgtagttccattcaaaatgaatgtctatgacaaagtgctgc

SEQ ID NO: 430441 - DNA, 50 bp, Artificial
  Synthetic oligonucleotide
ggtaggttcgggctgtgcatcctcggacggtgcatcagcgaatgggtcgt

SEQ ID NO: 430442 - DNA, 60 bp, Artificial
  Synthetic oligonucleotide
ggtaggttctcgttgatttcgttagtgcctagtaatgatgactatcaaactccaattgca

SEQ ID NO: 430443 - DNA, 57 bp, Artificial
  Synthetic oligonucleotide
ggtagtaaagcatcctctgctccgataagctgcattaacgaattccttaatgaggta

SEQ ID NO: 430444 - DNA, 55 bp, Artificial
  Synthetic oligonucleotide
ggtagtaaccagttcctcaccacggacgattatcaatcaccatgtgcaatgcccg

SEQ ID NO: 430445 - DNA, 58 bp, Artificial
  Synthetic oligonucleotide
ggtagtaagataaaaaactcagatctgaaccataatattcgcatcacttgttatcgtt

SEQ ID NO: 430446 - DNA, 57 bp, Artificial
  Synthetic oligonucleotide
ggtagtaaggaacctgctgtcttatctggtaaggatcccaggttagaagttgatcta

SEQ ID NO: 430447 - DNA, 55 bp, Artificial
  Synthetic oligonucleotide
ggtagtaaggctacaatgaaaacacgtagtggcaaacaaattggtgctcgggtgc

SEQ ID NO: 430448 - DNA, 58 bp, Artificial
  Synthetic oligonucleotide
ggtagtaataaggagattgatgctgctattgcaaccctaaaagtattgggagttgtgg

SEQ ID NO: 430449 - DNA, 55 bp, Artificial
  Synthetic oligonucleotide
ggtagtaatggagactcaggaaacaattctacgccagatacagtaacacccgggc

SEQ ID NO: 430450 - DNA, 53 bp, Artificial
  Synthetic oligonucleotide
ggtagtaccattattagggaggaggcgataccttttaaggatttctctcctgt

SEQ ID NO: 430451 - DNA, 56 bp, Artificial
  Synthetic oligonucleotide
ggtagtagaaattcaaccattaggaatagcacccaccaaggcaaggagaccagtgg

SEQ ID NO: 430452 - DNA, 58 bp, Artificial
  Synthetic oligonucleotide
ggtagtagagctgaatcctatctcaaagtcctgggttttaatgtatctgggtctgttg

SEQ ID NO: 430453 - DNA, 55 bp, Artificial
  Synthetic oligonucleotide
ggtagtatctgtcattgctgaaaactactaactgcgtgtgagtactagaaagagg

SEQ ID NO: 430454 - DNA, 58 bp, Artificial
  Synthetic oligonucleotide
ggtagtatggttaccagatacagtaatgaatgtgtttaacaatccaaatgatgtaggt

SEQ ID NO: 430455 - DNA, 55 bp, Artificial
  Synthetic oligonucleotide
ggtagtattagcactccgactctatcagcacttgtgcaatacactacaatcgcac

SEQ ID NO: 430456 - DNA, 53 bp, Artificial
  Synthetic oligonucleotide
ggtagtattaggagtgcctggttgcggtaagagtagttgtatccgcaaattga

SEQ ID NO: 430457 - DNA, 50 bp, Artificial
  Synthetic oligonucleotide
ggtagtattagtagggcctacaccagtagacattataggtaggaacatct

SEQ ID NO: 430458 - DNA, 53 bp, Artificial
  Synthetic oligonucleotide
ggtagtcaagcaattaagaaaatactttgtgaacgaaacaataacgtttacta

SEQ ID NO: 430459 - DNA, 55 bp, Artificial
  Synthetic oligonucleotide
ggtagtcagctgttagcgtgtgacgttgaagggtagtggtatttgggttcgctgg

SEQ ID NO: 430460 - DNA, 55 bp, Artificial
  Synthetic oligonucleotide
ggtagtccatatgttagtcctttgggtaatattgagcagtcagtagactgcgaca

SEQ ID NO: 430461 - DNA, 51 bp, Artificial
  Synthetic oligonucleotide
ggtagtccccgtgctcgtatagggtgaggtccttccacggacgcagcactc

SEQ ID NO: 430462 - DNA, 60 bp, Artificial
  Synthetic oligonucleotide
ggtagtcctactagatgatgcaacacgaagcacatgggactatgtagatacctatttaag

SEQ ID NO: 430463 - DNA, 57 bp, Artificial
  Synthetic oligonucleotide
ggtagtcgcgaatctattccaggtgccccagaatcccgtagtcgacgggattcttgc

SEQ ID NO: 430464 - DNA, 55 bp, Artificial
  Synthetic oligonucleotide
ggtagtcgcgtgccacatatagttcgtaggaatctttcaaagtatactatgttag

SEQ ID NO: 430465 - DNA, 55 bp, Artificial
  Synthetic oligonucleotide
ggtagtcgtgctgtcgtgacttatgagggtgatactagcgcaggctataaccatg

SEQ ID NO: 430466 - DNA, 56 bp, Artificial
  Synthetic oligonucleotide
ggtagtcgtggtggcaccctctatggcccaacctaggacccagtctcgccgtccta

SEQ ID NO: 430467 - DNA, 55 bp, Artificial
  Synthetic oligonucleotide
ggtagtctagcttttgaagcactctcaaagataatgcagtccatgagagcacaat

SEQ ID NO: 430468 - DNA, 54 bp, Artificial
  Synthetic oligonucleotide
ggtagtctggagggagggcccaaggtgggagataaaagaaatagctgatttggg

SEQ ID NO: 430469 - DNA, 55 bp, Artificial
  Synthetic oligonucleotide
ggtagtctgggtacaccacctccgttcttgcacggtactcgattacgcttgttcg

SEQ ID NO: 430470 - DNA, 52 bp, Artificial
  Synthetic oligonucleotide
ggtagtcttcgaaatttaatgttggtgggttcggtgtgtttgttaggaagtc

SEQ ID NO: 430471 - DNA, 60 bp, Artificial
  Synthetic oligonucleotide
ggtagtcttgtgcgcccagtcatggaagaacaacacttggctgaattgctgaaatgggct

SEQ ID NO: 430472 - DNA, 57 bp, Artificial
  Synthetic oligonucleotide
ggtagtgaataccactctgtcaacaatagcccttctcatcggagtgggaaacttagt

SEQ ID NO: 430473 - DNA, 56 bp, Artificial
  Synthetic oligonucleotide
ggtagtgacaccccccagtttggttcacgtcggtgccaatgactactaccctgaga

SEQ ID NO: 430474 - DNA, 55 bp, Artificial
  Synthetic oligonucleotide
ggtagtgaccactgcctgcgcccaatgaggcgcgatgctccagtcgatactggtc

SEQ ID NO: 430475 - DNA, 55 bp, Artificial
  Synthetic oligonucleotide
ggtagtgagggaatataacgagacagttaggatcgagagggtaactcaatggcac

SEQ ID NO: 430476 - DNA, 58 bp, Artificial
  Synthetic oligonucleotide
ggtagtgagggtcgacgtcatcaatgacgttgtaccatgcgtcgttactgtatacctt

SEQ ID NO: 430477 - DNA, 54 bp, Artificial
  Synthetic oligonucleotide
ggtagtgagtgcgaggaaggtttaaattgcaaaagaaagccacctttggaggag

SEQ ID NO: 430478 - DNA, 55 bp, Artificial
  Synthetic oligonucleotide
ggtagtgattctgtttactataaaagtactagcactactaagctggcaccgggta

SEQ ID NO: 430479 - DNA, 55 bp, Artificial
  Synthetic oligonucleotide
ggtagtgccatcgtcacggggggtatcccgccccagcggacgcaaaggtgcctac

SEQ ID NO: 430480 - DNA, 60 bp, Artificial
  Synthetic oligonucleotide
ggtagtgcggatctacgtcatcaatgacgttataccaagcatcattattgtacaccttag

SEQ ID NO: 430481 - DNA, 54 bp, Artificial
  Synthetic oligonucleotide
ggtagtgcgttgttagtgttgacttcgagtagaaactcagctgatacgctaaaa

SEQ ID NO: 430482 - DNA, 55 bp, Artificial
  Synthetic oligonucleotide
ggtagtgctctggttgtctatgaacccaaaccagttgtcacttacgattcaaaac

SEQ ID NO: 430483 - DNA, 55 bp, Artificial
  Synthetic oligonucleotide
ggtagtgcttaagaacatacattgggataggataaaagggtatccagggacacca

SEQ ID NO: 430484 - DNA, 55 bp, Artificial
  Synthetic oligonucleotide
ggtagtggacaagttggcacctatggcctcaacacctttaccaatatgggagccc

SEQ ID NO: 430485 - DNA, 56 bp, Artificial
  Synthetic oligonucleotide
ggtagtggattacgtcaatcaaataattcagacaatgtccaaaagatctagatcgc

SEQ ID NO: 430486 - DNA, 57 bp, Artificial
  Synthetic oligonucleotide
ggtagtgggagcaattgcgacgtaatttcaaaaggagacaacatccttgtgtacgta

SEQ ID NO: 430487 - DNA, 55 bp, Artificial
  Synthetic oligonucleotide
ggtagtgggcagtatagactaataaattgcaatacatcagccatgacacaggcct

SEQ ID NO: 430488 - DNA, 57 bp, Artificial
  Synthetic oligonucleotide
ggtagtgggcttacccatcgtgttggtaagagattctgtgtgaagtccgtttatgta

SEQ ID NO: 430489 - DNA, 58 bp, Artificial
  Synthetic oligonucleotide
ggtagtgggggtctacgtcatcaatgacgttataccaggcatcattactgtagacctt

SEQ ID NO: 430490 - DNA, 55 bp, Artificial
  Synthetic oligonucleotide
ggtagtgttgcgacctgagtctcactcacaagggaagcgacgggttcgatacttc

SEQ ID NO: 430491 - DNA, 51 bp, Artificial
  Synthetic oligonucleotide
ggtagttacaaaattaggggaacaacttaacaaaacaacaataatctttgc

SEQ ID NO: 430492 - DNA, 57 bp, Artificial
  Synthetic oligonucleotide
ggtagttagtttattagactacgctagttcatacagataaattgcaacggattataa

SEQ ID NO: 430493 - DNA, 60 bp, Artificial
  Synthetic oligonucleotide
ggtagttatcattcgaacatgcgttggttgttcgcttggttgtcagcttgtaaagaatga

SEQ ID NO: 430494 - DNA, 56 bp, Artificial
  Synthetic oligonucleotide
ggtagttatggtagctcttatatagtagaagttctttctaaggagattgctacacg

SEQ ID NO: 430495 - DNA, 60 bp, Artificial
  Synthetic oligonucleotide
ggtagttcaccacatgatcatttgagcaagtttgcttgaataaaagaactatcattccgc

SEQ ID NO: 430496 - DNA, 60 bp, Artificial
  Synthetic oligonucleotide
ggtagttccctgcagaccccaggatgaactaatagggagagcgaggatctctcaaggagc

SEQ ID NO: 430497 - DNA, 55 bp, Artificial
  Synthetic oligonucleotide
ggtagttccgtgcgaaaatccgtgatggcattcatgatgaattgtgaagtgacac

SEQ ID NO: 430498 - DNA, 55 bp, Artificial
  Synthetic oligonucleotide
ggtagttggagcgcgcgcgtaccatatccacctggcaatctgcctacacggaata

SEQ ID NO: 430499 - DNA, 60 bp, Artificial
  Synthetic oligonucleotide
ggtagttgtgatgtgggtccaatgacctggcccacatggtcttccctgtcctgctatctc

SEQ ID NO: 430500 - DNA, 58 bp, Artificial
  Synthetic oligonucleotide
ggtataaaatgtacaattttacacatatagacgattggcaggcctgggccattctcct

SEQ ID NO: 430501 - DNA, 55 bp, Artificial
  Synthetic oligonucleotide
ggtataaacatcgggcaacgcagattgtttgagtggttacgtcaaaacggattcc

SEQ ID NO: 430502 - DNA, 51 bp, Artificial
  Synthetic oligonucleotide
ggtataaacatctaatggcgccttatgtttagacggaatcttaacaaccgg

SEQ ID NO: 430503 - DNA, 55 bp, Artificial
  Synthetic oligonucleotide
ggtataaaccccaattacctcctggcttggaagcaggtgttggcagaactccagg

SEQ ID NO: 430504 - DNA, 55 bp, Artificial
  Synthetic oligonucleotide
ggtataaatcaccagtgactcttgcatagtagttgtcaccgtgtttaacgatgtt

SEQ ID NO: 430505 - DNA, 56 bp, Artificial
  Synthetic oligonucleotide
ggtataacaggtaggttgaaggagcatgtaagcttcgggactaacctggaagatgt

SEQ ID NO: 430506 - DNA, 60 bp, Artificial
  Synthetic oligonucleotide
ggtataactcactcaaaagcaccaaatgctgaaagtctgcgaggcattgtgcgatttgca

SEQ ID NO: 430507 - DNA, 59 bp, Artificial
  Synthetic oligonucleotide
ggtataactggggacagttcctccatttcattcgaagttgtatgtgcctatacgcacgc

SEQ ID NO: 430508 - DNA, 58 bp, Artificial
  Synthetic oligonucleotide
ggtataagtgtaaggtagtactggttaagatgcctggatacgtattcggtaatgatga

SEQ ID NO: 430509 - DNA, 60 bp, Artificial
  Synthetic oligonucleotide
ggtataatcatgggactagataaattagcaaatatgtcaaacaacgctaaagtcattcaa

SEQ ID NO: 430510 - DNA, 53 bp, Artificial
  Synthetic oligonucleotide
ggtataatggattaacattgcgtggagttacaatgagacccacatcattggcg

SEQ ID NO: 430511 - DNA, 60 bp, Artificial
  Synthetic oligonucleotide
ggtataatgtgcatagctgttgtccacttctagatgaccgcgatggtgccagatttaccg

SEQ ID NO: 430512 - DNA, 55 bp, Artificial
  Synthetic oligonucleotide
ggtatacagcgtattatggcgaatatgaaacgacaccgcctcagtacacactgtg

SEQ ID NO: 430513 - DNA, 56 bp, Artificial
  Synthetic oligonucleotide
ggtatacataccgatgccacaggggtgatacacaaattcaaacaagacgatcattt

SEQ ID NO: 430514 - DNA, 57 bp, Artificial
  Synthetic oligonucleotide
ggtatacatgggaagcccaatttatgttaattgggctgaagtataaattctgaagaa

SEQ ID NO: 430515 - DNA, 56 bp, Artificial
  Synthetic oligonucleotide
ggtataccacccataaatacacctgcatcaactaaactacaccccagtgttttcta

SEQ ID NO: 430516 - DNA, 59 bp, Artificial
  Synthetic oligonucleotide
ggtataccccacctgttcgaatggatacatttaaggctaatgcgaagcactctctatgt

SEQ ID NO: 430517 - DNA, 60 bp, Artificial
  Synthetic oligonucleotide
ggtataccggcaccacagctagcgtgtgtagtaattggcaagcacggttctcttctaaga

SEQ ID NO: 430518 - DNA, 50 bp, Artificial
  Synthetic oligonucleotide
ggtatactggtccatacctctggaaccataggagtttgatgtatagtgga

SEQ ID NO: 430519 - DNA, 56 bp, Artificial
  Synthetic oligonucleotide
ggtatagaagggaggtcttgaagtgcaagtgtaatttaaatgtaccttctgaatgg

SEQ ID NO: 430520 - DNA, 57 bp, Artificial
  Synthetic oligonucleotide
ggtatagactgtttatctaatgagtggtccatactttaccaccaattgcgttccaaa

SEQ ID NO: 430521 - DNA, 60 bp, Artificial
  Synthetic oligonucleotide
ggtatagccagagtgccgtacttcgtacgcgctcacgggcttattcgtgcatgcatgctg

SEQ ID NO: 430522 - DNA, 60 bp, Artificial
  Synthetic oligonucleotide
ggtatagcgctaactctgtttaatcttgctgacacgcttctcggtgggctcccgacagaa

SEQ ID NO: 430523 - DNA, 60 bp, Artificial
  Synthetic oligonucleotide
ggtatagcgttatggtggtgaattctaggtatcctacgatgaagctacttgaggcagacg

SEQ ID NO: 430524 - DNA, 52 bp, Artificial
  Synthetic oligonucleotide
ggtataggcatacccacccaggagaacagggccgtgtgataggcacacgtga

SEQ ID NO: 430525 - DNA, 55 bp, Artificial
  Synthetic oligonucleotide
ggtatagtactccagatatggacacaccctataggggaattccagaatagaaggc

SEQ ID NO: 430526 - DNA, 55 bp, Artificial
  Synthetic oligonucleotide
ggtatagtgtgggaaaaggtgcctttctcattcgttgtcgactggctcctacctg

SEQ ID NO: 430527 - DNA, 57 bp, Artificial
  Synthetic oligonucleotide
ggtatagttcgttgtgttagtgatgtgacccgtgggtctggtctgactcatagagta

SEQ ID NO: 430528 - DNA, 60 bp, Artificial
  Synthetic oligonucleotide
ggtatatacgaccaagtcatggtacttccaactcattctgatccgggttctgagatctta

SEQ ID NO: 430529 - DNA, 55 bp, Artificial
  Synthetic oligonucleotide
ggtatatcaaccgttctgtcagatgtttctgttttagtacctggcagatgaatcg

SEQ ID NO: 430530 - DNA, 51 bp, Artificial
  Synthetic oligonucleotide
ggtatatccatataccggaggagctatgtttccgaaacagaatatcgatcg

SEQ ID NO: 430531 - DNA, 58 bp, Artificial
  Synthetic oligonucleotide
ggtatatccgtccgttcctgcagattagccagagttcaccgtttggcaccgtctggta

SEQ ID NO: 430532 - DNA, 54 bp, Artificial
  Synthetic oligonucleotide
ggtatatcgaggcttggagaaaccttaaggttagattaacacgaacgtgttaga

SEQ ID NO: 430533 - DNA, 60 bp, Artificial
  Synthetic oligonucleotide
ggtatatgacacagggattacatcatacaaaagatcgagtgcataacacaaaaattgctc

SEQ ID NO: 430534 - DNA, 55 bp, Artificial
  Synthetic oligonucleotide
ggtatatgactttgcatgctatgatttgtgtatagtatatagagaaggccagcca

SEQ ID NO: 430535 - DNA, 55 bp, Artificial
  Synthetic oligonucleotide
ggtatatggagaggttcattcgatgattccgatgtttgcatagttgtccaagacc

SEQ ID NO: 430536 - DNA, 55 bp, Artificial
  Synthetic oligonucleotide
ggtatatggtaccaccccagaatggatagaacaccaaacagtattacagcatagc

SEQ ID NO: 430537 - DNA, 60 bp, Artificial
  Synthetic oligonucleotide
ggtatatgtgcggtcgctgaatgcagaattaaatcaagtgcaatgtgtaggaggtcatta

SEQ ID NO: 430538 - DNA, 56 bp, Artificial
  Synthetic oligonucleotide
ggtatattcgaaactttggtaatacaagttcatatgacggacgtgaagatattttc

SEQ ID NO: 430539 - DNA, 60 bp, Artificial
  Synthetic oligonucleotide
ggtatattgaacaatgtttgcagtacacacaccgtgccctcagtgatgttagcttaccaa

SEQ ID NO: 430540 - DNA, 60 bp, Artificial
  Synthetic oligonucleotide
ggtatattgcctcacttgatgacttaactttcacacatagccttgcgccttcatcacagg

SEQ ID NO: 430541 - DNA, 59 bp, Artificial
  Synthetic oligonucleotide
ggtatatttagattatagtattcatagtcttttgctcgttatgtcccgaggttcaatca

SEQ ID NO: 430542 - DNA, 53 bp, Artificial
  Synthetic oligonucleotide
ggtatatttgttatacttttgatcgtggacaagaaaccattcgtacccgaagg

SEQ ID NO: 430543 - DNA, 53 bp, Artificial
  Synthetic oligonucleotide
ggtatcaaaggtttcctcggtgacccaccgactccagggggcgttgacagacg

SEQ ID NO: 430544 - DNA, 50 bp, Artificial
  Synthetic oligonucleotide
ggtatcaacggggtgtaaccacaagacgaaccttcacccggaagtaaaac

SEQ ID NO: 430545 - DNA, 55 bp, Artificial
  Synthetic oligonucleotide
ggtatcaagttttgcgcaaatggtatgcaactgtcaccggtggacaatacgcttc

SEQ ID NO: 430546 - DNA, 59 bp, Artificial
  Synthetic oligonucleotide
ggtatcacaatactacgggataaccatggctgagcgccagagcaacgggtggcttaaga

SEQ ID NO: 430547 - DNA, 59 bp, Artificial
  Synthetic oligonucleotide
ggtatcaccacaccaggtgtatatagtacttatgttttacatggtgaatcctggttgga

SEQ ID NO: 430548 - DNA, 59 bp, Artificial
  Synthetic oligonucleotide
ggtatcacgcgtgagcaagctttcaacttactaaaatcagatccacgcgtactaaggga

SEQ ID NO: 430549 - DNA, 57 bp, Artificial
  Synthetic oligonucleotide
ggtatcacgggcgacaatacaacagcgtcctccgagcccgcctcttctggccacccc

SEQ ID NO: 430550 - DNA, 57 bp, Artificial
  Synthetic oligonucleotide
ggtatcactgattacattacaagcctgggaaaagcttttggagtgggtttcactgac

SEQ ID NO: 430551 - DNA, 60 bp, Artificial
  Synthetic oligonucleotide
ggtatcagacaactccgagctcgcctgctagccttagaaacctttatacagaatcagcaa

SEQ ID NO: 430552 - DNA, 55 bp, Artificial
  Synthetic oligonucleotide
ggtatcagagccatgaatcggtttaagaccaaaactcaagagggtaaaacctcac

SEQ ID NO: 430553 - DNA, 55 bp, Artificial
  Synthetic oligonucleotide
ggtatcagccctaactttgtgcatagtcaggatggtaaccacttacggatgactg

SEQ ID NO: 430554 - DNA, 55 bp, Artificial
  Synthetic oligonucleotide
ggtatcagcgaagctgcatgttgagtgggttcttattaattgctactgacggtcc

SEQ ID NO: 430555 - DNA, 60 bp, Artificial
  Synthetic oligonucleotide
ggtatcagcgtactttagtagcaagcctatagcgtcctatggggcgctatgtgaatgcaa

SEQ ID NO: 430556 - DNA, 57 bp, Artificial
  Synthetic oligonucleotide
ggtatcaggtacaggagcatccataatgatgcaaaaaagcaattttaggggcccaag

SEQ ID NO: 430557 - DNA, 50 bp, Artificial
  Synthetic oligonucleotide
ggtatcaggtattgcggaagttctacgcaactgttactggtggtcagtat

SEQ ID NO: 430558 - DNA, 55 bp, Artificial
  Synthetic oligonucleotide
ggtatcatcagacctagcaagagtccacattcctcaccagccttcatggtaagga

SEQ ID NO: 430559 - DNA, 52 bp, Artificial
  Synthetic oligonucleotide
ggtatcatgtgggccccagtgtcttcttaggagtccctggtgtggtgtccta

SEQ ID NO: 430560 - DNA, 55 bp, Artificial
  Synthetic oligonucleotide
ggtatcattcttcgagcgtctgagtctatgttagctagacgtcaaggttacgagg

SEQ ID NO: 430561 - DNA, 52 bp, Artificial
  Synthetic oligonucleotide
ggtatcattggaactatgtagattagaaaggaggtgatggagtgcaaattaa

SEQ ID NO: 430562 - DNA, 55 bp, Artificial
  Synthetic oligonucleotide
ggtatccaaggtacaccaggaggagaacaacaaacaggaggtacaccagacgcag

SEQ ID NO: 430563 - DNA, 59 bp, Artificial
  Synthetic oligonucleotide
ggtatccaattaagcgtaagtatgttgccgggcatacgagaccatgtgttaggcgaaga

SEQ ID NO: 430564 - DNA, 55 bp, Artificial
  Synthetic oligonucleotide
ggtatccacgagacaagtgtggagagtttctttggacgctcctcactcgtgggta

SEQ ID NO: 430565 - DNA, 53 bp, Artificial
  Synthetic oligonucleotide
ggtatccacgttgaaagggacacagatcttcgaggggaagaccaatcgcaccg

SEQ ID NO: 430566 - DNA, 56 bp, Artificial
  Synthetic oligonucleotide
ggtatccagacattgccacctgctaatgtgtcccttggttctacgggtcaaccttt

SEQ ID NO: 430567 - DNA, 55 bp, Artificial
  Synthetic oligonucleotide
ggtatccattcagctggcactggatctgttgcattttgctccctggtgtccagag

SEQ ID NO: 430568 - DNA, 57 bp, Artificial
  Synthetic oligonucleotide
ggtatcccctctggtagctgttttaccaacatgattggtagcgtcgtcaactacgtc

SEQ ID NO: 430569 - DNA, 54 bp, Artificial
  Synthetic oligonucleotide
ggtatccgatgggaattgacataaagaaacataaacctttacccgattgttcca

SEQ ID NO: 430570 - DNA, 60 bp, Artificial
  Synthetic oligonucleotide
ggtatccgatttgttcagctcaacaatactgtatagatatgcggaagcagagctagataa

SEQ ID NO: 430571 - DNA, 55 bp, Artificial
  Synthetic oligonucleotide
ggtatccgcaaatcaatatagagtgtttagaattaagttgcctgacccaaatagg

SEQ ID NO: 430572 - DNA, 60 bp, Artificial
  Synthetic oligonucleotide
ggtatccggatgctgtgtacttgcacagaattgacctcggtcctcccatatcattggaga

SEQ ID NO: 430573 - DNA, 55 bp, Artificial
  Synthetic oligonucleotide
ggtatcctatcactggcccggtcccaggtattgcactgtatgcaaatgcagtgca

SEQ ID NO: 430574 - DNA, 55 bp, Artificial
  Synthetic oligonucleotide
ggtatcctcttctggacttactgaattggtacaaaccaccgacctatacaacacc

SEQ ID NO: 430575 - DNA, 55 bp, Artificial
  Synthetic oligonucleotide
ggtatcctgtgttggttgaggtccagagggatgcaaaacgacacgagttcggcag

SEQ ID NO: 430576 - DNA, 52 bp, Artificial
  Synthetic oligonucleotide
ggtatcgaagggaaagaaagatataacggcggtaggtaaaatttcaggagta

SEQ ID NO: 430577 - DNA, 60 bp, Artificial
  Synthetic oligonucleotide
ggtatcgagcagtctagtcttggtagggctgataatagcagtgggtctttggatgtgttc

SEQ ID NO: 430578 - DNA, 60 bp, Artificial
  Synthetic oligonucleotide
ggtatcgagcagtctagttttggtaggactgatcatggcaataggtctttggatgtgttc

SEQ ID NO: 430579 - DNA, 60 bp, Artificial
  Synthetic oligonucleotide
ggtatcgagcgttgtgttatccacgccggcattatgacgtacaagatcatcggtgtacct

SEQ ID NO: 430580 - DNA, 55 bp, Artificial
  Synthetic oligonucleotide
ggtatcgatcctttagtaacacggtggacccgagacggcgtacaagaggctgcta

SEQ ID NO: 430581 - DNA, 55 bp, Artificial
  Synthetic oligonucleotide
ggtatcgatctatcgcatctcaaggttgcggagatccatccgcatgtgattggcc

SEQ ID NO: 430582 - DNA, 55 bp, Artificial
  Synthetic oligonucleotide
ggtatcgatgcaggcgtgtcgatcatcctgagtgcctatggcattcgcggtgcgg

SEQ ID NO: 430583 - DNA, 60 bp, Artificial
  Synthetic oligonucleotide
ggtatcgcatgcagcctgatcgcgttgcattgccgtataactatcttgatggttttccgt

SEQ ID NO: 430584 - DNA, 60 bp, Artificial
  Synthetic oligonucleotide
ggtatcgcctgatgtgacgtctacggtagtatgggcgggcgtatcttcgtttgatctgaa

SEQ ID NO: 430585 - DNA, 54 bp, Artificial
  Synthetic oligonucleotide
ggtatcgcctgtggttttccacaggttctcgtccgaagacgttaaactacactc

SEQ ID NO: 430586 - DNA, 60 bp, Artificial
  Synthetic oligonucleotide
ggtatcgcggctggagctgctttgactacagccgtcacggctcagggtgtcagtaaacta

SEQ ID NO: 430587 - DNA, 55 bp, Artificial
  Synthetic oligonucleotide
ggtatcggaccatgtatttctgtgtcatagctattgagagttaaatgcgtgactg

SEQ ID NO: 430588 - DNA, 60 bp, Artificial
  Synthetic oligonucleotide
ggtatcggccaagtcgtgcgtctcagtcgtcgccctgctaaacaccatgaactggaccag

SEQ ID NO: 430589 - DNA, 55 bp, Artificial
  Synthetic oligonucleotide
ggtatcgtgccagcacagacagtatgtggcccagtgtattgcttcactcctagcc

SEQ ID NO: 430590 - DNA, 55 bp, Artificial
  Synthetic oligonucleotide
ggtatcgttatcctcctatttgcctagggagagcaccaggatgtttaatgcctgc

SEQ ID NO: 430591 - DNA, 57 bp, Artificial
  Synthetic oligonucleotide
ggtatctaacagatcctatctgattctgtctcaatctagcaactgagctggtcttca

SEQ ID NO: 430592 - DNA, 60 bp, Artificial
  Synthetic oligonucleotide
ggtatctagggcccgaattgatgcgcgaattgacttcgaatctggacggattaagagaga

SEQ ID NO: 430593 - DNA, 60 bp, Artificial
  Synthetic oligonucleotide
ggtatctcaagatctagataaacgaggagcagtaacaagtagtaacatgaataattgcct

SEQ ID NO: 430594 - DNA, 55 bp, Artificial
  Synthetic oligonucleotide
ggtatctccgacaatgtcgtccatgtcgagtccggcaacggtctcagcaagaacg

SEQ ID NO: 430595 - DNA, 55 bp, Artificial
  Synthetic oligonucleotide
ggtatctctgaggatcacgttactttggtaagattgaagagcacgaagtgtgacc

SEQ ID NO: 430596 - DNA, 56 bp, Artificial
  Synthetic oligonucleotide
ggtatctgacgggctggcaccgttccacttacgattgcggtgaccggtcttaatgg

SEQ ID NO: 430597 - DNA, 58 bp, Artificial
  Synthetic oligonucleotide
ggtatctgatagtattcaaatgggactttaagtactggtgcgttctgtcccacggaga

SEQ ID NO: 430598 - DNA, 55 bp, Artificial
  Synthetic oligonucleotide
ggtatgaaacttgcgaatcgggctgtaacggggcaaggcttgactgaggggacca

SEQ ID NO: 430599 - DNA, 50 bp, Artificial
  Synthetic oligonucleotide
ggtatgaaattaacccgggtaaagtatttgcgtcaaggaaaagggacgag

SEQ ID NO: 430600 - DNA, 55 bp, Artificial
  Synthetic oligonucleotide
ggtatgaacaaattcaatgccgagagttataagaacaagctgcaacctaagttcg

SEQ ID NO: 430601 - DNA, 57 bp, Artificial
  Synthetic oligonucleotide
ggtatgaactttgaaacatctatgtttaataaggtggctattttaatttgtgaggca

SEQ ID NO: 430602 - DNA, 57 bp, Artificial
  Synthetic oligonucleotide
ggtatgaatacgactaaagggacaaataccactgaaggagatatcatactcccatgc

SEQ ID NO: 430603 - DNA, 58 bp, Artificial
  Synthetic oligonucleotide
ggtatgaattatgaaacgcctatgttaatcaaggtggccatattaatttgtgaagcac

SEQ ID NO: 430604 - DNA, 55 bp, Artificial
  Synthetic oligonucleotide
ggtatgacagggcgagagttggtttgttttccgagatgtttgatcggcggggagt

SEQ ID NO: 430605 - DNA, 55 bp, Artificial
  Synthetic oligonucleotide
ggtatgaccttaacggaaaggaggcaatttgtttcgctggtgatgacatgtgtgc

SEQ ID NO: 430606 - DNA, 60 bp, Artificial
  Synthetic oligonucleotide
ggtatgaccttgtctccaaatgaatgcggcacatggtccctagctgcagctgctctttat

SEQ ID NO: 430607 - DNA, 55 bp, Artificial
  Synthetic oligonucleotide
ggtatgacgtagtgatttatacgtccgtcgtgactgtcggtctgagtttcgaacc

SEQ ID NO: 430608 - DNA, 56 bp, Artificial
  Synthetic oligonucleotide
ggtatgactccgtgtttaaacacacactgttgggtgaaatattaaactactacgca

SEQ ID NO: 430609 - DNA, 54 bp, Artificial
  Synthetic oligonucleotide
ggtatgactttgagagggaagggtactctctggtcgggatagacccttttcgac

SEQ ID NO: 430610 - DNA, 55 bp, Artificial
  Synthetic oligonucleotide
ggtatgagtaacgttgatgttctcactacccatgaagcacaagggaaaacgcgtg

SEQ ID NO: 430611 - DNA, 55 bp, Artificial
  Synthetic oligonucleotide
ggtatgatagggctagtgacttaaacgtggtaacacaagctagagatagccccac

SEQ ID NO: 430612 - DNA, 55 bp, Artificial
  Synthetic oligonucleotide
ggtatgatgcaagattaaacttaaagacatcatttcactgttatggtgcctgcac

SEQ ID NO: 430613 - DNA, 60 bp, Artificial
  Synthetic oligonucleotide
ggtatgcacagaaatgtcaggacctgcgatctacaggtatctcaacgactacttccattt

SEQ ID NO: 430614 - DNA, 60 bp, Artificial
  Synthetic oligonucleotide
ggtatgcactgaaacgtaatctccgagacacagagtgcgctcgttacgcctttgatttct

SEQ ID NO: 430615 - DNA, 60 bp, Artificial
  Synthetic oligonucleotide
ggtatgcagcagacagagagagcacccaaaaggctatagacgggatcacaaataaggtaa

SEQ ID NO: 430616 - DNA, 55 bp, Artificial
  Synthetic oligonucleotide
ggtatgcagtggaagggttgggtcgatcattttaagactcgcatttggtggaacg

SEQ ID NO: 430617 - DNA, 55 bp, Artificial
  Synthetic oligonucleotide
ggtatgcatccattaaacatcgtcacagtgtggggtataccgtctctggagtgca

SEQ ID NO: 430618 - DNA, 57 bp, Artificial
  Synthetic oligonucleotide
ggtatgccaacactcggatgaccccatagaaactatgtaccaatatgggtttgtcgg

SEQ ID NO: 430619 - DNA, 60 bp, Artificial
  Synthetic oligonucleotide
ggtatgccatggaaatacgtcctgttcatgaccagggagggcttattcgctcaatggtgg

SEQ ID NO: 430620 - DNA, 51 bp, Artificial
  Synthetic oligonucleotide
ggtatgcgcaggactgcactgtgacgatttggttgagacacgtcccgtcac

SEQ ID NO: 430621 - DNA, 60 bp, Artificial
  Synthetic oligonucleotide
ggtatgcgcccccctgcaagcctttgctgcgagatgaggtgtcattcagagtgggactac

SEQ ID NO: 430622 - DNA, 60 bp, Artificial
  Synthetic oligonucleotide
ggtatgcgccggctggaggttgagcacgcccagaaatttatcacaagactttacagctgg

SEQ ID NO: 430623 - DNA, 59 bp, Artificial
  Synthetic oligonucleotide
ggtatgcgtgaaactcctggcagttttgtatattctccgtctcccagtggctctattat

SEQ ID NO: 430624 - DNA, 60 bp, Artificial
  Synthetic oligonucleotide
ggtatgcgtgcaattatgtgaggtctctctgctataaataacacgtcacgaggcgggtgt

SEQ ID NO: 430625 - DNA, 57 bp, Artificial
  Synthetic oligonucleotide
ggtatgctataactattgtttcgggcatgcaggtggacgttgaagtaaaaagcgtaa

SEQ ID NO: 430626 - DNA, 56 bp, Artificial
  Synthetic oligonucleotide
ggtatgcttcaggaacctttaaaccagctgagaagaattaccatagtaatgaaaag

SEQ ID NO: 430627 - DNA, 60 bp, Artificial
  Synthetic oligonucleotide
ggtatgcttcgatggctatacaacaatatctgagggttggttacgctgaagaggtcaggt

SEQ ID NO: 430628 - DNA, 52 bp, Artificial
  Synthetic oligonucleotide
ggtatgcttgtgactaaaggacctcccctcgcaaaaccccgtaaattgtacc

SEQ ID NO: 430629 - DNA, 57 bp, Artificial
  Synthetic oligonucleotide
ggtatgctttgtgtagattcaacgccttcctcaggttgtggttgaaccgtatttgga

SEQ ID NO: 430630 - DNA, 54 bp, Artificial
  Synthetic oligonucleotide
ggtatggacggggcactgtgtcggcaccaagtcgcgtcgcccccggtttcggcc

SEQ ID NO: 430631 - DNA, 55 bp, Artificial
  Synthetic oligonucleotide
ggtatggactaacttattccctgagcttgattgtatctttgagtttgcacatcac

SEQ ID NO: 430632 - DNA, 55 bp, Artificial
  Synthetic oligonucleotide
ggtatggatgattcaaaatcggtcacgacacttgtcaactcacgtttagctggac

SEQ ID NO: 430633 - DNA, 60 bp, Artificial
  Synthetic oligonucleotide
ggtatggatggacgagagcatcaagttgaagaatcacacaaatagtgtgatgttctggtt

SEQ ID NO: 430634 - DNA, 55 bp, Artificial
  Synthetic oligonucleotide
ggtatggattatgaccttaccggaccgtatgcggttgcgttacgagccgacgttg

SEQ ID NO: 430635 - DNA, 55 bp, Artificial
  Synthetic oligonucleotide
ggtatggcatttgggagtataagagaactgtagaaggcatcgaacttcctttgga

SEQ ID NO: 430636 - DNA, 52 bp, Artificial
  Synthetic oligonucleotide
ggtatggcggagaaataccaacaaccggacccaccttcatcccaaaatgggg

SEQ ID NO: 430637 - DNA, 55 bp, Artificial
  Synthetic oligonucleotide
ggtatggctccgagaacaggaaaaggaaggctaccagcaccagtaccccgcctgt

SEQ ID NO: 430638 - DNA, 60 bp, Artificial
  Synthetic oligonucleotide
ggtatggctgaggtcaccgcaagtgcagagggctaccagcttgtgaatgttgagtgggcc

SEQ ID NO: 430639 - DNA, 55 bp, Artificial
  Synthetic oligonucleotide
ggtatggctgggctgaatttactggggataaagaaatacaaagtgggttgcctac

SEQ ID NO: 430640 - DNA, 59 bp, Artificial
  Synthetic oligonucleotide
ggtatgggcagaaacagcctcattaacgatttggctcagagacgtgtttacgataacgc

SEQ ID NO: 430641 - DNA, 60 bp, Artificial
  Synthetic oligonucleotide
ggtatgggcagacgtgatccatgaccgcatcacagtcaccggagctaagctcttcttgca

SEQ ID NO: 430642 - DNA, 59 bp, Artificial
  Synthetic oligonucleotide
ggtatgggcctttcgctgcaacgacaagccaaaagcttgttcgacgatttgagagtcaa

SEQ ID NO: 430643 - DNA, 56 bp, Artificial
  Synthetic oligonucleotide
ggtatggtagtggcgtttggataggtagaaccaaaagcattagttccaggagcgga

SEQ ID NO: 430644 - DNA, 60 bp, Artificial
  Synthetic oligonucleotide
ggtatggtccgatgtgtcagtgatgttactcgtggatcaggcattacccatagagtcggg

SEQ ID NO: 430645 - DNA, 50 bp, Artificial
  Synthetic oligonucleotide
ggtatggtctacaacgtaatttgactgatatgagtcttgcgcgatatgca

SEQ ID NO: 430646 - DNA, 60 bp, Artificial
  Synthetic oligonucleotide
ggtatggtgaatcaccctgctgcatatttgcaagtaaaacatagtgatacacccatccca

SEQ ID NO: 430647 - DNA, 60 bp, Artificial
  Synthetic oligonucleotide
ggtatggtgatgtagagttttcatcttttagggatagagtgattggtcttagagatcaat

SEQ ID NO: 430648 - DNA, 55 bp, Artificial
  Synthetic oligonucleotide
ggtatggtggtgcaagaaataatccgccagaggtcgctcaaacaatataccacga

SEQ ID NO: 430649 - DNA, 52 bp, Artificial
  Synthetic oligonucleotide
ggtatggtgtacaacccacccagaacaaactaccctggacggttcacaaacc

SEQ ID NO: 430650 - DNA, 59 bp, Artificial
  Synthetic oligonucleotide
ggtatggtgtatcgaaaatggaacatcaggtgacttacaaggtgagtggaccatgatgg

SEQ ID NO: 430651 - DNA, 55 bp, Artificial
  Synthetic oligonucleotide
ggtatggtgtcccagacctccaagggctgtagagtattatggaccaggagtggac

SEQ ID NO: 430652 - DNA, 54 bp, Artificial
  Synthetic oligonucleotide
ggtatggtttatactaatactagaatgtttgaagtagcaagacaatcaagtgtg

SEQ ID NO: 430653 - DNA, 55 bp, Artificial
  Synthetic oligonucleotide
ggtatgtaaatgacacaataacaggcagacacagcctgcctcaatgctggctagt

SEQ ID NO: 430654 - DNA, 55 bp, Artificial
  Synthetic oligonucleotide
ggtatgtacccttaagaacctctggatccactacaagcctggcatctgtaggatc

SEQ ID NO: 430655 - DNA, 55 bp, Artificial
  Synthetic oligonucleotide
ggtatgtagtgataggccgacgatgggttcagtatggtctatgttggtgccatcc

SEQ ID NO: 430656 - DNA, 59 bp, Artificial
  Synthetic oligonucleotide
ggtatgtatgcaagtttacctccaaatcaaactattaatgtagacattaaggcgtgtga

SEQ ID NO: 430657 - DNA, 60 bp, Artificial
  Synthetic oligonucleotide
ggtatgtcaatcacacagcatcaggggaacactcattgccacggtgctggcttgttagaa

SEQ ID NO: 430658 - DNA, 60 bp, Artificial
  Synthetic oligonucleotide
ggtatgtcagtgatcgcagtagaatgtactaattgacaagttggagaatacggtagaacg

SEQ ID NO: 430659 - DNA, 53 bp, Artificial
  Synthetic oligonucleotide
ggtatgtcattggttgttggggatcattaccacaagatcacatcatacacaag

SEQ ID NO: 430660 - DNA, 55 bp, Artificial
  Synthetic oligonucleotide
ggtatgtccattaaatacgcagacattaggaataggatgtcttaccacagacact

SEQ ID NO: 430661 - DNA, 54 bp, Artificial
  Synthetic oligonucleotide
ggtatgtctgccggtcccgcggaatctatctcgccgtcgcgaacctgccctggg

SEQ ID NO: 430662 - DNA, 51 bp, Artificial
  Synthetic oligonucleotide
ggtatgtctggtgactttaaacgtcactactgaaaatcttcgtcttggtcg

SEQ ID NO: 430663 - DNA, 55 bp, Artificial
  Synthetic oligonucleotide
ggtatgtctttggaatccatctgtgacgagtggtacaagaaacttgtgtctatag

SEQ ID NO: 430664 - DNA, 59 bp, Artificial
  Synthetic oligonucleotide
ggtatgtgaatcacacaaaattgaaccaccattcacttcccagatgttggttagtgaaa

SEQ ID NO: 430665 - DNA, 58 bp, Artificial
  Synthetic oligonucleotide
ggtatgtgatcaagcctataagatcataccagagaaagaggggtttggttgtcttgtt

SEQ ID NO: 430666 - DNA, 60 bp, Artificial
  Synthetic oligonucleotide
ggtatgtgccgatgtgtgctacgactgaaacagggcgggtcgtgatgatgtgggataagg

SEQ ID NO: 430667 - DNA, 60 bp, Artificial
  Synthetic oligonucleotide
ggtatgtggatgtccctcctcgttagtgcctgtgatcgtgctgagaacagccttatctga

SEQ ID NO: 430668 - DNA, 55 bp, Artificial
  Synthetic oligonucleotide
ggtatgtggctgttgacggttataccaaatgatatgtttataagggaatcgctag

SEQ ID NO: 430669 - DNA, 56 bp, Artificial
  Synthetic oligonucleotide
ggtatgtgggtactgcggagcttcggccccgtacgccaccgcctgtggtcttgacg

SEQ ID NO: 430670 - DNA, 55 bp, Artificial
  Synthetic oligonucleotide
ggtatgtggttactaactgtagtgccgaacgatatgtttataagggagtcgttag

SEQ ID NO: 430671 - DNA, 59 bp, Artificial
  Synthetic oligonucleotide
ggtatgttaatggtactgtaaagtcatataacaccattggaaatatcacactcccatgc

SEQ ID NO: 430672 - DNA, 60 bp, Artificial
  Synthetic oligonucleotide
ggtatgttgcccgtctgtcctctaattccaggatcttcaaccaccagcacgggaccatgc

SEQ ID NO: 430673 - DNA, 55 bp, Artificial
  Synthetic oligonucleotide
ggtatgttggactgtcaagaactcatgattacatcatggataccaggtcgactcc

SEQ ID NO: 430674 - DNA, 54 bp, Artificial
  Synthetic oligonucleotide
ggtatgttgtctccacctggcagaacgacgaggggaaacacttacccacaaaag

SEQ ID NO: 430675 - DNA, 55 bp, Artificial
  Synthetic oligonucleotide
ggtatgtttcgcacctctgcgatgagtacccgttttaacgtggtgcccgtttatc

SEQ ID NO: 430676 - DNA, 52 bp, Artificial
  Synthetic oligonucleotide
ggtattaagtatataaggaaccccctttagtctgttcgaggccacttctttg

SEQ ID NO: 430677 - DNA, 55 bp, Artificial
  Synthetic oligonucleotide
ggtattaatattaacagcactcaaggggaggctcccttggggacctggtggcctg

SEQ ID NO: 430678 - DNA, 54 bp, Artificial
  Synthetic oligonucleotide
ggtattaatgggagctttacaacctggattaccctccccggtggctatcccaca

SEQ ID NO: 430679 - DNA, 55 bp, Artificial
  Synthetic oligonucleotide
ggtattacaatccatttaatatcgatccgctgactaagaagcatgtggaggacag

SEQ ID NO: 430680 - DNA, 54 bp, Artificial
  Synthetic oligonucleotide
ggtattacacatagagtaggtaaacggttttgtattaagtcaatctatatttta

SEQ ID NO: 430681 - DNA, 55 bp, Artificial
  Synthetic oligonucleotide
ggtattacactcgtgtgtccacgtcagcacgctctgtgaccggtaacccaacgca

SEQ ID NO: 430682 - DNA, 55 bp, Artificial
  Synthetic oligonucleotide
ggtattacgggcgacaatacaacatcgtcctctgagcccgccccctctatctgcc

SEQ ID NO: 430683 - DNA, 56 bp, Artificial
  Synthetic oligonucleotide
ggtattacgggcgacaatacgacaacaccctctgagcccgcctcttctgacccgtc

SEQ ID NO: 430684 - DNA, 56 bp, Artificial
  Synthetic oligonucleotide
ggtattacgggcgacaatacgacaacatcctctgagaccgccccttctggccaccc

SEQ ID NO: 430685 - DNA, 56 bp, Artificial
  Synthetic oligonucleotide
ggtattacgggcgacgacacaacggcgtcctctgagcccgccccctctgactgccc

SEQ ID NO: 430686 - DNA, 55 bp, Artificial
  Synthetic oligonucleotide
ggtattaggacactggatggatgcaatatttaacattaagacagcatttcactgc

SEQ ID NO: 430687 - DNA, 54 bp, Artificial
  Synthetic oligonucleotide
ggtattatatactgatgtatcgcaatgggactcatcgcagcataatacgcagcc

SEQ ID NO: 430688 - DNA, 54 bp, Artificial
  Synthetic oligonucleotide
ggtattcaaatgttaggtggggtgactcttaacggtcgtcaaatccttgaagac

SEQ ID NO: 430689 - DNA, 55 bp, Artificial
  Synthetic oligonucleotide
ggtattcacagtgaagctccctcaattcttattccagactctgccccaagtggga

SEQ ID NO: 430690 - DNA, 60 bp, Artificial
  Synthetic oligonucleotide
ggtattcacattgcattccctgtttctacaggagtgagtgattactgtagcatagttcac

SEQ ID NO: 430691 - DNA, 55 bp, Artificial
  Synthetic oligonucleotide
ggtattcagagtgttatgtaacagatggcattcattgttacaggcgtgtagatcc

SEQ ID NO: 430692 - DNA, 55 bp, Artificial
  Synthetic oligonucleotide
ggtattcagagtgttatgtaactgatggtgtccactgttacaggcgtatagatcc

SEQ ID NO: 430693 - DNA, 55 bp, Artificial
  Synthetic oligonucleotide
ggtattcatataatctgtgaacgttgcgtaacctctacccttcacataacgctcg

SEQ ID NO: 430694 - DNA, 52 bp, Artificial
  Synthetic oligonucleotide
ggtattccaacccacagacatctaataggagaaggctgtcctaagccacaca

SEQ ID NO: 430695 - DNA, 60 bp, Artificial
  Synthetic oligonucleotide
ggtattccatcatactcatcaaccagtatattgactgcttcagaagatggtcgtttcata

SEQ ID NO: 430696 - DNA, 55 bp, Artificial
  Synthetic oligonucleotide
ggtattccctcagcactagaggtgataaaatatactaccatggagaggaatattc

SEQ ID NO: 430697 - DNA, 54 bp, Artificial
  Synthetic oligonucleotide
ggtattcctcaagtcgcaatgggtcacaaaggtggaaaagttaggtctacccaa

SEQ ID NO: 430698 - DNA, 60 bp, Artificial
  Synthetic oligonucleotide
ggtattccttctcattctggaatctgtactgtgggctgccagtgcatcagaaacaccgct

SEQ ID NO: 430699 - DNA, 56 bp, Artificial
  Synthetic oligonucleotide
ggtattcgaacgagaagttgaagaacatagaaaaagatggtatcttcggaattcaa

SEQ ID NO: 430700 - DNA, 57 bp, Artificial
  Synthetic oligonucleotide
ggtattcggtaaagtgagctactatcagagagcgttacgttgtttcgctaattggct

SEQ ID NO: 430701 - DNA, 60 bp, Artificial
  Synthetic oligonucleotide
ggtattcgttgttgctgcctacatagctgggttcgacaatgcgaatcacctcatgaggca

SEQ ID NO: 430702 - DNA, 54 bp, Artificial
  Synthetic oligonucleotide
ggtattcgtttcagcaagggcggcaaacgtaaggcgtattgcttttatcgtaac

SEQ ID NO: 430703 - DNA, 56 bp, Artificial
  Synthetic oligonucleotide
ggtattctacgtttccatggataagacgctcaaccagtaccctgcattgacggcag

SEQ ID NO: 430704 - DNA, 57 bp, Artificial
  Synthetic oligonucleotide
ggtattcttacggcttaaacgtgagatttcctcggatgcttatgctaagtatttggc

SEQ ID NO: 430705 - DNA, 55 bp, Artificial
  Synthetic oligonucleotide
ggtattgaggcatgcaactttgactatacagttgcgttccgcatggttatgggtg

SEQ ID NO: 430706 - DNA, 60 bp, Artificial
  Synthetic oligonucleotide
ggtattgatggtcacctaatcattgagaagagtgttcaacataagcctgagaagattctt

SEQ ID NO: 430707 - DNA, 60 bp, Artificial
  Synthetic oligonucleotide
ggtattgccataccgcatgatatagacttaggggactctcgtgtggttatccaggactat

SEQ ID NO: 430708 - DNA, 57 bp, Artificial
  Synthetic oligonucleotide
ggtattgcgccgccgccacaattcaaaaaacgctataatacaaacgacaattcaaga

SEQ ID NO: 430709 - DNA, 59 bp, Artificial
  Synthetic oligonucleotide
ggtattgctttcggatacttttctgtgaccgattataatcctacaagaacattagatga

SEQ ID NO: 430710 - DNA, 53 bp, Artificial
  Synthetic oligonucleotide
ggtattggaaccggatcaggtcgtggaggtgcaaccggttacacgcccctggg

SEQ ID NO: 430711 - DNA, 56 bp, Artificial
  Synthetic oligonucleotide
ggtattgggggccaagtctgtacaacatcttgagtccctttataccgctgttacca

SEQ ID NO: 430712 - DNA, 56 bp, Artificial
  Synthetic oligonucleotide
ggtattggtactcatatcatattaactacatcttatctagagcgaattgggcagtc

SEQ ID NO: 430713 - DNA, 54 bp, Artificial
  Synthetic oligonucleotide
ggtattgtatgttagtgacccccattgtcctcctgatttagacaaccacgtgca

SEQ ID NO: 430714 - DNA, 55 bp, Artificial
  Synthetic oligonucleotide
ggtattgtcctgctaccagaaatgcgatgcaatattcaggatttgtcgtatttcc

SEQ ID NO: 430715 - DNA, 55 bp, Artificial
  Synthetic oligonucleotide
ggtattgtgcaatatgccctgacccatgtcaataatggaactcagatgtgatggt

SEQ ID NO: 430716 - DNA, 60 bp, Artificial
  Synthetic oligonucleotide
ggtattgtgtatcttgcttgcggaactgcccgctcagaatgttctgcgggatgcctgctg

SEQ ID NO: 430717 - DNA, 55 bp, Artificial
  Synthetic oligonucleotide
ggtattgttcaggcagtaaagatatatttgcaatcgcgtgttgaaccgaaacaag

SEQ ID NO: 430718 - DNA, 56 bp, Artificial
  Synthetic oligonucleotide
ggtattgtttaagactgaatctggatttgaatggggaaagccaaatattccttgta

SEQ ID NO: 430719 - DNA, 55 bp, Artificial
  Synthetic oligonucleotide
ggtatttaagcttcgcactgaagcccgagcacatatggaggatgaaagggaagcg

SEQ ID NO: 430720 - DNA, 55 bp, Artificial
  Synthetic oligonucleotide
ggtatttaatcaatccatcaaatgatggcgtggtgttctcggtaacggataacag

SEQ ID NO: 430721 - DNA, 60 bp, Artificial
  Synthetic oligonucleotide
ggtatttagaacttatgaacaataatgagacaaatataacaatgacattcaatcgcagcc

SEQ ID NO: 430722 - DNA, 55 bp, Artificial
  Synthetic oligonucleotide
ggtatttagggttcgtttgcctgatcccaacaaatttggccttcctgatgcatcg

SEQ ID NO: 430723 - DNA, 57 bp, Artificial
  Synthetic oligonucleotide
ggtatttatttaccctcagttggtgatatatgtgaggacgctagcctgttgggtttc

SEQ ID NO: 430724 - DNA, 54 bp, Artificial
  Synthetic oligonucleotide
ggtatttccaccgcattcaccgaaggaggtgactcggtcaaacgttacactacg

SEQ ID NO: 430725 - DNA, 55 bp, Artificial
  Synthetic oligonucleotide
ggtatttcgtacaaagttgaccacatgactccaccgggtagatcccaggcgtata

SEQ ID NO: 430726 - DNA, 59 bp, Artificial
  Synthetic oligonucleotide
ggtatttctagaagatcacatcaaattagattttcagagtctgcaacgtcatattcagg

SEQ ID NO: 430727 - DNA, 55 bp, Artificial
  Synthetic oligonucleotide
ggtatttctggcccagacaatggggctgtggctgtagtgaagtacaatggcataa

SEQ ID NO: 430728 - DNA, 56 bp, Artificial
  Synthetic oligonucleotide
ggtatttgagtctttataacaagtaccgctattttagtggcaaaatggatactgcc

SEQ ID NO: 430729 - DNA, 57 bp, Artificial
  Synthetic oligonucleotide
ggtatttgtagctgcggggcattcaaagtgccaggcgtaaaaacagtctggaaaaga

SEQ ID NO: 430730 - DNA, 60 bp, Artificial
  Synthetic oligonucleotide
ggtatttgtctggtcgctcaggtgtttccccagcactagacctggcagatgaggctagaa

SEQ ID NO: 430731 - DNA, 58 bp, Artificial
  Synthetic oligonucleotide
ggtatttgtgctcaaagatactaaccgatacaagtcgccccaatgatcccataaatgg

SEQ ID NO: 430732 - DNA, 59 bp, Artificial
  Synthetic oligonucleotide
ggtatttttccacttggtcatttgttccgtagcaaatggatgtgactggtgcgccatat

SEQ ID NO: 430733 - DNA, 59 bp, Artificial
  Synthetic oligonucleotide
ggtcaaaacatattggggagggatggcctgctgtaagagacagaatgagacgagctagg

SEQ ID NO: 430734 - DNA, 57 bp, Artificial
  Synthetic oligonucleotide
ggtcaaaacccgctcaaggccaaacaatcgtattaaatactgactggagtggctaca

SEQ ID NO: 430735 - DNA, 55 bp, Artificial
  Synthetic oligonucleotide
ggtcaaaatgcagtggatggtctgatgtaagggaaagaatgagacgagctgaacc

SEQ ID NO: 430736 - DNA, 57 bp, Artificial
  Synthetic oligonucleotide
ggtcaaaatggatcctctacaactcctccagcctctggaagcggaaatcaagggaac

SEQ ID NO: 430737 - DNA, 55 bp, Artificial
  Synthetic oligonucleotide
ggtcaaaattaactgtcaggtggccccaacgtgcggaattggattggcagtgagt

SEQ ID NO: 430738 - DNA, 60 bp, Artificial
  Synthetic oligonucleotide
ggtcaaaattgatatgctccaacagggcaaaaacaactgcgatcgttatccgcaaagcaa

SEQ ID NO: 430739 - DNA, 55 bp, Artificial
  Synthetic oligonucleotide
ggtcaaacaatttgaccgttaccaggcacttgaagatggatatggcgcttatggc

SEQ ID NO: 430740 - DNA, 60 bp, Artificial
  Synthetic oligonucleotide
ggtcaaacactgcgagtaaggtccaatgggaatctaattgctccattgtatggacacatc

SEQ ID NO: 430741 - DNA, 55 bp, Artificial
  Synthetic oligonucleotide
ggtcaaacccttggtaagcaaactcattgacccaggcattaatggtagttgagtc

SEQ ID NO: 430742 - DNA, 55 bp, Artificial
  Synthetic oligonucleotide
ggtcaaacgtttctggaaggtcaacaaccatgtggtgtacaacaaccaggaagcc

SEQ ID NO: 430743 - DNA, 55 bp, Artificial
  Synthetic oligonucleotide
ggtcaaactaaatctactcgttcgcagaattgggaatcaactgttacatggaatg

SEQ ID NO: 430744 - DNA, 59 bp, Artificial
  Synthetic oligonucleotide
ggtcaaactaagccaggcatttctacgtttttgttcaagatcatttgtcttgactgcac

SEQ ID NO: 430745 - DNA, 58 bp, Artificial
  Synthetic oligonucleotide
ggtcaaactacccaattgctaaaagatcatacaacaacacaagcggggagcaaatgct

SEQ ID NO: 430746 - DNA, 54 bp, Artificial
  Synthetic oligonucleotide
ggtcaaactcaaagtacttccacaagctagagataagttagacttctgtaagag

SEQ ID NO: 430747 - DNA, 55 bp, Artificial
  Synthetic oligonucleotide
ggtcaaactggccaacgtgcgtctcataccaagagtgacgttgttattactccta

SEQ ID NO: 430748 - DNA, 60 bp, Artificial
  Synthetic oligonucleotide
ggtcaaacttgtgacattgtcaacgcagcattggggagcccaggatgcgatcacttgggt

SEQ ID NO: 430749 - DNA, 60 bp, Artificial
  Synthetic oligonucleotide
ggtcaaactttgagggcacactgagcttaccagatgaggagctgttattagatgagtaca

SEQ ID NO: 430750 - DNA, 56 bp, Artificial
  Synthetic oligonucleotide
ggtcaaagactaaagtggaacaaggaaagtcaagattgattgaagcttccagcctt

SEQ ID NO: 430751 - DNA, 60 bp, Artificial
  Synthetic oligonucleotide
ggtcaaagctgaatacctcacgaagtcttacgatgtgtctggtgcagaagcatataagac

SEQ ID NO: 430752 - DNA, 55 bp, Artificial
  Synthetic oligonucleotide
ggtcaaaggaaatacacaaagaccacatactggtgggacggtctgcaatcatccg

SEQ ID NO: 430753 - DNA, 59 bp, Artificial
  Synthetic oligonucleotide
ggtcaaagggaaacgatggaatggacctagtaagatacttcggatgcatagtatatcta

SEQ ID NO: 430754 - DNA, 60 bp, Artificial
  Synthetic oligonucleotide
ggtcaaaggtcaaggtcaccgtgacgtcatcaagtactctatacatgctgagtacttgct

SEQ ID NO: 430755 - DNA, 59 bp, Artificial
  Synthetic oligonucleotide
ggtcaaaggtccccattttatgactccacgtcagctgatcgctagggtatttaatgcgc

SEQ ID NO: 430756 - DNA, 55 bp, Artificial
  Synthetic oligonucleotide
ggtcaaaggttcctgccagttttatctgacgcagccacttcaatggctaaggcat

SEQ ID NO: 430757 - DNA, 56 bp, Artificial
  Synthetic oligonucleotide
ggtcaaagtattttggagaggtggttctgaaatttgcttcgagttggacgaaggca

SEQ ID NO: 430758 - DNA, 53 bp, Artificial
  Synthetic oligonucleotide
ggtcaaataacttttaatcaacctcttggaaatttaacaggaggtgctccacg

SEQ ID NO: 430759 - DNA, 55 bp, Artificial
  Synthetic oligonucleotide
ggtcaaatcagcaagcagagctgacaggagttttgctagctctaaaacatgggcc

SEQ ID NO: 430760 - DNA, 60 bp, Artificial
  Synthetic oligonucleotide
ggtcaaatcgaacgtcgaagttccaccaaaagaggctgagattgtatgtcatgtcagccc

SEQ ID NO: 430761 - DNA, 58 bp, Artificial
  Synthetic oligonucleotide
ggtcaacaataggcgtgagattgttggccgggtccatgacgcaaggaagaacgccgcg

SEQ ID NO: 430762 - DNA, 54 bp, Artificial
  Synthetic oligonucleotide
ggtcaacaatcccgaaagccattagcatcttccttcttctgtcattcgaaataa

SEQ ID NO: 430763 - DNA, 54 bp, Artificial
  Synthetic oligonucleotide
ggtcaacaggacctcacaatgttcaaggtcctcataattaccttgctagtcaat

SEQ ID NO: 430764 - DNA, 51 bp, Artificial
  Synthetic oligonucleotide
ggtcaaccggttgaaaccgtggcccgttactatttgggaaagtataagcta

SEQ ID NO: 430765 - DNA, 55 bp, Artificial
  Synthetic oligonucleotide
ggtcaaccgtcaacagtcgtagataacacattaatggtctgtatatgtgtgcagt

SEQ ID NO: 430766 - DNA, 55 bp, Artificial
  Synthetic oligonucleotide
ggtcaacctttaatatccaactactccactctctttgctgctcatgtcagttctg

SEQ ID NO: 430767 - DNA, 56 bp, Artificial
  Synthetic oligonucleotide
ggtcaacctttaatggtgcagtgaatgcgtaccttaacggaatcgcaccacggctt

SEQ ID NO: 430768 - DNA, 54 bp, Artificial
  Synthetic oligonucleotide
ggtcaacctttgttggccccccgcatgaaggatttgcgaacggtggtgtccgaa

SEQ ID NO: 430769 - DNA, 60 bp, Artificial
  Synthetic oligonucleotide
ggtcaacgggtttcagtttgctacagagtcatatcacatatgcctgaaggatcactctgg

SEQ ID NO: 430770 - DNA, 55 bp, Artificial
  Synthetic oligonucleotide
ggtcaacgtgccaccctgaaaacccgcagtggcaagcaaataggggctcgggtgc

SEQ ID NO: 430771 - DNA, 55 bp, Artificial
  Synthetic oligonucleotide
ggtcaactacattctctaaggaggcgtgggagcgtttcatcgcaaggcaaattgg

SEQ ID NO: 430772 - DNA, 54 bp, Artificial
  Synthetic oligonucleotide
ggtcaactagcataatcacagtgcctgacggtatcccccctggctcagtcaaaa

SEQ ID NO: 430773 - DNA, 55 bp, Artificial
  Synthetic oligonucleotide
ggtcaactcaattattgacaaaatgaacactcagtttgaggctgttggaagggaa

SEQ ID NO: 430774 - DNA, 55 bp, Artificial
  Synthetic oligonucleotide
ggtcaactcatgtctctagacatcaacacagaacaaatgtgcttggaggacgcca

SEQ ID NO: 430775 - DNA, 60 bp, Artificial
  Synthetic oligonucleotide
ggtcaactggtcgatttaactaggttgctagcttacaattatgagacactaatggcatgc

SEQ ID NO: 430776 - DNA, 60 bp, Artificial
  Synthetic oligonucleotide
ggtcaactgtatgctcaaggactctgttctttacacagattgcccaaagctcctggccta

SEQ ID NO: 430777 - DNA, 55 bp, Artificial
  Synthetic oligonucleotide
ggtcaagaacgatcttcgtgatcgttatcaagttatgcataggttcaatgcaaag

SEQ ID NO: 430778 - DNA, 55 bp, Artificial
  Synthetic oligonucleotide
ggtcaagacagcaactcaattgcaacttgagaaaattgtggcattcatggctctg

SEQ ID NO: 430779 - DNA, 55 bp, Artificial
  Synthetic oligonucleotide
ggtcaagacctgtttcgacggacggaactgatagtgaagaccacctacgaagccg

SEQ ID NO: 430780 - DNA, 57 bp, Artificial
  Synthetic oligonucleotide
ggtcaagagggaagaattaactactattggactctcttggagcctggggacacaata

SEQ ID NO: 430781 - DNA, 55 bp, Artificial
  Synthetic oligonucleotide
ggtcaagagggctctatcactcaaagagtccatcaactggtttgtgtctcgggag

SEQ ID NO: 430782 - DNA, 55 bp, Artificial
  Synthetic oligonucleotide
ggtcaagagtacaatcaggattatcgctagaagaagcaattaaagcaggaaaccg

SEQ ID NO: 430783 - DNA, 58 bp, Artificial
  Synthetic oligonucleotide
ggtcaagataagttctggagtgaagagttttacgctagcctctatgaaaagtccactg

SEQ ID NO: 430784 - DNA, 57 bp, Artificial
  Synthetic oligonucleotide
ggtcaagcacttctgttttcccggttagagttgatatgctccaacagggcaaaaaca

SEQ ID NO: 430785 - DNA, 55 bp, Artificial
  Synthetic oligonucleotide
ggtcaagcagtggcacgtgacgccgagtcacaaatgaattcaatattggatgaag

SEQ ID NO: 430786 - DNA, 57 bp, Artificial
  Synthetic oligonucleotide
ggtcaagctacgtctttttgtcaacgcaactgattcgggtatcaggacctttcaaga

SEQ ID NO: 430787 - DNA, 58 bp, Artificial
  Synthetic oligonucleotide
ggtcaagctggaatctgagggaacttacaaaattctcaccatttattcgactgtcgcc

SEQ ID NO: 430788 - DNA, 59 bp, Artificial
  Synthetic oligonucleotide
ggtcaagggatttgcattcctagacggagataattcatggcttgggagaacaattagta

SEQ ID NO: 430789 - DNA, 55 bp, Artificial
  Synthetic oligonucleotide
ggtcaaggtgtgcagtccaaacggctactcgttcaagatcctacggcatattctg

SEQ ID NO: 430790 - DNA, 55 bp, Artificial
  Synthetic oligonucleotide
ggtcaagtacctgaagcatagaacaaaagagttgcaacaggtctcttatgtcccc

SEQ ID NO: 430791 - DNA, 55 bp, Artificial
  Synthetic oligonucleotide
ggtcaataaggccagcaaagctaggatgcatcatctgtctcgggtaggtctgacc

SEQ ID NO: 430792 - DNA, 60 bp, Artificial
  Synthetic oligonucleotide
ggtcaatacagcggattcgtgaggacactgttccaacagatgcgagatgtgctcggaaca

SEQ ID NO: 430793 - DNA, 59 bp, Artificial
  Synthetic oligonucleotide
ggtcaatactatttggttacacggttagatgagatgcctaatttagaccatatagagac

SEQ ID NO: 430794 - DNA, 60 bp, Artificial
  Synthetic oligonucleotide
ggtcaatatcatgcccaggtcattgttactgatcagcttgtcgtgggcgagccgcgtagg

SEQ ID NO: 430795 - DNA, 60 bp, Artificial
  Synthetic oligonucleotide
ggtcaatcagacctacgtacactgacagatgcgcaggagtttgcgataggaaacggacaa

SEQ ID NO: 430796 - DNA, 55 bp, Artificial
  Synthetic oligonucleotide
ggtcaatccgtattctgcctctctaacggccttttattagcccaaacctctccag

SEQ ID NO: 430797 - DNA, 57 bp, Artificial
  Synthetic oligonucleotide
ggtcaatcgggtcctctcaaacttggctatgcaatcggggaatgggtccttattata

SEQ ID NO: 430798 - DNA, 60 bp, Artificial
  Synthetic oligonucleotide
ggtcaatcggtgtctctcaaacttggctatgcaatcgggtgctggtgtcttatttatacc

SEQ ID NO: 430799 - DNA, 56 bp, Artificial
  Synthetic oligonucleotide
ggtcaatgacgggtgctctagtctgttttcaccttttgtaggtgtgaatagtttta

SEQ ID NO: 430800 - DNA, 55 bp, Artificial
  Synthetic oligonucleotide
ggtcaatgcccgaataatatgatgggcacttttagcattaggacagtagggaccg

SEQ ID NO: 430801 - DNA, 60 bp, Artificial
  Synthetic oligonucleotide
ggtcaatgcgctgctagccccaaggaggggggacgcagtcatgatctatttcgtttggag

SEQ ID NO: 430802 - DNA, 55 bp, Artificial
  Synthetic oligonucleotide
ggtcaatgcggcttgctggggaccattacgggaccacctcaatgtagccagtttc

SEQ ID NO: 430803 - DNA, 60 bp, Artificial
  Synthetic oligonucleotide
ggtcaatggcatccgaaagcccaagcacttgtatgtgtccatgccaacagcacagtcaac

SEQ ID NO: 430804 - DNA, 60 bp, Artificial
  Synthetic oligonucleotide
ggtcaatgttaactcggctgacattactcgtctgtatatgaccaagcgcgcgccgcggac

SEQ ID NO: 430805 - DNA, 55 bp, Artificial
  Synthetic oligonucleotide
ggtcaattcggtcaatacctaatgatatctgtcatttaacggcgagttgtacaaa

SEQ ID NO: 430806 - DNA, 51 bp, Artificial
  Synthetic oligonucleotide
ggtcacaaaagtccaagtgaacaaaggcgatcggagttatggcacgcacgt

SEQ ID NO: 430807 - DNA, 58 bp, Artificial
  Synthetic oligonucleotide
ggtcacaagatcccacgatgttatacaccaaaatggaatttgaaccatttcagtctct

SEQ ID NO: 430808 - DNA, 60 bp, Artificial
  Synthetic oligonucleotide
ggtcacacaggtgtagatgcccaacggtagcgaatctcctagtagatactctaggaattc

SEQ ID NO: 430809 - DNA, 55 bp, Artificial
  Synthetic oligonucleotide
ggtcacaccaaaacgagatcacaacgccaatgtgtatggtgtcccggcgtggatc

SEQ ID NO: 430810 - DNA, 55 bp, Artificial
  Synthetic oligonucleotide
ggtcacacctacgtcacaagtcacgtggggagggttggcgtatagcccggaagtc

SEQ ID NO: 430811 - DNA, 55 bp, Artificial
  Synthetic oligonucleotide
ggtcacactcttcgtccgtaatgcagtggggcgagtgcttgaaggggtacatctg

SEQ ID NO: 430812 - DNA, 60 bp, Artificial
  Synthetic oligonucleotide
ggtcacactggaccgttggaattaacaagttcaactgtggatgggatgagctagcacgga

SEQ ID NO: 430813 - DNA, 57 bp, Artificial
  Synthetic oligonucleotide
ggtcacagctcccgtgtgagcccgagccggacgtagcagtgctcacctccatgctta

SEQ ID NO: 430814 - DNA, 55 bp, Artificial
  Synthetic oligonucleotide
ggtcacagggacagttatttaccgatgacatgcattataacggaaatgttgagac

SEQ ID NO: 430815 - DNA, 55 bp, Artificial
  Synthetic oligonucleotide
ggtcacagggcagttcccagaataataggccgtctgcgccccttgagtcacgggg

SEQ ID NO: 430816 - DNA, 57 bp, Artificial
  Synthetic oligonucleotide
ggtcacagtctcgactaaaagaagccagcaaaccataattcctaacatcgggtccag

SEQ ID NO: 430817 - DNA, 55 bp, Artificial
  Synthetic oligonucleotide
ggtcacataagtgcggcgtgacacagactatagagtaatgcaactgttactatgc

SEQ ID NO: 430818 - DNA, 55 bp, Artificial
  Synthetic oligonucleotide
ggtcacatatggggatgacaacttgctttccgttagtgaggttgttaagccctat

SEQ ID NO: 430819 - DNA, 55 bp, Artificial
  Synthetic oligonucleotide
ggtcacatattcgacagacgtcaattgttgaatttaaccaaagtaaaggacgtgt

SEQ ID NO: 430820 - DNA, 55 bp, Artificial
  Synthetic oligonucleotide
ggtcaccaatcccatatgaggttatggctagatatttagcaaatgctatcgaccc

SEQ ID NO: 430821 - DNA, 60 bp, Artificial
  Synthetic oligonucleotide
ggtcaccacatggagaggaccatgatctagctggggaagagattgcttcttactctattg

SEQ ID NO: 430822 - DNA, 60 bp, Artificial
  Synthetic oligonucleotide
ggtcaccagatcgtggatctaatcaacaacgcatttgagggcagggtatcgatctactca

SEQ ID NO: 430823 - DNA, 55 bp, Artificial
  Synthetic oligonucleotide
ggtcaccagttatacgcagcacctatgaccttaacacattcctatcaacactaac

SEQ ID NO: 430824 - DNA, 59 bp, Artificial
  Synthetic oligonucleotide
ggtcaccatattcttgggaacaagagctacagcacccctcgtagcaccacacctcggaa

SEQ ID NO: 430825 - DNA, 58 bp, Artificial
  Synthetic oligonucleotide
ggtcaccatattcttgggaacaagagctacagccttcggaaaggcatggggacgaatc

SEQ ID NO: 430826 - DNA, 55 bp, Artificial
  Synthetic oligonucleotide
ggtcaccatcaaacaggagaagtggaatggtaactggaaaccagccagcgagcac

SEQ ID NO: 430827 - DNA, 55 bp, Artificial
  Synthetic oligonucleotide
ggtcaccatttggtgatcttaatcagcacgtatttgctagaactgtgggtcctag

SEQ ID NO: 430828 - DNA, 55 bp, Artificial
  Synthetic oligonucleotide
ggtcaccgggggaagtgccgccaaaagcgtgtccggctttgctggtctcttcacc

SEQ ID NO: 430829 - DNA, 54 bp, Artificial
  Synthetic oligonucleotide
ggtcacctccccccacatacctctaagggcttttgagcctagcgttgggctacg

SEQ ID NO: 430830 - DNA, 59 bp, Artificial
  Synthetic oligonucleotide
ggtcacctggacacacgtttggtagattggggctcttgtgatgattccagtaggtccat

SEQ ID NO: 430831 - DNA, 55 bp, Artificial
  Synthetic oligonucleotide
ggtcacctggcccaaacggaggatcctaggtgggtgtgcatttattagacgttgg

SEQ ID NO: 430832 - DNA, 59 bp, Artificial
  Synthetic oligonucleotide
ggtcaccttcaccgaggcccatacaattctgcttgatcgtcataccaaccttctctccc

SEQ ID NO: 430833 - DNA, 55 bp, Artificial
  Synthetic oligonucleotide
ggtcaccttccgctatgagtactgtggtgtgttaggtggggacctaatcgctagt

SEQ ID NO: 430834 - DNA, 53 bp, Artificial
  Synthetic oligonucleotide
ggtcacctttggctatgtagactgggtaaaaaaagaaactggcaactggggta

SEQ ID NO: 430835 - DNA, 60 bp, Artificial
  Synthetic oligonucleotide
ggtcacgcaattatctaactcagttagccagaacactcagagcatatcctcattgggtga

SEQ ID NO: 430836 - DNA, 52 bp, Artificial
  Synthetic oligonucleotide
ggtcacgcactggtgaccgcattccaacctgcgttgtacaagaaattcgctg

SEQ ID NO: 430837 - DNA, 55 bp, Artificial
  Synthetic oligonucleotide
ggtcacgcagctaatgcaggcagggaagccaaggaatgttttgctagcattatgc

SEQ ID NO: 430838 - DNA, 59 bp, Artificial
  Synthetic oligonucleotide
ggtcacggacgagcaggaagtagcacctacaaatggcgtagggtggaaaccatatggca

SEQ ID NO: 430839 - DNA, 55 bp, Artificial
  Synthetic oligonucleotide
ggtcacggatatgggatcatggtgtgatgactcactaacttatgagtgtgtgacc

SEQ ID NO: 430840 - DNA, 55 bp, Artificial
  Synthetic oligonucleotide
ggtcacgggtggacaatatgccagcaacgagcaagccttggttaggcgtttctgg

SEQ ID NO: 430841 - DNA, 59 bp, Artificial
  Synthetic oligonucleotide
ggtcacggtaataatgacccagcagcttacgctcagttcgtagccaacgagacaggatt

SEQ ID NO: 430842 - DNA, 55 bp, Artificial
  Synthetic oligonucleotide
ggtcacgtagttaaccagttgatggaggctctaatgcagttgtcgagacaacaat

SEQ ID NO: 430843 - DNA, 60 bp, Artificial
  Synthetic oligonucleotide
ggtcacgtcggcaatccatattagccctaatctgttgggaatctatttgacttcagacat

SEQ ID NO: 430844 - DNA, 55 bp, Artificial
  Synthetic oligonucleotide
ggtcactactaagttggatgtgctcaagatacacctcgcttcactatgcgcggga

SEQ ID NO: 430845 - DNA, 50 bp, Artificial
  Synthetic oligonucleotide
ggtcactatcccacaggcagttcagaccagagaccagtacaggtatccaa

SEQ ID NO: 430846 - DNA, 55 bp, Artificial
  Synthetic oligonucleotide
ggtcactatgactatgaaggtacaggttctagagtaacacctatcttagcaccgc

SEQ ID NO: 430847 - DNA, 55 bp, Artificial
  Synthetic oligonucleotide
ggtcactcctagtgggtcattggtgtccagtgattcacaagtatttaatagggct

SEQ ID NO: 430848 - DNA, 58 bp, Artificial
  Synthetic oligonucleotide
ggtcactctctgacccaaggggcgttgacatgccaggtggttactgtcttgaaaggtg

SEQ ID NO: 430849 - DNA, 54 bp, Artificial
  Synthetic oligonucleotide
ggtcactcttattggtcaagaccgtaaggttctgactttaaataccgactatcg

SEQ ID NO: 430850 - DNA, 52 bp, Artificial
  Synthetic oligonucleotide
ggtcactgagtgcatagaaggtggcaggaggcccaaccctggcatgtttaag

SEQ ID NO: 430851 - DNA, 60 bp, Artificial
  Synthetic oligonucleotide
ggtcactgcaggagttgatccaaactggttgataaggagtgctggttccttaatgtccca

SEQ ID NO: 430852 - DNA, 60 bp, Artificial
  Synthetic oligonucleotide
ggtcactgctgaaagtactgattcgttgcaatcgaaagtggttgtgcagttacctcagat

SEQ ID NO: 430853 - DNA, 55 bp, Artificial
  Synthetic oligonucleotide
ggtcactggacatgaacggattccgcatcaaaactctgaaagtcacagttcgggc

SEQ ID NO: 430854 - DNA, 59 bp, Artificial
  Synthetic oligonucleotide
ggtcactggtggtcaatatgcgagcaacgagcaagccttagttcggcgattttggaagg

SEQ ID NO: 430855 - DNA, 55 bp, Artificial
  Synthetic oligonucleotide
ggtcactgtgggttaccaatcgtcagcacaagagatggaagtatccttgggttgc

SEQ ID NO: 430856 - DNA, 55 bp, Artificial
  Synthetic oligonucleotide
ggtcactgtgtttactggcttggcatagtggacaagagaaatacgaagacttcct

SEQ ID NO: 430857 - DNA, 55 bp, Artificial
  Synthetic oligonucleotide
ggtcacttacagtaccaacactgcagggactacccaccatgtctactcctggatc

SEQ ID NO: 430858 - DNA, 57 bp, Artificial
  Synthetic oligonucleotide
ggtcactttgacaaaccaacagtaacagatgactatataattagaggcctaccactt

SEQ ID NO: 430859 - DNA, 55 bp, Artificial
  Synthetic oligonucleotide
ggtcagaaactgagcatgcacactcgaagtggcaaaggtattggggctcgggtac

SEQ ID NO: 430860 - DNA, 55 bp, Artificial
  Synthetic oligonucleotide
ggtcagaaatttcgtttaaagcggctaattatcagtacacttacttgcgagatgg

SEQ ID NO: 430861 - DNA, 55 bp, Artificial
  Synthetic oligonucleotide
ggtcagaacacagttaaggtgtcaggtaaaggtggccacagcggttcaactttta

SEQ ID NO: 430862 - DNA, 60 bp, Artificial
  Synthetic oligonucleotide
ggtcagaatatgttctatcactatcttgggagggctggttacacagtgcatgtacagtgc

SEQ ID NO: 430863 - DNA, 60 bp, Artificial
  Synthetic oligonucleotide
ggtcagaattctacttaatgctagatgtgtgggattataaaaatattaagagattcatac

SEQ ID NO: 430864 - DNA, 60 bp, Artificial
  Synthetic oligonucleotide
ggtcagacactcctggggtccatcaggagacgggtcgctaacgcgaactggatgtcagtg

SEQ ID NO: 430865 - DNA, 59 bp, Artificial
  Synthetic oligonucleotide
ggtcagacagggtaatggtatcacctctggctgtaacgtggtggaacagaagtggacca

SEQ ID NO: 430866 - DNA, 60 bp, Artificial
  Synthetic oligonucleotide
ggtcagacattgttgccattcaccgaagatgggaggatataggcgtcaagaatttggcga

SEQ ID NO: 430867 - DNA, 56 bp, Artificial
  Synthetic oligonucleotide
ggtcagactaatattactaatcagactgagactaatcagactactgagatcttcag

SEQ ID NO: 430868 - DNA, 60 bp, Artificial
  Synthetic oligonucleotide
ggtcagactaccacacactcaggtgtacttgaacagatccatttgaaggtaggtgctggt

SEQ ID NO: 430869 - DNA, 53 bp, Artificial
  Synthetic oligonucleotide
ggtcagacttaagcttgtgtggaaagttgcgagcaatgcgatactcacgtcaa

SEQ ID NO: 430870 - DNA, 51 bp, Artificial
  Synthetic oligonucleotide
ggtcagagagagagtaagtaggactggcctaggccctccaccggccaatgc

SEQ ID NO: 430871 - DNA, 60 bp, Artificial
  Synthetic oligonucleotide
ggtcagagataatcagattcagtcgctgcctaatgggggagaggggtttgtaagggatga

SEQ ID NO: 430872 - DNA, 60 bp, Artificial
  Synthetic oligonucleotide
ggtcagagatagcatcctcgacggtataacaggttggttgaagaagcatgtatgattcgg

SEQ ID NO: 430873 - DNA, 60 bp, Artificial
  Synthetic oligonucleotide
ggtcagagcagatacacacatgcttcataaatctgtggggcactattcgaaatcgaagtc

SEQ ID NO: 430874 - DNA, 52 bp, Artificial
  Synthetic oligonucleotide
ggtcagaggcacggcgccctgcatggtatttttgaccccaactgcaggtgca

SEQ ID NO: 430875 - DNA, 60 bp, Artificial
  Synthetic oligonucleotide
ggtcagaggctataaggcgatgtattgagacagtagtaagaaacgaaataaagcaagaga

SEQ ID NO: 430876 - DNA, 55 bp, Artificial
  Synthetic oligonucleotide
ggtcagaggtgttgaaacacgttagaacgaatccgaacactcctattcctagtaa

SEQ ID NO: 430877 - DNA, 55 bp, Artificial
  Synthetic oligonucleotide
ggtcagagtctgatgtgagggacattgtgctggacttgcatgaattggtactacc

SEQ ID NO: 430878 - DNA, 60 bp, Artificial
  Synthetic oligonucleotide
ggtcagatatccactgacctttggatggtgctacaagctagtaccagttgacccaaggga

SEQ ID NO: 430879 - DNA, 55 bp, Artificial
  Synthetic oligonucleotide
ggtcagatcatagggattcatgtgggaggtaatggtagagatggattttctgcaa

SEQ ID NO: 430880 - DNA, 60 bp, Artificial
  Synthetic oligonucleotide
ggtcagatgcacccattggcacctgcagttctgaatgcatcaccccaaatggaagcattc

SEQ ID NO: 430881 - DNA, 60 bp, Artificial
  Synthetic oligonucleotide
ggtcagatgcacctattgaaacctgcagttctgaatgcattactccaaatgggagcatac

SEQ ID NO: 430882 - DNA, 51 bp, Artificial
  Synthetic oligonucleotide
ggtcagcaacttcctaggacttcgtggtaaatgggatggacgaaaattttc

SEQ ID NO: 430883 - DNA, 55 bp, Artificial
  Synthetic oligonucleotide
ggtcagcactcatcctgagagggtcagtagcccataaatcgtgtctacctgcctg

SEQ ID NO: 430884 - DNA, 55 bp, Artificial
  Synthetic oligonucleotide
ggtcagcattaaaatgcaagggtttccatgttccagcaaaggaacaggtagaagg

SEQ ID NO: 430885 - DNA, 55 bp, Artificial
  Synthetic oligonucleotide
ggtcagccaacccgccacaatagcattatcatcgcttctagtagaaatgttcgag

SEQ ID NO: 430886 - DNA, 55 bp, Artificial
  Synthetic oligonucleotide
ggtcagccatggccgccgttctccacgtgcggagtcattctgaagtgccagggtt

SEQ ID NO: 430887 - DNA, 55 bp, Artificial
  Synthetic oligonucleotide
ggtcagccattagcttcatagaagtgcttggacgcatgcctgaacacttcgcggg

SEQ ID NO: 430888 - DNA, 53 bp, Artificial
  Synthetic oligonucleotide
ggtcagccattgtatgctaattacagtttaaccatcattcctgatggttgtgg

SEQ ID NO: 430889 - DNA, 55 bp, Artificial
  Synthetic oligonucleotide
ggtcagccttctactgttgtggacaactctcttatggtcgtcctcgccatgcact

SEQ ID NO: 430890 - DNA, 53 bp, Artificial
  Synthetic oligonucleotide
ggtcagcggtgcatcctggtattccagcggcctgccgttaaacatgaatcccc

SEQ ID NO: 430891 - DNA, 60 bp, Artificial
  Synthetic oligonucleotide
ggtcagcgtgtatatggcatgccatactctagtggatctcaacgtccacgtggtgtgcct

SEQ ID NO: 430892 - DNA, 60 bp, Artificial
  Synthetic oligonucleotide
ggtcagctactgcatgtcatgatgggaagaaatggatgacaattggagtgacgggccctg

SEQ ID NO: 430893 - DNA, 55 bp, Artificial
  Synthetic oligonucleotide
ggtcagctcaaaatccctatgccaaaacttcacatcggcatagtcaaatacggcg

SEQ ID NO: 430894 - DNA, 60 bp, Artificial
  Synthetic oligonucleotide
ggtcagctgcaatcgatggactcgtacaaggaagtgtacattcaatattaacaggtgaat

SEQ ID NO: 430895 - DNA, 59 bp, Artificial
  Synthetic oligonucleotide
ggtcagcttctcaaaacctagcctggtattcgttgaagccagcgagtattacccagcta

SEQ ID NO: 430896 - DNA, 57 bp, Artificial
  Synthetic oligonucleotide
ggtcaggaactaacaaatagtgctgttagcttattcaattccacagccatagcagtt

SEQ ID NO: 430897 - DNA, 56 bp, Artificial
  Synthetic oligonucleotide
ggtcaggacttagacagactggagcgttgtatcgctgcgtgggctgcattggcacc

SEQ ID NO: 430898 - DNA, 55 bp, Artificial
  Synthetic oligonucleotide
ggtcaggatacagtggttccttcacattacctgtggagttaacaaagagaagttg

SEQ ID NO: 430899 - DNA, 60 bp, Artificial
  Synthetic oligonucleotide
ggtcaggatatgagatgctaaaggtcccaaatgcggaaacagacaatcagtccggtccag

SEQ ID NO: 430900 - DNA, 55 bp, Artificial
  Synthetic oligonucleotide
ggtcaggatgtacgtgggaggggtcgagcacaggttggaagctgcctgcaactgg

SEQ ID NO: 430901 - DNA, 60 bp, Artificial
  Synthetic oligonucleotide
ggtcaggatttgagatattgaggataaagaatggttggacacagacaagtaaagagcagg

SEQ ID NO: 430902 - DNA, 58 bp, Artificial
  Synthetic oligonucleotide
ggtcaggcaactaagctattactcacaaagttcaagctcctacgtagtagtcaagctt

SEQ ID NO: 430903 - DNA, 60 bp, Artificial
  Synthetic oligonucleotide
ggtcaggcccgcccatttcacctgctctcacacgcacaggttcggcaagtccacttgttc

SEQ ID NO: 430904 - DNA, 55 bp, Artificial
  Synthetic oligonucleotide
ggtcaggccgggaggatcgactttcattggatgctattggacccaggggatacag

SEQ ID NO: 430905 - DNA, 52 bp, Artificial
  Synthetic oligonucleotide
ggtcaggcctctatgcacctcctatcaaaggtagtctaacctgcagttcaaa

SEQ ID NO: 430906 - DNA, 60 bp, Artificial
  Synthetic oligonucleotide
ggtcaggctatagtgggagcttcgtgcagcatccagagctgacagggctggactgcatga

SEQ ID NO: 430907 - DNA, 55 bp, Artificial
  Synthetic oligonucleotide
ggtcagggagagtgtttcactcccgaccgatcatcaatgaaagacccaagcaggc

SEQ ID NO: 430908 - DNA, 60 bp, Artificial
  Synthetic oligonucleotide
ggtcagggcggatctctaggagcgtgatggatatgtcgaaacccttaagcgcatgtgccg

SEQ ID NO: 430909 - DNA, 54 bp, Artificial
  Synthetic oligonucleotide
ggtcagggtcattggaggttactttcatgttcaccgggtcctttatggccacgg

SEQ ID NO: 430910 - DNA, 55 bp, Artificial
  Synthetic oligonucleotide
ggtcagggttcagacctaccaatatggctagccttctcaagagcctcacattgtg

SEQ ID NO: 430911 - DNA, 60 bp, Artificial
  Synthetic oligonucleotide
ggtcaggtacagcgtggacacagtggtctccgaacttattagagagtacaacagcagatc

SEQ ID NO: 430912 - DNA, 55 bp, Artificial
  Synthetic oligonucleotide
ggtcaggtatttaacatgttcgacaatgaacccagtactgcaacggtgatgaacg

SEQ ID NO: 430913 - DNA, 55 bp, Artificial
  Synthetic oligonucleotide
ggtcaggtgagtggttgctaggaattcttaatggcaattgggtagtagttgctgt

SEQ ID NO: 430914 - DNA, 57 bp, Artificial
  Synthetic oligonucleotide
ggtcaggtgatcgtatctacagtcacgcggacgttgctaagatgtcgcgaggttcct

SEQ ID NO: 430915 - DNA, 58 bp, Artificial
  Synthetic oligonucleotide
ggtcaggtgccccaggataaatggcacctctgtaaccagactcaaaatatccgaccta

SEQ ID NO: 430916 - DNA, 55 bp, Artificial
  Synthetic oligonucleotide
ggtcaggtggctttgtcaagggaaagagtgcaagttgggaaaatccgccactaac

SEQ ID NO: 430917 - DNA, 56 bp, Artificial
  Synthetic oligonucleotide
ggtcaggtgttagtaaattgtcaatggtcataagggacaacttctcaaaattagga

SEQ ID NO: 430918 - DNA, 60 bp, Artificial
  Synthetic oligonucleotide
ggtcaggtgttcaacatgtatgataatgagcccagtactgcgacggtgaaaaacgataac

SEQ ID NO: 430919 - DNA, 55 bp, Artificial
  Synthetic oligonucleotide
ggtcaggtttgttaaatactgcggatcagcatacgtttcttggcgtgattatgta

SEQ ID NO: 430920 - DNA, 55 bp, Artificial
  Synthetic oligonucleotide
ggtcagtactgctagttcacttgcaatttcgtcgtcggaacaagcgaacgtaacc

SEQ ID NO: 430921 - DNA, 60 bp, Artificial
  Synthetic oligonucleotide
ggtcagtagatgtcaactgctatgcaggggaagcagacaataggactggtatacccgtag

SEQ ID NO: 430922 - DNA, 60 bp, Artificial
  Synthetic oligonucleotide
ggtcagtagtccgcctagacttcggagtgcagtgactgcatgcttttggtttaggcgagg

SEQ ID NO: 430923 - DNA, 60 bp, Artificial
  Synthetic oligonucleotide
ggtcagtatactgtgctaccatttgaaactcttgaagatgtcgcgcagttatacgagtca

SEQ ID NO: 430924 - DNA, 55 bp, Artificial
  Synthetic oligonucleotide
ggtcagtatatgcgcgaaaccttgtaccatcaactgatggttaccgaggaaacaa

SEQ ID NO: 430925 - DNA, 55 bp, Artificial
  Synthetic oligonucleotide
ggtcagtatgtcacggtcgctgacactgaaggggactcgttcttaggtggaaggg

SEQ ID NO: 430926 - DNA, 55 bp, Artificial
  Synthetic oligonucleotide
ggtcagtcaacggacctccaagtgatgagataaacaatcatactacgagatctgt

SEQ ID NO: 430927 - DNA, 51 bp, Artificial
  Synthetic oligonucleotide
ggtcagtcccacttctgtggaagacctgagagaactaatagcagaattggt

SEQ ID NO: 430928 - DNA, 57 bp, Artificial
  Synthetic oligonucleotide
ggtcagtcgacataacctgtgaaggatatcagccgacttcagaccctacaaagcaag

SEQ ID NO: 430929 - DNA, 55 bp, Artificial
  Synthetic oligonucleotide
ggtcagtcgtcttgccagtttagagagctgtgtagaaaacctacttcagaagatg

SEQ ID NO: 430930 - DNA, 55 bp, Artificial
  Synthetic oligonucleotide
ggtcagtgcaagccattacagaaacacaacacctgacaaattctcacaagccggg

SEQ ID NO: 430931 - DNA, 55 bp, Artificial
  Synthetic oligonucleotide
ggtcagtggactctcaagaagttagagattattgtcaaaagaaggggtggattgt

SEQ ID NO: 430932 - DNA, 60 bp, Artificial
  Synthetic oligonucleotide
ggtcagtggtgctcacaatgaatacctgggtatgaatgtactgagactgtgggcgaattc

SEQ ID NO: 430933 - DNA, 52 bp, Artificial
  Synthetic oligonucleotide
ggtcagtggtttcaagaactggtgaacatgcccactagagtggatgagtcga

SEQ ID NO: 430934 - DNA, 55 bp, Artificial
  Synthetic oligonucleotide
ggtcagtgtatttatacattcacaagcttgttctcactagtaccaaatgttgcac

SEQ ID NO: 430935 - DNA, 55 bp, Artificial
  Synthetic oligonucleotide
ggtcagtgtcagggttctctagctgcttttccccgtttgagccccgtgccccgga

SEQ ID NO: 430936 - DNA, 60 bp, Artificial
  Synthetic oligonucleotide
ggtcagttgatctcacgaatttcgtgatctcattagctgctcagggtggcttcgattacc

SEQ ID NO: 430937 - DNA, 55 bp, Artificial
  Synthetic oligonucleotide
ggtcagttggatcactagtggagatttgcctactttggcacaattgcaagagttc

SEQ ID NO: 430938 - DNA, 54 bp, Artificial
  Synthetic oligonucleotide
ggtcagtttcataactttggaaagtccgtacgggatcctaggatataaatacaa

SEQ ID NO: 430939 - DNA, 60 bp, Artificial
  Synthetic oligonucleotide
ggtcagttttcttatacgtttcatattacatattgagaatcgaatttgcatatatcgttg

SEQ ID NO: 430940 - DNA, 55 bp, Artificial
  Synthetic oligonucleotide
ggtcatacatagtggagaggcccagtgcaccagaggggatgtgttaccctggatc

SEQ ID NO: 430941 - DNA, 55 bp, Artificial
  Synthetic oligonucleotide
ggtcatacgtttcataaccgtgcgtacgggcatcgatacttaaggtgtggcgccg

SEQ ID NO: 430942 - DNA, 55 bp, Artificial
  Synthetic oligonucleotide
ggtcataggggcacaatgagcacccgatctggccgtaacataggggcacaggtcc

SEQ ID NO: 430943 - DNA, 60 bp, Artificial
  Synthetic oligonucleotide
ggtcataggtgagcagatacccctgcaggaactgggtactaggtcattctccacaactat

SEQ ID NO: 430944 - DNA, 55 bp, Artificial
  Synthetic oligonucleotide
ggtcatattagcgtcaatcgttcccaccgattgcaagaaatgcctcccacgcgag

SEQ ID NO: 430945 - DNA, 60 bp, Artificial
  Synthetic oligonucleotide
ggtcatcacctgtcaggggtcagaggacatcagaaaacttctggagtcacaaggaagaag

SEQ ID NO: 430946 - DNA, 55 bp, Artificial
  Synthetic oligonucleotide
ggtcatcagtgagtcaacctccttgtttaggtccctcagactgatgagatcattg

SEQ ID NO: 430947 - DNA, 55 bp, Artificial
  Synthetic oligonucleotide
ggtcatcatagagctaaaacggacaataaaagtttgactgcttatgacgtggtgc

SEQ ID NO: 430948 - DNA, 52 bp, Artificial
  Synthetic oligonucleotide
ggtcatcatagagtacgttactttttgaagtggacaaaagtcgagacaaagc

SEQ ID NO: 430949 - DNA, 60 bp, Artificial
  Synthetic oligonucleotide
ggtcatccagctaacggctaaaatgatcagtcgcatcttctgatgcgccggaggtttaca

SEQ ID NO: 430950 - DNA, 60 bp, Artificial
  Synthetic oligonucleotide
ggtcatccttgaagtgggcctctcatgccatctacaccacactctcctctgccgctcgag

SEQ ID NO: 430951 - DNA, 55 bp, Artificial
  Synthetic oligonucleotide
ggtcatcgcatggcttgggatatgatgatgaactggtcacctacagcggccctag

SEQ ID NO: 430952 - DNA, 60 bp, Artificial
  Synthetic oligonucleotide
ggtcatcgcattgcttaatgctatattggcattcatgttagatcacattaagaggttcaa

SEQ ID NO: 430953 - DNA, 60 bp, Artificial
  Synthetic oligonucleotide
ggtcatcggagaaaaccgctggtgcaagctactctgtgataagtagcaacttcaactctc

SEQ ID NO: 430954 - DNA, 55 bp, Artificial
  Synthetic oligonucleotide
ggtcatcggctgtcaatggaatgtgttaccctggaaatgtagagaacctggaaga

SEQ ID NO: 430955 - DNA, 55 bp, Artificial
  Synthetic oligonucleotide
ggtcatcgggccaccaagtggttttatggatacgccaagcgtatcgtcagctcaa

SEQ ID NO: 430956 - DNA, 60 bp, Artificial
  Synthetic oligonucleotide
ggtcatcgtttaaggacgttgaccgtgaatcgtgtaatggcgtctatgcgaacataagca

SEQ ID NO: 430957 - DNA, 60 bp, Artificial
  Synthetic oligonucleotide
ggtcatcttcgcatggttcctgtttcctgcgttcgccgcgttccttcagtccgcatgggc

SEQ ID NO: 430958 - DNA, 55 bp, Artificial
  Synthetic oligonucleotide
ggtcatctttgaaggtagccacctccggagactgtttcgtccatggcacaatggg

SEQ ID NO: 430959 - DNA, 60 bp, Artificial
  Synthetic oligonucleotide
ggtcatgagacgatggtacgtaggagtcaccggtggtcagtatgcgtcgaaggaacaggc

SEQ ID NO: 430960 - DNA, 59 bp, Artificial
  Synthetic oligonucleotide
ggtcatgagatagccgatactcatcccgtcgcgattctatgtaattaaatgcgttaggt

SEQ ID NO: 430961 - DNA, 60 bp, Artificial
  Synthetic oligonucleotide
ggtcatgcacaagttctatggcaaggtgacaggtggacagtatgccagcaacgagcaggc

SEQ ID NO: 430962 - DNA, 52 bp, Artificial
  Synthetic oligonucleotide
ggtcatgccgctgcaacttctgatggtgaatatcggcgtctttcccaaattg

SEQ ID NO: 430963 - DNA, 55 bp, Artificial
  Synthetic oligonucleotide
ggtcatggaacctagagacatgatgcagagccaaaactttgatggcacaacatca

SEQ ID NO: 430964 - DNA, 60 bp, Artificial
  Synthetic oligonucleotide
ggtcatggtagatattgaaggatgcacgtccctctctaacaagcgcttcaattgttgggc

SEQ ID NO: 430965 - DNA, 55 bp, Artificial
  Synthetic oligonucleotide
ggtcatggtcaacggtcagtagcggggctgacacggaggatgtcgtgtgctgctc

SEQ ID NO: 430966 - DNA, 58 bp, Artificial
  Synthetic oligonucleotide
ggtcatgtattgttttctagtccaactattagtacacacacctatgaagaaatcccta

SEQ ID NO: 430967 - DNA, 56 bp, Artificial
  Synthetic oligonucleotide
ggtcatgtccgttcaggccagattcgaaaacgttcgacttggtgtacccactcaaa

SEQ ID NO: 430968 - DNA, 55 bp, Artificial
  Synthetic oligonucleotide
ggtcatgtgcatatctgatgtcacacgtggcaatggtataacccaccgtgtcggt

SEQ ID NO: 430969 - DNA, 55 bp, Artificial
  Synthetic oligonucleotide
ggtcatgttaaacgccttggacaatatttcaatcttgggggatttgaactggatt

SEQ ID NO: 430970 - DNA, 60 bp, Artificial
  Synthetic oligonucleotide
ggtcatgttattaatcaactgatggaagctctaatgcagttgtcgcgacaacaatttcca

SEQ ID NO: 430971 - DNA, 56 bp, Artificial
  Synthetic oligonucleotide
ggtcatgtttagggtctccatatttaattctaaggtttgcagctcatatccccctt

SEQ ID NO: 430972 - DNA, 59 bp, Artificial
  Synthetic oligonucleotide
ggtcatgtttttgtcataagggaaccatttgtttcttgctctccaacagaatgcaggac

SEQ ID NO: 430973 - DNA, 55 bp, Artificial
  Synthetic oligonucleotide
ggtcattagcccaacaagaaacacacccatactcaccttggccacaaatacccag

SEQ ID NO: 430974 - DNA, 60 bp, Artificial
  Synthetic oligonucleotide
ggtcattaggcagctcagtatgccaactgagttttgaccaagcacctctgttaccccgga

SEQ ID NO: 430975 - DNA, 50 bp, Artificial
  Synthetic oligonucleotide
ggtcattagttaacaaactaatcggggttaaactggaaatgtagcattat

SEQ ID NO: 430976 - DNA, 55 bp, Artificial
  Synthetic oligonucleotide
ggtcattatagactagttccctatcagcaggtactaaatcatgctgaacgtactt

SEQ ID NO: 430977 - DNA, 58 bp, Artificial
  Synthetic oligonucleotide
ggtcattcacccggggccttgcgctgacaatcctgacgtccgggatcgcgttgaggcc

SEQ ID NO: 430978 - DNA, 60 bp, Artificial
  Synthetic oligonucleotide
ggtcattcactcgtctctattgctccgatgaacatcgagcgttgtatggcaagaagaagg

SEQ ID NO: 430979 - DNA, 59 bp, Artificial
  Synthetic oligonucleotide
ggtcattcccgaaagaaagaaacactcctgggcagtgcatgaggcttaatctgactagt

SEQ ID NO: 430980 - DNA, 59 bp, Artificial
  Synthetic oligonucleotide
ggtcattgaggaagaatgcgaactggattatttcagggtaaagtaccttgaatcatctg

SEQ ID NO: 430981 - DNA, 55 bp, Artificial
  Synthetic oligonucleotide
ggtcattgagtggtaacaatgatgcagtgctaaggttttataagcgacttcgtag

SEQ ID NO: 430982 - DNA, 60 bp, Artificial
  Synthetic oligonucleotide
ggtcattgcaatgcagaatatgcatttaggactgggatttcaaattgtatggaaaaacac

SEQ ID NO: 430983 - DNA, 59 bp, Artificial
  Synthetic oligonucleotide
ggtcattggcttctggacagactctaagagcccgcagctgccaaccgactttacgcgtt

SEQ ID NO: 430984 - DNA, 50 bp, Artificial
  Synthetic oligonucleotide
ggtcattgtataacgaacagtgtccttaatcttttctatactttcggtag

SEQ ID NO: 430985 - DNA, 55 bp, Artificial
  Synthetic oligonucleotide
ggtcattgtttgcttaagaccgttatcctgaggaagctcgtgcgccacctatcat

SEQ ID NO: 430986 - DNA, 59 bp, Artificial
  Synthetic oligonucleotide
ggtcatttacggccagttcgttatattaggctctgacgtaactgctacagtctctggac

SEQ ID NO: 430987 - DNA, 56 bp, Artificial
  Synthetic oligonucleotide
ggtcatttaggtgtagaaggctctttgactggaaaagggtctcatagattagaagg

SEQ ID NO: 430988 - DNA, 55 bp, Artificial
  Synthetic oligonucleotide
ggtcatttctgccaggattcccagacttcagcttatacttgcttatcaggtcatt

SEQ ID NO: 430989 - DNA, 55 bp, Artificial
  Synthetic oligonucleotide
ggtcatttgagcttatacaggcagtgactgaatttgccaggaccaagtttcctgc

SEQ ID NO: 430990 - DNA, 55 bp, Artificial
  Synthetic oligonucleotide
ggtcatttgcagtatgccaaggcttatattattacacaagtgctagacagcatgc

SEQ ID NO: 430991 - DNA, 55 bp, Artificial
  Synthetic oligonucleotide
ggtcatttgtgtgtcggatgttactcgtggtaatggtttgacgcatcgagtcggt

SEQ ID NO: 430992 - DNA, 54 bp, Artificial
  Synthetic oligonucleotide
ggtcattttgtcttatttactagtggcgaaagatgagtttaaccacggtcggtg

SEQ ID NO: 430993 - DNA, 60 bp, Artificial
  Synthetic oligonucleotide
ggtccaaaccgatcagggccacttcacaatgctaggagtgcgagaccacttggccgtgct

SEQ ID NO: 430994 - DNA, 55 bp, Artificial
  Synthetic oligonucleotide
ggtccaaacttcatcagtgatgcctttgcggcagcctgttggtgggcaggagtcg

SEQ ID NO: 430995 - DNA, 55 bp, Artificial
  Synthetic oligonucleotide
ggtccaaactttgtcagtgagaaggtagccacagtgtgttggtgggctcagatag

SEQ ID NO: 430996 - DNA, 52 bp, Artificial
  Synthetic oligonucleotide
ggtccaaagcctgacatccgtaaacacttcccaagaagggatgaggtgtgct

SEQ ID NO: 430997 - DNA, 52 bp, Artificial
  Synthetic oligonucleotide
ggtccaaccggaaaatggggttgggtccaacattcaaatccaataatcttgt

SEQ ID NO: 430998 - DNA, 50 bp, Artificial
  Synthetic oligonucleotide
ggtccaaccgtaagccttgaggacccacctcagcgtctgtcgcagggact

SEQ ID NO: 430999 - DNA, 55 bp, Artificial
  Synthetic oligonucleotide
ggtccaacgatatatagttgtcggtttcgtttaatcgcctcgcgcacaatgcctg

SEQ ID NO: 431000 - DNA, 55 bp, Artificial
  Synthetic oligonucleotide
ggtccaactttcgagatgtcagatacggagagttcaagcaaatctggttccaacc

SEQ ID NO: 431001 - DNA, 60 bp, Artificial
  Synthetic oligonucleotide
ggtccaagaagggaaacatagctagagcagcagtggtggataatctcgatctaccaccag

SEQ ID NO: 431002 - DNA, 55 bp, Artificial
  Synthetic oligonucleotide
ggtccaagcgtggaatcccttttaggctaaggcctgcacctactcccacagacct

SEQ ID NO: 431003 - DNA, 55 bp, Artificial
  Synthetic oligonucleotide
ggtccaagtgtgccagccccctcgcctaactacaccagggccttgtggagagtgg

SEQ ID NO: 431004 - DNA, 55 bp, Artificial
  Synthetic oligonucleotide
ggtccaataatccgagcgacgaccccctcccgttacctctgccccgctgaatgat

SEQ ID NO: 431005 - DNA, 54 bp, Artificial
  Synthetic oligonucleotide
ggtccaatcataaacgtggtacatagtctcgttaacccaaccggatacgtggac

SEQ ID NO: 431006 - DNA, 55 bp, Artificial
  Synthetic oligonucleotide
ggtccaatcctgcgacggtgtatacaaaaggcactcctattcatgtgcgtggagc

SEQ ID NO: 431007 - DNA, 55 bp, Artificial
  Synthetic oligonucleotide
ggtccaatcttatgagcagcgtcatgatatctcacatgttgggaaggtcatctgc

SEQ ID NO: 431008 - DNA, 56 bp, Artificial
  Synthetic oligonucleotide
ggtccaattctgaactttcaggctttactagcttcttattttgaacatttgtcaac

SEQ ID NO: 431009 - DNA, 51 bp, Artificial
  Synthetic oligonucleotide
ggtccacaaacgtaaagttcttttcaccgccgtacgttggggaatcccatg

SEQ ID NO: 431010 - DNA, 55 bp, Artificial
  Synthetic oligonucleotide
ggtccacaagatactagccaaagagtacagagaagtgcgtatgggagatatggtc

SEQ ID NO: 431011 - DNA, 51 bp, Artificial
  Synthetic oligonucleotide
ggtccacagattgcaatggtaatcagcgctattgctcaagctatccaagca

SEQ ID NO: 431012 - DNA, 58 bp, Artificial
  Synthetic oligonucleotide
ggtccacatttaaggacctcgatccttcggcatgtaacggcgtctatgacaatataag

SEQ ID NO: 431013 - DNA, 55 bp, Artificial
  Synthetic oligonucleotide
ggtccaccagtcattaatgcaaaacgtgatggggaagtaccagtaagtatgattg

SEQ ID NO: 431014 - DNA, 53 bp, Artificial
  Synthetic oligonucleotide
ggtccaccatttttaagttttgccccgtacgctcttatatccccgactgtatc

SEQ ID NO: 431015 - DNA, 51 bp, Artificial
  Synthetic oligonucleotide
ggtccacggtgcccgcccctagggacgagaaaacgacgccgttaggcgtcg

SEQ ID NO: 431016 - DNA, 58 bp, Artificial
  Synthetic oligonucleotide
ggtccacgtcatcaataatattgtagtgtgcttcgttggaatagcacttagggttaaa

SEQ ID NO: 431017 - DNA, 54 bp, Artificial
  Synthetic oligonucleotide
ggtccactaaaaggggaagttctcctcattggtccgctaaacagccaataggaa

SEQ ID NO: 431018 - DNA, 56 bp, Artificial
  Synthetic oligonucleotide
ggtccacttgtgcttaatccctctggaaagatcaaagggttctataggttgagtag

SEQ ID NO: 431019 - DNA, 55 bp, Artificial
  Synthetic oligonucleotide
ggtccactttacttggtcttcaagacatacggaactatgctggtaaacccagaat

SEQ ID NO: 431020 - DNA, 52 bp, Artificial
  Synthetic oligonucleotide
ggtccagaacaaacccaaggaaactttggggaccaagacctaatcagacaag

SEQ ID NO: 431021 - DNA, 57 bp, Artificial
  Synthetic oligonucleotide
ggtccagaattaaatccttatctggcacatttagcaagaatgtacaacgggtatgcc

SEQ ID NO: 431022 - DNA, 60 bp, Artificial
  Synthetic oligonucleotide
ggtccagacgctctcgtccaatcatgtcgcgtctgacaagcttatatatttttgaacaac

SEQ ID NO: 431023 - DNA, 50 bp, Artificial
  Synthetic oligonucleotide
ggtccagagctcactagggattatggaaagtcgaatagaaaatgaagcac

SEQ ID NO: 431024 - DNA, 56 bp, Artificial
  Synthetic oligonucleotide
ggtccagagttaagtcatcgtaggacagcttaacaaatttagggcgcaatgttcca

SEQ ID NO: 431025 - DNA, 55 bp, Artificial
  Synthetic oligonucleotide
ggtccagcactggaaccttctacgcaaggaaaatgtgctgatgcactatgcaaaa

SEQ ID NO: 431026 - DNA, 54 bp, Artificial
  Synthetic oligonucleotide
ggtccagcccctccccagtccgagagaagggggactccgggactccttgcatgt

SEQ ID NO: 431027 - DNA, 54 bp, Artificial
  Synthetic oligonucleotide
ggtccagcgacgtgcacgctccattatgcccatgagcaatccacaacaaacggt

SEQ ID NO: 431028 - DNA, 55 bp, Artificial
  Synthetic oligonucleotide
ggtccagctcaagttgtcacgatggaagagcatggttacatgtttgtgttaccgg

SEQ ID NO: 431029 - DNA, 55 bp, Artificial
  Synthetic oligonucleotide
ggtccagctcaagttgtcatgatgggaaagcatggttgcatgtctgtgtcactgg

SEQ ID NO: 431030 - DNA, 55 bp, Artificial
  Synthetic oligonucleotide
ggtccaggaattcaatggattgaacaaaatgaatactacccggcaagataccaga

SEQ ID NO: 431031 - DNA, 58 bp, Artificial
  Synthetic oligonucleotide
ggtccaggattaagcaatcgcctaatgggcttgggcttctcaacagaccaaaagtcca

SEQ ID NO: 431032 - DNA, 60 bp, Artificial
  Synthetic oligonucleotide
ggtccaggcaggatgcatacttttcatggttcgggcaggagtggtgcgctttcacccctg

SEQ ID NO: 431033 - DNA, 55 bp, Artificial
  Synthetic oligonucleotide
ggtccaggtgtggtagtctgatttcactgggcgacaatctccctgacagccggga

SEQ ID NO: 431034 - DNA, 60 bp, Artificial
  Synthetic oligonucleotide
ggtccagtctttcgagcagcgtcacgatatctcccgtattggcaaggtcatgtgtatatc

SEQ ID NO: 431035 - DNA, 54 bp, Artificial
  Synthetic oligonucleotide
ggtccagtgtactgtttcaccccaagccctgttgtggtggggacgaccgatcgg

SEQ ID NO: 431036 - DNA, 60 bp, Artificial
  Synthetic oligonucleotide
ggtccagtgtggactactgctacatcagacgatgccagaaaatggaaccaagggcacttt

SEQ ID NO: 431037 - DNA, 55 bp, Artificial
  Synthetic oligonucleotide
ggtccagttcacacatgtcaccactgcgctaatgctcaccagtctgaccgccggg

SEQ ID NO: 431038 - DNA, 55 bp, Artificial
  Synthetic oligonucleotide
ggtccagttggatagacctcttctgagggattgagtccaacggaatgagggtacg

SEQ ID NO: 431039 - DNA, 59 bp, Artificial
  Synthetic oligonucleotide
ggtccataatacagccatatctacgtttattacattccccagtcttggcaagactgaac

SEQ ID NO: 431040 - DNA, 54 bp, Artificial
  Synthetic oligonucleotide
ggtccatacagccacaaggaacaggcattaattaggaagttttttaagtgtttg

SEQ ID NO: 431041 - DNA, 55 bp, Artificial
  Synthetic oligonucleotide
ggtccatatagaggccgaggtgtggcacttaccgatgatgagtacgacgaatgga

SEQ ID NO: 431042 - DNA, 55 bp, Artificial
  Synthetic oligonucleotide
ggtccatatggatacactacaggtagaactgtaggcaaaatgattagtgcttaca

SEQ ID NO: 431043 - DNA, 59 bp, Artificial
  Synthetic oligonucleotide
ggtccatcaaattcaattctttttggtgccataggtgcaatataaaattcaatttgtga

SEQ ID NO: 431044 - DNA, 55 bp, Artificial
  Synthetic oligonucleotide
ggtccatcagtatacccgccagctacgggaacacacggcactaacatcgggccac

SEQ ID NO: 431045 - DNA, 60 bp, Artificial
  Synthetic oligonucleotide
ggtccatcatcgagctcacataccgacacaaagtcgtgaaagtgatgaggccagcggccg

SEQ ID NO: 431046 - DNA, 57 bp, Artificial
  Synthetic oligonucleotide
ggtccatctacccaggcgcgtcgcgacatcacttcttattttccgcgtaagagtgaa

SEQ ID NO: 431047 - DNA, 60 bp, Artificial
  Synthetic oligonucleotide
ggtccatgtcagccaggtgattgcgggggcctcttagtctgctcacatggagtgatagga

SEQ ID NO: 431048 - DNA, 58 bp, Artificial
  Synthetic oligonucleotide
ggtccattccaagccaaaaccccagaggagcgcgccattctcggagcgctccaacaac

SEQ ID NO: 431049 - DNA, 55 bp, Artificial
  Synthetic oligonucleotide
ggtccattggaggtccggtgagctcccacaaccgcatcccgggttacaaggtgca

SEQ ID NO: 431050 - DNA, 60 bp, Artificial
  Synthetic oligonucleotide
ggtccatttgcacagactagatatgctccagttaattggagacacggggagattaatgat

SEQ ID NO: 431051 - DNA, 56 bp, Artificial
  Synthetic oligonucleotide
ggtccatttgcacagactggttacgcaccagtaaactggggtccaggagaaacgaa

SEQ ID NO: 431052 - DNA, 55 bp, Artificial
  Synthetic oligonucleotide
ggtcccaaatggtcagccttattggttctgaactatcagcatctgtgaagcagca

SEQ ID NO: 431053 - DNA, 55 bp, Artificial
  Synthetic oligonucleotide
ggtcccaacagccctaaaccttcggactcaggcaatgaggacttgtgtgggaacc

SEQ ID NO: 431054 - DNA, 55 bp, Artificial
  Synthetic oligonucleotide
ggtcccaactctaccgagcagtatataacttaatacttgatcacattgatccgca

SEQ ID NO: 431055 - DNA, 55 bp, Artificial
  Synthetic oligonucleotide
ggtcccaatttagggaaatcaaatagcaccctagagaattgtcaggcttatatgt

SEQ ID NO: 431056 - DNA, 55 bp, Artificial
  Synthetic oligonucleotide
ggtcccacccactaataaatgtcagccaatcagaatgaagcctgaaagcttcctt

SEQ ID NO: 431057 - DNA, 58 bp, Artificial
  Synthetic oligonucleotide
ggtcccacccctgacatctcagccccactgggaaaatcatgaccgttgaatcttaaca

SEQ ID NO: 431058 - DNA, 54 bp, Artificial
  Synthetic oligonucleotide
ggtcccaccgaaagggatacatatataaagggcagcaaacggtacccggacagc

SEQ ID NO: 431059 - DNA, 55 bp, Artificial
  Synthetic oligonucleotide
ggtcccacttgaggaatgatactgacgtggttaactttgtgagtatggagttctc

SEQ ID NO: 431060 - DNA, 59 bp, Artificial
  Synthetic oligonucleotide
ggtcccagcatgattgtagggaactatgtactcgttagcgacaaattgtttgttcgcac

SEQ ID NO: 431061 - DNA, 59 bp, Artificial
  Synthetic oligonucleotide
ggtcccaggcgtgtgcgttggaagtgcgtcgtgccctcattactcgcgacccagacctg

SEQ ID NO: 431062 - DNA, 49 bp, Artificial
  Synthetic oligonucleotide
ggtcccagggttccaaagggttggaaaactctccccccagtactatccc

SEQ ID NO: 431063 - DNA, 55 bp, Artificial
  Synthetic oligonucleotide
ggtcccagtcaggatgcgattgtgcgagaccttccgagccaacgcccggatcatc

SEQ ID NO: 431064 - DNA, 55 bp, Artificial
  Synthetic oligonucleotide
ggtcccagtgacttacatgtccacacgagggatgccatctacacttgtgcccacc

SEQ ID NO: 431065 - DNA, 58 bp, Artificial
  Synthetic oligonucleotide
ggtcccattcgagagtctttgcgaggtgctttgactcgagacacgaacgtcgaaatta

SEQ ID NO: 431066 - DNA, 50 bp, Artificial
  Synthetic oligonucleotide
ggtccccaagtactaaagctaaacatgtgggatcctcttttgaacgagtt

SEQ ID NO: 431067 - DNA, 52 bp, Artificial
  Synthetic oligonucleotide
ggtccccaatccagcaaaagttttgcccaagtcgtgtacggtaacagggaag

SEQ ID NO: 431068 - DNA, 58 bp, Artificial
  Synthetic oligonucleotide
ggtccccacgagggttacacagatgttattgtcaaccaatcaaattgcattctcaaac
